United States Patent Application Publication US 2020/0109395 A1 - sequence listing, part 7

SEQ ID NO: 30284 - DNA, 6321 bp, Salmonella enterica subsp. enterica serovar Worthington
atgactacacgctatttttcttcgctgattgaacaatcactgtcgcgttctacggaggcgacgctgagtattatgggggtgaccaacccgaatcttcgcgagcatctcacgcaacaaatggcggccgattgcgggaaagaaggatcgtttcttgcctcacccgtatttgaacagacatttggctggaaagagtccaacagcacaatgaaagaccttgcaacaaaacaaacgttgctaagcaaggaggtggtggactcgctggatagtgaggaaaatggtcgttatcgttttggctctgactggaaacctttcacgcatcagttagccagctggcaatcattacttgagaaaaaacattcggtcgtggtgaccagcgggacaggctctggcaaaacggaatgctttatggttccggtgctggaagacctctatcgtgagcttcaggttaagaacaaaaaaccgttgataggtgtgagagcactttttctttacccactgaatgccctgattaattcccagcgcgagcgtttagatgcgtggacccggagttttggttccggaattcggtactgtctgtataacggtaacacggaagaattgcatgctttggtcaaaagtgagcaggcaaacaggcctaatgaggttttgtcacgagagaagatgcgtgaagagcccgctcccattttagtgaccaacggtaccatgctggaatacatgatggttcgtcaggttgatgcgccgattattcagaaatcaaaagcggaaaaatcattacgctggatagttctggatgaagcccatacctacgttggttctcaggccgctgagttggctctacagctccgtcgcgtcatgacggcatttggcgtcacgcctgatgatgttcgctttgtggcgacgtcggccaccatggccggaagtgatgctgaaaagcagctgaaaaaattcttgtctgagctgtcaggagtgccacaggaacgtattgatgttctggggggaagccgcgttattcctgagctcgaaccctgcaaacaatattctctgtcactggatgagattgagcatatccctgattcggagagtgaagggatcagcccggagcgttatagtgcgttgacccactctccggaagcgcgctgtttacgcgaaatgctggttagccaaccccgaccaatgaaacttgatacgctgacccagcgtttgaacgaactgaccaaacatcagtacacgcagcaggatgttttacgctggatcgatctttgctctggcacactccctaatgcaaaggatcctgcatttctgaaagtcagagcacatattttccagcgaaacacccagggcatctgggcctgtgtggataagaactgtgcagctaaaaaaaataccgcgctggaaaaaaactggtcttttggcaatgtgtatgtaaatcagcggcaaaactgcgagtgcggcagtcccgtttttgaactggcattctgcaatgagtgtaatgaaccgcatcttcttgcacgggataaaaaaggcaaactcgtacagtgggataataaaggtggagatgaattctccctgcaggatgaaatttctgacgattttgaaacatccggagaaaaggttcagaaggattttgtattccagtcgccacaaattattgctgcggaatgtaatacggaagctggctatattatgcagcggctcgatcgtcagacccgcagtatcggcgtggtgaacccggacagtattccgctggcaattaatgatatcgaacaaatctgtagtgccagcaattgtggctataaaggcggaaagggtaaacagcccttccgacgggcgttactgggcgggcctttttatgtcaccaatattgtgcctacggtgctggagtattgccaggacttcactagcgatgaaggtaaagatggcgtcggcccgctctctttgcctggtcgaggtcgtcgcctgattacctttaccgacagtcgtcaggggacggcgcgaatggcagtacgtatgcagcaggaagcagagcgcagccgattacgtggtagcgtagtagaaattcttggctggcaccaacgaaaacaaccaacgagtgctccgaacgaccaggctgacgtgatgaaactggttgcaagggtgacacaataccgtgaagaagcccgggagtatcgcgagtggggaatgcccgaggaagcaaaactttctgaagctcaggccgaacgccttgaacaggcaatccagacggcgacggggggaaaggctgcaaccattttagtttgccgaacctggacggaaatggtcaatgagctgaaagagaaagccgatatacagggaccaattttacaatataaccattatctaaagcctgaaattttcaccgaaaatggtggccctttgaaactcgccgaaatgctgcttttccgtgagtttatgcgacgcccgaaacgaaccaacagcctggaaacccaggggctggttcaggttggctatcaggggctggagaaggcgcacagtgttcctgctcactggcaggctaaaggcttaacccttgatgactggcgcgattttctgaaggtgacgctggatttctatgtcagagaaagtaactacatccaactggatgacgatctaagaaactggatcggtagccgtttctcttccaaatttgtccgcaacccggattcgaaagagccagatgacaaccaggttaaacgctggccgcaaattcgccacggtaatgtgactcagcgcctggtcaaactgttgattttaggagccaaatttaacaccgtaaatacggtaactattgatattgttaacgcctggctgaaagaagcctggctccagctaacaggatctctggcggtattgaagcctgatggaaaccgtttttatttaccgaaagagcatctaacattctctctggttcaaaaagcacgcatttgtccagtgaccaataaattactggcgacaaccttcaaaggtttgaccccctatttgcccatgcatatccagttcgagcgactgacgagtgcacagtacgacgcgtttttggctcaggaagtcacgctgccagcgatctgggaacacgatcgctctcaggatgattatgtcgacgggttaacaaaagtgcgtgactgggtaagcctggatccgcaagtgctatcattacgctcgcaaaacctctggacggacattaacgatcgcgtggtagaaggtggattttactaccgcaccgcagaacactcggcacagcaatcgtcggagcgcctgcaaagctacgaaagaatgtttaaaaacgggcagcttaacgtccttaactgctcaaccacaatggaaatgggtgtggatattggcggtatttctgcagtggtgatgaacaacgttcctccgcatccggccaactatttacagcgagccgggcgtgccgggcgtagtaaagagtcacgcgctatttcgtacaccttgtgcaaagggaacccgcacgatcagcaggtttttgctaatcccctctggccatttgagacggtgatcccggctccaatggtggcaatgaactcagagcgtctggtgcagcgtcacgtcaattccctgctgctgtcagaatatttatgccatgtggtcggggaaaccgaaaaagagcgtaccagccttaatagccagtggttctttggcgaagagctcgaccagtcggtatgcaatcgttttaaagcctggctcgaacgtccgacgctgagcattgataacgcgctggagcgtctggttaaagggactgcattgcacggcgttactgcagaaaaactgcgtgataaaacgcaggaggctattgccgtcttacagacacgctggctggggatcttccgcgatctcgtgaaacaggaaagtgaatcgcagcccaatacgccgtaccgcaggcgactggagctggagaaaaaacggcattgtggtgaatacctgttacgcgatctggcggcccgaactttcctgcccggatatggcttcccaacggatgttgtcacttttgataacttcaccatggaagattatatccgcgagaaaacgcacaaaggccgtgataagaacgaccgggaggataacgtttctcgttataaggggctgccttcgcgcaatctttccgttgcgatccgtgaatatgcgccgggtgcagagattatccttgatggtcgggtattccgctcggccggcgtttcgctgcactggcataaccttaacgccgatactaacgaagcccagcgtctggacagcgcctggcgttgccacaaatgcggtaccttaggttatgaggaaggtattggtggcccgggggatttattctgtaccaatagcgcgtgcggggagcggatcacgctggataaccgacgtcaggtattacagcccgccggttttgtcaccgatgcccatactcccgttacgaacaacattgaaacaatgaaattcatcccggtggtgcctgcctgggtatttgtgaaggcagaacgcgtgccactgccaaacccgctgatgggctttatggcttcaggcgcggatggccatgttttccagcagagcatgggcgaaggtgggcacggttatgcgctgtgcctgagctgcggccgggcggagtcaatgctcagtgctaccgatgcgccgaaatcgatggaagcgcattatcctccgcgccccggtaaatctgatcgcgacagccagaatcagcggattatctgccctggatccacagcactgaataagaatgtcacgctgggtgcgctggcccgcaccgatgtgtttgagctcattttgcgccgtccgcaaaacggggagtatatccccgataattctgatgaaggccgtattgtggctatgacgctggtggttgcgctacgtcgggcgctggccagcgtgctgggggtatcggcggcagaattgggctatgcggtgcgtccggtcaggctagagaatgagcaatcggtcctggcggtgcaactttacgacattatcagcggcggtgcggggtttgcttccagtgcgccattgcatattgaagcagtcctcaaagggatggtgaaacagctgggatgccgccactgtgataccgcctgtagcgaatgtctgctcgattcgcagacccgccacgatcacgatcagctggatcgtaaagccgcgcaggcctggctgggggaggatttcagtcactatatcggtttgccggaggcggaaaaattctccctggccgacgcgcagtattgcccaggcagcattgaggatgctatccgtcgtgccattaacgacggggcgcgcaaactcacgttgtggatgaatgggccgcttaacgagtgggatttgtatacccgccagttccgagcggcgatccagaactatcggctgaaagatgaggttgaggttacgctggttgtgcccggtcatattgaagatccggagcttttacaggagattgcgcagtttgccgccattggtgtgcagctttgccagtctgagctgaatacggatacgccggttgtcgcacaggtagcattcaacgatcgcctgatgacgttgatttctcgcagcccagaggccaccatccccggcccgaactggcatctgaatagccagatggttattcgtagccatgcgtttgagccgataacgcttagtaaagctgagctattatccgatgccgcaggtaacagaggcctggtcaacgatattgagatccataagcagcttaatggcccggtttctcagtttggtcagcgtttctggggcgtgttaaccggggcacaggaagatattcagacgctgctgaaggaaaaccaggtgacgcgcattcactacagcgatcgttatctgcaaaacccggtggcgctggcgttattaggcgggctgttaaaaccgctgaaatcgatcctggcgcaggatgcgcaagtgacgattgatacgctgtttaagagtaaagagcggccaggcaacaagccgttccatgactggatgagtgaagcggattttcaggattttgccgaccagtggtttgcggcatctatgggcagagccgtcgtggttaacacctttggctcgccgcgtgatattccacaccatcgtaaactgatggtgaccttcagtaatggtcaggcgctgaagatccgttttgaccaagggatgggatactggcgcatcgtctttgcgcgagcgtatcgcgattttgattttaacgatgatgtggctttccagctcgggaatatggcaaaagcctgcgttgaaggtcaggtggtcaacagcgaggaaagttgggcaaccgatgtgctggtgcaggtgatagtcccttaa

SEQ ID NO: 30285 - DNA, 3300 bp, Salmonella enterica subsp. enterica serovar Worthington; identical to SEQ ID NO: 29987

SEQ ID NO: 30286 - DNA, 6321 bp, Salmonella enterica subsp. enterica serovar Worthington; identical to SEQ ID NO: 30284

SEQ ID NO: 30287 - DNA, 3300 bp, Salmonella enterica subsp. enterica serovar Worthington; identical to SEQ ID NO: 29987

SEQ ID NO: 30288 - DNA, 6321 bp, Salmonella enterica subsp. enterica serovar Worthington; identical to SEQ ID NO: 30284

SEQ ID NO: 30289 - DNA, 3300 bp, Salmonella enterica subsp. enterica serovar Worthington; identical to SEQ ID NO: 29987

SEQ ID NO: 30290 - DNA, 6321 bp, Salmonella enterica subsp. enterica serovar Worthington; identical to SEQ ID NO: 30284

SEQ ID NO: 30291 - DNA, 3300 bp, Salmonella enterica subsp. enterica serovar Worthington; identical to SEQ ID NO: 29987

SEQ ID NO: 30292 - DNA, 6321 bp, Salmonella enterica subsp. enterica serovar Worthington; identical to SEQ ID NO: 30284

SEQ ID NO: 30293 - DNA, 3300 bp, Salmonella enterica subsp. enterica serovar Worthington; identical to SEQ ID NO: 29987

SEQ ID NO: 30294 - DNA, 6321 bp, Salmonella enterica subsp. enterica serovar Worthington; identical to SEQ ID NO: 30284

SEQ ID NO: 30295 - DNA, 3300 bp, Salmonella enterica subsp. enterica serovar Worthington; identical to SEQ ID NO: 29987

SEQ ID NO: 30296 - DNA, 6321 bp, Salmonella enterica; identical to SEQ ID NO: 30284
  subsp. enterica serovar Worthington str. ATCC 9607

SEQ ID NO: 30297 - DNA, 3300 bp, Salmonella enterica; identical to SEQ ID NO: 29987
  subsp. enterica serovar Worthington str. ATCC 9607

SEQ ID NO: 30298 - DNA, 6321 bp, Serratia marcescens
atgactacacgctatttttcttcgctgattgaacagtcgttatctcgttcgacggaagctacgctgagcattatgggcgtaaccaatccgcatcttcgcgagcaccttgcgcagcagatggcggctgaatgtggaaaggaagggacatttctggcctctcccgtatttgaacaaacatttggctggaaagagtcaaatttcacgatgagggatcttgccacaaagcaaacgttactgagcaaggaggttgttgattctctcgataacaaagaaaacggacgttatcgttttgactcaacctggaaaccgttcacacatcagttagccagctggcaagcattacttgataaaaaacattcggtggttgtgaccagcggcacgggctcgggtaaaacagagtgtttcatggttccggtacttgaggatctttatcgtgaactacgggacaacgagaaaaaatcgctaataggcgttagagcccttttcctttatcccctgaatgccctgatcaattcacagcgtgaacgtttagatgcctggacccgaggttttggaaccgggattcggtactgtctgtataacggtaatactgcagagctgcatgcctcagtaaaaagtgagcaggcaaaccggccaaacgaagtgctttcgcgtgagaaaatgcgtgaggaacctgcgcctgttctggtcacaaacggtaccatgctggaatacatgatggtgcgtcaggttgatgcacctatcattcagaaatcaaaagcggaaaaatcattacgctggatagttctggacgaagcccatacctacgtaggttcccaggccgctgaactggctttacagctccgtcgtgtcatgactgcatttggcgttacacctgatgatgttcgctttgttgcaacatctgcgactattgccggaagtgatgcagaaaagcagctgaaaaaattcttatctgagttgtccggtgtgccacacgaacgtattgatgttctgggaggtaaccgtgtcattcctgacctggcgccgtgccagcatctttctctatccctggatgagcttgagcatatccctgattctgatggagcgggtattagccttgagcgttataccgcgctgactcactctccgcaagcgcgtcatctccgtgagatgcttgtgagtcaacccaaaccgatgaagcttgatacgctgacccggcgtttgaatgagctaacaaaacatcagtacactcagcaagatattttgcgctggctcgatctctgtaccggcacgcttcccaatgcgcaagaaccggcatttctgaaagtcagagcgcatatttttcagcgtaatacccaggggatatgggcctgcgtagataaacattgctccgctaaacacaatactgcgctggagaaggggtggccttttggcaatgtgtatgtgagtcagcggcaaaactgcgagtgtggcagccctgtttatgaactcgcgttctgtaatgaatgtaatgaaccgcatttacttgcccgtgacaaaaaaggaaagcttgtacagtgggataataaaggcggggatgagttttcactgcaggatgaagcacctgatgattttgacttttcgagtgaaaaagttcaaaaagaacaggtattccagccaccccatattattgccgcggaatgtaataccgaaatgggttatatcgtgcagcgcctcgatcgtcaaactcgaagtattggcgtagtcaacccggatagtattccgctggcgatgaatgatattgagcaggtctgtagcgtcagcaactgtggttatagaggaggtaaaggtaaacaacctttccggcgggcactgttaggcgggcctttttatgtgacgaatatcgtgcctaccgtgctggaatattgtcaggactttatcagtgatgaaggtaaagagggggttggcccactttctttgcctggccgagggcgccgactgatcaccttcactgatagccgtcagggaacggcacggatggcggtgcggatgcagcaggaagctgagcgcagccgtttgcgtggtagcgttgtggatattctctcttggcatcaacgtaaacagtcaacacatgcgccaaatgcccaggctgacgtaacgaagttgactgagatggcagcacaggcacgtgaagaagcgaaaaatcttcatgattgggggatgccggaagaagcgatccgtcgtgaagaacaagctgagcgcttagagcacgctatacaacaagccactggcggaaaagtcgatacggttttgatgtctctctcctggcctgaaatggtcaaggaattgaaagataaggcggatatcaaaggtcctatcctacagtataaccactatctcaagcctgaaatcttcactgaaaatggtggccctttaaaactcgctgaaatgctgcttttccgtgaatttatgcggcgcccgaaacgtaccaatagcctggaaacgcaaggattggttcaggtgggttatcaggggctggagaaggcgcatagcctccctgctcattggcaagataaagggttaaccctggatgactggcgtgattttcttaaggttacgctggatttctatgtcagggaaagcaacttcacccagttggacgaagatctgaaaaactggatcggtagccgtttctcttcaaaatttgtccgtaaccccgattcgaaagagcctgatgacaaccaggttaaacgctggccgcaaattcgtcacggtaacatcacgcagcgtctggtcaaacttttgatcctcggcgctaaattcagcagcgtaaatacggtcacaatcgatatcgttaatgcgtggctaaaagaggcatggcttcagttgacgggatcattagcggtattgaaatctgacggcaaccgtttttatttacctaaagagcatctgacattctctctggtacaaaaagcctacatttgcccggtaaccaataaattactggcgacggctttcagaggcctgacgccttatctgccaatgcatattcagtttgaacggctgaccagtacacaatatgacacctttgtcgcccaggcggtgacgctgcctgagatttggcagcacgatcgttctcaggatgattatgtcgatgggttaagaaaagttcgtgactggttgggtcaggaccctctggtggcgcaattacgttcgcaaaacctctggacggacattaacgatcgcgtcgttgaaggtggattttactatcgtacggcagagcattccgcccagcaatcatccgagcgtctgcaaagttatgaacgtatgtttaaaaacggacagcttaacgttcttaactgttcaaccactatggaaatgggcgtagatattggcgggatttctgctgtggtgatgaataacgttccaccgcaccccgctaactatttgcagcgtgccgggcgtgccgggcgtagcaaagagtcccgtgctatttcttacacgttgtgcaaaggcaacccgcacgatcggcaggtttttgctaaccctctctggccgtttgaaacggtgatccctgcgccgatggtggcaatgaattctgagcgtctggtacagcgccacgtcaattctctgctgctgtcagactatttgtgccatgtcatcggtgaaaccgaaaaagaacgcaccagccttaatagtcagtggttctttggtgaagagcttgaacagtcggtgtgtaaccgtttcaaagtctggctgaagcgtcagacgctgagcattgacgcggctttggttcgattggttaaaggcaccgcgcttcatggcattgcggcagaaaagctgcgggataaaacgtgcgatgcgattgcggcgctgcagaagcgctggctaggaatttatcgcgaccttgttaagcaggaaagtgaatcgcagcccaatacgccgtatcgcaaacgtctggagctggagaaaaaacggcactgcggcgagtatctgctgcgcgatttggcggccagaaccttcctgcctggatatggcttcccaacggatgttgtcacttttgacaacttcaccatggaagattatatccgcgagaaaacgtacaaagtccgggataagagcgatcgtgaagataacgtctcgcgttataaaggcttgccatcacgcaacctttccgtggcgatccgtgagtatgcgccgggcgcggagattatccttgatggccgggtcttccgctccgctggggtatctctgcactggcataatcttaatgctgataccaatgaagctcagcgtctggatagcgcctggcgttgtcacaaatgcggtacgttaggctatgaggaaggtattggcggttcgggagatttgttctgtaccaatgacacgtgtggtgagcgcatcacgccggaaaaccgacgtcaggttttacaacctgcgggttttgtgacggatgcgcacgatccggtgaccaataatattgagaccatgaaattcattccggttgtgccggcctgggtatttgttaaggccgagcgtgtaccgctgccgaacccgttaatgggctttatggcttccggggcggacggtaatgtgttccagcaaagtatgggggaaggcggtcacggctatgcgctgtgcctgagctgcggccgtgcggagtcgatgctcaacctcacggatgcgcctaaatctatggaagcacactatccgcctcgtcctggaaaagccgaccgggatagccagaatcagcggattatctgcccaggttcaacggcgctgaataaaaatgtcacgctgggagcgctggccagaacggatgtcttcgagctgattgtccgccgcccgcaggacggagagtatattgctgataacacggaagaaggtcgcattgttgcaatgacgctggccgtggcgctgcggcgctcgctggcgagcgtgctgggcgtttccgcagcggagctgggctacgcggtgcgcccggtcaggctggagaacgagcaatccgttctggcggtgcagctgtacgatattatcagcggcggtgcaggatttgcttccagcgcgccattgcatattgaggccgtgctgaagggaatggtgaagcagctgggctgccaccactgcgataccgcctgtagcgagtgcctgctcgattcacagacccgccatgatcacgatctgctggatcgtaaagcggcactggcctggctgggggcggatttcagccactatattggtttgccggatgaggagaaattctctctggctgatgcgcaatattgccctgggagcattgaagatactctgcgacgggctattaacgatggggggcgaaagctcacgctgtggatgagtgggccgttgaatgaatgggatctgtatgcccgtcagttccgcaccgcgatccagaactaccggctaaaagatgatgttgaggtggtgctggttatcccgcaaaacattgacgatccggagatccttctggaactcgcgcagtttacggcgataggcgtgcagctgtgccagtctgagctggatacggatgcgccgctcgttgcgcaggtgacgtttgacgatcgcctgatgacgttaatttctcgcagccatgaagcaaccatccccgggccgaactggcatctgaatagccagatggttattcgcagccatttgcaggcgccgatagcgctttataaaaccgagttgccatccgaggatacgggcagcaaaggcctggttaacgatattgaaatccataagcagcttaacggtccggtttctcagtttggccagcgcttctggaacctgctgaccgagtctcaggatgatattcagcgcctgctgacggaatgccgggtgacgcgtatccactatagcgatcgctatctgcaaaaccccgtagcgctggcgttgttaggcgggttattgaaaacgttgaaaccgatgctgacacaagaggcggaagtgacgattgatacgctgttcaggagtaaagagcgaccggggaacaaaccgttccatgactggatgagtgaagcagacttccaggatttcgccgaccagtggtttgcggcatccatggggcgagccgtggagattcaggcgttcaactctggccgcgacattccgcaccaccgtaagctgatggtgagttttgataatggccaagcgctgaaaatccgctttgatcaggggatgggatactggcgtattaactttgcacgagcctggcgtaattttaactttaatgacgacgtctctttccagctggggaatatggcgcaagcctgcgcagaaggcctggtagtgaacagcgaggagagctgggcaaccgatgtgctggtgcaggttatcgccccttaa

SEQ ID NO: 30299 - DNA, 3300 bp, Serratia marcescens
gtgagtcgatcagaatacatttatctaattaagtgtacttcttggctagctaaattcctctcccgcagaggattgaagcaaccagaccgccgcccattatatgaataccacgcaacgagtgatgagtatgatgagttgaagcagttgttgagagctatagggctacccgatggctacaggagtgataaaggatatgcagccagcttcacgttattctgctcagagtggtatagaagagattatgaaagggagtgtggatgggcatgggagcctatttataagactatcggtatatcagcatcttcatcggaaatggggaaaataattcctaaaggtctggatggatattggggacgtcctgtgcggttttacgatacagaaagacggaattttttaggatccctatttagtgaaggcggtctacctttcaggttgctaaaggaatctaatagccgctttcagtcgatgttctctctcattctcaatcaatacgatcaggcccaatcttctaacatttcaacgtttgctttagttcatgcggcggtagaaaaatcatccctgccagtcgttttcaaagaggatacttcagttgagcttattagtcggatggctgaacagttagtgtctcttgtgcaaatttatgacctgagtaaccacaccgaacccgtaaaagagcttgatcgtgttcatcctaagtggcgggacagcttccccgttccgcttgatgatgatacggggaccagtttccttaatggacttttacgagcagcttctactgaatccaaacctcgccttcaaaaaaatagaacaaccctatgtcagttcttatggtcagagaatcatcctgaagctttacagtcgcttatttctcttccagaagagctgagtttttcgattgatagtgaaccttctacaacatgtttcgagcttgccatctatgaagatggtaacgaaattgcgagcctggggcctgcctatgcaacgctgagtaattcacaggcgaaaatgagagttcgtaagcgtgaaattaagttttttcgaaaaaagcccgctgccagcttatttattgtggcgagagcaggagggatgcttgtcggaaccagactgttggagggaagtgaggttgccgttggcgatgtgccattagtttttgtttttgataaaagtgaatggttgctacaagggcaagcatcttgcagtgtacgtggcagtcatgtgctcattgtattgccaaaggatggttgtctggcctcagagctcgaggattatgaaaccgatttttcggctttgggatgccgcgctctgattgtcaaaggacgcctggatatcctgattgaaggcagtgaaacgtatcggataaagacaggaagagagcagattatccagacagggttctctttccaggggaagcggttaaactggacaagctacccggatgaactcttccttggtgttcctggcatttcccaaaattctgagaatctattaacgcatcattataaacgttttttcaacggcacatttatagataattgtgatgtgcaagagaaaatgggtgctcagtttgtttcagtacgtaacgagaataatgaaacgttactgcgcaagaaaataggtattctccccaatgattttggtctgaagacaaaaaatggagaaaaagcaaacgaaggctccatcattattactaccaaacatccttgcttgtatagtttgaaagaaaaatcattggagattgataggaagcgattaccaggtagtacagaaataatgatgaaaactgaggggattcctccagcatctattttattacaaataacgccaaaccttgctgcaaatcctattgttatttctctccctttccctgcccgaggttgccttgtcttcgataaagacgacaaacctctatcaaaaaatttaacgattaacgatcttctgggagccagagcataccttttcggaaaaaatggtgagcctacgcgataccaacttgaactgcgtttacgctcctgtagtggaatgcaggcatggtatgagtggtgctatagtgcgggagaaatcccggtagagcttactttatacagcttaagagagcatattgacaatttactttccctggagaaagggattgatcaaacggtggatatgcgtattgagggcggaggtagttcctttacctggcaaatcaggcgctataaatatagccttgagtatgatcgggaaatgcagcttcttcttactaattcagtgagcaatcgtacggggcaggtcccttcccccgttattatgttactcagtgagcccgaaagaaaagcaataccacttgtatcgagaatgagcgaaggtgtaccggttggtgaattcgaattaaattcgacaatacagaataatggcccatggctagttgttcccaaaaaaggtgaagaagcttcatttcggccttgttacattgcaggtgagccggtaatccaaagcgatactacggcaatacagtccctgcaaaaagcgacgcagctttttaatcctcgggcggatgtaaataccattacgttggttctggaacaaatggcaagcgaccctgcacattcaggttggcagttcttacgtaacttatacgatcagtttggatatttaccgatggctacctttgaggtatggcgtgccttggtccagcatccacaggcattggcaatgtcactgtttaaatttgagatgtccattgattatctcagccgtattgaaagcgagtttcctgttttctgggagtttttgcctatcactgaggttaaacatgccgcgatgcgttttcgagcgtttctgacccatagaggtgctccggaggaaatgcagataaagttgctgggtcgaatgttccagcaattagggactgcatttccaacttatgccagcgaggtgcaaatatggctcgagcagggaagattaccaccagattttccgacacaaatgataaaaggcatcattcatgagtggtatcaggaactcttacgtgaacatggtgaatctcgttggccagagtttggcgggccgggtcttttccgttggtacacgtcgcaacaagatcctgttatagagatttcacccgataccagctaccgatattctgttactttgctccctatatttgctgccgctgttgcctgcggtaaaacaacatttgacagcgtttttgaaaataaacctggtgccgtatttttcttaagacaagtcagagattttgactcgcgatggtttaatgccattttccagtattgcttattgcgtaatgtggctgaaaaataa

SEQ ID NO: 30300 - DNA, 4326 bp, Serratia marcescens
atggcggtgcggatgcagcaggaagcggagcgcagccgtttgcgtggtagcgttgtggatattctctcttggcatcaacgacaaaaagtagtcaacaaacctaacgagcaggccaatgtcaaagaaatgattgatatggccgagcagggaaaaatcaggattaaaaacttactacagtggggaatgcctgatgcggcgaaacaagcggaagcagaattagcccttcttgaacaggctatacaacaagccactggcggaaaagtcgatacggttttgatgtctctctcctggcctgaaatggtcaaggaattgaaagataaggcggatatcaaaggtcctatcctacagtataaccactatctcaagcctgaaatcttcactgaaaatggtggccctttaaaactcgctgaaatgctgcttttccgtgaatttatgcggcgcccgaaacgtaccaatagcctggaaacgcaaggattggttcaggtgggttatcaggggctggagaaggcgcatagcctccctgctcattggcaagataaagggttaaccctggatgactggcgtgattttcttaagattacgctggatttctatgtcagggaaagcaacttcacccagctggacgaagatctgaaaaactggatcggtagccgtttctcttcaaaatttgtccgtaaccccgattcgaaagagcctgatgacaaccaggttaaacgctggccgcaaattcgtcacggtaacgtcacgcagcgtctggtcaaacttttgatcctcggcgctaaattcagcagcgtaaatacggtcacaatcgatatcgttaatgcgtggctaaaagaggcatggcttcagttgacggggtcactagcggtattgaaatctgacggcaaccgtttttatttacctaaagagcatctgacattctctctggtaaaaaaagcctacatttgcccggtaaccaataaattactggcgacggctttcagagacctgacgccttatctgccaatgcatattcagtttgaacggctgaccagtgcacaatatgacgcctttgtcgcccaggcggtgacgctgcctgagatttggcagcacgatcgttctcaggatgattatgtcgatgggttaagacaagttcgtgactggctgggtcaggaccctctggtggcgcaattacgttcgcaaaacctctggacggacattaacgatcgcgtcgttgaaggtggattttactaccgcacggcagagcattccgcccagcaatcatccgaacgtctgcaaagttatgaacgtatgtttaaaaacggacagcttaacgttctcaactgttcaaccaccatggaaatgggcgtagatattggcgggatttctgccgtggtgatgaataacgtcccaccgcaccccgctaactatctacagcgtgccgggcgtgccgggcgaagcaaagagtcccgcgctatttcttacacgttgtgcaaaggcaacccgcacgatcggcaggtttttactaaccctctctggccgtttgaaacggtgatccctgcgccgatggtggcaatgaattctgagcgtctggtacagcgccacgttaattctctgctgctgtcagactatttgtgccatgtcatcggtgaaaccgaaaaagaacgcaccagccttaatagtcagtggttctttggtgaagagtttgaacagtcggtgtgtaaccgtttcaaagcctggctggagcgtccgacgctgagcattgacgcggctttagttcgattggttaaaggcaccgcgcttcatggcgttgcggcagaaaagctgcgggataaaacgtgcgatgcgattgcggcgctgcagaagcgctggctgggaatttatcgcgatcttgttaagcaggaaagtgaatcacagcccaatacgccgtatcgcaaacgtctggagctggagaaaaaacggcactgcggcgagtatctgctgcgcgatttggcggctagaaccttcctgcccggatatggcttcccaacggatgttgtcacttttgataacttcactatggaagattatatccgcgagaaaacgtacaaagtccgtaataagagcgatcgtgaagataacgtctcgcgttataaaggcttgccttcacgtaacctttccgtagcgatccgggagtatgcgccgggtgcggagattatccttgatggacgggtcttccgctcagctggggtgtctctgcactggcataatattaatgctgataccaatgaagctcagcgtctggatagtgcctggcgttgtcacaaatgcggtacgttaggctatgaggaaggtattggcggctcgggagatttgttctgtaccaatgatgcgtgcggtgagcgcatcacgccggaaaaccgacgtcaggttttacagcctgcgggttttgtgacggatgcgcatgctccggtgaccaataacattgagaccatgaaattcattccggttgtaccggcctgggtatttgttaaggccgagcgtgtaccgctgccgaacccgttgatgggctttatggcttccggggcggacggtaatgtgttccagcaaagtatgggggaaggcggtcacggctatgcgctgtgcctgagctgcggccgtgcggagtcgatgctcaacctcacggatgcgcctaaatccatggaaacacactatccgccacgtccaggaaaggccgaccgggatagccagaatcagcggattatctgcccaggttcaacggcgctgaataaaaatgtcacgctgggagcgctggccagaacggatgtcttcgagctgattgtccgccgcccgcaggacggagagtatatcgctgataacacggaagaaggtcgtattgttgcaatgacgctggccgtggcgctgcggcgctcgctggcgagcgtgctgggcgtttccgcagcggagctgggctacgcggtgcgtccggtcaggctggagaacgagcaatccgttctggcggtgcagctgtacgatattatcagcggcggtgcgggctttgcttccagcgcgccattgcatattgaggccgtgctgaagggaatggtgaagcaactgggctgccaccactgcgataccgcctgtagcgagtgcctgctcgattcacagacccgccacgatcacgatctactggatcgtaaagcggcgctggcctggctgggggcggatttcagccactatattggtttgccggatgaggagaaattctctctggctgatgcgcaatattgcccagggagcattgaagatactctgcgacgggctatcaacgatggtggccgaaagctcacgctgtggatgagtgggccgttgaatgagtgggatctgtatgcccgtcagttccgcacagcgatccagaactaccggctaaaagatgatgttgaggtggtgctggttattccgcgaaacattgacgatccggagatccttctggaactcgcgcagtttacggcgataggcgtgcagctgtgccagtctgagctggatacggatacgccgctcgttgcgcaggtggcgtttgacgatcgcctgatgacattaatttctcgcagccatgaagctaccatccccgggccgaactggcatctgaatagccagatggttattcgcagccatttgcaggggccgatagcgctttataaaaccgagttgccatccgaggatgcgggcagcaaaggcctggttaacgatattgaaatccataagcagcttaacggcccggtttctcagtttggccagcgcttctggaacctgctgaccgagtctcaggatgatattcagcgcctgctgacgaaatgccgggtgacgcgtatccactatagcgatcgctatctgcaaaaccccgtagcgctggcgttgttaggcgggttgttgaagacgttgaaaccgatgctgacgcaagaggcggaagtgacgattgatacgctgttcaggagtaaagagcgaccggggaacaaaccgttccatgactggatgagtgaagcagacttccaggatttcgccgaccagtggtttgcggcatccatgggtcgagccgtggagattcaggcgttcaactctggccgcgacattccgcaccaccgtaagctgatggtgagttttgataatggccaagcgctgaaaatccgctttgatcaggggatgggatactggcgtattaactttgcgcgagcctggcgtaattttaactttaatgacgacgtctctttccagctggggaatatggcgcaagcctgcgcagaaggcctggtagtgaacagcgaggagagctgggcaaccgatgtgctggtgcaggttatcgccccttaa

SEQ ID NO: 30301 - DNA, 3300 bp, Serratia marcescens
gtgagtcgatcagaatacatttatctaattaagtgtacttcttggctagctaaattcctctcccgcagaggattgaagcaaccagaccgccgcccattatatgaataccacgcaacgagtgatgagtatgatgagttgaagcggttgttgagagctatagggctacccgatggctacaggagtgataaaggatatgcagccagcttcacgttattctgctcagagtggtatagaagagattatgaaagggagtgtggatgggcatgggagcctatttataagactatcggtatatcagcatcttcttcggaaatggggaaaataattcctaaaggtctggatggatattggggacgtcctgtgcggttttacgatacagaaagacggaattttttaggatccttatttagtgaaggcggtctacctttcaggttgctaaaggaatctaatagccgctttcagtcgatgttctctctcattctcaatcaatacgatcaggcccaatcttctaacatttcaacgtttgctttagttcatgcggcggtagaaaaatcatccctgccagtcgttttcaaagaggatacttcagttgagcttattagtcggatggctgaacagttagtgtctcttgtgcaaatttatgacctgagtaaccacaccgaacccgtaaaagagcttgatcgtgttcatcctaagtggcgggacagcttccccgttccgcttgatgatgatacggggaccagtttccttaatggacttttacgagcagcttctactgaatccaaacctcgccttcaaaaaaatagaacaaccctatgtcagttcttatggtcagagaatcatcctgaagctttacagtcgcttatttctcttccagaagagctgagtttttcgattgatagtgaaccttctacaacacgtttcgagcttgccatctatgaagatggtaacgaaattgcgagcctggggcctgcctatgcaacgttgagtaattcacaggcgaaaatgagagttcgtaagcgtgaaattaagttttttcgaaaaaagcccgctgccagcttgtttattgtggcgagagcaggagggatgcttgtcggaaccagactgttggagggaagtgaggttgccgttggcgatgtgccattagtttttgtttttgataaaagtgaatggttgctacaagggcaagcatcttgcagtgtacgtggcagtcatgtgctcattgtattgccaaaggatggttgtctggcctcagagctcgaggattgtgaaaccgatttttcggctttgggatgccgcgctctgattgtcaaaggacgcctggatatcctgattgaaggcggtgaaacgtatcggataaagacaagaagagagcagattatccagacagggttctctttccaggggaagcggttaaactggacaagctacccggatgagctcttccttggtgttcctggcatttcccaaaattctgagaatctattaacgcatcattataaactttttttcaacggcacatttatagataattgtgatgtgcaagagaaaatgggtgctcagtttatttcagtacgtaacgagaataatgaaacgttactgcgcaagaaaataggtattcttcccaatgattttggtctggaaacaaaaaatggagaacaagcaaacgaaggctctatcattattaccaccaaacatccttgtttgtatagtttgaaagaaaaatcattggagattgataggaagcgattaccaggtagtacagaaataataatgaaaactgagggaatccctccagcatcgattttattacaaataacgccaaaccttgctgcaaatcctattgttatttctctccctttccctgcccgaggttgccttgtcttcgataaagacgacaaacctctaccaaaaaatttaacgattaacgatcttctgggagccagagcataccttttcggaaaaaatggtgagcctacgcgataccaacttgaactgcgtttacgctcccgtagcggaatgcaggcatggtatgagtggcgctatagtgcgggagaaagcccggtagagcttactttatatagcttaagagagcatattgacaatttactttccctagagaaagggattgatcaaacggtggatatgcgtattgagggcggaggtagttcctttacctggcaaatcaggcgctataaatatagccttgagtatgatcgggaaatgcagcttcttcttgctaattcagtgagcaatcgtacggggcagatcccttcccccgttattatgttactcagtgagcccgaaagaaaagcaataccacttgtatcgagaatgagcgaaggtgtaccggttggtgaattcgaattaagttcgacaatacaaaataatggcccatggctagttgttcccaaacaaggtgcagaagcttcatttcggccttgttacattgcaggtgagccggtaatccaaagcgagactacggcaatacagtccctgcaaaaagcgacgcagctttttaatcctcgggcggatgtaaataccattacgttagttctggaacaaatggcaagcgaccctgcacattcaggttggcagttcttacgtaacttatacgatcagtttggatatttaccactggctacctttgaggtatggcgtgccttggtccagcatccacaggcattggcaatgtcactgtttaaatttgagatgtccattgattatctcagccgtattgaaagcgagtttcctgttttctgggagttttttcctatcactgaggttaaacatgccgcgatgcgttttcgagcgtttctgactcataaaggtgctccggaggaaatgcagataaagttgctgggtcgaatgttccagcaattagggactgcatttccaacttatgccagcgaggtgcaaacatggttcgatcagggaagattaccaccagcttttccgacacaaatgataaaaggcatcattcatgagtggtatcaggaactcttacgtgaacacggtgaatctcgttggccagagtttggcgggccgggtcttttccgttggtacacgtcgcaacaagatcctgttatagagatttcacccgataccagctaccgatattctgttactttgctccccatatttgctgccgctgttgcctgcggtaaaacaacatttgacagcgtttttgaaaataaacctggtgccgtatttttcttaagacaagtcagagattttgactcgcgatggtttaatgccattttccagtattgcttattgcgtaatgtggctgaaaaataa

SEQ ID NO: 30302 - DNA, 4326 bp, Serratia marcescens; identical to SEQ ID NO: 30300

SEQ ID NO: 30303 - DNA, 3300 bp, Serratia marcescens; identical to SEQ ID NO: 30301

SEQ ID NO: 30304 - DNA, 6321 bp, Serratia marcescens BIDMC 80
atgactacacgctatttttcttcgctgattgaacagtcgttatctcgttcgacggaagctacgctgagcattatgggcgtaaccaatccgcatcttcgcgagcaccttgcgcagcagatggcggctgaatgtggaaaggaagggacatttctggcctctcccgtatttgaacaaacatttggctggaaagagtcaaatttcacgatgagggatcttgccacaaagcaaacgttactgagcaaggaggttgttgattctctcgataacaaagaaaacggacgttatcgttttgactcaacctggaaaccgttcacacatcagttagccagctggcaagcattacttgataaaaaacattcggtggttgtgaccagcggcacgggctcgggtaaaacagagtgtttcatggttccggtacttgaggatctttatcgtgaactacgggacaacgagaaaaaatcgctaataggcgttagagcccttttcctttatcccctgaatgccctgatcaattcacagcgtgaacgtttagatgcctggacccgaggttttggaaccgggattcggtactgtctgtataacggtaatactgcagagctgcatgcctcagtaaaaagtgagcaggcaaaccggccaaacgaagtgctttcgcgtgagaaaatgcgtgaggaacctgcgcctgttctggtcacaaacggtaccatgctggaatacatgatggtgcgtcaggttgatgcacctatcattcagaaatcaaaagcggaaaaatcattacgctggatagttctggacgaagcccatacctacgtaggttcccaggccgctgaactggctttacagctccgtcgtgtcatgactgcatttggcgttacacctgatgatgttcgctttgttgcaacatctgcgactattgccggaagtgatgcagaaaagcagctgaaaaaattcttatctgagttgtccggtgtgccacacgaacgtattgatgttctgggaggtaaccgtgtcattcctgacctggcgccgtgccagcatctttctctatccctggatgagcttgagcatatccctgattctgatggagcgggtattagccttgagcgttataccgcgctgactcactctccgcaagcgcgtcatctccgtgagatgcttgtgagtcaacccaaaccgatgaagcttgatacgctgacccggcgtttgaatgagctaacaaaacatcagtacactcagcaagatattttgcgctggctcgatctctgtaccggcacgcttcccaatgcgcaagaaccggcatttctgaaagtcagagcgcatatttttcagcgtaatacccaggggatatgggcctgcgtagataaacattgctccgctaaacacaatactgcgctggagaaggggtggccttttggcaatgtgtatgtgagtcagcggcaaaactgcgagtgtggcagccctgtttatgaactcgcgttctgtaatgaatgtaatgaaccgcatttacttgcccgtgacaaaaaaggaaagcttgtacagtgggataataaaggcggggatgagttttcactgcaggatgaagcacctgatgattttgacttttcgagtgaaaaagttcaaaaagaacaggtattccagccaccccatattattgccgcggaatgtaataccgaaatgggttatatcgtgcagcgcctcgatcgtcaaactcgaagtattggcgtagtcaacccggatagtattccgctggcgatgaatgatattgagcaggtctgtagcgtcagcaactgtggttatagaggaggtaaaggtaaacaacctttccggcgggcactgttaggcgggcctttttatgtgacgaatatcgtgcctaccgtgctggaatattgtcaggactttatcagtgatgaaggtaaagagggggttggcccactttctttgcctggccgagggcgccgactgatcaccttcactgatagccgtcagggaacggcacggatggcggtgcggatgcagcaggaagctgagcgcagccgtttgcgtggtagcgttgtggatattctctcttggcatcaacgtaaacagtcaacacatgcgccaaatgcccaggctgacgtaacgaagttgactgagatggcagcacaggcacgtgaagaagcgaaaaatcttcatgattgggggatgccggaagaagcgatccgtcgtgaagaacaagctgagcgcttagagcacgctatacaacaagccactggcggaaaagtcgatacggttttgatgtctctctcctggcctgaaatggtcaaggaattgaaagataaggcggatatcaaaggtcctatcctacagtataaccactatctcaagcctgaaatcttcactgaaaatggtggccctttaaaactcgctgaaatgctgcttttccgtgaatttatgcggcgcccgaaacgtaccaatagcctggaaacgcaaggattggttcaggtgggttatcaggggctggagaaggcgcatagcctccctgctcattggcaagataaagggttaaccctggatgactggcgtgattttcttaaggttacgctggatttctatgtcagggaaagcaacttcacccagttggacgaagatctgaaaaactggatcggtagccgtttctcttcaaaatttgtccgtaaccccgattcgaaagagcctgatgacaaccaggttaaacgctggccgcaaattcgtcacggtaacatcacgcagcgtctggtcaaacttttgatcctcggcgctaaattcagcagcgtaaatacggtcacaatcgatatcgttaatgcgtggctaaaagaggcatggcttcagttgacgggatcattagcggtattgaaatctgacggcaaccgtttttatttacctaaagagcatctgacattctctctggtacaaaaagcctacatttgcccggtaaccaataaattactggcgacggctttcagaggcctgacgccttatctgccaatgcatattcagtttgaacggctgaccagtacacaatatgacacctttgtcgcccaggcggtgacgctgcctgagatttggcagcacgatcgttctcaggatgattatgtcgatgggttaagaaaagttcgtgactggttgggtcaggaccctctggtggcgcaattacgttcgcaaaacctctggacggacattaacgatcgcgtcgttgaaggtggattttactatcgtacggcagagcattccgcccagcaatcatccgagcgtctgcaaagttatgaacgtatgtttaaaaacggacagcttaacgttcttaactgttcaaccactatggaaatgggcgtagatattggcgggatttctgctgtggtgatgaataacgttccaccgcaccccgctaactatttgcagcgtgccgggcgtgccgggcgtagcaaagagtcccgtgctatttcttacacgttgtgcaaaggcaacccgcacgatcggcaggtttttgctaaccctctctggccgtttgaaacggtgatccctgcgccgatggtggcaatgaattctgagcgtctggtacagcgccacgtcaattctctgctgctgtcagactatttgtgccatgtcatcggtgaaaccgaaaaagaacgcaccagccttaatagtcagtggttctttggtgaagagcttgaacagtcggtgtgtaaccgtttcaaagtctggctgaagcgtcagacgctgagcattgacgcggctttggttcgattggttaaaggcaccgcgcttcatggcattgcggcagaaaagctgcgggataaaacgtgcgatgcgattgcggcgctgcagaagcgctggctaggaatttatcgcgaccttgttaagcaggaaagtgaatcgcagcccaatacaccgtatcgcaaacgtctggagctggagaaaaaacggcactgcggcgagtatctgctgcgcgatttggcggccagaaccttcctgcctggatatggcttcccaacggatgttgtcacttttgacaacttcaccatggaagattatatccgcgagaaaacgtacaaagtccgggataagagcgatcgtgaagataacgtctcgcgttataaaggcttgccatcacgcaacctttccgtggcgatccgtgagtatgcgccgggcgcggagattatccttgatggccgggtcttccgctccgctggggtatctctgcactggcataatcttaatgctgataccaatgaagctcagcgtctggatagcgcctggcgttgtcacaaatgcggtacgttaggctatgaggaaggtattggcggttcgggagatttgttctgtaccaatgacacgtgtggtgagcgcatcacgccggaaaaccgacgtcaggttttacaacctgcgggttttgtgacggatgcgcacgatccggtgaccaataatattgagaccatgaaattcattccggttgtgccggcctgggtatttgttaaggccgagcgtgtaccgctgccgaacccgttaatgggctttatggcttccggggcggacggtaatgtgttccagcaaagtatgggggaaggcggtcacggctatgcgctgtgcctgagctgcggccgtgcggagtcgatgctcaacctcacggatgcgcctaaatctatggaagcacactatccgcctcgtcctggaaaagccgaccgggatagccagaatcagcggattatctgcccaggttcaacggcgctgaataaaaatgtcacgctgggagcgctggccagaacggatgtcttcgagctgattgtccgccgcccgcaggacggagagtatattgctgataacacggaagaaggtcgcattgttgcaatgacgctggccgtggcgctgcggcgctcgctggcgagcgtgctgggcgtttccgcagcggagctgggctacgcggtgcgcccggtcaggctggagaacgagcaatccgttctggcggtgcagctgtacgatattatcagcggcggtgcaggatttgcttccagcgcgccattgcatattgaggccgtgctgaagggaatggtgaagcagctgggctgccaccactgcgataccgcctgtagcgagtgcctgctcgattcacagacccgccatgatcacgatctgctggatcgtaaagcggcactggcctggctgggggcggatttcagccactatattggtttgccggatgaggagaaattctctctggctgatgcgcaatattgccctgggagcattgaagatactctgcgacgggctattaacgatggggggcgaaagctcacgctgtggatgagtgggccgttgaatgaatgggatctgtatgcccgtcagttccgcaccgcgatccagaactaccggctaaaagatgatgttgaggtggtgctggttatcccgcaaaacattgacgatccggagatccttctggaactcgcgcagtttacggcgataggcgtgcagctgtgccagtctgagctggatacggatgcgccgctcgttgcgcaggtgacgtttgacgatcgcctgatgacgttaatttctcgcagccatgaagcaaccatccccgggccgaactggcatctgaatagccagatggttattcgcagccatttgcaggcgccgatagcgctttataaaaccgagttgccatccgaggatacgggcagcaaaggcctggttaacgatattgaaatccataagcagcttaacggtccggtttctcagtttggccagcgcttctggaacctgctgaccgagtctcaggatgatattcagcgcctgctgacggaatgccgggtgacgcgtatccactatagcgatcgctatctgcaaaaccccgtagcgctggcgttgttaggcgggttattgaaaacgttgaaaccgatgctgacacaagaggcggaagtgacgattgatacgctgttcaggagtaaagagcgaccggggaacaaaccgttccatgactggatgagtgaagcagacttccaggatttcgccgaccagtggtttgcggcatccatggggcgagccgtggagattcaggcgttcaactctggccgcgacattccgcaccaccgtaagctgatggtgagttttgataatggccaagcgctgaaaatccgctttgatcaggggatgggatactggcgtattaactttgcacgagcctggcgtaattttaactttaatgacgacgtctctttccagctggggaatatggcgcaagcctgcgcagaaggcctggtagtgaacagcgaggagagctgggcaaccgatgtgctggtgcaggttatcgccccttaa

SEQ ID NO: 30305 - DNA, 3300 bp, Serratia marcescens BIDMC 80
gtgagtcgatcagaatacatttatctaattaagtgtacttcttggctagctaaattcctctcccgcagaggattgaagcaaccagaccgccgcccattatatgaataccacgcaacgagtgatgagtatgatgagttgaagcagttgttgagagctatagggctacccgatggctacaggagtgataaaggatatgcagccagcttcacgttattctgctcagagtggtatagaagagattatgaaagggagtgtggatgggcatgggagcctatttataagactatcggtatatcagcatcttcatcggaaatggggaaaataattcctaaaggtctggatggatattggggacgtcctgtgcggttttacgatacagaaagacggaattttttaggatccctatttagtgaaggcggtctacctttcaggttgctaaaggaatctaatagccgctttcagtcgatgttctctctcattctcaatcaatacgatcaggcccaatcttctaacatttcaacgtttgctttagttcatgcggcggtagaaaaatcatccctgccagtcgttttcaaagaggatacttcagttgagcttattagtcggatggctgaacagttagtgtctcttgtgcaaatttatgacctgagtaaccacaccgaacccgtaaaagagcttgatcgtgttcatcctaagtggcgggacagcttccccgttccgcttgatgatgatacggggaccagtttccttaatggacttttacgagcagcttctactgaatccaaacctcgccttcaaaaaaatagaacaaccctatgtcagttcttatggtcagagaatcatcctgaagctttacagtcgcttatttctcttccagaagagctgagtttttcgattgatagtgaaccttctacaacacgtttcgagcttgccatctatgaagatggtaacgaaattgcgagcctggggcctgcctatgcaacgctgagtaattcacaggcgaaaatgagagttcgtaagcgtgaaattaagttttttcgaaaaaagcccgctgccagcttatttattgtggcgagagcaggagggatgcttgtcggaaccagactgttggagggaagtgaggttgccgttggcgatgtgccattagtttttgtttttgataaaagtgaatggttgctacaagggcaagcatcttgcagtgtacgtggcagtcatgtgctcattgtattgccaaaggatggttgtctggcctcagagctcgaggattatgaaaccgatttttcggctttgggatgccgcgctctgattgtcaaaggacgcctggatatcctgattgaaggcagtgaaacgtatcggataaagacaggaagagagcagattatccagacagggttctctttccaggggaagcggttaaactggacaagctacccggatgaactcttccttggtgttcctggcatttcccaaaattctgagaatctattaacgcatcattataaacgttttttcaacggcacatttatagataattgtgatgtgcaagagaaaatgggtgctcagtttgtttcagtacgtaacgagaataatgaaacgttactgcgcaagaaaataggtattctccccaatgattttggtctgaagacaaaaaatggagaaaaagcaaacgaaggctccatcattattactaccaaacatccttgcttgtatagtttgaaagaaaaatcattggagattgataggaagcgattaccaggtagtacagaaataatgatgaaaactgaggggattcctccagcatctattttattacaaataacgccaaaccttgctgcaaatcctattgttatttctctccctttccctgcccgaggttgccttgtcttcgataaagacgacaaacctctatcaaaaaatttaacgattaacgatcttctgggagccagagcataccttttcggaaaaaatggtgagcctacgcgataccaacttgaactgcgtttacgctcctgtagtggaatgcaggcatggtatgagtggtgctatagtgcgggagaaatcccggtagagcttactttatacagcttaagagagcatattgacaatttactttccctggagaaagggattgatcaaacggtggatatgcgtattgagggcggaggtagttcctttacctggcaaatcaggcgctataaatatagccttgagtatgatcgggaaatgcagcttcttcttactaattcagtgagcaatcgtacggggcaggtcccttcccccgttattatgttactcagtgagcccgaaagaaaagcaataccacttgtatcgagaatgagcgaaggtgtaccggttggtgaattcgaattaaattcgacaatacagaataatggcccatggctagttgttcccaaaaaaggtgaagaagcttcatttcggccttgttacattgcaggtgagccggtaatccaaagcgatactacggcaatacagtccctgcaaaaagcgacgcagctttttaatcctcgggcggatgtaaataccattacgttggttctggaacaaatggcaagcgaccctgcacattcaggttggcagttcttacgtaacttatacgatcagtttggatatttaccgatggctacctttgaggtatggcgtgccttggtccagcatccacaggcattggcaatgtcactgtttaaatttgagatgtccattgattatctcagccgtattgaaagcgagtttcctgttttctgggagtttttgcctatcactgaggttaaacatgccgcgatgcgttttcgagcgtttctgacccatagaggtgctccggaggaaatgcagataaagttgctgggtcgaatgttccagcaattagggactgcatttccaacttatgccagcgaggtgcaaatatggctcgagcagggaagattaccaccagattttccgacacaaatgataaaaggcatcattcatgagtggtatcaggaactcttacgtgaacatggtgaatctcgttggccagagtttggcgggccgggtcttttccgttggtacacgtcgcaacaagatcctgttatagagatttcacccgataccagctaccgatattctgttactttgctccctatatttgctgccgctgttgcctgcggtaaaacaacatttgacagcgtttttgaaaataaacctggtgccgtatttttcttaagacaagtcagagattttgactcgcgatggtttaatgccattttccagtattgcttattgcgtaatgtggctgaaaaataa

SEQ ID NO: 30306 - DNA, 6255 bp, Serratia odorifera DSM 4582
atgggcgttacgaatcctcagctccggaagcatctagcccagcagatgggggcagattgtggcaaagcaggttctttccttgcatctccagtatttgaacaaacatttggctgggaagaatcaaactacaccatgaaaatgctggcaactgaaaaaacattgctgagcaaagaagtcgttgattctctggatagtgaaaaaaatggccgctatcgttttggtgctaactggaaaccatttacccaccagttggctagctgggaatcattacttgagaaaaagcattcggttgttgttaccagtgggacaggctccggtaaaacagaatgctttatggtgcctgtactcgaggatctttatcgcgagttacgcgattgcggcaataaaccactggtgggagtaagagcgctatttctctatccattgaatgctctgattaattctcagcgtgagcgtctggatgcctggacacgtggatttgggaccggggttcgttattgcctgtataacggcaacacagaagaactacatgcctcggtaaaaagcgaacaggcaaacaggcctaatgaagttttatcacgtgagaaaatgcgcgaagagccagcaccaatactggtgacgaacggtaccatgctggaatacatgatggttcgtcaggttgatgctccaataatccagcaatcgaaagcacaaaaatcattacgctggatagttctggatgaagcgcatacctatgtcgggtctcaagctgccgagcttgccctacaacttcgtcgcgtaatgactgcgttcggtgtcacgcctgatgatgttcgttttgttgcaacgtcagccaccatcgcaggaaatgatgcagaaaaacagctaaaaaaattcttatctgaactgtcaggaataccacaggaacgtattgatgttttagggggcaatcgggttattcctgaacttgaggcatgcaaaaattatcccttcacccttgatgagcttgagcatataccagactccgattccgataaggaaggaattagccttgagcgttatagtgcgttaacacattccccggaagcgcgctatctacgcgagatgctggttagccaacctcgccccgtaaaactagatgtaatgaagaaacgtttaaacgagctgacaaaaaatcattacacgcaacaggaaattttacgctggatcgatctctgtacgggtacaagccccaacgcacaagatcctgcatttctcaaagtaagagcacatatttttcagcgtaatacccaagggatatgggcctgtgcagataaaaactgtacagcgaagcacaacacggccctggaaaagaattggccctttggctatgtgtatgtgaatcagcgacaaaattgccagtgtggtagccctgtttttgagctttcattctgtaatgagtgcaacgaaccgcacctgttggcgaaggataaaaaaggtaagctcgtacagtgggacaataaaggtggggatgaattctcgcttcatgatgacgtcccagatgactttgaaacttcgggagagaaagttcaaaaagaacatgcattccaggctccgcaaatcattgcgccagaatgtaatactgaggctggatatataatccagcggctcgatcgtaatactcgcagtattggtgttgttcgtgaagacagcattcctttggcaatcaacgaaagtgaacaaatttgcagtgccagcaactgtggttataaaggcgggaaaggtcagtccccctttagacgcgctttgctaggaggacctttttatgtcacgaatattgtgcccacggtgttggaatactgccaggatttcgccagcgatgaaggtaaagaaggtgtaggtccactatctttgccgggacgagggcggcggctgataacctttaccgatagccgtcagggaacggcacggatggcagtaaggatgcagcaagaagctgaacgtagccgtttgcgtggtagtgtggtggatatactttcctggcatcagagaaaacaggctgtaaatactcctaatgcactggctgatgtaacgaaactggtcgagatggctaaacaggccagagatgaggcgaaaaacctgcgtgactgggatatgccggaagaggcaattctctctgaagaaaaagcggaacgtattgaacaggccatacaaaaagcaacaggtggaaaagttaataccgttttaacctcgctaacctggcaagaaatgattaatgatcttaaagataaggcagatatccaaggctcgattctgcagtacaaccactatcttaaacctgagattttcactgaaaacagcgggcctctgaagctttcagacatgcttttattccgtgaatttatgcgtcgaccgaagcgaaccaatagccttgaaacgcaagggctggtgcaggttggttatcaagggttggagaaggtacataaaacccctgtccactggcaggaacaagatctaactctggaggactggcgtgattttctgaaagtcacactggatttttatgtcagagaaagcaacttcatccaactggatttagaactgaagaactggattggcagccgtttctcatcgaaatttgtacgcaaccctgaatcaaaagaccctgacgataaccaggtcaaacgttggccacaaattcggcatggcaatgtcacccatcgcttggttaagctactaatactcggagcaaaattcagcaccgtaaacacggttaccatcgatatagttaacgcatggttgaaagaggcctggcttcaattaaccggccctctggctgtgttaaaaccagacggtaaccgtttttacttgccgaaaaaacatctgacattttctctggttcaaaaggcgagtatttgccctgttaccaataaattgttggataccactttcaaaggactcaccccgtacctacccagacatatcccgtttgaacgcctgaccaatacgcaatatagcgcctatatggcccaggaagttatgctacctgaagtctgggaacacgatcattcgcagttagattatgccgaagggttggcacaagtccgggaatgggtatcgcaagacccacttgtcgctcatttacgctcgcaaaacgtctggacggatattaacgaccgcgtggtggaaggaggcttttactaccgcactgctgagcattcagcacaacaatcagcagatcgtctgcaaagctacgaaaaaatgtttaaaaacgggcagctcaatgtccttaactgttcgactactatggaaatgggcgtggacattggcggtatttccgccgtagtgatgaataacgtccctcctcatcctgcaaactatttacagcgtgcggggcgagccggacgtagtaaagaatcccgcgcaacctcctacacgctgtgtaaagggaacccacacgatcagcaggttttcgccaatcctctctggccatttgagaccgtgatccccgcaccgatggtggcaatgaactcggaacgattggtacaacgccacgttaattcgcttctgctgtcagaatatttgtgtcatgtagtgggagaaactaagaaagaaaaaaccaacctgaatagcgaatggttctttggtgaagagtttgggcagtctgtatgtaacagctttaagatttggcttgaacgcccgaccctgacaattgatgacgcgcttgagcgtctggtaaagggtaccgcgctgcatggtgcaaggccggaattattgcgggaaaaaactttccatgcgattactaatttacagaaacgttggctggggattttccaggacctcgtgaaacaggaaaaggaatcacagccaaatactccatatcgtaagcgcctggaactggagaaaaaacggcattgcgatgagtatctattgcgcgacttggcagcgcgaacgttcctacctggctatggtttcccgacggacgttgtgaactttgataacttcactatggaagactatatccgcgagaaaacgtataaaagccgtaataagagtgaccgtgaagataacgtttcacgttataaaggactgccttcacgcaacctgtctgttgccattcgtgaatatgcgccaggggcggagatcattctggacggacgtgtgttccgttccgctggtgtatcactgcattggcacaatctcaatgctgataccaatgaagtccaacggttggaccgagcctggcggtgccagaaatgcggtacgttaggctatgaagaaggtattggtagctcaatagaattattctgcactaacggcgactgcggtgagcgaattactcgtgacaacactcgacaggtgctacagcccgctgggtttgtcactgatgcttatgattcggtaacgaacaacatcgaaacgatgaaatttatcccggtagttccggcatgggtatttgttaaggcggagcgtttgccactaccaaacccggagatgggctttatggcttcaggcgctaatgggcatgtattccagcagagtatgggcgagggtgggcatggttatgcactgtgcctgagctgcggtcgcgcggagtcgatgataagcgaaaaagacgcgccaaaatcaatggaggcgcattatccgccacgtccaggaaaagccgaccgtgacagccagaatcagcgaattatttgtcctggttctaccgcattaaataccaaagtcaccctgggagcgttagcacgtaccgatgtatttgaactgattttacgtcgtccacaggacggtgagtatatccctgatagctcagaggaagggcgtattgttgctatgacgctggctgttgcgctgcgtcgggcgcttgcgggtgtactgggtgtttctgctgcggagttgggctatgccgtgcgtccggtcaggttggagagcgaggaatcagtactggcagttcagctttacgacgtcatcagcggcggtgcggggtttgcttccagtgcaccattgcatatcgaagcgatactgcagggaatggtcaaacagctagggtgcacccactgcgataccgcctgtagcgattgtttactcgattcgcaaacgcgtcacgatcatgaccatctggatcgcaaagctgcactggcctggctaggggatgatttcagccactatattggtttgccagacgaggtgaaattctcgctacccgatgcgcagtattgccctggtacaattgaggatgcagtccgtcgcgcaattaacgaaggagccgataaactcacactatggatgaacgggccgctcaacgaatgggatttatatgcccgacagttccgcgcagcaatccataactaccggcttaaagataatgtcgcggttgagattgtcattcccgctagtattgacgatccggaggtgttgcacgaactggcgcagtttgcggctattggcgtgcggttgtgccatgccgaacaggaagtgtcattccctattgtggcgcagatcgctttcgccgatcgtgtcataacgctagcatcacgcagccagcaagccacggtgccgggaccgcactggcatcagaatgacgagctggtggttcgcagccaatgctatcgccctactgctctgcgtgagtttgcactaccagcaaccacagcgaactatactgagctggtgaaagacattcaaattcataaagagttgaatggcccgttttcgcagtttggccaacgcttctgggatgtgctttttgacgaccatgaaaaagtacaaaacctgatgaaaacaaaccgaattacccatattcactataccgatcgctatctgcaaaacccggttgcgctggcattactgagcgctttacttaagcctctgaaaaccttaatgaccaaagatgcggaagtagtgattgataccttattcaaaaacaaagatcgcccaggcaatcgaccgtcccacgactggatgagtgaagctgattttcaggattttgctgaccagtggtttgctgcatcaatgggtaaggcggctgacataacggtcttcgactacccacgagatattccacatcatcgcaaattgatggtgaattttgacaatggccaggtgctgaagatccgctttgatcaggggatgggctactggcgtatcgacttcccatatgtctggcgcagctttgacttcaatgatgatgttacttctcagctccacaaaatggctaaagcttgtatggaaggaaaggtgattaacggagaggaaaactggtcaacggatgtggtagttgaagtgatggagccttaa

SEQ ID NO: 30307 - DNA, 1449 bp, Serratia odorifera DSM 4582
atgattaaagcggagggagtgccacctacttccgttgtattgcaggtaacccctaatcttgctggtaatcccatcgatattattctgcctttcccgacaaagggttgtttggtacttgatgttaatggccaacacctacgcaaaaatataacaattaatgatctgttggggaccagagcatttctctttggaaaaaatggcgagccagccagattccgccttgaactgcgcctaatgtccagagcgagactgcaggcgtggtatgaatggcgttataccgcaggcgaacgtccagttgaactcaatttgtatagtctaagagaacatattgagaacctgctctctctggagaccggcattgaccagattgtggaaatgcgtatagatggcgccgggagcgtacttacctggcaaattcgacgatacaaatacagccttaactacgactatgaaaggcaggttctttttagcagctcagtgaatactcgctccgggcagactccttcgccagtcataatgctgctaagcgaacctgaaagaaaacctgtttctctcacttcgcgaatgagcgaaggtgtaccagttggtgaatttgagctgagctctgtaatacagaaaaatggcccttggctggtagttcctagaaaaggtgaagaagccgcttttcgaccatgttttattcgcagcgaaccaccattacaaactgaagttcacgccatccaatcgatgcaaaaagcgacacagctttttaaccctcggtcagacgtgaatacaatcaccttggttctcgatcaaatggcaagtagcccctcgcattcaggctggcagttcttgcgaagcttgtacgagcaatacggatatctacctctggccactttcgaagtatggcgagcacttgttcaacatccgcaagcgttggcaatgtcattgtttaaatttgaaatgtctgttgaatatctcagccgcattgaaaatgagtttcctattttctgggagtgtttacccattcttgagattaaagatgcagcagatagatttcgggccttcctggcccataaaggtgcgccagaagaaatgcagaaaagattgctgaacaaaatgtatcagcaattggggactatttttccggcctatgccaatgaagttcagaagtggttaagtttaggtatacaaccgcgtccaatacctcatccgacgatgagagatattattcaagagtggtatcaggatcttctgcgtgagcatagtgaatcacgctggcctgaatatggcggagctcagctttgtcactggatcatgtcacaaaaagactctgtgattgatatttctcctgacacagaataccgctactccgttgtctggctacctgtatttgctgccgccgttgctagcggaaaaacaacatttgaaagtgtttttggccatgagccaggctccttattttcttaa

SEQ ID NO: 30308 - DNA, 6345 bp, Serratia sp. Ag1
atgactacaggctatttttcgtcactgattgaacaatcgttgtctcgttcaactgaagcaacgctgagtatcatgggggtcaccaacccgcagttgcgtaagcatctcgcacggcaaatgggtgccgactgtgggcaatccggctcattccttgcttccccagtattccagcaaatgtttggttggaaagagtcaaacgacaccatgcgcagcctgacggaaggcaaagcattgctgagtaaagcagtggttgattcattggatgatcagaataatggtcgctaccgttttggtgccgactggcgccccttcactcaccagttagccagttggcaggctttgctggaacagaaacattcggtggtggtaaccagtggtacgggttcaggcaaaacggaatgttttatggtccctgtgctggaagatctctaccgggagctgcatgaaaacggcaacaatccgctggtcggtgtcagggccctttttctctacccgcttaacgccctgattaattcacagcgtgagcgcctggatgcctggacacgtggttttggtaccgggatccgatactgcctctataacggcaacaccgaaaatctacacgcctcggtaaaaagcgagcaggcgaaaaggccgaatgaagtgctctcgcgcgaaaagatgcgtgaagagccggctccgattctggtgaccaacggcacgatgctggaatatatgatggtccgccagatcgacgccccaattattcagcaatccaaagcacaaaaatcactacgctggatcgtattggatgaagcgcatacctatgttgggtcgcaggccgctgaactggcactccagttacgtcgcgtgatgacggcgtttggcgtgacgccagatgatgtgcgctttgtagcaacctctgcaaccattgccggaagcgacgccgaaaaacaactgaaaaaattcctctctgacttatccggcataccgcaggagcgtattgacgtactggatggaagccgggtgatcccggaactggaaccgtgcaaacatgtttatcacccgcgggaagaaattgagcaacttcctgatttagatatagaagataaacatgggaacaaaattaaaggcgtaagtccggaacgcttctctgcactgacgcattcacctgaagctcgttatttacgtgagatgctggtcagccaaccaaatccaatgaagctggatgagatgacgcagcggctcaactcactgaccaaacagcattatagccagcaggatgtgctgcgctggctcgatgtttgttccggtacccaacccaatacaaaggatccggcatttcttaaggtcagggcgcatatcttccagcgtgctacccagggagtatgggcttgtgttgataaagagtgcaggctaaagcatggcacgccgctggaaaaaggctggccctttggctatgtgtatgtgaaccaacgacaaaattgcgactgtggaagcccggtttacgaactggcgttctgtaatgaatgtaacgagccacatcttctggcgcgggacaaaaatagcaaactcatccaatgggataataaaggtagcgatgagttttctttgcaggatgaagtacctgttgaacgcgacgccacagaagaaaaagttgagaaagagagtcgtttccagcccccacttattattgcggcagaaaatacccgcgaggcgggttataccctacagagactggaccgccagacgcgttgtattggggtggttaacaatgacagcatcccgctggtgattaacgatattgagcaggtttgtggcgctagtggttgtggctacagaggcatgagcggaaaacaaccgttccggcgcgcgttatttggtgggccattttatgtcgccaacattgtgccaacggtgctggagtattgtcaggactttgtcagtgaagaaagaaaagaggacgttgggcctgattcattacctgggcgaggccgccgactcatcacctttaccgacagccgacaaggaacagcgcgaatggcggtgcgcatgcagcaagaagcagaacgcagtcgcttacgtggtagtgtggttgaaatccttagctggcatcaacgcactcggacttccacatcaccgaatgccaatgcagatctaggcaagttagctgcgctggcaaaacaggcgcgcgaacaggctgaggaatatcgcagttggggaatgcctgaacaagcgaaactggtagaagtgcaagctgaacaacttgaacaggtctttcaggctgcgaccggtggcaaagcagcgaccactctgatctcccgcacctggacggaaatggtcaatgagattaaagagaaagccgatattcgtggccccattctgaaatataaccactatcttacgcctgaagtttttaataaaaacggcggcccgctgaagctttctgaaatgttgcttttccgtgagtttatgcgtcgtcccaagcgtactaatagtctagaaacgcagggattagtccagattggttatcaaggtctggaaaaaacatatcaggctccggtgcactggcaggaaaaagggctaacgctcgatgattggcgtgactttctcaaggtgaccctggatttttaccttcgtgaaaacagcttcatgcaacttgatgatgagttgaaaaactggattggtagccgtttttcatcgaaattcgtccgtaacccggaattgaaagatcctgaagataatcagaacaaacgctggccacaaattcgtaatggtaatatctcccatcgtttagcgaagttgttgatgttgggggctggcttcaaaacagcaaattcagtgactattgatataatcaatacgtggctgaaagaagcatggaatcaacttactgggccacttgcaatactgaagcctgatggtaaccgtttctatttaccgaaagagcacctgaccttttcgttaatcaccgatgcctggatttgtccggtcaccaataaaattctggatacggcctttaaaggtttaaccccttatctgcccactcatatttcctttgaacatctcacccaggcgcaatacgacgcttttgtcgcgcagaaggtcgccatgccggaaatttggcagctggatcgttcacaggaagactacgctgcgggtcttgcgaaaatacgtgactgggtcagtaaggaaccattgatcgcgcaattacgttcagaaaacgtctggacggatattaacgatcgtgttgtggaaggtggtttttactatcgcactgccgagcactctgcccagcaatcttcagaacgcctgcaaagctacgaaaagatgttcaagaacgggcagcttaatgttctcaactgttccaccaccatggaaatgggggtagacattggcggcattaccgcggtggtgatgaacaacgtaccgccgcatccggccaactatttacagcgcgccgggcgagccgggcgtagtaacgaatcgcgcgctatctcttatacgctgtgtaaagggaacccgcacgaccagcaggtttttgccaacccactctggccgtttgagaccatgatcccggcaccgatggttgcgatgaattctgtccggttggtgcaacgccatgtcaatgcgttattgctgtctgattttttatgtcacgttattggcgaaacggataaagagaaaaccagtctcgacagcctatggtttttcggtgaggctgacgggcattcaaaatgtgaacgttttaaagtttggcttgagcgacctgagcttgatatcgacgcagcgctagagcggctggtgaaaggcacggcgttgcatggtgccaggcccgacctgttgcgtgataaaacaatcaacgcgatcgactccctacaacagcggtggctttccgtctatcgcgatcttgtagctcaggagcgcgagtcgcagccgcaaacgccttatcgcaagcgcatagaactggagaaaaagcgacactgcggcgaatatttactgcgcgatctggcagccagaaccttccttcctggatacggcttcccgacagatgtggtgacgtttgataacttcaccatggaagattatattcgcgaaaaatcgcagaaaagccgggataaaaaagatcgtgaagataacgtgtcgcgttataaaggacttccctcccgtaaccttggggttgccatccgtgaatatgcaccaggtgcagagattattcttgatggccgagtcttccgctctgcgggtgtctcactacactggcacaatattaatgccgataccaatgaagcacagcgtcttgattgcgcctggcgctgtcacaaatgcggaaccatcggctatgaagaggggatgagcagctctggggtgctctgttgtaccaacagtgcctgtggtgaaaaaatcatcctggataatcgccgccgggtgctacagcctaccgggtttgtcaccgatgcgcatgcgccggtaacgaacaatattgaaaccatgaaatttatcccggttgtccctgcctgggtatttgttaaagcagagcccgtgccactgccgaacccgataatgggatatatggcttctggcgctgatgggcatgttttccagcaaagccttggagaaggcgggcatggttatgcattgtgcctgagctgtggtcgtgcagggtcgatgctgaatgcaaacgatgcaccgaaaagtatggaagctcactacccaccgcgtccaggaaaagcggatcgcgatagccagaatcagcggcttatttgccccggttcgacggcgcttatgaagaacatcacgttgggtgcgttggcgcgaacggatgtctttgagatggttctgcgcaggccgcaaaacggcgaatatttaccggataacaccgaagaggggcgaattgttgccattaccttggcggttgcgctgcgtcaggcgctggcgggtgttctgggcatctccgccgcagaactgggctacgccgtgcgtccggtcagattggacgatgggcaatcagcattagccatacagctttacgatgtgatcagcggtggtgccggttttgcctccagtgcgccattgcacattgaggctattctactgggaatggtgaagcagttaggctgccgccattgtgatagcgcatgcagtgaatgcctgctcgactctcagactcgtcacgatcatgattcgctggatcgtaaagtggcgctggcctggcttggagatgacttcacgtattacattggtttgcctgatgaagagacattctcgctaccggatgctcgctactgcccgggcaacattggcgatgcggttcgccgggcgattaaccaaggcgctgaaaaactcacgttgtggctcaacgggccgctcaatgagtgggatttgtatgcccgccagttccgagcggctatacagaactaccgggtaaaagataacgttgctgttgatcttgtcatccctgctggcgtggatgacccagaactctcacatgagctttcacagtttacggtgctgggcgtgcggttgtgccatgccgaacaggatctggaattgccgattgttgcacaaatcaccttttccgatcaggtaatgacattggcctcacgcagtcagcaagcgacgatcccgggcccttgctggcacttgaatgacgaactggtggttcgcagcctcggttataaatcggtagcgctgcgcgagtttgttctgccggggaaatcagcaaactctgttgagcgggtaaaagacattcagatccacaaacagttgaatggcccgctttcgcagttcggacaacgcttctgggatgtgctgtttaacgaccatgaagaagcgcagtctctgatgaaaaacaaaaaaattgcccgcgttcactataccgatcgctatctgcaaaacccagttgctctagcgttgctgggggcgttaatcaaaccactgaagccgttactgaccgataacgcagaactggcgcttgatacgctgtttaagcctaaagaacgccgcggtaaccggccttcccatgactggatgagcgaagcggattttcaggatttcgccgaccagtggtttgctgcgttgatgggcagggcggtagacttaacggtgttcggctcgtcgcgtcatattccacatcatcgtaaactgacggtgacctttgaggatggccaaacgttgaagatccgcttcgatcagggaatgggctactggcgtatcgacttcccatcggtatggcgacattttgattttgctgatgacgtgacctttcagctcggcaaaatggcgcaagcctgccaggaagggaaggtgcttaatagtgaggaaagctgggcaacggatgtgctggtagaggtgatggagtcttaa

SEQ ID NO: 30309 - DNA, 3288 bp, Serratia sp. Ag1
ttgggtcaatcagaatgcatttcctggttaaaatgtacttcctggctaagtaattttcttaatcgtagaggattgaggctaccggatggtcgaccactatatcaatatcatgcgaccaacgatgaatacaataatctaacacagctacttcgtgcggttggtcaatcacaaagtaatgtcgatgataaaggttatgcagcctgttttgtccttttttgctctgaatggtatcgcagagattatgagcgaaattgtgggtggacatgggaccctatttataaaacattggggatatcattaacagcgactgaactaaggcatattatccctaaagggatggaaagctattggatccgcccaattcgattttatgaatcggaacgacgtaattttctcggaacattattcagtgagggaggactgccattccgcttgctcaaggaatcggataaccatttccagacgctattctcccggatcctcaatcaatatgaacaggcacaactggcgggattttccgtactttctctggtaagaactgtcctggaaaagtcaacactacccattgtttttagtgaagacacttctgtagaactcatcagccatatagcagaaaaactcagctcgttggtcctgttgtacaacctgagtaatcataccgaaccagtcaggcagcttgataaggttcatcctaaatggcgggatgagttcccaataccattggacgatgaaacaggcacccactttctcaatgggttgttatgcacagcttcggtagaaaccaaatcccgcttacaaaaaaataagcgtaccgtttgtcaattctattggtcggaaaactatccggatcaaatacgagcgatagtttcgctgcccgaagaactttctttcccaatcatcagcgcaccatcaactacgcgttttgaacttgccatttatgaagatggtgacgaagttgctagtcttggccctgcctatgctactttagaaaatgcgcatgctagagttcgcctacgtaaaagtgaatcaagatttgccagacgtgaaccatctgcgagtttatctttagttgcgcgggctggagggatgattgttggtacaataaaactgggtgatagtgaaatcgctgttggcgaggtaccacttacttttgttgctgatgagggctgctggttattgcaagggcaagcttcttgtagtgtacgtaacagcgatgtccttattgttttacctcgtgaaaagaccactctttctggatacgaagcttctccgagtacagtgtcaatattagggttcaaaacactctatgtaaaagggtgccaggaagtcactatttccggggatgaaatataccggatacgcaccgggagagagcaatctaatctagggggatttgatttttatggtaaccgggtgacctggaattgccatcctgatgaaacattccttggtgtacctaaagttacggcgaaaaatctggatattgaagatatacagttcaaacgttacctgaatggcatattgttagatgaatgccaggtacaagagatgatgggagtgcaatatatttctgtcagaaatactaacaatgaaacactactacgtcgaaaaattgggatattgccagcagattttactgttgaaataaatggaagagaggaagccaatgaaggctctattgttatctcaacgcaacatccctgtatgtccgtcttaaaaaatagaacactggaggttgcgcgtaaacgcacggcgggacgtaccgaaatattactcaaagcagaaggaatgccacctgcgtttgtttctctgcagattcgtccaaatttggtagcagaccctgtagagattgttctacctttcccggcgaaaggctgcctggtctttgatgccaatggaaaccctctggataaaaatatcactctgcatgatttacttggctccagagcctatttgtttggtaaaaatggcgagccgacacgcttttcactggagttacatttgcgctctataagtgggctacaggcatggcatgaatggcgttatacggcgggagaacaaccggtcgaacttaatttatatagtctgagagagcatatcgaaaatttgctgtctcttgagacgggaattgaccaagttgtagagatgcggatcaaaggtgctggctctgcgataagctggcagatccgtcgctacagatacagtttgcgttatgattacgaaagagaacttctcatcagccagtcagctaattatcgtgccaggcaaataccttccccagtcatcatgctattgagtgaaccggagaggaaagcgacctctttatcatcaagaatgagcgaaggtgtgtccgtaggtgaatatgagctaggttctatcgtaaacaaaaacgggccatggttagttgttcctaaaatgggtgaggaaatggcgttccgtccttgttttattcgtggtgagccttcgttacctgcggaggggagtagcatccgttcattgcagaaagcgacccaactttttaatccccaggaggaaattaataccattacgctagtgctcgatcagatggctaacgatcctgctcattcaggctggcagtttatgcgtagcctgtacgatcaatttggctatctaccgctggcaacttttgaagtatggcgtgcgctggtacaacacccgcaggcgctggcgatgtcactcttcaaatttgaaatgttaaccgaatatctgaaccgcatagagaatgagttccccattttgtgggagttcttccccatccttgaaatcaaagccgcagccgggcgttttcaattgtttttgagccaaaaaggtgcaccggaagaaacccaagcggcactagtgaagagtatgtttcagcggttggggatcgtattcccaacgtatgccgatgaaattgagatatggttaagcgtagggcaattacccccacctattccagagttcttagttcacgagtggtatctagatcttagacgtgagcacagtgaggatcactggccagagtacggctgcaaacgtctgcatagctggatgatgtcacaaaaagatccggtgatcgacatttatccagaagcgaattatcactgttccgtggcttggttacccgtcttcgcggcggctgttgccagcggtaaaacctcttttgagactgtgtttgaccgtaaacctggtgccgtgtttttcctgaggcaggtcagggacttcgactcacgctggtttaaggccatcttccagtgcagccttttgcgttatgtttctgaaaaataa

SEQ ID NO: 30310 - DNA, 6345 bp, Serratia sp. Ag2; identical to SEQ ID NO: 30308

SEQ ID NO: 30311 - DNA, 3288 bp, Serratia sp. Ag2; identical to SEQ ID NO: 30309

SEQ ID NO: 30312 - DNA, 6363 bp, Shewanella sp. ANA-3
atgtctaaaaaaagcatttccctaaccaatttgtatacagcaatttcatcagtgtctgtcgatgcggttctcaaccaattaaatttcaggcatgacagtttgcgagcttatctacgctcagtcctctctagtcaaatgcgccacaatgatggatttttagcagagccagtaattgaagcaacatttggttggcattcatctgagcgatccttgaacgatttgactaagcagggagagttatcagcacggttggtaaagtgtatggatggtgcttttgcgccagatacggaaaaacaaaagtctgaagattcaaaaatgggaaaatcccgtcttggatacgcgacagacatagatgaagactatacctggcccgaaaatagagctccttatactcatcagttagaggcgtggaatctcctctcacaggacactccgcgttctacagttgttacttcagggaccggttcaggaaagactgaatgctttttggttccattacttaatgatttagccaaacaagttgaatctcacgatgaagtactagttggggttcaagcaataatgttgtatccccttaatgcattaattaattctcagcaagagcgtttaagtgcatggactaggggatttgagggaaagataaggtatgcactttacactggcgaaactaaacatactgcaccacccaaagcgaccagagtttttaaaacacacaagcctgaaaaagtcgagtatagggatgatataagaaatgcacctcccccaatattggtaactaactcaacaatacttgagtacatgcttgttcgcccagttgatcgtgaaatcttaacaaagtctcaagggaagctgcgctggattatcttagatgaggctcataccttggttgggacgcaggcagcagaaatatcgctgttgttacgtcggacgatgatagcttttaatgtaaaacctgagcacgtaagatttattgcaacttcagcaaccatcggtgactcaaaagattggattagaacagagaagttactcaaagaattcctctctgggcttgccggagtgagccctgaacaagtatctgtggtgcgtggtactcgatacattcctaaaattcccgacgacactgatattgaaggcaaaatttcaattccggatttagaaaaattaaatagtgcagatgcataccaaaagctctgccaaatccctctaatgcgcattttacgccaaagactaattcaatctcctatgacagttagcgagattgcaaaaacggtatatacagaacgggagcaattagaggccctgcacgcacaaaatgctatgaagttaattgatattgcaacaaatgcataccctgacggcaatccaagtcttgagcctttttttcctgttagagctcacatatttcatcgcgcccaaagaggcttatgggcgtgtgttaaccccaattgttgtcataagacggggagtgagctagagcagggatggccattcggaagagtgtttgtttcagagcgacaaaagtgcttggatggctgcagttcaccagtgtacgaattaacgcattgtgcagtctgtaaagaaccttctcttgcggcctcattggtcattgactcacatggaaatcgagttttgctatcacgagagcatgatgatttagatgagtattcggatgagattgaagataatcaagaaatcgatgtaattcttgagcataagactcgcaacaatgtgcaaatatttagctcccaatcgagcgatttagaacgatataaatccttcggaagctcagtcgaagcttatctggatctgagtaccagaagagtcaaaactcgttctgaaaacacccttgcggttaggtacacaacagcggatcgtgactcatatctccgttgcgcatgctgtgacgctacggaagcagtagcaagttcgacttttaagagagctcttcttggtgcgccttttttaatgggaaatcttgtccccgagttattgcggcatatcccaaggaaaaatgatgattcgttgttcggtgctcgtttaataacttttacggatagccgacaaggaacggcaagattttctgcaaagttgcaactagattctgagcgtaagtggtgtcgttcaaaaatctatcgcgaaattgcaatgcgaagctctgattccgaactgtataacgacccccaaattgcaacattcaacaagattcttgatagtaatcctgaagccgctactaaggattttattttatcgcagataaaaataaggcttgaagagttaaagaaagtctcattcaaattgaattgggtagctgcggttgaactcttggcaaacactgacgaaataaggttgatggcaggggacctagatgtcgaagactacatgctcccaggcgaatatagtaatcgagaccaacgcttagaaaatactaaacaccttgcagaattgtttttactccgagagtttgcgcggcggcctaaaaatgccaacaacttagaaacattaggcttggtgaagatagtttaccctgccctagattccataactgaggaagatctgcgagttggctgtcgggaatggggcactctaggtctcaatctcgatgattggaagagctacctaaagatcattcttgatttttatgtcagagaaaacacgctaattgacattcactcttatcaagtgaattggatgggcggtaaattatttgcacgccttctgcaggggcctgagtttgaaggcaaatccgaggaagagaaaaaagctatttgggcttttccatcggtgaacaaggggaaccaacataagctggttcgtatgctcgagttatttagcaaaaggtcagctaaagacaacccagagcttttcaacggaatcctcagatttgcgtggcgtactctaattaataaagaaatactgcagcattacaaggatggaaataaagagtggcgtgaaggctaccacctaaagctgagtaactcagcatcctttgaattgataacaaatgcatccgtgtgtccaattactaaccgatggttagatacgtcatttcggggaatatcgccatatttaaccagtaagactgaaatagaagattgcttggttaagaatacgaactgcaagattcctcatccagcccctgatttgttgcaaagcaatagctcgcaatcgcttcgcaactggatacgccacaatgagtttattcttaacatgaaaaagcaggggatctggagagatatcactgatgcggcacttttacccccagtcatgcttcgttctgcagaacactcagctcaacaatacactgacaatttgaagctttttgaaaaggcatttaaaaaagattttttgaatgtccttaattgttcaacaacgatggaaatgggtgtagatattggttcgctagtcatggtagcgatgaacaatgctccgccatcgacggcaaattacctgcaacgcgctggacgcgctggccgacgaggtgagagtacctctatcgtattcacgttctgtaaatctacgccgcatggtgaaagaatttttgcaaacccgaagtggccatttgaaacgcccattccagttccgaaggttgcacttgaaagtgtgactattgttcataggcacattaacgcattcctcctatctcgctatctaaataccaagtttagcaaagagaatctgccaactttgaagtctggaaaattcttcacttcggatacaggtactgcaatttatgagcgttttatgagctggttatccagtgaagctgttgatgataaatacattagccagtgcttgcgcatgatgattgtagggagtggattggcgggacaagcggaagcatctcttgtgcataaaacattgcaaaccatcgaagaagcgtcaagccattggcggaggcgttgggactcactttgtgcagaaattcagaaagtaagcgaagacgacaccggagccaaaaggcgtttgattaaacagaaagaatctatggagaaagattcgctattgagtgaactaacctcaagaggatttcttccaggctatggtttcccggtaaacgttgttgaactggttactaacaataaaatggaaaaagcaaaggaggctcacagctacccatcaaggggactggccacagcgataagggagttctctccagggagtgatatcgttttaaacggtgccgtatatcgttcgatgggccttcaattgtcttggaaagtgccacaaagccagtatgacctatctaaggttcagaaattgcggaatgctgtgagctgccaagaatgcggcttttgtcaattggacattataagcaatcaagagctaaaaagttgtccagactgcggttccaataggctcaagacgatggagtatatcgtacccgatggatttaaagtcgattataagacgccacttcataacgattacactcaaccactttatgcgccatatacagaaccgttaatttccataacagacacaacctggcaggcgctatgtcggcacgaattaggacgctttaaggtctccgacgcggcagagcttttttactacaacaatggcaatggtggtgggtatgctctctgttggagttgtggccggatggagccattggcagtcaatagtagtgaaggtcgtacttttttagatctgaaaagtcaggtgagattacttactcgagaaaagcatcctaggttgtctggtacgtcaatagatggaaatgctgactgtattaagagtgattggagcattaaagtcagttcttcaagtttacaagatggattattacaaattccttttgttctcgggttcagcagtgtaacaagtatgttcgagctacaaattagggatccaaaaactcacgagtggatatttgatcgtaagctcttgtttagtttcggtgctgccttaagacaagtttattgtgcaaggaaggggatttccacgtctgagcttggcatttcagtccatcaaaggaaaacagcatcttccgagagtgaatcagtttgtagcctttttattttcgatactgcagaacaaggtgcagggtatgcatcgtcaatccctgaggtattggcagagctttttaaagatgtctatgagtacgcgtcagaatgtccatctgcttgtgatgcatattgtcacgcatgccttttggattatgacacacagcatcatgtcgagtatttggaccgaaaatggttagttcagttttttgaagaaacaaagtttcatttgttatttgaggttgaaccttctcgagcatgctttggagaacgctcaattcctgagctcagcagtattgaccagctactatcaatcaagggtaggtcgtcattaggaatagatttgtttgtgtctgcttctgattgggatctagctgaagtttcagttttatctaaacttcatgatttgaaagggataccaattcgtttgctgttaggtaatgcggcgattcaaacactgacaccaaatttagcttggcagcttaggtctaaaattccatctcaagtggagatctcatcttatgaattacccaaggagatttcggccggctcgttcccgttattacgaatgaaatttaccgatggtgattattggtatgcaaccgatgatcagagaaaaatctcttgtaacgctcaatggggctcgtcggaaggagcatctttagtcgcggcaaaaccaatggctgttgatctaaaaaccagccctttcaacttggaagacttggcattgaagtctgagctaacaagtaacatcgcgctgatcgacgacattacgacaaagctgaatgtcccattcaatcgatttggcagttcgatatttgcgcttttcgaggagataataccgcgcttcaagaatgtgtttgatcaaggcatcgagaatgtaacttatacagacagatacctgataagcccaataagtttaggcttgatcatctctatttttgctcatgttaaagcaattatggggataagggattttgagatcattacatgccatccgagcgctgctggtgataggaaaccatactgcattgcggataacttcagcaatattgatgaagttaatgatttcatcgactcggtttgtagtacatacggaattaacgtatatccagagtttgcttccaaaaatgacatcgatcatggaaggtgcttgacgtttacactcaagaatggagaggtggttcgatttttatttgaccaaggaatggggtattgggcaactcgccgtccatacagtcggatcaaatttgatttcgaaagtgtgggggcgtttgatattaattcttggtgttttaaagttgagtcaagtggtggcaatagctacattgttgtacataaagggcggagctgttaa

SEQ ID NO: 30313 - DNA, 3543 bp, Shewanella sp. ANA-3
atggctgtggtagaacaacttaaactgtggacagcatcggttcttcagagtaggcaacacgtgccttttggtagccctttgtgggcttacaaaatcacagacagtgagcttgaagatctccaaacagttttacaacgtttgttttcaacgaccaatactaacttacttttcaataagcatctgagcgtcttatcacggccacttgttctttatatcgcaacttggcttcagcggaaaactaaatcccgtcctacttgggaacctgttacggatagcatctgcttagattacaacaccagtagccgcgcccttatactcgactgtattagagcaggtctaaaagaattcggcataaaaatacaccacactcagaattatagataccttgatactttgtattgccatggaggttttcctcgagcggatttacttggcatctctcattcacacctaatggggtattttgaagatgtacttaataattatgcaacgttcctccactcgctcacagttgatgaaatcgctgagggcaaattgtccagcttacctgaaaccttacagcagaagtctttttctaaactagcttcatcgctaattagttaccttttcgaacttagagatagttttcatctttatgagacgtctgatcctctcgcatttttggacatgaagaatccaaattggcgaaataacttaccttttttagttattgatgaagaagctagcaggttgataaacacactgctaaagaaaactagcaaagtagttagacgttcacagaacccagtcagactaaagcgttatctccgacaaaacgccgacgaattcaatttgtttagtgaggtgcatgtaaaccatacaattcatcccgaagacctaaataaggttcttggagtaaattcacttccaaacttttttgaattaatcactattaccggagacggccacagatccagagcggccagttttagttataaaactggtgctgcgccaagatggatagtttcagagatcgtgcgtcccatagttggtctgttggctgcaggcgagctcaagtatcagctatattctgatggagaactgattgggagcaatacttatcgccacggcgagtcgtttgacgatcgtgctccttggatttttgacgctgacgaacaaaaatttaattatttaggccagggtagttttcgtgacagattagcatcagtgcttgttgtgagtgactgcgaaccagcgaaatgcagtccatcctctcaagttagactattgggtaaagtcagcttctgtgaacgtaacgtctacaaaataaccggccatgtaaaaataccatcaacctttggccattttcatattcgaaccgatgctagccaactgaatctagactgcgtaaatgtcaaagggaaaaagttggtagatgttatatccgataaaccggtatacatcggtaaaccaaatctagtaattgatgaatcaaagcctggtgcattcttaaataaagaagaatatttttgggtgagcaccaatggtacgagaattccctattttagtaatacggttacttcgggaacaggtgctgttgttagggtccttgaaggcgaaattgtttgggtgcatgaatgcgtctatcttcacgatgagtttttggcagaactaattcacaatggaaaaggggaatttgaagtaaaattccggggtttggaaaatgcccatgttggtttagttcctggtcaaagtgcaattttgaccgctgagcccgaactcatagcgggctttaagttttgtgatatcagattaactgatcttctagttgacagtgttgaattcagtatctcctggtcagatgcccctgataatacaataagactcagattgcccattgcacttaatgcggtatctttgctgacaaagacgggggatgtttatagagaatgtgacctaggatgtctgacagctgacgatctcatggactgtactttcaagtttcaaccagacacatttgaaactcgggttaaagttgatctcctcgccgatgacaaagttgacatgtcagtttctcaagaaatgaatctttccgcgtctggtacaagtaaaactcttcctgcgagagctgttgctaacttagtgcgtcgacttttccgtaatggttcaactccggaacatgttgtcaggttatcgttctttgctaaaaacgaaattctggagaaccgcatacctctagtgtatagatttaaatatatacccaaaattcgcggccaattcgtttacttacctaaaactcttctattgataaagcatcttgaccaattgaagttaaagttgacaccaatttgggatcttaaccgggacactccagatttagaatttctggttgaggatggagattttgtaaaagcaaagctaccagagattgatgaatatggcggatggttactgtgggggcccggacaaacaaactttaaaccgacattgattgagtttgacgttccggttgtacgcaagaaaatagataacttaggtgcgttcggacaggctctaaagtcagcacttcagtgttctcaaggcatcactgattttaatgaacctctaaaacaagactcgatacagtatgcggttaagtatctaaagcaagagggtaacaagcgtactattaatttctcattactcgatcgtattctagaaaaaatggaaaacgatatagatcatgaaggttggtcatatttaaatgatctgatagacctcgtagaagatatcgagcctgcaaattttcatgtactcaagcgactgttatcgcgcccttcttgcttaaccttaatgcttcttagagacacctccagattccacaaggtgtgggagttggctgattatttgccgtttcagtggattctcataccaatatcagcgtggatcaaagctattgataaagttaaacggaaaaatgcttcatcactggaattgataaaaaaaacagctcctaatatttatgccgaagttgagcgtggtctatttagagatctcactgcaaaaggcctatattttaatacattggtcgatatcgctttagtcaattttactccaagtaaaaaaatctgggcggatacaaaagacccgaggggcagttcttctattggaaataaattcctgattgccaagagcaaattgtttgagcgtcatcaacacaagttgatgagtatttcacagtcaaagaaaagagatcttgagttaatcgaatgtttggataggtgttggcctgtttcttcgttgccaagcgatcttcgtggctttttcagggcaatgggggccattgaacaaagtgaagtggtaaagcgagcttacaagcttacgattgaattacccgtaaaggtggctttttataacttggatgtattcctgcaacctcttcctccaagggaattccacgcgctgagtttctctttgagtcaactgcaacagttcgacagagaatggttgcaggaggctatgtcattagccacaggggcggcatattcagctttttgtaactcagaattcacagtggtcggttaa

SEQ ID NO: 30314 - DNA, 6321 bp, Shimwellia blattae DSM 4481 = NBRC 105725
atgactacacgctatttttcgtcacttattgaacaatcgttgtctcgttcaactgaagcaacactgagtatcatgggggtcacaaacccgcagttgcgtgagcacctcgcgcaacaaatgggcgccgattgtgggaaatcaggctcattccttgcttctcccgttttccaacaaatgtttggctggaaagcgtcaaacaaaacgatgcgtagcctgacggaaggcaaggcattgctcagtaaagctgtggttgattcgctggatgatcagaacaatggacgctatcgttttggtgctgactggaaaccctttactcaccagctagccagttggaaggctctgctggaaaaaaaacattctgtggtagtgaccagcggtacgggttcaggcaaaaccgaatgttttatggtgccggtgctggaagacctctaccgggaattacatgaaaatggcaacaacccacttatcggcgtcagggcccttttcctctatccacttaacgccttaattaattcgcaacgtgagcgcctggacgcctggacacgtggttttggttccggaatccgatactgcctctacaacggaaataccgaaaatctacacgccgcagtgaaaagcgaacaggtaaaaagaccgaatgaagtactctcgcgcgaaaaaatgcgtgaagaacccgctccaattctagtgaccaacggcacaatgctggaatatatgatggtccgccagatcgacgctccaattatccagcaatctaaatcacaaaaatcattacgctggatcgtattggatgaagcgcatacctatgtcggctcgcaggccgctgaactggcgctgcagttacgccgcgtgatgacggcctttggtgtgactccagatgatgttcgctttgtagcaacctctgcaaccattgccggaagcgatgccgaaaagcaattaaaaaaattcctctctgaattatccggtataccgcaagagcgcattgacgtactggacggaagccgggttattccggaactggaaccatgcaaacacgtttttattccgttagaagaaattgagcaaatccctgatacagacatgaagggcgtaagcccagagcgctttgatgcacttacgcattcacctgaagcgtattacttgcgcgacatgctagttactcaaccgaatccaatgaagttggatgatatgacgcagcggttgaactcgctaacaaaacagcattatagccagcaggatgtgttgcgctggattgacgtctgctctggcacacaacccaatactaaggatcccgcatttcttaaggtcagggcgcacatattccaacgcaatacccagggggtgtgggcctgtgttgataaagaatgcagattaaagcacggtaccccgctggaaaagggttggccttttggctatgtgtatgtgaacaaacgccaaaattgcgattgtggaagcccggtttacgagctggcattctgtaatgaatgtaatgagccacatcttctggcgcgggacaaaaagggaaaacttgtccaatgggaaaataaaggcggtgatgagttctctttgcaagatgatgtgcatattgaaaatgatgccgcagaagaaaaagttgataaagagagtcgttttcagcccccactcattatcgccgcagagaagaccagcgaggcgggttataccctacagcgtctggaccgtcagacacgtcgtattggtgttattaacaatgacagcatcccgctggttattaacgacattgaacaagtatgtagtgccagtagctgtggctacagaggcgcgagcggaaaacaaccgttccgccgagccttattaggtgggccattttacgtcaccaatattgtgccaaccgttctggaatattgtcaggattttattagtgaagaaggaaaagagggcgtcggacctgattcgttaccaggtcgaggccgtcgacttattacctttaccgacagccggcaaggaacggcccgaatggcggtgcgcatgcagcaagaagctgagcgcagccgcttacgcggtagtgtggtcgaaatcctgagctggcatcaacgaacacagacttctgcaacaccgaatgccaatgccgatctggaaaagttagcgacgagggcaaaacaggcccgccatgaggcgaaagaatatagaagctggggaatgccggaacaagcaaaactggctgaagcgcaagccgaacagcttgaacaggctattcaggccgcgaccggtggcaaagctgcgactattctggtttcgcggacctggattgaaatggttaatgaacttaaagagaaagccgatattcgcggtcctattctgcaatataaccactatctgaagcctgaaattttcaatgaaaatggcgggccgctgaagctttctgaaatgttgttattccgggagtttatgcgccggcccaaacgaactaacagcctggaaacgcagggattagttcaggttggttatcaggggctggagaagatccataagatgccggtgcattggcaagagaaagggctgacgctggatgactggaaggattttcttaaggttacgctggatctctacgtacgtgaaagcaacttcacacaactggacgatgagttgaaaaactggattggtagccgtttttcatcgaaattcgtccgtaacccagacacaaaagatcccgaagataatcagaacagacgctggccgcaaattcgtaatggcaatatatcccatcgtttagtgaagttattaatgcttggcgcaggattcaaaaccgtaaatacggcgacgatggatattatcaatacgtggctgaaagaagcgtggacccaacttactgggccacttgcagtgctgaaacctgatggtaaccgtttctatctgccaaaagagcacatgactttttctttaatcacagatgcctggatttgtccggtaaccaataagattctggatacggcctttaaaggcttaaccccttatctgcccacccacatttcgtttgaacaccttaccaagacacaatatgacgcttttgtcgcacaaaaggtcaccatgccggaaatctggaagctggatcgttcgcaagaagactacgctccgggtctggcgaaggtacgtgactgggttagtaaagaaccactgatcgcacaattacgttcggaaaacgtctggacggatatcaacgatcgtgtcgttgaaggtggcttctactaccgcactgcagagcactctgcccagcagtcttcagaacgcctgcaaagctacgaaaagatgttcaagaacgggcagcttaatgttcttaactgttctaccaccatggaaatgggggttgatatcggtggcattaccgccgtagtgatgaacaacgtaccgccccatccggctaactatttacagcgtgccgggcgagccgggcgtagtcaggaatcgcgtgcgatctcttacacactatgtaaagggaacccgcacgatcaacaggtttttgccaacccactctggccatttgagaccatgatccccgcgccaatggtggcaatgaattccgcccggctggtgcaacgccacgttaatgcgctattactgtccgactttttatgtcacgtcattggcgaaacggataaagaaaaaaccagtctcgatagcctctggtttttcggtgaagacgacgggcaatcaaagtgtgaacgctttaaagtctggctcgagcgtccggttcttgatatcgacgcggcgctggaacggctggtgaaaggcacagcattacatggtgccagacccgacctgttgcgagataaaacaatccatgcgattacgttcatgcagcagcgatggctttccgtctaccgcgatcttgtagcccaggagcgagagtcgcagccacaaacaccttatcgcaagcgcatagaactggagaaaaaacgacactgtggcgagtatttgctgcgtgacctggcggccaggactttcctgccgggatacggcttcccgacagatgtggtgacgtttgataacttcactatggaagactatatccgtgaaaaatcacagaaaaaccgggataaaaaagatcgcgaagataatgtgtcacgttataagggacttccctcgcgtaacctgggggttgccatccgtgaatatgcaccaggtgcagagatcatactggatggccgggtcttccgctctgctggcgtctcactgcactggcacaatattaatgccgataccaatgaagcccagcgtctggattgcgcctggcgctgtcacaaatgcgggaccataggctatgaagaggggttgagcagttccgggacgctattttgcaccaacagcgcctgtggtgaaaaaatcatcatggataatcgtcgccaggtgctgcagccagccgggtttgtaactgatgcgcacgcgccggtgacgaacaatattgaaaccatgaaatttatcccggttgtccctgcctgggtatttgttaaagcagaacccgtatcgctacctaacccgataatggggtatatggcatctggcgctgatgggcatgttttccagcaaagccttggagaaggtgggcatggttacgcactttgcctgagctgcggtcgcgcagagtcgatgttgaacgcaaacgatgcgccgaaaagtatggaagcccactacccgccgcgtccgggaaaagcggatcgcgacagccagaatcaacgtctaatttgccccggttcgacggcgctcatgaagaacgtcacgctgggggcattggcgcgaacggatgtctttgaaatggttctacgcaagccgcaaaacggtgaatatctgccggatagcacggaagaaggccggattgttgccatgactctggcggttgccctacgtcaggcgctggccggggttttgggtatctccgcggcagaactgggctacgccgtgcgtccggtcagactggcagatggacaatcggtattagccgttcaactttacgatgtgattagcggtggtgcgggttttgcatccagtgcgccgatgcacattgaggccattctgcggggaatggtgaagcagttgggttgccaccactgcgatacagcatgcagtgaatgcctcctcgactcccagacacgccacgatcacgatttgctggatcgtaaagcggcacaggcatggcttggtgatgacttctcgtactacatcggtttgcctgatgaagagacattctcactaccggatgcccgctactgcccgggagccattggcgatacccttcgtcgggcgattaacgagggagctgaaaaactcacactgtgggtgaacgggccactcaatgagtgggatctttatgcccgtcaattccgggcggctattcagaactaccggattaaagacaatgttgcggtcgaccttgtcattcctgctggcgtcgatgatccggagctgttgcacgaactttcgcagtttactgctttgggcgtgcgcttgtgtcatagcgaacagactctggaattgccgattgtggcgcaaatcgcctttgccgatcgcgtaatgacgctggcttcacgcagccagcaggcaactaccccagggccaggctggcacctgaatgacaaactggtcgttcgcagcctcggctataaaacggtaaaactgaacgagtttgtactgccggggaaagcagcgaacgctgttgagcgtgtcaaagacatagagattcataaacagttaaatggtccactttcgcagttcggacaacgcttctgggacgcgctgtttaacagccatgaagaggcacagtcgctgatgaaaaaccagcaaattacccacgttcactataccgatcgctatctgcaaaacccggttgcgctggcgctgctgggggcgatcctgaaaccgctaaaaacaaagctgaccgatgatgctgaactggcgttggatacgttgtttaaatctaaagaacgttcaggaaatcgcccctctcatgactggatgagcgaagcggattttcaggatttcgccgaccagtggtttacagcggcaatgggcagagcggtagaactgacggtgttcgattcgccacgtgatattccgcatcatcgtaagctgacggtggcctttgagaatggtcagacgttgaagattcgcttcgatcagggaatgggatactggcgtatcgacttcccgtatgcatggcgtaactttgactttactgatgatgtgacttatcagctagtaaaactggcgcaagcctgccaggagggcaaagtccttaatagcgaggaaagctgggcaacggatgtgctggtagaggtgatgacgtcttaa

SEQ ID NO: 30315 - DNA, 792 bp, Shimwellia blattae DSM 4481 = NBRC 105725
ttgcagaaagcgacccagctttttaatccccagtctgaagttaataccattacactggtacttgaacagatggctaacgatcccgctcattccggctggcaatttatgcgttgcctgtacgaccaatttggttatctgccgctggcaacctttgaagtttggcgtgcgctagtacagcatccacgagcactggcgatgtcgctatttaaatttgagatgtcagctgagtatctgagccgcattgaaaatgagttccctattttatgggagttcttccccatcttcgaaatcaaaactgcagccgatcgatttaaattgttcctgagccaaaagggtgcaccggaagaaacccagaatttactggtgaagagcttgtatcagcgattggggctcgtttttccgacatatgccgacgaaattgagaaatggttaagttatggacaattccctccgcccattccagagttcttcattcgcgagtggtatcaggagcttttacgtgagcatagtgaagctcgctggccagagtacggcagcaagcggctgcatagctggatgacatcacaaaaaaatccagtgatcagcattaatcctgacgcagaataccgctattccgttgcctggttacccgtcttcgccgcagctgtagcaagcggcaatacctcttttgaagccgtatttgaccgtaaaccgggtgccgtatttttcctgagacaggtcagggacttcgattcccgctggtttaaggccatcttccagtgcagcctgttgcgttattttgctcaaaaataa

SEQ ID NO: 30316 - DNA, 6321 bp, Shimwellia blattae DSM 4481 = NBRC 105725; identical to SEQ ID NO: 30314

SEQ ID NO: 30317 - DNA, 811 bp, Shimwellia blattae DSM 4481 = NBRC 105725
ccaaagtagtattcgttcattgcagaaagcgacccagctttttaatccccagtctgaagttaataccattacactggtacttgaacagatggctaacgatcccgctcattccggctggcaatttatgcgttgcctgtacgaccaatttggttatctgccgctggcaacctttgaagtttggcgtgcgctagtacagcatccacgagcactggcgatgtcgctatttaaatttgagatgtcagctgagtatctgagccgcattgaaaatgagttccctattttatgggagttcttccccatcttcgaaatcaaaactgcagccgatcgatttaaattgttcctgagccaaaagggtgcaccggaagaaacccagaatttactggtgaagagcttgtatcagcgattggggctcgtttttccgacatatgccgacgaaattgagaaatggttaagttatggacaattccctccgcccattccagagttcttcattcgcgagtggtatcaggagcttttacgtgagcatagtgaagctcgctggccagagtacggcagcaagcggctgcatagctggatgacatcacaaaaaaatccagtgatcagcattaatcctgacgcagaataccgctattccgttgcctggttacccgtcttcgccgcagctgtagcaagcggcaatacctcttttgaagccgtatttgaccgtaaaccgggtgccgtatttttcctgagacaggtcagggacttcgattcccgctggtttaaggccatcttccagtgcagcctgttgcgttattttgctcaaaaataa

SEQ ID NO: 30318 - DNA, 6129 bp, Sinorhizobium fredii NGR234
atgaaaccctttgaaacgctggctgacatcagacgtcgatccgtagacgccgtcgtggcgcagctcggtaccaataacgaggccctgaaccagcaactgcgttccatgctcggtagtgagcggaccggagacggctcactcattcaagaccccgtcatcgaaggagcgcaccctttcatcacagccgccgaaagcatggctgaagtcccgccagatgtgctccgcccgcaactcgtgtcgatcctggacggactcgatgaggaagacgaatatcggtttccaaaatccagaaaacctttcaggcatcagttgcaagcctggaccaaacttgcccagcccggaaccccgcaatcggtgctcgttacgtcggggactggctcaggaaaaacggagtgctttctttttccgatcctcagtgatctcatcaggcagaccgagggcaactcggcaacattggagggcgtccaggcgatcatgctgtacccgctgaacgccctcattgaaagtcagcgggcgcgtttgtccgcgtggacaagtcccctaaagggccgcgtccggtattgcctctacaacggcgatctcccccagccggctctcccagaaagcgaacgcaaggcttcgcccgaacgccaaatcgacagacatcagcttcgctcttcaccagccccaatattggtgacgaacattacaatgctcgagtacatgctggctcgagctgaagaccaaccgattatcgagaagtcaaatgggaaactgcggtggatcgtattggacgaggcgcattcgctggtcggtgctgccgctgccgaaacagcactgctcatccgacgcgtcctgctcgcattcaataccgcccctgagaacgttcatttcgtggctacctcggcaacgatcggcgatgaccgggacaccgatgacaagcttcgacagtttctggccgaggtcgcgggcatacctgacgaccaagtgcatgtgatcaagggtgaccgcaccctaccccatcgtccgaatgccaaagccgacatgcagatcgatccatcggcagcgactcccgccgagctctacgactatttcggaggaaaggaacaggtctgggaatttatcaaaacgctcaaggaaaaaccgcaaccgctaacggcgctggcaaaagtcgccaggtccgtcggtatcgaaaccgaagacttcatgtctctgctggccgcagctgagaaatcggacccggagaccggagaaccggagcgcctcgcgccaatgagggtgcacagttttgagcgagcaattcccggtatctggggatgcgtcaatccagactgcgtcgctgcaccatcaggatggccgtttgggaagttgtttcccagcaaattcgagaactgcgacacatgcggcgctccggtggtcgagctgatcagctgtacggagtgcggagagccaatgctggaggcggaagaagacaggtcggatggtaaattgcgcccgtcccgtcggggattggagcgagacgagttccagtatgaggccgaacgcgacggagaattggacgccgagggcgacgaggacgatgacgaagaggacggcgacgcatcgcttgcccacaaatacatggcaaagcagaccatcctgttcgccgcaaccccttcaaaatcctcccgtcttatctccctgtcgaccaaggattggagcgtgcttgctggtccgactaccgactccgtcaacttgaggtacgaggaaaagtcggtcgcagagggcgtctgcccttgctgtggcgtcaatgcgctgcgcggcatcgacaatctgcttcgaccggtacgtttcggtgcgcctttcatggtcacggcggccgcaccaatactgctcgaagctgtcgatccgaagcccaacagcgaacgcacgttaccatcctctggtaggggcctcatttcgttcactgacagccgccagggaacagcccggatgtcggcgaagttccaagcggagtccgagcggaatttcgtgcgatcattcatctaccatgcggtgcaaggtgcacttgcggccgacgaggacactcccgaggtggcaaacgttcgcaccgttattgcgcaaatcgagcccctggttggcacgaacccaggactacagctcgtattggatggacaacgcgaacaattggcgaagctgacgagcgagagcgtaatcggcgtcaactggaacgcactcatagatcgcctcgcgaggcgaccggaggttgagttctggatgaaggaagtctgggaacctcgcgacccggatcgcttcggcgatgcgcacaaattggcggaattcctgctgttgcgcgagctgttcagacgcccgcggcgcgcgaactcgctagagaccctggcactggcatgcctaaaattcccgtctgtggagcgcattgcttccatgccgccggcgttcacacgccgcgggaaaacgataaatgattggcgttatttcctgaccgccatcatcaatcacttcatacgcgcgaaatcggcggtggacgtagatcgtcgcacgatgcgctggatcgcacctcagattaagttgcggccgcttctggggccggggcgctccagcggaggcgacaagcgttatgtgatttggcccaaggttcctcggaacctgtcgagcctgtccacgcctcagaccctcctcatcatggggctgaagctcgatatcgccgacccgagcgatcgtgacgacatgcaggattgccttcagatggcgtgggatcagctccaacaggtcttgaacgccgaccgtgacaatcccgcgctcgacttctcaaagtcggtcgtcgcgcctgtgaccgacggcttccgatgcccgatcactcgcaaggcaatagagatcgcacctttcggcctcactccctacgttcgcatcaattcggcggtttcgaatgccactccgctcaggatgccagagattccattccagctcatcgcgcccgacgatccagcatcggccaaatcaaaaatctcggactggctgaacaccgacggacgtgtcgccgatctcaagaaggcgggcatttggatcaacatttccgaacgcattgcgctcttcgtcgattacgcccggtctgcagaacactccgctcaacaggaaagccagcgtctccggcaatacgagacggatttcaaggatggccgaataaatatcctaaactgctctacgacgatggaaatgggcgtggacatcggctctgtttccacggtgatgatgacaaacgttccgccgtctatcgcgaactatcgccagagagtaggtcgcgcagggcggcgtaggcagccgttctccatggcattcacgttctgccgggaccgcccgctggatcgcgaagcctttggaaatcccttggcatatctcgatcgagcaatgtcacctcccaaggtcgccttgaacagtcggccaatcgtccagcgacacgtcaacgcatatcttctccgccaatacatgctggccaggggcggagacactctcaagctgacaatcggctcgctgatgggatgcccgatcaaactgctggaaggtcgggtcgaaaatgcccctgtatcgcaattcctgcaatggctcgaagacccaagcaccatccgtgcgacgaccgcggacttgaagacgctagtggctcggtccgtgctggagcaggacagcacgctggtcgaggattgccggaaggcaatgcaggaggttgaggaggtttttgtccacgaatgggaaggccttcgtcaacttgcacgcgacgaaggcgagaacatgaaagaagcaggccgagctcgcatgtcgctcgaactccagaggctttgcggcgaattcctcctcagcgctctcgctgacagaggtttcctaccgggacacggattccccacaaacgttgtcacgttcatccctcacaggtcgaagaagccaaagcaagatgaaccgtcgatggacggtcgcagacacgcgaggctgtccggcccccaacgatccctagacctggcgatccgcgactatgcccccggttcggaagtcgtcctcgacggcctcgtgcaccgctcggccggcgttctactcaactggaaaagacctgcgaccgaagaaaaggtcagagaggtccaaagcattcgccggcactggtgctgctcgcaatgcggagctgccgagaccactcttcaggatgtgcgtgtctgccgcgaatgtggtgcgcaggtactcagcgtcgaatacctgcggcccagcggatttgctgtcgacttctggaagaaggaacatgcagataccgatcggatcacatacgttgcgccggaggaacccgtcgtatcgatcgcagaggagccgtggatcgcgctccctatcccatctttggggcgcttccgcgggagcggcgaaggcaccgtgtactactcgaatgccgggccgaccaggaatggttacgcggtctgtttgcactgcggtcgcgccgaacccgagctcgatcccgctggtaattccgacgaggcccgttcgttctcgcctctggatggacaccgcccgctgagacggaaagcagccgacggcgacatcatctgcgaaggcgtcgagaagaagtggaaaatcaaacggaatctcgccctcggttacgagatcacgactgacgtcttcgagttgcaaccttcaactcgaatttccaaagcggcggcgaccgcattggttatcgccatgcgtgaagctcttgcgcgctcgctaggcgtagaggcagacgaaatgggttattccgttcatcgctccaagaacgaacttggtggtgactgcaattctctgctcgtctttgacaagaacgcaggcggcgctgggttctcgattgcgatgggctacaacatcgcgaaggtactcaaggatgcggaggaaatcctggattgcagcagtccagggtgtgttgacggctgcgcagcctgcgttcttacctcggacgctccgttcgaggacggagaattggacaggacttcagccctcgccttcgttcgcggccatctgagctttggtgctgcggtggaagtcagagaccgtttctctgatgacacggttctctcgatcgcgattaccgacgaagtcgatcgcgagcttaaacgtcgcaataatccgcttttgagaatctacatacccgaggatgccgatctcggacagataccttcgtggtcggttatgcaagacctgagcacctggtcataccgtggatatcgtctcgccgtcgtggtgccacccaagacagtcgcacgatcagatcaggcatcgaagctcgttcttcagacgctgggacacagactatccgtggacgacaggttcgcgatccatatcggcgaggcaccgatatgctcaaacggcgcgagtgttctagcgaccgtaagcgggaatggccacaccatggcttgggcgacacatagcgcttcatctcgctatcctggcatcgcctggggacagccggcagaaggctccatcttcagggggaccatccaagacaccgcgtccacaaacccgatttcaccttcggagcttctcccgcaatcgactgcgaaggtgcttcttatcgaaaagaatctggatcgttcgatgagcctcttcggaacaggcatggcagggctcatccgaaccaatctagcgaacctcggatttgaagcggacgccgcgatatcacgaattgaatataaggacccgtatgtgcggtcgccgttggtgtcaaaactgcttatcgacacggcagcggcattgttcaagtcctcgacgtcgcccgtcttaaaaatcacgaccgcgccgccgaaagcgccggtttcgcctccaaagcatatttcgaacgactggcccgacggccacttggtttcctcggtgcaagcagaatatggtcgtctgaagaacattgacgtccaggtcagcctcggcgactgcggccatggtcgatttatggagttgtcgtttaccgatgggcgcgcggccactgtgattttcgaccagggcttcggcgcttggactccaacagtccgggacagccgcacattgcatgacttcacgcagacgccgtacgcacaagcgtcgtcgatgcagaaatccaatccaatgctagcgagaaagggagtgtggccgacatatgtcgtgctaagagctggataa

SEQ ID NO: 30319 - DNA, 3252 bp, Sinorhizobium fredii NGR234
gtgcctagcgccgcttctaccccgagcgatccagccagttcctggactacggcgtttctcagcaaaagaaacctcaaagcgcctaacggtcagccgttccaccgttacaggatgaccgacgaggaattcagcgaagctggggtcgtgctcagggggctcgctgccaggcggaagctgatacctgaccagcggaccgcctgcggggtctttgcagcattctgcgctgagtggttccgacgggaggcaacgtcgaccttcaggaaatgggacgcattggcacccgatatatttccggccattcatggaaaccagaagagagagatggccgaaaatgggctcagattctggcgacgcccgcttctgaagatcaacggcgcgaatgagtaccttctttccttggcgctagagggcggtgttcccgtcaaggtcattgcggatgaaggtgcggggtggcttagggattatctgaggcacctgcttcgtttcgcgctggcggggcacgaggtcgccgcggtgcgtggctatgcccatgacgagtcctataggattaagctcagctatcggaacgatgcgtttgtcgatctctgcgcggagctggcagccgaagtcgccaaatggcgaaccgttgtcgaaagcgaggctatcgccgggatcgatcctgtttcctttttggacgccaagtacccaacatggaaggattccatcccggtctaccttccgacaggcgcggactcggcagctcgggttctcctcacggggctaatcgcggaaaagatcgaagccttctcgagccatggcatcggatgcgaaaggttccttagcttagaaggtggcgtgtggcagcctgcacttcggatacaggcaacaggggacattccgatgggtcggctccccggtgtatcgacggcgactcggtggcgcgcaacaccagccggtattttggccgactatcttcccagccagttggctttgttcgagccgccgtccgacgaccagcagtcctggcgggtccgccctttggctgacctgagccgaatgatagtcgggttcccactttcagcgaccgtcagcgttaacatcacggctaacaacagtgttcaagcgttcgattggccaaacggccagcgagctacgtccgacgttctcgttttcgatgaagtagaatcgtcggaaacccccaccctacttcgactggtcaaaacggggtcatcgagccttccgtccaagaagctgttcgtattggtgcctgcggcatggacaatagaaggcagcgacgaagccgtcggacggatatggcgggtggctgatcgaaaactgatcgaggtgaccgggacctgttacttatctgagggtggggtcaccgaaggtggtcgctatcgcgttcaagcggggagtgaacagcgcgacgaaacgatcgagctgacctcacgttcctcgccggggataagtaccgccggcgatttcgacgtgatggaagcgcccgtcaggctggttgtcaccaggaatggagcgccccgcccgatcgaacgggatgaattgttcgtcaggcaatccggaggaccttggagggcgctgcccgggggggaaattcctgacgtcggcatggtcgaactttcgtggcgcgacccgaaatccaatattcagatagaaaagcggcgcatcgctgttgttccggctggagcgtcggtcaaaggcctcttgacgacgccaacgaccgggcggatatcgctggccgaactccccggatggacgctcgcactttccaatgtcgcgaacgccgtttcgaggaatgacgccggcaacattcttatcgaattcagcggcaaaccaaactaccgtctaccggcactattggagcctcccgagggcaagccaatcccgatcctggtcccggttgccgcccgcgattcggttatcgtgaacggtgatggcgaggtggttgatgccgggcagcaaatggacctggcatctcttcgcggctcgcgggcgatttcctctcacaaatcggtcctggtgatctcgcgaaagggttccaagtcgcaggatatctcagttgaggtggacggagagtttgcgatctccacgctcaagtcggcgatcgaacagatcatggcgagcgtcgagcatcaggatgtcaagctcgatatgcatttcgttggtgattctcggcagcccatccgacttgcgaggtatcgatgggatcgcccgaggcaagaacgaggagccgtcatattttctaccgtgggcgtcgcggtctgtcgtcctgtcctcgccccagaggtcgagcgcatgctggaccatttccaacctgatcgattcagtctgcctgaagatgtgtatggtccctgcctagtttacctccgcgacggacctgacattctgacccggccactgctcctcattggggctgcggaggtacctgcgtttccttcggggtcgctgcgcactgcgctctgcctgaggaattacagtgaacttcaaacggcaatcgcggagcggctgggaaagctctggtgtgatccgaacgcaattgaggacctagcctacatcaggacgctagtcggaaaccttgacggcctaccgccgaccgcgttcgaggccctgaagaacctcccgcatcatccgaaaaccttggttcggttgctgctgggggcagctgacgacaaaagccgtgtagcggtgtggggattgcagggacagttgccgttcatctggcttggtatcccccttgagtgctggaaatgcgcattcgactttgagcggagcacgatagaaaatgcactagcgcaggttccgggctccgacgagtttcgcctcgaaatcctagttaggtacttccgggacaaactcgcaagcctggtcgacatcgagccctctctcgcggcggtcttttccgcgctcgactttcccctcgcgccccgcaccaagccgctagagaacattatcgaagacttcatcaaagaccagcggtcgcgggaaaccgaagactcgagccacgtcgttcgggcagctcccctcgcccgtcgtgtgtccgagctcgggcttgccgtgcccaatggcataagtcaccgcttcagtctcggagactttgacgcgctttacgcgccgatccttcttgctgcgagtgcgcgcgggcttgcgatcatcgaccccgacctcgaagttccacttcgggccgcgcttcacgagaacggtgctttcgtctccgaagcctatccccatttcttcaatttcttcaggaccaaacaatga

SEQ ID NO: 30320 - DNA, 6300 bp, Sorangium cellulosum So ce56
atgacccctacgcatgatccccgcctattcacttcgttgacccgggagctgaccctgcgcgccgcgcgcgcggccgtcagccagctggggctcgcctcggagccgctcctccgccacctccaagcaaccctccagcgtcgggccggcgagcctggcagctttctcgccgagccggtgttcgaggccaccttcggatggcaggaggatccgcgcaccatggcggcgctctccggggcgctcctccaccctcacgtcgttcgggcgttggaccaggcccaggagtccagattcccggcgacggcgcacccgtacgtgcatcaggtgaacgcctggagcctgctgtgtggccccgatccacgatccgtcatcgtgagcactggcacgggcagcgggaagaccgagtgttttctcgtgccgattcttcatgatctggcacgcgagaccgcggccaccgggcggttgtccggcgtccgggcgctctttctttatccgctcaatgcgctcattaacagtcagcgcgaccgcctccgcgcgtggtgcaaagaattgccggggcccgtgcggttctgcctttataacggctacacccgcgatcaggtgcccaggcaagaggagcagaagcaccccgaggaggtgctctcccgcaagaccctccgctccgatccgccgccgattctcgtcaccaacgcaacgatgctcgagtacatgctggtccgcggcgccgatgcatcgatcatcgaggcttcgcgcggcctcctccgctgggtcgtcctcgacgaggcgcacacgtacgtcggctcgcaggccgccgagattgccctgctgctccgccgagtcctgcacgcgttcggctgcagggccgaggacgtgcgcttcgtagcgacgtcggcgaccatcggggatggtgacgaggcgaggcacgagctgaagcgctacctcgcagacctcgcgggcgtcagccccgagcgggtggaggtgatcccgggccgcagggcaacccccacgttaccggaggcgctcgagcaacgcgacgaggcgctcgggccgatcgaggcgctggaaggcattcaggatccacgcgctcgcttcgaacgcattgcatcggcgccaggcgcgcggagagtgcgcgcggccctggccgagcggcaaggtgccatgtcgctccgcgagatcgcgaccagcgccaccgggcgcgacgccgtgatcgatgcggaagcgatgcatcagaccctgcggatcctggatctctgcgcctcggcggcccggcgcgccgaggagcatcagaaggatccagccgtggatcccgagatcttcctcccgctgcgctgccacgtcttccaccggaccctcgccggcctgtgggcgtgctcgtcccccgtctgtcccggccgcctcggaccactcgacagcgcggcgtggaagttcgggaaggtgttcgacgcgcgacgtgaagaatgcgacgcgctccaccgagacggcgagacgcggtgcaaaagcgcggtcttcgagctggtcgtctgccggggttgcggcgccgactatctatgggtcagtcgccgtcgagagtccggcgggatgtacacccttgtccccgcgaagcgtccgggcgacgagaacggcgacgatgggttgctctccgatctcgaggaccgggagagcgagggcgacgagagccgcgcggtgcgtcccggaggcaggttaggtccctgcctgattgggcactgggagcccccggaaaatgtcgagcctgacgcgtttcagcgtagcttccgctacgatccgagcactggcgaggtggatcccgacagcggcggcgtgaggtgcgtgatgtcgggcgacagcgcgaacctccgctgcgcgcgctgtggcgagcggcagcagagcccgggggagctcttccggcccgtcctgctgggggcgcccttcttcctgagcacggccattccgacggtgctggaggccgtgccgccgacgaaggacatcgacctgccattccagggcaggcgggtgatcacgttcagcgacagccggcaggggacggcccgcttcgccgcgcggacgcagctcgaggcggagttgaactacgcacgcagccacatctaccatctgctctggcgcgaagcgaagcagccgagcgcggaggagatcgagacggcaagaacggcgatcgaagcgctcgcagacgccgctatctcgcgcccggcactcaagggcacgctcgccgccaagcgagacgagctggagcgcctggagagccagtcgcggcgcccgatcggacgcgtgccgtggcgatatgctgtccagtcgctgctgcaggaggatgcggtccgtctatggatgccaaggcagctccgcgaccgctaccttcccgcccagctcacgccggagcagctcgcggagctgtgcatttaccgcgagttcgtcaggcgcccccgccggcagaactccctcgagacgatgggccttgccgcgctccattattccttcctggacaacatcacggacgctgacgtgccgccggaatggcgccgccgcgagctctcccttcgggcgtggcgagacttcttgaagatcaccgtcgactacctcgtgcgtggccgcacggcggtgctcgtcaacaatgactacctccggtggatgggcgccccggtccgcccgaagaatctcgcggtacccgacgcggagccgatcgacccgcgcaggaccgtgctgtggccagccatccgcggcacgaaccgcccgcccaggctggcgcgcatgctgatgatcgcactgcggctcgacgaggacgacgcggaggcgcgcggtgaggtgaacgcgctcctcgatgcggcctggcgcgccgtcgttcgggagctgacgcggatcgagggaggctactacaagctcgatctcagcaaggtggatatcgtttctgtcccatccgcgtggatctgccccgtgacccggcgcctgctggacacgacgttagacgcgatctcgccctaccagaccgaacgctgggcccagagcgatccatgcgagcaggtagagatgcctcggctgccgttccccttcggcagggacgcgctggggcgagcttacggcccggaggacgcccgggcctggctcgaggaggatccgcgggtgatcgcgctccgggagcgcggtttctggagcgagcgttgcgaccgcatcgccgccttcgccccgtactttcaggtcgcggagcactcggcccagcaggccccaggccgccttcgcaggctggaggaggacttcaagcagggcgcgatcaacctgatgagctgttcgaccacgatggagatgggtgtggacatcggcgggatcactgcggtggccatgaacaacgccccgcccagcccggcgaactacctgcagcgcgccggccgcgccggtcggcgccgggagcccgcggccatcacgttgaccctctgccagaacgcgccgcacggccaggcgatctttcagaacccgctctggccattccgcacgacgatacacgtgccccgggtgtcgctggagagcgagaggatcgtgcagcgtcatatcaacgcactcgcgctcacccgctatctctcgcggctcggcgccgagcaggtggatctggaggcttcatggttcttcgacgaggtcggtgacagcgcggcgcatgcggatgcctttgccggctgggcgcggggaaccgccgcggaagacgcgtggctcatcgatggaatcaaggcaatcatcaggcgctctgacctggagggcgtcgacccacgcgcgctcctggccgagtcggccgacgccgtgctcgcgatggccgagcgctggcgcgccgagcaccacgccctgcgccggatgctcgaggaggtcggcggtgagccgaccgagaagacgcagaatccggcgcagcgagcgatctggaaccagctcaagagataccgcggtgagtacctactgcgcgagcttgcggagcaagcattcctgccagcctatggctttccggtgggcgtggtgccgttcgttaacacgacgaaggagctgctcgacgccgaggcgaaggagcgtgcccaggccaaggccgacggcaccaaggaggatcgcctcggccgacgccgcggctatgcgacccgcgagctgccgctcgccatccgggagtacgcgccgggagcgcgtgtggtgatgaacggtgtggtctacgagtcctccggcgtgacgctcaactggcatatcgagcccggggaccgccagatcccggagctacaggcattgcgctgggcatggcgctgcaagggctgcggggctgcaggatctcgtcagctcatgcccgagcggtgcccctgcgggtccgccgacctaacccgtgtgcagtatcttcagccggctggcttcgcggtcgatctcttcagccggcccgacaacgatctgtcttcacgggcctacctcgtgccgctggacccgtggatctcggcggggagcggcccctggctggcgctgccgcgaccggaggtgggacgcttccgttacacgggcgaagggcaggtcatctaccgccacggcgggttgcatcagaagggctacgccgtgtgcctccgctgcggccgcgcggcatcgtatgacggcgagaacataccggcagacctcaaggagcactggcgcttgcgcgggggcaagagcaaggacggcgaggctctctgcgatgggaatcggaaggactgggcgatcaagacgggcctgtggctcggcgggagcgagatcacgaacgtgttcgagctcgagctgttcaaccccgcgagccgcgtgccgatccatgacgagatagccaccacctccatcgccgtcgcgctgcggcacgcgctcgccgagatgctcggtgtcgaggatcgagagatcggctgggcggtgacgccctccaagccggtgggagcaccccgccgttgcaccatcgctctctatgacactgcatcaggcggtgcggggtatgtggcgcgggccgcagagtcgctgtgcgagctcctcaagcgcgcgcaggagctcttgaggtgcagccagggctgcgataaggcgtgccacgggtgtctgttggcgtatgacacccagcacgacgccgaccggctcgaccgccggaaggctctcgaggtgctcaccgacgagctactcgatgccttccgactacccgatgagctcaagatattcggcgagtcgacgacgctcgaataccagccgctcctcgacgccgtggtccgcgaagcgcagcggatcgacgtccagcggattcagctgcacctgggtgacgacgtcaaggaatgggacctgttcagctggcccctctaccgccacatcctgcggtggacgtccaccagcaagcaggtcgtcctgatcgtgccgcgcaaggcgatcgcggcgctcgagtgggacgagagcgggacctgggccagcatcatggaggggaccggggcaaccctgcggatcgtcgaccagctcccgccggccagtagctcgccccggattgcggtcgagatcgccggttcgagctggagcagcagctgggccgtcacgtcggagacagccctggatccgggcgaggcatggggcctcgccggcgatggcgcgcgctgcgtcatcggcagggcgaccgtcgccctcgccgccgcgccaggcgcagcgctcacgcccgcacaggtgcgtaagccgcggcccggcacgtacgtcgaggtcaagatcaacaacgagctggacgggcccgtcggtgacttcggacaccgtttctgggcgctgctcgagcgccgcttcccggagctcatggagcggctcgacgccgccgagcccttggcctccgtcgagtacggcgagcgttacctcaagtcaccccttgccacccgcttgctgtacgaggtgctcaaagccctgcagaggcgcccgggtggcatcagaccagcgacgctcgtgagcgtcgacgcgacaagctcgttcaggccaaacaggcctccgacgaaggtcgatcacgactggcgcgacccggccacgaggaacaccatgatggaggcgacgctgaggcatctcgggatcaacctccgcttcacggctggcacggacatccacagagtcgcccactatcggcagatgctcctgcgctggcccgaggcgaccctgtgtctccggctggaccaggggctctcgttctgccaggcggaccctccgccgcccttccccttcgagaaagcgtgcgacgagcagcagaaggcgctgctcgccacgaagtacagcgtgcagaagcgggacgccatgccagcggtcgtctacgtgaacagctga

SEQ ID NO: 30321 - DNA, 3459 bp, Sorangium cellulosum So ce56
atggacaggcgaccccccgcagccaccaggacagcggccgccgccctacgccgcgcgatcgccgcgcggagcgcagtcgcgctcgactcgcgcagcccactctatacctaccgttgctgcgacgaggacttcacggccctcgagcagctcctttgcgagtgtgcccctgccagaacccttggcgatgaagaggccgcctgtttctgcctctacgtggcggagtggtggcgccgccgttacacgggcggcccctgggcctgggagccaatcctgcgggatgccggccatggaggcaagccccacgcctggcgagaggacgtcattcaccgcggactgaggcaatggcaacgccctctcctccgcgtcggcgatcggacgggctatatcgttacattggcgtgtgagggcggtctgcccctcagcttgatccagcggcaaggcgcccacctgcgccgctatttccgcgccttactccgcgatgctcgcatcttccgcgacactcccctgcgcgagctggcggagcgcaatgcatatcatctgcctgcgagctaccggcagccgtcggtctatgagctcgccgcgcagctcgtgaagggcgtggagaagctgcaggcgcttgcggtcggcgcggctgaccctgtagcccatctggacgcccatcaccccgactggcacaactatatccccctcaacgcggggaacgcgcttgcggcggccctcgtgcggggcctgatggatgacatcgcggcggtcgagaaggagccgcagccgatcatcgctgcggagaccctgctcacagcgagcaacgggggcttgacgatcacgcgcacgctgcgcatgccgcgaattgtgcgtactcatgacgtcgcggtcgcgctcgaaaggagctgggacacgctgccccgtacctttgagctctgcgtcgaggaggcggatggcgtgctcaccccgacggcgctggtcagccgtgccagcgaaggcgagcagggggcgatgcacgtcgagcccctggtcggcgcgttcgagcgaaccgggtcggccgcgcgggatgtctttcggatcatcgcggtgcgccggcgtgacatcttggcggcggcggaggtcgaaggcggagctgccctgggtgaggttccctgggtcttcgttcgcgcgggggaggaccacggtcaggaaggccgctggcgcctcgccggaactggcgcggtagcgctccgcaccgatgccgccctgctcgtcctgccacccgacgcgcacgcgcgtcctgaccctgggggtgacctgagcccaaggggtcgcgtacacgatgtcggctgggacgcgtacgagatccgcggccgtgtcaggatcgacatcggcgatgggactcgatgcgtcgtctcgctggctcagtcgagagacgacgctcccgagtaccacacccgaggtagccggctgggtcatctcctctctccgggcgacgtatggcgagggcttcccaggctcatggagcgccaggcccccgaccagcccgttcgcccgatttcggcggcccacctggagtggcgcccacgcagcgtgggcgcgtcgtggcgacggatggacgagagatgccttggggacgtggaggtgcgctatgcgcctgacggcgagcagcgattccgggcccggtggaccgtcttgccggcgacagccgagatcaggctcatccccgggacgaacggccatggcgagctcgtacttcacggattcggcgactgccgtgtgggtgcagtgccgctgagcgctgcgcagcagcggggcgggaatggcgagctcaagcttcgcttcgagagtagcggccccgcccccacgagtgtccggctctacatcgactttggcgggcaccggagcaccgcggtcgacgtgccttatccgaggcgcgaggctcgattccttgcgaggagcggtcaagacctgccggacgaggcgacgatctgggtcgagcagctcgtcggggtgcgcgcgcaagtgctcgatgcccaagccggcggtcgcttctatgtcgagggcgtcctgcaagcgcgcgacgctgatcccaccaagccgctcaccgtcaaggaagagctcctcgaggtgggccctggccgccatgagctcgatcttcgggctcttgccggcagcatcaaggctctgctcagcgcctcccaggagctggacgcgaaggccaagctcacgctgcaggcacacggaggccggcagcttgcacagcgtcgattgctggtcgcgcattacgacggagcgctggatcgttcagcggaggagctacggctcgaaccaaggagcctcgcccgccttggcacgaccgtcgagtcgctccggctggaggctcgcccgctcgaggatcctgtcgcgccggcggtgcaggtcccgaggatcgaggcaggtcggtggcggttcgtcccgccgccagatgcccgcggtccctggctcatcaccggctgggagggccggctgtctcggctcaggccgctccgtgtgacgctcggcgatcggccgccggtcggcgcgcggacgccaagcgctgcgagaacgctctcccttcgtgagatcacgtacctgtccgagcgatccgctcggttggtcgccttccgagagctcatcgaccagctcgcccgcgatcctgatgcatcggactggagcgcgctcgatgcgctgctcgatacactgggcgtcctgccagcagcaacgttcgaggtgatgccacgcatcacggaggctccggaagcagtggcgctggccctcctgaggtgccccagcgcagttgcgctggagagccgttggcgtggattggagacgcttcccttcccggtatggctggtaccggtccgcgtctggattcgcgccaccaggcgatttcacaaatcctaccatcgcgcgtgcggcgggaaggacctcgacccgatggacatgttcgcgcagacgctccggccattcgtcgacaaggcgcccgttctcgctcccgtcctcggtgtggtcgtggacgccatgacgctgacattccggggaattccagcgcccagggatcgacctctgtggcttgccagcaaccccggcggacagcgagtgctccgcgagcggctcgagcagtgccggcaagcgctcctccaggagcacgctggcagcgactcgcgctccgatccggtgtggcctaccggaaatctcccgtacgccgtcgcgagcagcgcgctcacccgcctccggctctggccggagaccgacgggatcgccgagcggaaggacgtgctcagcgcgccggcgctcgccgcatgcgccacggtcgacgatacgttccgcttcagctcccatcagcagttcgagctcagccggctgcgctggttcgacccgacctggttcgacgaggcgcacgccttaatagccagcattctcctcgcggatacgctctcacggaacagcggatacctcgatgacccctacgcatga

SEQ ID NO: 30322 - DNA, 3936 bp, Sphingobium chinhatense IP26
atggatgttcatcggcgcttgcaggctggcctcgcagaagcggtcgtgtctcgtgctggcatcaggcatgagggcctgaacgactttctccggcagaacctagccggcacggatccctccaagggtgccttgctgtcggaacagctctttcaggcagcacccggctatgtttcgtcgggcaagcgccctgacgaactcacttcactgcttcatccgcgcacgatcgacgcaatcacgaaaacgcccgatgcggagttgcggttcgattatcctgcctacgcccaccagctgaggacctgggagcttctgcgcaatgcagacccgcaatctgtgttggtctctagtgggaccggttctggcaaaaccgagtgcttcctcgttccgctgcttgatgatctggtccgcgcatctgaagcagagggtcagctgaccggtgtgcgagccctcatgctgtatccgctcaacgcgctgatcgcgagccaggagaagcgtctaacggcctggaccaagccgctcaccggcgatgtgcgcttcgccctctacaacgggctgatgggaacagcgcggaaatcaaaccgcgacaaggccgagcacgatgtcccgcatcaggttctttaccgcgaaacgctccgcgcgaacccgccccccatcctcgtcacgaatcagacgatgctggaatacatgacgatccggcgtgaggatcgtaagatactcgatgcgtccaggggcaagctgcgttggatcgtgatcgacgaagcgcatagctacatcggttcagccgctgcggagctgtcgttgctgcttcggcgcgtcatgaatgcgttcgatgtgacgcccgatcaggtccgatttgtggcaacgtcagccaccataggatcggcagaagacgcggaggcagtcgcttcactgcagcgcttcctctccgatatcgctggcgtccaacttgagcgcacacatgtcgtaatcggcaagccgcaaccggtggatctttcgaaggtcttgactgcatccgacgatccggcggcccgcgtagtggccgagatgctcgaaaagaagccgcagaccatctcatctctgtcatccgtgacgacgtctgcagagaagatcctgctcgacctgtctgcgcacaatgccaaagagatcaggccggtgctgccgatgcgcgcgctcagttttacacgcgccattcctggcctgtggacctgcattaatccgggctgcaccgggggcacacggccggacggctggccattcggcccggtcctgtttgatcagaaggacagttgcccacactgccagtcgctggtgttcgagatccagagctgcccggattgtggcgagccgttcctgcctgctgacgatttgggcgacagggtcttgccgcggcgcagcgatcaagacaccgatgagtttcgcgaaaatagttatcgcgatcgggaccatgacgaagacgaggaggaagagcggcaaccggagggcatcgggcatccgcgcctaatcgctatcaacgcgcaatcccagtcgacgcttgttggatttgacgtcgtcagcggcgaattgaccgacgacacgagccaattctcgctgacgcagttgaacgaggggcgttgcccggcctgcctcagcaacaagcgccatggacggcccgccatgctgtcattccggttcggcacaccgttcctgacccagaatgcggcgcccatcctcctggagggtgtttcaccgcaccaggcagagcatgctttgcctttcgatggccgccagctgatcagcttctccgatagccgacagggcacggcccggtttgctgccaacatcgagaccaacggcgagcgcggattcgtacgcgggtttatctaccatgcggtgcagaaggcggctcaaggcagcgacctccccgaggagaagctgcaggaactaatccagaagcgtgcaaagctcgcgagcctggtcgatgaaatgccttcgtttaaggacgacatcgcaaagattgacgccgagcttaacggtgtcggcacagccggcattgcgtggaaggacctagtatcggctctggcctccgagccgacaatcggcatgatggcgaaggtctgggacctcgaccgcagcgagcgctatcacgataatcgtgaagcacttgctcgcttcatgatgctgcgagagctcgcccgcagaccgcgcaacgccaacgccatggagacgttgggccttgcacgcttgcgtttcccggatatcgaacggatcggaaaggagaagctgccggaggccgttgcggcaaaaggttactcaatcgaggactggcgcgacttcctgtatttcatggtcgactatctccgaagctattttgcgttggacgtagacgacggcgacgctcgttggatgcccggtcgggcgcgtccacgaaatgtaatcggacctgatcaaccccccggttccaaaagggatgtcctctggccctcagttaacacgaaaggtgggcaaccgactgccgtcctccttcttgctaccgccctgggtttggttatctcggagccgcgcgatcgccacgaaatcaatcaactccttcgcacagcgtgggaacacatggcgccgcttctctccggtgtcggcggcacattcagtctgcgcctcgagaaaaccgcagagatcgaagccgtgacccagacctggcaatgcccgctaacgcggcgggtgctgccccggctcgtgttcggtcgttcgccaaaccttgtcaccacgggaactggaaggttcgacggcaaggtggtcgcggaagtcgaattcccgaagctgccgcatactcggccgctcaattccgaagctaagcaaaggcttgctgactggctggctgacgacgagcaggtgcggtccctacgcagccagcgtctatggaccgatattcacgaccaggcggcgctggcgactccttatctgcgcgccgaagaacatagcgcgcagcagccgccgcaccggctgcgcgatttcgaggagcagttcaagcaaggcgacatcaaccttctggcctgttcgacaacgatggaaatgggcgtcgatatcggctcgattgaggcggtcctgatgacgaatgttccgccctcgattgccaactacaaccaacgcgcgggtcgagcgggtcgacggggccaagggttttcgacgagtctgacgattgctcgcaacaccccgctcgatctggaaacgttcgccgatcctgccagctacctcgcccgcaagctcgcatcaccgcgcgtttctctggattcggaccgtatcgccctgcgccatgcgaacgcctatctgctcgcacaatggttccgggaggtggacggcgagttcgcgcggaccaagacgggcgatttcttcggctgccgcgccgaccttcgacctttcgaagggctgccgcccgtggacgccttctgcgaatgggttcaactgcccactactgctgcaaatacagacgctgggctcaaacgcctgctgaagggtactggtctcgaattcgacaccgcaatacgtgagcacactgctgcgatgttcaagcaggaggcagcaaacttccgacggacttgggagcgcctgaaggacgatgccgatgcgcttgaaggtcctgcaaagaaggcaatcgagttccaggcgcggcgcctgtgcaaggagttcctgctcaaagaactggccaatcgctccctgatcccgggaagcgggttccctacagccgttgttcccttcgataccttgtgtgctgaaacccagaaggcgcaggagcgtcttcgctcggacggggagggaatccggaatcggcgttatgaatgcccgacccgcaatgctgacattgccatccgagaatatgctccgggggccgaggttgtggtcgatggactcgtctggaagtctgcaggcgtaacgctgaactggctaagcccgattgatagcgggcag

SEQ ID NO: 30323 - DNA, 3117 bp, Sphingobium chinhatense IP26
ttgccccgcccggccgatttaccgctgtatcgatataaactggcggcgggcgcgttcgagcggatcgcgaagaagctgtcatcgagcctggcgtcggatatgctccggccctttcttgctccggccttcgttctttgggccgcggattggtttcgtcgctcctatcagggagggaagccgaaatgggaagatattggctcggccttaaatgtgcatctcaattggtcggagtggatccgacttgccgaccaaggcttcgaagcttggaaaattcctcccctaatcagagcatcggacaagagtaatcagcgccttgccaatctcgcccggcaaggaggatttcccgcggcagccattgagagcggggcaggttggccgcggaagtatctcacaagggctgttggcgagcttttgggctcagatgtccaggacatcggcaccgcaatcgccacctgtgagcgcaacgaatacctcctgccgacgatctggcgcagccaggaaatgtatgcgatctgcggtgagctggcgctcaagattgtcgaattgcgcgcattcgttgacaaggaagtgccggccgatggtcgtccttactcggcgcggctggaccagtcgcacgaggagtggcgcgatgaattgccaatgaccctggatggggcggcggcgggtctgatcgatacgttgctggaagcaaaaaagctctccagtagcggcagcattcgcgttggccggatgatgtctcagcatggcgaagattggcgtgaatgcctcgacttccacctcgatggacggtgggacgacaaggaccaggtgctctcacccggcgatcacattcgcgtgttcctccagccttccgatggattggcggaccgaatttccggcagactggcctatcttgagcacgaggacgcgaaccgctggatcgcaagaccgatgcgaagtgaagcggcaatcgagtttccattcgacctgccggttacgaccgaatttcacgcgcgcggagatcgactggcacgcagctttatgctgcctggcggtaagcccgtgagcggcgggcttcgtgtattcgaaccgcgcgccacagatgccctgcgcacaacctttgctctcatcggccaagggtccggcgcttacaaagcggagcctgtttttatcgatgttcctgaggactggtcagttcgagggaaagacggcaacgccgagattgagcccgaagattttgccttcgctccaaggcgttgtctttaccggtgcgcgggcacaattatagctcagaagagcaacggcgacagtttccttgtgcgaaccggacagagtgcagaccgcaaggaccgggtctcgatcgtggccgatgcagtttccggggtacagacgcctgatggtgaacaactcttcaagcacccgctccatgcgcaggtgtccgatggtctttcacacagggtcgcatcccggggagaggtgcgttggcggattgccggccaacgtagctggtcggaagacctggccactgccggacccgggttgtgcgaattcgcttggctcgatggtgtcacaggccatgtgcgcgatcggctgactgcattcgttctgcccactgactttgcgctgacacagcggagcaacgggacccattccgatatcgagctgagcggttgggatggggcagctgtgcttggcgacgaagcaccgagttcggagcacagctggcggatacggattgatcctcctcgcctggccttgctaaccttacgcctggctgccgctcaaactcctgcgttcgatcttaaagttccgctccaatcgaaggaatggctcacaacctggtacggagatctcctcccgcgcgacgcagttcttggcctggccgatcttcgtgacacggtggcacgcgctccctcgacttcgatcctgatgggggacgttgcccatcatgctgacgctgcgttggacgccaactggcgaattgatcgggaacttggcctgtccgcattgcgaacggacattgcagctctcatgcgcccccttggcatcgacgctcaggttaggctcgattttcataacgggagcaatgaccactggtatgtaacggagtttggcaacattctcgagcgggagccaagcggaggcttgcgcccgaaaaccgcgatagtcggtgaggatgttagggtatgtggacgctcactcggggctcccgagaaagagctcgaatttggcagttacgacggcctgcaaagtggtcttggtggccagctcattcacttaccgcatctcaaaggtgattggctcgtctatcttcgtgagggctcccgcgtcctcactcgacccaaatttgtctcaggtgaccctgatcccgaagttccacagcaccagctcggccgggccatggcccagccattccttaaggcgcaagaagacctgcagtccctcgttaccgatatagcgcaggatccgacgacggcagaggccggtcaaacgatccaagtcgtcatgaaactggccttgtcgctaaacggcctcccaccgcagacattcgagatcttcagcaaactggtacacgccggtgcacttgctcccctgctactgtaccgctgtgaagaacagcacctgtcgaccatactcgaattgttcgacgggctttgctcgagctggatcctcttgccatacggcgcatgggattcagctttccaggcccaagggctctatctcgttacccggctggatgatcccaagtgggcattgaccagactcactgagcgccagaatgaaatcgcagcacgtgctccccagctggctcctctgatttgccgcgatttttcgccgtcgacctgggaggacgtgcgtagtcacttcacggatcacacgagcgagggcatcagcacagatgccggtggcttcaatccatttcgccccgctttccgcgagctgctcccgcaggaaaactttctcgaatccctcatgcgcgtcttcgacgccccgtttgtcgcagccttggctgctatggggcggatcacactcgacaaggtacagattctaacggtgaaagacgtcgagcgacgtcatcccacatacttcgccaaggcctatggctacgcccttacggagctcaagaatgaccgctga

SEQ ID NO: 30324 - DNA, 5970 bp, Sphingobium chungbukense
atgtccgctaacgatccatcccagcctgcccacttgtcgccgatggctgtccaccggcgcctgcaagcagggctcgctgaggcagtcgtatcgcgtgcgggcatccgccacgaggggctcaacgcctttcttcggcaaagtcttgctggcacagatccggcgaagggagcgctcgtgtccgagcagcttttccaggcggcgcccggctatgtctcctctggcaagagccccaatcagctcagcgcactgcttcatccccagacgatcgaagcgatcacccagacgcccgacgccgcgttgcggtttgattatccggcctatgcgcatcagctcaaaacctgggagctgctgagcgagatagacccgcaatcggtgctggtctcgagtggcaccggttcgggcaagaccgagtgcttcctcgtgcccatgcttgatgatctagtgcgagcgtcggaggccgaaggccagctcaccggcgtgcgcgcactcatgctctatcctctgaacgcgctgatcgcgagccaggagaagcgcctgaccgcatggaccaagccgctcaggggcgacgtacgctttgcgctttacaacggtcttatgggaacggcgcgcaagtcgagccgcgataaggccgaacacgaaatcccgcaccaggttctctaccgcgaaaccctgcgcgccaatccgccccccattctcgtcaccaaccagactatgctcgaatatatgacgatccggcgcgaggatcgcccaatactcgatgcatcgcgcggcaagctgcgctggatagttatcgacgaagcccatagctatattggttctgctgcagccgagctttcactcctgcttcggcgcgtgatgaatgccttcgatgtgacgcccgatcaggtccggtttgtggcgacctcggccaccattggatcggcagatgatgcagaggctgttgcctcactgcagcggttcctctccgatatcgctggcgtgccgcttgagcgtacgcatgtcgttattggcaagccgcagccggtcgatctttccaaagtcctgaccgcatcggatgatcctgcggcaaggcaggtggccgagctgctcgaaaaagaaccgcaaaccatctcggcgctgtcttctgtcacgaccgcagccgaaaagatcgtgctcgctctctctgcgcacaatgcaaatgaggcgaagccggttctgccaatgcgcgcccatagcttcacccgcgcgatcccgggcctgtggacctgtatcaatccgggctgcagcggtgaggtaaagcccgcaggctggccgatcggctccctcctgttcgagcaacgggacagctgcccgcattgccactctctggtgtatgaggttcagagctgtgcggattgtggcgagccatacctgcccgccgacgatatgggcgacaggctcctgccgcgccggagcgcacaagataccgacgagttccgcgaaaacagctaccgggatcaggaccatgacgacgccgatagcgacggggaagagcagcaagcggagcctatcgggcatccgcgcctgatcgcgattaacccgcaaaccagttcgacgctggtcgggttcgacgtggcgagcggcgaattcttggatggcaccggtcacttccatcttacccagctgaatgagggccgttgtccggcctgcctcggcaacaagcgtcagggccgcccggccatgctgcccttccgcttcggcactccgttcctgacccaaaaagccgcgccgatcttgctcgaaggcgtgtctccgcatcaggcagaccacgctttgccttttgacggccgccagctgatcagcttttccgacagccggcagggaacggcgcgctttgctgccaatatcgagaccaatggcgaacgcggctttgtgcgcggcttcatctaccacgccgtgcagaaagcagcgcagcggaccgcattgtcagaagaggcgcgggaggatctgctcaaaaagcgcgcaaagctcgcgagctttgttgaggaaatgccatcgttcagggatgacatcgcgaagatcgacgccgagctcaacggcgcgggtggttccggcattccttggaaggacctggtatccgcgctggcgtccgagccgacgatcggcatgatggccaaagtctgggacctcgatcgcagcgagcgctttcatgacaaccgcgaagcactggcccgcttcatgctgctgcgcgaaatggcccgtagaccgcgcaacgcgaacgccatggaaacgttgggtctggcgcgtctgcggttccccgacatcgaaagaatcggcaaggacaagctgcctgagatcgtcgctgccaaaggctatggaatcgaagactggcgcgactttctctatttcctgattgactacctgcggggccagttcgcggtagacattgacgacggggatgcgcgttggatgccaggaagggcacggccgagaagcatcattggacctgatcagccgcctggcgcgaagcgcgatctcgtatggccgtcggtcaacacaaagggccggcagaccgattccgttctccttctggccacagcgctgacccttgagctatcctcggcgaaggatcggcacgatatcaacgagctccttcgcacggcatggcaccatctgacgccactgcttgcgggcgtaggcggcacgttcagtctgcgtctggaaaaggccgccgagatcgaagctgtgacgaaggcctggcaatgtccgctgacgcgccgggtgctgccgcgcctcgtgtttggcagatcccccaatcttgtcagttccggcatcggtcggttcgacggcaagatggtgacagaggtcgagtttccgaaattaccgcagtcccggccgctgagttcgcaagccaagcaacagctaaccgcatggttggcggagaatgaagcggtcacgacacttcgcggcgcgcatctctggaccgacattcacgaccaagctgcgctcgcgacgccctatttgcgcgccgaagaacatagcgcgcagcagcctccgcatcgcctgcgagatttcgaggagcaattcaaacagggcgatatcaatctccttgcctgctcgacgacgatggagatgggcgtcgatatcggctcgattgaggcggtcttgatgaccaacgtcccgccctcgattgccaactacaatcagcgcgccggtcgagcgggtcgacggggccaaggattctcgacgagcctaaccatcgcgcgcaacgccccgcttgatctcgagacgttcgcagatcctgccagctatcttgcccgcaagctcgcctctccgcgcgtgtcgctggattccgaccgcatcgctcagcggcacgcgaacgcctatctgctcgcgcaatggttccgcgaggtagacggcgagttcgcccggaccaagacgggcgatttcttcggctgcagagccgaccttcaatcgttcgaaggactgccgccggtggacgccttctgcgaatggattcgcctgccgacgacggctgcaagtaccgacgctggcctcaaacgcctgctgaagagcactggtctcgaatttgatactgagatccgtgagcatacggccgtgatgttcgaacaggagacggcgaacttccagcgaacatggcagcgcctgaaactcgatgccgacgcgctcgagggcccagcgaagaaagcgacagagttccaggcacggcgcctctgcaaggaatttctgctcaaggagctggccaaccgctcgctgatcccgggaagtgggtttccaacatccgtcgttcctttcgataccctgtgcgccgaaacgcaaaaggcgcaggagcgccatcgctcggaggaggaggggacgcgggatcgccgctatgaatgtccgacccgcaatgccgacatagcgatccgtgaatatgccccaggtgcagaggttgtcgtcgatgggctggtctggaagtcggcgggcgtaacgctcaattggctcagccctattgatagcggccagcgagagccacagaatttgcgctgggcctggtggtgcgaacaatgcggcggggccggctccgatcaccaaatgccggactgttgtgaccattgcggcgatccaaacgtcaagacggagcaattcctcgaaccagccggtttcagggtcgactggaacgcgcagccccatgccgacaccgatcaggctgtctacattgagcccaagtcgccaaaggtcagtgtcggagatgctctgtggcagcctctgctgcagcccgagagcggtcgcatccgcgcatcgcacgatgggtatatttaccaccattcacgcgggccgaacgacaaaggctacgagatttgccttgagtgcggacgagccggggaagccggcaccgacgcgctcaaggatcactggccgctgacgccacgggacaagaaattgatcgatcgctgcccgggcaacgatcagggatacgcgattacgcgcgccctggccttgggacacgaggttctgaccgatgtcgtcgaagtccagttactagggctcgcaagcgacggcgcggcatgggcgcttggggccgcactgcgcgaaagtcttgcgcgctggctcggtattgagccgcgcgaactcggcatttccgtaaccgcgagggacggccaattgggccgaaagtcgccttcgatctacctgttcgacgaggcatcgggcggcgccggctacgcaccgagactgctcgacgacattcatcatgtgtttgatcgggcttcttatgtcctcgattgccccaaggaatgtgaaatggggtgctcggcctgtgtgctggcgccagatctctacaagcaacaaggccgtctggaccggcgggcggcgttgagttctgttcgtgcgttcctcgagaagaattccgacctgcccgaggaggatcgggcggttgtggacgccaaggctatcagcgatgccgcaaacacaattctgctgcgtgctcgcagcggggatagcgtaacggcattcctaccggaggcctttgaccttgccgaattgtcctcgatcaagatgcggtcgttcttctcgtctgcctcagcccggggcgtgccggtgacgctcgtcctgtccggcaagtcgttcaagaacttggcagaggtagaacgccggttcttgcgcgacgcggccgtgcgcaacgacttccaactggggctgggccagtcagaaagcggcccctttggaaattgccggatagcggaactgatctccttgggcggagccacagccttcttttcacgcgatgcgaatgccctgcagcccggtgaacgatggggcgttggcgaaacccatgctgtcgttgcgggcagcatcaatccgccaacgccatttgtcttgatcgctgccgatgaccttgagcgccaggttgcttctggtgacaaggtcgaggtgatgcttggatttggccaatgtccggtgggccagttcggcaagcgatttggtgcaaaactgaagcagcatatggaagcagctggcatctggcgaccagggcagctgctcagaatttcctattctgaccgctatctcaatgcgccgcttccgatgcttcttttcctgcggacctgcgaggcgcttgcggcagagctgaagggtggcgagacagtcgaagtcgacgtcgtggtgcagccgttgaaaagggaccgagtgccctatcggattttcaacgactgggatcatgagggcgaccgggaggatgtggcccaggtccttggcgaaaggcttggtctcgatgtcgctctcgaggtgactgatagcgccattcacgggcgaaagcttgagtttgagtacggagacggaagcagggcgctcgtcttgttagatcagggttttggatattggcgcatcgtcggtaacccgcccaggcacgatttccgcgcagcgccggcaacccaggctggtgacttgttccgatcgactgctgcggtgtccgggactggcgaaagctacttcgccgtggccaagcgatga

SEQ ID NO: 30325 - DNA, 3300 bp, Sphingobium chungbukense
gtggatagctcaacactaaaagaacgtgattttaaggccgagatcgcagcagcgcgcagaaatcccgagcagctgcgcaagatcgctgacgaaattcacacccttggtggtccccgcatcttgatgatccgggcgatacaattggcacgagaggccgccagcgggctgcacccgctcgggaggataggcgcggagctcgccttgccgcgcccggccgatttaccgctgtatcgctataaactggcggcgggcacgttcgagcggatcgcgcagaagctatcatcgagcctggcgtcggatatgctccggcccttgcttgctccggccttcgttctttgggctgcggattggtttcggcgatcctaccaaggcggcatgcagcgctggtcggacattgaagccgtgcttggcgtgcagcttcctcaatccgaatggcgcgcgcttgccgaccgcggctttcacgcctggggaatcgcgccgcttgttaccacatacggcaaccagcgattggcaaatctcgcgcgtcacggcggatttccggcggcggccatcgccagcggcgcgagctggccgcgccggtttcttgaaaggactgtgggcgagctcctgggcgccgatcaaccggacatcgggactgccgtcaccatttgcgaacgcaacgattatcttctcccgtcaatttggcgcagccaggaaatgcatgcgatttgcggcgaactcgcgctcaagatcgtcgaattgcgtgcttttgccgacaaggaagcgccggccgatggccgcccctattcggccaggctggaccaagcctacgaagactggcgcgatgaattaccgatgacactcgacagcgctgcgacaggcctcatcgatacccttctcgaggcccgcaagctgaccggcacgggcagtatccggatcggccgattgatgcgccagatcgacggtgactggcgtgagtgtctcgactttcacctcgacggtcgctgggatgacaaggatcgcatattgtcgcctggcgaacatattcgcgtgtttcttcaacccacgggggcactggccgaccgggcttcgggccggctggcctatctcgagcacgaagctggcaacagctggatcgcccgggccatgcgcagcgaagcggcgatcgaatttccgctggatctacccgttaccgctgaatttcatgcgcgcggcgaaagactgtgcagaagcttcatggtcccaggcggcaagccggtcaccaatggcttgcgcgtgttcgaacagcgagccggagacagcgaacaagcgacatttgcgcttatcggccagggttcgggcggctatcgtgctgaactggtgtttatcgacgtgccgcacgactggtcgatccgaggaaaggacacggcgactgagatcgaagctgaggactttgcctttgcccttggccgccgcctctaccgatgcgcgggccagattgtcgccgagacggcgcacggcgacaggttcctcattcgaaccggtcaaagtgcggaccgcaaggataagctttcgatcatcgccacggcgcttgccggcgtgcaggcaagcgatggggagcggctgttcaagcaccccttccacgccgaagtggaagatgggatgtcgcgccgcgtcgccactcgcggcgaagttcgctggcgcctttctggcgaacggtcttggcgcgatgacctggccgcagccggccccggtccttgtgaatttgcctggctcgatagcacaacgcaccatgttcgcgaccgcttgaccgccatagtgctccctgccgattttgcggtaagccaacgtacccatggatcgcaagccgagatcgtgttggacggatgggccagcacagccacactcggcggtgagccgcgttcgcaggaacacagctggacagttcggatcaatccccccaaaagggcgctactgcctctgcggctgacgccgggcacaggcccagcctttgagctccaggttccgctccggtcgaaagaatggttgaccacctggaacggcgagctcctcaggcgtgataccattctggggcttgccgaccttcgcgacaccgtggcccgagtgcccgctaccgcgatcctcatgggcgaggtcgtggggcacggcggagccgcgctggaagctcactggacaattgatggcgaactcggcttgtcagccttgcggaccgatgtcgccgcgctcatgcggccccttggcatcgatgccaaggttcggctcgatttccataatggcagcaacgatcattggtatgtgaccgagttcgggaacacgctggaatgggagcccggtggggggcttcgtccaaagaccgcaatccttggtgaagatgcgcgggtctgcggccggttcttgggcgcgcccgagaaagaagccgactttggttcctatacaggcttgctcagtggcctgggcggccaattgcttcagcttccgcgtttgcgcggaccatggctcgtctatctgcgcgatggagctcgcgtcctcacgcgccctaaatttatcgcaggcgacctggtacacgatgctccgcagcacaggctcgggcgcgctatggcgcagccgctcgaactggcgcgggaggatctccagattttggtcgatgagattgcgcgcgatcccgcaacggacgaggcaaacaagaccatacaggccgtcatgaagctggccttgtcactgaacggcctgcccccccagacgttcgagatcttcggaaaactggagtctgcgggcgcccttgcgccactgctgctttaccgctgcgaagagcaatatctgtctccaattctcgaagtgttcgacggtctttgctcaagctggacccttttgccatgcagctcttgggagacagcctttcaagcccagggactttatctcgtgtcccggcttgatgatccccaatgggcactgacacgaattaccgaccggcaaaacgaaattgcggcgcgagcccccgttttggcaccgctgctgtgccgcggctatgcgccggaaggctggaacgacattcgcagccactttaccagccataccagcgaaagcatcagcatggatgcgggcggcttcaatccattccgccccgcattcagcgacctgctgcccagagaaagtttcatcgagtcccttatgcgggttttcgatgccccgttcgcggctgctctggcggccaagggccgaattacgctcgacaaggaacaggtcctcacggtgaaggacgtcgaacgccgtcaccccacatattttgccaaagcctatggctacggcctctcggagctctag

SEQ ID NO: 30326 - DNA, 4677 bp, Sphingobium japonicum BiD32
atggctacgccctcacggagcttaagaatgaccgctaacaatatgccccagcctgctcgtctgtcgccgatggatgtccatcggcgcttgcgggccggcctcgcagaagcggtcgtgtcgcgggcaggcatcaggcatgagggtctgaacgctttccttcgccacaatcttgccagcaccgatccctcaaagggtgctctgctgtcggaacagctctttcaggccgcgccgggctatgtttcgtccggcaaaagccctgatgaactagcctcgctgctccatccccgcacgattcaagcgatcacgcaaacgccggataaggaattgcggttcgactatccggcttacgcccaccagctgagcacttgggagctgctgagcagtgccgaccctcaatccgtgttggtctccagtggaaccggttctggcaaaaccgagtgtttcctcgtgccgctgctcgatgacctggtccgcgcgtctgaagcagagggccagctgacgggcgtgagggccctcatgctgtatccgctcaatgcgctgatcgcgagccaggagaagcgtctcacggcctggacgaaaccgctgaccggcgatgtacgcttcggactctacaatgggctgatgggaacggcgcggaaatcaagccgcgacaaggccgagcacgaaatcccgcatcaggttctctaccgtgaaacccttcgcgcaaatccgccacccatcctcgtcacgaaccagacgatgctggagtacatgacgatccgtcgtgaggaccgtcagatactcgatgcatctcggggcaagctgcgttggatcgtgatcgacgaggcgcacagctacatcggttcagccgctgcggagctgtccctgttgctccgacgcgtcatgaatgcgttcgatgtgacgcccgatcaggtccgatttgtggcaacctcagccacgatagggtcggcggatgacgcggaggcggttgcttcgctccagaggtttctctccgatatcgccggcgttcctctcgatcgcacccatgttgtgatcggcaagccgcaaccggtggacctttcgaaggtgctgaccgcatcagacgatccggcggcccgcgtggtagccgagatgctcgaagaaaagccgcagaccatctcgtcgctgtcgtctgtgacgacgtctgccgaaaagatcctactcgacctgtctgcgcacaatgccaacgaggcgagaccggtcctgccgatgcgcgcgcacagtttcacgcgcgcgattcctggcctgtggacctgcattagctcggactgcactggaggcacacggccggagggctggccgtttggccccgtcctgtttgatcagaaagacagttgcccgcactgccagtcgcttgtgtttgagatccagagctgcccggattgtggcgagccgttcctgcctgcggacgatctgggtgacagggtcttgccgcggcgaagcgatcaagacaccgacgagtttcgcgaaaacagctaccgcgatcgcgaccatgaggatgaggatgacgaggaggaagagcggcaacctgatggcatcgggcatccgcgtctgatcgctatcaatgtgcagtcccaatcgacgcctgttggatttgacgtcatcagcggcgaattgaacgatggcgcgggccaattccagctgactcaattgaacgagggtcgctgccctacgtgcctcagcaacaagcgccacggaaggcctgcgatgctgtctttccgttttggcacgccgtttctgacccagaatgcagcgccaatcctcctggagggtgtttcaccgcaccacgcagagcatgctttgcctttcgatggtcgccagctcatcagcttctccgatagccgacagggcacagcccggtttgccgccaatatcgagaccaacggtgagcgcggatttgttcgcgggttcatctaccatgcggtgcagaaggcggcgcaaggcagcgacctcccggaggaaaagcggcaggaactaatccagaagcgtgcaaagctcgcgagcctcgtcgatgaaatgccttcgttcaaggacgacatcgccaagatcgacgccgagcttaacggggtcggcgcagccggcattgcttggaaggaactggtatcggcgctggcctcggagccgacgattggcatgatggccaaggtctgggaccttgatcgcagcgagcgctatcatgacaatcgcgaagctctcgcgcgcttcatgatgctgcgtgaacttgcgcgcagaccgcgtaacgccaacgccatggaaacgctgggtcttgcacgcttgtgtttccccgatatcgagcggatcggcaaagaaaagctgcctgaggccgttgcagcaaaaggttactcaatcgaggactggcgcgacttcctgtacttcatggttgactatttgcgaggtcagttcgcgctggacgtcgatgacgcggatgctcgttggatgcccggtagggcccgaccgaggaacgttattggtcccgaccagccgcccggagcgaagcgagatctcatttggccctcggtcaacacgaagggccgccagccagactccgtcctccttcttgctaccgccctgggtttggatatctcggagccgcgcgatcgccacgaaatcaatcaactccttcgcacagcgtgggaacacatggcgccgcttctcaccggtgtcggcggaacatacagtttgcgtttggagaaggccgcagagatcgaggccgtgacgaaagcctggcaatgcccgcttacgcggcgggtgttgccccggctcgtgttcggccgttcgccaaaccttgtcaccacgggaaccggaaggttcgacggcaaggtggtcgcggaagtcgaattcccgaagctgccgcatacccggccgctcaattccgagaccaagcaaaggttggtcaactggctgggtgacaatgagctggtgcggtccctacgcggcctgcatctatggactcacctccatgatcaggcagcgcttgcgaccccttatctgcgtgctgaagagcatagcgcgcagcagcctccgcatcgcctccgggacttcgaggagcagttcaagcaaggcgacatcaacctccttgcctgctcgacgacgatggaaatgggcgtcgatattggctcgattgaggcggtcctgatgaccaatgttccgccctcgattgccaactataaccagcgcgccggtcgagcgggacgacggggccaagggttttcgacgagcctgacgcttgcacgcaacaccccgctcgatctggaaacgttcgccgatccggccagctaccttgcccgcaagctcgcatcgccgcgcgtgtctctggattcggaccggatcgctctgcgccacgcgaatgcctatctgctcgcccaatggttccgagaggtggatggcgagttcgcccggaccaagacgggcgacttcttcggctgccgcgccgaccttcgacctttcgaagggctgccgcccgtggacgccttctgcgaatgggttcgactgcccactactgctgcaaacacagacgctgggctcaaacgcctgctgaagggtactggtctcgaattcgacaccgcgatccgtgagcacacggctgtgatgttcgaacaggaggccgcaagcttccgacggacctggcagcgcctgaaggacgatgcagatgcgctggaaggtcctgcaaagaaggcaatcgagttccaggcccggcgcctgtgcaaggagtttctgctcaaggagctggcaaatcgttcactgatcccgggaagcgggtttcctaccgccgttgttcccttcgataccttgtgcgctgaaacccagaaggcgcaggatcgccatcgctcggacgaggagggtacgcgagatcgccgctatgaatgcccaactcgcaatgccgacattgcaatccgtgaatatgctcctggtgccgaggttgtggttgatggcctcgtctggaagtcggccggcgtaacgctcaattggttgagcccgattgatagcggccagcgcgagccgcaaaacttgcgctgggcttggtggtgcgatcaatgcggcggggccggctccgatcatcaaatgcctgagcgttgcgaccattgcggcgatccgaacgtcaagacggagcaattcctcgagcccgccggtttcagggttgactggaacgcgcagccccatgccgacaccgaccaggcggtctacatcgagcccaagtcaccaaaggtcagcgtcggagccgccttgtggcagccccttctgcagccggaaagtgggcgtatccgtgcttcgcacgatggttacatctaccaccattcgcgcggaccaaacgacaagggctacgagatctgcctcgagtgcggacgagccggagaagcgggtacagatgctctcaaggatcactggccgcttacgccgcgcgacaagaaggcgatcgatcgctgtccgggcaatgatcagggatacgcgattacgcgccccttggcactgggacacgaggttctgaccgacgtggtcgagatccaagtgccagggcttgaaaacgacggtgctgcctgggcgctcggggccgcattgcgggaaagtctcgctcgctggctcgggattgagccgcgtgaactgggaatcgctgtagctgcgagggatggccagttgggccgcaagacaccttcgtgttga

SEQ ID NO: 30327 - DNA, 3297 bp, Sphingobium japonicum BiD32
atgcaggaacgcgatttcaaggctgaaatcgaagctgcgcgcaacgatcctgctcagctgcgcaagattgcggacgcaattcaggcgacaggtggttcgcgtcttctggtgatccgggcgatccagctggccagagccgcagatacgggtcctcatcccttgggcaaagcaagcgccgaactgggcttgcctcggccaaccggcctgccgctttaccgctacaagcttgcgcccggaatgttcgagcgcatggagaagaagttatcttccggcctcccgtctgactggcaacgtccatcactggcaccagcctttgtgctgtgggccgcagactggtttcggcgatcatatcagggcggcgtccaacgctggtctgacattgagacggtactcgggctgcggctttcgcaaggtgaatggcgtgatctggccgaccaggggtttcgcgcctggggtatcgagccgtttattacggcccacggcaatcaacggctatccaacctggcgcgtcagggcggattcccggccgccgcgatggcgagcggagcaagctggccaagaaagtttctcgaacgggctgttggcgagcttctaggctcagacgcgcaggacatcggcacagcagtcgccacctgtgagcgcaacgaatacctgctgccgacaatctggcgcagccaggaaatgtacgcgatctgcggcgagctggcgctcaaaattgtggagttgcgggcattcgctgacaaggaagtacccgccgacggtcgtccgtactcggcgcgccttgaccaggcctacgaggactggcgcgatgaattgccaatgaccttggacggggcggcggcgggtctgatcgatacgctgctggaagccaaaaaactctccagcagcgggagcattcgcgttggtcggctgatttcccaacatggcgaagaatggcgtgaatgcctcgatttccatctcgacggacgatgggatgataaggatcagctgctttcgcccggcaatcacgttcgcgtattcctccagccctccgatggcttggcagaccgcatctccggcaggcttgcatatcttgagcacgaagacgccaaccgctggatcgcaagaccgatgcggagcgaagctgcaatcgagtttccattcgaccttccggttacggccgaatttcacgcacgcggagatcggctggcgcgcagcttcatgctgcccggagggaagccggtgagcagtgggctgcgcgtatttgaacggcgcagcacaaatgcccagcacacagcctttgctctcatcggccaaggctccggcgcctacaaagcggagcctgttctgatcgatgttccacaggactggtcggtccgaggaaaggacggcaacgccgagatcgagctcgaagattttgccttcgctccagggcgccgtctttatcggtgcgcgggcacaatcatggctcagaagagcaatggtgacagcttccttgtccgaaccgggcagagtgcggaccgcaaagaccgtctctcgatcgtggccaattcagtttccggagtgcattcgcctgacggcgatcagctcttcaagcacccgctccatgctcaggtgtcagatggcctttctcaccgggtcgcatcccggggagaggttcgttggcggtttgcgggtcaacgtagctggtctgaggacttggccgctgcggggccagggttgtgtgaattcgcttggctcgatggatcaacaggccatgtgcgcgatcgactgactgcgttcgtattgcccgctgcttttgagctgacacagcggagcaacgggacctatgccgatattgaactgagcggttgggactgggacgctgtgctcggcgaggaaacgcccagttcgcagcacagctggaggatcaggattgatccaccgcgccgagccttgctgaccttacgcctggctcccgctcaggcttctgcattcgacctgaaggttccgctccaatcgaaggaatggctcacaacatggggcggagacctcctcccgcgcgacgcagttcttggccttgccgatctgcgtgacacagtggcacgcgtcccctcgacttcgatcctgatgggtgaagtggcccatcatgcgggtgctgcgctagacgccgactggcgaatcgatggggaacttggcctgtcggcactgcgaacggatattgcagccctgatgcgcccccttggcatcgacgctcaggtcaggctcgattttcacaacgggagcaatgaccactggtatgtcacggagtttggaaacaccctcgagtgggagccaaacggagggctccgtccgagaaccgcgatagtcggtgaggatgttcgggtgtgcggccgctcccttggggctcccgagaaagagctcgaatttggcagttacgacggtctgcagagtggccttggaggccagctgattcacttgccgcgcctcaatggtgattggcttgtctatctccgcgagggctcccgcgtcctcactcggcccaaatttgtttcaggcgatccggatcacgaagttccgcagcatcgacttggccgggccatggcccagccattcgttcaggcgcaagaggacctgcagtccctcgtcggcgaaatagctcatgatccgacgacggccgaggccagtcagacgatccaggtcgtcatgaagctggccttgtcgctcaacgggctcccaccacagacattcgagatattcagcaaactggtacacgccggtgcccttgctcccctgttgctgtaccgctgtgaagagcagcacttgtcgaccattctcgaattgttcgacgggctttgttcgagctggacccttttgccttacggcgcatgggatgctgctttccaggcccaaggatactatctcgttacccggctggacgatccccaatgggcgttaacgaggctcactgagcgccagaatgaaatcgcagcgcgcgcaccgcagctggccccgctgatttgtcgcgatttttcgccggcgacctgggaggacgtgcgcagtcacttcaccgaccataccagcgagggcatcagcacggacgctggcggcttcaaccctttccgtccctccttccacgatctgctcccaaaggaaaatttcctcgaatccctcatgcgggtctttgatgcaccgtttgtggcagccttggcggcaatggggcggatcacactcgacaagggacagattctcacggtgaaagacgtcgagcgacgtcatcctgcatactttgccaaggcctatggctacgccctcacggagcttaagaatgaccgctaa

SEQ ID NO: 30328 - DNA, 5964 bp, Sphingobium lucknowense F2
atgaccgctgatgatgtgtcccagcctacccgtctgtcgccgatggatgttcatcggcgcttgcaggctggcctcgcagaagcggtcgtgtctcgtgctggcatcaggcatgagggcctgaacgactttctccggcagaacctagccggcacggatccctccaagggtgccttgctgtcggaacagctctttcaggcagcacccggctatgtttcgtcgggcaagcgccctgacgaactcacttcactgcttcatccgcgcacgatcgacgcaatcacgaaaacgcccgatgcggagttgcggttcgattatcctgcctacgcccaccagctgaggacctgggagcttctgcgcaatgcagacccgcaatctgtgttggtctctagtgggaccggttctggcaaaaccgagtgcttcctcgttccgctgcttgatgatctggtccgcgcatctgaagcagagggtcagctgaccggtgtgcgagccctcatgctgtatccgctcaacgcgctgatcgcgagccaggagaagcgtctaacggcctggaccaagccgctcaccggcgatgtgcgcttcgccctctacaacgggctgatgggaacagcgcggaaatcaaaccgcgacaaggccgagcacgatgtcccgcatcaggttctttaccgcgaaacgctccgcgcgaacccgccccccatcctcgtcacgaatcagacgatgctggaatacatgacgatccggcgtgaggatcgtaagatactcgatgcgtccaggggcaagctgcgttggatcgtgatcgacgaagcgcatagctacatcggttcagccgctgcggagctgtcgttgctgcttcggcgcgtcatgaatgcgttcgatgtgacgcccgatcaggtccgatttgtggcaacgtcagccaccataggatcggcagaagacgcggaggcagtcgcttcactgcagcgcttcctctccgatatcgctggcgtccaacttgagcgcacacatgtcgtaatcggcaagccgcaaccggtggatctttcgaaggtcttgactgcatccgacgatccggcggcccgcgtagtggccgagatgctcgaaaagaagccgcagaccatctcatctctgtcatccgtgacgacgtctgcagagaagatcctgctcgacctgtctgcgcacaatgccaaagagatcaggccggtgctgccgatgcgcgcgctcagttttacacgcgccattcctggcctgtggacctgcattaatccgggctgcaccgggggcacacggccggacggctggccattcggcccggtcctgtttgatcagaaggacagttgcccacactgccagtcgctggtgttcgagatccagagctgcccggattgtggcgagccgttcctgcctgctgacgatttgggcgacagggtcttgccgcggcgcagcgatcaagacaccgatgagtttcgcgaaaatagttatcgcgatcgggaccatgacgaagacgaggaggaagagcggcaaccggagggcatcgggcatccgcgcctaatcgctatcaacgcgcaatcccagtcgacgcttgttggatttgacgtcgtcagcggcgaattgaccgacgacacgagccaattctcgctgacgcagttgaacgaggggcgttgcccggcctgcctcagcaacaagcgccatggacggcccgccatgctgtcattccggttcggcacaccgttcctgacccagaatgcggcgcccatcctcctggagggtgtttcaccgcaccaggcagagcatgctttgcctttcgatggccgccagctgatcagcttctccgatagccgacagggcacggcccggtttgctgccaacatcgagaccaacggcgagcgcggattcgtacgcgggtttatctaccatgcggtgcagaaggcggctcaaggcagcgacctccccgaggagaagctgcaggaactaatccagaagcgtgcaaagctcgcgagcctggtcgatgaaatgccttcgtttaaggacgacatcgcaaagattgacgccgagcttaacggtgtcggcacagccggcattgcgtggaaggacctagtatcggctctggcctccgagccgacaatcggcatgatggcgaaggtctgggacctcgaccgcagcgagcgctatcacgataatcgtgaagcacttgctcgcttcatgatgctgcgagagctcgcccgcagaccgcgcaacgccaacgccatggagacgttgggccttgcacgcttgcgtttcccggatatcgaacggatcggaaaggagaagctgccggaggccgttgcggcaaaaggttactcaatcgaggactggcgcgacttcctgtatttcatggtcgactatctccgaagctattttgcgttggacgtagacgacggcgacgctcgttggatgcccggtcgggcgcgtccacgaaatgtaatcggacctgatcaaccccccggttccaaaagggatgtcctctggccctcagttaacacgaaaggtgggcaaccgactgccgtcctccttcttgctaccgccctgggtttggttatctcggagccgcgcgatcgccacgaaatcaatcaactccttcgcacagcgtgggaacacatggcgccgcttctctccggtgtcggcggcacattcagtctgcgcctcgagaaaaccgcagagatcgaagccgtgacccagacctggcaatgcccgctaacgcggcgggtgctgccccggctcgtgttcggtcgttcgccaaaccttgtcaccacgggaactggaaggttcgacggcaaggtggtcgcggaagtcgaattcccgaagctgccgcatactcggccgctcaattccgaagctaagcaaaggcttgctgactggctggctgacgacgagcaggtgcggtccctacgcagccagcgtctatggaccgatattcacgaccaggcggcgctggcgactccttatctgcgcgccgaagaacatagcgcgcagcagccgccgcaccggctgcgcgatttcgaggagcagttcaagcaaggcgacatcaaccttctggcctgttcgacaacgatggaaatgggcgtcgatatcggctcgattgaggcggtcctgatgacgaatgttccgccctcgattgccaactacaaccaacgcgcgggtcgagcgggtcgacggggccaagggttttcgacgagtctgacgattgctcgcaacaccccgctcgatctggaaacgttcgccgatcctgccagctacctcgcccgcaagctcgcatcaccgcgcgtttctctggattcggaccgtatcgccctgcgccatgcgaacgcctatctgctcgcacaatggttccgggaggtggacggcgagttcgcgcggaccaagacgggcgatttcttcggctgccgcgccgaccttcgacctttcgaagggctgccgcccgtggacgccttctgcgaatgggttcaactgcccactactgctgcaaatacagacgctgggctcaaacgcctgctgaagggtactggtctcgaattcgacaccgcaatacgtgagcacactgctgcgatgttcaagcaggaggcagcaaacttccgacggacttgggagcgcctgaaggacgatgccgatgcgcttgaaggtcctgcaaagaaggcaatcgagttccaggcgcggcgcctgtgcaaggagttcctgctcaaagaactggccaatcgctccctgatcccgggaagcgggttccctacagccgttgttcccttcgataccttgtgtgctgaaacccagaaggcgcaggagcgtcttcgctcggacggggagggaatccggaatcggcgttatgaatgcccgacccgcaatgctgacattgccatccgagaatatgctccgggggccgaggttgtggtcgatggactcgtctggaagtctgcaggcgtaacgctgaactggctaagcccgattgatagcgggcagcgcgagccacagaacttgcgctgggcctggtggtgcgatcaatgcggcggggccggttccgatcaccagatgcctgagtgttgcggccattgcggcgatccgaacgtcaagacggagcaattcctcgagccggccggcttcagggtcgactggaacgcgcacccccatgcggacaccgatcaggctgtctacatcgagcccaagtcaccaaaggtgagcgtgggggacgccttgtggcaacccttgctgcagccaaccagcggtcgcatccgtgcttcgcacgatggctacatctaccaccattcgcgcggccctaacgacaagggctacgagatttgcctcgagtgcggacgagccggggaagccggtacagacgcgctcaaggatcactggccgcttacgccacgcgacaagaaggcgattgatcgttgtccgggcaacgatcaagggtacgcgatcacgcgtgccctggctttggggcacgaggttctgaccgacgtggtcgaagtccagttgtccgggctcgaaggcgacggcgcagcctgggcactcggcgccgctctgcgtgaaagtctcgcccgctggctcggcattgagccacgcgagctgggaatttcagttgcggcaagagatggccagttgggccgcaagacgccttcggtttacctgtttgacgaagcctctggcggcgccgggtatgcgccgaggttgctcgacgacatctatcatgtgtttgaacgggcctctcatgttctcgattgccccaaggaatgcgaaatggggtgctcggcctgtgtgctggcgccagatctctacaaacagcaagggcgcctggaccgcaacgcggcgttgatcgctgtccgtgccttccttgagacgaatgccgagttgcctgaggaggaccgggccattgcggatgcgaaggctgtcaacgatgcagcaaacacaattctgctgcgcgcccgtagcggggatagcgtaacggtattcctgcccgacgcattcgaccttgccgaactatcctcgatcaagatgcggtcgtttttctcgtctgcctcagcccgaggcgtgccgatgacgctggttctgtcccgcaaatcgttcgatagcttggctgaagtggagcgccggttcttgcgcgacacggcagtacgcaacgacttccggcttgcactgggcgacgctgcaggaggccgtttcggcaaccatcggatcgccgaactggtctcccaggatggtgcgaaaggcttcttttcacgcgacgagaatgcggcgcaacccggcgagcgatggggggttggtgaaacccatgctgtcgttgccggcagcatcaatccgccgacgcccttcactctgatagctgccgacgacctcgagcgccaagtcgctcccggggacaaggtggaggtcatgcttggatttggccaatgcccggtgggacagtttggcaaacgttttggcgcaaagctgaagcagcatatggaagccgcaggcatctggcatccgggccagctagttcgaatttcctattccgaccgctacctcaatgccccgctacccatgcttctgttccttcggacttgcgaagctcttgccgccgagctgaaggccggcgacacagtcgaagtcgatgtggttgtacagccgttgaagaaagaccgtgtgcagtatcggatctttaacgactgggatcatgagggcgaccgggaggatgtggcgcagtttctgggggaaaagcttgggctcaacgtcgccctcaaggtgtccgatagcgcaattcatgggcggaaactcgaactggggtacgcagacgggagcaaggctatcatcctgctcgatcagggttttggttactggcgcatcgtagggaatccgccgagacatgactttggtgcagcaccggcggctcaagcaagtgacctctcccggtcaaacgctgcagtgtcggggactggggaaagctactttgctgtagcgcgccggtaa

SEQ ID NO: 30329 - DNA, 3195 bp, Sphingobium lucknowense F2
atgatccgggcgatccaattggcgcgagaagctgccagtggtccgcacccgctcggaaggataggcgcggagctcgccttgccccgcccggccgatttaccgctgtatcgatataaactggcggcgggcgcgttcgagcggatcgcgaagaagctgtcatcgagcctggcgtcggatatgctccggccctttcttgctccggccttcgttctttgggccgcggattggtttcgtcgctcctatcagggagggaagccgaaatgggaagatattggctcggccttaaatgtgcatctcaattggtcggagtggatccgacttgccgaccaaggcttcgaagcttggaaaattcctcccctaatcagagcatcggacaagagtaatcagcgccttgccaatctcgcccggcaaggaggatttcccgcggcagccattgagagcggggcaggttggccgcggaagtatctcacaagggctgttggcgagcttttgggctcagatgtccaggacatcggcaccgcaatcgccacctgtgagcgcaacgaatacctcctgccgacgatctggcgcagccaggaaatgtatgcgatctgcggtgagctggcgctcaagattgtcgaattgcgcgcattcgttgacaaggaagtgccggccgatggtcgtccttactcggcgcggctggaccagtcgcacgaggagtggcgcgatgaattgccaatgaccctggatggggcggcggcgggtctgatcgatacgttgctggaagcaaaaaagctctccagtagcggcagcattcgcgttggccggatgatgtctcagcatggcgaagattggcgtgaatgcctcgacttccacctcgatggacggtgggacgacaaggaccaggtgctctcacccggcgatcacattcgcgtgttcctccagccttccgatggattggcggaccgaatttccggcagactggcctatcttgagcacgaggacgcgaaccgctggatcgcaagaccgatgcgaagtgaagcggcaatcgagtttccattcgacctgccggttacgaccgaatttcacgcgcgcggagatcgactggcacgcagctttatgctgcctggcggtaagcccgtgagcggcgggcttcgtgtattcgaaccgcgcgccacagatgccctgcgcacaacctttgctctcatcggccaagggtccggcgcttacaaagcggagcctgtttttatcgatgttcctgaggactggtcagttcgagggaaagacggcaacgccgagattgagcccgaagattttgccttcgctccaaggcgttgtctttaccggtgcgcgggcacaattatagctcagaagagcaacggcgacagtttccttgtgcgaaccggacagagtgcagaccgcaaggaccgggtctcgatcgtggccgatgcagtttccggggtacagacgcctgatggtgaacaactcttcaagcacccgctccatgcgcaggtgtccgatggtctttcacacagggtcgcatcccggggagaggtgcgttggcggattgccggccaacgtagctggtcggaagacctggccactgccggacccgggttgtgcgaattcgcttggctcgatggtgtcacaggccatgtgcgcgatcggctgactgcattcgttctgcccactgactttgcgctgacacagcggagcaacgggacccattccgatatcgagctgagcggttgggatggggcagctgtgcttggcgacgaagcaccgagttcggagcacagctggcggatacggattgatcctcctcgcctggccttgctaaccttacgcctggctgccgctcaaactcctgcgttcgatcttaaagttccgctccaatcgaaggaatggctcacaacctggtacggagatctcctcccgcgcgacgcagttcttggcctggccgatcttcgtgacacggtggcacgcgctccctcgacttcgatcctgatgggggacgttgcccatcatgctgacgctgcgttggacgccaactggcgaattgatcgggaacttggcctgtccgcattgcgaacggacattgcagctctcatgcgcccccttggcatcgacgctcaggttaggctcgattttcataacgggagcaatgaccactggtatgtaacggagtttggcaacattctcgagcgggagccaagcggaggcttgcgcccgaaaaccgcgatagtcggtgaggatgttagggtatgtggacgctcactcggggctcccgagaaagagctcgaatttggcagttacgacggcctgcaaagtggtcttggtggccagctcattcacttaccgcatctcaaaggtgattggctcgtctatcttcgtgagggctcccgcgtcctcactcgacccaaatttgtctcaggtgaccctgatcccgaagttccacagcaccagctcggccgggccatggcccagccattccttaaggcgcaagaagacctgcagtccctcgttaccgatatagcgcaggatccgacgacggcagaggccggtcaaacgatccaagtcgtcatgaaactggccttgtcgctaaacggcctcccaccgcagacattcgagatcttcagcaaactggtacacgccggtgcacttgctcccctgctactgtaccgctgtgaagaacagcacctgtcgaccatactcgaattgttcgacgggctttgctcgagctggatcctcttgccatacggcgcatgggattcagctttccaggcccaagggctctatctcgttacccggctggatgatcccaagtgggcattgaccagactcactgagcgccagaatgaaatcgcagcacgtgctccccagctggctcctctgatttgccgcgatttttcgccgtcgacctgggaggacgtgcgtagtcacttcacggatcacacgagcgagggcatcagcacagatgccggtggcttcaatccatttcgccccgctttccgcgagctgctcccgcaggaaaactttctcgaatccctcatgcgcgtcttcgacgccccgtttgtcgcagccttggctgctatggggcggatcacactcgacaaggtacagattctaacggtgaaagacgtcgagcgacgtcatcccacatacttcgccaaggcctatggctacgcccttacggagctcaagaatgaccgctga

SEQ ID NO: 30330 - DNA, 6000 bp, Sphingomonas sp. Leaf25
atggccgacgccgatcccatccgccccaccacaggcccgctgcgcacgttcgagctgatccgtgaccgcgcggtcgaggcagtgctcggccagtcgcgccttagccatccgggactggcggcggagatccggcgccagttcggatcgaccgatgttgccgccggcgcgctagttcgcgagccggtgatcgagggggcggcgccgttcgtcaccgacgggcggacctttgccgattgcgccgggcggccgctgcatccgcgcgttatcgacgcaatcgctagcgatcgggctggggtgtatcgcttccccccggacgcgcagccctatcgtcaccagctcgaggcgtgggaacatttgagcgctgccgaccgccggtcggtgctggtgtcgagtggcacgggttcgggcaaaaccgaatgcttccttatgccggtcctcagcgatctggcggcggaggccgagactagcggccggctgtcgggcgtgcgcgcgatcgcgctctatccgctaaatgccctgatcgccagtcagcaggaacggctgagcgcctggaccgcgccgttcggtggcgacatccgctttggcctctacaacggcctgacgcccgagcgccttgcgcgcagtgaaatcgccccgcccgaacaggcaatggaccggctgacgctgcgcagcgatccgccgccaatcctggtcaccaacgtgacgatgctggagtacatgatcgtccgtcagatcgaccgcccgctgatcgaggcgagccggggcaagctgcgatggatcatcctcgatgaggcgcatagctacatcggctcggcggcggcagagatcgcgctgctgatccgccgcgttctgctgacgttcggggtgcgggccgaggaggtccgattcgtcgcaacgtccgccacgatcggcgatggcaccgacgtgaccgatgagctgcgccgtttcctgcgcgacctgtcgggcgcggacgatgatcgggtcagggtagtgctgggcgagcgtgaaaccgtcacgctgccgccccccgcgggtgtgaccgttggcggtgtgctcgaccttgccgatcgagccgcgctgacccgtcatccggcggttcaggcgttcgtccgctcggcggaggcaggcccagtcacgctggagcagagtgccacgctgctccgcccggcgggtcatccggtagagcagattatcgaggcgatcgtcgcgtccgatgcgcagcgcgacccgctgttgccgctgcgcatccacggcttcatgcgtgcggtgccgggcctttggagctgtatccatcccgactgttccggtgcgccggtcgactggccctacggacgggtgctggcgcatggcatcgacgcctgcccgagctgcgcaagcccggtccttgagatcaagacgtgccgcgaatgtggcgaaccctgcctgactggcgaggacgcaggaggacaggtgcgcgcggttacgaccgcgcctacgatagacgaattcgccgcgacgctcgaccgcgagcacgccgaggacgaagatggcgactcgctggatgcagagtccgactatgacgcagcgaaggtggcgatcgcgctgcgaccgctacccggcaaccgacaggcgcatatcgacccggcaaccggccgtcgaaccgaccaggccgaggaagaaactcggccctatccggtgcggtcgccggatctttgcgggcattgcggggcacaggatgcgaacggcccgatcatgcggccactgcgtttcggcgcaccgttcctgatcggcaatgccgcgcccgtccttctcgaaggggtgccgccgcgcgcctccgcaagcggcgtagcctatccgccgccggcggaggggcgccagctcctgtcgttcaccgacagccgtcagggcacagcacgcttcgctgccaatcttcagaccaatgccgagcgaagctatgtccgcggctatatctatcatgccgtacaagggagcatggcgggcggcggcggcgatgatggaaaggctgatgcgctgcgcgctgaaatcgccacgctcgaaccgcacgccattgccgtgccgacgatcgccgcgttgctcgagacgaaacgcgccggccttgccgcgttggcgcggccgtcgctcgatggcgtcgcttggaccgagctgcgcaccgggcttgcagcgcggcccgaggtcaaggaatggatgcagcggatctggaaggatcgcgacgaacgctaccgtgacccgtccgcactcgccgagttcctgttactgcgcgaattggcgcggcggccgcgccgtgcgaacaccgtcgagacgatgggcctcgcgtggttgcgcttcgccgcgatcgaacggtcgaagcaggtgcccgaggcgctgctaacgcgcggcttcggtctgagcgactggcacgggttactgcattcgatcgtcaatctcgtcgcgcgcgggcggtttgcgatccacgcggcgtggagcgacatgcactggctgcacagccgcaccccgctgaccgaactgcttgagcccggccgcgaaccccaggcttcgcgggagatccgctggccgatggtaagcaagagcgcgggtcgatcgaacctcgcgcttattctatcgaagcagctcggcctcgaccccgcggacagccgcgggcggacacaactcaacgcggtgctggagggggcgtggaacgcgctgctacccttgttcagcgatcccacgcggcccggcctcgcgcttgatttcgcaaaggcacatgtcgccccagtggtcgaagcgtggcagtgtccggtgacgggccgcgtcctccccacgacagtcctcggcctgacgccttatggccatcgcgagcatctgcggacagcagcgctgccgccgcgaccgatcacctttcccgcgctgcccgtcaccttcccgcgcgcggagtcggtggaaacggtgcgcgcttggctggatggcgatccgcagatcgccgtgctgcggggcgcaggcatctggtcctcgctccacgatcgcgcggcgctgctcgccccatatctgcgggcggcggaacattcggcgcagcaaccacccgatcgccttcgccggtttgaaggcgacttcaagcggggcgagatcaacgtcctcaactgttcgaccaccatggaaatgggcgtcgatatcggatcggtgtcggcggtgatgatgaccaacgtccccccggcgcttgccaattatcgccagcgcgtcggccgcgcggggcgacggcgacaggggtttgccgcctcgctcacatatacccgcgacagcgcgctcgaccgggaggcgtttcgcgatcccgtgctgtatctgggccgaagcacccgcgcgccgcgcatcaagctcgacagccgccggatcgtccagcgccatgtcaacgcgctcctgcttgcccgctggttcgcgggcgccgggggcgaggcgatgaagaccgaggtcggcgcctttttcgggctgccggcagcgatcggagcggtccccatcgacgacgcgccggtcgtcgtctgccgtgcctggctaatggcccccagcaccgccgaggcgctggggacagaggtggacgcgctgactgccggcacagtgctggccggtgaccgcaccttgttcgccgcagcagaaacaatggtcggtgccgccttcgatgcggtcaaggtcgaatgggaggcgatccagggccaggcgcagggccttacacgagaagcgcagctgagcctcggcttccagcttcgccggctcgtcaacgacaacttgttgaaggaactcggctatcgcggcgtgctgccttcgcacgggtttccgaccggggtggttcccttcgtcaacgacgatcgtccgcccgccgatgcacccgtcgatgacaatagccgccgccgccgcagtttccctactcgcacgctcgacatcgccatccgcgactatgcgcccggggccgaggttgtcgtcgatggcctagtctatcgttccgccggggttacgctcaactggttacggcccgttgacgacaccaaggcggtcgaggaacagaaccttcgctacttttggagctgtgccgcttgcggggcgggcgatgttgccgcggtcgtgccgccgaaatgcctggaatgcagcgttgacctcgacgagcggcggcggctgcgtttcctgtcgccagccggcttcaccgccgatgccgcggagaagccgcacgccgatactgatgaaatcacctatgtcgaacccgagcccgaacagatcatcgcgcgcggcgcactttggtcgtcaatggccgatccggccgcgggacggctgcgcgccagtcctgacgggctagtcttctattcctcgcgcgggcccggcaagaacggttatgtcctgtgccttgaatgcgggcgcgcggccccggcagggagcgacggcgacacgcacccgctgaaggatcacaaaccacttcgctatacgcgaaagggaaccgacggccgctgtcccggcaacgacaaggggttcaagatcacgccccctatcgcgctcggtcatgaagcgacgaccgacgtggtcgagctgcaaccgatcgggctggaaattgccggcgccgcttgggccgcagtgtcggcgctgcgtagcgcgctctgccgccaactcgggatcgagacaagtgaactcggtatcgcgatccggcgggtgcgcgcgccgctcggccagatcacgcattcactgtttctgtttgatcgcgcatccggcggcgcgggcttcgcgcagcaggcggtgccgctttacgacagtttgctggcagatgccgccactcgcctcgattgtccggaggggtgcgcgcgcggctgctcggcctgtgtgctcgcgcccgacatgtaccgccaggcggaagtaattgagcgtcgcccggcgcttgaatgggcgcgcgcagcctatgcggcgctgcgccaagtgccggatgaggatcgcgcaggcccagacgcggcgctcgtccggtcggtcgccgactcgctgatcaaagaggtagatcgcggggcgcgcagcatcacgatatgggccggctccgccagcgatcctgccgccttcggcaccgctcggttcgcgctactcatgcagcggctgcgcgatcgcggcgtcaaggtcgccacggtcgtcgagcctgcttggctggacgggctggacgttgcgcagcgcctggcgttgcgcgatgcggcgctgaagcttggcctgtccctcaagcgcgggacggcgccagtctaccccaatggcgcgtcagcgatcgcccaggcagggtcgcgaagctgggtctcgcgtgatgccgaagcgagcgcgatcggcgcaggatggggtgaggggcaggcggcgcccatcgtctcgatcgtggcagatccggcgccgctgtccgccgcgatcgaccttgccagcctgctgcccgccagcgggacgcggcatttcgaagtcgaggctcaactcgacgggtttcttgccgatttcggtcggcggttcgcggtgatgctgctgccggctatccgcgaggccggggggacgggacgactggtgcggatcgcctataccgaccgctatctctctgctccgctgaccgtgcgcctgctgaccgaagcgctggccggactgcgcgacgaattggcctcgggttcggcggtgatccccgttcatatcacgacccgaccgctgaagatcgaggaccgatcgcgctatcggcctcatcacgactggcggcaagaagaagatcgggccgccgtgctgcacgggctgcttgagaatgccggtttccgtgacaatcttgaggtcggagaggccgaccatggccgcacgatctcccttacctttgacgatgaccggatggtccgcgtgatcctcgaccaaggcttcggtccgtggcgtgcaccagccttcgccaaatgggaccattttggtgacgataaggtcacgcagacacgaaaaataagccagttcaacgcaatgctgtcagcacaggggcctagctatgctgtcgtcacacggtcatag

SEQ ID NO: 30331 - DNA, 3009 bp, Sphingomonas sp. Leaf25
gtggaactcgcgcacgggtatgcacccgggcttttcgtgctttgggcgtcagaatggttccgccgccgctatgaaggaaacggccatcgctggcgcgacctcgccgatgcgctgtcgatccccgaggatcaggggctgttccgacagttgacaggtgaagggcttcgcctttggcggcggccgctgcgtcagagcggcggaaccgcctatctcggcagcctggcgcgcgaaggcggcttcccggctgcggcggtgcgtgacggggggagcgggtgggcaagcgtggcgctggccgcgatcatcgcgccactgctcaccgaaccggaatccgacgcacaggaagcgcgggcgcgtgcgcttgccgcagcgcagatcaaccggttgccacaactgttccgcgacgaggatttcttcgacctgtgcgccgatctagcgtgcgcgatcgtagccttgcggcgcgaggcggacgagccggccgccgccgcgcggatcccgactgcagcgtggctatcgatcaatattcccgactggcaggcacgcctgccgctcaatacaagcgatcgggcggcagcggcaatgcttgagcggctgctacacgtcgccccgcttcagggcgggggcgtgagcgtcacgcggtttctggagcggatcggcgatcactgggtcgaaagcgccgcactgacgctcgacggtacgctggatacgatagcgtgcgatcgtgtcgaccaggcttacggccggcttcgcgtgtttggggcgggtgagctggcccggcaccttccgggcgagctggcaatgctggaggcgccaagtgagggcgagcgcctgtggaccgcacgcgcgacccggcgcgcacgccagcggcacgcgatcccattcgcgacgccgatcgaactcgacctgcgcgccggggaccagcgcgtcgatcgcatcacgcttgccggcgggaagccgcggcgcggtgccctgatcgtcaccgcgatcgaggcgggatcgcccgaggcaccgactctgctgcgcgtagtcggcagtggctctggccagtaccgcgccgagacgctggtcgttcaggcgcccgctgactggatggtgctggcagtcggcgacgagatcgcgaccgagatcgggatgggcgtggctggagttgcgggttatacacggctgtggcgcgtgacgcgcggtgccttcttcaccgacccgctgggcgaccgctttcgcatcctgtgtggccagcccgccgatcagccgaaccggatcgaactcatcggccagcatgcgagctgggcggaaacgggtggcgacatcgatctctacgtcgggtcgccgctcgcgcggatcggagcgggcggcggcctgttcgtccgcgcgatcggcagcggcacctgggtgcctgcgccgcagccgctgccgatcggtcactatgatctgggctggcgccgcgacaagatcctgctcgaccgccgccggatcgcgatcctgcccgcgacgagccaattgcgtcgcagcgggccgcccaatcactgtcggtatgagctgtcgggcttcggcgattgcgctctcgtccccgacgagggcgcgccggtgcatgtggtcgatccagtgatctggcggcatcggccgggtagcagcgcgatccactggttcgcggcgcggctccgctggccggacgcgcccgagctgatcgtgcggatcgagcatccgacggcagcggcggtcgcgcgctggacggggcggcatctgcccaatcaggcgcagttcacgctggcggacctgccggagcttgtcgctgtcagcgaaacgccagtcaaactcatggccgagcttaccgagcgaggccgtgtggtcgccgagatggtgtgggcgttcgagggcgagttgccgatgagctcgattgggtcggacctcaaaagcctgttgctgcccgcctcgatcgatgccgaagttcgcctgtcgatgctcgacgggcttggatcgatgtggcgggtgcggcaattcccgcacgatctaaagatcgactgcgacactgcctacgtcccgcgcggcctagtgacggagggcgcggtgattgccggccgagcactggcggacgcttcgcgcgagcacgtcttcggcacctattcgctgctgaccgacagcaatcatcggcccgcagcgctgccgccgcttggcggaaactggcttgtttatgtccttgacggagagcaggtgctgacccgcccccggtttgttgccggatcggaacccgtgatgcctacaggacgcctgggagacgtgatgcgcttgccgcaagggccggtgctgaacgccgcactcgacgagctgttggccaccgcggcgcgcgacgatgccgagggggcggcggtgatcgacgagctgctggcacttgtgacctcgctcggcggcttgccgcccgcgaccttccatatcctcgaactgctggccaaggcaccggcggtgttggtgcggatggcattccaggccgacgccgagcagcggggcgcagtcatggcgctgtcggacgcgctcccctttgcctgggcgacgatcccgcttgcgtgctggcaggaagcccagggtgcggcgtttgcccgggcgatcggtcagctgtcgatgctgggcgccgaggccccgcattttgccaagcaggtggtcgatcaggcggtcgcttgcctcatcgaccgagagccactgctcgccgcggtgctgacgtcggggtccgcgcacgatcttgcgatgatcgcgcaggctttccttaaccgcgccgtggaccgcgtgcccccggccgcaggggaccgctatcgccgacagcttggcgtgctgccgcgctatttcctaaagttcgatccgcgcttcctcgacacgctcgatgcgccgtgtgcggcggcggccgccgtcgcggggctgtggacgccgggcgccgccgacattcgccacatcaagaccgtggcgcgatccttcccgacctattttgccgatgcctatgccgcgtcgctccaggagtattcgtaa

SEQ ID NO: 30332 - DNA, 6255 bp, Thiohalorhabdus denitrificans
gtgaacgcagccaagcggttttacggcaacgccgtcaatcggctggcaaaggggtccagccaggccgtgctcgggttgagaggatttcgtagcgaaccattacgcgaccaccttcgcgccgaattccagcaggcccccggtcatggcaatgctcttctcgccgaccccgttttcgaggccgcgtatgggtgggagccgtcggggcgcacgatggcagaccttcgggggaatctcctgcacggcgaagcgatcaaggccctggcgaaccctgtccagaaggacctgacggaagatttctcatttcccgaggcccggcaacctttcacccatcagctccaggcctggcaggccctcagggacacggagaacgggcggcgttcggtgctcgtcaccagtggcactggatcgggaaaaacggagtgcttcctggtccccatcctggatgacctgacgcgggaactggccgagaaccagaacggcggccaggagggtgtgagagctgtcttcctctatcccttgaacgccctgatcaagagccaaaaggaacgccttcaggcttggtcggagcccttcgaaggcaagattcggttctgcctctacaacggggatacgccggaccaggccaagagtccatggcaatgcgaagtaccagaccgccggacccttcgagattcgcccccgcaaatcctggtcaccaacccaaccatgctggaatacatgctggtgcgggcggaggatcagcccatcgtggcgaaatcccagggacggttgcgctggatcgtcatcgacgaggcccacacctacctgggttcccaggctgcggaactcaccctgcttctccgccggacaatgcatgcctttggctgcgccccgggcgatgtgcatatcgtggccacttccgcaaccctcgggaacgacgacgaggcctcctggcgggaactggaacaattcctagcagaccttgcaggagtggataccacccaggtcacggtaatcgccggcaagcgcgaaacaccggaaaccctgagggcccgtccggatgccggggacacgccgccatccccatcttccctcgaaaccgaggatgcccggtccctgtaccagacggtttgccaggagcctgccctggtccggttgagggacagcctggttgagcggccccgaacactaacccagcttacccatgtcctgttcggggaacagggcgcgaccaatcagcaggcaaccctggagctactcgacgcctgcagccgtgccagaaatgagcaggggcgccccttcctgccgctgagaggccatctctttcaccgaaccctgccagggctctgggtctgcgccgatgcccattgctccgaaaaggcgggcacccccttggaaaaagaggactggcccttcggcgccgtctacctcgaacgacgggagcattgtcggtgcggtatgccggccttcgaactagtccagtgcatgggttgcggggcggagtatttgctggcccaggaacgagccggtaggggggacggggaatattacctccggcccgtcgaggaccagaacccagaggacgaattccagcaagacctagagccgctggaatcggaaacggagaaccaatccgaaacacccgaatgggaagccgggaggggcctcctccgtctaatcacgcccgaggaccatgcgacccagatccaggtgggtctcggccaggacggccagctggactggtccggcaaccaatcccggatcgtgaacctgcgcgcccccgacgacaacggtctttcctgcggcaactgcggcgatcaccaggggacgggtcccgctgagcgccagttccggccggttcgggtcggcgccccgttcctgctcacttcgaccacgccgaccctgctctcgttactgcccgagtccggagaaaccaacaccgcgcagccccttgaaggtcgtcgactcgtgacgttcaccgacagccgtcaggggactgcccgctccgtcatcaaggcccagcagcagattgaacgggattacgtggggagcctcatttaccacagtctagccgccagccgggaaacccaacccgacacggagaccattaccaagaccaaagaccagatcgccgctctggaacaggcggtgggtagcaatccgaaccttaaacagctccttgacgagcaacgcgcccggctggaacagctgaagacaccatcggcccccgaactggggtgggaggagatggccggcaagctcattagcgcccaggacttctccacctggatgtcccaggatctgcgcgagctcagtttccggaacctgtcggaacgagacgtcgccgacctttgcctctaccgggagttcttcctacgtccgaagcggcaatactccctggagggcctcgggttcgcccagctccgttatccggctcttgaatccaccacggttccggcggtactccaacagaagcaagtcccccacgcggaatgggtcaacctccttcggcttgcgctggacaccttcgtccggagcggcgccccttcggtggagattccggccaacgtccggcgctggctcggctaccctggcaagccgtccctgcttattgcccccgattcgggcgacagaaaaacccatcccgaccaacgttactggccttccagcggctcccggaacgcccggcgcaatcgactgattcgtctgctttcccacgcattcggcctagaccttgacgaggaatcgcacgcccggttcctcgacgaggttttgacggcgatgtggaaggccctaacgggaaccggggtactttcccccaccgaagggggctttcagctaaacctcaagaaagccgcccggattcgtggcgtggaaacggcctggctctgtccggttacccggcgccttctccccgtgacctttatgggattcacgccctatcttcccgacctgccagcccccgactccctggccgagtgcagggaggtgcccatgccgcagcttccctttcccttttggcagggcgcggaccagaccgacccggaatcctggctcgaaagcgacgcctcggttactcatttgcgcgtgctgggaggctggaccgacctaagcgaccggatcgcccgattcagtcgctactatcgggcggcggagcactccgcccagctatccggggccgagctgacgcggcgtgaacgggaattcaaagagggccgaatcaacctgctcagctgttccaccacgatggaaatgggcgtggacatcggtggcctctcggcagtcgccatgaacaacgtcccgccccatcccgccaatttcctgcaacgtgccggacgggccgggcgccggggggagtccgcagcactgagtttcaccctttgcaaggccaccccacatggggaggcggttttccgcaacccgctgtggcccttcaatgccgaactggctaccccgcgagttgatctgcggagcattcccatcgtccagcgccacatcaacgccctggccctcgccaccttcctgtcagcgaatgggcccgacagcgttccgcgcctccggacaggctggttctacgaagcatcgggggaggaggaccagcgttccacgccagcggagcgcttcatttactggtgccgggcgcccgagtcctggccgacggatcttccccggggtctcaaatcgctgactcggggctctcaactagagggcattacggttcaggaattgatggatcggaccgccgaagccatgcaggcagtctccagtgaatggctaaacgagattagggggttgctcgcccaataccgggagctggcaacaaaggatggccagtccaaacccgagatcgccctgaacatgcggctcgatcgctggcgccgagagtacctccttcgccaactggccaaccaggccttcctgccagggtacggattcccgaccggcgtcgttccgctggttaccacgacggccgaagaattgaaccgggacagggcgagtaatccccagggcgaacgcgaggataatcgccagcgccgggccggttatcctacccgggatctggccgtggccatgcgggactatgcgccggggaccgacaccgtgctaaacggccgggtctaccggagcagcggggtaactctcaattggcagctaccggtcgaagcagagggggcccccgagatccaagatttgcgctggatctggcaatgcgcggtgtgcggcgccaacggtgtcaaactcgctcggccggatacttgccccgcctgtggctccgaggcagcgaaactgcaaacggaccgcttcctccaacccgccggcttcgccgtggattttcgctccacgccccacaacgatgtctcggtaccccagtacatccccgttcgagagcccctgattgccatgcacggcgcggaatggatgatgctcccgaacgctccccttggacgtttccggaccaccccctccggaacccttttccaccgatccgacggcattaacgcgaatggttacgcgctctgcctgcgttgcggccgggccgattcgatgaccgtggacggcgaccggccttccagtctggacggtcacaaacgccttcaaggggggaaactcaacgaccaggaacgggtgtgtcccggcaacgaggagagctgggccatcctggacaaggtcctgcttggggccacctatgccaccgaaatcttcgagttacaacttcaggacgccttcgggaacccggtgaaggacagagcagcagcctatacgctgggcgtagcgctccgccgggccttctgcaaccgggttggcatcgaggaaggcgagctcggagccacggccgccgcgagccgtgaccagcacgagaaccggacccagtcgttgtacctgtacgataccgccagcggcggagccggctacgccagccaggtgcccggggtcctccccgagctgttaagaacagtcaagagcgaggttctttcctgccctaacgactgcgactccgcatgccaggcctgcctcctgacctacgagacccagttccaggtcgaccacctgaaccgccacaaggcatcggaggtcctcaccgaggagttcctggccgccctccagctcccggaagagttacgactgttcggcgagcggagccacctcgaaatcgagccattggcactggccgtggaaagggagtggcaacgccgtccgtttacccaaatccggttgttcctggggggctcggcgaacgagtgggaaccccttcattggcgcttcctggatactctccgacgtttgaagaccgccgatgtcgaggtgacgttagtcctggaccggggttgcctggaagagctggagcaaagtcagctggacgagttgttcgccatcgccgccgaaaccgatgcttacctatacagtctcccggccgaaccgccaatcagcggagacagccgccttccgttggcggttgaaatcgccgattccaaccacgtaaagcgatgggccacgtcggatccgaaggctctggtgcccgccccattctggggaagcggggacaccggcgcacgattcattcaatctccatggcagggcgacaccctgaccgagttaaagaccgccaacgccattcaaccggaagccctgaggccgcaaccaagccccggggtcaccgagctggagattacccatcagctagacggcagtctggaaggcttcggaagaagggcctggactttgattaccgaacaggttccagatctggccagcctgctgtggggggaggccgagttaagctatgtggcgtactcggaccgctatctccggtctccaatacaggtggtcctgatggagcgcctgattgctgggctaaaggattatccgggaggcttgggggcagggacggagatccatgtcctgacaaccaaactgggaaaaccacatttccaggaacccagagcctggtctcacgattggcaggatcgccaggacagagacgacgtcgctcgcgccgtgctcacggataaccccggaaccgtttggtgggaggtaaaagaccttcactcggtacctcacgcccggatcctgattctggagtggaccgatggcactaaatgggaaattcggctcgaccagggagttggttactggcgtgaagattctgcccaggtgggcagtttccccttcatggcctcaatctctcgccaggtaaccattcttggggaggccaatttccaggttcgcccccagcacgcccaccacccgactttttggtacgccttgaagaaatag

SEQ ID NO: 30333 - DNA, 1500 bp, Thiohalorhabdus denitrificans
atgttccagctcgaaggccatcgggcagaagcaggcgagctggttgccctcgaccgcctatacgccctttatctcattctgcagcacccgagcggaacggaacggtttttcctggaggccgaactcgtccgcggaggccataccctaggtgagcaggggttctctgcaacccttccgcccatggaagggggccgaatggaaaccaatctcggtccatgggtcgatcaggtcaaccacttgctcgccacaactgaccaccccaacgccttcgttcgcctgatgatctgttctcaatggggccaggagctaaccagggtccacgttgcccagtacgacatgggaatttacccggatcgggaagaagagacgattgagctagcttacgctgacattcaaaggcttggggaagactggtcatcgcgaatttcggtgagcatgctccccctctgggagccggggcgggagccccggtcactttttcccaccgacgacacccccggtatctggcccattccggaggatctggagcccggcccctggtgggtcatcgcccgggacggcgactgggccagattccggccgctcctgtggaccgttacgaacgggcaccgcgaagacatggatgcggagacaggcggactttcggcagcggtccgggaaactgattcggaccgccggatctaccaaattgatgaggcccttcaacggcttggagcggaacccgagcacgaggactgggaacttcttctggaatacgtggcgttggccacggaattttctcccaaggcactggatcctctcaggcgcctcgttctccatcctacaacgctcgcaatggccctgttgcgtgccgaccaggaacgcttcgaccggctaatgcttttccccacgcaaatgtcctttgcctggggccttttaccggtgggtgcctggcaccaggctgcctctcggtacttcactcagctgggtgagtccctggtgggaatcgacggtgccgaggacatcctgtggcaaaccttcacggggtttcgggaacgcgctacgaaggtgcggccctatttcgactccctctgcgactggctcggggaaagccttttccccggccgcggtccagccaacaactcgctaaagctgactcgtcagatgccggcggatttcatcgaccaccacgtcgccacggagatcgaggcccttcaaggccggcatgacgccgacgaacggtggcccacgggggcagaggtcatggaggcagcggacgggggccttctgagcgagcggttccggtttgccgatgtgaccggcatccagcgtccggtgaaatgtgctccctttgtcgcagcctcctttgccctgaaccaccacggggaccaaactccggggctcgtctacgaacttcgcctgattcgcggcttcgaccatgagtggttcgatcgggcctattccatcggcctgactttcggcctcgcaaaaggcagggaagaaatgaggaaaacctcgtga

SEQ ID NO: 30334 - DNA, 6342 bp, Variovorax sp. Root411
gtgcgcctcgcccggccgaagtcggttgacacatacgcaatgcaactcagctatttttcctctcttctccctgaactgagcactcgcgccgcgcgcgccacgctgagcaagctagggttctcgaatgcgccgctccggcgccacctgctggacgagttcgcgcagggctacggtgattcgggttgtttccttggcgatccggtcttcgaagcgacgtttaggtggcaacaagcccatgtcaccatggccgagctgtccaagactcttcttcatcctgatctggttgcagcgatggacaagccgtggggcgaaagcgccaaggactaccggtttccccgagaagctcggccgtatacgcaccaactggaagcttggcaagcattgttgggcacggcgcctaagtcggtggtagtaacaagcggcacggggtcgggcaagaccgagtgcttcatggttccggtccttagccgacttgcatcgctgcgtgcggaggagggggccgtgcagggggtgcgagctctattcctatacccattgaacgccctgattcagagccagcgggagcgcttgcgagcgtggacagggccgttcgggggcgatgtccgattttgcctctacaacggtatgacgccggaagaagagaaggcggagaaagccaaaaacgcgcccaacgaggttcacgatcgtgcgacgctacgagaccgaccaccggctatcctagtgaccaatccgacgatgcttgagtacatgctggtgcgcgcccaagacgcagccatcttggaaaagtcgaagggcaagcttgagtggatcgttcttgacgaggcgcacaactacatcggttcccaggcggctgaactcgcacttctgctccgtcgcgtcctgcacgcatttgggactgatgcggacaagatccgtttcgttgctacctctgcaacgatgggtgcaggtgatgttgaagcgaagcggaacttgcaggaattcttggcgcgcctcgccggtgtccactcagaccgcgtcgtcgtagtcgagggggagcgggaagtacctgccctgcttgagaagctagccccgtcatcttccgacactcctccgacctctatttctaggatggagagtgcgcaagagcgatacgatgctcttgcagcaaacccggtggcgcgggcgttgcgcgagttgttcgtcccggcggcgagcggccggagctatcagcctctgtctgagctgaaatccagattgcgggcggacagcgcgaagtcggacaatgaaaccgcgcttgcatgggtcgatgccctgacgagcggcgtcaacggaacaggccgtgacgcgtcgcccttcctccccctacgcgctcacatattccacaacacactcaatgggctttgggcttgctcgagcggcgcgtgcgtgaagcgctccggcacgaagctggacgacccagagtggccgttcgggatggtctttacagacgatcgacgccgctgcgaatgtggcgcaccggtcttcccgctcgtatcctgcaacgactgcaatgagacgtaccttgaagcggagatcaattcccgtgcaggtcgcaggtggttgctgccgcctttgcccagcgaggtcgatgaattcctgctagaccgcgatccggaggaacgggagaacgaggcggagatggacgacgcggacgttggaggcccccccacttcggtactgcgttcaccggtgttgatcgtgaatgtagacacccgtggggccccggcacgtctgaacccgagcagtgctgaattgcttgacaagcaagatgaacccgcgctttccatccgcgttcaagatcaggtgactgtagaggggcgcttgatcttgaagtgcccatgctgtgacggcgacgcttctcgcttggagcagtttcgcaccccgaggatcggggcacctttcttgctgggcaacatcattccgactctgctggagttctgccctgaaggggacaacccgcttgacgttccgatgcgcggacgccggatgatcacgttcacggacagccggcagggcaccgctcgaatagcagcacaacttcagcaagactccgagagaaacgggctgcgcgccgccgtgtaccggaggatcgcttcctctaacgcgggcgcagaggagtcgagagcgcagatcgaggccgatatcctggctctgaaacctgctctggggcaggtgaagggaacgcccgcggaggccagcatcgcgaagctaattgcgcagcatgagcagactctgctggagttgtctgccggcaaaccagtgcttttcaatgacatggtgggttggctgtccacacaggcgcccgatgtgtcacgctggatctacggcttctacgccgagtcagaccaagagttcaagcgggcggatggcaaggagcaattggcgcgcgtcctgatgtgccgcgagttcgcacggcgtcccaaacgccagaacagcctggagaccatgggcctcgtgtctgttgcataccccaagctctccaacgtccgcacgctgaagccggcggtccagctggcggggctgtcgttggttgagtggaaggatttcctcaagatcagcctcgatttcgtagttcggcagagcatgtgcctaatgctgccgagtgcatggaagcgttggggcggcaatcgcgtctttgccaaacagatgctgcccgctggctccacggaaagacccaattctcagttgacgaagtggccacgagtgttgcccggcgagcggcagaacaagcttgttcggatcctcgctttcgtgctcaaggtggaccctgccacggagtccgggcgagatcgcatagacagcctgctgatcgccgcatgggaagatctcacgctgacaacgaatctcctgcaactaggcggcgggcagggccgggcgctcgacatcgcagacatggcgtttcgcaccatcaccgacgcctgggtgtgcccggtaacgcgccgcgtcttggactgcacgttgcggggtgttactccgtacttgccacagaagcagttgcacgaggcagtcgctctgtgcaggcccgtgcagttgccggtgtgcgacgtcgcggcgttggactacgcgaacgaccaggcaagagttgaggcggcccgcgagtgggtcaatgcgcaagcgtcactcacagacctgcgcgtggaaggcatttggtccagcatcaatgacagggtcgtggagggcgcgggctactttcgcgctgcagaacactccgcccagcaaggcggcagccggctgcaggtctacgaggcgcagttcaagcgaggcgcgatcaacttgatgagttgttcgacgacgatggaaatgggggtggacatcgggggactgaacaccgtcgcgatgaacaacgtgcccccgcatcctgcgaactacttgcagcgcgcggggcgagcagggcggcggggcgaaacccggtccgtcgcgctcaccgtctgcaagaacaacccccacgaccaacacgttttcctgaacactgcctggccatttgagacaaagctcaaatcgccgggaatttcgttgtccagtcctgtgttggtgcagcgccatgtgaactcgatggtccttgcgcaatttctccgacagcaagaccgcaaaggcaagctcgacaagttgaccttggactggtggatgctgccgcggggcagcagcaggcaggagcgattcacggcctggtgtgagtgctttgacgctgcgaagcaggccgagctggaccaggggttgagggagttgtcaaggcgaacggtgtttgagggaaggaagagcaccggcgcgctggtcgctgaaacgggtcgggcggcgggtgagcacgcacacgcctggagcctcgagtacgacgcgatcgttcaacaactcaacgagttgtccaagaaggacgaggaagatcgggtgcccatgcgggccctcacggtgcagaagacgcggcttctggacgaatacttgctgcgcgaactggcaacgagcgggttcctgcccggctatggcttccccaccgatatcaccacctttgagacgcttaacaaagactccgtcgagctccaaaagcaccgagatggtggaggtcgggaggacaacaagttccaccggcgtgaattgcccagtcgggacaccgttacagcgctccgggaatacgcgccgggcgcaacggtcgtgatcgatgggctggtatacgagtcggcaggcattacgctgaactggcacgcaccagcgagcttggaccaagtaaacgagttgcagaacatccggcaggcgtggcggtgcaagcattgcggggcgagtggcacgagcgtgcttgcctcacacctccgttactgcaccgaatgcggatctgatcttgcggccggggagcagaccggtatgcagtatttggagccggctggattcagcgtggatctttatgctgaaacgcacaacgacatcacgcttcaaaaatacgtgcccgtggaggcgccctggatcgcggcgagcggtgactggatgccgctcgtcaatccggcattgggcagtttccgggcttcggcacaggcatcggtctttcatcactcctctggcttgtacggctcggggtatgcggtgtgcctggagtgtgggcggacagcgcccatgggggatgctcaggacgagacggcgacaccgttcgtctttcgtcaaccacataagcggctgcgcggtcgtcgcggacagggcgacgattggatgtgtgggggcagcgatagcgcattcaagataaagaagggcgtgaggttcggccgcgaatacaccaccgatgtgctcgaactctgcctgtttgacgcggaaggccacgcgcttatcgacgagcccgtcgcgtacacgttggcggtggcgctgcgtcgcaccatcgcggcgcggctgggcatcgcggagagcgaactcggttgcgacacgaagctattgcgggacgggcaggggcggaaggtccgggcggtgcagatctttgacatgcgcgcggccgggtattccagccttgttgctccggaactccccgcccttttgcgaggcgcacgggaagttcttgtttgcgagcgctcgtgcgactgcgcgtgtcagagctgtctactcacgttcgacacgcgattcaaagcggagagcttgaatcggcaggccgcactcgagttcatcaccccaaagtggaccgatgcgctcgcgttgccggaagagttgatgctgttcggatcgctgtcgcagtccgaataccagccggtaagagaagccgtgtcgcgggaactcaaccgctccaatgcgaagcggttgtttgtgtacgtgggtggtgagatcgcggagtgggactttccgtcctcgccgttacgccgaatgttgcattggctttcggcaaaaagcgacgtggagttggtcctcgtcgtgacaactgtcggttttgagggcctgagtgcggagaatgcgtcggtgctgtcgagtttggagcagttgtgtggtgtgcggctggtgtgtgggaacggcatagcgctgcgggcgccaggtgcctgcttggcaactgtcgagttcgcggacggcacatgtcggtcgtgggcgacgcagagattggacgcaagcctacccgcggccggctggggcgagagcggcgaaggaggcgtcattagcagtttgacccaggcgccccgtttgaatgtcgatcccctcgtgttgccgaccatttccgcaggcgcgctggactctgttggcattacgaatgaactggacggaacaggggcggggtttggatccaggttctgggggaagatgaagtcgcaccttccgctgaccaagacgatcactgcaatcacctacgaagaccgctatctcgccacacccatcagctgcgcgctgctggtggaggcgatatctgggcttaaagccatgtacgagccgctgggtgggtgggcaaatccggtagtccaaatcatgacgatgcagatcgagcaagggcatgtggcgcggcgtcggaatcactgggcgggagattgggaggactcggatacgcggggggccgcggtcgaggcggcgttcgagtattgcggcattgaggggagggtgtggtcgaagcggcgtagcgacactgtccacggtcgatgcctcacgatcgatttcgaggatggaagtgtgagtacggtgtggctcgatcagggcttctcgtactggacggtggcgcaggctgcggcccgatccgccgcagcgagctttgacgcgaacggaccggcgacgagtctcggcgagcaactcgcggagatcaagaccagcgtgcaaggacacgcactgccaacacgcctattttttgagcaccgcgcggaaaagactggcgttgttgcggcttag

SEQ ID NO: 30335 - DNA, 3564 bp, Variovorax sp. Root411
ttggccggcgacgaaaagaccgccgctgacggaggagaatcaatattgcaggacttcaccggttgggtaagggagtttctcgcgcggcgtgggttggagcgcccaaacgggcagatgctcttctcataccgcgcagcaaaggaggaatacctggctttgcgcgctatgttcgcggagcggattaccgctttgcagggcgatccgtgggtattcaagcagagagcggagagcgcgtgctttgtgctatatgcggccgagtggtggcgcagggaatacgccggcggcgcctggcgctggttgcacattctcgaatcgatcgcacagtcgccggtcaaccttgatgtactcgagcggagtgccgccgtggagtgggggttgcgggcgtggggtcacctgccgagcggcgccggcaagcgctatttgggcgcgatcgttgcgaatggaggcttgcccctgcagttagtcgccaagggggatggggcgatctcgcgcctacttatccgcggtaccaggcaggcgcagcagtttgggtgggacgcagcgcggctcgaggcgttcttccaagcctatgaactggagctagtgcagcacctgcgcgacgaggacatctatcgcctcctggccatggtagtcaccacggtgctggacttgcgtcggcagtacaacctcgcaggctctgccgatcccgtcggacacctggaccgaatgcgtcccgactggcggcaagcgttccccatggccgtcgatgacaagtctgctgaaccgctattggtcggcctggtgaaggaggcggcgcgcgagatgagcacggcggccgcctacccggtgatcgccactcggacgttacgtgagtctgcacaaaacggcgcgtttcaactcgtgctttcgctgcaaatgccagcgactattgcgttggagtcgctggcggctgcttgcgacatctctgccgactcgatcccacagtcgttcagcatggaggcaataggatcgggcaagctagctctgggggaggctcgacaacttcttggtgcgcagtcgcaagtaatgctgtccgctcggacgcaaagagtcgtgggccaggatgcggcgcaggagcacatgctcgtcctgcgttcgacaggcgaagcgttgcacgaggccgtgggaattcctggtgcggacggcctggacgacttccagccatgggtcttcgccattcgccagtctgagaatgtgctgatgggcgtcggctcttgccgcgtggcagaggagcgtgcgttgcttgccgttagcgcagaagctcaggttattgcggatagtgaagactcgcaggcaacggtagtaggagaaatgcaagatgtgcagccagcgcgccgcatttacgagatttcggggtcagtgtccatccagctggactcgagtcgtttcttcgtacggacgaagcaggtagcaggcgttgcggagcaactgttatggcggggcacccgcgcgccctactcagcggggccatttccggtgtaccagggcgttccccacttgtgccggctgaccgccgacgggcttcttgcaccggtgcatccaaaggatattcactgggttatgccaatgcggcagggcacgcaggtggatagcccaaaggggcatcgcggccctatcgatgcatggctggtcgagggcggcatgcgggtgcgtcgtttccgcatggcacttgtggcgcaagacgcgcgcgttcgctttcgttccggcgactctccgcgcgagggtagtgtcgagttcaagggttggggatttagccaactcgacacttccgctgaactgacgaagcgcgtcgaagtgcttccagatgtggcgcggtgggagctcgcaagcgaaacgaagccaccggctcagattggcgcatcagtcgtctggccccatagtacgttggcgctacggcttgagttgcctttcccatcgagcggcgggcgtttcctgacttccaatggggcgcaagtgacaaaaggtgcgttgcttcccctcaagtgcttgcccgaactgcgcgcgcaggtcttctcgcgaaacccagaagccccgaaacgttatacgctgatgctcgaactcgcgggcacagtgggcgggtctgtggtttcagagcatgcaatctcgttggataagcaaggctttggcgaacttcgtctgctcgaactcgagtcgagcgtgcgcggcatcatgtgtcaaagtagctccctcgacgcgcgcctgaacattcgaatctatcaggcgggctctgtaattgctgagatgcgcctggttcgctacgacgccgagttggagacgaagggcgcgagcatgacgctctccgagcaatgccttgcaagccatggcgtccaggtcattgagcaaattgtgcttgaagcggtgccgctgctaacaagcgacgccgggtcgaaactctcgcaatcgatgtcggacggtgtaccagttggaagctggcccgtggcgcagctggccgcggaccgtggtccctggttggtgtacccggccgtcgaatcttcgttgcagttgaggccttcgctctacgcgggatttgcgatcggaactcagaacgcaacaagcatcgcaaggctttgcccgctaggccaagcgatgtcgtccgaagaggcaagcgagcgcgcgatagagatcgaagcggtggtgtctgccatgtcctgcgatctagatcatcggtcatggggcttggtgaggcaccactaccagcagctctcccacttgccgctcagtaccttggactattggcgagccattgggcgagacccgcgtgcttgtatcgctgccgtgctgaagctcgcaggcggcacgcagctcatggaccgcatgcgcgatgagctgggtctcatctgggcgctcaccccaaaagcagtgctgtcagaggttctggctctgcttactaagacctgggcgcgtcagttcaatgtcgaagagcacaattcgcttgttcacacgattgtgaaaggggagttcccgcagcttgggctcggtgacaccgtgctgcaatcgctggtggatgtggtgtggttcgaatcaggaatcgagcatagccaagagctaacatcgcgggttgcgcggatggcggctacttccccgtcagcgctgctgcagaagatctgggttggcgaagactgcctcgtgcagcgttttctattgcgccagcacgttgacgatcgtgtgtggccatgcacgggcctcgcgaacgatttgattcacatcattcaagcgaacgagccggcatacgcttcgcgcttgtcggcggaattcgggaagagactggtgtggatgccaactgccggccaatcgggaccgcattccaaaaatctgaaggaagacgttgccaatgcgccgctgcttgccggtttactggcgcagttgtgcacaaagccgcagcaatggcgaacacccgagatcatgtctcgcctgctccgcatcaggagcttcgatccggcgtggtttgacgaaagctgccgcataggaaccctcatcgccctttccctgacagcccctcaggcctcccaccatcggcgtgcgcctcgcccggccgaagtcggttga

SEQ ID NO: 30336 - DNA, 6201 bp, Vibrio alginolyticus
atgcaatattttgagtctttagttgaccaacttaccaaacgtgcggcacgagctactttagggcaatttggtctgcgatctaagccgttacgtgaattcttgtggcagtcgttttctcaacctccgggtaaagacggagcttttcttgccgatcctgtctttgaggcaacattcggctggaaaccacatacagaaagtatgcgagatctttcaggggggcttctaaaccgcgcaattgtaaaggcgatggcaaacccacctaaagagcttgaagaagattacctatttgatagtagttggtacccatactctcaccagtatgaggcttggtcacacctattagagacctcacctaagtctgtgattgtaagtagtggcacgggttcgggtaaaacagagtgttttttggttccgattcttaatgacattgtcgacagaaacagcaaaccagatggtgttgaggctctgtttctatatccactcaatgcgctaattaacagccaaagagagcgtctgacagcatggactcaccagctgggggatcaggttaagttctcactctttaacggcgatacgccggagtccgtcagtgccgaagagcgcaaaaaacatccgaatgaacaattatctcgcagagaactaagggaaagcccagctcagattttggtgacgaactcgacgatgttggaatacatgttagttcgtcaaaaagatgccaatatcttgaaccgttcccagggtaagctacgttggatcgtattggatgaagcgcacacctatattggttctcaggctgctgaactatcgttgttgttaagacgtgtgatgcatggatttggcgtaacaccagaccaagtccgatttgtagcaacatctgcaactattggtggtgcggattctgacgatgatctaaaggtattcttggccgatgtggctggtgtcgatatgacacaagttcacttggtgaaaggtaagcgcgaaattaagcctctgatggaattagagcagatcaaagcgatgagtcttgatcatgtagcgagtattgaaaacgagcaacaacgctacgatgttttacaaaacataccgccgctgcgaaccttaaggcagcgcctcagtgcaacagataatagaatgactcttaacgaaataagcaaactattatctgcaacagaagagcctctatctgaacaagttactctacaatggctcgatatatgtgcttcgacgaagaatgcgaatggcgatgcattcatcccgtttagactccatctttttcatcgtgtggccggtggcctctgggcttgttcaaacgctgactgctcgtccaaagtaggtacacctttagaatctgtcgactggcgatttggcatggtctacatgtcgagacgagataaatgctcatgcggctcgccggtgtttgaaatggtcagctgtaatggttgtggtacaagcttattggctgcgactgaaataattgactcagagacgagtcatgcccagcttcatttgacgaaaccagactcatctatagatgactttgctctggatctcattggagaagaagacttaactaacgaagatgacgaagaggtttctaatgagtatgaccgctttggtctcatctccccattaagttttgaagaaacaggtgaatattggattaataaccagagagaagtgaaagcagctaaaatgcccggttcgcacttgattcatcgagtagaagggtatcgcaaaagcgatggtgctttatcactccgttgtccgtgttgccaacatacaaaaattaagaattttgagttttatcgccattttataaatggtgctccgttcatgttgtcgacggttatccctacgttattagaatattgccaagatggtaagaaagaacaattaaaaggtccttggaatggtcgtagaatgatcacttttaccgatagtcgtcagggtactgctcgcttttctgccaaagcacagcaagactctgaaaggcagtttttacgttctacgatttatcacttgattttggataaagcgatccgagaaagtggggcgagttcagcttctagtccagagctggagcaataccaagcgatgctcaaaatggcaatcgagaatggcaatgaaggtatggttgagttcgttgaaggtaaaatctcggaactcgttggtagctcctcaaagccagttacggtcaattggttagaagtggaagacttcttagcggaacagaaagaagtgcagttgtggatcaaaaaattctatgagcattttgatgaccgaatggacatggttgcgaatcctaagttacttgctcgtttattgcttttgagagagtttaatagtcgaccgaaaagacagaatacgctagaaaccatgggattagtctgtatggagtacccagtgctggataaaaaggcgaattcagctccgagtgagtggttgagacattttgacagtgcagacgaagcgcgtgcagagtgggtaaacttcttgactgtcgcagtaaattttcatgtgagaagcgtgaaagctgtgagggttactgatgagcagattaactggatcggtgctaaatattctccagctttcttagtagggcaagatgaacctacccatatttggaatgtagaggcatggcccaaaattaggcgtaatggttcacgacaaccaagattagcaaggttggttgcaacagctctaaatatggagttggatgatgctaattctcgggctgatatcaacgaaattttacgccaagcttggatggctctgcagtcttccgtattgacaccaagtggtgatggctatcgtttggagcttgaacagcaagtcagcttttctttattagcggacaagcatcaatgtcctcacacccagaaaattattgataagcctttgctaggggttactccgtatttgaatgtatctggagaccgtaacgagcacttgtgtaagtcaatttctacaccaagttatccattcccgtttggacgagatccagacagtggagaaaccgttgagctaaccaaagttcgagattggcaagagcagcctgaattgatgaatgtacgtaaagaaaatgcttggtctgatattgctgaccgcgttgtcgagcgtacaccttactttagggttgcagaacattcagcacagctcaaagcaagtcagttacgagagtatgaaaaagaattcaaagcagggagaatcaacgttttaagctgttctacaaccatggagatgggggtcgatattggtggtatatcagtagtcgcgatgaacaatgctccgccgaacccggcaaactatttacaacgtgcaggccgggctggtcgtcgtggggagagtaaatctattgcacttacgttatgtaagtcgacaccacatggtgaacatatcttttcgaatacacgttgggcatttgatacagagattaaagttccgaatgtatccttatccagtgattacattgttcgtcgacatgtgaattcgttattacttgcaacatttttaaatcgagtcttaaagtcagaaaattcgctgaagctgaattgcgggaatttctttaagtctgatcatggctcagcggcttctcaagcggagcagtttgttgactggtgtgtgaatggtgcattagagcttgtacaagaaggccttgatactttgcttcgtcgtacatctctcgatgcgacatcacgtatcgaaatactagatgcctctgctacacacatgaagcaaattgttgaacgttgggtagctgagcatcaattgttaaaagatcaatctaatagcttggaagataatcctaattccctctcgactgcgcaagctgcagttgaaagtcaaattcaacgcttagaaggtgagtttttactgtccgagctagctcggaaaggcttcttacctggctacggtttcccaacggatgttgtttctttaaatacagaccacgtcaaagtgatcgaaaggcgtaagcgcaacatcaagatgaagcaagatcaaattagtgacaaaacatcccgtaaagacaatctttacagcgcaaaaggtttcccatctcgcgatttgtctgtcgcaattcgtgattatgcgccgggtaatgatgttgttattgatgggcgtgtttatcagtctaagggggtcttgttgaattggcatagccccgcatccgttgatcaagtcaaagagattcaagcgttgagatgggcatggcgatgcgacaagtgcggagcaagcaatacttcttctttaagacctgataaatgtgaatgttgtggtaatgaatttgatttgactgatggcaacacgaaagagcatatccatccatacattcaacccgcaagcttcgcagtggatattagagatgagccccacaatgacatttctcggctgaaccacgtacctttcaatgacccttgggtaacggtagatagttcagagtggcgagaagtgagtgtgaaccccggcgcatcttatcgttctagtcataatgggcatgtgtattactacagtgctgggcctgtgaacaaaggttatgcgctttgccttgagtgtggtcgcatggaggcaatgccagaaagtgaagataaatcgccgaaagacgtattaatggggcacactcgtttacgaggaggtaaaggacatttaactagttcgagcgaagtattatgtggtggtaatgatagggagtttactgctaaggggcctttgaagctcggacatagtacttatacagacgtattcgaattattgttatttaatgagttggggaaaccactagtagatagaagtatcgcacgttcagtcgccgtattgatgcgaaatcagttagcagagaaactcggtatcaataatgatgaaattggctgtacaactaagccagtgaattatgagggacgtgaagtgcaagcgatcgtcttatttgataatgcagctggcggtgcaggtttctcaattcaagcttcggactatgttgtcgagctattaaaaggggcaaaaaagatagcttcaagttgtcactgtgataaggcatgtcatcgctgtttagttgattattcgactcagcatgtccttgatctacttgaccgacgtaaagttactgcatatttgaataacggttttttcaacaatctcagccttccttcgggatatgaattattcgaccatcataataggcgtgagctacgccccctaatgatcgcaatagaaaaaacacttgccaaggacgatgactctgacatctatgttgaattacctatcagtcaattgagcgatttaggagggtggctgttatatcaagcattcagccgttgggttgctgaacgtaaggtaaacctgatacttgcagaggctaaagttaaagagttgtcactagagcaaaaagtgacgctatcttggtatcaaaaccaccctaatgtgaagcttttgagtaaatccttgaatggccagtccgattacgtggtgcttgcatctgtaactaataagtcatattgctaccaatggggtattcgtgaagacgatcatgaaactctagttactggcgttggttctttagggacgttggttgacttcgatattacacgtctgaaccaaagttctgatgtagagaaaatagtcatcgatagtgagttggatggaaaagcttctgagttcggatttaagttctggtcccacgtatttaaatgttccccggcattgatggcactaatggaaaatcaggttattgaatctgtaacgtactcagatcgttaccttgcggctaccttaccattctcgctctgctttaatgcgctgaagtttataggagagcattacaaaagttgccagatagaaatcaacacaggtgaattggcgcgaggttacaggccagcaacggtacaagataacttttacgacgattattcacgagataaggttgtgagtttggcgctagagagtacggcggcaaatatcagttttaaaacagctccgaagtacaagctaccacattcaagaacgctagttttatcgtttgataatggacgtcaggtgacattgtggctcgatcaaggttttggttactggtatgcagacaagcgtttgtccgaaaatcatttaccgcataatctttatgatgaagaacacgcaaagattattgtggaaggacaatctcaattatcctcaggaaatttcccaacagatatctttgtctcattttcctaa

SEQ ID NO: 30337 - DNA, 3366 bp, Vibrio alginolyticus
atgcaaacatacaaacacattcttacttcatttctcaaccagagagaattgaacaagccaaacgctcagcctctttatagttacaaagtcacggctgaggagtttgaatcacttaaacagtcgttgattgctagtgttgtgagtaatggaatccacacatattcgaataaaccaataagagagtggtccggatgttttgtattgtatgcagcagagtggtggcgcacgtcatttcaaggtggagtatgggcttgggaacctgtgttggaatctttaggtttaccagccaacgcaatttcgccgacacaaagaagtgagatagttgtaaagggcttaagcttttggggaagaaaggttttaagcaacacgaagggacgcatgttacttggcactgttgctgtcgaaggtggtttaccgcaaacgctaatccaagaccctcatagcaagctcgcccattacttcgaacaagtcatccaagattatggccagtttgctaactctcgcttaagtgcagcctcaattgcgaaagcacatgcgcattacattgctgcatcttatcgtgatgaaacggtttatagtattgtcgcgcaagtcgctgagtctatttactctttggtcgataagcatggcttagaagagcagagtgatccgctacattatttgaatacggtcgacgcgaactggtcacagagtttaccgttgaatatggagcctgaggctgctcggaccttattaggtaacgcgcttggccttgctgtcgaagttcaacgccgtttaccaaattcaattaaggttttgcgttccttacgtaaatcctattctcattacgcttctatgttggatgagttcgcgctgggcactgaagaagtgtaccagtggaagactcaagttgatatcacgctcaagtctcgtcttaacgttcaatttttacagcagctgtttggtagtgtgaatctacctgagcggataaatctgtttgcagtcggtcaaaagagtttgttattggcaaaggcgattaaacgcggtactgactctgagcactatttacttgatgtttatacgacgtcactcccagaagattgggtcgactgcgacatacagttaaaagcaacggatgaccttggaaattcatggtatgccccggtgctgggcggtgctggattagatgtgaatgaaccttgggtattcacccaacacaatgatgaatggctgtttaaagatgctgggaatgtcacgtgtgaggaatcaaacgctttagtttcagtgcctgaaccattatcacatcttgaactgggcagtgtcggcattatcaaaaatcgaattctttatgaagctaatactcaaactagctccgagttttactttggagagtattgtgtgtctctgcagcaagaggatacacattccctagaatacaacttagtcggtcaatcggtttcttatcaaacaaacccaagtaagtgctttattggcttgcctagtcttgttgctattgatgaagctggtcgacaaacgcctatagcgaacactcagcttcgttggcgtaatacgatgttggaacaatggcaaactatgagcactgtaccttttggtaaggtcgatattgctttattcgaaaataataaacccgttaagcgctttacagtgggtttattaccagatgattttgttattgatttccagccaagccattcggtacaaatcggccaaattggtttttactcagagaatcaattgccttctatcgcattagaggataatgagctgatcgatatattgccgagttctgttctatctcatgctcaagaagaccagaatgaagcaaagcgtagtttggatatgttgagcagccaagcccatccacctgcacagattaatgtccgtttatggtggcaagatcaagcaaagtctttgtcgatgactttgccatttcctgcgaaaggcatctgtttgattggtactctaggagaagtggttcgcaatgcagacgccatcttagttgataggctcaatcgctatgagttgttcagttacggtgtaaatgattcactagaagtggaatttaaactacaagctagagatattcacggtgcactttctaaatcagcatacgttaaacgttctctgccaaaaggcgacgccttgtctgctggcctttcattagcgacattcaaagaagatattgactctctgtttgctttatcaacttcattagacgcgatcgttaaagtttccgtactcgataatgcacatacgatattcaattttaatgttaacgcgtatggcaacacgctcacgcctaaccgggaactatgcacggttgaaattgataacggccactttatcggggcactttctatggtgccactggataacccaacctttgctccgattactttagtaaagaatgatgaacaatggcatttccctgatgaagatgcagcgccaggagcttggcttatttatgccgatgaggcagagcagggagtgcgaccgttgatgtggagtaaagatctcgaactcttatcgtcgccaggcaataggctggaagaagcagcagcgattggctcacgtaaagatcgtttagataaattctcggtcgtttgtggtcagctagcggttgagtttaatgctcctgagtgggcatatatcaaagggctgttggcttttgatagcgttcccttaaccacatttgatttatggcgcggtgcaatcactaaaccagagtttatgcttgcaatgttgttaagcgcgaataagaaagaagccgagcgtatttggcaatttagtaagcagtttcctttcttatggcactcacttaaagcccgagatgcaatcgcggtgattaatgcgttctatgcttcgcgtatcgaagagtatggaacagacttttcaggcatcatttgtgatcaaatagaatcaaaattggacgacttagtcaccagatatcacggcttacaaagccttaaaaatctattgatgtataaaattgactctagccgagataagccatctcttaatcccgcagcctataatcagcagttatttgacctacgaaatgcgttgaacaatcaatatgatgaatctcattggccttgcgcatttgcagatcacattttgaacaatgtcattaactcggtaaatgagcaactatccggagtctgtttcaccactaaaaacctctatcgcaataatgtcatgaatgcgcctgtattactcgcattatcgacttgtggttctgcttcactccgtgtgactccagaagttgtgcatgcaatgagacagtataaaagcttcgatcccgactattttgaacaagcattcgctcttacacatcaaatgattttcggcctagtgaatagctaa

SEQ ID NO: 30338 - DNA, 4359 bp, Vibrio campbellii HY01
atgttgtcaacggtgatcccaacattgttggagttttgtcaagatggcaaaaaagaacagcttaaagggccttggcatggtcgccgaatgatcacgtttacggatagccgtcagggaacggcccgctttgccgcaaaatcacagcaagatgccgagcgccaatttttgcgtgctgcactgtttcatttagtcgcagatagaacattgaaaagtggcgcgttgacgccggagcaagaagcggatttgaagaaatacaaatcacgcttagcgatgttcatcgaagatggtgacgatgacatggttgaaatcatggaagaaaaaattgcggcactgtgtggtggtggtgatgtttcgattccgtgggcagatgttgaacatgagcttgccaaagagaaagagctccaatactggatcaaggattcctatcagcgatttgacgacaagatgaccatggtgaaagatcctgtcttgctggcaaggctcttactgctgcgggaatttaacagtcgccctaagcgtcagaatacgctagaaaccttaggtctgatccgcatggagtacccagcccttaaagataagggcaatacagctccttctgaatgggtcgcattatttgatgatcgggacagagcgcaatcagagtgggtaaacttcttaacgctgtgcttaaacttccatgtgcgcgccaataaggctatctcgttaaccgaagagcagctgcgctggattggtgcgaagttcagcccggggttgatttctgcgccagacgacgacagcccgtttcgtaatgttcagagttggccccaagtcagaaaaggagcagtacaaccgcgcttggtgaggttgcttgcaactgcgttcaatctggatattactgagactcaggataaaacacggctaaatattatcctgcaagatgcttggaatgtgctgcaacgctatgtgctggcggggagtggcgatggctaccgcctggagcttgagcatcaggtaagtttcagtttgttggctgaaaaatggcagtgcccgcatacgcaaaaaattatcgatacgccgctagctaaaattacgccgtacttgaacgtaaaaggtgaacgtgatgaacaagtctgccgcttattagaagcgccggtttatccgtacccttatggtcgtcagattgaagacggatcacccgttgcgcttaacgtggtgagggactggcaagaacagtctgacatagctaacttgcgtaaagaaaatgcgtggtcagacatatcggaccgtattatcgaacgtacaccatattttcgtgtggcggagcattctgcacaattaccggcccctttgctgcgtgattatgaagataagttcaaaaaaggtgcaattaatgtgctgagctgttcgacaaccatggaaatgggtgtggatattggtggtatctctgtggtggcaatgaataatgcgccgcctaacccagcaaactatttgcagcgtgcgggtcgtgcgggtcgtcgtggagaaacgaaatctgtcgcgttaactttgtgtaaaactacgccgcatggcgagtatattttcagccacacgcggtgggcatttgacacgcctattcatgtacctaatgtatcgctatccagcgaatacattgtaaggcgccatattaatgcactgttattgtcggtattccttcgtcagaaaaatatcagcgacaactctctgcgtttgagctgtggcaacttcttcctgtctttgcatgagcagtgtgcatcacaggccgagttgtttattaactggtgtatgacagatgcgcttgaccatatgagtgacggcttagagacgttgcttcgtcgaacaagcttagaagcgacgtcaaaaatgagtctagtgcaggaatcagcacagcagatgaagactattttgtgcagttggcagaaagaacatcagttgctgtgtgagcagagtgaagcggtaaaagcagatactaaccgcctttctattgcacaggcggcggtggaaacgcaaattcagcgtttagaaggggaatacctactttcagaattggcacggaaagggttcttgccgggatacggttttccgaccgatgtggtgtcgctaaataatgataatgctgagtccatcaatcgaaggaaagcattgattcaagcggcaaaagaagccaaatctgcgaaaaatgatacgttagagcaccgtattgataacctgtacagtgcgcgcgattatccatcccgagacttatctgtcgcgattcgagattatgccccgggcagtgaagttgtgctggatggtcgtgtgtatcaatcggcaggcgtgatcttaaattggcatagtcctgcgtctgcggatcaggtgagtgaaattcaatctttgatgtgggcttggcgttgtcagcagtgtggtgcaagtggaacagagcgacaaatgccgaaggtgtgcagttgctgtgaggctcagttagcttcagacagttaccaccgtttcattgagccaggaagttttgcggtcgatattcgtcataaaccacataatgatatttctcgcttggtgcatgtgcctttccaagatccttgggtaacggtagagcaagataagtgggaagaaatgagcgtaaacccaagtgctttgttccgttctagccataacggtcatgtgtattaccacagtgcagggttgtccaatacgggatatgcgctctgcttagagtgtggccgtatggaggctatgccagattcaccggacgtgacgccttaccaggtcttggaaaatcacactcgtttgcgtggcggtaaaggggaaatcgagcgtgaaagtgagcatttctgtggcggtaatgagcgtgattttgcgattaaaggcccgattaagttaggtcatagtacacgtacggatgtgtttgagttattgcttttccatgcagatggtacggttctgaacaatcgcacgattgcccgttctatttcggtactgttacggaatgagttggctgcaaaattagggatcaatagtgatgaggtgggttgtaccacaaagccagtgaattatcaggagcatgaggcgcaggcaattgtgctctatgattgtgcggcgggaggtgcgggctttgcgataaaaacgcctgagtttttgatcgcgttattgcaagctgtgaagaagaaagccgtggattgtcactgtgataaagcgtgccatcgttgcttagtggactactcaacgcagcatgcgctggaattgctaaatcgttggaaagtgatcgagtttctcgataatgatttttttgcacgcttatcgctgccagatgaatttaagttatttgatcgcgataaccgaagagagttacgtcccttgatgactgccattgagcaatcattggcgcatacgatagaccctgagctatgtctgtatatgcagcgagatactctagatgatttaagcaaatggccgcttatagatgcactgtatagctgggcaagagagcggacggtgaaggtggtgttactcagcactgagtcatcggctttaacgacgcctgaacagatcagtttgtcatggcttgctaatcacccgaatatcgacttacttcagcgagatgacgcaataaaacgtgatatgacgttatgtgctgaaattttgagtggcaataaagcccaatcgtggggataccgtgatgaatatgaagctcagttagtgacaggtttcgggagtagaccgatgttgtcagcgattaagctggatgcactgacgcacccagagagaatcggaaccgtgaatattcatcatgagcttaatcattcggtgaaagcgtttggtgcgctgttttggagtaaagtactgaaggcatctgatttgttgttgaagaaaatgcagacacatcagatcgtagaggttgaatactgtgaccgatatttggctgcaccgctaccttttagtttatgtttaagtgtagttggggcattgctggcgcattataaggattgtaaagcttcgattatcacggggggattaaaggatggggggtatttgcctgaatctgctcaagataattggtcgtctaatgatgcaagagacaaggtagtaaatcgctgtatcgagaaaacacagcttgatataacgtttgagacaaaaccaaagtatcaattacctcatgcgcgcacaatgacatttactttcgatgatggtgcaaaagtaacactctggctggatcaaggctttgggtattggtgggtaaacaaatatttaccagaaaatcaattccccgctgatttaacggttgatgagcaggctgaatgtattgttcaggggccatggcggctaaagagtggagattggccaactgtgcttttcttttctattgatgaataa

SEQ ID NO: 30339 - DNA, 3378 bp, Vibrio campbellii HY01
atgaaaacatttcgccattgcattgcagatatattgtcatcacgcgacttagagcgtgtgagtggtgcgcctttatatagctataaattgacggatggtgaatattcatcattgcaaacgtcgctaattgatagtttacgtaaaagccatatcgagagctacatacccaaaagcatgagctcagaatgggctggtgcatttgttatgtacgctgctgaatggtggcgaaaggaattcaatggtggccattggagttgggagccgattttcaagtcgcttaatattcaagataccgatcttgctgcgaaccagcgaaatacattgattgaagcgggttttcgtttttggcgccgcccagtactgtgcaatggtcaggggagaatgttccttggtaccgttgcggtagaggggggcttgccgctgcaattgataacggacccaaacaacaaactctcccattattttgagcaagtgattaaagactttggcaagtacgcactctctaaaccaaatgcggttgccattgcacaagcgcatgatcattgtatcgtaccgtcatttcgcactgatgcggtgtattctgttgtcggtaaaattgccgaagcgattttccagctaaccgatcaatatggtttggatgagcagcatgaccctctacggtttctggatgcagttgctccagattggtcaacctcactaccactaaatattgatcatgatgtagcaaaaggtctgttaaatcgagcattagggcaggcgattgcagttcagcgacgcttgccacactcattgcgtcttatccggcgattaacacaaacgtataacccccacgcttttgttgatgatgagttccagcaaaccgagcagtcttggacgtaccaactggctatctcgctgcgaccgcggttgagtgctcagtatattcaacagctctttggtatgcaggttttacctgaacggtttagtttgtttgcgatggggaaaaaaccgttgctattagcaaaagcgttcaagcccaaaaataacacagaacgctatctgttggatgtgatgacctgtgagttacctgatgattggtttgattgtgaaatccaactaatggcgcggggcgatgaagggcaatcatggtatgcccctttgttgggaggcagtgctttagatgcggaagagccgtgggtttttgccgataataatggtgagtggacgtttgtcggcgcaggggatgtaaattgcgaatcaagcagtgctgtgatcgctttgtcttctgagcttgcagatgtctctttgtctcccgtctcgtgtgtaatgggctctgtgaccacaccgcacgcacaatctttgtatctattcaatgagacgggccgatacagctttggcaactatgtggtgcaactcggtgagacgagtgagccaaatagagaatatgtatggcaaggtgaggaattgccttatcaaacagtgccaactaagtgctttatcggcaaacctgccttgttagccctttcttcactagggggacagcaacgaattgcgtcggagcgattacgttggcatgacggtgcaaaacaacaatggtgttcatttgagaccttgccattagggcaaagtgaagtggcctatattgagggtggccgagttaaaaagcgttttcgattggcaagtttacctaatgatatcgcgattgaatttttgcctggcagccagatcaaccgtggtcagattgttatttcatcatcgcgcccccctatggtcgctgtcgcacagcctacggttggccacttggattacgacgtctcacgagcatgtgatgccgtgacgattgatttgttttgtgcacaggagcaaccgcctgctgtgctggacattgatctttggtggcaggaaaagccgaaagcaatctcgctgaccttaccatttccaagtaaaggcatttgtttgttggatgagagccaacaattggtaccgtgccatagcgaattactggtggataaaatcaatggatatgagttgcatggctatggtgttgacggtgaaatagagctgcaatttttactaaaagctcaagatgttcgcggggcattcagtcgaagtgcatttttcagtgccgttttgccttctgttgacgcattagcttcaggcttgtctttgtccagtttccgtaccgaaattcaatcattgtttgccctttcatcgagtttggatgcgaaagtgcaactgacggtgtctcatcatgggcaggcattgtacacgtgtgcgttatcggcgtatgagtgtgcgctcatgccagatcgagaaagcaacagtgtggcgctagcacaggcgatagatgacaaaggtacaccagaactctacaccatccctttggatagaccggatcacccaccgttagcgctaatgcctgcgtctatgacagatggcatgtcgatgcagtggttatttccgcaagaggaaatagaagccggtgcgtggctgatttacagcgataaccctcagtttggactgcgtccgctgatgtggagtaaagacttagagtgtttgtctgcgccaagtaacggatttgaaatggcagcgggtattgggcgccgggcggaaagactagaagcgtttgcttcggtggcattagaaatggcatacgactttaatcgtcctgaatggaaatatgcgcgcacgttactggctttcgatcatgttccattaaccacgtttgacttgtggcgtggtgtattgcgccaacctgaatttatgttggcactgttgctgaatgccaataagaaagaaattgatcaggtgtggaaaatggataagcagttcccgctgctttggtatgcattgaaagcgacttctgccgtaaaagtgacggaggcgttctattactatttgcttgagcgtttgggcgaagatatggcggatgtagcacagttgcggattcagaagaagttggctgagctagtgtcttattttccggggctggcaccacttgccaagctattgcaatttaagctgggcatggttgagcagaagccctcactggaaccccctgcatatatgcagcacatgttcgattgccgaaatgcgctttctcagcgccagtctgacgtatcgtggcctacggttttcgccgatcacatttttcagtctgtgatgaaaaatattaacgcgcaatgggttcaactctgtttaacgaccaagcatggattcaaaaataatgtgatgaatgcgccagtgttactcgcgctggcaacgagcaatcaagctgagttgacgatgacgccagaagtggtgcatgcgatgcgagaatatcgtcgatttgaccctgagtattttgatgacagctttgcattaacccagaaaatgatcattggcttgctggctatttaa

SEQ ID NO: 30340 - DNA, 6438 bp, Vibrio caribbeanicus
atgtctacaaaagcaattaattttaagtctctctataaagacctttcctcagttacgtcacaggcagtgattaaccgacttcagttgaaatcggcgcctttaagaaagtttttgcaaagtgagtttcaagtcaaatatggcaagggaaacgactttttcgctcaacctgtttttgaggctacttttggttggtcttcggaaggctgtgaaaatgatcttaacgggctggtcactcaaggtaaattagagcaaactttcgttaataacctgtcgcaaccgccaatgcctttccctgactcttctgaagagaaagaggaatatcgtcttaaaggaataagtgaagaccgttgggctgaagacatacaggaagactacacctggcctctggatagaccgccatataagcatcagttggaagcctgggatcacttgtcttctgataaagtgaaatcagtagttgttacttctggaacagggtcgggtaaaaccgagtgttttctagttccattgttgaacgacttagcaaagcaatccaatcgagctgtagagcctcttgagggaacacaggcgatattcctgtacccgcttaatgcactgatcaattcacagaaagagcgtttgagcgcttggactcgtggctttgaagggaaggtgaggtttgctctgtataatggtgaaacaccgactcaagctccatctaaaactatttccaatgcaagtcttagtaaaaacactgcctcagaattggtgaccaacagaaaagacatctggtcttcaccgccgccgatactcgtaactaacgcgaccatgcttgagtacatgcttattcgccaacaggatgaagatattcttgccaagtcacaaggaaagttaaagtggattgtgttggatgaagctcatacgtatgtaggctctcaagcagcagagatagcactgctactgcgtagggtcatgcatgcctacaatgttaagcctgaagatgttcgttttgtggcaacgtctgcaacaattggggataaaaacaaacaagacgaaacaaacagagatcttcaaaggtttttggctaaggttgcgggggtgttacctgagcaagttgcagtggttaatggtcatcgtgctataccacatatcaactcgacagggatggagtcttctttcagcttgaaaaaagcgagagaaatgagttctggtgagctatatgactatatgagcagttttcccgttcttcgagaaatgcgagagtccttaactagagagccgcatacacttgaagagatagctcgtattcttgaatcgagtaaatctgaacgtatatctcaggttgagctaacaaaggcgctagatatcattgatttggccgtaaccgcttatccacaaggagatgatagccagcaagcattcctgccggtacgagctcatattttccatcgctctcaacgaggtctttgggcttgttcagatccaagctgttgccataaagctaatacagagcttcaagagggttggaagtttggtatggtttatacaagcgagcgtacacattgtgaaggagactgcggagctcctgttttcgagctaacccattgtaaagattgtggaacacctagccttgctgcagcaaagacaacagcaaaggggggtataaagctattggaaccgagagaaacagatctgcttgacgattatgtcgatgagattgacgagtatgatcagttgtctgaagaaagtatcgatactgagtttgaggctaatgttcagatctttgcaagagaggatgctttggggaatacacatgatcaactagggtgcactcacgtaagcatcgacccgaaaaccaatcgcatatctgaaggtttcgaatctgggcatcttgatattttctataaccaaaatgatcgcgatgacggtttgcgctgtgcacactgccatggtgtagaaaatgtaccgaatactcaattcaaacgagctttgttagggtctccattcttgatgggctctctagtaccagctatgttgcgccacataccaggcgataacagtgatgacctcaaaggaaagcgtttgattacgtttactgatagtcgccaaggcacggctcgattttctgcgaagatgcagttggattccgagcgtaactggacgagaagccaggtttacaagactgcggtccttgaggctagagagctggacttgcctcaaaacgtaagagatttgcaaacaacaattcaagtaatgaaagatagtaaagttcctgacgctgttattgcacctatggaacagaactacctagaacaattaaaaaaaataccttcaaagaaagtaagttggtctgagctaaaagagcgtctgagcacattgcctgagatacagttactttccggtgcagaacttgacctgttggaggggaaggctcttgagaaatatgatgagcgtattcccggggagtatcgcaaacgttccgagttgttgagtgatgcgagtaatctggctgatctgttcttaaagcgcgaattttctaggcgtggtaagaatgcgaacaaccttgaatctatgggcctgattagtcttcactatccagtaatcgctcagctaactgaagaagatcttacttcatcagagtggagaagtttaggctttaaccttgaagatcttagacactatttgaagatttgtatggatttttacatccgagaaaatactctcgttgagattgataggagtgttatcaattggatgggagcaaaaatcaacccgaggttgttaaaagaatcaagttacgagtacaaagatgaattcgagaaaagggcgttatttaggttcccagtggttaataacggtctacagcatcgtctagtccgtttactcgaattaggctcaggccgtattgcaaaagatgagaaagaactctttaactctgtattgttatttgtctggggcttactaactaagcgcactcaattattgacgctatctgagcgacaagaaatgagtacaggtaatgagatttctggttataacttaaagtttgacgagaaagtagaattcgcacccatcgaaaaggcttggctgtgcccgattactaaccgctggttagatactacctttagaggtttgagtccgtacacaacaggctcttcgacactggacgatgttaaatgtgatgagccatttgagataagtcaccctgacgcagaaatactgaacagctctccagctggcataaggaactggttaacagacgaagacgttttgaatgctcatcgtgatcatgggcgttggtctgatatcaatgacagagtaattgcgggtgtacctttagttagagcggctgagcattctgcccaacaaagttctgacaaactcaagcgtttagaaaaggcatttaaaaaagattacttaaatgttcttagttgctctaccacgatggagatgggggtggatattggttcactgagtatggtagcaatgaacaatgttccaccgagtacgtctaactatcttcagcgtgctggtcgagcaggtcgacgcagagaatcaactgcacttgcgttaactttttgtaaagcaacacctcatggtgaacgtgtatttagcgaacctaaatggcctttcgcaactccgatccgagtgcctaaggtttcgctagacagtgggaccattgtccagcgtcacatcaatgcgtttttgttagcgagctttttgaagattgagaaaagtcgctctaacaatcttttgaagatgcaagttggtgcatttttcttaggtgatggtggtctcaatccatttaacgcctttagaaattggttagctggtcctgcacgtagtgatgcaaatgtacttgcaggtatagatagccttaagtttgattcggtatttgctggtcatctcaacagcattcttatggagagtgcattaaatgccattgaatcttcgcataccaagtggatgcgcaggtacgactctctcaatacacaaattgaagcaacaagcgataccaattctccagcgtctaaaaaacttgcaaggcaattgaaacggttggaacgagattatttattgtctgagttagctaatactagttatttgccgggctatggttttcctacgggagtagttcagctaattaccgacaatcgcagtgaaaagaactcaaaagatgatggtaagtctgaccaccgaaactcttacccaagccgaggccttgaagttgcgctaagagagtatgctcccggggcagaaattgtgcgtgatggtgctgtttatcagtcacaaggccttcaactcaattggaagatgccattctcaggaaatgacattaaacaagaacagcttattgagtatcaatgggagtgcgagcactgtgggaacataggctttgagtccgtgagttctgaacgagaaaatattcgttgtactgattgtgacagtgacagactcacctggagtgaatttattgttccatcgggctttgttgttgatttcaataagcctttgcacaacaactatgtatcaccaaattactcaggatacagagaacctaaagttgctttgagtgatgcacagtggcagccactttctaacactggtgttggacgttaccgtgtatctgaatacggctccatttttcattacaacgatggagaaggtggtgggtacgccatgtgttggtgttgcggtagagcagagcctttgagtgtcgaaaagaccccgaaagggaacgttagactatccaaagagcctcacatattaaatacgcataaacgactccaaggctttaaggttaaaggtgaggtgatgtgcgaaggtgttaaagatggctggggaatcaaagttagtgagatcagccaatctgaaagagaaatctccatgcctttcatcatgggctatccgcaaagcacggctatgtttgagctgcagttgaagaaccctacctcgggcaattggatatctgatgagactttactgtacacgcttggtgtagcacttcgacaaatgtactcagatgagaagggtattactactcaagaactcggcgtagtaactaaacttaaaagaacagagtcctttgaagaagtggtgagtttatacatttttgattctgcgacccagggcgctggcttctcaagttctatgcctgaggtattgtcgcgtctgttagatggcctcatgaaatacttgaagcagtgcccgaatgattgtgaaactgcatgtcatgcttgtttgttagactatgatactcaacataatgtaaaagtactcaaccgcaattatctaataaaacagttagaagataataagatacttgaaggccttgctttagctacagacagatgcttttttggtgattcttcggttgttgaactcagcagtgcttctcaggttttgtctagatttggacattcttgtaatcatgtaagtgtatttttgagtacgccagaatggcattttggagaatggagtatccgagaaaaaattacgactcttgccactaaagggattccttgtacggtctatctttctaaagagttagctgaatcaatcaactcagatttggcgtgggaaatagctcgaactatgcctgtaggtattatcaatttccaagagttggataaacccatcgaattagcttcgggcgggcagccagttatgtcgttaaaggtggattcagaatcacactggtatgcgaccgatgaaatgggtcaattgggcgcaaatgaacattggggaagcggtgaagacctgtgtttagtaactgctgtaaaagagctagagattaactcgactaaatttaatcttgaggagcttgctcaggcctctaatctgaatgaaaactcctttatattaagtgatgtcacttcattgcaaggcagcattacttcattcggagttagtttcgttgatttgttggtagataatatcccatcattaaatgaaactcttcacaacaatatcgaatctattcactatagtgaccaatatgtggtgagcccaattagtgttgtgttaattaaccatgtattggctgcatttaataagcgatatggccacttttcatcagaaatcaatactgttgctccaaggaaatatgtgactggtcaaagggtgtcttcatctgttggtgacaacttcttggaagcaaatgatgtcttggattttatctatgattcgtcaagagctctcggtgccgaagtttatggagatatcgttgataagtccgaattatcacatagccgcattatgcgaattgatttaaaagatggtagagagattaagcttctatttgatcatggtatgggttattggagccgcagtagagattacccacaaaagttcgattttaaaaatgttggatgtgaagcatcctctattaatgattggaattttgggctgagagattctggtaaagaaacttttatcgcgattaaaatagaggagtaa

SEQ ID NO: 30341 - DNA, 3510 bp, Vibrio caribbeanicus
atgataatagagaatgttcagaatccagtcgcttcgatgcagagttggtttaaccagtttgaatcccgaagagcgaaacctaaaaaaggaatgcctttatgggcactgaaggttacggacgaagaacttcagcagatgaaccaattgctaagagcactttttagagctaaagatccttcggtcgtgtttaatcaacactcttgtgcaggttatggtaagaagtttgaccaaatattcacgctttatttagctacatggattcaaagaaactttacggggggcaaggaacgatggcctgtggttctccgtagtatcgatatatcacatgacaatcgactcaatacctatatctatgattcagtaaaagcagggttaaaatactgggggatcgagctttactcgacttcttcagcaaatcaatattttgcaacgttatactgtcaaggtggattccctagatctggtcttgtcggtttgagttccggaccggtaccagaatatttggacaaggttatatctcagtatgctttgtttcatcacacttctgaaatcaacgatattgcgaacaaacaacttgaattgctgccagaaacgctgaagcaggttgcttttgctagattagcgacggtgttggttaccaagctaatggagtatcgagatcgctatcatcttcacggtgaatctgaccctgtaatcgctcttaatgtacgatacccccaatggcgagatgaacttccatttttgctttgtgacgaagaggcatatgagttaatcagtcgattggttcgtaagacatcagcaattattcgccgtgaacagaatccagttagaattaagcgttaccttagagaagatatgggtcattgggacttggttgctgagacatacgttaaccacacaatccaccctcaagatttgtctcgcgtgctttctttagaaaatctacctaagttctttgatttgtatacacaaacaaacacaggggagcgagtaaggacggcatcttttaacctgaaagggtacgctaaccaaaggtggcaagtcataaccaagtttgctcatttttataatgctgatgctgcgagtaacattggctatgagctttggagtgatggccgaaagtttaatagccatacttattatcgaggtgaagagttaaataaagctctgccttggattttttccaccgagggtgagaagtctcagtatcttggtcaaggtaaagttcaggtgaaacaagcctctgcaataattgttcatgctggtttagttgaacctgctacgtctcaatcaaaggttgaaaaggttggacgcattgcgagtttagaccgagatgtttatcgcgttgtgggtaaggtaaaagtcgagttagattacgacttcattgaagtggtgacaggtgcagatgaagctcaagatgtcacatgttggttagagggcaagcggaatcgcgaggctatttcacatcagcacgtattcgagggtaaacctacgggaatgatgagattcggtgtgaataagtctcaacttattccgagcgacgagttgttctggaaaagtgttgactctgattcgctggtgccacttaactcagatgcattcacttatggccttggttcggttatttggtttaactccggtcaagtaatgtggcaaatgaaatgcgcgattttgcctgcttcatctgattttaatgtgattcattacggtaaaggtgaaattgagctaaaagcagtgggttttaaaaataccgatcttggctttgtagagaacgaaaagaactggttaagagatgttgaagttatagaggagatgttcctcgctgaagtgcagatccccgcgagtatgcctgacacttttcacccagtgttagggtggaacaactccagtaagaataccctgacgtttgaatttgattcgctgcaatctggcgtatgcttgctcggtagtaaaggcaatacactcaatgctaggggtaataagatcacgttggacgacctttatgcaagtagcctaaaggtaaagctaggacaagaatcccgttcgatcagtgtttcagctgcattactgcaacataaaactattaaagcaagtattactgatatcattcaaattcctgaatcaaaagttacggtaggaagtggagatttagcgcgtatggcacaggcgctatttacacagtcagatgatactcgcgatcgcgtttcatttagattctactctggaagagagcttctggaatcacgagtacctgcaatcgaacagttcaagtatcctgtagcctctttgaaagatgatcgttctatgctccgcatttatggtgctcatgaccatcgtaacccagagtcaatacagctctatactgcacctatatgggatctatcacgtgagcatacgccactggttaagtccttaggagagcgaggagagttgctttttgcaatgccagagataaatgaacctggaccatggttcgtatacgcacagaatgatcgaaagattcaaccaagggctgtactagtcgctcagaatgaaactggaattaaagaatacaattattctcgcttacagttgtctatcagagatctactcttcaatcctgagactaggagctttgattattcagaaatggatgctgctttgaaagagttgatgtttgaccttcaacacgatgattggcacaccgtgcagtcattcgttgaacagctttcaattgcaaacccaacgacgttccacattttcaagcgtcttgctgcgaatccaaatgtgtttgcttcattgttattaaaacaagaaaatcttgaagagtttgaatcggtttggtcaatatcactcgatatgccattcgaatggctgagcgtccctctaaatcaatggatcgatgctatcaggttgacgactaagagcaccatggaatcccttgtgatgatgaaggatcaactacccgttgatcagtttgaacaaattcaaaaaactatgttgaaaagtcgtcttcaaaacttgtcagataaaggcgagtactttgcagctgttgttgatgcagcactgtttgctctgtacgacataaaatcaagttggatggatttaccaatttatgcatcagaagaaaagccgtcttatatcgctgattttcataagcaaaaatctgaatattttagtcgtcaagaaggcagacttctgactcaaattcaaaacaagcataatgacattcgattaaaagatcttcttgatacaaggttatcgagagactttttggatgctgaacttaaaggatttactcagcattactctgtagataagtcgaaagcaacacgactggcgataccacttgaattaccggttaaagttgcacttcacaatgcaggaatctatccagctgctgatattaatgaagaagagttgaggttggttaacttcgctttaaaccggctatctcagtttgaccgagtatggacacaagaatcgatggcgattgcactaaaatctgcagttaaattacgagcgcaatag

SEQ ID NO: 30342 - DNA, 6207 bp, Vibrio cholerae
atgcaatattttgaatctttagttgatcagctcaccaagcgagcggctcgcgcaacattaggtcagtttggtctgcgttcgaaaccgcttcgtgaatttttgtggcagtcgttttctcaagcaccggggaaggaaggcgcattccttgcggatccagtttttgaagctacatttggttggaaacctcacaccgaaacaatggcagatctcgctggagggttgttagataaagcgattgttcacgctatggcgaatccacctaaggagcttagagaagattatcagtttgaaaaacactgggctccttattcccatcagcatgaagcttggtctcatttgcttcaacattcgcccaaatcagtgatggtcagtagtggtacgggttcagggaaaacggaatgttttttggtgccgattctcaatgacattgtcacgcgggagagccaacctgatggtgtggaagcattgtttctctacccattgaatgcgttgatcaatagtcaacgtgaacgtttaacggcgtggacccatcaattgggtagtcaggttaaattctgtctgtttaatggtgatacaccagaggccgtaagcgccgaagagagaaaattgcatcctaatgaacagctatcacgtaaagagcttcgcgagaaccccgcacaaattcttgtgacaaactcgaccatgctggagtacatgttggtgcgacaaaaagacgcgagcattttaaagcgctcccaaggcaaattgcgttggatagtgctcgatgaagcgcacacttatatcggttcacaggcagccgagttgtcactgctgttaagacgcgttatgcacggttttggtgttaccccagatcaggttcgttttgtcgcgacctcagcaaccattggtggcgaggattctgacggtgagttgaaagcgtttcttgcagatgttgcgggcgtcgatatctctcaggtgcatctggtgaagggacaaagagagattaaaccccttaaggcattagagcaggtaaaagcgatggatcttgttcatgtgaacgctattgaagatgaactgcagcgttatgattatttgagcgctttaccgcccctaagaacactgcgtcagcatctcagcaccacagataaccggatgacgttaagtgcgatcagtaagcttttatccgcgactgacgaaccgctcagtgaagcagaaacgctcaaatggatggacatctgtgcaggtaccaaagatgtcaacggagaggctttcatcccatttcgtttgcacatctttcatcgtgtcgccagcggtttgtgggcgtgctcaaacaaagattgtaaagcgaaagcagggacgcctctagaatcgctagattggcgctttggtatggtttctatgtctcgccgtgagtcttgcagctgcggttcaccgatgttcgaaatggttagctgcaatggttgcggcacgagtttgttggcaaccaacgtaaaaactgcggctgattcgggtgacacattcttgcacctgactaagccggactctgccatagacgattttgcacttgatatcgcgggtgaagacgatgatgtttcgtcttatgaggacgaagaggaaggtgaacaatatgatcgtttcgggctaatttcaccgttgccaggtgataagacaggtgaatattggttagataatcaaagaaaagccacaacagcaaagtctgagggtggttttttgattcaccgtgttgagggctaccgaaatagtcttggtgcgttgtcgcttcgttgtccttgttgtcaacaaaccaaagtcaagaacttcgaatttttccgttactttaaaaacggtgcgccgttcatgctgtctacggtgattcctaccttgctcgaatattgtcaggacggaaaaaaggaacaaaagaaaggcccttggaatggccgacgaatgattacctttaccgatagccgacaaggtactgcacgtttttccgctaaatctcaacaggatgctgaacgacagtttttgcgttcgaccttgtttcatttgattctggacaaggcaatacgtgagtcaggatctggatctccagagagtgcagagctagaaaagtacaagaagatgctcgatatggcgaaaatgagcgaagacgaagacatggtcgagttcgttgagagcaaaatcgcttctttggttggtgcatcatcaaaacctgttagcgtgtcttggagtgatgcggaggactttctcgctgatcagaaagaagtgcaattgtggattaaaaagttctatgagcatttcgacgaccgaatggaaatggtcactcaccccaagttgcttgcgcgcttattgttattgcgggagttcaatagccgccccaaaagacaaaatacgcttgaaacgatggggctcgtcgccatggaatatccacttttggcgcagaaagcaaatactgcccctaaagagtggttgagattttttgatgatgtggaaaaaggccggactgagtgggttaatttcctgacattggcggtgaatttccatgtgcgcagcctgaaagcagtaaggttaaccaaagagcagttaaattggattggcgcaaaatatcagccgaccttgttggtggctcaaggtgaatcgacgcatatctggaatgttgaatcatggccaaaagtaacacgaggtggttcgattcaaccgcgtttagcgagattgttatcatgcgcatttaatatcgacttagatgaagcgtataaccgagcagaggtgaatgaaattcttcgccaggcatggaacgcattgcagtcatctgttttaacacccagtggggatggcttccgcttagaactggaacagcaggttagcttttcgctcttgaaggagaagcatcagtgccctcacacacagaaaattatcgataaaccactgttgggtataacaccttatctcaatgcttctggtgaacgtgaagagcaactctgtcgccgattactaacaccagattatccttatccgtttggtcgagatccgaaaaccggtgaaagtgttgagctggctaaaactcgtgaatggcaagaacaagatgcgctgattgatatacgtaaagaaaatgcatggtctgatattgcagaccgtgtgattgagcgtacaccttatttccgcgttgcagagcattctgcacaattaaaagccagccagcttcgccagtatgaaaaggacttcaaagaaggccggatcaacgtactcagctgttcgacaaccatggaaatgggggtggatatcggagggatttctgtggtggcgatgaacaatgcaccgccaaacccagcgaattacttacagcgcgcaggtcgtgcaggtcgtcgtggagaaagtaagtccattgcactgacactgtgtaaatcaacgcctcatggcgaacatatcttttccaatactcgctgggcgtttgatactcagataaaagtcccaaacgtgtccttgtccagtgagtacattgtcagacgtcatgttaactctcttctcttgtcgacgtttcttaacaaggttgtgtcatccgaaaacaatttaaaattgaactgtggcactttcttcaaagctggtcacgagttgacagcatcttatgctgagcagtttattgactggtgttgggaagaagcgcaggaaatggttcaaagtggcttagatacactgcttcttcgcacagccttggaggcaaactctcgcgttgaggtgttaaacacggcagcaaagcatctcgaaacaataatgagccgttggactgctgaacatcaattgctgctcgagcagagcaagagtttagcagacaacccgaacgtgctttcgacagcgcaggcggcagtagagagccaaattcagcgtttggaaggggagtttttgctgtcagatttggcaaggaaaggtttcctgccggggtatggttttccgaccgatgttgtttcactgaatacagatcatgctaaagagattgaacgtcgtaaacgcaaaatcaaagagaaacttgataatgtggatgacaatacatcgagaaaagataacctatacagtgcaggaggtttcccctcacgagatttgtcggttgcgatccgtgattacgcgcctggcaatgatgtagttatcgatgggcgtgtataccagtcggctggtgtgttactgaactggcatagcccagcatctgccgatcaagttaaagaaattcaggctcttcgttgggcttggcgttgtgaccaatgcggtgccagcaacacatctacactgagacctgaacgttgtgagtgttgtggtaatgaatttttgtttggtgatgaaaaatcaaaggatcttattcacccctatatccaaccagcgagttttgcggttgatattcgcagtgagccacacaatgatatttcacgtttgaaccatgtcccgtttaatgatccttgggtcactgtcgacgggaaggaatggcagcatgtcagtgttaatcctagtgcggcataccgttcgagtcataatggccatatctattattacagtggagggccgacgaatgtagggtatgcgctttgtcttgaatgtggtcgaatggaagcaatgccagagcagggaaataaatcttccaaagaagtgcttgctaatcattaccgtttgagaggtggaaaaggcccactagctactgccggtgagctctactgtggcggcaatgaaagagagtttacgataaaagggcctttaaagcttggccatagcacttttactgatgtatttgagcttattttgttcaatgatctgggccaccctttagttgatagaaccatcgcacgttcaatttcggtattgatccgtaatcagctggcagaaaagctgggaatcaatagtgatgagatagggtgtacgactaagccagttaattttgaaggacgagaagtacaggcggtagtgctttttgacaatgcggctggtggtgcaggctttgctattcaagcatcagagcacttggtagaacttttgcaaggtgcgaaaaaagttgctgcacattgtagctgtgacaaagcatgtcacaggtgtcttgttgactattcgactcagcatgttttagagctgctcgatcgtaggaaagtggcctcttatttgagtattgatttttttagaaatcttgctcttcctgatgaataccaaatctttgcttctaataaccgacgtgaactgaggccgttgacaacagctatcgagaaggcgctatcaaagttaagtgaagcggagctatacctgacgttgcctaaaaagcagttagatgagctgggtgattggactttgtatcacgcattcaatcgatgggttgaagatcgccgtgtaaatgtcgttttggcggaaaacggtgatgatgagctgactatacagcaaaaggttcttctcaattggtatttgaatcacccaaatgtaaatctgtacagtgtccgaactcctcctctgagtaacggtgtgttgttggcatctgttgtcgatgacacaaaagcttatcagtggggatatttttccaatgacacagatacgctaatttgcggcacggattcattcatcaagccaacactttttgactctactcgtttgaatttcgaagggggaagtctgaaaaaagtggttgtgcacgaggagctcaatggtgcagtaaaggacttcggctttaagttttggtcctatgtatttaagcattcaccggaattaatggcattgatgaaatcccagcaacttcagtctgcgacttattcagatcgctatttggccgccccattgccgttatccttatgctttagtgcattgaagttcttaggtgaacactataagggatgcacaacacaggtagtgactggagaactgcacagaagtgctaagccgatgacagtgcaagataacttcgaagatgagtactctcgggacaaagtgttcaggctaatagcggatgcgactgaggcaaacatgtcgtttagaagtcgtccgaaatacgaattaccccatgcacgcgtactcgaactggtttttgatagcggcaccaaagtgacactttggctagatcaaggttttggctattggtatgcggacaaatatctacctgaaaaccagcttgaacgtgatgtttcggaagaggaactcgctgatatcatcagtgcgggacattccatcatacggtctggaaagttctctacggatatttttgtctcgctatcgtag

SEQ ID NO: 30343 - DNA, 3357 bp, Vibrio cholerae
atgcaaacttacaaaaacgtcattgcatctattcttgaagtgcgaaagctaaccaaaccaaacggtttgcctatttacagctacaaaattactccagacgaattttctcagttgagaactgctttaatagccagcatgaaaagccatggcgtgcaattttatgccagcaagccaacacgagagtgggcgggctgttttgttttgtttgccgcagagtggtggcgcaactcttttcaaggtggcgtttgggcatgggaacaggttttggacagtctgggtttgggcgcgaatgacttttcacctctccagcgcagtgaaattgttgcgaaggggctgagtttctggggacgtaaagtgctcagcaataccaaaggtcgaatgtttttggggacggtagcggttgaaggtggcctgcctcaggcattacttctggacccaaacagcaagctgtcttactactttgagcaggttattcaggactacggacaatatgcgaatgcacaacttagtgctgtgtctattgccatggctcactcacattgcatcccttcttccttccgagatgatgctgtgtatagcatcgtcgcgcaggtcgcagaggccatttaccaactggtggataagcacgcgctggacgagcaagaagaccctctgcattacctcaatactgtcgagaaagcgtggcagcacgacctccccttaaatattgatgaaagaacggtccaccagctcttgggcaatgcgttaggcatggctgttgaagcgcaacgtcgtttgccaaattcaattaagattttacgctcgctgcgtaagtcctattcaaactatgcgtctatgttggatgaagaagaggcatttgagtggcggcatcaagtatctatcactttgaaaaatcgcttaaatgaaaattttctccagcagatgtttggcacgcgatcgttacctgataggtttcacctctttgctgttgggcaaaaaacactcctgctggcaaaagcattcaagaacggtaaagtttcagagcagtattggctggacgtcttcacgcagtctctaccggacacatggtttgatgcagaaatacagctaaaagcgaccgatgaccatggcaatgaatggttcgcgcctgtcattgggggcgcaggtgtagacgacgatgaaccttgggtattcactcaacataatgatgaatggcttctgcatggttccggcagtgtaagctgtgaagagactaacgctctcgtctcactccctcatgggttttcagtggagtgtggtgatctaattggctatgcgggggagcgcacccttgtagcgattggatcgcaggatggtgagccgacagaacattggtttgcaggccattgtatatcgctgatgcaagatgatagtcactctttggagtacagcctcgtgggccagacgttggtgtatcaaaccaatccgagcaagtgttttcttggtatgccagagcttatcgctatcgaccaacgtggcaatcaaagcaaagtggcgagctctcagttgcgttggcgtaataccctgctggaacaatggcagagcatagattcagtgccgtttggcaaagtggatattgccttgtttgaaaacaataaacccaaaaagcgttttacagtgggtttgttgccgagtgactttgatattaaacacatgtcgagtgactctgttcatatcggccaaattgcatttacttcgaagcataccttgcccactattgcactgggtgaatgccagcagttagacgttttgccaagttcggtactttcgaagccattgactgttgtaggggagcaaacgcgtagtttagatttggtcagccatgcccctcatcctcctgctcatgtaagcgtttcagcatggtgggtagatagatcaaaatccttatcaatgacattaccgtttccttcaaaaggtatttgccttattgggtcaagcggcgaagtcatccgcagtagagatgtggtgctcgcagacaaactcaaccattatgagttgttcggctatggcgttaaggacgcgcttgaggtggagtttgcgcttcaagcgatagatgtctctggctctctagcgaagactgcctatgttaaacgtgatctacccaccgggaacgtattgtcctcaggcttttgtatggcggcattcaagcaagatattgaatcgttacttgccctttcatctagcctagacgccttagtcagggtgtctgttttggagtcagcacagccaatttttacgttcaatattcaaagttatgatgcctcgctgataccagataaagataacaatctgatcagtctgaagggtgaagagcgggagttgtcactatccatggtgccattggataacccttcattcgctcccattcccttgcaacgtgaacaagaacattgggtgtttcctaatgagtatgccaagcctggtgcatggttgatattctcggacgatgtgcagcgaaatgttcggccgctaatgtggagtaaggagcttgagcttttgtcatctcctgagaatcgctttgaagcggcagcagcgattggtgtacgcaaccaacgactggaagcttttgctactgcatgtggacaactggcaacggagtttgacgcccctgagtggccttatatcaaggccttgttggcattcgatagtgtgccgctaaccacttttgatgtttggcgaagcgcggtcaccaaacctgagttcatgttagccatgttgcttgcggccaataaaaaagagtgtgaaaggatttggctgtttagccagcaatttccacttttgtggcaatcggtaaaagtcagaaaagccatcaaggtggttgaagcattctatgcctcgcgcttgagtatgtatggagaagactttgccgatattatacgtagccaaattaaaaccaaattagatgcattggtctcaaggtattctggtttggactcattagccgatttgctgatgcacaaaattgacccgtcacatcccagtaaaaagattaatcacgctgcttatatgcagaagatttttgatttacgaaatgatcttagcaaccgttacgacgaggcttactggccgtgtgatttcgcagctcacatcatcgcgagtgtaacgcggagagtggataggcagttggcaaatgtctgtctaacgtcaaataacgtttaccgtaacaatgttatgaatgcgccagtcctgcttgcgctttcgatttgtggtgtcgcgaaactcaccatcaatccggaaatcgttcacgcgttaacgcaataccgcaactttgatgcagagtatttcgagcaagccttttcgctcacgcatcaaatgattttttgcctgaccaacccctaa

SEQ ID NO: 30344 - DNA, 6207 bp, Vibrio cholerae
atgcaatattttgaatctttagttgatcagctcaccaagcgagcggctcgcgcaacattaggtcagtttggtctgcgttcgaaaccgcttcgtgaatttttgtggcagtcgttttctcaagcaccggggaaggaaggcgcattccttgcggatccagtttttgaagctacatttggttggaaacctcacaccgaaacaatggcagatctcgctggagggttgttagataaagcgattgttcacgctatggcgaatccacctaaggagcttagagaagattatcagtttgaaaaacactgggctccttattcccatcagcatgaagcttggtctcatttgcttcaacattcgcccaaatcagtgatggtcagtagtggtacgggttcagggaaaacggaatgttttttggtgccgattctcaatgacattgtcacgcgggagagccaacctgatggtgtggaagcattgtttctctacccattgaatgcgttgatcaatagtcaacgtgaacgtttaacggcgtggacccatcaattgggtagtcaggttaaattctgtctgtttaatggtgatacaccagaggccgtaagcgccgaagagagaaaattgcatcctaatgaacagctatcacgtaaagagcttcgcgagaaccccgcacaaattcttgtgacaaactcgaccatgctggagtacatgttggtgcgacaaaaagacgcgagcattttaaagcgctcccaaggcaaattgcgttggatagtgctcgatgaagcgcacacttatatcggttcacaggcagccgagttgtcactgctgttaagacgcgttatgcacggttttggtgttaccccagatcaggttcgttttgtcgcgacctcagcaaccattggtggcgaggattctgacggtgagttgaaagcgtttcttgcagatgttgcgggcgtcgatatctctcaggtgcatctggtgaagggacaaagagagattaaaccccttaaggcattagagcaggtaaaagcgatggatcttgttcatgtgaacgctattgaagatgaactgcagcgttatgattatttgagcgctttaccgcccctaagaacactgcgtcagcatctcagcaccacagataaccggatgacgttaagtgcgatcagtaagcttttatccgcgactgacgaaccgctcagtgaagcagaaacgctcaaatggatggacatctgtgcaggtaccaaagatgtcaacggagaggctttcatcccatttcgtttgcacatctttcatcgtgtcgccagcggtttgtgggcgtgctcaaacaaagattgtaaagcgaaagcagggacgcctctagaatcgctagattggcgctttggtatggtttctatgtctcgccgtgagtcttgcagctgcggttcaccgatgttcgaaatggttagctgcaatggttgcggcacgagtttgttggcaaccaacgtaaaaactgcggctgattcgggtgacacattcttgcacctgactaagccggactctgccatagacgattttgcacttgatatcgcgggtgaagacgatgatgtttcgtcttatgaggacgaagaggaaggcgaacaatatgatcgtttcgggctaatttcaccgttgccaggtgataagacaggtgaatattggttagataatcaaagaaaagccacaacagcaaagtctgaaggtggttttttgattcaccgtgttgagggctaccgaaatagtcttggtgcgttgtcgcttcgttgtccttgttgtcaacaaaccaaagtcaagaacttcgaatttttccgttactttaaaaacggtgcgccgttcatgctgtctacggtgattcctaccttgctcgaatattgtcaggacggaaaaaaggaacaaaagaaaggcccttggaatggccgacgaatgattacctttaccgatagccgacaaggtactgcacgtttttccgctaaatctcaacaggatgctgaacgacagtttttgcgttcgaccttgtttcatttgattctggacaaggcaatacgtgagtcaggatctggatctccagagagtgcagagctagaaaagtacaagaagatgctcgatatggcgaaaatgagcgaagacgaagacatggtcgagttcgttgagagcaaaatcgcttctttggttggtgcatcatcaaaacctgttagcgtgtcttggagtgatgcggaggactttctcgctgatcagaaagaagtgcaattgtggattaaaaagttctatgagcatttcgacgaccgaatggaaatggtcactcaccccaagttgcttgcgcgcttattgttattgcgggagttcaatagccgccccaaaagacaaaatacgcttgaaacgatggggctcgtcgccatggaatatccacttttggcgcagaaagcaaatactgcccctaaagagtggttgagattttttgatgatgtggaaaaaggccggactgagtgggttaatttcctgacattggcggtgaatttccatgtgcgcagcctgaaagcagtaaggttaaccaaagagcagttaaattggattggcgcaaaatatcagccgaccttgttggtggctcaaggtgaatcgacgcatatctggaatgttgaatcatggccaaaagtaacacgaggtggttcgattcaaccgcgtttagcgagattgttatcatgcgcatttaatatcgacttagatgaagcgtataaccgagcagaggtgaatgaaattcttcgccaggcatggaacgcattgcagtcatctgttttaacacccagtggggatggcttccgcttagaactggaacagcaggttagcttttcgctcttgaaggagaagcatcagtgccctcacacacagaaaattatcgataaaccactgttgggtataacaccttatctcaatgcttctggtgaacgtgaagagcaactctgtcgccgattactaacaccagattatccttatccgtttggtcgagatccgaaaaccggtgaaagtgttgagctggctaaaactcgtgaatggcaagaacaagatgcgctgattgatatacgtaaagaaaatgcatggtctgatattgcagaccgtgtgattgagcgtacaccttatttccgcgttgcagagcattctgcacaattaaaagccagccagcttcgccagtatgaaaaggacttcaaagaaggccggatcaacgtactcagctgttcgacaaccatggaaatgggggtggatatcggagggatttctgtggtggcgatgaacaatgcaccgccaaacccagcgaattacttacagcgcgcaggtcgtgcaggtcgtcgtggagaaagtaagtccattgcactgacactgtgtaaatcaacgcctcatggcgaacatatcttttccaatactcgctgggcgtttgatactcagataaaagtcccaaacgtgtccttgtccagtgagtacattgtcagacgtcatgttaactctcttctcttgtcgacgtttcttaacaaggttgtgtcatccgaaaacaatttaaaattgaactgtggcactttcttcaaagctggtcacgagttgacagcatcttatgctgagcagtttattgactggtgttgggaagaagcgcaggaaatggttcaaagtggcttagatacactgcttcttcgcacagccttggaggcaaactctcgcgttgaggtgttaaacacggcagcaaagcatctcgaaacaataatgagccgttggactgctgaacatcaattgctgctcgagcagagcaagagtttagcagacaacccgaacgtgctttcgacagcgcaggcggcagtagagagccaaattcagcgtttggaaggggagtttttgctgtcagatttggcaaggaaaggtttcctgccggggtatggttttccgaccgatgttgtttcactgaatacagatcatgctaaagagattgaacgtcgtaaacgcaaaatcaaagagaaacttgataatgtggatgacaatacatcgagaaaagataacctatacagtgcaggaggtttcccctcacgagatttgtcggttgcgatccgtgattacgcgcctggcaatgatgtagttatcgatgggcgtgtataccagtcggctggtgtgttactgaactggcatagcccagcatctgccgatcaagttaaagaaattcaggctcttcgttgggcttggcgttgtgaccaatgcggtgccagcaacacatctacactgagacctgaacgttgtgagtgttgtggtaatgaatttttgtttggtgatgaaaaatcaaaggatcttattcacccctatatccaaccagcgagttttgcggttgatattcgcagtgagccacacaatgatatttcacgtttgaaccatgtcccgtttaatgatccttgggtcactgtcgacgggaaggaatggcagcatgtcagtgttaatcctagtgcggcataccgttcgagtcataatggccatatctattattacagtggagggccgacgaatgtagggtatgcgctttgtcttgaatgtggtcgaatggaagcaatgccagagcagggaaataaatcttccaaagaagtgcttgctaatcattaccgtttgagaggtggaaaaggcccactagctactgccggtgagctctactgtggcggcaatgaaagagagtttacgataaaagggcctttaaagcttggccatagcacttttactgatgtatttgagcttattttgttcaatgatctgggccaccctttagttgatagaaccatcgcacgttcaatttcggtattgatccgtaatcagctggcagaaaagctgggaatcaatagtgatgagatagggtgtacgactaagccagttaattttgaaggacgagaagtacaggcggtagtgctttttgacaatgcggctggtggtgcaggctttgctattcaagcatcagagcacttggtagaacttttgcaaggtgcgaaaaaagttgctgcacattgtagctgtgacaaagcatgtcacaggtgtcttgttgactattcgactcagcatgttttagagctgctcgatcgtaggaaagtggcctcttatttgagtattgatttttttagaaatcttgctcttcctgatgaataccaaatctttgcttctaataaccgacgtgaactgaggccgttgacaacagctatcgagaaggcgctatcaaagttaagtgaagcggagctatacctgacgttgcctaaaaagcagttagatgagctgggtgattggactttgtatcacgcattcaatcgatgggttgaagatcgccgtgtaaatgtcgttttggcggaaaacggtgatgatgagctgactatacagcaaaaggttcttctcaattggtatttgaatcacccaaatgtaaatctgtacagtgtccgaactcctcctctgagtaacggtgtgttgttggcatctgttgtcgatgacacaaaagcttatcagtggggatatttttccaatgacacagatacgctaatttgcggcacggattcattcatcaagccaacactttttgactctactcgtttgaatttcgaagggggaagtctgaaaaaagtggttgtgcacgaggagctcaatggtgcagtaaaggacttcggctttaagttttggtcctatgtatttaagcattcaccggaattaatggcattgatgaaatcccagcaacttcagtctgcgacttattcagatcgctatttggccgccccattgccgttatccttatgctttagtgcattgaagttcttaggtgaacactataagggatgcacaacacaggtagtgactggagaactgcacagaagtgctaagccgatgacagtgcaagataacttcgaagatgagtactctcgggacaaagtgttcaggctaatagcggatgcgactgaggcaaacatgtcgtttagaagtcgtccgaaatacgaattaccccatgcacgcgtactcgaactggtttttgatagcggcaccaaagtgacactttggctagatcaaggttttggctattggtatgcggacaaatatctacctgaaaaccagcttgaacgtgatgtttcggaagaggaactcgctgatatcatcagtgcgggacattccatcatacggtctggaaagttctctacggatatttttgtctcgctatcgtag

SEQ ID NO: 30345 - DNA, 3357 bp, Vibrio cholerae
atgcaaacttacaaaaacgtcattgcatctattcttgaagtgcgaaagctaaccaaaccaaacggtttgcctatttacagctacaaaattactccagacgaattttctcagttgagaactgctttaatagccagcatgaaaagccatggcgtgcaattttatgccagcaagccaacacgagagtgggcgggctgttttgttttgtttgccgcagagtggtggcgcaactcttttcaaggtggcgtttgggcatgggaacaggttttggacagtctgggtttgggcgcgaatgacttttcacctctccagcgcagtgaaattgttgcgaaggggctgagtttctggggacgtaaagtgctcagcaataccaaaggtcgaatgtttttggggacggtagcggttgaaggtggcctgcctcaggcattacttctggacccaaacagcaagctgtcttactactttgagctggttattcaggactacggacaatatgcgaatgcacaacttagtgctgtgtctattgccatggctcactcacattgcatcccttcttccttccgagatgatgctgtgtatagcatcgtcgcgcaggtcgcagaggccatttaccaactggtggataagcacgcgctggacgagcaagaagaccctctgcattacctcaatactgtcgagaaagcgtggcagcacgacctccccttaaatattgatgaaagaacggtccaccagctcttgggcaatgcgttaggcatggctgttgaagcgcaacgtcgtttgccaaattcaattaagattttacgctcgctgcgtaagtcctattcaaactatgcgtctatgttggatgaagaagaggcatttgagtggcggcatcaagtatctatcactttgaaaaatcgcttaaatgaaaattttctccagcagatgtttggcacgcgatcgttacctgataggtttcacctctttgctgttgggcaaaaaacactcctgctggcaaaagcattcaagaacggtaaagtttcagagcagtattggctggacgtcttcacgcagtctctaccggacacatggtttgatgcagaaatacagctaaaagcgaccgatgaccatggcaatgaatggttcgcgcctgtcattgggggcgcaggtgtagacgacgatgaaccttgggtattcactcaacataatgatgaatggcttctgcatggttccggcagtgtaagctgtgaagagactaacgctctcgtctcactccctcatgggttttcagtggagtgtggtgatctaattggctatgcgggggagcgcacccttgtagcgattggatcgcaggatggtgagccgacagaacattggtttgcaggccattgtatatcgctgatgcaagatgatagtcactctttggagtacagcctcgtgggccagacgttggtgtatcaaaccaatccgagcaagtgttttcttggtatgccagagcttatcgctatcgaccaacgtggcaatcaaagcaaagtggcgagctctcagttgcgttggcgtaataccctgctggaacaatggcagagcatagattcagtgccgtttggcaaagtggatattgccttgtttgaaaacaataaacccaaaaagcgttttacagtgggtttgttgccgagtgactttgatattaaacacatgtcgagtgactctgttcatatcggccaaattgcatttacttcgaagcataccttgcccactattgcactgggtgaatgccagcagttagacgttttgccaagttcggtactttcgaagccattgactgttgtaggggagcaaacgcgtagtttagatttggtcagccatgcccctcatcctcctgctcatgtaagcgtttcagcatggtgggtagatagatcaaaatccttatcaatgacattactgtttccttcaaaaggtatttgccttattgggtcaagcggcgaagtcattcgcagtagagatgtggtgctcgcagacaaactcaaccattatgagttgttcggctatggcgttaaggacgcgcttgaggtggagtttgcgcttcaagcgatagatgtctctggctctctagcgaagactgcctatgttaaacgtgatctacccaccgggaacgtattgtcctcaggcttttgtatggcggcattcaagcaagatattgaatcgttacttgccctttcatctagcctagacgccttagtcagggtgtctgttttggagtcagcacagccaatttttacgttcaatattcaaagttatgatgcctcgctgataccagataaagataacaatctgatcagtctgaagggtgaagagcgggagttgtcactatccatggtgccattggataacccttcattcgctcccattcccttgcaacgtgaacaagaacattgggtgtttcctaatgagtatgccaagcctggtgcatggttgatattctcggacgatgtgcagcgaaatgttcggccgctaatgtggagtaaggagcttgagcttttgtcatctcctgagaatcgctttgaagcggcagcagcgattggtgtacgcaaccaacgactggaagcttttgctactgcatgtggacaactggcaacggagtttgacgcccctgagtggccttatatcaaggccttgttggcattcgatagtgtgccgctaaccacttttgatgtttggcgaagcgcggtcaccaaacctgagttcatgttagccatgttgcttgcggccaataaaaaaaagtgtgaaaggatttggctgtttagccagcaatttccacttttgtggcaatcggtaaaagtcagaaaagccatcaaggtggttgaagcattctatgcctcgtgcttgagtatgtatggagaagactttgccgatattatacgtagccaaattaaaaccaaattagatgcattggtctcaaggtattctggtttggactcattagccgatttgctgatgcacaaaattgacccgtcacatcccagtaaaaagattaatcacgctgcttatatgcagaagatttttgatttacgaaatgatcttagcaaccgttacgacgaggcttactggccgtgtgatttcgcagctcacatcatcgcgagtgtaacgcggagagtggataggcagttggcaaatgtctgtctaacgtcaaataacgtttaccgtaacaatgttatgaatgcgccagtcctgcttgcgctttcgacttgtggtgtcgcgaaactcaccatcaatccggaaatcgttcacgcgttaacgcaataccgcaactttgatgcagagtatttcgagcaagccttttcgctcacgcatcaaatgattttttgcctgaccaacccctaa

SEQ ID NO: 30346 - DNA, 6315 bp, Vibrio cholerae HE-45
atgaaaggctacttttcaacattaaaacaacaagcaaacaatcgtgctaaagagtcaacattgagtgttctcggtatcagcaacccctcattgcgcaatcacctaagcgaacgatttgaaacggttgagccctttgttcatggccctgtttttgagcaaacctttgcttgggaagaaagtaaagttcaaatgaacgatttggtctccgaaggactgctttcaaaggagctagtaacagcattagacgatgacattaacggaaggtatgcatttaaagctgagtggtttccattcaagcaccagctggcggcatggcgagacttactcaatccagagcctaaatctagagttattaccagtggtacaggttcggggaaaaccgagtgttttatggttcctgtccttgaagacttggtgcgggaagtaaaaaccgaggggcaagcactaaaaggcgtaagagcgctattcctgtaccctttaaatgcgttaatcaactcacagaaagagcgtctaaacgcttggacgcaacattttgaaggtgatatccgcttttgcttgtttaatggcaatactcccaatgacccaagcgctagccagagtcaaatacagatcaagcagcctcaagaagtattgtcacgtaatctaatgcgtgataaccctgctcccattttggtcaccaatggaacaatgcttgagtatatgctggtgagacaagctgatgctccaattatcgaacaatctaaaggaaagttaaggtggattgttttggatgaagcgcacacctatgtgggttctcaagcagctgaacttgcgttgcaacttcgcagagtaatgcaggcgtttgaagtagaaccggaaaacgtacgttttgtggcaacatcggcaacaatcgctggatccgaggctgaatcacaacttcgaaggtatttagctgagctggctggagtaagtgaggcacaagttgatgttattggtggtaaacgagcagtaccgaaacttccagattactcacttaataacagagatatctcacttctagagagcattgaccccgagggagagttgccagagaacaaaaaagatatccaagatccatatgtttcggcaagtcggtatcgagcgttatgtgaatctgaaatagcgaaaaggataaggtctgcgtttacggccaacggctctagtccgttactcttttctgagttagccagcagtttaagtccaatcaatttgaccgagaatgaattgtatcgttggttagatatatgcactgggacgaaagagtcttacgatagaaatgcacaacccttccttaaattgagagctcattactttcaacgaactttaaacggactttgggcctgtattgacccaaattgctctgaaaagtcagactccctcctcaatggagcttggcagtttggtcaggtacttagtgagcaaagacagaaatgtgactgtggtgcgccggtactagagctgtcattttgtagcgagtgtaatgaaccgcacttgcttggtgtagataagggcgggatacttactcaatggactggtaaggtaagtgatgagttttctcttttggaagaaggagataaatacatagatgaggaaagaacagaccaacagagtactcctaaagccagcgatagtatgctgattctctctgcaactgaaaaccaagaaaatatgttctttgagaccatttatgaccacgatggtaaagaagctagtgttaaatcaggtagtatacggttagctaaatatcttgatgaaggcgaacagtgtagcaaatgtggattctctggtagaggacaacatgcaaaagcactgaggcgcggtttattaggggctccattttatacaacgactgcggtacccaccgttttggagtattgccccgatatcgagaaagataaagatactggttacggaccattagatgctccggggcgaggtcgtcgccttattactttcactgatagccgacaaggcactgcgaaaatgtcagttcaaatgcagcaggaagcggaacgttctcgactacgtggtttggttttcaaagagttgaggaagcacgttgaggaggaactggcgatcgatgatgagttactagatatcgttcgtccatatatcgaggagtcaacggttgaggatatcgaagaatttattcttattgcagggaagaggaaaccacaagttgctcaagcgctaactcaatacctttcagcactcgagaaaggagcgtcaagatattctccaaaagcaatttcttggaaggaattagccgatagaattagcatggataaggatttacagaactcaattttgacagagaataagagactatctcccgaggtgtttgacgtaaccactggctctttaaagctcgctaacatgttattgacaagagaacttgctaggagaccgaagtttaaaaacaaccttgaaactcaaggattgataaggtttgtttatccagaggttgaaaaactaagtaaagctccggagcaatggaaagagaaaggcggtttgaccctgtctgactggaaagactacctaaaaatctgccttgacttctttgttcgtgaaaacacatacgtgaacatagatagggagtggggacggtggatcgggatgcactttgcaccgaaaacccttatagctcctgattcaaaagaagaagaagagagccgcattaagaagtggcctcagataaacaaaggtagaaaaattcaacaaagattgatcacgctgttgcgtgtagcaacaggtatcgatattgaaaagccagaaggagagcagttaatcaacggatggttgcaggatgcttggaagacgttaaccaaattgcaaattcttagagattcaacttcagacaaacaatatagccttgatttgagagaagttagttttgctttgttaactgaagggtttatttgtccagtcacaaataaagtgttggatacaacctttagaggcttaacaccatatattccagcgaatggtaactatgcagactatcagtgtactcgcgttaatcttcctccagtttgggagtttaaaggtagcgaccgagggtatgacgactcgctccaatcgattcgttctgatattgagaagtcgcaggaaattcgttcactcagagagcagaatgtatggacggatataaacgatagaaccgttgaagggggtttttactacgcaacggctgaacattctgcacagcagtcagcagaacggcttgcagattatgaagataagttcaagagtggcaagaagaacgttctgaactgttcaacaactatggaaatgggggttgatattggtggtattacggcagttgtgatgaacaatgtgccgccgcatccggctaactttcttcaacgagcgggacgggctggccgttcaaaagagtctagagctctcagctatacgatctgcaagaataatcctcatgacacattagtctttaataatcctaagtgggcgttcaccacatctattcctgcaccgcatgttgagtttagctctgagaaacttgtacagcgtcatgtgaactcgtacttactggggcgctatctggttgatgttataggtccaacagataaagagaaaattaacctgaatcttgaatggttttatctacctgacattgggggtaagtcagttgcggaatgtttttctctttgggttatgagtcttgaaaattcatatcttgatggtgtcaaaaagttagttaaggggactgctctgtcgggcgtgtcgcctgatattttagcaaagcagacggctaaaaaaattctagaactcagtgaaaagtgggttggggaatataaatatattcagacagagcttaatgatacggctccaaatggcccatatgctcataagcttgacaatgagaagtctcgcttatgtagagagtatctgctacgggacttggcaacaaaagcatttctacccggttatggctttcctaccgatgttgtaagcatagatacggacaacgtagctgattatattcgtgagaaaaaattcaaaaagaacaagaataagtttgagcgtgaagacaacgtgtcaattaaccgtggcctcccttctcgaaacttgtctgtagctattcgggaatatgcaccaggttcggaaatcgttattgacggtagagttcatcgttctgctggaatttctttgaattggcaaaatgttcatgttgaaggctcaagagatgcccagaaatttgatcttgcatggcgttgtcctcactgtggtcagacagggtatgagtctaatttgaataaacaagctaacttcgagtcattaacgtgcagcaatgtaatgtgtggcaaagtcattcctataaataatgagtgcaggaaaaaggtcatccagccgactggttttgtgactgattattatattgagccgactaacaacattacgcatcacacctatgtcccagtgcagcctgcttgggtaagtgctaagggggttcctgtacctttacctgtctctgaattaggttatatgattacagatcatcaaggtaaagtgtttcattacagctcgggaatgagtggtactggttttgcactctgcatggcttgtggtcgggctgaatctatgacctcaacagaagagcttcctaaagcgctaaaccatgaacgcacacataagccaccgcgtccaagtaagtttgccaaagatgaaaatgatcggcatggatactgtgatggctcaggaagaatactagaaagtattcatcttggcgtgcattcccaaactgatgtatttgaactagttttgaggcacccagacacaggcgaatatatccctgatagtgacgaaggtagggttattgcaacatcactcgtagtagcgttgcgaaaggcattggtaaagactttaggcatctcagtcaatgaagttgagtacagtgtacgcccagccgttgttggtgaaagtcagcatgcgatggttttacagttgtttgatagtgtaagtggtggagctggtttcgctacatccacatcacattacattactcaagtattacgtcagatgttacgagagcttgaatgccccaaggcttgtgatgcattttgtccggattgtttactagagtcggattcaagacacgatactgataaactgaacaggcagattgcgcttaaatggttgggcgataattttactcgccatttaaatataccgccgaagtatcaacgattgctaactgaagctgaatattgccctttgagtattaaggagcagcttatatccgtggttgcgggccaagttagcgaagtgaagttcgttttatctagcaatatagaacggtgggatacgtcagtaaacttgctcaagtcacgagtttacgaaatgttgagtaatagcattaatgtgtcatttattgtaccagatgtcgattatccagacgatatcaaattattcttgaagaacatcaacaacatcggtgcatctttatatattaccaagaacgaaactggcccaatggtattccaagcgctaacggatgtcggttgtttctctttagctaacctagaggatagtgcgcgaacacctggtattgattggctaatgtctgacgatatctctgtcatctcaactgtcgagccggaactttcggtaattccatacactatcgaagtggaaccaaaaaacttgtctcaagttggggccatccagatagaagctatcgaagagctgaatggaacgctgacacaattaggtgagcgattcaaacaactagtgtgtgatagtgatagccgtgtgaaggagcttttatcgagtaatactataaaaagtgtccactattcagaccgttatttgcaaagtccgtcagccgtaatgctggtttccgaggccataaaaggtttggtttgtggccataatgattgtgatgtgtcaatagatacttgttttgatgaaaagaacggtaggccgccagcatttatcagccacgattgggactacaaagcagattttagacagatttttcaggcttggttagagaatgccacaggtagaacaactaagataaatatcgttgaggacaaaaagacaattcaacatagaagagtattaactattgtctttgagtcagataacacagttcagataactttagaccaaggctttgggtactggtggctggaattaacgcatggcttgcaccgatttgactttgaaagagactgtctcgatcaagtaaaaagaatgctcgaagtgcaaaaaaaggcaagcgttaagaatagtgctgactggtcaacgttaataacgacaagcttgctttag

SEQ ID NO: 30347 - DNA, 3309 bp, Vibrio cholerae HE-45
atggatttgaatattcctcctgtggaggggcgtatcaatacaacaagcaattcgatattgcctatcactatcgaagaatggttgacgagacttttacatagaaatgagctgtcgttaccaaatggacaaccactgtaccaatatcacgttacagaatcagaatatatccagttgcgcagtattctaagacggattggtaaaccccaatcaagcaaaaattggtgcgctgctttctcaattttttgttcagaatggtatcgtcgcttttacatggggggctggacttggtttgggatttgggagtcattaggctatgaactcgatgctaacagtagacagaatgtcgttgagcgtgggttaaaagcgtactggggacgtcctattagccaatatcaagacgagagaaacagctatcttggttctttatttaaagagggcggtcttccttatgggcttcttgccagtgagggtagccgctttcaggcaatattcaaacgcatattaaagtcttacgaagatgcaaaagactttggatattcgcccgtagagttagtgaccgagtgtatggactctttacccgaggcatttaaacaagagaccacagttaacttaattactcgaatgactgagttgttattgcgtctaactgaagactacgatttggatgaacagaacaatccggctgcatatctggatgataacgctggcggttggcgtgaactgtttcctatcccattggacggcaatgctggtaacgaatttttgtctggtttgctttcatctgcatcacaacaacatcgaaataaaaaacaagcagataagaggattacatgccagcaatggctcgcgaatacatcagaatgccagtttgtcacccagatcaagctcgccaaaatagtagatatgccttttaggcgtgaagatacggttactagtcgtgtagagctatttatttatgaaggtagtacgccacttgcagaagttggtgttggtcatattcatagtgatactggcaagtgtagcgtcgttttaaggtccacttcttgtcgtttcaatcgagttgacccaaaacaaacgctgtacctaattgtacttcaggcaggtaagctacttcatcgagaagaaatatctaattcagaaataatgattggtgaggtaccggtagtactacgttgcatcgatgaaaaaatgatgtttgttggtactggtagcattagcactcgagcagaatcgttgaccgtattatgtccaccaaatgcggtagtagatgaatcagaaactaaagatgtaaatattaagacagactatggttataccgtaggcacattcagtggtacgttgaaagtctctttgaataatgggcttgaaatagatcgttacctgataacgacctcagcgaacaacacgcatcatgatgatgtcagaatagatggaaaaatacttccgtttagtaccgaaaaaggccaaccagtttatctggggttacccaagattactacgcaagacatttgctctcaggtgttagtggcaggggagcccgttggtgggggacataagacaagcatttttggtttacaaagtattaaagtaaagtccaacagaggtcatactctttttcaaaagagactggcgattttgcccaagtcatttgatatcaggttaatctcatccgaaaacgcagaccgagggaacattgaactccattgtatgaacagatttaccgttaaggtattgaatgcaggagttgatgtagtcgctcgttcaacagagtatggtaaatgtctagagatcatatcagctttaggcatgcctcctcgtgagcttttattagaaattacgaccaatttaatggctgctccggttgtggtaagtgtgccttttccttcaacgggtgtgttagcttacgataaggataacaataaactacctcagttactgacagtgacggacttgctgggtagtcggcttatgttgtttcctaggctgggtaagcagtgcagctataagattgaacttagctctcctaacagctctcgacaggcttactacttatgggaatacaaggttcaggatcagccattagaaatcagtttgtatgaatttagacataatgtaagagaactattggctacaaatggaaatctggatgatcgagtcagacttgagataagcggggcatgtaagaccgtgcaatttcagattggacgctattcttctgtgactcaatttgaaaactcatgcatcaagtttgaaggtgcgattaaggattttggtatgattaaaccagtgctaattgatcttaccaatccagcggttcaccctaaaccattgacccaaagagagtctcaaggtgtagctactggtatctttgaactttcatcgtcccctgcaaatccatctctaattgtaccatcacctgattctcaagttgcttttcgagctagatttgttcccggaagtaaaattactgaaaacccaaatgacgtccgaagtttacagaaagctgcagcagtttgtcatgtcaatcctaatgctatagatgaagtgttggttcaaatgactatggattttgaccatagtggctggacattccttgctgatctagaaacaaagtttggttacttgccgctagcaacatttgaaatctggaagtcagtagtcaaaaagcaggaagtattggcagcactggcatttcgctttgataatcctatccctttgatgagtaggttgcagtctgagttcaacgtaatgtgggaactaataccgatcgttgcttggaagcgcgcttctcaaaacttcattcaaggaattcgtgatgatggttacccagatagaattgtcaccgggctgattagccagaagctagacgatatatcgcaggtatgccctattttcgaatctgactgcagacatttggttcttgaaaaagcaattatccctcaagagaatctcagaggcttactccagtacttctctgctcattcggtatcggaagttagaaacttacacactagtgatcgacgctggccgacgatgttttcaaacgatgtagaaaagtggtgtcgcgaccactaccaagaccttgtgacattttctattcccgatggcaaaggttttcaaaaggctgtgttgtattttccattgtgtgcatcagctctggttctacaaaaaacaacgctctccgaaattggtatttgcgatgagcctgcgaatgaattttttattcgccagctcattgagtttgaccgtcagtggtttgtccctatgtataaattattactctgtattatggctggtgagagaaaatga

SEQ ID NO: 30348 - DNA, 6207 bp, Vibrio cholerae O1 str. EM-1676A
atgcaatattttgaatctttagttgatcagctcaccaagcgagcggctcgcgcaacattaggtcagtttggtctgcgttcgaaaccgcttcgtgaatttttgtggcagtcgttttctcaagcgccggggaaggaaggcgcattccttgcggatccagtttttgaagccacatttggttggaaacctcacaccgaaacaatggcagatctcgctggagggttgttagataaagcgattgttcacgctatggcgaatccacctaaggagcttagagaagattatcagtttgaaaaacactgggctccttattcccatcagcatgaagcttggtctcatttgcttcaacattcgcccaaatcagtgatggtcagtagtggtacgggttcagggaaaacggaatgttttttggtgccgattctcaatgacattgtcacgcgggagagccaacctgatggtgtggaagcattgtttctctacccattgaatgcgttgatcaatagtcaacgtgaacgtttaacggcgtggacccatcaattgggtagtcaggttaaattctgtctgtttaatggtgatacaccagaggccgtaagcgccgaagagagaaaattgcatcctaatgaacagctatcacgtaaagagcttcgcgagaaccccgcacaaattcttgtgacaaactcgaccatgctggagtacatgttggtgcgacaaaaagacgcgagcattttaaagcgctcccaaggcaaattgcgttggatagtgctcgatgaagcgcacacttatatcggttcacaggcagccgagttgtcactgctgttaagacgcgttatgcacggttttggtgttaccccagatcaggttcgttttgtcgcgacctcagcaaccattggtggcgaggattctgacggtgagttgaaagcgtttcttgcagatgttgcgggcgtcgatatctctcaggtgcatctggtgaagggacaaagagagattaaaccccttaaggcattagagcaggtaaaagcgatggatcttgctcatgtgaacgctattgaagatgaactgcagcgttatgattatttgagcgctttaccgcccctaagaacactgcgtcagcatctcagcaccacagataaccggatgacgttaagtgcgatcagtaagcttttatccgcgactgacgaaccgctcagtgaagcagaaacgctcaaatggatggacatctgtgcaggtaccaaagatgtcaacggagaggctttcatcccatttcgtttgcacatctttcatcgtgtcgccagcggtttgtgggcgtgctcaaacaaagattgtaaagcgaaagcagggacgcctctagaatcgctagattggcgctttggtatggtttctatgtctcgccgtgagtcttgcagctgcggttcaccgatgttcgaaatggttagctgcaatggttgcggcacgagtttgttggcaaccaacgtcaaaactgcggctgattcgggtgacacattcttgcacctgactaagccggactctgccatagacgactttgcacttgatatcgcgggtgaagacgatgatgtttcgtcttatgaggacgaagaggaaggcgaacaatatgatcgtttcgggctaatttcaccgttgccaggtgatgagacaggtgaatattggttagataatcaaagaaaagccacaacagcaaagtctgagggtggttttttgattcaccgtgttgagggctaccgaaatagtcttggtgcgttgtcgcttcgttgtccttgttgtcaacaaaccaaagtcaagaacttcgaatttttccgttactttaaaaacggtgcgccgttcatgctgtctacggtgattcctaccttgctcgaatattgtcaggacggaaaaaaggaacaaaagaaaggcccttggaatggccgacgaatgattacctttaccgatagccgacaaggtactgcacgtttttccgctaaatctcaacaggatgctgaacgacagtttttgcgttcgaccttgtttcacttgattctggacaaggcaatacgcgagtcaggagctggatctccagagagtgcagagctagaaaagtacaaaaagatgctcgatatggcgaaaatgagcgaagacgaagacatggtcgagttcgttgagagcaaaatcgcttctttggttggtgcatcatcaaaacctgttagagtgtcttggagtgatgcggaggactttctcgctgatcagaaagaagtgcaattgtggattaaaaagttctatgagcatttcgacgaccgaatggaaatggtcactcaccccaagttgcttgcgcgcttattgttattgcgggagttcaatagccgacccaaaagacaaaatacgcttgaaacgatggggctcgtcgccatggaatatccacttttggcgcagaaagcaaatactgcccctaaagagtggttgagattttttgatgatgtggaaaaaggccggactgagtgggttactttcctgacattggcggtgaacttcaatgtgcgcagcctgaaagcagtaaggttaaccaaagagcagttaaattggattggtgcaaaatatcagccgaccttgttggtggctcaaggtgaatcgacgcatatctggaatgttgaatcatggccaaaagtaacacgaggtggttcgattcaaccgcgtttagcgagattgttatcatgcgcatttaatatcgacttagatgaagcgtataaccgagcagaggtgaatgaaattcttcgccaggcatggaacgcattgcagtcatctgttttaacacccagtggggatggcttccgcttagaactggaacagcaggttagcttttcgctcttgaaggagaagcatcagtgccctcacacacagaaaattatcgataaaccactgttgggtataacaccttatctcaatgcttctggtgaacgtgaagagcaactctgtcgccgattactaacaccagattatccttatccgtttggtcgagatccgaaaaccggtgaaagtgttgagctggctaaaactcgtgaatggcaagaacaagatgcgctgattgatatacgtaaagaaaacgcatggtctgatattgcagaccgtgtgattgagcgtacaccttatttccgcgttgcagagcattctgcacaattaaaagccagccagcttcgccagtatgaaaaggacttcaaagaaggccggatcaacgtactcagctgttcgacaaccatggaaatgggggtggatatcggggggatttctgtggtggcgatgaacaatgcaccgccaaacccagcgaattacttacagcgcgcaggtcgtgcaggtcgtcgtggagaaagtaagtccattgcactgacactgtgtaaatcaacgcctcatggcgaacatatcttttctaatactcgctgggcatttgatactcagataaaagtcccaaatgtgtccttgtccagcgaatacattgtcagacgtcatgttaactctcttctcttgtcgacgtttcttaacaaggttgtgccatccgaaaacaatttaaaattgaactgtggcactttcttcaaagctggtcacgagttgacagcatcttatgctgagcagtttattgactggtgtagggaagaagcgcaggaaatggttcaaagtggcttagatacactgcttcttcgcacagccttggaggcaaactctcgcgttgaggtgttaaacacggcagcaaagcatcttgaaacaataatgagccgttggactgctgaacatcaattgctgctcgagcagagcaagagtttagcagacaacccgaacgtgctttcgacagcgcaggcggcagtagagagccaaattcagcgtttggaaggggagtttttgctgtcagatttggcaaggaaaggtttcctgccggggtatggttttccgaccgatgttgtttcactgaatacagatcatgctaaagagattgaacgtcgtaaacgcaaaatcaaagagaaacttgataatgtggatgacaatacatcgagaaaagataacctatacagttcaggaggtttcccctctcgagatttgtcggttgcgatccgtgattacgcgcctggcaatgatgtagttatagatgggcgtgtataccagtcggctggtgtgttactgaactggcatagcccagcatctgccgatcaagttaaagaaattcaggctcttcgttgggcttggcgttgtgaccaatgcggtgccagcaacacatctacactgagacctgaacgttgtgagtgttgtggtaatgaatttttgtttggtgatgaaaaatcaaaggatcttattcacccctatatccaaccagcgagttttgcggttgatattcgcagtgagccacacaatgatatttcacgtttgaaccatgtcccgtttaatgatccttgggtcactgtcgacgggaaggaatggcagcatgtcagtgttaatcctagtgcggcataccgttcgagtcataatggccatatctattattacagtggagggccgacgaatgtagggtatgcgctttgtcttgaatgtggtcgaatggaagcaatgccagagcagggaaataaatctcccaaagaagtgcttgctaatcattaccgtttgagaggtggaaaaggcccactagctactgccggtgagctctactgtggcggcaatgaaagagagtttacgataaaagggcctttaaagcttggccatagcacttttactgatgtatttgagcttattttgttcaatgatctgggccaccctttagttgatagaaccatcgcacgttcaatttcggtattgatccgtaatcagctggcagaaaagctgggaatcaatagtgatgagatagggtgtacgactaagccagttaattttgaaggacgagaagtacaggcggtagtgctttttgacaatgcggctggtggtgcaggctttgctattcaagcatcagagcacttggtagaacttttgcaaggtgcgaaaaaagttgctgcacattgtagctgtgacaaagcatgtcacaggtgtcttgttgactattcgactcagcatgttttagagctgctcgatcgtaggaaagtggcctcttatttgagtattgatttttttagaaatcttgctcttcctgatgaataccaaatctttgcttctaataaccgacgtgaactgaggccgttgacaacagctatcgagaaggcgctatcaaagttaagtgaagcggagctatacctgacgttgcctaaaaagcagttagatgagctgggtgattggactttgtatcacgcattcaatcggtgggttgaagatcgccgtgtaaatgtcgttttggcggaaaacggtgatgatgagctgactatacagcaaaaggttcttctcaattggtatttgaatcacccaaatgtaaatctgtacagtgtccgaactcctcctctgagtaacggtgtgttgttggcatctgttgtcgatgacacaaaagcttatcagtggggatatttttccaatgacacagatacgctaatttgcggcacggattcattcatcaagccaacactttttgactctactcgtttgaatttcgaagggggaagtctgaaaaaagtggttgtgcacgaggagctcaatggtgcagtaaaggacttcggctttaagttttggtcctatgtatttaagcattcaccggaattaatggcattgatgaaatcccagcaacttcagtctgcgacttattcagatcgctatttggtcgccccattgccgttatccttatgctttagtgcattgaagttcttaggtgaacactataagggatgcacaacacaggtagtgactggagaactgcacagaagtgctaagccgatgacagtgcaagataacttcgaagatgagtactctcgggacaaagtgttcaggctaatagcggatgcgactgaggcaaacatgtcgtttagaagtcgtccgaaatacgaattaccccatgcacgcgtactcgaactggtttttgatagcggcaccaaagtgacactttggctagatcaaggttttggctattggtatgcggacaaatatctacctgaaaaccagcttgaacgtgatgtttcggaagaggaactcgctgatatcatcagtgcgggacattccatcatacggtctggaaagttctctacggatatttttgtctcgctatcgtag

SEQ ID NO: 30349 - DNA, 3357 bp, Vibrio cholerae O1 str. EM-1676A
atgcaaacttacaaaaacgtcattgcatctattcttgaagtgcgaaagctaaccaaaccaaacggtttgcctatttacagctacaaaattactccagacgaattttctcagttgagaactgctttaatagccagcatgaaaagccatggcgtgcaattttatgccagcaagccaacacgagagtgggcgggctgttttgttttgtttgccgcagagtggtggcgcaactcttttcaaggtggcgtttgggcatgggaacaggttttggacagtctgggtttgggcgcgaatgacttttcacctctccagcgcagtgaaattgttgcgaaggggctgagtttctgggggcgtaaagtgctcagcaataccaaaggtcgaatgtttttggggacggtagcggttgaaggtggcctgcctcaggcattacttctggacccaaacagtaagctgtcttactactttgagcaggttattcaggactacggacaatatgcgaatgcacaacttagtgctgtgtctattgccatggctcactcacattgcatcccttcttccttccgagatgaagctgtgtatagcatcgtcgcgcaggtcgcagaggccatttaccaactggtggataagcacgcgctggacgagcaagaagaccctctgcattacctcaatactgtcgagaaagcgtggcagcacgacctccccttaaatattgatgaaagaacggtccaccagctcttgggcaatgcgttaggcatggctgttgaagcgcaacgtcgtttgccaaattcaattaagattttacgctcgctgcgtaagtcctattcaaactatgcgtctatgttggatgaagaagaggcatttgagtggcagcatcaagtatctatcactttgaaaaatcgcttaaatgaaaattttctccagcagatgtttggcacacgatcgttacctgataggtttcacctctttgctgttgggcaaaaaacactcctgctggcaaaagcattcaagaacggtaaagtttcagagcagtattggctggacgtcttcacgcagtctctaccggacacatggtttgatgcagaaatacagctaaaagcgaccgatgaccatggcaatgaatggttcgcgcctgtcattgggggcgcaggtgtagacgacgatgaaccttgggtattcactcaacataatgatgaatggcttctgcatggttccggcagtgtaagctgtgaagagactaacgctctcgtctcactccctcatgggttttcagtggagtgtggtgatctaattggctatgcgggggagcgcacccttgtagcgattggatcgcaggatggcgagccgacagaacattggtttgcaagccattgtatatcgctgatgcaagatgatagtcactctttggagtacagcctcgtaggccagacgttggtgtatcaaaccaatccgagcaagtgttttcttggtatgccagagcttatcgctatcgaccaacgtggcaatcaaagcaaagtggcgagctctcagttgcgttggcgtaataccctgctggaacaatggcagagcatagattcagtgccgtttggcaaagtggatattgccttgtttgaaaacaataaacccaaaaagcgttttacagtgggtttgttgccgagtgactttgatattaaacacatgtcgagtgactccgttcatatcggccaaattgcatttacttcgaagcataccttgcccactattgcactgggtgaatgccagcagttagacgttttgccaagttcggtactttcgaagccattgactgttgtaggcgagcaaacgcgtagtttagatttggtcaaccatgctgcgcatcctcctgctcatgtaagcgttttagcatggtgggtagatagatcaaaatccttatcaatgacattaccgtttccttcaaaaggtatttgccttattgggtcaagcggcgaagtcatccgcagtagagatgtggtacttgcagacaaactcaaccattatgagttgtttggctatggcgttaaggacgcgcttgaggtggagtttgcgcttcaagcgatagatatctctggctctctagcgaagactgcctatgttaaacgtgatctaccgactgggaacgtattgtcctcaggcttttgtatggcgggattcaagcaagatattgaatcgttacttgccctttcatctagcctggacgccttagtcagggtgtctgttttggagtcagcacagccaatttttacgttcaatattcaaagttatgatgcctcgctgataccagataaagataacaatctgatcagtcttaagggtgaagagcgggagttgtcactatccatggtgccattggataacccttcattcgctcccattcccttgcaacgtgaacaagaaaattgggtgtttcctaatgagtatgccaagcctggtgcatggttgatattctcggacgatgtgcagcgaaatgttcggccgctaatgtggagtaaggagcttgagcttttgtcatctcctgagaatcgctttgaagcggcagcagcgattggtgtacgcaaccaacgactggaagcttttgctactgcatgtggacaactggcaacggagtttgacgcccctgagtggccttatatcaaggccttgttggcattctatagtgtgccgctaaccacttttgatgtttggcgaagcgcggtcaccaaacctgagttcatgttagccatgttgcttgcggccaataaaaaagagtgtgaaaggatttggctgtttagccagcaatttccacttttgtggcaatcggtaaaagtcagaaaagccatcaaggtggttgaagcattctatgcctcgcgcttgagtatgtatggagaagactttgccgatattatacgtagccaaattaaaaccaaattagatgcattggtctcaaggtattctggtttggactcattagccgatttgctgatgcacaaaattgacccgtcacatcccagtaaaaagattaatcacgctgcttatatgcagaagatttttgatttacgaaatgatcttagcaaccgttacgacgaggcttactggccgtgtgatttcgcagctcacatcatcgcgagtgtaacgcggagagtggataggcagttggcaaatgtctgtctaacgtcaaataacgtttaccgtaacaatgttatgaatgcgccagtcctgcttgcgctttcgacttgtggtgtcgcgaaactcaccatcaatccggaaatcgttcacgcgttaacgcaataccgcaactttgatgcagagtatttcgagcaagccttttcgctcacgcatcaaatgatttttggcctgaccaacccctaa

SEQ ID NO: 30350 - DNA, 6207 bp, Vibrio cholerae V51; identical to SEQ ID NO: 30344

SEQ ID NO: 30351 - DNA, 3357 bp, Vibrio cholerae V51; identical to SEQ ID NO: 30345

SEQ ID NO: 30352 - DNA, 6426 bp, Vibrio ezurae NBRC 102218
atgtctacaaaagcaatcaattttaagtctctgtataaagacctttcttccgttacttcacaggctgtgattaaccggcttcagctgaaatcagcacctttgagaaggtttttgcagggtgagttccaagttaagtacggcaaagggaatgacttttttgcgcaaccagtttttgaagcaacttttggttgggcttcagaaaatcgggacaatgatctacaaggcttggcgaaccaaggtaagttagagcgagcgtttgttgaaaacttatcgcacccaccgatgccttttcctgactcttttgaagaaaaagaagaatatcgttcaaaaggcattgttgaacagcgttgggctgaggatatacaagaggattatacttggccactggacagaccgccctataaacatcagttagaagcttgggattacttgtcttcagacgaagttaaatcagtagtggtcacttctggtacaggttctggtaaaacagagtgtttccttgttccattgttgaatgacttagcgaagcagtcgaagcagagcaccgctacacttgaaggaacgcaggctatcttcctgtatccgctcaatgcgttgatcaattcacagaaagagcgtttaagcgcgtggactcgtggatttgaaggcaaagttaggtttgctctttataatggtgaaacaccgactcaagctccgtctaaaaacctttctaacgcaagctttagtcgaaacagcgctcctgaacaggttacaaataggaaagatatttggtcttctccaccaccgatcctggttacgaatgccactatgttggagtacatgctcattcgtcaacaagacgaagaaatcctggctaagtctcaagggaagctaaagtggatagttttggatgaagctcatacctacgttggctctcaggccgctgaaattgcattgttattgcgtagggttatgcatgcctatggtgtagagcctcaagatgttcgcttcgtggcaacatcagcaactattggtgataagaacaagcaagaagaaacaaacagagatcttcaaaggtttctggctaaggttgcgggtgttttacctgagcaggttgcagtggttaatggtcatcgttcaatcccagaaattaatgcaacaggccgcgagtcatcatttagtatcgagaatgcgaagggtatgagttctggtgagcttttcgattacatgagtggctttccaatgcttcgtgaaatgcgagagctgctgacaagagagccccacacacttgaagaaatagctcttatcctcgagccaagcaagtcagaaagcatttctcaatcggagttggcaaaagcgctagaaattattgatctagcagttactgcttatcctaatggtgatagcagccaacaggcgtttttacctgtgcgtgctcatattttccaccgttcacaaagaggtttgtgggcttgctctgattcaaactgttgcaacaaagccaataccgagctgcaagatgggtggaagttcggtatggtttatacaagtgagcgaactcactgtgaaggtgagtgtggagcgccagttttcgagcttactcattgcaaagactgtgggacaccaagccttgccgctgctaaaacaacggcacagggtggcattaagttacttgagccaagagaaactgatctgctagatgattatgttgacgagatagatgaatacgaacagacgtcggatgaaaaaattgacactgagttcgaagccaatgttcagatatttgctaaggaagatgctttaggaaatgcgcatgatcaactgggttgcacccacgttagtattgatccgaaaactaaccgaatttcagaagcctttgaatcagagcatctagatatcttctacaaccaaaatgaccgtgatgatggactccgctgtgcccattgtcatggggttgagaatgttccgaatacacaattcaaacgagctttgctaggttctccgttcctaatggggtcactagtaccggctatgttgcgacacatcccaggtaacaatagtgatgacctaaaaggtaagcgattaattacctttaccgatagtcgtcagggtaccgctcgtttttccgcaaaaatgcagttggattccgagcgtaactggacgagaagccaggtttataagactgcggttcttgaggcaggcggactggatttaccagaagagctaaagaaaataaaagactctattgaagttatgagggaaaacaaattccctgaggatatgattgcccctctcgaaaagaactacctcgaacagctgaaaaaaataccttcaaagaaagtaagctggtctgagctaaaagagcgcctcagcacattgcctgagatacagctactttctggtgcagagctagacctgttggaggggaaggctcttgagaaatatgatgagcgtattcctggagagtatcgactaagatcggagcttttgagtgatgcagataatctggctgatcttttcttaaagcgagaattttctaggcgtggtaagaatgccaacaaccttgaatctatgggcttgattagtcttcactacccagcaatcgccaagctaactgaagaagatgtgacttcatcagagtggagaagtttaggttttaaccttgaagatcttaaacattatctgaagatctgtatggatttttatatccgagaaaacacgcttgtcgatattgatagaagtgtcatcaattggatgggggcaaaacttaaccctagattgctgaaagagtcgagctacgagtataaggatgactttgagaaaaaagcactctttagattccctgtagtcaacaacggtctacagcaccgtttagtgcgtttacttgaactgggttcaggtagagtagctaaggatgagagagagctctttaactcagtgttatcgtttatctggggcttgctgacgaaacgtactcaattgctcactcttgcagagcgacaagaaatgagtaccggtaatgagctgtcaggctacaacctaaagtttgacgagaaaattgagtttgcacctattggaaaagcttggttatgccccgtcactaatcgttggctcgatacaacttttagagggttgtctccttatactacaggttcatcaacattggatgatgttcgatgtgatgagccattcgaaataactcacccagagactgaaatagtcaatagctctccagctgatataagaaactggttggctgacgaagatgtattgaacactcatcgtgatcatggacgttggtctgatatcaatgacagagtaatcgcgggagtccctctagttcgtgccgctgagcactctgcccaacaaagctctgataaactcaagcgccttgaaaaagcgtttaaaaaagattacttaaacgttcttagttgctcaactacgatggagatgggtgtagatattggctctcttagtatggtggcaatgaacaatgttccaccgagtacttcgaactatcttcagcgtgctggtcgagcaggccgacgcagggagtcaactgcacttgcgttgactttctgtaaagcaacacctcatggtgagcgtgtgtttagcgagccaaaatggcccttcgcaactcctatccgagtgcctaaggtttcgctagacagtggaaccattgtgcagcgtcatatcaatgcgttcttgctagcgagctttttgaagatcgagaaaagtcgctcaaacaatcttttgaagatgcaagttggcgcattcttcctgggtgacagtggccttaatccatttaatgcctttataaattggttagcgggtcctgcaggtaatgatgaaagtgtacttgctggtatagatagccttaagtttgattcggtatttgctggtcatctcaatagtattcttatggagagtgcattaaatgctattgaatcctcacatatcaagtggatgcgcaggtacgaatctctcaacacacaaattgtagcgacaagtgacagtaattctcctgcgtctaaaaaactagcaagacaattaaagcgcttggagcgagattatttattagctgagttagctaatactggttatttgccaggctatggttttcctactggcgtggttcaattaattactgataaccgcagtgaaaataactcaagagatgatggaaaatctcaacatcgaacttcgtatccaagtcgaggccttgaggtagcgcttagagaatacgcgccagggtcagaaatcgttcgtgacggggctgtttatcagtcgcaaggtcttcaactcaattggaagatgccgttttctgggaatgatattaaacaagaacagcttattgagtatcaatgggagtgtgagcactgcgggaacataggctttgagtccgtgagttctgaacgagcaaacattcgttgtactgattgtgatagcgacagactaacctggagtgagtttattgttccatcgggcttcgttgttgattttaataagccactacacaacaactatgtgtcgccaagctattcaggatacagagaacctaaagttgctttgaacgatgctcagtggcagccgctctctagctctggcgttggacgttaccgcgtgtctgaatacggctctatatttcattacaacgatggagaaggtggtggatacgcgttgtgctggtgctgcggtagagccgagcctttgagtgtagaaaagacacctatgggccacgttagactgtccaaagagcctcatatattaaagacgcataaacgacttcagggttttaaggtcaagggcgaggtcatgtgcgatggtgttagagaaggctggggagtcaaaaccagcgagataagtaaatctgaaaaagaaatctctatgcctttcatcatggggtatccgcaaagcacggctatgtttgagctgcagttgaagaaccctacctcgggtagctggatatctgatgaaaccttgctctatacgctcggtgtggcactccgacaaatgtactcagatgagaaaggcatcactactcaagaactcggtgttgtcacgaaacacaaaagaacagagtcgtttgaagaggtggtgagtttatacatctttgactctgcgactcagggagctggcttcgcgagttccataccagaggtattgtcgcgtcttttagatgggcttatggactacttaaggcagtgccctaatggttgcgaaacagcatgtcatgcttgcttgttagactacgatactcagcacaatgtaaaagtactcaaccgtaattatctaattaaacagttagaagagaataaggtacttgaaggcctagctctagcggcagatagacgtttctttggtgactcttcggtagttgaactcagcagtgcttctcaggttctgtctagacttgggcattcttgcaatcgggtaagtgtgttcttgggctcgccagagtggcattttggtgagtggagtatccgagaaaaaatcacaacccttgctactaagggtatcccatgtacggtttatctgtctaaagagctagctgaatctatcgactctgatttggcgtgggaaatagctcgaactatgcctattggctctgtcgacttccaacaattaactgagccagtggatttagcttcgggtgcattcccagttatggccctaaaagttggcactaaggtgcattggtacgcgacagatgaggtaagtcaactaggggcgaatgagtactgggggagcggtgaagagaaatgcctggtaacagctacgaaagatcttgtgctcaattcaactaaatttaacctagaagcactagcgcagtcctcaacattgagtgaaagctcttatattttaagtgatgtgtcgtcattaagaggcaatatcaactctttcggagagagcttcgttgagcttttggctagcaatattcaatctttggatgaaacattaaacaataatattagctctattcactacagtgaccaatatgttgtcagcccaatcagtgcagtattgattaaccaaatacttgctgcacttggtaagcggtacgggcgtttctcatcggaaataaatacggttgctccacgaacaggccaaagagcatcaacgtcaatcggtgataacttcttagaagctaacgatgttttggattttatttatgattcatctcagaccctaggtatcgaagtctatggagatatcgttgataaatcagaactatcacatagccgcattatgcgcatcgaactaaaagatggttgcgaagtcaaactactgtttgatcacggtatgggctattggagccgaagtagagactactcacagaagttcgatttcaaagatgttacttatgaagcatcttctgttgatgaatgggactttaccctgaaagattcaggtaaagagacgtttatagcggttaagttaaattag

SEQ ID NO: 30353 - DNA, 3510 bp, Vibrio ezurae NBRC 102218
atgattttagatggtgttcaaagtcctgtggtaacgatgcaacaatggttcaatgagtttgagtctaaaagaccgaaacctaaaaaagggatgccattgtgggcactgaaggtgacggacgaagaacttcaacaaatgaacaagttgttgagggcgcttttcagagctaaagagccgtctgttgtatttaatcaacactcttgcgcgggttatggcaaaaaattcgatcaaattttcacgctgtatttggctacctggattcagagaaactttacgggtgggaaagaacgctggccagttgtcctgagaagtatcgacatatcacatagcaatcgacttaacacttatatctatgattctgtcagagcaggtctaaaatactggggtatcgatctttattcaacctcttctgcaaatcaatattttgcgactttatattgtcaaggtgggttccctagatcaggtcttgttggcttgagcagtgggccagtgcctgagtatttggataaggtgatttcccaatatgctctatttcaccacacctctgaaattagcgatatttctcatcagcagttgcaattgttacctgaaacgctaaagcaacctccttttgccaagcttgcgacagttttaattactaagctgatggagtatcgagatacctattatctacacggcgaacctgacccagttatagctctagatgtgcgccatccacagtggagagatgaactaccatttctactttgtgatgaagaggcccatgaattaatcgggcgattagttcgcaggacttcaacaatcattcgccgtgagcaaaacccggtcagaataaaacgttacttaagagaagatatgggacattgggacttagtggctgaaacctatgttaaccatactatccacccacaagatttgtctcgtgtactctctttggagagcttgcctaagttctttgatttgtacacacagacaaatacaggtgagcgagtcagaactgcgtctttcaaccttaaggggtatgccaataaaagatggcaggttataaccaagttcactcatttttataacgctgatgctgcgagtaatattggctatgagctttggagcgatggacacaagttcaatagtgacacctattatcgaggtgaagagcttaataaagcactaccttggattttttcttctgaaggcgagaagtctcagtatcttggtcaaggtaatgttcaagtaaaacaatcagcggcattaattgttcactctggcacagtagaagcagcaaattctagatctaaggtagagaaagcaggaaccattgcgagtttaggtcgggatatttaccgtgttgttggtaaagcaaaagttgaattagattatgggttcattgaggtaactacaggtgcagaggaagctcaagatgtcacatgttggcttgaaggccaacgtaatcatgaggcaatatcacatcagcacgtatttgtggggaaacctgttggaatgatgaggtttggtgtgaacaaatctcaacctattcctagtgaggaattattctggaagagtgttgattctgattcgcttttaccgctaaattctgaagccttgtcttatggtttgggttcaattatttggtttaatgctggacaagtaatgtggcaaatgaagtgtgcgattttgccagcctcgtctgacttcaatgtgattcaccatggcaggggcgagattgagctaaaagctgtcggtttcaataataccgaccttggctttgtagaaaatgagaagaactggttaagagatgtggacgttattgaggatatattctttgctgaagttcagattccagcaagcatgcctgatactttccacccagttttaggttggaacaattctcttataaataccttaacgtttgaatttgactcgcagcaatcgggtgtatgtctgctaggtagaaatggcaatacgctgaatgctcggggcaataagatcaccttggacgatctctatgcgagtagtctcaaagtcaagcttaatcaagaagacagttcaatcagcgtgtccgctgcactcatgcagcataaaagaattaaagcgggtgtcacgggtgtaattcaaatcccagagtcaaaaactacgatagggagcggtgagctggctcgtatggctcaagctctgtttacacaatctgacgatactcgtgatcgtgtttcgtttaagttctactcgggaaaagagcttttggagtcgcgagttcctccaattgaacagtttaaatatccagtagcgtctttgagagagaataacgcaatgctccgcatccatggtgctcacaagcatagtaattcagagtccatagaactctacacggctccaatatgggatctatctcgcgaacatataccattgcttaagtctgagggagacagaggcgagctgtttttcgagttgccagaaattaatgagcctggtccttggtttgtgtactctaaagatgaccgaaagattcaaccgagagctgtgttagtaccccaacaagaattagaaaagacaagctacgattactctcgtttacagttgtctattaaagatttgccttttgatcctgagactagaagctttgattattcagagatggatgcctcattgagagagttgatgtttgacctccagcatggcgattggcagacagtgcagtcgtttgtggagcagcttgctattgccaacccaacaaccttccatatatttaagcgtctttcagcaaacccggacgtgtttgctgcactgttgctgaaacaggagagcccagaggagtttgaatcggtttggtcgatatcacatgatatgccatttgagtggttgaacgtatctctgagacagtgggtcgaagccatctcgttaacgaccaagagcactatggattcgttgctgatgatgaaagataaattgcccgccgaccagtttaagcagattcaaaatacgatgttgaagagtcgattacaaaacctgtctgacaagggagagtattatgctgccattgtagaagcatcgatcttcattctatatggcatcaagccgagttggttagacatgccaatttattcttcagaacagggaccatcgcatatagctgatttccacaaacagaaatctgaatactttagtcgtcacgaaggcagattcctaactcacattcaaaataagcacaatgacattcgcttaaaagaaattttggattctagattatcgagagatcttctagatgctgaactgaaaggctttactcagcattactctgtggagaagtcgaaagcaatgcgcttggcgatacctttggagttgccagttaaggtagcgctcaataatgcaggcgtgtatccagcagcagatatcgatgaagaagagtcgaaactgattaactttgctctgaaccgtctgtctcagtttgaccgagtatggatgcaagaatcgatggcaatcgcattaaagtctgctgttaagtcacgcgcgcaatag

SEQ ID NO: 30354 - DNA, 6198 bp, Vibrio harveyi
gtggaatattttgaatctattattgaacagctgaccaaacgtgctgctcgagcaaccttaggacagtttggcttacgctcaaagcctttacgtgagtttctatggcaagccttttctaaagcgccagggcaagaaggtgcctttttgggtgatccggtgtttgaggcgacatttggctggaagcctcatacggaaaccatgcaggctttgtcggggaaattgttgtcttctcgtgttgtgcatgcgatggcgaatccgccaaaagcgttgaaagaagactaccagtttgagtcttcatggtttccctatgcccatcagcatgaagcgtggcagcatttgttgcaggacgaacctcgctccgtcattgtgagtagtggcactggttcgggtaaaaccgaatgtttccttgtgcctattttgagtgacattgccgcgcgtaatagtaaggcggaaggcgttgaagccctctttttgtatccgctcaatgccttgatcaatagccagcgagatcgtttagcggcatggactcatgagttgggttcagatgtgaaattctgtttgtataacggtgaaacgaaagagcaggtaccggtcgccaaacaaaaagcagagccgaatcagcagctttctcgtaaggctctgcgtgatgatcctgcacaaattttggtgaccaatgccaccatgttggaatacatgcttgttcgtcaaaaggatgatccaatcttacgtaaatcgcagggtaagttacgttggatcgtcttggatgaagcacacacctacattggctcacaagctgcagagcttgctttattgttgcgccgcgtgatgcacggttttggtgttacacccgatcaagtaaggtttgtggcgacatcggccacaattggtgggaaagattctgataatgatctgaaagcttttttagctgacgtggcgggtgtcgatattacgcaagttcatttggtgaaagggcatcgtgaaattacaacgctggaggaattaacgacgccgcaagcaatgaatttgcaacaagtgaaagcgattgatgatgaagtaatgcgttatcaggcactggagtcgattgtgccgttgcgtgtactgcgtcagcatttgagctctgatgataaccgtatgtcactgtcgcaaatctgcaagttattgtcagcaaccgatgagccaatggaagaaaaaaccgtattgaagtggcttgatgtatgtgcgtcaaccaaaggcagtgacgggcaggcatttattccatttcgtttgcatttgtttcaccgggttgccagtggtttatggacgtgcgctaatccaagctgtaaagcgaaggcaggttccgcattggatgcgttagattggcgcttcgggatggtatatatgtcacgccgtgagcgttgtggttgtggctcacccgtatttgaaatgaccagttgtaatgggtgtggtacgagtctactacttgcagatgaaagtatcgacaaagaaaccggtgaaagtgtgcttagcctgactaagcctgattcgagtattgatgacttttcactcgatatcgaggtggatgactcggatgccttattagaactcgatgaagaggaatcggaaacccatgcccgtctgtgcatgatggctgagcatgatcgtgaggaaacgggccagtattggctgaataatgaaggcgtattaaagccgtctacccacaacggtgcattccaagtgcaccgcgtggaagggtacagcaagtcagacggtactggggtggcgttgcgttgtccttgttgccagcatacaaaaattcagaacttcgatttctatcgccatttccgcaatggtgcgccgtttatgttgtcaacggtgatcccaacgttgttggagttttgtcaagatggcaaaaaagaacagcttaaagggccttggcatggtcgccgaatgatcacgtttacggatagccgtcaaggaacggcccgctttgccgcaaaatcacagcaagatgccgagcgccaatttttgcgtgctgcactgtttcatttagtcgcagatagaacgttgaaaagtggcgcgttgacgccggagcaagaagtggatttgaagaaatacaaatcacgtttagcgatgttcatcgaagacggtgacgatgacatggttgaaatcatggaagaaaaaattgcggcgctgtgtgggggcggtgatgtttcgattccatggtcagatgttgaacatgagctcgctaaagagaaagagctgcaatattggatcaaggattcctatcagcgattcgatgacaaaatgaccatggtgaaagcccctgttctattggcaaggctcttgttattgagggagtttaatagtcgtcctaaacgtcagaatacgctggaaaccttgggtttgatccgtatggagtaccctgccatcaaagacaagggcaatactgctcctaatgaatgggtcgcattatttgatgatcgggacagagcgcaatcagagtgggttaacttcttaacgctgtgcttaaacttccatgtgcgcgccaataaggctatctcgttaaccgaagagcagcagcgctggattggtgcgaagttcagcccagggctaattgctgcgccgggtgacgacagcccgtttcgtaatgttcaaagttggcctcaggtcagaaaaggctcggttcagcctaggctggttagactacttgcaacggcatttaatctggacattaccgatactcaagataaaacgcagctcaatattatcttgcaagacgcttggaatgtgctgcaacgctatgtgctggcggggagtggcgatggctaccgcctggagctagagcatcaggtaagtttcagtttgttggctgaaaaatggcagtgcccgcatacgcaaaaaattatcgatacgccgctagctaaaattacgccgtacttgaacgtaaaaggtgaacgtgatgaacaagtctgccgcttattagaagcgccggtttatccgtacccttatggtcgtcagattgaagacggatcacccgttgcgcttaacgtggtgagggactggcaagaacagtctgacatagctaacttgcgtaaagaaaatgcgtggtcagacatttcggaccgtattatcgaacgtacgccatatttccgtgtggcggagcattctgcacaattaccggcccctttgctgcgtgattatgaagataaattcaaaaaaggcgccattaatgtactgagctgttcgacaaccatggagatgggggtggatattggtggtatctctgtggtggcaatgaataatgcgccacctaaccctgcaaactatttgcagcgtgcgggtcgtgcaggtcgtcgcggagaaacgaaatctgtcgcgttaactttgtgtaaaaatacgccgcatggtgagcatatatttagccacacgcggtgggcgtttgatacgcctattcatgtaccgaatgtatcactatccagcgaatatattgtaaggcgtcatattaatgcgctgctattgtcggtattccttcgccagaaaaatatcagcgacaactctttgcgtttgagctgtggcaatttcttcctgtctctgcatgagcagtgtgcatcacaggccgagttgtttattaactggtgtatgacagatgcgcttgaccatatgagtgacggcttagagacgttgcttcgtcgaacaagcttagaagcgacgtcaaaaatgagtctagtgcaggaatcagcacagcagatgaagactattttgtgcagttggcagaaagaacatcagttgctgtgtgagcagagtgaagcggtaaaagcagatactaaccgcctttctattgcacaggcggcggtggaaacgcaaattcagcgtttagaaggggaatacctactttcagaattggcacggaaagggttcttgccgggatacggttttccgaccgatgtggtgtcgctaaataatgataatgctgagtccatcaatcgaaggaaagcattgattcaagcggcaaaagaagccaaatctgcgaaaaatgatacgttagagcaccgtattgataacctgtacagtgcgcgcgattatccatcccgagacttatctgtcgcgattcgagattatgccccgggcagtgaagttgtgctggatggtcgtgtgtatcaatcggcaggcgtgatcttaaattggcatagtcctgcgtctgcggatcaggtgagtgaaattcaatctttgatgtgggcttggcgttgtcagcagtgtggtgcaagtggaacagagcgacaaatgccgaaggtgtgcagttgctgtgaggctcagttagcttcagacagttaccaccgtttcattgagccaggaagttttgcggtcgatattcgtcataaaccacataatgatatttctcgcttggtgcatgtgcctttccaagatccttgggtaacggtagagcaagacaagtgggaagaaatgagcgtaaacccaagtgctttgttccgttctagccataacggtcatgtgtattaccacagtgcagggttgtccaatacgggatatgcgctctgcttagagtgtggccgtatggaggctatgccagattcaccggacgtgacgccttaccaggtcttggaaaatcacactcgtttgcgtggcggtaaaggggaaatcgagcgtgaaagtgagcatttctgtggcggtaatgagcgtgattttgcgattaaaggcccgattaagttaggtcatagtacacgtacggatgtgtttgagttattgcttttccatgcagatggtacggttctgaacaatcgcacgattgcccgttctatttcggtactgttacggaatgagttggctgcaaaattagggatcaatagtgatgaggtgggttgtaccacaaagccagtgaattatcaggagcatgaggcgcaggcaattgtgctctatgattgtgcggcgggaggtgcgggctttgcgataaaaacgcctgagtttttgatcgcgttattgcaagctgtgaagaagaaagccgtggattgtcactgtgataaagcgtgccatcgttgcttagtggactactcaacgcagcatgcgctggaattgctaaatcgttggaaagtgatcgagtttctcgataatgatttttttgcacgcttatcgctgccagatgaatttaagttatttgatcgcgataaccgaagagagttacgtcccttgatgactgccattgagcaatcattggcgcatacgatagaccctgagctatgtctgtatatgcagcgagatactctagatgatctaagcaaatggccgcttatagatgcactgtatagctgggcaagagagcggacggtgaaggtggtgttactcagcactgagtcatcggctttaacgacgcctgaacagatcagtttgtcatggcttgctaatcacccgaatatcgacttacttcagcgagatgacgcaataaaacgtgatatgacgttatgtgctgaaattttgagtggcaataaagcccaatcgtggggataccgtgatgaatatgaagctcagttagtgacaggtttcgggagtagaccgatgttgtcagcgattaagctggatgcactgacgcacccagagagaatcggaaccgtgaatattcatcatgagcttaatcattcggtgaaagcgtttggtgcgctgttttggagtaaagtactgaaggcatctgatttgttgttgaagaaaatgcagacacatcagatcgttgaggttgagtactgtgacagatatttggctgcaccgttaccttttagtttatgtttaagtgccgtaggggcattgctgggtcactataaggattgtaacgcttcgataatcacgggtagactgaaggaaggcggatatttgcctgaatctgttcaagataattggtcgtctgatgatgcaagaggcaaggtagtaaatcgctgtattgagaaaacacagcttgatattacgtttgagacaaaaccaaaatatcaattacctcatgctcgcacaatgacatttactttcgatgatggtgcaaaagtaacactctggctggatcaaggctttgggtattggtgggtagacaaatatttaccagaaaatcaattccccgctgatttaacggttgatgagcaggctgaatgtattgttcaggggccatggcacttgaaaagtggtgattggccaacagtgatttttttctctattgaggaatga

SEQ ID NO: 30355 - DNA, 3378 bp, Vibrio harveyi
atgaaaacatttcgccattgcattgcagatatattgtcatcacgcgacttagagcgtgtgagtggtgcgcctttatatagctataaattgacggatggtgaatattcatcattgcaaacgtcgctaattgatagtttacgtaaaagccatatcgagagctacatacccaaaagcatgagctcagaatgggctggtgcatttgttatgtacgctgctgaatggtggcgaaaggaattcaatggtggccattggagttgggagccgattttcaagtcgcttaatattcaagataccgatcttgctgcgaaccagcgaaatacattgattgaagcgggttttcgtttttggcgccgcccagtactgtgcaatggtcaggggagaatgttccttggtaccgttgcggtagaggggggcttgccgctgcaattgataacggacccaaacaacaaactctcccattattttgagcaagtgattaaagactttggcaagtacgcactctctaaaccaaatgcggttgccattgcacaagcgcatgatcattgtatcgtaccgtcatttcgcactgatgcggtgtattctgttgtcggcaaaattgccgaagcgattttccagctaaccgatcaatatggtttggatgagcagcatgaccctctacggtttctggatgcagttgctccagattggtcaacctcactaccactaaatattgatcatgatgtagcaaaaggtctgttaaatcgagcattagggcaggcgattgcagttcagcgacgcttgccacactcattgcgtcttatccggcgattaacacaaacgtataacccccacgcttttgttgatgatgatttccagcaaaccgagcagtcttggacgtaccaactggctatctcgctgcgaccgcggttgagtgctcagtatattcaacagctctttggtatgcaggttttacctgaacggtttagtttgtttgcgatggggaaaaaaccgttgctattagcaaaagcgttcaagcccaaaaataacacagaacgctatctgttggatgtgatgacctgtgagttacctgatgattggtttgattgtgaaatccaactaatggcgcggggcgatgaagggcaatcatggtatgcccctttgttgggaggcagtgctttagatgcggaagagccgtgggtttttgccgataataatggtgagtggacgtttgtcggcgcaggggatgtaaattgcgaatcaagcagtgctgtgatcgctttgtcttctgagcttgcagatgtctctttgtcttccgtctcgtgtgtaatgggctctgtgaccacaccgcacgcacaatctttgtatctattcaatgagacgggccgatacagctttggcaactatgtggtgcaactcggtgagacgagtgagccaaatagagaatatgtatggcaaggtgaggaattgccttatcaaacagtgccaactaagtgctttatcggcaaacctgccttgttagccctttcttcactagggggacagcaacgaattgcgtcggagcaattacgttggcatgacggtgcaaaacaacaatggtgttcatttgagaccttgccattagggcaaagtgaagtggcctatattgagggtggccgagttaaaaagcgttttcgattggcaagtttacctaatgatatcgcgattgaatttttgcctggcagccagatcaaccgtggtcagattgttatttcatcatcgcgcccccctatggtcgctgtcgcacagcctacggttggccacttggattacgacgtctcacgagcatgtgatgccgtgacgattgatttgttttgtgcacaggagcaaccgcctgctgtgctggacattgatctttggtggcaggaaaagccgaaagcaatctcgctgaccttaccatttccaagtaaaggcatttgtttgttggatgagagccaacaattggtaccgtgccatagcgaattactggtggataaaatcaatgggtatgagttgtatggctatggtgttgacggtgaaatagagctgcaatttttactaaaagctcaagatgttcgcggggcattcagtcgaagtgcatttttcagtgccgttttgccttctgttgacgcattagcttcaggcttgtctttgtccagtttccgtaccgaaattcaatcattgtttgccctttcatcgagtttggatgcgaaagtgcaactgacggtgtctcatcatgggcaggcattgtacacgtgtgcgttatcggcgtatgagtgtgcgctcatgccagatcgagaaagcaacagtgtggcgctagcacaggcgatagatgacaaaggtacaccagaactctacaccatccctttggatagaccggatcacccaccgttagcgctaatgcctgcgtctatgacagatggcatgtcgatgcagtggttatttccgcaagaggaaatagaagccggtgcgtggctgatttacagcgataaccctcagtttggactgcgtccgctgatgtggagtaaagacttagagtgtttgtctgcgccaagtaacggatttgaaatggcagcgggtattgggcgccgggcggaaagactagaagcgtttgcttcggtggcattagaaatggcatacgactttaatcgtcctgaatggaaatatgcgcgcacgttactggctttcgatcatgttccattaaccacgtttgacttgtggcgtggtgtattgcgccaacctgaatttatgttggcactgttgctgaaagccaataagaaagaaattgatcaggtgtggaaaatggataagcagttcccgctgctttggtatgcattgaaagcgacttctgccgtaaaagtgacggaggcgttctatcactatttgcttgagcgtttgggcgaagatatggcggatgtagcacagttgcggattcagaagaagttggctgagctagtgtcttattttccggggctggcaccacttgccaagctattgcaatttaagctgggcatggttgagcagaagccctcactggaaccccctgcatatatgcagcacatgttcgattgccgaaatgcgctttctcagcgccagtctgacgtatcgtggcctacggtttttgccgatcacatttttcagtctgtgatgaaaaatattaatgcgcaatgggttcaactttgtttaacgaccaagcatggattcaaaaataatgtgatgaatgcgccagtgttactcgcgctggcaacgagcaatcaagctgagttgacgatgacgccagaagtggtgcatgcgatgcgagaatatcgtcgatttgaccctgagtattttgatgacagctttgcattaacccagaaaatgatcattggcttgctggctatttaa

SEQ ID NO: 30356 - DNA, 6201 bp, Vibrio parahaemolyticus
atgcaatattttgagtctttagttgaccaacttaccaaacgtgcggcacgagctactttagggcaatttggtctgcgatctaagccgttacgtgaattcttgtggcagtcgttttctcaacctccgggtaaagacggagcttttcttgccgatcctgtctttgaggcaacattcggctggaaaccacatacagaaagtatgcgagatctttcaggggggcttctaaaccgcgcaattgtaaaggcgatggcaaacccacctaaagagcttgaagaagaatacctatttgatagtagttggtacccatattctcaccagtatgaggcttggtcacacttattagagacctcacctaagtctgtgattgtaagtagtggcacgggttcgggtaaaacagagtgttttttggttccgattcttaatgacattgtcgacagaaacagcaaaccagatggtgttgaggctctgtttctatatccactcaatgcgctaattaacagccaaagagagcgtctgacggcatggactcaccagttgggggatcaggttaagttctcactctttaacggcgatacgccggagtccgtcagtgccgcagagcgcaaaaaacatccgaatgagcaattatctcgcagagaactaagggaaagcccagctcagattttggtgacgaactcgacgatgttggaatacatgttagttcgtcaaaaagatgccaatattttgaaccgttcccagggtaagctacgttggatcgtattggatgaagcgcacacctatattggttctcaggctgctgaactatcgttattgttaagacgtgtgatgcatggatttggcgtaacaccagagcaagtccggtttgtagcaacatctgcaactattggtggtgcggattctgacgatgatctaaaggcattcttggctgatgtggctggtgtcgatattacacaagttcacttggtgaaaggtaagcgcgaaattcagcctctgatggaattagagcagatcaaagggatgagtcttgaccatgtagtgagtattaaaaacgagcaacaacgctacgatgtattacaaaacataccgccgctgcgaacgttaaggcaacgccttagttcaacagataatagaatgactcttaacgaaataagtaaactattgtctgcaacagaagagcctctatctgaacaagtttctctacaatggctcgatatatgtgcttcgacgaagaacgcgagtggcgattcattcatcccgtttagactccatctttttcatcgtgtggccggtggcctctgggcttgttcaaaccctgactgctcatccaaagttggtacacctttagaatctgtcgactggcgatttggtatggtccatatgtcgagacgagataagtgctcatgcggctcaccagtgtttgagatggtcagctgtaatggttgtggtacaagcttattagctgcgactgaaaaaattgactcagagacaagtcatgctcagcttcatttgacgaaaccagactcatctatagatgacttcgctctggatctcataggagaagaagacttaaccaacgaagatgaagaagaggcttctaatgagtatgaccgttttggtcttatctccccgttaagttttgaagaaacaggtgaatattggattaataaccagagagaagtgaaagcagctaaaatgcccggttcgtacttgattcatcgagtcgaagggtatcgtaaaagcgatggtgctttatctctccgttgtccgtgttgccaacacactaaaattaagaattttgagttttatcgccattttataaatggtgctccgttcatgttgtcgacggttatccctacgttactagaatattgccaagatggtaagaaagaacaattaaaaggtccttggaacggtcgtagaatgatcacttttacggatagtcgtcagggtactgctcgcttttctgccaaagcacagcaagactctgaaaggcagtttttacgttctacgatttatcacttgattttggataaagcgatccgagaaagcggggcgagttcagcttctagtccagagctggagcaataccaagcgatgctcaaaatggcaatcgagaatggcaatgaaggtatggttgagttcgttgaaggtaaaatctcggaactcgttggtagtacctcaaagccagttacggtcagttggccagaagtggaagacttcttagcggaacagaaagaagtgcagttgtggatcaaaaagttctatgagcattttgatgaccgaatggacatggttgcgaatccaaagttactagctcgtttattgcttttaagagagtttaatagtcgaccgaaaagacagaataccctagaaaccatgggattagtctgtatggagtacccagtgctggataaaaaggcgaattcagctccgagtgaatggttgaggcattttgacagtgcagacgaagcgcgtgcagagtgggtaaacttcttgactgtcgcagtgaattttcatgtgagaagcgtgaaagcggtgaggttgaccgaagagcagatcaactggatcggtgctaaatactctccagctttcttagtagggcaagatgaacctacccatatttggaatgtagaggcatggccaaaaattaggcgtaatggttcacgacaaccaagattagcaaggttggttgcaacagctctaaatatggagttggatgatgctaattcacgggctgatatcaatgaaattctacgccaagcatggatggctctgcagtcttctgtattgacaccaagtggtgatggctatcgtttggagcttgaacagcaagtcagcttttctttattagcggacaagtatcaatgtcctcacaccaagaaaattattgataagcctttgctaggggtcactccgtatttgaatgtatctggagaccgcaacgagcacttgtgtaagtcaatttctacaccaagttatccattcccgtttggacgagatccagacagtggagaaaccgttgagctaacgaaagttcgagattggcaagagcagcctgaattgatgaatgtacgtaaagaaaatgcttggtctgatattgctgaccgcgttgtcgagcgtacaccttactttagggttgcagaacattcagcgcagctcaaagcaagtcagttacgagagtatgaaaaagaattcaaagcagggagaatcaacgttttaagctgttctacaaccatggagatgggggtcgatattggtggtatatcagtagtcgcgatgaacaatgctccgccgaaccctgcaaactatttacaacgtgcaggccgggctggtcgccgtggtgagagtaaatctattgctcttacgttatgtaagtcgacaccacatggcgaacatatcttttcgaatacacgttgggcatttgatacggagattaaagttccgaatgtatctttatccagtgattacattgttcgtcgacatgtgaattcgctattacttgcaacatttttaaatcgagtcttaaagtcagagaattcgctgacgctgaattgcgggaacttctttaagtctgatcatagctcagcggcttctcaagctgagcagtttgttgactggtgtgtgaatggtgcattagagcttgtacaagaaggccttgatactttgcttcgtcgtacatctctcgatgcgacatcacgtatcgaaatactagatgcctctgctacacacatgaagcaaattgttgaacgttgggtagctgagcatcaattgttaaaagatcaatctaatagcttggaggacaacccaaattcactctcgactgcgcaagctgccgttgaaagtcaaattcaacgcttagaaggtgagtttttactatccgagctagctcggaaaggcttcttacctggctacggtttcccaacggatgttgtttctttaaatacggaccacgtcaaagtgatcgagaggcgtaagcgcaacattaaaatgaagcaagatcaaattagcgataaaacatcccgtaaagacaatctttacagcgcaaaaggttttccatctcgtgatttgtctgtcgcaattcgtgattatgcgccgggtaatgatgttgttattgatgggcgtgtttatcagtctaagggtgtcttgttgaattggcatagccccgcatccgttgatcaagtcaaagaaattcaagcgttgagatgggcatggcgatgcgacaagtgcggagcaagcaatacttcctctttaagacctgataaatgtgaatgttgtggtaatgagtttgatttgagtgatggcaacacgaaagagcacatccatccatatattcaacccgcaagcttcgcggtggatattagagatgagccccacaatgacatttctcgattgaaccacgtacctatcaatgatccttgggtaacggtagatagttcagagtggcgagaagtgagtgtgaaccccggcgcatcttatcgttctagtcataatgggcatgtgtattactacagtgctgggcctgttaacaaaggttatgcgctttgccttgagtgcggtcgtatggaggcaatgccagaaagtgaagataaatcgccgaaagacgtattaatgggtcacactcgtctacgaggaggtaaaggacatttaactagttcgagcgaagtattatgtggtggtaacgatagagagtttactactaaggggcctttgaagctcggacatagtacttacacagacgtattcgaattattgttatttaatgagttggggaaaccactagtagatagaagtatcgcgcgttcagtcgccgtattgatgcgaaatcaattagcagagaaactcggtatcaataacgatgaaattggctgtacaactaagccagtgaaccatgagggacgtgaagtgcaagcgatcgtcctatttgataatgcagctggcggtgcaggtttctcaattcaagcttcggactatgttgtccagctattaaaaggggcaaaaaagatagcttcaagttgtcactgcgataaggcatgtcatcgctgtttagttgattattcgactcagcatgtccttgatctacttgaccgacataaagttactgcatatttaaataacggttttttcaacaatctcagtcttcctgcggaatatgaattattcgaccatcataataggcgtgagctacgccccctaatgatcgcaatagaaaaaacacttgcgaaggacgatgactctgacctctatgtcgaattacctatcagtcagttgagcgatttaggaggttggcagttatatcaagcattcagccgttgggttgctgaacgtaaggtaaacctgatacttgtagaggctaaagttaaagaattgtcactagagcaaaaagtgacgctatcttggtatcaaaaccaccctaatgtgaagcttttgagtagatccttgaatggccagtccgaacacgttgttcttgcatctgtaactaataagtcatgttgctaccaatggggcattcgtgaagacgatcatgaaacactagttactggcgttggttctttagggacgttggctgacttcgatattaaacgtctgcatcaaagttctgatgtagagaaaatagtcatcgatagtgagctggatggaaaagcttctgagttcgggtttaagttctggtcccacgtatttaaatgttccccggcattgatggcactaatggaaaatcaggttattgaatctgtaacgtactcagatcgttaccttgcggctaccttaccattctcgctctgctttaatgccctgaagtttataggagagcattacaaaagttgccagatagaaatcaacacaggtgaattggcgcgaggttacagaccagcaacggtacaagataacttttacgacgattattcacgagataaggttgtgagtttggcgctagagagtacggcggcaaatatcagttttaaaacggctccgaagtacaagctaccacattcaagaacgttagttttatcgtttgataatggacgtcaggtgacattgtggctcgaccaaggttttggttattggtatgcagacaagcgtttgtctgaaaatcatttaccacataatctttatgatgaagaacacgcaaatattattgtgaaaggacaatctcaaatatcctcaggaggtttcccaacggacgtctttatctcatttgcctag

SEQ ID NO: 30357 - DNA, 3366 bp, Vibrio parahaemolyticus
atgcaaacatacaaacacattctttcttcatttctcaaccagagagaattgaacaagccaaacgctcaacctctttatagttacaaagtcacggctgaggagtttgaatcacttaaacagtcgttgattgctagtgttgcgagtaatggaatccacacctattcgaataaaccgataagagagtggtcaggatgttttgtattgtatgcagcagagtggtggcgcacttcatttcaaggtggagtatgggcttgggagccggtgttggaatctttaggtttaccagccaacgcaatttcgccgacacaaagaagtgagatagttgtaaaaggcttaagtttttggggaaggaaggttttaagcaacacgaagggacgcatgttacttggcactgtcgctgtcgaaggtggtttaccgcaaacgctaatccaagaccctcatagcaagctcgcccattacttcgaacaagtcatccaagattatggccagttcgctaactctcgcttaagtgcagactcaattgcgaaagcacatgcgcattacattgctgcatcttatcgtgatgaaacggtttatagtattgtcgcgcaagtcgctgagtctatttactctttggttgataagcatggcttagaagagcagagtgatccgctacattatttgaatacggtcgacgcgaactggtcacagagtttaccgttgaatatggagcctgaggctgctcggaccttattaggtaacgcgcttggccttgctgtcgaagttcaacgccgtttaccaaattcaattaaggttttgcgttccttacgtaaatcctattctcattacgcttctatgttggatgagttcgagctgggcactgaagaagtgtaccagtggaagactcaagttgatatcacgctcaagtctcgtcttaacgttcaatttttagagcagctgtttggtagtgtgaatctgcctgagcggataaatctgtttgcagtcggtcaaaagagtttgttattggcgaaggcgattaaacgcggtactgactctgagcactatttacttgatgtttatacgacgtcactcccagaagattgggtcgactgcgacatacagttaaaagcaacggatgaccttggaaattcatggtatgccccggtgctgggcggtgctggattagatgtgaatgaaccttgggtattcacccaacacaatgatgaatggctgtttaaaggtgctgggaatgtcacgtgtgaggaatcaaacgctttagtttcagtgcctgaaccattatcacatcttgaactgggcagtgtcggcagtatcaaaaatcgaattctttatgaagcgaatactcaaactagctccgagttttactttggagagtattgtgtgtctctgcagcaagaggatacacattccctagaatacaacttagtcggtcaatcggtttcttatcaaacaaacccaagtaagtgctttattggcttgcctagtcttgttgctattgatgaagctggtcgacaaacgcctatagcgaacactcagcttcgttggcgtaatacgatgttggaacaatggcaaactatgagcactgtaccttttggtaaggtcgatattgctttattcgaaaataataaacccgttaagcgctttacagtgggtttattaccggatgattttgttattgatttccagccaagccattcggtacaaatcggccaaattggtttttactcagagaatccattgccttctatcgcattagaggacaatgagcagctcgatgtattgccgagttctgttctatctcatgctcaagaagaccagaatgaagcaaagcgtagtttggatatgttaagcagccaagcccacccacctgcacaggttaatgtccgtttatggtggcaagatcaagcaaagtctttgtcgatgactttgccatttcctgcgaaaggcatctgtttgattggtactcaaggagaagtggttcgcaatgcagacgccatcttagttgataggctcaatcgctatgagttgttcagttatggtgtaaatgattcactagaagtggaatttaaactacaagctagagatattcacggtgcactttctaaatcagcatacgttaaacgttctctgccaaaaggcgacaccttgtctgctggcctttcattagcgacattcaaagaagatattgactctctgtttgctttatcatcttcattagacgcgatcgttaaagtttccgtactcgataatgcacatacgatattcaattttaatgttaacgcgtatggcaacacgctcacgcctaaccgggaattatgcacagttgaaattgataacgactactttatcgggacactttctatggtgccactggataatccgacctttgctccggttactttagccaagaatgatgaacaatggcatttccctgatgaagatgcagcgccaggagcttggcttatttatgccgatgaggcagagcagggagtgcgaccattgatgtggagtaaagatctcgaactcttatcgtcgccaggcaataggctggaagaagcagcagcgattggctcacgtaaagatcgtttagataaattctcagtcgtttgtggtcagctagcggttgagtttaatgctcctgagtgggcatatatcaaagggctgttggcttttgatagcgttccattaaccacatttgatttatggcgcggtgcaatcactaaacctgagtttatgcttgcaatgttgttaagcgcgaataagaaagaagccgagcgtatttggcaatttagtaagcagtttcctttcttatggcactcacttaaagcccgagatgcaatcgcggtgattaatgcgttctatgattcgcgtatcgaagagtatggaacagacttttcaggcatcatttgtgatcaaatagaatcaaaattggacgacttagtcaccagatatcacggcttacaaagccttaaaaatctattgatgtataaaattgactctagccgagataagccatctcttaatcccgcagcctataaacagcagttatttgacctacgaaatgcgttgaacaatcaatatgatgaatctcattggccttgcgcatttgcagatcacattttgaacaatgtcattaactcggtaaatgagcaactatccggagtctgcttcaccactaaaaacctctatcgcaataatgtcatgaatgcgcctgtattactcgcattatcgacttgtggttctgcttcactccgcgtgactccagaagttgtgcatgcaatgagacagtataaaaacttcgatcccgactattttgaacaagcattcgctcttacacatcaaatgattttcggcctagtgaatagctaa

SEQ ID NO: 30358 - DNA, 6207 bp, Vibrio parahaemolyticus
atgcaatattttgagtctttagttgaccaacttaccaaacgtgcggcacgagctactttagggcaatttggtctgcgatctaagccgttacgtgaattcttgtggcagtcgttttcccaacctccgggtaaagacggagcttttcttgccgatcctgtctttgaggcaacattcggctggaaaccacatacagaaagtatgcgagatctttcaggggggcttctaaaccgcgcaattgtaaaggcgatggcaaacccacctaaagagcttgaagaagattacctatttgatagtagttggtacccatattctcaccagtatgaggcttggtcacacttattagagacctcacctaagtctgtgattgtaagtagtggcacgggttcgggtaaaacagagtgtttcttggttccgattcttaatgacattgtcgacagaaacagcaaaccagatggtgttgaggctctgtttctatatccactcaatgcgctaattaacagccaaagagagcgtctgacagcatggactcaccagttgggggatcaggttaagttctcactctttaacggcgatacgccggagtccgtcagtgccgcagagcgcaaaaaacatccgaatgagcaattatctcgcagagaactaagggaaagcccagctcagattttggtgacgaactcgacgatgttggaatacatgttagttcgtcaaaaagatgccaatatcttgaaccgttcccaaggtaagctacgttggatcgtattggatgaagcgcacacctatattggttctcaggctgcggaactatcgttattgttaagacgtgtgatgcatggatttggcgtaacaccagaccacgtacggtttgtagcaacatctgcaactattggtggtgcggattctgacgatgatctaaaggcattcttggccgatgtggctggtgtcgatattacgcaagttcacttggtgaaaggtaagcgcgaaattaagcctctgatggaattagagcagatcaaagcgatgagtcttgatcatgtagcgagtattgaaaacgagcaacaacgctacgatgttttacaaaacataccgccgctgcgaacgttaaggcagcgcctcagtgcaacagataatagaatgactcttaacgaaataagcaaactattatctgcaacagaagagcctctatctgaacaagttactctacaatggctcgatatatgtgcttcgacgaagaatgcgaatggcgatgcattcatcccgtttagactccatctttttcatcgtgtggccggtggcctctgggcttgttcaaaccctgactgctcgtccaaagtaggtacacctttagaatctgtcgactggcgatttggtatggtctacatgtctagacgagataaatgctcatgcggctcgccagtgtttgaaatggtcagctgtaatggttgtggtacaagcttattggctgcgactgaaataattgactcagagacgagtcatacccagcttcatttgactaaaccagactcatctatagatgacttcgctctggatctaataggagaagaagacttaaccaacgaagatgacgaagaggcttctaatgagtatgaccgttttggtcttatctccccgttaagttttgaagaaacaggtgaatattggattaataacctgagagaagtgaaagcagctaaagtgcccggatcgcacttgattcatcgtgtagaagggtatcgtaaaagcgatggtgctttatctctccgttgtccgtgttgccaacacacgaaaattaagaattttgagttttatcgccattttattaatggtgctccgttcatcctgtcgacggttatccctacgttattagaatattgccaagatggtaagaaagaacaattaaaaggcccttggaacggtcgtcgaatgatcacatttaccgatagtcgtcagggtactgctcgcttttctgccaaagcacagcaagactctgaaaggcagtttttacgttcaacgatttatcacttgattttggataaagcgatccgagaaagcggggcgggggcgggatcggcttctagtccagagttggagcaataccaagcgatgctcaaaatggcaaccgagaatggcaatgaaggtatggttgagttcgttgaaggtaaaatctcggaactcgttggtagtatctcaaagccagttacggtcagttggctagaagtggaagacttcttagcggaacagaaagaagtgcggttgtggatcaaaaagtactatgagcattttgatgaccgaatggacatggtttcgaatcctaagttacttgctcgtttattgcttttaagagagtttaatagtcgaccgaaaagacagaatacgctagaaaccatgggattagtctgtatggagtacccagtgctggataaaaaggtgaattcagctccaagtgaatggttgaggcattttgacagtgcagatgaagcgcgtgcagagtgggtaaacttcttgactgtcgcagtgaattttcatgtgcgaagcgtgaaagctgtgaggttgaccgaagagcagatcaactggatcggtgctaaatattctccagctttcttagtagggcaagatgaacctacccatatttggaatgtagaggcatggccaaaaattaggcgtaatggttcacggcaaccaagattagcaaggttggttgcaacagctctaaatatggagtttgatgatgctaattctcgggctgatatcaatgaaattctacgccaagcttggatggttctgcagtcttccgtattgacaccaagtggtgatggctatcgtttagagcttgaacagcaagtcagcttttctttattagcggacaagcatcaatgtcctcacacccagaaaattattgataagccattgctaggggttactccgtatttgaatgtatctggagaccgcaacgagcacttgtgtaagtcaatttctacaccaagttatccatacccatttggacgagatccagacagtggagaaaccgttgatttaaccaaagttcgggattggcaagagcagcctgcattgatgaatgtacgtaaagaaaatgcttggtctgatattgctgaccgcgttgtcgagcgtacaccttactttagggttgcagaacattcagcacagctcaaagcaagtcagttacgagagtatgaaaaagaattcaaagcagggagaatcaacgttttaagctgttctacaaccatggagatgggggtagatattggtggtatatcggtagtcgcgatgaacaatgctccgccgaaccctgcaaactatttacaacgtgcaggccgggctggtcgccgtggtgagagtaaatctattgctcttacgttatgtaagtcgaccccacatggcgaacatatcttttcgaatacacgttgggcatttgatacggagattaaagttccgaatgtatctttatccagtgattacattgttcgtcgacatgtgaattccttattacttgcaacatttttaaatcgagtcttaaagtcagagaattcgctgaagctgaattgcgggaacttctttaagtctgttcatggctcagcggcttctcaagctgagcagtttgttgactggtgtgtgaatggtgcattagagcttgtacaagaaggccttgatactttgcttcgtcgtacatctctcgatgcgacatcacgtatcgaaatactagatgcctctgctacacacatgaagcaaattgttgaacgttgggtagctgagcatcaattgttaaaagatcaatctaatagcttggaggacaatcctaattcactctcgactgcgcaagctgcagttgaaagtcaaattcaacgcttagaaggcgagtttttactatctgagttagctcggaaaggcttcttgcctggctatggtttcccaacggatgttgtttctttaaatacggatcacgtcaaagtgatcgaaaggcgtaagcgcaacatcaagatgaagcaagatcaaattagtgacaaaacatcccgtaaagacaatctttacagcgcaaaaggtttcccatctcgcgatttgtctgtcgcaattcgtgattatgcgccgggtaatgatgttgttattgatgggcgtgtttatcagtctaagggggtcttgttgaattggcatagccccgcatccgttgatcaagtcaaagagattcaagcgttaagatgggcatggcgatgcgacaagtgcggagcaagcaatacttcttctttaagacctgataaatgtgaatgttgtggtaatgaatttgatttgactgatggcaacacgaaagagcatatccatccatatattcaacccgcaagcttcgcagtggatattagagatgagccccacaatgacatttctcggctgaaccacgtacctttcaatgacccttgggtaacggtagatagttcagagtggcgagaagtgagtgtgaaccccggcgcatcttatcgttctagtcataatgggcatgtgtattactacagtgctgggcctgtgaacaaaggttatgcgctttgccttgagtgtggtcgcatggaggcaatgccagaaagtgaagataaatcgccgaaagacgtattaatggggcacactcgtttacgaggaggtaaaggacatttaactagttcgagcgaagtattatgtggtggtaacgatagggagtttactgctaaggggcctttgaagctcggacatagtacttatacagacgtattcgaattattgttatttaatgagttggggaaaccactagtagatagaagtatcgcacgttcagtcgccgtattgatgcgaaatcagttagcagagaaactcggtatcaataatgatgaaattggctgtacaactaagccagtgaattatgagggacgtgaagtgcaagcgatcgtcttatttgataatgcagctggcggtgcaggtttctcaattcaagcttcggactatgttgtcgagctattaaaaggggcaaaaaagatagcttcaagttgtcactgtgataaggcatgtcatcgctgtttagttgattattcgactcagcatgtccttgatctactagaccgacgtaaagttactgcatatttgaataacggttttttcaacaatctcagccttccttcggaatatgaattattcgaccatcataataggcgtgagctacgccccctaatgatcgcaatagaaaaaacacttaccaaggacgatgactctgacctctatgttgaattacctatcagtcaattgagcgatttaggagggtggcagttatatcaagcattcagccgttgggttgctgaacgtaaggtaaacctgatacttgcagaggctaaagttaatgagttgtcactagagcaaaaagtgacgctatcttggtatcaaaaccaccctaatgtgaagcttttgagtaaatccttgaatggccagtccgatcacgtggtgcttgcatctgtaactaataagtcatattgctaccaatggggtattcgtgaagacgatcatgaaactctagttactggcgttggttctttagggacgttggctgacttcgatattacacgtctgcaccaaagttctgatgtagagaaaatagtcatcgatagtgagttggatggaaaagcttctgagttcggatttaagttctggtcccacgtatttaaatgttccccggcattgatggcactaatggaaaatcaggttattgaatctgtaacgtactcagatcgttaccttgcggctaccttaccattctcgctctgctttaatgccctgaagtttataggagagcattacaaaagttgccagatagaaatcaacacaggtgaattggcgcgaagttacaggccagcaacggtacaagataacttttacgacgattattcacgagataagattgtgagtttggcgctagagagtacggcagcaaatatcagttttaaaacagctccgaagtacaagctaccacattcaaggacgctagttttatcgtttgataatggacgtcaggtgacattgtggctcgatcaaggttttggttactggtatgcagacaagcgtttgtccgaaaatcatttaccgcataatctttatgatgaagaacacgcaaatattattgtgaaaggacaatctcaaatatcctcagggggcttcccaacggacgtatttatctcatttgcctag

SEQ ID NO: 30359 - DNA, 3366 bp, Vibrio parahaemolyticus
atgcaaacatacaaacacattctttcttcatttctcaaccagagagaattgaacaagccaaacgctcaacctctttatagttacaaagtcacggctgaggagtttgaatcacttaaacagtcgttgattgctagtgttgcgagtaatggaatccacacctattcgaataaaccgataagagagtggtcaggatgttttgtattgtatgcagcagagtggtggcgcacttcatttcaaggtggagtatgggcttgggagccggtgttggaatctttaggtttaccagccaacgcaatttcgccgacacaaagaagtgagatagttgtaaaaggcttaagtttttggggaaggaaggttttaagcaacacgaagggacgcatgttacttggcactgtcgctgtcgaaggtggtttaccgcaaacgctaatccaagaccctcatagcaagctcgcccattacttcgaacaagtcatccaagattatggccagttcgctaactctcgcttaagtgcagactcaattgcgaaagcacatgcgcattacattgctgcatcttatcgtgatgaaacggtttatagtattgtcgcgcaagtcgctgagtctatttactctttggttgataagcatggcttagaagagcagagtgatccgctacattatttgaatacggtcgacgcgaactggtcacagagtttaccgttgaatatggagcctgaggctgctcggaccttattaggtaacgcgcttggccttgctgtcgaagttcaacgccgtttaccaaattcaattaaggttttgcgttccttacgtaaatcctattctcattacgcttctatgttggatgagttcgagctgggcactgaagaagtgtaccagtggaagactcaagttgatatcacgctcaagtctcgtcttaacgttcaatttttagagcagctgtttggtagtgtgaatctacctgagcggataaatctgtttgcagtcggtcaaaagagtttgttattggcgaaggcgattaaacgcggtactgactctgagcactatttacttgatgtttatacgacgtcactcccagaagattgggtcgactgcgacatacagttaaaagcaacggatgaccttggaaattcatggtatgccccggtactgggcggtgctggattagatgtgaatgaaccttgggtattcacccaacacaatgatgaatggctgtttaaaggtgctgggaatgtcacgtgtgaggaatcaaacgctttagtttcagtgcctgaaccattatcacatcttgaactgggcagtgtcggcagtatcaaaaatcgaattctttatgaagctaatactcaaactagctctgagttttactttggagagtattgtgtgtctctgcagcaagaggatacacattccttagaatacaacttagtcggtcaatcggtttcttatcaaacaaatccaagtaagtgctttattggcttgcctagtcttgttgctattgatgaagctggtcaacaaacgcctatagtgaacactcagcttcgttggcgtaatacgatgttggagcaatggcaaactatgagcactgtaccttttggtaaggtcgatattgctttattagaaaataataaacccgttaagcgctttacagtgggtttattaccggatgattttgtaattgatttccagccaagccattcggtacaaatcggccaaattggtttttactcagagaatccattgccttctatcgcattagaggataatgagcagctcgatgtattgccgagttctgttctatctcatgctaaagaagaccagaatgaagcaaagcgtagtttggatatgctaagcagccaagcccacccacctgcacaggttaatgtccgtttatggtggcaagatcaagcaaagtctttgtcgatgactttgccatttcctgcgaaaggcatctgtttgattggtactcaaggagaagtggttcgcaatgcagacgccatcttagttgataggctcaatcgctatgagttgttcagttatggtgtaaatgattcactagaagtggaatttaaactacaagctagagatattcatggtgcattttctaaatcagcatatgttaaacgttctctgccaaaaggcgacgccttgtctgctggcctttcattagcaacattcaaagaagatattgaatctctgtttgctttatcaacttcattagacgcgatcgttaaagtttccgtactcaataatgcacatacgatattcaattgtaatgttaacgcgtatggcaacacgctcacgcctaaccgggaactatgcacggttgaaattgataacgaccactttatcggggcactttctatggtgccactggataacccaacctttgctccgatcactttatccaagaatgatgaacaatggcatttccctgatcaagatacagcgccaggagcttggcttatttatgccgatgaggcagagcagggagtgcgaccgttgatgtggagtaaagatctcgaactcatatcgtcgctaggcaatagactggaagaagcggcatcgattggctcacgtaaagatcgtttagataaattctcagtcgtttgtggtcagctagcggtcgagtttaatgctcctgagtgggcatatatcaaagggctgttggcttttgatagcgttccattaaccacatttgatttatggcgcggtgcaatcactaaacctgagtttatgcttgcaatgttgttaagcgcgaataagaaagaagccgagcgtatttggcaatttagtaagcagtttcctttcttatggcactcacttaaagcccgagatgcaatcgcggtgattaatgcattctatgattcgcgtatcgaagagtatggaacagacttttcaggcatcatttgtgatcaaatagaatcaaaattggacgacttagtcaccagatatcacggcttacaaagccttaaaaatctattgatgtataaaattgactctagccgagataagccatctcttaaccccgcagcctataaacagcagttatttgacctacgaaatgcgttgaacaatcaatatgatgaatctcattggccttgcgcatttgcagatctcattttgaacaatgtcattaactcggtaaatgagcaactatccggattctgcttcaccactaaaaacctctatcgcaataatgtcatgaatgcgcctgtattactcgcattatcgacttgtggttctgcttcactccgcgtgactccagaagttgtgcatgcaatgagacagtataaaagcttcgatcccgactattttgaacaagcattcgctcttacacatcaaatgattttcggcctagtgaatagctaa

SEQ ID NO: 30360 - DNA, 6315 bp, Vibrio sinaloensis
atgaaaggctatttttcaacattaaaacaacaagcaaacaatcgtgcgaaagagtcaacattgagtgttctcggtatcagcaacccctcattgcgtaaccacctaagcgaacgatttgaaacagttgagccctttgttcatggccctgtttttgagcaaacctttgcctgggaagaaagtaaagttcaaatgagcgatttggtctcagaaggactgctttcaaaggagctagtaacagcattagacgatgatattaacggaaggtatgcatttaaagctaagtggtctccattcaagcaccagctggcggcatggcgagacttactcaacccagagcctaaatctagaattattaccagtggtacaggttcggggaaaaccgagtgttttatggttcctgtccttgaagacttggtgcgggaagtaaaaaccgaggggaaagcactaaaaggcgtaagagcgctattcctttaccctttaaatgcattaatcaattcacagaaagagcgtctaaacgcttggacgcaacattttgaaggtgatatccgcttttgcttgtttaatggcaatactcccaatgacccaagcgctagccagagtcaaatacagaccaagcagccgcaagaagtgttgtcacgtaatctaatgcgcgataacccagctccaattttggtcacgaatggaacaatgcttgagtatatgttggtgagacaagctgatgctcctattatcgaacaatcgaaaggaaaattaaggtggattgttttagatgaagcgcatacttacgtgggttctcaagctgctgaacttgcgttgcaacttcgtagggtaatgcaggcgtttgaagtagaaccggaaaatgtacgttttgtggcaacatcggcaacaatcgctggcttagaggctgaatcacaacttagaacgtatttagctgagcttgctggtgtaagtgaaacacaagttgatgttattggtggcaagcgagcagtaccgaaacttcctgattacccacttaataacaaagatatctcagtcatagagagcattgaccctgacggagagttgcctgaaaacaaaaaagatgtccaagacccttatgtatcggcaagtcgctatcgagcgttatgtgaatctgaaatagcgaaaaggataagatctgcgtttactgccaaagactctagtccgttactcttttctgagttagccagtagtttaagtccaatcaatttgaccgagaatgaactgtatcgttggttagatatatgcactgggacgaaagagtcatacgatagaaatgcacaacccttccttaaattgagagctcattactttcaacgaactttaaacggactttgggcttgtattgaccccaattgctctgaaaagtcaggcacccatctcaatcgagattggcagtttggtcaggtgcttagtgagcaaagacagaaatgtgactgtggtgcgccggtactagagctgtcattttgtagcgagtgtaatgaaccgcacttgttaggtgtagataagaccggagtacttactcaatggacaggtaaagtaactgatgagttttctctcttggaagagggggaaaaatacatagatgaggaaagaacagaccaatatagcgcccttaaagctagcgatagtatgctggttctcgctgctactgaaaaccaagaaaatatattttttgaaactatttatgaccacgatggtaaagaagcgagtgttaagtcgggcagtatacggttagctaaatatctcgatgacggcgagcagtgtagcaaatgtggattctccggtagaggacaacatgctaaagcactacgacgaggcttattaggagctccattttatacaacaaccgctgtaccaaccgttttggagtattgccccgatattgaaaaagataaagaaactggctacggaccattagatgctccggggcgggggcgtcgccttattacttttactgacagccgccagggcactgcgaaaatgtcagttcaaatgcagcaggaagcggaacgttctcgactacgcggtttagttttcaaggagttgaggaagcacgttgaagaggaacttgcgatcgattctgatttattagatatcgttcgtccatatatcgaggattcaacggttgaggatatcgaagaatttatccttattgcagggaagaggaaaccacaagttgctgaagcgctaattcaatacctttcagcactcgagaaaggagcatcaaggtattctccaaaagcaatttcttggaaggaattagccgatagaattagcatggataaggatttacagaactcaattttgacagagaataagagactgtctcctgaggtgtttgacgtaaccactggctctttaaagctcgctaacatgttattgacaagagaacttgctaggagaccgaagtttaaaaacaaccttgaaacacaaggattgataaggtttgtttatccagaagttgaaaaactaagtaaggctcctgagcaatggaaagagaaaggtggtttgactctgtctgactggaaagactacctaaaagtctgccttgacttctttgttcgtgaaaacacatacgtgaacatagatagggagtggggacgttggatcgggatgcactttgcaccgaaaaccctcatagctccagattcaaaagaagaagaagagagtcgcattaagaaatggcctcagataaataaaggtagaaaaattcaacaaagattgatcacgctgttgcgtgtagcaacgggtatcgatatagaaaaaacggaaggcgagcagctaattaacgggtggttgcaggatgcttggaagacgttaaccaaattgcaaattcttagagattcaacttcagacaaacaatatagccttgatttgagagaagttagttttgctttgttaagtgaagggtatatttgcccagtcacaaacaaggtgttggatacaacctttagaggcttaacaccatacattccagcgaatggtaactattcagactatcagtgtactcgcgttaaccttcctccaatttggaagtttgaaggtagcgatcgagggtatgacgagtcgctccaatcaatacgttctgatattgaggaatcgcaggaaattcgttcacttagagagcagaatgtatggacggatatcaacgatagaaccgtcgaaggtggtttttattacgcaactgctgaacattcggcgcagcaatcggcagagcgcttggcagactacgaagagaagttcaagagtggcaggaagaacgtcctcaactgttcaacaactatggaaatgggggttgatattggtggtattactgctgttgtaatgaataatgtgccaccgcatccggctaactttcttcaacgagcggggcgtgctggccgttcaaaagagtctagggctctcagctatacgatatgcaagaataatcctcatgacacattagtctttaataaccctaaatgggcattcaccacatccatccctgcaccgcatgttgaatttagttctaagaaacttgtgcagcgtcatgtgaactcctacttattaggacgctatctggtcgatgttataggcccaacagataaagagaagattaacctgaatcttgaatggttttatctacctgacattgggggtaagtcagttgcggaacgtttttctctttgggttatgagtcttgaaaactcatatcttgatggtgtcaaaaagttagttaaagggaccgctctgtcgggcgtgtcgcctgatattttagtaaagcagactgctaaaaaaattctagaactcagtgaaaagtgggttggggaatataaatatattcagacagagcttaatgatacggctccaaatggcccatatgctcataagctcgacaacgagaagtctcgcttatgtagagagtatctgttgagggacttggcaacaaaagcatttctacccggttatggcttccctaccgatgttgtaagtatagatacggacaacgtagctgattatattcgcgagaaaaaattcaaaaagaacaagaatcagcttgagcgtgaagacaacgtgtcaattaaccgtggcctcccttctcgaaacttgtctgtagctattcgtgaatatgcaccaggttcggaaatcgtcattgacggtagagttcatcgctctgctggaatttctttgaattggcaaaatgttcatgttgaaggctcaagagatgcccagaaatttgatcttgcatggcgttgtcctcactgtggtcagacagggtatgagtctaatccgaataaacaagttaacctcgagtcattaacgtgcagtaatgtaatgtgtggaaaagttattcctatagataatgagtacaggaaaaaagttatccaacccactggttttgtgactgattattatattgagcctactaacaacattgcgcatcaaacctatgttccagtgcaacctgcttgggtaagtgctaagggggttcctgtacctttaccagtctctgaattaggttatatgatcactgatcatcaaggtaaagtgtttcattatagctcgggaatgagtgggactggatttgcactgtgcatggcttgtgggcgggctgaatctatgacatcaacgggagagctaccaaaagcgctaaaccttgaacgtacacataagccaccacggccaagtaagtttgccaaagatgaaaatgatcggcacggggattgtgatggctcaggaagaatattagaaagtatacatcttggagttcactcacaaactgatgtattcgagctagttttaaggcaccctgacactggagaatatatccctgacagtgatgaaggtagggtcattgcaacatcacttgttgttgcgttacgaaaagcactagtaaagactttaggcatctcagtcaatgaagttgaatacagtgtacgcccagctgttgtcggtgaaagtcagcatgcgatggttttacagttgtgtgatagtgtaagtggtggagctggtttcgctacatccacatcacatcacattactcaagtattgtgccaaatgttacgagagcttgaatgcaccaaggcttgtgatgcattttgtccggattgtttactagagtctgattcaagacacgataccgacaaattgaacaggcagattgcgctcaaatggttaggcgataattttactaaccatttaaatttaccttcgaagtatcaacgattgctaactgaagctgaatattgccctttgagcattaaagagcagcttacatcagtggttgctggccaggttagcgaagtgaagtttgttctatcgagcaatatagaacgttgggatacgtcagtaaccttgctcaaatctcgagtttacgaaatgttgagtaataatattgatgtgtcatttgttgttccagacgtcgattatccagacgacataaaattattcttgaagaacatcagtaatataggcgcatcactataccttaccaaggacgatactggtctgatggtatttcaagcgaaaactgatgtcggctgtttttctttagctaacctagaagatagtgcacgaatacctggtcttgaatggctaatgtcggacgatatctctgtcatctcaactgttgaaccggaactttcggtaattccatacactatcgaagtggaaccagagagcgtgtctcaagttggggctatccagatagaagctatcaaagagttgaatggaacgctgactcaattaggtgagcaattcaagcaactagtgtgtgatagtgatagccgtgtgaaggagctcatatcgagtaatattataaaaaaagtccactattcagaccgttacttgcaaagcccatcagccgtaatgcttgtatccgaggccataaagggtttggtttgtggacataacgattgtgaggttttggtagatacctgttttgatgaaaagaacggaagacagcctgcatttatcagtcatgattgggactacaaagcagactttaggcagatttttcaggcttggttagaaaacgctactggtagaacaactaagataaatatcgttgaggacaaaaagacaattcaacatagaagggtattaactattagctttgagtcaggtcacacagttcagataactttagatcaaggctttgggtactggtggctggagttaacgcatggcttgcaccgattcgactttgaaagagatagtctcgatcaagttaaaagaatgcttgaagtgcaagcaaaggcaagcgttaaaaacagtgcagactggccaacgttaataacgacaagcttgctttag

SEQ ID NO: 30361 - DNA, 3309 bp, Vibrio sinaloensis
atggatttgaatattcctcctgtggaggggcgtatcaatacaacaagcaattcgatatcgcctgtcactatcgaagattggttgacgaggcttttacatagaaacgagctgtcattaccaaatggacaaccactttaccaatatcacgttaaagaatcggaatttattgagctgcgaaacattctaatacggataggcaaagttcaatcaagcaaaacttggtgtgctgctttctcaattttttgttcagaatggtatcgtcgcttttacatggggggctggacctggtttgggatttgggagtcattaggctatgaactcgacgctaacattagacagaatgtcgttgagcgcgggctaaaagcctactgggggcgtcctattagccaatatcaagacgaaagaaacagctatcttggttcattgtttaaagagggagggcttccttatggcctgcttgccagtgaggatagccgctttcaggcaatattcaaacgcatattaaagtcttatgaagatgcaaaagactttggatattcgccagtagaattggtgaccgagtgtatggactctttacccgaggcatttaaacaagagaccaccgttaacttaattactcgaatgactgagttgttattgcgtctaactgaagactacgatttggatgaacagaacaatccagctgcatatctggatgataacgctggcggttggcgtgaactgtttcctatcccattggacggtaatgctggtaacgaatttttgtctggtttgctttcatctgcatcacaacaacatcgaaataaaaaacatgcagataagaggattacatgtcagcaatggctcgctaatacatcagagttccagtttgtcacccagatcaagctcgccaaaatagtagatatgccttttaggcgcgaagatacggtcactagtcgtgtagagctatttatttatgaaggtagtacgccaattgcggaaatcggcgttggtcatattcatagtgatactggcaagtgtagtgtcgttttaaggtccacgtcttgtcgattcaatcgagttgacccaaaacaagcgctgtatctaattgtacttcaggccggtaagttacttcatagagaagaaatatctaattcggaaataatgattggtgaggtaccggtagtactaagttgcattgatgaaaaaatgatgtttgttggtacaggtagcatcagtactagagcggaatcgttgactgtattatgtccatcaaatgcggtagtagatgaatcagaggctaaagatgtaaaaatcacgacagactatggttataccgtaggtacatttagtggtacgttgaaagtctctgtgaataatgggcttgaaatagatcgttacctgataacgacctctgcgaacaacatgcagtatgatgaggtcagaatagatggaaaaatacttccttttagcacagctaaaggccagcccgtttatctggggttacccaaaattactacacaggacatttgctctcaggttgtagtggcaggtgaacccgttggtttggggcataaggcaagcatttttggtttacaaagtataaaagtaaagtcgaacaaaggtcatacgctttttcaaaagagactggcgattttgcccaagtcattcgagatcagattaagctcttccgaagacgcagacagagggagtattgaactccattgcgtaaaccgatttaccgttaaggtattgaatgctgaagttgatgtggtcgctcgttcaacagagtatggtaaatgcctagagattaaatcaactttatgcattcctcctcgtgagcttttattagaaatcacgaccaatttaatggcggctccggttgtggtaagtgtgccttttccttcaacgggtgttttagcttacgacaaggataacaataaactgcctcagttgttgacagtggcggacttgctgggtagtcggcttatgttgtttccaaggcttggtaagcagtgcagctataagatcgaacttagctctcctaacagttctcgacaggcttactacctatgggaatataaggttcagggtcagccactcgaaattagtttgtatgaatttagacataatgtacgagaactattggctacaaatggaaatttggatgatctagtccgacttgagataagcggggcatgcaaaactgttcagtttcagattggacgctattcttcgatgactcaatttgaaaactcatgcatcaagtttgaaggtgagattaaggattttggtaagattaagcctgtgctaattgatcttacgaatccaacggttcaccccaaaccattgacccaaagagagtctcaaggtgtagctactggtatatttgaactttcttcgtttcctgaaaatccatctctaatcgtaccatcacctgattctcaagtagcatttcgagctagatttgttcccggaagtaaaattgcagagaacccaattgatgtccgaagtttacagaaagccgcgacagtttgtcatgtcaatcctagtgctatagatgaagtgttgggtcaaatggttaaggattttgaccatagtggctggacatttcttgctgatcttgaaacaagatttggctatttgccgctagcaacgtttgaaatctggaagtcagtagtaaaaaggcaggacgtattggcagcactggcatttcgctttgataaccctattcctttgatgagtaggttacagtctgagttcaacgtaatgtgggagctaataccgatcgctgcttggaagcgcatttctcaaaatttcattcaaggaattcgtgatgacggttacccagaaaggattgtcacgaagctaattaaccagaagctagacaatatatcgcaaatatgccctgttttcgaatctgattgcagacatttggttcttgataaagcaattatccctcaagagaatctcagaggcgtactacagtacttctcggctcattcagtatcggaagttagaagcttacacactagtgaccgacgctggccgacgatgttttcaaacgatatagaagagtggtgtctcgaccattaccaagaccttgtgacattttctatccccgatggtaaaggttttcaaaaggcggtgttgtactttccattgtatgcatcagctctggttttacaaaaaacaacgctttccgaaattggtattagcgatgagcctgcgaatgagttttttcttcgccagctcattgagtttgaccgtcagtggtttgttcctatgtataaattattactttgtattatggctggtgagagaaaatga

SEQ ID NO: 30362 - DNA, 6207 bp, Vibrio sp. 2538-88
atgcaatattttgaatctttagttgatcagctcaccaagcgagcggctcgcgcaacattaggtcagtttggtctgcgttcgaaaccgcttcgtgaatttttgtggcagtcgttttctcaagcaccggggaaggaaggcgcattccttgcggatccagtttttgaagccacatttggttggaaacctcacaccgaaacaatggcagatctcgctggagggttgttagataaagcgattgttcacgctatggcgaatccacctaaggagcttagagaagattatcagtttgaaaaacactgggctccttattcccatcagcatgaagcttggtctcatttgcttcaacattcgcccaaatcagtgatggtcagtagtggtacgggttcagggaaaacggaatgttttttggtgccgattctcaatgacattgtcacgcgggagagccaacctgatggtgtggaagcattgtttctctacccattgaatgcgttgatcaatagtcaacgtgaacgtttaacggcgtggacccatcaattgggtagtcaggttaaattctgtctgtttaatggtgatacaccagaggccgtaagcgccgaagagagaaaattgcatcctaatgaacagctatcacgtaaagagcttcgcgagaaccccgcacaaattcttgtgacaaactcgaccatgctggagtacatgttggtgcgacaaaaagacgcgagcattttaaagcgctcccaaggcaaattgcgttggatagtgctcgatgaagcgcacacttatatcggttcacaggcagccgagttgtcactgctgttaagacgcgttatgcacggttttggtgttaccccagatcaggttcgttttgtcgcgacctcagcaaccattggtggcgaggattctgacggtgagttgaaagcgtttcttgcagatgttgcgggcgtcgatatctctcaggtgcatctggtgaagggacaaagagagattaaaccccttaaggcattagagcaggtaaaagcgatggatcttgctcatgtgaacgctattgaagatgaactgcagcgttatgattatttgagcgctttaccgcccctaagaacactgcgtcagcatctcagcaccacagataaccggatgacgttaagtgcgatcagtaagcttttatccgcgactgacgaaccgctcagtgaagcagaaacgctcaaatggatggacatctgtgcaggtaccaaagatgtcaacggagaggctttcatcccatttcgtttgcacatctttcatcgtgtcgccagcggtttgtgggcgtgctcaaacaaagattgtaaagcgaaagcagggacgcctctggattcgctagattggcgctttggtatggtttctatgtctcgccgtgagtcttgcagctgcggttcaccgatgttcgaaatggttagctgcaatggttgcggcacgagtttgttggcaaccaacgttaaaactgcggctgattcgggtgacacattcttgcacctgactaagccggactctgccatagacgattttgcgcttgatatcgcgggtgaagacgatgatgtttcgtcttatgaggacgaagaggaaggcgaacaatatgatcgtttcggtttaatttcaccgttgccaggtgatgagacgggtgaatattggttagataatcaaagaaaagccacaactgcaaattctgaggatggttttttgattcaccgtgttgagggctatcgaaatagtcttggtgcgttgtcgcttcgttgtccttgttgtcaacaaaccaaagtcaagaacttcgaatttttccgttactttaaaaacggtgcgccgttcatgctgtctacggtgattcctactttgttggaatattgtcaggacggaaaaaaggaacaaaaaaaaggtccttggaatggccgacgaatgattacctttaccgatagccgacaaggtacagcacgtttttcagcaaaatctcaacaggatgctgagaggcaatttttaagagcaacgctctatcatttgatattggacaaggcgcttaggaaaggtcagttaaccccagacatcgaacagaaattggatcgtttacatcgcatgctaaagattgcggtcagtatgaacgaaccgagcgatgtagaggctattgaatgtgaaatcgcagagttggttggacaatcgtcccaatcaattttggtgccatgggcagaagtagagaatttcttagctgatcagaaagaagtgcaattgtggattaaaaagttctatgagcatttcgacgaccgaatggaaatggtcactcaccccaagttgcttgcgcgcttattgttattgcgggagttcaatagccgccccaaaagacaaaatacgcttgaaacgatggggctcgtcgccatggaatatccacttttggcgcagaaagcaaatactgctcctaaagagtggttgagattttttgatgatgtggaaaaaggccgcactgagtgggttaatttcctgacattggcggtgaacttccatgtgcgcagcctgaaagcagtaaggttaaccaaagagcagttaaattggattggcgcaaaatatcagccgaccttgttggtggctcaaggtgaatcgacgcatatctggaatgttgaatcatggccaaaagtaacacgaggtggttcgattcaaccgcgtttagcgagattgttatcatgcgcatttaatatcgacttagatgaagcgtataaccgagcagaggtgaatgaaattcttcgccaggcatggaacgcattgcagtcatctgttttaacacccagtggggatggcttccgcttagaactggaacagcaggttagcttttcgctcttgaaggagaagcatcagtgccctcacacacagaaaattatcgataaaccactgttgggtataacaccttatctcaatgcttctggtgaacgtgaagagcaactctgtcgccgattactaacaccagattatccttatccgtttggtcgagatccgaaaaccggtgaaagtgttgagctggctaaaactcgtgaatggcaagaacaacatgcgctgattgatatacgtaaagaaaacgcatggtctgatattgcagaccgtgtgattgagcgtacgccttatttccgcgttgcagagcattctgcacaattaaaagccagccagcttcgccagtatgaaaaggacttcaaagaaggccggatcaacgtactcagctgttcgacaaccatggaaatgggggtggatatcggggggatttctgtggtggcgatgaacaatgcaccgccaaacccagcgaattacttacagcgcgcaggtcgtgcaggtcgtcgtggagaaagtaagtccattgcactgacactgtgtaaatcaacgcctcatggcgaacatatcttttccaatactcgctgggcgtttgatactcagataaaagtcccaaacgtgtccttgtccagtgagtacattgtcagacgtcatgttaactctcttctcttgtcgacgtttcttaacaaggttgtgtcatccgaaaacaatttaaaattgaactgtggcactttcttcaaagctggtcacgagttgacagcatcttatgctgagcagtttattgactggtgtagggaagaagcgcaggaaatggttcaaagtggcttagatacactgcttcttcgcacagccttggaggcaaactctcgcgttgaggtgttaaacaaggcagcaaagcatcttgaaacaataatgagccgttggactgctgaacatcaattgctgctcgagcagagcaagagtttagcagacaacccgaacgtgctttcgacagcgcaggcggcagtagagagccaaattcagcgtttggaaggggagtttttgctgtcagatttggcaaggaaaggtttcctgccggggtatggttttccgaccgatgttgtttcactgaatacagatcatgctaaagagattgaacgtcgtaaacgcaaaatcaaagagaaacatgataatgtggatgacaatacatctagaaaagataacctatacagtgcaggaggtttcccctcacgagatttgtcggttgcgatccgtgattacgcgcctggcaatgatgtagttatagatgggcgtgtataccagtcggcaggtgtgttactgaactggcatagcccagcatctgccgatcaagttaaagaaattcaggctcttcgttgggcttggcgttgtgaccaatgcggtgccagcaacacatctacactgagacctgaacgttgtgagtgttgtggtaatgaatttttgtctggtgatgaaaaatcaaaggatcttattcacccctatatccaaccagcgagttttgcggttgatattcgcagtgagccacacaatgatatttcacgtttgaaccatgtcccgtttaatgatccttgggtcactgtcgacgggaaggaatggcagcatgtcagtgttaatcctagtgcagcataccgttcgagtcataatggccatatctattattacagtggagggccgacgaatgtagggtatgcgctttgtcttgaatgtggtcgaatggaagcaatgccagagcagggaaataaatctcccaaagaagtgcttgctaatcattaccgtttgagaggtggaaaaggcccactagctactgccggtgagctctactgtggcggcaatgaaagagagtttacgataaaagggcctttaaagcttggccatagcacttttactgatgtatttgagcttattttgttcaatgatctgggccaccctttagttgatagaaccatcgcacgttcaatttcggtattgatccgtaatcagctggcagaaaagctgggaatcaatagtgatgagatagggtgtacgactaagccagttaattttgaaggacgagaagtacaggcggtagtgctttttgacaatgcggctggtggtgcaggctttgctattcaagcatcagagcacttggtagaacttttgcaaggtgcgaaaaaagttgctgcacattgtagctgtgataaagcatgtcacaggtgtcttgttgactattcgactcagcatgttttagagctgctcgatcgtaggaaagtggcctcttatttgagtattgatttttttagaaatcttgctcttcctgatgaataccaaatctttgcttctaataaccgacgtgaactgaggccgttgacaacagctatcgagaaggcgctatcaaagttaagtgaagcggagctatacctgacgttgcctaaaaagcagttagatgagctgggtgattggactttgtatctcgcattcaatcgatgggttgaagatcgccgtgtaaatgtcgttttggcggaaaacggtgatgatgagctgactatacagcaaaaggttcttctcaattggtatttgaatcacccaaatgtaaatctgtacagtgtccgaactcctcctctgagtaacggtgtgttgttggcatctgttgtcgatgacacaaaagcttatcagtggggatatttttccaatgacacagatacgctaatttgcggcacggattcattcatcaagccaacactttttgactctactcgtttgaatttcgaagggggaagtctgaaaaaagtggttgtgcacgaggagctcaatggtgcagtaaaggacttcggctttaagttttggtcctatgtatttaagcattcaccggaattaatggcattgatgaaatcccagcaacttcagtctgcgacttattcagatcgctatttggccgccccattgccgttatccttatgctttagtgcattgaagttcttaggtgaacactataagggatgcacaacacaggtagtgactggagaactgcacagaagtgctaagccgatgacagtgcaagataacttcgaagatgagtactctcgggacaaagtgttcaggctaatagcggatgcgactgaggcaaacatgtcgtttagaagtcgtccgaaatacgaattaccccatgcacgcgtactcgaactggtttttgatagcggcaccaaagtgacactttggctagatcaaggttttggctattggtatgcggacaaatatctacctgaaaaccagcttgaacgtgatgtttcggaagaggaactcgctgatatcatcagtgcgggacattccatcatacggtctggaaagttctctacggatatttttgtctcgctatcgtag

SEQ ID NO: 30363 - DNA, 3357 bp, Vibrio sp. 2538-88
atgcaaacttacaaaaacgtcattgcatctattcttgaagtgcgaaagctaaccaaaccaaacggtttgcctatttacagctacaaaattactccagacgaattttctcagttgagaactgctttaatagccagcatgaaaagccatggcgtgcaattttatgccagcaagccaacacgagagtgggcgggctgttttgttttgtttgccgcagagtggtggcgcaactcttttcaaggtggcgtttgggcatgggaacaggttttggacagtctgggtttgggagcgaatgacttttcacctctccagcgcagtgaaattgttgcgaaggggctgagtttctgggggcgtaaagtgctcagcaataccaaaggtcgaatgtttttggggacggtagcggttgaaggtggcctgcctcaggcattacttctggacccaaacagtaagctgtcttactactttgagcaggttattcaggactacggacaatatgcgaatgcacaacttagtgctgtgtctattgccatggctcactcacattgcatcccttcttccttccgagatgatgctgtgtatagcatcgtcgcgcaggtcgcagaggccatttaccaactggtggataagcacgcgctggacgagcaagaagaccctctgcattacctcaatactgtcgagaaagcgtggcagcacgacctccccttaaatattgatgaaagaacggtccaccagctcttgggcaatgcgttaggcatggctgttgaagcgcaacgtcgtttgccaaattcaattaagattttacgctcgctgcgtaagtcctattcaaactatgcgtctatgttggatgaagaagaggcatttgagtggcggcatcaagtatctatcactttgaaaaatcgcttaaatgaaaattttctccagcagatgtttggaacgcgatcgttacctgataggtttcacctctttgctgttgggcaaaaaacactcctgctggcaaaagcattcaagaacggtaaagtttcagagcagtattggctggacgtcttcacgcagtctctaccggacacatggtttgatgaagaaatacagctaaaagcgaccgatgaccatggcaatgaatggttcgcgcctgtcattgggggcgcaggtgtagacgacgatgaaccttgggtattcactcaacataatgatgaatggcttctgcatggttccggcagtgtaagctgtgaagagactaacgctctcgtctcactccctcatgggttttcagtggagtgtagtgatctaattggctatgcgggggagcgcacccttgtagcgattggatcgaagggtggcgagccgacagaacattggtttgcaggccattgtatatcgttgatgcaagatgatagccactctttggagtacagcctcgtgggccagacgttggtgtatcaaaccaagccgagcaaatgttttcttggtatgccagagcttatcgctatcgaccaacgtggcaatcaaaacaaagtggcgagctctcatttgcgttggcgtaataccctgctggaacaatggcagagcatcgattcagtgccgtttggcaaagtggatattgccttgtttgaaaacaataaacctaaaaagcgttttacagtgggtttgttgccgagtgactttgatattaaacacatgtcgagtgactccgttcatatcggccaaattgcatttacttcgaaacataccttgccaaccattgcactgggtgaatgccagcagttagacgttttgccaagttcggtactttcgaagccattgactgttgtaggggagcaaacgcgtagtttagatttggtcagccatgcccctcatcctcctgctcatgtaagcgttttagcatggtgggtagatagatcaaaatccttatcaatgacattaccgtttccttcaaaaggtatttgccttattgggtcaagcggcgaagtcatccgcagtagagatgtggtgctcgcagacaaactcaaccattatgagttgttcggctatggcgttaaggacgcgcttgaggtggagtttgcgcttcaagcgagagatatctctggttctctagcaaagactgcctatgttaaacgtgatctaccgaccgggaacgtattgtcctcaggcttttgtatggcggcattcaagcaagatattgaatcgttacttgccctttcatctagcctggacgcctcagtcagggtgtctgttttggagtcagcacagccaatttttacgttcaatattcaaagttatgatgcctcgctgataccagataaagataacaatctgatcagtctgaagggtgaagagcgggagttgtcactatccatggtgccattggataacccttcattcgctcccattcccttgcaacgtgaacaagaacattgggtgtttcctaatgagtatgccaagcctggtgcatggttgatattctcggacgatgtgcagcgaaatgttcggccgctaatgtggagtaaggagcttgagcttttgtcatctcctgagaatcgctttgaagcggcagcagcgattggtgtacgcaaccaacgactggaagcttttgctactgcatgtggacaactggcaacggagtttgacgcccctgagtggccttatatcaaggccttgttggcattcgatagtgtgccgctaaccacttttgatgtttggcgaagcgcggtcaccaaacctgagttcatgttagccatgttgcttgcggccaataaaaaagagtgtgaaaggatttggctgtttagccagcaatttccacttttgtggcaatcggtaaaagtcagaaaagccatcaaggtggttgaagcattctatgcctcgcgcttgagtatgtatggagaagactttgccgatattatacgtagccaaattaaaaccaaattagatgcattggtctcaaggtattctggtttggactcattagccgatttgctgatgcacaaaattgacccgtcacatcccagtaaaacgattaatcacgctgcttatatgcagaagatttttgatttacgaaatgatcttagcaaccgttacgacgaggcttactggccgtgtgatttcgcagctcacatcatcgcgagtgtaacgcggagagtggataggcagttggcaaatgtctgtttaacgtcaaataacgtttaccgtaacaatgtgatgaatgcgccagtcatgcttgcgctttcgacttgtggtgtcgcgaaactcaccatcaatccggaaatcgttcacgcgttaacgcaataccgcaactttgatgcagagtatttcgagcaagccttttcgctcacgcatcaaatgatttttggcctgaccaacccctaa

SEQ ID NO: 30364 - DNA, 6432 bp, Vibrio sp. HENC-03
atgtctacaaaagcaattaattttaagtctctctataaagacctttcctcagttacgtcacaggcagtgattaaccgacttcagttgaaatcggcgcctttaagaaagtttttgcaaagtgagtttcaagtcaaatatggcaagggaaacgactttttcgctcaacctgtttttgaggctacttttggttggtcttcggaaggctgtgaaaatgatcttaacgggctggtcactcaaggtaaattagagcaaactttcgttaataacctgtcgcaaccgccaatgcctttccctgactcttctgaagagaaagaggaatatcgtcttaaaggaataagtgaagaccgttgggctgaagacatacaggaagactacacctggcctctggatagaccgccatataagcatcagttggaagcctgggatcacttgtcttctgataaagtgaaatcagtagttgttacttctggaacagggtcgggtaaaaccgagtgttttctagttccattgttgaacgacttagcaaagcaatccaatcgagctgtagagcctcttgagggaacacaggcgatattcctgtacccgcttaatgcactgatcaattcacagaaagagcgtttgagcgcttggactcgtggctttgaagggaaggtgaggtttgctctgtataatggtgaaacaccgactcaagctccatctaaaactatttccaatgcaagtcttagtaaaaacactgcctcagaattggtgaccaacagaaaagacatctggtcttcaccgccgccgatactcgtaactaacgcgaccatgcttgagtacatgcttattcgccaacaggatgaagatattcttgccaagtcacaaggaaagttaaagtggattgtgttggatgaagctcatacgtatgtaggctctcaagcagcagagatagcactgctactgcgtagggtcatgcatgcctacaatgttaagcctaaagatgttcgttttgtggcaacgtctgcaacaattggggataaaaacaagcaagacgaaacaaacagagatcttcaaaggtttttggctaaggttgcgggggtgttacctgagcaagttgcagtggttaatggtcatcgtgctataccacatatcaactcgacagggatggagtcttctttcagcttgaaaaaagcgagagaaatgagttctggtgagctttatgactatatgagcagttttcccgttctccgagaaatgcgagagtccttaactagagagccgcatacacttgaagagatagctcgtattcttgaaccgagtaaatctgaacgtatatctcaggttgagctaacaaaggcgctagatatcattgatttggccgtaaccgcttatccacaaggagatgatagccagcaagcattcctgccggtacgagctcatattttccatcgctctcaacgaggtctttgggcttgttctgatccaagctgttgcaacaaagctaataccgagctgcaagatgggtggaagttcggcatggtttatacgaatgagcgtacacactgtgaaggtgagtgcggagcgcctgtttttgaactaacacactgtaaagattgtgggacaccaagccttgctgctgcgaaaaccacagcacaaggtggaattaagttattagagccaagagatactgatctgctagatgattatgttgatgagatagatgaacacgaacaggcatcggatgaaaattttgacactgaattcgaagctaatgttcagatatttgctagggaagacgctttaggaaatgcgcatgatcaactgggttgcacccacgttagtcttgatccgaaaactaaccgaatttcagaagcctttgaatcagggcacctagatatcttctacaaccaaaatgaccgtgatgatggactccgctgtgcccattgtcatggggttgagaatgttccgaacacacaattcaaacgagctctgttaggttctccgttcctgatggggtcgctagtaccggctatgttgcgacacatcccaggtgacaatagtgatgacctaaaaggtaagcgattaattacctttaccgatagtcgtcagggcacggcccgtttctccgcaaaaatgcagttggattctgagcgtaactggacgagaagccaggtttataagactgcggttcttgaggcaggagaattggagcttacagaagagctaaaagagaaaaaagctgcacttaagtttctcaaaagtgccttgccaaatgacccgaatacgatagcactagaaaaacaaatcgacgaaggcttgaaaaagctcccaacgaagaaagtaaactggtgttttctaaaagagcgcctcagcacattgcctgaaatacagctactttctggtgcagaactagacctgttggaggggaaagctcttgagaaatatgatgagcgtattcctggagagtatcgtttaagatcggagcttttgagtgatgcagataatctggctgatcttttcttaaagcgagagtttgctcgaagagcaaaaaatgccaacagtcttgagtctatggggctagtccagcttcattatcctgcaatttcaaatttaacaaacgaagacatgaactctcatgaatggagaagtttgggctttgaccttgatgatcttaaaagttatttgaaaatatgcatagacttttatatcagagaaaataccttagttgatatcgatagaagtgtaatcaactggatgggagctaaaatcaacccaaggttgcttaaagagtcgaattacgaataccaagatgaaattgagagaagagcttacttcaaatttcctgttgtgaacaatggtcgtcagcatagattagttcgcctgttggagttaggagctgggcgagtagccaaggacgagaaggaactgtttaactcggtactgtcttttatttggagaattctcagagaccacattttaaccaaagcaagtcgtcaggattacagtgatggagctactttgtcaggctacaacctaaagtttgatgagaaaattgagttcgcaccgattgaaaaagcttggttgtgcccagttactaatcgctggctagatacaacttttagaggcttgtctccttacactacagggtcatcaacattggatgatgttcgatgtgatgagccattcgaaataactcacccagagactgaaatagtcaatagctctccagctgatatcaggaactggttagctgacgaagacgttttgaacactcatcgtgaccatggacgttggtctgatatcaatgacagagtcattgcgggtgtacccctagttcgtgccgctgagcactctgcccaacaaagctcagacaaactcaagcgcctcgaaaaagcgttcaagaaagactacttaaatgttcttagttgctctaccacgatggagatgggtgtagatattggctcccttagtatggtggcaatgaacaatgttccaccgagtacgtcgaactatctacagcgtgcaggtcgagcaggtcgacgcaaggagtctacagcacttgcgttaacgttctgtaaagctacacctcatggcgagcgtgtgtttaacgagccgaaatggccattcgcgacacctatccgagttcctaaggtttcgctagacagtggaatcattgtacagcgtcatatcaatgcgttcttgttagcgagctttttgaagatcgagaaaagtcgctcaaataatcttttgaagatgcaggttggcgcattcttcttgggtgatggtggccttaacccatttaatgcctttataaattggttagctggcccggcgcttaatgatgaaagtgtacttgctggtatagatagccttaaatttgattcggtctttgctggtcatctcaacagtattctggtggagggtgcgttagatgcaattgaatcttctcatatcaagtggatgcgcaggtacgagtctctcaacacacaaattgaagcgacaagtgacagtaattctcctgcgtctaaaaaactagcaagacaattgaaacgcttggagcgagattatttattggctgagttagcgaatactggttatttgccgggctatggctttcctactggcgtggttcagctaattactgacaaccgtagtgaaaataactcaagagatgatggtaaatctcaacatcgaacttcatacccaagtcgaggcttggaggtagcacttagagaatatgcgccagggtcagaaatcgttcgtgacggtgctgtttatcagtcgcagggtcttcaactcaattggaagatgccgttttctggaaatgatattaaacaagaacagcttattgagtatcaatgggagtgtgagcactgcgggaatataggctttgagtccgtgagttctgaacgagcaagtattcgttgtactgattgtgatagcgacagactaacctggagtgagtttattgttccatcgggcttcgttgttgattttaacaagccactgcacaacaactatgtgtcgccaaactatgcaggatacagagaacctaaagttgctttgaacgacgcacagtggcagccactttctaacacaggtgttggacgttaccgtgtatctgaatacggctccatttttcattacaacgatggagaaggtggtgggtatgccttgtgctggtgttgcggtagagcagagcctttgagtatcgaaaagactccgaaaggaaacgttagactatctaaagagcctcacatattaaatacgcataaacgactccaaggctttaaggttaaaggtgaggtgatgtgcgaaggtgttaaagatggctggggaatcaaagttagtgagatcagccaatctgaaagagaaatctctatgcctttcatcatgggctatccgcaaagcacggctatgtttgagttgcagttgaaaagccctacgtcgggcaactggatatctgatgagactctgctttatacgcttggtgtagcacttagacaaatgtactcagatgagaaaggcatcactactcaagaacttggcgtagtaactagacgcaaaagaaccgagtcttttgaagatgtggtgagtttatacatctttgactctgcgactcagggagctggcttctcgagttctatgccggaagttctttcacagcttctaaaggatcttactgagtatttaaagaaatgtcctaataattgtgaggcggcgtgtcacgcatgtctattggattacgatactcaacataatgtaaaaatactaaatcgtaattatttgattaaagagcttgaagaaaacaggattcttgaagggttagccctttcaacaaaaaggtgtttctttggagattcttcgagggtggaactcagcagtgctaatcaggttttgtccagagttgggcattcttgtagtcagataaatgtatttttaagttcatctgagtggcatttcggtgagtggaatattcgagaaaaaattaccacgcttgcaacaaaagggattccagtcaacgtttatttttctaaagagttagctgattcactagattctgaccttgcttgggagatagcccgatctatgcctgtaggtattattaatttccaagagttggataaacctattgaattagcttcgggcggccagccagttatgtcgttaaaagtagattcagaattacactggtacgcgaccgatgaactgagtcaactgggcgcaaatgaacattggggaagtggtgaagacctgtgtttagtaactgctgtgaaagagctagagattagctcgacgaaatttaaccttgaggcccttgctcaggcctctaatctaaatgaaaactcctttatattaagtgatgttacgtcattgaaaggcagcattgcttcattcggagttagttttgttgagctgttggcaggccaaatcccatctttaaatgaaatgcttaacaacaatatcgaatcaattcactatagtgaccaatatgtggtgagcccaattagtgttgtgttaattaaccatgtattggctgcattcaataagcgctatggccgcttttcatcagaaatcaatactgttgctccaaggaaatatgtgaccggtcaaaggctgtcttcatctattggtgataacttcttggaagcaaatgatgtcttggattttatctatgattcgtcaagaactcttggtgctgaagtttatggagatatcgttgataagtcagaattatcacacagccgcattatgcgaattgatttgaaagatggtagagagattaagcttctatttgatcatggtatgggttattggagtcgcagcagagattacccacaaaagttcgattttaaaaatgttggatatgaagcatcctctattgatgattggaactttgggttgagagattcagggaaggaaacctttatcgccgttaagctaggagactga

SEQ ID NO: 30365 - DNA, 3510 bp, Vibrio sp. HENC-03
atgattttagatagtgtccagaatccagtactgaagatgcaacagtggtttactgaatttgaatcgagaagagtcaagcctaacaaagggatgcctttgtgggctttaaaggttacggacgaagaacttcagcaaatgaagcagttgttgagagcacttttcagcgctaaagatccttctgttgtgtttaatcaacactcttgcgctggttatggtaagaagtttgaccaaatattcacgctttatttggctacatggattcaaagaaactttacgggagggaaggagcgatggcctgttgttcttcgcagtatcgatatatcacacaataatcgactcaacacctatatctatgactccgtaaaagcagggttaaaatactgggggatcgatctctactccacttcttctgcaaatcaatattttgcaaccttatactgtcaaggcgggttccctagatctggccttgttggtttgagttctggaccggtgccagagtatttggacaaggttatttcccagtatgctttgtttcatcacacttctgaaattaacgatattgcgaagcagcaacttgaactgttgccagaaacgcttaagcaggttgcttttgctagattagccacggtgttggttaccaagctaatggagtatcgagatcgctatcatcttcacggtgagtctgatcctgtgatcgcacttaatgtacgatacccccaatggcgagatgaacttccatttttgctttgtgacgaagaggcatatgagttaatcagtcgattggttcgtaagacatcagcaattattcgccgtgaacagaacccagttagaattaagcgttaccttagagaagatatgggtcattgggacttggttgctgagacgtacgttaaccacacaatccaccctcaagatttgtctcgcgtgctttctttagaaaatctacctaagttctttgatttgtatacacaaacaaatactggggagcgagtaagaacggcatcttttaacctgaaagggtacgctaaccaaaggtggcaagtcataaccaagtttgctcatttttataatgctgatgctgcaagtaacattggctatgagctatggagtgatggtcgaaaatttaatagcgatacgtattaccgaggtgaagagctaaataaggctctaccttggattttttctgctgaaggtgaaaagtctcagtatcttggccaaggtaatgttcatgtaaaacaagcctctgcaataattgttcatgctggtttagttgaacctgctacctctcaatcaaaggttgaaaaggttggacgcattgcgagtttagaccgagatgtttatcgcgttgtgggtaaggtaaaagtcgaattagattacgacttcattgaagtgttgacaggtgcagatgaagctcaagatgtcacatgttggttagatggcaagcggaatcgcgaggctatttcacatcagcacgtattcgagggtaaacctacgggaatgatgagattcggcgtgaataagtctcaacttattccgagcgccgagttgttctggaaaagtgttgactctgattcgctggtgccacttaactcagatgcattcacttatggtcttggttcggttatttggtttaactccggtcaagtaatgtggcaaatgaaatgcgcgattttgcctgcttcatctgattttaatgtgattcattacggcaaaggtgaaattgagctaaaagcagtgggattcaaaaataccgattttggcttcgtagataacgaaaagaactggctaagagatgttgaagttatagaggatatgttcctcgctgaagtgcagatccccgcgagtatgcctgacacttttcacccagtgttagggtggaacaactccaccaagaataccctgacgtttgaatttgattcgctgcaatctggcgtatgcttactcggtagtaaaggcaatacacttaatgctaggggaaacaagatcacgttggatgacctttacgcaagtagtttaaaggtaaaactagttgaagagtccagctcgatcagcgtgtctgctgcattaatgcaacataaaactattaaagcaagtattacagatatcattcaagttcctgaatcaaaagttacggtaggatgtggcgaattagcacgtttggcacaggcactatttacacagtctgatgatactcgcgatcgcgtttcatttagattctactctggaagagagcttctggaatcacgagtacctgcaatcgaacagttcaagtatcctgtagcctctttgaaaggtgatcgttctatgctccgcatttatggtgctcatgaccatcgtaacccagaatcaatacagctctatactgcacctatatgggatctatcacgtgagcatacgccactggttaagtccttaggagagcgaggagagttgctttttgcaatgccagagataaatgaacctggaccatggttcgtatacgcacagaatgatcgaaagattcaaccaagggctgtactagtcgctcagaatgaaactggaattaaagaatacaattattctcgcttacagttgtctatcagagatctactcttcaatcctgagactaggagctttgattattcagaaatggatgctgctttgaaagagttgatgtttgaccttcaacacgatgattggcacaccgtgcagtcattcgttgaacaactttcaattgcaaacccaacgacgttccacattttcaagcgtcttgctgcgaatccaaatgtgtttgcttcattgttattaaaacaagaaaatcttgaagagtttgaatcggtttggtcaatatcactcgatatgccattcgaatggttgagcgtccctctaaatcaatggatcgatgctatcaggttgacgactaagagcaccatggaatcccttgtgatgatgaaggatcaactacccgttgatcagtttgaacaaattcaaaaaactatgttgaaaagtcgtcttcaaaacttgtcagataaaggcgagtactttgcagctgttgttgacgcagcactttttgctctgtacgacataaagtcaagttggatggatttaccaatttatgcatcagaagaacagccgtcttatatcgctgattttcataagcaaaaatctgaatattttagtcgtcaagaaggcagacttctgactcaaattcaaaacaagcataatgacattcgattaaaagatcttcttgatacaaggttatcgagagaccttttggatgctgaacttaaaggatttactcagcattactctgtagataagtcgaaagcaacacgactggcgataccacttgaattaccggttaaagttgcacttcacaatgcaggaatctatccagctgctgatattaatgaagaagagttgaggttggttaacttcgctttaaaccgtctatctcagtttgaccgagtatggacacaagaatcgatggcgattgcactaaaatctgcagttaaattacgagcgcaatag

SEQ ID NO: 30366 - DNA, 6324 bp, Vibrio sp. J2-31
atgaagcaatatttttccacgctaaaacaacaagctaatagccgagcaaaagagtcaactttaagtattttgggtatcaataacccggcgcttagaaaccatttaagcgagagaatggaaacggatgaaaaatttgttcacggtccggtgtttgagcaaatgttctcttgggaagcagacgaaataacgatagaagacctttctacccctgaatataacaacctactcagcccagagctactagacgcgctagatgtcgcaccgcataaagaggggtgtaaaagagacagtagctgcaagtgtaagtatgttctgaatcgagagataaagccgtacaaacatcaactagaagcatggagaggtctgcttgaccctcgcccccaatcccaaattatcaccagtggtacaggttcgggtaaaacagagtgtttcatggtaccagttctcgaagatttgtatcgagaaacacaacagaccaacagttcgctaaccggggtgagagcgctatttttgtaccctttgaatgcgttaataaactctcagaaagaacgactgaatgcttggacgacacactttaacggtgatattcgtttttgtctgtataacggtaatacgcctaatgaccttaaagctcaagataggcaaaggcaaaaaaatcagcctcaggaagtgctttcgagaaagttgatgcgagacaacccagctcctattttggtcaccaacggaaccatgttggagtatatgttggtgaggcaagcagatgctcccattatccagcaatcgcagggcaagctgcgttggatcgtattagatgaagcgcatacgtatattggttcccaagccgctgaacttgctttgcagctaagacgtgtgatgcaagcttttgatgttaagccagaggatattcgatttattgctacgtccgcaacaattgcgggcgctgaagcagaaacgcaacttaaacaatacctcgctaggctagctaatgtcggcgtagagcaggtagccgtcattggggggagacgcgttgttccgggcttacccaaagtaacaccagcaaacctaaccatcagtgaaatagaagcgatagatccagaaggtgaacaacctaaagagaagaagctaagtcaaaactcggaagtatcagagcgtcgatactctgctttagcgagttccaaactagccgttagaatacgagagttgttagctggcgacaatataggtccggtacattacgctgaattgcttgataaattaaaaccttatgatttaaacgaagcagaattatgccgatggctagatatctgtaccggaaccaagcagtttcatagcagtgaggcatttttaaagcttagagctcattattttcagcgtacattgcatggtttgtggtgctgtattgacccaaactgtgagaataagaaagagtctaaactgaatggcgcatggccatttggtcttgtttatagtgaacatcgtcagaaatgtcattgtgggtctgcagtacttgaattgacattttgcaatgattgtaatgaaccacacctattagccatagaccaaaatggtcaattgcaacaatgtaccgggaaaataagcgatgaattttcgctacttgatgaagaagaaaaagaggtagatgaggagcgctcagatcagttttccaaaaagacaacggcaagtgatactcaagtcgttattggctcaaagcagaacgatgattacctattaacaggctttgataatgcaggtcgagaagagtttttggataatagttcaattcacttatcgaagtcgatgaatgaatcacaacaatgttgcgaatgtggttactcaggtagaggtcagtatagtaaagcgttacgaagagggttgttgggtgcaccattttatacagcaaatgcggtaccaacagtattagaatactgtccggatattgaagtcgataaagaatccaaaataggtcctaattctgtcccgggtcgagggcgtcggttaattacttttaccgatagccgacaaggaacggcaaaaatgtccattcgaatgcagcaagaagcagagcgctctcgattgcgaggtttagtatttaaggagcttcgcaggcatgttgaagagaaagtcgttatagatgaggcgttactcgacagcgtaaaggactacttgagtatgcctatcgacaaattacgagtcatgttgccatccatcgaacaatccatgcctgaagatgcaaaggcactaaaaaaatatattgatgttgtcagtagttcggttgctatacctttgcctcaaacgattccttggtctgaattggcagctgttattaagcaagataacgatctaaaagagtcgatgttaaaagagaacaagcggctatcaccagaaattttcgatgactcgaccggacctttacgactcactcaaatgctattgacgagagagtttgcgagacggccaaaaaatagaaacagtctagagactcaggggttggtcaaaatagtctacccaggattggataaaatcgatgttgttccggagctttgggagaattacggcctaacggtaaaagattggcgtgattaccttaaagtttgtttggatttttttgtccgcgaaaactcttatataaccattgatcgtgaatggattcgttggatcggtatgcacttttcacctaaaacattattagggccggatgctagtgatgtcgatgaaaacagagcgaagagttggccgttagtgcgaaaaggcagtaaacgtcaacaacgtataatcactctgctcactgttgccacaggaattgatattacgagtacattaggggaagacacggttaatggttggttgatttctgcatggaatgcattaactggatcaaaaattttacaagattcaacagcagacaaacaatatagtttgggcctgactaatgtcagcttttctttgatgaattcggcttatatatgcccgattacgaacaagctgttggacactacgtttaaagggatcactccttatattccgtttaaaggccagttagatagcaacctatgtgaaaaagtgaaacttcccgcggtatgggcttttgaaggaagtgacgacttcttactttcattgattctaacgcgcaaggatattgaagaatcatcggaagtgagatcacttagagagcagaatttgtggacggacattaatgaccgaacagtagagggtggtttttactatgcttcagcagaacactctgcgcaacaatccgctgagcgacttaaaatctatgaggatgagtttaaagttggcaggaaaaatgtcctcaattgctcaacaacaatggaaatgggcgttgacatcggaggtattacagcggtagtgatgaacaatgtgccgccacaccctgcgaactatcttcagcgagcaggtcgcgctggtcgatctaaagaatctagagcgataagttatacgctgtgtaagagtaaccctcatgatacgttggtttttaataacccaaaatggccatttactaccgttataccagctcctcatgttgaattttcgtctgagaaattggtgcagcgccatgtgaattcatttttgatgggacgcttcttaattgaagaggttggattaacgaataaagagaaatttaacttagatcttgagtggtttaatgcgaagcttaacggtgaaaaatctatagcagaacgttatattaattggctaaaaacgtgtgataagagatttgaatcagctttatctactctaattgaaggtactgagttgaaaaaaattcctttgacacaaatctgtaagcgctcggcaaagaaaatagaggaaataaccacgcgttggctaaaagagtatcaatacatagaaaatgaactggtcggtgttgatcccgatggtccttatgcttttaagctaaatagtgaaaagtcccgtttatgtagagagtacttactacgggatttagcgacaagggcgttcctgcctggatatggattccctactgatgtcgtaaacttggataccgataatatcgtcgattttagaaggcagcttcaatttaggaatctaagcaaacttgatcgagaggataatgtttctatcaatcgagggttaccaagccgaaatctagctgttgcaattcgagaatacgccccaggttcagaaatagttcttgatgggcgagtacatcgggcggctggcatttctcttaactggcagaaaattcacgttgatggcgcgaaggattcacagaaatttgacttagcttggcgttgtcctggttgtggccagacaggttacgaaacggatctggaaatacaatctgattcaaattctctcatgtgtaccaatatcgcttgtggacaaagtattcctgataatactgactgtagaaaaaaagtgattcaacctacaggttttgtcactgattattatcgagagccaacaaataatatttcgaataataattatgttccagtacaaccttcttgggttattgcatccggtacagcgacaccattacccatgcctgcacttggttatatggtggcggatactaatggaaaggtcttccatcatagttctgggttgtccggtaaaggatacgcgttatgtatggcttgtggccgcgcagagtcgatgacagcgaaaggtgagttgccaaatgcgcttaactttgaaaaaacacataagcccccgcgtcctagtaagttcgataaagatgaagtaggtcgacacgctgattgtgatgggtcagccaagataatgtcttcaattcatttaggtattaactctcgaaccgatgtatttgagctggtgattaaaaaccccaaaacaggtgaatacatacctgataatgagcagggtcggaaagtcgcgactacattagctgtggcattacgaaagtgtttaatcgaacaacttggagtgtctacaaatgaggtccagtatagcgttaggccaacagttattggtgagaatcaacacgcattagtgctacaactgttcgacagcgtgggcggcggtgccggattttcgacttccgcgccatttcatatctctaagatattaaatggattagttggaaaacttgattgtaggaagcattgtgacgcgttttgtcctgaatgtcttttagagtcggattcgagacacgataccgataaactcgatcgcatgttagcaatagaatggttaggagatgattttaagcactacgtatcacttgctactaagcaccaaaaccttatcaatgatggaaaatactgccctcaaactattgaggcgcaactaaccgatttactcaatgagaaagtatcggaatgtttgtttgttctttcttctgaagtcgaaggttgggatacatctcttgtcttgatgaaatcgaaattgcatgaactattggcgaagaatatagctgtttcaatagtcgtcccgaaagttgattttactgaagaaattctgagttttttaagggaaatacaaaaaatcggggttcaacttaggtatggaaaagagtgtggggcgattgtttttcaaggcttaactaatagcggttggtcaacattagctaaccttgatattaaagcaaccacccctggagagtattggcttacagcggaagatatttccattatttcttatagtgaaccagaaatagcgacaactcctttcgaattagactccatggagccaactcacttgttaggagctgttcatgttgatctcacgactgaattaaatggaccgctatcaaacttcggtagaggctttgttaagctattgaaaaacaaagatgagcgattagcaaagctgcttaaagaaggtgagttgaacagtatttcatattcggataggtatctccaaagtcccgtttctttgttgttgttagctgaggttctcaaagtactaggagaaacatcggattgccaaatagaagtcaacagctgctttgatgaacaaaatagaaatccatttgctgttaatcatgattggaacgatcgctacgattatgacgctatatttaatgcgtggttgactcatatggccggcaaaaaagtaaataccaacataattgataataaacgcgaagtaccgcaccgaagagcaatacaattgcatttttctactggtgatatcgttgaagtaactctagatcaaggttttggatattggcgtttagatctcgctggcgggatgcatcgatttgatttcatgagagatacacacgatcagataaagaggctaattgaggtttataaattggcgaaggtgtctaatagtgccagttggtctacttggattgcagttaacgtgttgtaa

SEQ ID NO: 30367 - DNA, 3309 bp, Vibrio sp. J2-31
atggatactacgtcccccagcgcacttgaacctacaagtgcgatactcggctctacttcggttaatggttgcctacgagccattttgacgaagcgagaactatctcagccaacaggtcagccgctctttacctatcagctatcagaatccgaatatcatcacttacgaaccagtttaaaaaaacaaaaattgccaacaaggttgcacggagatagtagctggtgtgccgctttttgcctttttagtgctgaatggtatcgacgtcaatatcaaggtggatggagctggagtggtatatcaagcagcttagagtttgagttagatgctaaccaacgtagtaaagtaataaaaacaggttttaaatattggcagcgtacggttagccaatataacgatgaaaggcatagttttcttggttcagtatttcgagagggcggtttgccctatgggctgctagcgagtgaaggcggccgtttccaaacaatctttaaacgtattcttagggtttttgacgacgctcaggaatttggtcaatcgccttttcagttagtgtcggagggccttgaacatttacctgaggcatttagacaagaaacgacggttgatctaatcactaatatgacggagctattgctgcgtttaactgacgaatacaaactgcaacaacaagagcaaccagccaatcatttagacacccaattacccaattggcgagatctatttccaatcccgcttgatgtagacaccggaagtgaatttctcactggcttgctgacttcagcctccgttcagcgaaaagataaatcacaacaaacaaaacgaattatttgcaggcaaaggctttcgaacaatgatgatttgggctttgttgctcaaattaaattgatgaaggcgatacctatgccttttaaacgcgaagcattgattaacagtcgagttgagttatttatacaagaaggcaatagagtaattgcagagctaggcattggtcatacaacctttgaaggagaaacgacgaaggttattttacgaactcctgcttgtgaatttcgtcgccaagctatagagcaagatctgtacttagtcgtattgcaagccggtgttgagcttcatcgtgaagaaatcgctaattctgatctcgctatgaatgagatgcccattgtgcttaagtcagacggtgaacatgattgggtcgttggacaaggaagtgtaaatgttaaagcagatcaactgaaagctatcttatcaaaaggttcgacgtacactgccgagtttccagaattgtgcacatcagtaacgacagaacactgccagtttgtccactttagtggggaaattaaggttgattattatactgaagatgatgagcatgatacttatgtaatatcaacgcgacagtctgcagtcttagcagagcaagtgagcgttcgaggtgtcaaattacaatattactcaagtactggacaacctatctatctggggttgccaaccattaccagccaagaagcgcatacagaattatggttaggtaataaaccactaggagaaacgcatcaagctggcttgtttggtatccaatcagtacgtttaaaggcgagtggtaatcgaacaatgcttcgtaaacgcctcgctattcttccgcaatcattcggcattgaacttaagccgtctaagcaggctaatagtggttttgtcgatcttcattgtgaaaggaacttatttgtatccatagaaggcgaacaggtctcctataaacaaaccaatatagaaggtggcaagagaataacggtgacagctgaagggtcaccgccagcggatattattctctctatcagtgctaacttgatggctgacccgataaaagtacgggtaccttttccagcctcaggagcgttaacctttgacaaacatggtaacggtctagccaatcgtatcaccatcgatgatttattaggtgcacgtattcagtttttcccgcgtgtagatgtagcggcaagttatcatattgaattgaaagggccgacgaggtctcgtgatgcgtcttattattgggagtacaaggttgcagataaggtgctagaggtcagcttatatgagtttcgccatcgaattcgcgaactattggcagcatctggtgaacttgatgatgaaatccgaatggttattggagggtcgggttgtagagaacaacaaacgatcattggacgatatgccacagaagctcaacagctaaatgacactgtgagctttaatgtaaaactggaaaaagagctcattattaagccagaattgattaatttggctgacccagcagaaaaaccgcatgcccttcaacaaagatattccaatggcgtagcgacaggcgtattcgagctaaatacaaaattatctcagccagcgttaatcgttccttcaaacaagactcagttggcttttcgcgcgaagtttattccaagtcgtgagcctattgaacattctagtgatgttaaaactttaaataaggcggttgcgttatttcatccagtaactaacccaaacgcgatagccgatgtgctcccaatgttagcgaatgactttaatcacagtagctggcgatttatcaacgatttgtttgctaattactcgcatcttccgatggcgacctttgaagtgtggaaggcaatagtgacgaatacgacttgcttatcggctcttgcgtttaaagcctataaccccgctcaattaatggaacgtttgaaagttgagttcaatgttatttgggagcttataccgctgagtatttggcggtcacatactgttaagtatcgccagatgttgctagatatagggctgcctgaaaaagtggtggataacaaagttaagagcaagctagaaactctttctgaatttaccccattgtttgaaaagcagtgccgagcattaattgacgatcaatttattcaacaaaagaccaatctaccagctgtgtttcaatactttctaccgaaatggagccaggacttgatgcgagttcacttgtctgaccgtgaatggcctaaagcgtttggctatgacttagaaacatggtgccagaaacattgcgaatcgcttattcattttgaagtaaaccgaagttcacataaaagtgtgctttatttccctatttttgccgctgcagtggcgtgtggaaaagtgcaactggaagaattgtcaccgtcactttatcccatagactatttccatctacgacagattgtcgagtttgaccgtcattggtttaaccccgtatttcagagtgcattgtgcgtattttcccaagaggaagcttaa

SEQ ID NO: 30368 - DNA, 6258 bp, Vibrio tasmaniensis LGP32
atgacccgttatttttctgatttagttgagcagtctatttcgcgtagtaaagagtcaacgttaagtgttcttggtataacagaccccaatttgcgcaatcacttgagtgacattatgtctgttgattgtggtcaagaggatgcgttccttgctccgcctttgttcgagcatactttcggctgggagtacgcggaacccaaggtttttgagctggaggggaatctactctctaaagcggtgattgatgctcttgatgataaaagcaatggtcgataccgatttgaggctaaattcaatccatttcaacaccagcttgaggcgtgggatactcttcttgaagattctccaaagtccgtagttgtcacgtccggtacaggttcgggtaaaacggaatgttttatggtcccagtattggaagacctttaccgcgaataccagcagaaacagtcgccgttagtgggagtaagagcacttttcctatacccattaaatgcgttgattaattcgcagcaagaacgtttagatgcatggactcagcatttcggggacggtattcgctactgtttgtacaacggcaatactgaaaacagtgagaacaaagttcgcaaactacagcaagaacatcgtaatgaagtacattctcgtgagcttatgcgtaaagagccagcgccaatactggtgactaacggcaccatgcttgaatatatgttagtaagacaaattgatgcaccgataatcgaatgttcaagagaagaaaagtctttgcgctggattgttcttgatgaagtccatacctatgtggggtcacaagccgctgagctgtcattgcagttacgtcgagtgttgcatgcctttggtgtagaggctaaaaatgttcgttttgtggccacctctgcaaccattgccgatgccaatgcaacggaacaactgaccgagtatctatccaaactagcggatgtgcccaaagaccaaatcaaagtgattggtggaggtcgtgttattccggaactggattttgtggaaagcgttgagctcactctggacaatttagagggtatagagccaggtggtgaacctagcaaaaagccaaaccccgaaatatcaaaggagcgattcacttcgcttgaagcttcttcttttgcacacatcttaagaaaggttattgtcgaaagtgatgtgccactgacgcttagtgagatcaatgagaagtcgagtgttttatccaatcaatcacagttgagtcaacaagacttgttacgctggttagacctattaaccggaacgaaacgagataaacattcagaagcgtttttaaagctgcgagctcacttctttcaacgaatgactagtggtttgtgggcatgtatcgatagaaactgttcttgtaaacaaggaacaaaacttgaacaagaatggccatttggcaatgtttatgcggtgcaaaggcaaacttgcgattgcggcgcacccgttttagaactcagtttctgtttagattgtaatgaacctcatttgatggggctagataaaaaaggcaagctacttcagtggaacggcggtgcaggtgatgaattctcgctgcaacaagaaagacttgatgacgatgatcaagacgttcagcagttggatgataccgctcgttatcctgaaatgtttggtgctaagcaagatgatcacgagcattatgcagcaatcaatattggtaaggatggtatcattggttcagtaaagccaggctatgaactcatgatggatactgcgaaaaaacaaacctgttgttcctgtaattttgagggatacaaccatggttctccgttccgtcgtgccatgttaggcgcgccattttatattgccaatgttgtaccgacattattggagttttgccctgatattgttgctgatggccccgagggacctcaatctttacctgcacgtggtagacgattaatcactttcaccgatagccgtcaaggcaccgctcgcttgtccgtaagaatgcaacaagaagctgagcggtccaagttacgtggtgctgtggttgaagtattgcgagataaacaactctctcagcctcagaatgatgataaaccttcagagggagtatcagcacaagaccttcttgctaaagccaaagagctaagagcaatggggatgaatggtccagctgaaatgctggaggctcaggcgagcgcaattgaaagcggtggtgccgagttaactctggctaagctgagctggaatgacatggtgacagagcttgcaaaaaagagtgatttaaatggtgcaatgcttcagtacaaccaatatttatcgccagaaatattcaagcaatttgacggtagtgcgaagctagcggacatgctgttattccgagagtttgcacgtcgccctaaacgacaaaacagctcagaaacccaaggcatggtcaaggttagttatgccggtctcgataaaatcaaatcctgtcctgatcgctgggaagagtatggttacaaactcgatgattggttagatttcatcaaagtatctctcgacttttatattcgtgaaaacaatttcttacgcctcgaagatgctgggtggttgaaatgggttggtagccgttttgcttcgaaatcattgcgtaaccctgactcggaagaggcgaatgaaggacgagtgaaaaagtggccacaaatccgcagtggcaatcacaatcgccttgtcaaactgttagcagcgacctcaagcatagatgcggactctacggttggtaacgatatcatcaatggttggctagcgagtgcatggcatgagcttactgtaaacactcggattttgtcgcccgacaataaccgctttgctctagaccgtaacaagattactttctccttcgttgataaagtgcatatctgtaaagtcactaataagcttattgacactacctttaggggcatttcaccttatctcccgcgcaaggtggaagatattagtcaatacaaatgcgttgaagtggattttccatgtatttggcaggtcgaagcaactcaacatgactatcagaaagggctgaaacacatacgtgagatagttggtaaagactctaaggtagaatatttaagagagcacaatctgtggacggatatcaacgatcgtgccgtcgaaggaggcctttactaccgtactgcagagcactctgcacaacaaagctctgatcgtctaaatgaatatgaagatctgttcaaaaaaggaaaaatcaatgttctcaactgttcaaccacaatggaaatgggtgttgatattggcggtatcagtgcggttgtaatgaacaatgtgccaccacatccagcaaactatttgcagcgtgcgggacgggctgggcgaagtaaagagtctcgtgctatttcatatactctatgcaaagggaaccctcacgatcagcaagtgttccaacagccaaagtggccatttgtaaccaaaattccagcaccgtatatcgcgtttaactctcagaggttgattcagcgacatgtgaactcgttgttgctttcaatctttttgaagacacaaattggctcaactaacaaagaaaaaacctctttgaacttggaatggttttatttacctgaaggcaatgccgtttgtgacagcttcctcaattggcttgagagcgatgcaagagactgggactctgatgtgactgcattggttcgtggaacagggttagcaggcagtcaaccttctgcattgcgcgcatccgcatctaaagttatccagcaacttaaaaacaaatggtttaatgagttcaactatttagagcaggagttacttggagccgatgccgagagtccttacgcatatcggcttggacttgaaaagagcaggctgggacaagagtatttactaagagaactagcatccaaagcattcttacctggttacggtttccctactgatgtagttaattttgacaacaacaatattgaagactttatccgtgagaaacaaggtaaagaaaagaagtctaatgaacgagaagacaatgtctcacgctttagaggacttccaagtcgcaacctagcgattgcaataagagagtactctccgggttctgaggtggttcttgatggacgagtctttcgctctggtggggttacattgcattggcacaatgtatctgactctggggttaatgaagctcaaaaattcgacttggcttggcgctgcgatagttgtggacaaacaggatatgaagagtctgtttctgcatcatcactaaacatgaattgcactaactcagcgtgtggagcgcctatcaaggggcaacacatcagacaagtattacaacctacaggctttgctacagacttttatcatgctccctcaaatgacatatcgacacaaaagttcattccagtagaagatgcttgggtttcaacaggaaaggctccttatatagatcttcctaacagagcgatggggttcatgatttcaacgtcagaaggtaccgtctttaaccacagctcgggagaatatggcaaaggatatgccctgtgtatgtcttgcggccgtgcagagtcattggatagaaacggagactatccagcggggctgaatcctagtgcacctcataaaccgttaaaagcggttaagaaagacaaatcaggtgaaggaaatgtcacctgtgatggttcggctaccccgatgaaaggggttcatcttgggtgtcattcgaaaacggatgtgtttgagttagtactaaggcatccagttaaacatgaatatatcagctgtgacaacgatggtcgtacggtcgcgatgacattagcagtctcgcttcgttcagctcttgcaaaacaattaggcatatcgacatctgaaatggggtatgcaattcgacctgctatcatcgagggtacgacatcagcaatggtaattcagctgtatgatgttatttctggtggcgcgggctttgcgagttcagcaagtcagtatattcagacaattttagccgatatgatttctgggcttacttgtcctaattgcgtctctggctgcagcgattgtttgttggaatctgacactcgtcatgacattgatgagattgatactgcgcttgcaagagagtgggtagggcatgatttcaatcactttaatcgccttcccgaggcattagccgaatatagtcaaggtgagtaccagccctattcagttcttggaacaattcgtaggcagataaacttaggcgctaaatcgttaactctattcttgaatcctgactgcgacgaatgggatcttactcaccctgacttcaaacggactattgctggatacctcttgagtgacgagataggtgtgaccttagctctaacctctaccgagctaagtaatgagtttgaagaggaactatggacctttcagcagctgggtgttcagatttcaaaagcaggtgaggtatcacctcatttaatggctcaattaagtgatggaaataaagtatcaacgatcgcaaacactgttgctcaaaacacgattcctggaaaattgtggttacagcaaggtggtatatcgatttgctgcgaaagcactcaacttcatccccaaagcccttttgtactgtcaatcagtaagaagggggaagccccacagatagcgtcaatagagttagttgatgagctgaatgggtcattgagtaagttcggtaaagcgttctggattaccatgttcaaaactaaccctaatcttgctgagctattaaagagcgaaagcatctctgaagttgaatatagtgaccgatatatacaaagcccatcttcaatgttgatgatttgtgagctgcttggctacatttgccgaggctttgatagcattagaacagtcacgattaatacgctttatcacgaaaagcaaacagtaggtcactaccttcatcacgattggcaagataaaggggagtttatcgaggcttatgaggtttggggtgaattgaagttaggtgtgaaacctagtgtgaaatgtcacgaaaagcgcagctctattgcccaccgaagattactaactcttaaactagagtctgggagagagctagtcttcaagtttgatcagggggtagggtactggcgcatttcagatacgacctcgagattcgataaagtgaaatacagttttcactccgacttagatccacaactgcgagacttgagaagtaaagagccaaacctagttgtgagtaatagtgagtcttggtcgacggatgtgactctccaaattaaaaactag

SEQ ID NO: 30369 - DNA, 3375 bp, Vibrio tasmaniensis LGP32
atgactattcaaactaactcaagtgatttatctagccgcagcacgctatcgcttgaacgtactcaatcgatcagccactggttagataactttattaataaacgtaccaataagaatatcagcgcgagtgagggtttatttcaatatcacatgactcagcaagaatatcaggtgttgaggaaaacgttggccaatggtgccaatttttcggttcaaagccgattttctgataagtggtgctctgcgtttgttttgtatggtgctgaatggtttcgtcgtgaatacagccgagactggagctggttacctatttttcaaagcttaggcttggagctaaaccactctcaaatcagtgacattgttgtaagagggttaacaggctattggaagaaaccactggctaagtttagcaatggtcacaatgactatattggctcggtatttagcgagggtggactgccttccaacctattgtccaatgatgttaacttgcagcaagcgaatcactatcagaatgctttttttgcgatttttgaacgttatcaagatgctaagggcttaggaagttacgccattgaagcactgattagctcccgaatcacaggctttcctgaaaccttgcagactgctcgtaccgtaaagctcattaccaatatgatagataaactggatagtttggtttatcaatttggccttgaaacacaaacgaaccctgctcagtatttggacaagcagttccctctatggcgcgagagttttccattgcctcttgagaatgaaacagggtctgcgtttctgagccaacttctatctacagcctctaaagaggtaaataaagctcgagtagtaagaaagcacctgcaatgccgacattcagtatcggtaggacaacaggcgatctattcgttggtttcgttaccacacctgtgtgtttttgaattgtctttgaccgcgctcacctctagccgattggaattggcggtttttgaaggtgctgagcaaattgcttcgttaggcacggggtttgctcaaacatgtgagaatggagtatcagtgaggatgcgaaacccgaccattgaagttcgtagaagaaagccaagcagtgagctttatgtcgttgctatgcaatccggtcgcaaactagctgatattgcactgcccaatagttcgttagatattggggaatcgccactgacgctatctagtgagagtgataagtgggaagtaatgagtcagtctacgttttcaacccgtagatccaaggttgcccttttattgcctgcgaacgccatcgtacaaccggtttatggtgactttgagttagcgaatattcaatttaatgatttacctatttatcatctaaacgggcaatgtgagatcaagattggctcggatgagaggtacattgtgacgtcgggttcagatgacttcacgacaccaggctatgtgttaaaaggtgagcaagttcaattcccgactcaaccagcaatagtatttaaaggcataccaaatgtggttgaagaactctcacaatcaccgctgtctgtagaagaagagttgaatatcttccttgataatacgccattgcgtgctctcagttcgagtgagtttaatggtaggcaactactgacagtgaaagatgagcaaggtcttataaagctgaaaaagcgagttggtattttgcccaaagattttgaggttgaatttgagaatggaggtcagccaaagcaaggggtgatccgcttcttaacaaagtcaccttgtacttggaagttagttagcgatacggttactgttgaatcttttaccaataatgatggcgtgaaagaagttcgcttgatagctaatgataagccgccagcttctgtacgcttcgcaattcaagcaaatattttagctgcaccaatcacaatagaggttcctttccctgcacgcggagctgtggcctacaacaaagctggtagaccactttcacagcgactttcggtagagggtttgttaggcagtcgcttattcttgttctcgactcgaggcataccagcgacgtttcagcttgaggctgaattacgagcaaaagcgcagtcaaagctccatgtaccaccttactttcgctggcaatacaaggttacagataagccagtggagatcagtctatatggtttgaaaggtcaaatattagaactgctgtccttatcagaaatgcttgatagtgaggtggaactgcgcctaactggaccagggcgtactttgagctttgtagtcagccactactcaacaatgctagagcatgacagacataatcatacaatttcggtgcgctcgacggccatttctgaagcgagtcaagtaaaaccagtattgatgtcattggcaaatccagagcagtcaacttttgcattgactccttgccacagcgaaggagtagcaaccggggagtatgagctacctgagatgattcatcgtggtggaccttggctagtcatcccagaaaaaggttctgaagtgttttttcgagcgaagttttttccgggagaggctcatgagcgcaatggcgaagtaaaaacgttgcaaaaggcctcagaattgttccaccctcgctttgaaccgaatgtgattgctgatgtgattgaacaaatggcggaagattggtcgcatagtggttgggaatatctgaagcagacatactcgaattatggtcacttacctctttctacgtttgaagtatggcgccacttagtaagaaatgagcgtgctctcgctgtggctgtgttccgtttagagtttgatgacaaatgcgtatctcaaatggatgcagaactgccgttactatgggagacaattgagatatctcattggcagcatgcaatatcgttgttgactcagacactccaagcaatagggcttgaggctaccttagtaacaaatatggttgagcagcaagtatcaaagctagggctggccatcccaatcttgaatgacacagaggttaaattgatcttgctccagcaaagttcctgtcaaataccactgcctatgatgcagatgatgatgaatggttggtatcaggatttactccacacacacagtgaagatgatgattggccaacagagatggggaatgagctgaaacattggtgtcagcatctagatcttttgccgtttgagtttactgttaacagaccgtttcaatcaggtgtaatctattggcctattttcgctgcagcgcttgccagtaatagagttcctagcgagatctcgaacgactttctctcagggactatttttcatttacgtaaactgcgcgactttgaccacgattggttcgagccagtttatcgtttgtttatcaattactttgccaacgaagcacgataa

SEQ ID NO: 30370 - DNA, 6201 bp, Vibrio toranzoniae
atgcaatattttgagtctttagttgaccaactgaccaaacgcgcggcgcgcgctactttagggcaatttggtttgcggtctaagccgttacgtgagttcttgtggcagtcgttttctcaacccccaggtaaagagggggcgtttcttgctgatcctgtatttgaagccacttttggctggaaactgcatactcaaagcatgcgagacctatcgggtgggttgttaaacagctcgattgtaaacgcaatggcaaatccgccgaaagagctgaaagaagactacctttttgatagcagttggtacccgtattctcatcaacatgaagcatggtctcatctgttggaggcatctcctaagtcggtaatcgtgagtagtggtacgggttctggtaagacagagtgcttcttagtgccaattctgaatgacattgtagaacgcaacagcaagcctgatggcgttgaggctttgttcttatatccactcaatgcattaattaacagtcagagagaacgtttaacggcatggactcaccagttgggtgatcaagttaaattcagcctgtttaatggtgatacgcccgaatcagtaagcgctgcagaacgtaaaaagcacccaaatgaacagctttctcgaaaggagttgagagaaaacccagctcaaatactggtgaccaactctacgatgttggagtacatgttggttcgccaaaaagacgcgaatattttgaaccgttctaaaggcaaactgcgttggatcgttttagatgaagctcacacctatatcggttctcaagctgctgaattgtccttgttgcttcgacgtgtaatgcatggttttggtgtcacgccagatcaagtgagatttgtcgcgacttccgcaacgattggtggaaaggactctgacgcggatctaaaagcgtttttggctgacgtcgctggtgtcgatatcactcaagttcatttagtgaaaggcgagcgtgaaatcaaaccgttgatggaactggagcaaatcaagacgatgaaccttgatagtgtttcgagcataacgaacgagatagagcgatatgatgtattgcaaagcttaccgccgttaagaacgttaaggcagcacctgagttcaaccgataacagaatgacgttgagcgaaatagggaagctattgtctgcaactgaggaaccgttatcagagcaggactcacttcaatggcttgatatctgtgcttcgacaaagaacgtagatggcgatgcatttattccgtttagactccatttgttccacagggttgctggtgggctttgggtttgctccaactcaggttgctcggcaaaggtaggtacccctttagagtcgattgattggcgatttggtatggttcatatgtcacgccgtgagaagtgctcgtgtggttcaccgatatttgaaatggttagctgtaatggttgcggaactagcttattggctgcgactgaaagaacagactcagagaccagtcatactcagctacaactaacaaaaccagattcatcgattgatgactttgccttggaccttgttggagaagaagatctaaccatcgaagatgatgaagaaacttccgaagagtatgaccgctttgctctcatctcaccgttaaattttgaagaaacaggtgaatattggatcaataaccagagagatgtaaaaaccgctaaagtctccggcgcgcatttaataaatcgagtcgaagggtatcgtaaaagtgacggtgctttgtcggtgcgttgtccttgctgccagcacaccaaaatcaagaatttcgagttctaccgtcacttcagaaatggcgcgccgtttatgctgtcgacggtgatccctacattattggaatattgccaagacggtaagaaagagcagttgaaaggtccttggaacggccgtcgcatgattactttcaccgatagccgtcaaggtaccgctcgtttttctgccaagtcacagcaagactctgaaaggcagtttttgcgctcaactatctatcatttgatcttggataaagcgatccgagaaagtggtgctaactctacatctagtccagagcttcaacagtaccaagatatgctcaagatggcgcaagagagtggcaacgaaagtatgattgagttcgttgaagggaagatttcggaacttgtgggaggttcttcaaaaccaattacggtcacttggcaagaagtcgaagaattcttagcggaacagaaagaagtaaaactgtggattaaaaagttctacgagcacttcgatgaccgcatggacatggttgctaatccaaaattacttgctcgtttactgttgttacgagagttcaatagccgtcctaaaagacagaacacactcgaaaccatgggtttggtctgcatggaatatccaggtttagccaaaaaggagagttcagctcctagtgaatggttgagaaattttgatactgctgaaaaagcgcgtgcagagtgggttgatttcctaactgtttgtgtgaattttcatgtacgaagcatgaaagccgttaggttgacggatgagcaaattaactggataggggctaaatattcgccggctttcttagtaggacaagatgaacctacccacatttggaatgtagaggcatggccaaaaattaggcgtaatgggccacgacaacctaggttagctaggttgcttgctacggctctgaatatagagttagaggatgctgatatacgtgcagatattaacgaaattttgcgccaagcgtggatggctctgcagtcttcagtgttgacaccgagtggtgatggctatcgtttagaacttgagcaacaagtgagtttctctttaatagcagataagcatcaatgtcctcatacccaaaaaatcatagataaaccattgttaggggtgacgccttatttgaatttatctgggaaccgtaccgagcatttgtgtaaacagatatctaccccaagttatcccttcccatttggccgcgatcctgaaagtggagaaacggttgatctaaacaaagttagagattggcaagagcaaccaaacttaatcgatgtacgcaaagaaaatgcgtggtcggatatagctgaccgtgttgtcgaacgtactccttactttagagtcgcagagcactctgcgcagcttaaggcaagccagctgcgtgagtatgaaaaagaatttaaagaaggaaaaataaacgttttaagctgttctacgacgatggaaatgggtgtagatattggtggtatatcggtagtagctatgaataatgctccacctaaccctgcgaactacttgcaacgtgcaggtcgtgcaggccgtcgtggagaaactaagtcgattgcgcttacgttatgtaaatctactccgcatggagagcatattttctcaaatactcgctgggcgtttgatacggaaattaaagtaccgaacgtatcgctatcaagtgactacattgttcgtcgccatgtgaattcgttactactttcaacgtttttaaatcatgtagtgaagtcagagaactcgttgaaattgaattgcggcaacttcttcaaatctgatcacgaatcggcggcttctcaagctgatcaatttgttgactggtgtgtaaatggagcattagattttgtacaagacgggttggatactttgttacgtcgaacctctctggatgcgacatcacgtatcgaaattctagatacgtccgcgaagcatatgaagcgtattgtcgagcgttggtccgtcgagcatcaattgctaaaagaacaatctaaaagtttagaagagaaccctaattcgctatcaacagcacaagctgcagtcgaaagccaaattcaacgcttagagggggagttcttactttccgagttagcgcgtaaagggttcttacccggatacgggttccctactgatgtggtgtctttaaatacagatcatgtcaaagtgatcgaaaggcgaaaacgctacatcaagatgaaacaagaccaaatcaacgataaaacatctcgtaaagataacctatatagcgctgctggctttccgtctcgagatctttcagtcgctattcgcgattatgcaccgggtaatgatgttgtgattgatggacgtgtttatcagtcgaaaggtgtgttgttgaactggcatagtcctgcaactgttgatcaagttaaagagatacaagcgttaaggtgggcatggcgttgcgacaagtgtggtgccagtaatacttcgttgttaagaccagagcagtgtgaatgttgtgggaatgagttcaattttagtgacgagaaaacaaaagatcgtattcacccttacattcagccagcgagctttgcggtcgatattagagacgaacctcataacgatatctcgcgtctgaatcatgtgcctttcaatgacccttgggtgacggtagatagttccgagtggcatgaagtgagtgtaaaccctggagcatcataccgttcaagccacaatggccatgtttattattacagtgcaggccccgtcaaccaagggtacgcgctttgcttagaatgtggtcgtatggaagttatgcccgaaggtggagataagtcaccaaaagaagtgttgatggggcaccctcgcttacgaggtggtaagggccatttaaccagctcacgcgaagttttgtgtggcggtaacgacagggagctcactgtcaaaggtccgttaaagttgggtcatagtacctatacggacgtgttcgagttattgttatttgatgagcagggtaaaccattagttgagagaagtattgctcgttcagtcgctgtgttgatgcgaaaccagttatcggaaaagcttggtattaataatgatgaaattggctgtacaacgaagcctgtgaatcatgagggacgagaagtacaagctatcgtgttgtttgacaatgcagctggtggtgcgggtttttcaattcaagcttctgagtatgttgttgagttattgcaaggagcaaagaaggttgcatccagctgtcactgtgacaaggcctgtcatcgttgtttagtggattattcgactcaacatgtccttgatttactggatagaaggaaagtggctacttatttgagcaacgggttttttaacaatcttagcttgccagtggaatatgaattgttcgaccatcacaataggcgtgaactacgtccgttaatgatcgcaatagaaaaaacgttggctaaacatgaggactcaaacctatatgttgagcttcctataagtcaattaagcgatttaggcgattggcaactgtatcaagcatttagtcgctgggttgccgagcgaaaggtaaacttgatattgacagaggttcaagtgcaagagttgtcacttgagcaaaaagtgacgttgtcttggtatcagaaccacccaaatgtgaagctaatgagcaaactactaaatgatcatgtcaatcatcaggtattagcatcggtggctagtgagtcatattgttaccaatggggacttcgtgacgacgaccatgaaactttagtggttggtgttgggtctttgggtgagttggtggactttgaccctacgcgtttgcgtcagagctctgatgtggaaaaaatagtgattgatagtgaattggatgggaaggcttcagagtttgggttgaagttttggactcttgtgtttaaacgctcaccagcattaatgacgttgatgcaagaccaagttatcgaatcggctacttattctgatcgttatctggccgcaactttacctgtctctctatgctttaataccttgaagtttttaggggaacattacaaaagctgccaggtcgaaattcatacaggggagttaagtcgaggttacaagccaacgacagtacaagacaattttttcgatgattactcacgtgacaaggtagtcggtttggcatttgaaagctcggcagcaaatatgagttttaaaacgacctcgaaatacaagctacctcactcgcgaacgctcgttttatcttttgataacggcaagcaagtgacgttgtggcttgatcaaggatttggttactggtttgctgataagcgtttatcggaaaatcatttgccttatcatcttgatgatgaagaacacgcaaatatcatcgttgaggggcaagctcagatctcgtccggcacattcccaacggatgtatttgtgacatttagttga

SEQ ID NO: 30371 - DNA, 3360 bp, Vibrio toranzoniae
atgcaaacatacagaaatgtcctctcttcaattcttaatgcgagagagttgaccaaaccaaatgctcaacctatttatagttacaaagtaacagctttggagtttgagttacttaagcagtcgttgatttctagcgtcgaaagtaatggtattcaaacctattcgaataagccgacaagggaatgggcagggtgttttgtattgtatgcggcggagtggtggcgcacgtcttttcaaggcggcgtttgggcttgggaacctgtattggagtctctcggcttacaggccaacgcaatttcaccaactcaaagaagtgagattgttgctaaaggtttaagcttttggggacgaaaggtattaagttatactaagggacgcatgttacttggaactgtcgcggtagaaggtggtttgccacaaacacttatccaagatccaaatagcaggcttgcccattacttcgaacaagtgattcaagattatgggcaatttgctaactcacggttaagcgcggtgtcagttgctaaagcacacgcgcactatattgcggcatcatatcgtgatgaaacggtttatagcattgtcgcccaagttgctgaatccatttattatctggtcgataagcacgggctagacgagcaaagcgatccgcttcattacttgaatacggtcgatgcaaattggtcgcaaggtttaccattgaatatggaacctgaagctgcgcgaactttattaggtaatgcgcttggtcttgccgttgaagttcaacgccgtttaccaaactctattaagattcttcgttctctacgtaaatcttattcttattatgcctcaatgatggatatgtcggtatcggatgacgattatcagtggcagaaccaaattgatattacactcaagtctcgtcttaatgccaagttcttacagcaactgtttagtagcgtgaatttgccggaccgcataaacctgtttgcggttggcagtaagagccttttgttggcaaaggcattcaaacgcggcgctgactctgagcattatttattggatgtttatactaagtcttttccaacagagtggttcgactgcgacatacaattgaaagcaacggatgaccttggtaatgaatggtacgctccagtgcttggtggcgcgggagttgatgccaatgaaccttgggtattcactcaacataatgatgagtggctacttaagggtgctggaagtatcgaatgtgcagaagcgaacgctttagttttagtgcctgagcacttgtcacatcccacacttgctatggtaggtcacatcaatgaacgtattctttatgatgttaatgctcaaatagagacggaattttattttgacgcctattgtgtgtcacttgaccgagaaggtgtgcaacctcttgaattcaatttggttggtcagccagtcccttatcaaactaatccaagtaagtgctttattggtgttcctagcttagtcgccatcgatgaaaatggtcagcaatcagaaattccaaatactcagcttcgttggcgcaatacaatgcttgaacaatggcagtcaatgaatacggtaccttttggtaaggttgatatcgctttgtttgagaataacaaacctgttaagcgttttaccgtaggtttgctaccggacgatttttctattgaatttcaaccgagccacacggtacaaattggtcaaatcggcttttattcaaataagccactgccatccattgcgttaaaaggcgcagaacgactcgatgttctgccgagctcggttctatctcattctcagcaagatccgaacgaagccaaacgcactttggatatgctcagtcatcaagctcacccaccagcacaagttgacgttgcgatatggtggcaagaccaagcgaagtcgttgtcgataacattgccattccccgctaaaggtatttgtctgattagctctgggggagaagcggttcgtaatgctgaagcaattttagtcgatacgcttaatcgttatgagttattcggctatggcgtcagtgattcgctagaggtggaattcaagcttctcgctagagatatttatggcgctttttctaagtcggcttacgtgaagcgaattttgccaaaaggtgacgtattatctacaggattttccttagcaacgttcaaagaggatattgactccctgctagctctatcatcttcgttagatgcagctgttaaggtatcggtgctggacaatgcacataccattttcaatttcagtgttaatgcttacagtaatgcacttattccaaacagagcacaaggcacgattgaaatcgagaacaataacttcatgggcacactttctatggtgcctttggataacccaacttatgcaccgattactttaatcaagaatgacgaacagtggtgtttccctgaagaagacgcttcgcctggtgcttggcttatctatgctgacgaagccgaacagggtgtaagacctttgatgtggagtaaagaccttgaactgttatcgtcgccgagtaatcgactagaagaagcggcatctattggggctcgtaaagatcgtctagataagttctcggtggtttgcggtcagttggcgacagaatttagtgcgcctgaatggaagtacattaaagccttgttggcctttgatagtgttccgcttaccacattcgatctgtggagaggtgcaatcactaagcccgaatttatgcttgcgatgctgttaagtgcaaataagaaagaagctgagcgtatttggcagttccgtcaacagttccctttttcatggcactccattaaagctcgagatgcgatcgcggtagtgagtgctttctatgcttcgcgtatagaagtgtatggcaacgatttttctgacattatttgtgaccagatagaatcgaaattaaacgaattagtgacgagataccacggcttacaaagcctcaagaatcttttaatgcataaaattgatcctaatcgagagaaaccttcgcttaatcctgccgcttacattcagcaattgtttgacctgagaaattcattgaataaccaatacaatgaatctcactggccatgcgaattttcggaccacatatttaagagttcaattaaggcagttaaaccacaattagcagaggtgtgcttcactactaaagatctctaccgtaataacgtgatgaacgcacccgtattgcttgctttgtccacttgtggctctgcatcgctgagaatgacaccagaggtggtacatgcgatgagacaatacaacagcttcgaccctgactattttgaacaagtgttcgctcttacacataaaatgattttcggcctagtgaacagctaa

SEQ ID NO: 30372 - DNA, 6198 bp, Vibrio xuii
gtggaatattttgaatctattattgaacagctgaccaaacgtgctgctcgagcaacattaggacagttgggtttacgctcaaaacctttacgtgagtttctatggcaagccttttctaaagcgccaggacaagaaggtgcctttttgggtgatccggtgtttgaggcgacatttggttggaagcctcataccgaaaccatgcagacattgtcggggaagttattgtcttcccgtgttgtgcatgcgatggcgaatccgccaaaagcgttgaaagaagattaccagtttgagtcttcatggcctccctatgcccatcagcatgaagcgtggcagcatttgttaaaagatgaacctcgctccgtcattgtgagtagtggcactggttcgggtaaaacggaatgtttccttgtgcctattttgagtgatattgccgcgcgtaatagtaaggcggaaggcgttgaagccctctttttgtatccgctcaatgccttgatcaatagccagcgagatcgtttggcggcatggacccatgagttgggttcagatgtgaagttctgtttgtataacggtgaaacgaaagagcaggtcccggccgcaaagcaaaaagcagagccgaatcagcagctttctcgtaaggctttgcgtgatgacccagcacaaattttggtgaccaatgccaccatgctcgaatacatgcttgttcgtcaaaaggatgagccaatcttacgtaaatcgcagggtaagttacgttggatcgtcttggatgaagcgcacacctacattggctcacaagctgcagagcttgctttattgctgcgccgcgtgatgcacggttttggggttacaccggatcaagtaaggtttgtggcgacatcggccacgattggcggcaaagattctgataaagatctgaaagcttttttagctgacgtggcgggtgtcgatattacgcaggtacacttagtgaaagggcatcgtgaaatcactggactggctgaattaaagacaccgcaagcaatgaatttgcagcaagtgaaagcgattgaagatgaagtaatgcgctatcaggcgctcgagtcgattgtgccactgcgtgtattgcgtgagcatttgagctctgatgataaccgaatgtcactgtcgcaaatcggcaagttattgtcggcaaccgatgagccactggaagaaaaaaccgtgttgcaatggcttgatgtgtgtgcatcaaccaaagatagtgacggacaggcatttattccatttcgtttgcatttgtttcatcgggttgcgagtggtttatggacgtgcgctaatccaagctgtaaagcgaaggtgggtactgcattggatgcgttggattggcgcttcgggatggtatatatgtcacgccgtgaacgttgtggctgtggctcacccgtatttgaaatgaccagttgtaatgggtgtggtacgagtctactccttgcagatgaaagtatcgacaaagaaaccggtgaaagtgtgcttagcctgactaagcctgattcgagtattgatgacttttcactagagattgaggtggatgactcggatgccttattagaactcgatgaagaggaatcggaaacccatgcccgtctgtgcatgatggctgagcatgatcgtgaggaaacgggccagtattggttgaataatgaaggcgtgttaaagccgtctacccacaaaggtgcattccaagttcaccgcgtggaagggtacagcaagtcagacggtacaggtgtggcgttgcgttgtccttgttgccagcatacaaaaattcagaactacgatttctatcgccatttccgcaatggtgcgccgtttatgctgtcgacggtgatcccaacgctgttggagttttgtcaagatggcaaaaaagaacagcttaaagggccttggcatggtcgtcgaatgatcacgtttacggatagccgtcagggaacagcccgctttgccgcaaaatcacagcaagatgccgagcgccaatttttgcgtgctgcactgtttcatttagtcgcagatagaacgttgaaaagtggcgcgttgacgccagagcaagaagcggatttgaagaaatacaaatcacgcttagcgatgttcatcgaagacggtgacgatgacatggttgaaatcatggaagaaaaaattgcggcactgtgtgggggcggtgatgtttcgatttcatggtcagatgttgaacatgagctcgctaaagagagagagctgcaatattggatcaaggattcctatcagcgatttgatgacaaaatgaccatggtgaaagaccctgttctactggcaaggctcttgttattgagggagtttaatagccgtcctaaacgtcagaatacgctggaaaccttgggtttgatccgtatggagtaccctgccatcaaagacaagggcaatactgctcctaatgaatgggtcgcattatttgatgatcgggacagagcgcaatcagagtgggttaacttcttaacgctgtgcttaaacttccatgtgcgcgccaataaggctatctcgttaaccgaagagcagcagcgctggattggtgcgaagttcagcccgggattgatttcttcgccaagtgacgatagcccgttccgtaatgttcaaagttggcctcaggtcagaaaaggctcggtacagcctcggctggttagactacttgcaacggcatttaatctggacattaccgatactcaagataaaacacagctaaatattatcctgcaagacgcttggaatgtgctgcaacgctatgtgctggcagggagtggagatggctaccgcctggagctagagcatcaggtaagttttagtttgttggctgaaaaatggcagtgcccgcatacgcaaaaaattatcgatacgccactagctaaaattacgccgtacctgaacgtaaaaggtgagcgggctgaacaaatctgctgcttattagaagcgccggtttatccgtatccttatggtcgtcagattgaagacggatcacccgttgcgcttaacgtggtgagggactggcaagaacagtctgacatagctaacttgcgtaaagaaaatgcgtggtcagacatttcggaccgtattatcgaacgtacgccatattttcgtgtggcggagcattctgcacaattaccggcccctttgctgcgtgattatgaagataagttcaaaaaaggtgccattaatgtgctgagctgttcgacaaccatggaaatgggggtggatattggtggtatctctgtggtggcaatgaataatgcgccgcctaaccctgcaaactatttgcagcgtgcgggtcgtgcgggtcgtcgtggagaaacgaaatctgtcgcgttaaccttgtgtaaaaatacgccgcatggcgagcatattttcagccacacgcggtgggcatttgacacgcctattcatgtaccgaatgtatcgctatccagcgaatacattgtaaggcgccatattaatgcactgttattgtcggtattccttcgtcagaaaaatatcagcgacaactctctgcgtttgagctgtggcaacttcttcctgtctttgcatgagcagtgtgcatcacaggccgagttgtttataaactggtgtgtgacagatgcgcttgaccatatgagtgacggattagaaactttgcttcgccgaacaagcttagaagcgacgacgaagatgagtctagtgcaggaatcagcacagcagatgaagactattttgtgcagttggcagaaagaacatcagttgctgtgtgagcagagtgaagcggtaaaagcagatactaaccgtctttctattgcacaggcggcggtggaaacgcaaattcagcgtttagaaggggaatacctactttcagaattggcacgaaaagggttcttaccgggatacggtttcccgaccgatgtggtgtcgctaaataatgataatgctgagtccatcaatcgcagaaaagcattgattcaagctgcaaaagaagccaaatctgcgaaaaatgatacgttagagcaccgtattgataacctgtacagtgcgcgcgattacccatcccgagatttatctgtcgcgattcgtgattacgccccgggcagtgaagtcgtgctggatggtcgcgtgtatcaatcggcaggcgtgatattaaattggcatagtcctgcctctgcggatcaggtgagtgaaattcaatctttgatgtgggcgtggcgttgtcagcagtgtggtgcaagtggaacagagcgacaaatgccgaaggtgtgcagttgctgtgaggctcagttatcttcagacagttaccaccgcttcattgagccaggtagttttgcggtcgatattcgtcataagccacataatgatatttctcgcttggtgcatgtgcctttccaagatccttgggtaacggttgagcaagacaagtgggaagaaatgagcataaacccaagtgccttgttccgttctagccataatggtcatgtgtattaccacagctcagggttatttaatacgggatatgcactctgcctagagtgtggtcgtatggaacctatgcctgattcgcaggatgtgacgccttaccaggttttggaaaatcacacccgtctgcgtggcggtaaaggggaaatcgagcgagaaagtgtgcacttctgtggcggtaatgaacgtgattttgctattaaaggcccaattaagttaggtcatagtacgcgtacggatgtgtttgagttattgcttttccatccagatggatcggttctgaacaatcgcaccattgcccgttctatttctgtactgttacgaaatgagttggctgcgaaattagggatcaatagcgatgaggttggctgtaccacaaagccagtgaattatcaggatcatgaagcgcaggcaattgtgctctacgattgtgcggcgggtggtgcgggctttgcgataaaaacgcctgagtttttgatcgcgttattgcaagctgcgaagaagaaagcagtggattgtcactgtgataaagcgtgtcaccgttgcttagtggactactcaacgcagcatgctctggagttgctaaatcgttggaaagtgattgattttctgaataatgatttttttgcacgcttatcgctgccagaggaatttaagttatttgaacgcgataaccgaagagagttgcgccccttgatggcagccattgagcaatcattggcacatacgatagaccctgagctatgtctgtatatgcagcgagatactctaggtgatttaagcaaatggccgctagttggtgcaatgtatagttgggcaagagagcagacggtgaaagtggtgttactcagcactgattcatcggctttaacgacgcctgaacagatcagcttgtcatggcttgctaatcacccgaatatcgaattacttcagcgagacgacgcaataaaacgtgatatgacgttatgtgctgaaattttgagtggcaacagtgcccaatcgtgggggtatcgtaatgaatgtgacgctcagttagtgaatggtttcgggagtcgaccgacgttgtcaacgattaagctggatgcgctgacgcacccagagagaatcggaaccgtgagtattcatcatgagcttaaccattcggttaaagcgtttggtgcgctgttttggagtaaagtactgaaggcatctgatttgttgttgaagaaaatgcagacacatcagatcgttgaagtagagtactgtgaccgatatttggctgctccgctaccttttagtttatgtttaagtgccgtaggggcattgctgggtcactataaggattgtaaggcttcaataatcacgggcagactgaagggtgggggatatttgcctgaatctgttcaagataattggtcgtctgatgatgcaagagacaaggtagtaaatcgctgtattgagaaaacacagcttgatataacgtttgagacaaaaccaaagtatcaattacctcatgcgcgcacaatgacatttactttcgatgatggtgcaaaagtaactctctggttagatcaaggctttgggtattggtggttggataaatatttaccagaaaatcaattccccgctgatttaacggttgatgagcaggctgaatgtattgttcagggaccatggcaattgaaaagtggtgattggccaacagtggttttcttctctattgaggaatga

SEQ ID NO: 30373 - DNA, 3378 bp, Vibrio xuii
atgaaaacatttcgccattgcattgcagatattttgtcatcacgcgacttagaacgtgtgagtggtgcgcctttgtatagctataaattgacggatggtgagtattcatcattgcaaacatcgctgattgatagtttacgtaagagtcatatcgagagctatatccctaaaagaatgagctcagagtgggctggggcatttgtaatgtatgccgctgagtggtggcgaaaggaattcaatggcggccattggagttgggagccaatttttaaatcgttacacgttaaggattcagaccttgccgcgagtcaacgaaatagattgattgaagctggttttcgcttttggcgccgtcctgtactgtgtaatggtcaggggcggatgttccttggtaccgttgcggtagagggaggcttgccgctgcaattgatcacggatccaaacaacaaactctcccattatttcgagcaagtgatcaaagactttggcaagtatgcactctctaaaccaaatgcggtcgctattgctcaagctcatgatcactgtatcgtaccgtcatttcgtactgatgcggtgtattctgttgtcggcaaaattgccgaagcgatttttcagttaacggaccaatatgggttggatgagcagcatgaccctctacgttttctggatgcagtggctccggactggccggccgcattaccactaaatattgatcatgatgtggcgaaaggtttgttaaatcgtgcattgggtcaggcgattgctgtccaacgccgcttgccacattcattgcgtcttatccggagattaacgcaaacttataaccctcacgcttttgttgatgatgagttccagcaaaccgagcagtcttgggggtaccaactggctatctcattgcgaccgaggttgagtgctcagtatattcaacagctctttggtatgcaggttttacctgaaaggtttagcttgtttgcgatggggaaaaaaccgttgttattagcaaaagcgttcaagccaaaaaacaacacagaacgctacctgttggatgtcatgacctgtgagttacctgatgattggtttgattgtgaaattcagctaatggcgcggggcgatgaaggacaatcatggtatgcccctttgttgggaggcagtgctttagatgctggtgaaccatgggttttcacagataataacggtgagtggacgtttgttggggcgggggatgtaagttgtgaatccccgagtgccgttattgcattgcctgcagagatggcagaccaatctttgccgcacgcatcacgtgtattgggagccgttggtgcaccgattgcgcaatctttgtatcacgtcaaggagactggtcgatatacgtttggccagaatgtggtgcaactcggggtggcgagtgagccgaacaaggaatacgtatggcaaggtgaagagttgccttatcagactttgccaaccaagtgttttatcggaaaaccaaacttgtttgccctttcttcgcaagggatgcaacaacggattccagtagaccgtttgcgctggtatgacggtacaaaacagcaatggagtgcgttggaaactttgccatttgggcaaagtgaagtggcctatattgaggatgggcgagttaaaaagcgttttcgattggccagtttgccgaatgatatcgagattgagttttttccaggtagccagatcaatcgtggtcaaattgttatttcatcatcacgtccgccgatggttgccttggcacaatctgcggtcggcctgcttgattaccaagtctcgaaagcatgtgatgcagtgacgattgatctgttttgtgctcaggagcaaccgccagctgtgctggacattgatctttggtggcaggaaaagccgaaagcaatctcgctgaccttaccatttccaagtaaaggtatttgtttattggatgccaaccaacaattggtaccgtgccacagcgaattgctggtggataagatcaatgggtatgagttgtatggctatggtgttgacggtgaaatagagctgcaatttttgctaaaagcccaagatgttcgcggggcattcagtcgaagtgcatttttcagtgccgttttgccttctgttgacgtgttggtttcaggcttgtctttgtccagtttccgttccgaaattcaggcgctgtttgccctttcatcgagtttggatgcgaaagtccaactgacggtgtcccatcatgggcaggcattgtacacgtgtgcgttatcagtgtatgagtgtgcgcttatgccaaatcgagaaagcaactgtgtggcgctagctcagacgacagatgacaaaggtacaccagaactctacaccatccccttggatagaccggaacacccaccgttagcgctaatgcctgctcctgtgacagatggcgcttcgatgcattggttatttccgcaagaggaaatagaagccggtgcgtggctgatttatagcgataaccctcagtttggactgcgtccgctgatgtggagtaaagacttagagtgtttgcctgcaccaagcaacgggtttgaaatggcggcgggcatcggtcgtcgtgcggacagactagaagcgtttgcctcggtagcattagaaatggcatacgactttacccgtcctgaatggaaatatgcgcgcacattactggctttcgaccatgtcccattaaccacgtttgacttgtggcgtggagtattacgtcaacctgaattcatgttggcactgttgctgaatgccagcaagaaagaaattgatcaggtctggaaaatggataagcagttcccgctgctttggtatgcattgaaagcgacttctgccgtaaaagtgacggaggctttctatcactatttgcttgagcgtttgggcgaagatatggcggatgtagcgcaattgcggattcagaagaagttggctgagctggtgtcttatttcccagggttggcgccacttgccaagctattgcaatttaagctgggcatggttgagcagaaaccgtcactggtacccgctgcatatgtgcagcacttgttcgattgtcgaaatgcgctttctcagcgccagtctgatgtatcgtggccagcgattttcgccgatcacatttttcagtctgtgatgaaaaatattaacgcgcaattggttcaactttgtttaacgaccaagtatggattcaaaaataatgtgatgaatgcgccagtgttactcgcgctggcaacgagcaatcaagctgagttgacgatgacgccagaagtggtgcatgcgattcgagaatatcgtcgatttgaccctgagtattttgatgacagctttgcattaacccagaaaatgatcattggcttgctggctatttaa

SEQ ID NO: 30374 - DNA, 6321 bp, Yersinia bercovieri
atgactacacgctacttttcttcactcattgaacaatcactctctcgctcaacagaagcaacgcttagcatcatgggtgttacgaatcctcagctcagagaacatcttgcccttcaaatgagggcagattgtggcaaagcaggttctttccttgcgtctccagtatttgaacagacatttggctgggaagaatcaaaatacaccatgaaaatgctggcaacggagaaaacattgcttagcaaaaaggtaattgactctctggatagtgaacaaaatggccgctatcgctttggcgctaactggaaaccgtttacccaccagttggctagctgggaatcattactcgagaaaaaacattcggttgttgttaccagcgggacaggttcaggtaaaacagaatgcttcatggtgccagtactcgaggatctttatcgtgaattacgcgatagcggcaatcaaccgctagtgggagtaagagcattattcctctacccacttaatgctctgattaattcgcagcgtgaacgcctggatgcatggactcgtggatttagttcagggattcggtactgcctatataacggcaacacagaagaattgcatgcctcggtaaaaagcgagcaggcaaacaagcctaatgaagttttatcacgtgagaaaatgcgagaagagccagcaccaatactagtgacgaacggtaccatgctggaatacatgatggttcgtcaggttgatgctccaataattcagcaatcgaaagcagaaaaatcattacgctggatagttctggatgaagcgcatacctatgtagggtctcaagcagccgagcttgccctacaacttcgtcgtgtaatgactgctttcggtgtcacgcctgatgatgttcgttttgttgcaacgtcagcaaccattgcaggaagtgactcagaaaagcagctaaaaaaattcttatcggaactgtcaggagtaccacaggaacgtattgatgttttgggaggcaatcgtgttattccagaacttgatgcatgcaaaaattatctcgtcacacttgatgagcttgagcatataccagactcaggtaacgaaggaattagctttgagcgttatagtgcattaacacactcaccggaagcacgctatttacgagagatgctggttagccaaccacgcccagtgaaacttgatgtaatgacgaaacgcttaaacgagctgacaaagaatcattacacgcaacaagaaattttacgctggatagatctctgtacaggcacaagtttaaacgcacaagatccggctttccttaaagtaagagcgcatattttccaacgtaatacccaagggatatgggcctgcgcagataagcattgttcagcgaagcacaacacggcactggaaaaaaactggccttttggttacgtgtatgtgaatcagcgacaaaattgccattgtggtagccctgtttttgagcttgcgttctgtaatgagtgcaacgaaccgcacctgttggcgaaggataaaaaaggtaagctcgtacagtgggacaataaaggtggggatgaattctcgctgcatgatgacatcccagatgactttgaaacatcgggggagaaagttcaaaaagaacatgtattccaggctccgcaaattattgcgccggaatgcaatactgaggccggatatataatccagcggctcgatcgtaatacccgcagcattggcgttgttcataaagacgccatcactctggcaattaacgaaaacgaacagatttgcagcgccagcaattgtggctataaaggcgggaaaggtcagtccccctttagacgcgctttgctgggaggtcctttttatgtcacgaatattgtgcccacggtgttggaatactgccaggatttcgccaatgatgaaggtaaagagggcgtaggcccactatcattgccggggcgaggacgacgactaattacctttaccgatagccgccagggaacggcacggatggcagtaaggatgcagcaagaagctgagcgtagtcgtttgcgcggtagtgtggtggagttactttcctggcatcagagaaaacaggctgtaaatactcctaatgcactggccgatgtaacgaaactggttgagatggctaaacaagccagagatgaggcgaaaaacctgcgtgactggggtatgccggaagaggcaattctctcagaagaaaaagcagaacgtattgaacaggctatacaaaaagcaacaggtggaaaagttaatatcgttttaacttcgctgacctggcaggagatgattaatgagcttaaagataaggcagatatcaaaggctcgattctgcagtacaaccactatcttaaacctgagatttttactgagaacagtggacctctgaagctttcagagatgcttctatttcgtgaatttatgcgtcgaccgaaacgaaccaacagccttgaaacacaaggactggtacaggttggctaccaagggttggagaagctacataaaacccctgttcactggcatgaacaagggcttactctggatgattggcgtgattttctaaaagtcacactggatttttatgtcagagaaaacaacttcattcaactggatttagaactgaagaactggattggcagccgtttctcttcgaaatttgtacgcaaccctgaatcaaaagaccctgacgataaccaagtcaaacgttggccccaaattcgtcatggcaatgttacccatcgcttggttaagctactaatactcggggcaaaattcagcaccgtaaacactgttaccatcgatatagttaacgcatggttgaaagaagcctggctcgaattaaccggccctctggctgtgttaaagccagacggtaaccgtttttacttgccgaaagaacatctgacattctccttgattcaaaaggcgagtatttgccctgttaccaataaattattggataccactttcaaaggactcactccttacttacccagacatatacagtttgaacgcctgacaaatacgcaatatagcgcctatatggcacaggaagtaacactacctgaagtctgggaacacgatcattcacagttggattatgtcgaagggttggcgcaaacccgggaatgggtatcacaagatccgctagtagctcatttacgctcgcaaaacgtctggacggatattaacgaccgcgtagtggagggaggcttttactatcgtactgctgagcattcagcacagcaatcagcggatcgtctgcaaagctacgaaaagatgtttaaaaacgggcagcttaacgtccttaactgttccaccaccatggaaatgggcgtggacattggcggtatttccgccgtaataatgaataacgtccctcctcatcctgcaaactatttacagcgtgcggggcgggccggacgtagtaaagaatcccgcgcaatctcctacacgctgtgtaaaggaaaccctcacgatcagcaggttttcgccaatcctctctggccatttgagaccgtgattccagcaccgatggtggcaatgaactcagaacgattggtacaacgccacgttaattcgctactactttcagaatacttgtgccatgtggtgggagaaactaagaaagagaaaaccaatctgaatagcgcgtggttctttggtgaagagtttgggcagtctgtatgtaacagctttaagatttggcttgaacgccccgccctgataattgatgacgcgcttgagcttctggtaaagggtaccgcgttaaatgctgcaagaccggaatttttgcgggaaaagactttccgtgcgattactggcttacaaaaacgttggcaggggattttccacgatctcgtgaaacaagaacatgaatcacagccaaatactccgtatcgtaagcgcctggaactggagaaaaaacggcattgtgatgaatacctattgcgcgaccttgcagcgcgaacgttcctgcctggctatggtttcccgacggatgttgtgaactttgataacttcaccatggaagactatgtccgtgagaaaacgcataaaagccgtaataagagcgaccgtgaagataacgtttcacgttataaaggactgccttcacgcaacctgtctgttgccattcgtgaatatgccccaggagctgagatcattctggacggacgtgtgttccgttcagctggcgtatcactgcactggcacaatctcaatgctgataccaatgaagcccaacggttggaccgcgcttggcgttgccagaaatgcggtacgttaggctatgaagaaggtattggtagctctgtagaattattctgcaccaaccgtgactgcggtgagcgaattactcgtgacaacactcgtcaagtgctgcagccagccgggtttgtcacagatgcttatgacccggtaacgaataacattgaaacgatgaagtttatcccggtagttccggcatgggtatttgttaaggcggagcgtttaccactgccaaacccagagatgggctttatggcttcaggcgctaatggtcatgtattccaacaaagtatgggtgaaggtggacatggttatgcactgtgcctgagctgcggtcgcgcggagtcgatgataagcgaaaaagacgcgccaaaatcaatggaggcgcattatccgccacgtccaggaaaagccgaccgtgacagccagaatcagcgaattatttgcccaggctctaccgcgttaaataccaaagtcacccttggagcgttagcgcgtaccgatgtatttgaactgattttacgtcgtccacaggacggcgagtatatccctgatagctcagaagaagggcgtattgttgctatgacgctggctgttgcgctgcgtcgggcgcttgcgggtgtactgggtgtttctgctgcggagttgggctatgcggtgcgcccggtcaggctggagagtgaggaatcagtactggcagttcagctttacgacgtcatcagcggcggtgcggggttcgcttccagtgcaccattgcatatcgaagcgatactgcagggaatggtcaaacagctaggatgcgcccactgcgataccgcctgtagcgattgtttactcgattcgcaaacgcgtcacgatcatgaccatctggatcgcaaagccgcactggcctggctaggggatgatttcagccactatattggtttgccagacgaggagaaattctcgctacccgatgcgcagtattgccctggtacaattgaggatgcagtccgtcgcgcaattaacgaaggggccgataaacttacgctgtggatgaatgggccgctcaacgaatgggatttatatgcccgacagttccgcgcggcaatccagaactaccggcttaaagacagtgtcgcggttgagattgtcattcccgctagtattgacgatccggaggtgttgcacgaactggcgcagtttgcggctattggcgtgcggttgtgccatgccgaacaggaagtgtcattccctattgtggcgcagatcgctttcgccgatcgtgtcataacgctggtatcacgcagccagcaagccacggtgcctgggccgcactggcatcagaatgacgagctggtggttcgcagccaatactatcgccctgttgctctgcgtgggtttgaactaccagccacgacagtgaactatagtgagctggtgaaagacattcaaatccataaagagttgaatggcccgttttcacagtttggtcaacgcttctgggatgtactttctaacggccatgaaaaagcacaaaacctgatgaagacaaatcggattacccatattcactataccgatcgctatctgcaaaacccggttgcgctggcgctgctgagtgctttacttaagccgctgaaaaccttaatgaccaaagatgcggaagtggtgattgataccttattcaaaaacaaagatcgtccaggaaatcgaccttcccacgattggatgagtgaagctgattttcaggattttgctgaccagtggtttgctgcatcaataggtaaggcggctgacataactgtgttcgactactcacgagatattccacatcaccgtaagttgacagtgaactttgataatggccaggtgctgaagatccgctttgatcaggggatgggctactggcgtatcgacttcccatatgtctggcgcagctttgacttcaatgatgatgttacttctcagctccacaaaatggcgaaagcttgtatggaaggaaaagtgattaacggagaggaaaactggtcaacggatgtggtagttgaagtgatggaaccttaa

SEQ ID NO: 30375 - DNA, 3303 bp, Yersinia bercovieri
gtgagtcgatcagaatacatttatctaattaagtgtacttcttggctaactaaatttctaacccaccgtggattgaaggttacagatagccgaccgttatttgagtaccatgcaaccagtgatgagtatgaagaactaaaacggttactccgcgatgtagggcaggctgaaggacttaaaaacgataaaggttacgcagcgtgttttacgttatttagcgccgaatggtaccgaagggattatgagcgaattcatggctggagttgggagcctatctataaaactctggatatatctctatccgccccggaactgagtcttattgtaccgaaaggtcttgaagattactggagacgcccagttcgcttttacgactcagaacgacgcaactttttaggatctttgttcagtgaaggcggcctgccattcaagctattgaaagaatcggatagccgttttcagtctgttttttctagaattcttaatcaatacgaccaatctctatcgttaggttattcagttttagctttagtacaagcggttgtcgaaaagtcgcagcttccaactgtgtttaaggaagatacgtcagttgagcttattggtcgtatggctgatcagcttatttcacttgttcagacttacgacctcagtaatcattcagaacccgtcaacgaacttgaccgtgttcatcctaaatggcgggatagtttcccaatgcccttagatgatgaaactggcaccagtttccttaatggccttttgcgcacagccactgttgaaactaaacctcgattacaaaaaaaaagcaaaacaactggctgtaatttctattggtcagaacaacatcctgatgagattcaagcacatattttccttccaaatgaattaacgtttgctatttccagtgagccatcaacgactcgtttcgaacttgctgtttatgaagatggtgaagaagtcgccagtctggggcccgcgtatgccaggcttgataaaacgcaggcgatcgtcaggctccgtaaaagtgaagtgagatttgtaagacaacaaacaaccgcaagcctatcgttggtcgctcgagcgggtggcatcattgtcggttctatcaagctagatagaggagaaattgcagttggagatgttcctttgacgtttgtgcgtgacgaggatcgctggttattacaaggccaggcttcctgtagcgtgcatagcagtgatgtactcatcattcttcctacggaaggccgtctggcttcgaaacatgaagattgttcttctgatattcgggcgctggaacaccctgttttgtctataaaagggcgacaggacgtcatttttgaaggtaacgaaacgtatagaattcgaacaggtcgtgagcaggtaaaatatcctgatttagctttacagggaaatcagttagcttggttatgcagcccctatgaaacatttgctggaatacccagagtcattcacaagtttgccacagcacagagaattgaatacgaacgtttcctaagcggcaaaagtattgataaatgtgatttacatgaaacaatgggggcacattacatttcgattcgaaatgaagataatgaaacattattacgccgaaaagtagggattctaccttcggattttcagctagaaattaaaaacagagaacaagcaaacgagggggtgataattatttccactcaacatccttgtttatatagattaaaggataaaacgctcgaagttggacgtagcaaatcagcaaataaaacggaaataatgattaaagcggagggagtgccacctacttccgttgtattgcaggtaacccctaatcttgctggtaatcccatcgatattattctgcctttcccaacaaagggttgtttggtacttgatgttaatggccaacacctacgcaagaatataacaattaatgatctgttggggaccagagcatttctctttggaaaaaatggcgagccagccagattccgccttgaactgcgcctaatgtccagagcgagactgcaggtgtggtatgaatggcgttataccgcaggcgaacgtccagttgaactcaatttgtatagtctaagagaacatattgagaacttgctctctctggagaccggcattgaccagattgtggaaatgcgtatagatggcgcagggagcgtacttacctggcaaattcgacgatacaaatacagccttaactacgactatgaaaggcaggttctttttagcaactcagtgaatactcactccgggcagattccttcgccagtaatcatgttgctaagcgaacctgaaagaaagcctgtttctatcacttcgcgaatgagcgaaggtgtaccagttggtgaatttgagctgagctctgtaatacagaagaatggcccctggctggtagttcctggaaaaggtgaagaagccgcttttaggccatgttttattcgcggtgaaccaccattaccaactgaagttcacgccatccaatcaatgcaaaaagcgacacagctttttaaccctcggtcagatgtgaatacaatcaccttggttctcgatcaaatggcaagtagcccctcgcattcaggctggcagttcttgcgaagcttgtacgagcaatacggatatttacctctggccactttcgaagtatggcgagcacttgttcaacatccgcaagcgttggcaatgtcattgtttaaatttgaaatgtctgttgaatatctcagccgcattgaaaatgaatttcctattttctgggagtttttaccaatttttgaaataaaaggggcagcgaataggttttgtactttcctaacccataaaggtgcaccagaagaaatgcagaaaagattgctgaataaaatgtatcagcaattgggaactatttttccgacctatgccaatgaagtccaagagtggttaagtttagatttacaaccacgtccaatacctcattcgatgatgagagaaattatacaaaattggtatcaggatcttctgcgtgagcatagtgaatcaagctggcctgaatatggtggctctcagctttatcactggattttgtcacaacaagattctgtagttgatgtttctcctgaaacaagagatcgctactccgttgcttggttacccgtatttgctgcagcggttgccagcggcaaaacgacatttgaaagtatttttggccatgagccaggcaccttatttttcttaagacaagtcagagattttgattcacgttggtttaattcgattttccagtacagcttattgcgtaatgttgccgaaaaataa

SEQ ID NO: 30376 - DNA, 6321 bp, Yersinia enterocolitica
atgactacacgctacttttcttcactcattgaacaatcactctctcgctcaacagaagcaacgcttagcatcatgggtgttacgaatcctcagctcagagaacatcttgcccttcaaatgagggcagattgtggcaaagcaggttctttccttgcgtctccagtatttgaacagacatttggctgggaagaatcaaaatacaccatgaaaatgctggcaacggagaaaacattgcttagcaaaaaggtaattgactctctggatagtgaacaaaatggccgctatcgctttggcgctaactggaaaccgtttacccaccagttggctagctgggaatcattactcgagaaaaaacattcggttgttgttaccagcgggacaggttcaggtaaaacagaatgcttcatggtgccagtactcgaggatctttatcgtgaattacgcgatagcggcaatcaaccgctagtgggagtaagagcattattcctctacccacttaatgctctgattaattcgcagcgtgaacgcctggatgcatggactcgtggatttagttcagggattcggtactgcctatataacggcaacacagaagaattgcatgcctcggtaaaaagcgagcaggcaaacaagcctaatgaagttttatcacgtgagaaaatgcgagaagagccagcaccaatactagtgacgaacggtaccatgctggaatacatgatggttcgtcaggttgatgctccaataattcagcaatcgaaagcagaaaaatcattacgctggatagttctggatgaagcgcatacctatgtagggtctcaagcagccgagcttgccctacaacttcgtcgtgtaatgactgctttcggtgtcacgcctgatgatgttcgttttgttgcaacgtcagcaaccattgcaggaagtgactcagaaaagcagctaaaaaaattcttatcggaactgtcaggagtaccacaggaacgtattgatgttttgggaggcaatcgtgttattccagaacttgatgcatgcaaaaattatctcgtcacacttgatgagcttgagcatataccagactcaggtaacgaaggaattagctttgagcgttatagtgcattaacacactcaccggaagcacgctatttacgagagatgctggttagccaaccacgcccagtgaaacttgatgtaatgacgaaacgcttaaacgagctgacaaagaatcattacacgcaacaagaaattttacgctggatagatctctgtacaggcacaagtttaaacgcacaagatccggctttccttaaagtaagagcgcatattttccaacgtaatacccaagggatatgggcctgcgcagataagcattgttcagcgaagcacaacacggcactggaaaaaaactggccttttggttacgtgtatgtgaatcagcgacaaaattgccattgtggtagccctgtttttgagcttgcgttctgtaatgagtgcaacgaaccgcacctgttggcgaaggataaaaaaggtaagctcgtacagtgggacaataaaggtggggatgaattctcgctgcatgatgacatcccagatgactttgaaacatcgggggagaaagttcaaaaagaacatgtattccaggctccgcaaattattgcgccggaatgcaatactgaggccggatatataatccagcggctcgatcgtaatacccgcagcattggcgttgttcataaagacgccatccctctggcaattaacgaaaacgaacagatttgcagcgccagcaattgtggctataaaggcgggaaaggtcagtccccctttagacgcgctttgctgggaggtcctttttatgtcacgaatattgtgcccacggtgttggaatactgccaggatttcgccaatgatgaaggtaaagagggcgtaggcccactatcattgccggggcgaggacgacgactaattacctttaccgatagccgccagggaacggcacggatggcagtaaggatgcagcaagaagctgagcgtagtcgtttgcgcggtagtgtggtggagttactttcctggcatcagagaaaacaggctgtaaatactcctaatgcactggccgatgtaacgaaactggttgagatggctaaacaagccagagatgaggcgaaaaacctgcgtgactggggtatgccggaagaggcaattctctcagaagaaaaagcagaacgtattgaacaggctatacaaaaagcaacaggtggaaaagttaatatcgttttaacttcgctgacctggcaggagatgattaatgagcttaaagataaggcagatatcaaaggctcgattctgcagtacaaccactatcttaaacctgagatttttactgagaacagtggacctctgaagctttcagagatgcttctatttcgtgaatttatgcgtcgaccgaaacgaaccaacagccttgaaacacaaggactggtacaggttggctaccaagggttggagaagctacataaaacccctgttcactggcatgaacaagggcttactctggatgattggcgtgattttctaaaagtcacactggatttttatgtcagagaaaacaacttcattcaactggatttagaactgaagaactggattggcagccgtttctcttcgaaatttgtacgcaaccctgaatcaaaagaccctgacgataaccaagtcaaacgttggccccaaattcgtcatggcaatgttacccatcgcttggttaagctactaatactcggggcaaaattcagcaccgtaaacactgttaccatcgatatagttaacgcatggttgaaagaagcctggctcgaattaaccggccctctggctgtgttaaagccagacggtaaccgtttttacttgccgaaagaacatctgacattctccttgattcaaaaggcgagtatttgccctgttaccaataaattattggataccactttcaaaggactcactccttacttacccagacatatacagtttgaacgcctgacaaatacgcaatatagcgcctatatggcacaggaagtaacactacctgaagtctgggaacacgatcattcacagttggattatgtcgaagggttggcgcaaacccgggaatgggtatcacaagatccgctagtagctcatttacgctcgcaaaacgtctggacggatattaacgaccgcgtagtggagggaggcttttactatcgtactgctgagcattcagcacagcaatcagcggatcgtctgcaaagctacgaaaagatgtttaaaaacgggcagcttaacgtccttaactgttccaccaccatggaaatgggcgtggacattggcggtatttccgccgtaataatgaataacgtccctcctcatcctgcaaactatttacagcgtgcggggcgggccggacgtagtaaagaatcccgcgcaatctcctacacgctgtgtaaaggaaaccctcacgatcagcaggttttcgccaatcctctctggccatttgagaccgtgattccagcaccgatggtggcaatgaactcagaacgattggtacaacgccacgttaattcgctactactttcagaatacttgtgccatgtggtgggagaaactaagaaagagaaaaccaatctgaatagcgcgtggttctttggtgaagagtttgggcagtctgtatgtaacagctttaagatttggcttgaacgccccgccctgataattgatgacgcgcttgagcttctggtaaagggtaccgcgttaaatgctgcaagaccggaatttttgcgggaaaagactttccgtgcgattactggcttacaaaaacgttggcaggggattttccacgatctcgtgaaacaagaacatgaatcacagccaaatactccgtatcgtaagcgcctggaactggagaaaaaacggcattgtgatgaatacctattgcgcgaccttgcagcgcgaacgttcctgcctggctatggtttcccgacggatgttgtgaactttgataacttcaccatggaagactatgtccgtgagaaaacgcataaaagccgtaataagagcgaccgtgaagataacgtttcacgttataaaggactgccttcacgcaacctgtctgttgccattcgtgaatatgccccaggagctgagatcattctggacggacgtgtgttccgttcagctggcgtatcactgcactggcacaatctcaatgctgataccaatgaagcccaacggttggaccgcgcttggcgttgccagaaatgcggtacgttaggctatgaagaaggtattggtagctctgtagaattattctgcaccaaccgtgactgcggtgagcgaattactcgtgacaacactcgtcaagtgctgcagccagccgggtttgtcacagatgcttatgacccggtaacgaataacattgaaacgatgaagtttatcccggtagttccggcatgggtatttgttaaggcggagcgtttaccactgccaaacccagagatgggctttatggcttcaggcgctaatggtcatgtattccaacaaagtatgggtgaaggtggacatggttatgcactgtgcctgagctgcggtcgcgcggagtcgatgataagcgaaaaagacgcgccaaaatcaatggaggcgcattatccgccacgtccaggaaaagccgaccgtgacagccaaaatcagcgaattatttgcccaggctctaccgcgttaaataccaaagtcacccttggagcgttagcgcgtaccgatgtatttgaactgattttacgtcgtccacaggacggcgagtatatccctgatagctcagaagaagggcgtattgttgctatgacgctggctgttgcgctgcgtcgggcgctctcgggtgtactgggggtttctgctgcggagttgggctatgcggtacgcccggtcaggctggagagtgaggaatcagtactggcagttcagctttacgacgtcatcagcggcggtgcggggttcgcttccagtgcaccattgcatatcgaagcgatactgcagggaatggtcaaacagctaggatgcgcccactgcgataccgcctgtagcgattgtttactcgattcgcagacgcgtcacgatcatgaccatctggatcgcaaagccgcactggcctggctgggggatgatttcagccactatattggtttgccagacgaggagaagttctcgctgcccgatgcgcagtattgccccggtaccatcgaggatgcagtccgtcgcgcaattaacgaaggggccgataaactcacgctgtggatgaacgggccgctcaacgagtgggatttatatgcccgacagttccgcgcggcaatccagaactaccggcttaaagacagtgtcgcggttgagattgtcattcccgctggtgttgacgatccggaggtgttgcacgaactggcgcagtttgcggctattggcgtgaggttgtgccatgccgaacaggaagtgtcattccccattgtggcgcagatcgctttcgccgatcgtgtcataacgctggcatcacgcagccagcaagccacggtgccggggccacactggcatcagaatgacgagctggtgattcgttgccaatactatcgccctgttgctctgcgtgggtttgaactaccagccacgacagtgaactatagtgagctggtgaaagacattgaaatccataaagagttgaatggcccgttttcgcagtttggcaaacgcttctgggatgtgctttttgacggccatgaaaaagtacaaagcctgatgaagacaaaccgaattacccatattcactataccgatcgctatctacaaaacccagttgctctggcgctgctgagcgctttgcttaagccgctcaaaaccttaatgaccaaagatacggagatagtgattgataccctattcaaaaacaaagatcgcccaggaaatagaccgtcccacgactggatgagtgaagctgattttcaggattttgctgatcagtggtttgccgcatcaatggataaggcggctgaaataacggtgttcgactactcacgagatattccacatcatcgtaagttgatggtgaactttgacaatggccaagtgctgaagatccgctttgatcagggaatgggttactggcgtatcgacttcccctatgtctggcgcagctttgacttcaatgatgatgttacttctcaactccacaaaatggcgaaagcttgtttggaagggaaagtgattaacggagaggaaaactggtcaacggatgtggtagttgaagtgatggaatcttaa

SEQ ID NO: 30377 - DNA, 3303 bp, Yersinia enterocolitica
gtgagtcgatcagaatacatttatctaattaagtgtacttcttggctaactaaatttctaacccaccgtggattgaaggttacagatagccgaccgttatttgagtaccatgcaaccagtgatgagtatgaagaactaaaacggttactccgcgatgtagggcaggctgaaggacttaaaaacgataaaggttacgcagcgtgttttacgttatttagcgccgaatggtaccgaagggattatgagcgaattcatggctggagttgggagcctatctataaaactctggatatatctctatccgccccggaactgagtcttattgtaccgaaaggtcttgaagattactggagacgcccagttcgcttttacgactcagaacgacgcaactttttaggatctttgttcagtgaaggcggcctgccattcaagctattgaaagaatcggatagccgttttcagtctgttttttctagaattcttaatcaatacgaccaatctctatcgttaggttattcagttttagctttagtacaagcggttgtcgaaaagtcgcagcttccaactgtgtttaaggaagatacgtcagttgagcttattggtcgtatggctgatcagcttatttcacttgttcagacttacgacctcagtaatcattcagaacccgtcaacgaacttgaccgtgttcatcctaaatggcgggatagtttcccaatgcccttagatgatgaaactggcaccagtttccttaatggccttttgcgcacagccactgttgaaactaaacctcgattacaaaaaaaaagtaaaacaactggctgtaatttctattggtcagaacaacatcctgatgagattcaagcacatattttccttccaaatgaattaacgtttgctatttccagtgagccatcaacgactcgtttcgaacttgctgtttatgaagatggtgaagaagtcgccagtctggggcccgcgtatgccaggcttgataaaacgcaggcgatcgtcaggctccgtaaaagtgaagtgagatttgtaagacaacaaacaaccgcaagcctatcgttggtcgctcgagcgggtggcatcattgtcggttctatcaagctagatagaggagaaattgcagttggagatgttcctttgacgtttgtgcgtgacgaggatcgctggttattacaaggccaggcttcctgtagcgtgcatagcagtgatgtactcatcattcttcctacggaaggccgtctggcttcgaaacatgaagattgttcttctgatattcgggcgctggaacaccctgttttgtctataaaagggcgacaggacgtcatttttgaaggtaacgaaacgtataggattcgaacaggtcgtgagcaggtaaaatatcctgatttagctttacagggaaatcagttagcttggttatgcagcccctatgaaacatttgctggaatacccagagtcattcacaagtttgccacagcacagagaattgaatacgaacgtttcctaagcggcaaaagtattgataaatgtgatttacatgaaacaatgggggcacattacatttcgattcgaaatgaagataatgaaacattattacgccgaaaagtagggattctaccttcggattttcagctagaaattaaaaacagagaacaagcaaacgagggggtgataattatttccactcaacatccttgtttatatagattaaaggataaaacgctcgaagttggacgtagcaaatcagcaaataaaacggaaataatgattaaagcggagggagtgccacctacttccgttgtattgcaggtaacccctaatcttgctggtaatcccatcgatattattctgcctttcccaacaaagggttgtttggtacttgatgttaatggccaacacctacgcaagaatataacaattaatgatctgttggggaccagagcatttctctttggaaaaaatggcgagccagccagattccgccttgaactgcgcctaatgtccagagcgagactgcaggtgtggtatgaatggcgttataccgcaggcgaacgtccggttgaactcaatttgtatagtctaagagaacatattgagaacttgctctctctggagaccggcattgaccagattgtggaaatgcgtatagatggcgcagggagcgtacttacctggcaaattcgacgatacaaatacagccttaactacgactatgaaaggcaggttctttttagcaactcagtgaatactcactccgggcagattccttcgccagtaatcatgttgctaagcgaacctgaaagaaagcctgtttctatcacttcgcgaatgagcgaaggtgtaccagttggtgaatttgagctgagctctgtaatacagaagaatggcccctggctggtagttcctggaaaaggtgaagaagccgcttttaggccatgttttattcgcggtgaaccaccattaccaactgaagttcacgccatccaatcaatgcaaaaagcgacacagctttttaaccctcggtcagatgtgaatacaatcaccttggttctcgatcaaatggcaagtagcccctcgcattcaggctggcagttcttgcgaagcttgtacgagcaatacggatatttacctctggccactttcgaagtatggcgagcacttgttcaacatccgcaagcgttggcaatgtcattgtttaaatttgaaatgtctgttgaatatctcagccgcattgaaaatgaatttcctattttctgggagtttttaccaatttttgaaataaaaggggcagcgaataggttttgtactttcctaacacataaaggtgcaccagaagaaatgcagaaaagattgctgaataaaatgtatcagcaattgggaactatttttccgacctatgccaatgaagtccaagagtggttaagtttagatttacaaccacgtccaatacctcattcgatgatgagagaaattatacaaaattggtatcaggatcttctgcgtgagcatagtgaatcaagctggcctgaatatggtggctctcagctttatcactggattttgtcacaacaagattctgtagttgatgtttctcctgaaacaagagatcgctactccgttgcttggttacccgtatttgctgcagcggttgccagcggcaaaacgacatttgaaagtatttttggccatgagccaggcaccttatttttcttaagacaagtcagagattttgattcacgttggtttaattcgattttccagtacagcttattgcgtaatgttgccgaaaaataa

SEQ ID NO: 30378 - DNA, 6330 bp, Yersinia enterocolitica
atgaaagtccagcaactacattatgcgccgcttttaaatcaacttcatcagcgtgcagtgcgttcggtggtgagccaactggcattgcgtagcaaatcgctgactgagtatctggaatctcagtacttcagagcaccaggacaacaaggttctctgcttgccgatcctgtatttgaaagtacttttggttggatgcctgccagtgaaacaatggatgggcttcgagacaagctcatatctaaccatttggttaatgcactcagtcatgcaccagtgcccttttcccaccagctaacagcctggcgtactattcttgaagataaacagtccttattagtgagcagtggcactgggtcaggaaaaacagaatgtttcatggtctctgtactggaagatctgattcgtcagcaagaggctcataggcagctactgataggtactcaggctatttttttgtatcctcttaatgccctaatcaacagccaacaggaacggttacgtgactggaccaaagggtttaaaggaaaaattcgttttgcgctttataacggtgaaacgaaacacacgaaatatgaggttcaggaagagcagaaaaaagttccagaacaatctttgagtagggaggaaatatacgagtccccaccttctattatggtgacgaatactaccatgctggaatatatgcttattcgacgtaaagatgctcctatcgttgataaatcgcaggggatgttgaaatatatcgttcttgatgaggcgcatagctatattggttcccaggcggcagagctggcattattactgcgccgtgtcatgcaggcctttaatgtcggtccagggactgataatcctgttcaggtcattgcaacatcggccacgattggtgaggattcagtcgagggcaatcaagaattggcaaaatttgtcgctgatttggccggtgtgactgagcggaatgtaaaagtagtacgtggttaccgtcagatcccacctatatctgatacgcatattcgagctgaatttccattgtcattaacttcacttaataatcttaccccgacagaactttatcagcagctttgtcagtaccgagtgacacaagaactacggcgagccttaactcagcaaaagaacccagcagtgcgtttaagtgaattactggcgattgctcggcatatttggcctgaaatttccaacagggaattattgcaattacttgatctgatggctaaagcacgtgcagatacatcagataattcactggcttttacccctttacgtatgcacgggtttattcgaactctggctgggctatgggcgtgttcaaatcggcaatgtgcccataaatctcatgaattacagaataaggattggtcatttggacaaatttggtctgagcaacgcctgttttgtgattgtggtgcaccagtcttcgaagtactccgttgctccggctgtggcacagcttatttatcggcaaaggaagaattaaaaaacgatggcgctacatggttgtctgcacaaccaactgttgccgatgaagacgagtttgctcttgaagtagacttatatcgtgatgatgaagatgaagacagtgaagagagcggtcaccagtttgatcgtcttttagctgataccggtgagaaaacatttgtctcactcgaagagaacagccaagggaaaatagtcagtaattccgcagttggttatgaagtgaatttgctgagaccggaaaaccgtgatgcagggaaatcgacgttttttacttgtatttgctgtggtgatgctgagcggaaaaataaccctttatttcgcccactgcgtttgggggcacctttctttctaagtgacattattccaacgttacttgaattctccccattaccaaaaaacctggaagaacagcaagggcctttcaatggtcgtcggttactgacttttaccgattcccgtcagggtacggcacgaatttctgcacgcttacagcaagatgcagataaatcaaccctcagaaccctttgctatcaagagttagcgaacataacagagcattctgctggtttgagcgacgagcagaaagaattgctcaaaccttatattgcccaattctctttagttccaatatttaagagtgcagtcgaggctttaagtaaggcgataacctcacatgaagtgttaagcccaaatgaaattctcgctttgaataccattacggcagccatcagttcacaaagcgaagcacatgctcaggcaatggaagtgttactttctggttcgggtggtcagaaggttaaatctgtttcctggcaaacattggtcgagcagctatccggtagtgtagacctggctgaccgaatgcgaggtagtttcaaagaaatatctgggcttgatttaaccaaacaacagtttgccgatttttgtctgtacagtgaatttggacgccgccctaaaaatgcatggactttagaaaatttgggtctcgttgctattcattatccttttattgataacgtgaatcgttgtcctcaggattggaaaagccttctgccagatcctgacaagcaacttgccgaatggcgcaatctactgaaaattacccttgatttctttattcgcgaaaacagtgctgtcttttacgagaatgaacaatatccccgttggatgggggcacgtttcccagtaaaaatgctgcaagggccggataaaaaatataaagagcagaagcgtgatcaactttggccccaaattcgggatcgccattacaaccgggttattaagttactggtggctgtattcccagctattcagccagatcaaacttactggaaagatttagttaacaatttaatgaaagaggcctgggatgccatcaggccaaatctacgtcaatttgagtcgggttatcaatttgatattaaagaacaagcttatttttacagcccaaaagagatctggcgttgtccttatacccggcgcgcacttgatgtaactctgttaggtcactcaccttatttacctggaagcgaaggaattgctcctgagaaagccgtattggttgagatgccggaattgccaatgcgtcactggcggttatctggtggcggtgagttgcctagagatgagcggttgcaatggttggaaaatgatccgcaaatcaagagtgctcgtcgtgaaggtgtgtggtctacccgaagtgacaggctagcactgaaagatggctggtatcgtctggaagagcattcggcgcagcgtacaccacaacaaaaccagtttaacgaaaaacagtttaaggctgggaaagtgaacgtgttgaactgctctacgacgatggaaatgggcgtagacattggtggtatgagtttggttgcgatgaataacgtccctcctgctccagctaactatctgcagcgtgcaggtcgtgcagggcgtcgaggtgaatcagcttcagcagcaattaccttatgcaaaaataccgcccatggtatggaagttttcaaagatccactttggccatttaacagtagttccaaggctccacaggtacgctttgagagcgaaagcattgtccagcgccacgtcaatgcgctagtgctcggtctgtttttaagggcggaagtaccggatgcgaccaagctgagttgtaaatggttttttgagggtgaagatagccagtgtcagcgtttcttgaattggatggatggtcaatcagaagcattggctaacaagttgaagcggctggttcagggaacgatattaacgtctctgactgcttcccagctactttcccgtaccaattcaatgatgaagaaagcggagcttcactggcgtaatcaactcgctattttgctgcaaaatattgaatctttgaaagcagacaatattgcctgggaagagactcctgccggtaaagcaattgcctatcaattacgtgattatcgtagcgcatatcttttttcaaaactgatcagtgaagcttttcttcctggacacggtttccctgtgggggtcgttaactttaacttcctgacagctgatgaacttgaaaagcgtaaagctttaaaagccagtcaattggatcagaaagaggggacagagaacttttcacgtagtctcgaaaaactgccaagtcgtgacttgcctacagcattgcgtgaatatgcaccgggtgccgatgtggttttaggcggaaaagtctaccggtccgcaggaattatgctcggtaaagtattggggagtgggcaggagctaaaaggcgaccatcatattccgtggttctggcactgccgccaatgtggtgcggggtctaccagcgcaacatatcctgcaggttgtagccattgtggtgcagaaaaatcactacttaccgtgaggcgctatttgcaaccggttggttttgcgacagatatccgttatcaggcccataatgatgtgtctatgcccgcacaattgccttatcaggaccctcgggtgttggtaccttcagctgtatgggtttctctgccagatacatcactggggcgttaccgcttcagcaatagtggtgagttattccatttcagcgatggtgagttcggtaaaggctatgccatttgcttgtcttgtggtcgcactgagtcacaaacggaagctgaacgcacaccggcaacactcaaaaaccctgcactagaaaacacgcatcttctgttgcgtggcggcagtaatgatcggcagggcagcagcaagctgtgccatggtcatgttcataaagatttgtggctaggttacagcagccgtacagacatggttgaactgcagcttaatgacgaaaacggtttgctgattactgatgatgttgctgcacgttccctggctgtcgcattacgtgaagggttggcgcataaattaggtattgaaaataccgagctgggcgtcgctattcagcaatcccgcgatagtaacaatgcttatggatactcgatttttatctatgacaataacgcaggtggggcaggttatgcagttcaagtaattgatctattcagcgaagtgtttaactacgccaaaaagttacttgactgctcatgcgataaattctgtcatcactgcttactcagttacgacagtcagcactatgtcagtaagttggatcgccatcgtgccttactattgctcaccagtacgcgtttgcagatgttgaaacttgcaccggaatatcaattcttcgggccgggcagccgggttgaaactatccctctaatgctgcgtttatcacagcatcttagctcagggcgttacggcactctctcattggtaatatccggagtgacagaggagtgggattttgcacattggccactattgaaggatgtattgcggtttgcatcctcgggaggcaaggtcgagctgctaatcactaccgcattagctgagttacctgagaaaatacgccatcagttgtcggcattgtcagctatgcctggtaacaaattatgcatccgtcctatcactgagagcctgcttgctcagagtaaaggtcgctggttggcgcaaattgttggtgatgatcattgcctacagtgggctgcaggcattgatgccattaccacccctggtgaaagctggggacagagtgcaacgactcctgttgtatcttgtccggtgcatgttgctaaggtgcttcctggagatgcgctctccccggaagaactgttacctgagttgcctgcgggagctgttcgaatcaatttgtcccaccaacttgatggcccattggacggtttcgggtcacgtttctgggcgcttataagcagtcaacacccattctggaagcgtgctttcaccgaaaaacgtgaagtagctcaggtgcaatatagcgatcgttatgtgaatagtcctttcactgcacgtctgctggccgaacttttgactgaattggtcgaacaaggaatggcagaacgagcggcactctcgatatcggtgaaaaaactcgactacagttcgcgtcaacatgactcattgtttaacgcttggctcaacgagcaagaccgggagcaggtggtgagaacattgctggaagaaggatatctgggccctgcctggtcagggaatatttcatggtttattggtgataaccgaacgactgagcatggccgtgagttaactgtgtcatttaaggatggtagtgaaggttatctactgctggatacggggcttggctactggcgctgccaggggaattcattttttgacttcgaagaacatccctctcggcaagtcgaaatagtcgcttccagtagagcaaatctcgtcgctccggataacggtctgcgaagctatattattgtcgggtaa

SEQ ID NO: 30379 - DNA, 3354 bp, Yersinia enterocolitica
gtgaagacgccaactaatccccttctgctgtggcttaaagaatttctcaaaaaacgtaagctggcactaacagatggtagagctctctatgcctatcgatgtgacgatgtcgaattcgcgaaactggctcaaactcttagcagtcatatccctcgaacctatcccaaaacggtctttatttcttacagcgatgctttgttctgtctttatgcagccgaatttattcgtcggaatcacactgctggccatcccaaatgggatgctattttacagtccataaactggcaaattccatatcagcatcgccagaagcttgtcagtgaaggtatacgctactggaaaagagaagtgaggagtctggggcaagcgtcaggctacttacatacactggcctgcgaaggtggattgccagtgcgtatgatagaaaacgagagtggttatttaataaactactttaggcggatttatcaggctttgagagggtcacaaggtaatgtctcagcagttaagattgcggaagacttgagtgacactattcctggtacaatgcaaaatgagcttgtctatgaagtagcgggtgaattttgctggacgctttctaaacttcttaacgaaagtggtcatcaggggggagatcctattgcctcactacgcaagacattgccaaactggcatcaccaactacctctcgttctcctggaagaaaatgcagcagaaatagtcaggcgtttactttcacaaacatcagaaacccgagtcgcttctggcatcttaatagaaagaatttggatcgatgtcgatgacagttggttctgtgatgcgcgcttccgttttcctgggatgctacgtaatgaacagcttaaagccttatttgaatgtgaaatacaagaagatcaatcccggcttattgtttctgcacaatggaaaaatggtggggcacggctggcaatgttaagccgtcatgaacaccaagactggcgggtcgagttattgccagcagcgacacaaaaaatctcaggcgtggaagcgatgggagaaatatcattaatgctgtttgaaggaccggcactcataggcaaaggcattccgaaaggaggatatgagctgacagaagatcttccatggttttttgaaacaatgaatgagagtgagtcacagctaaaattattcggcatgggctctgtaagttcggttcaagaatctctatttatttcgttgcctacaaatagtcatctggacattagtggggatggcgcgtttgatattccacaggttttgaagaacagtgctcgtagtttaacgaaagtcagtggggtatttagcgttattttacatgatggcgcggtttgtacagttcgtactctccaaccatttgattcatctactgaatatttcattaaaccgtcagaagtcgatctggttaagtctgactatcctgttcatcgggccaagcctaagatagcctggaaaaaggaactgcagcatggaattgttcctgagcacgagctttactggcgttcaatacgttcagggaacactacatggtccccagtctcaactgcaataccgaaagggcaaattgaagtacggcatgtggttaataatgaagtgctattcagtggccgaatggttgttctaccagcagattttgatattaaaattgttcccgactcagcccaaaaaggaattgttactctttccgggattgctgaaacgcgggtggaacattacacaaataatgaaaattatttattaaaaactgactatctggctcaagagtgtatcgttcctttcgatggtaatgtttccaaaaatattacaatagacctgcgtgttacctggcgtgatggttgtaatcttaagctgttattaccctctcctgtggcaggtggtcgatttgttaatcatgaaggtgagacattttctgaaggtattgcatcagtagaccatttacatggggtgagtgctgacttgctaacaatatctccagtgggaaaaggttttctaaatatagagttaaaagatgaaaacccactttctaaaagttatcattttttatccatggatattccattatttactgggcgcaatgaaaacttacaacaaatttctctatatgagaaatataatctcttaaaatcacttctagcgtgttcatgggcgaaaaatagctcattacatcttgatttctacgctgaaaaattaggaaaagtcggttcaacgctaaacgtaaaacgatatgatggtaagtttattgaacgagatgatcgtctacatattgatgttcaggacgcaattagctttccacaagatcgagctagtgaaataattgtacaagcagtttcacttacagatcctgcttcatgcgttatgaccttacagaaagatgcattaggttatgatttttcgtcaaagagtgatagcagtgggccttggttaataattggcaagctagataactatattcgggttgaaccattattaagatggagcgataaattacccgtacacgatgaactgttaataaaatcactttgtgagccggagcgatcaaagcgtaaaaatgagataaaattactgctttccgatataaaaaacaatccattacagcagtctgcttattcaatggtcgagtatttaaaaaaatataaaagctctgatgacttacctctgtatgtgcacgatttgtttaataaactatctagggacccactggctttaattcagctcttaatcacatcctgtttgtctggtgatagtgagcttatttacgatatgcaaaatgaattgccattctcatggggttggattccattcgaacattggaggaaatcttttcatgattgttatgtttctcttgcaactcaatttggtgatgaagcgctggcgttaaatatattacagccatttgttgtatttattagtaatagagcagcgattgaccgtcgattcgcagcgattgccaatatgcttcaaatgaattttaaactatcacaatcagtctgtgtaggaattccatctgttgatcgtgagcagtttaatgaagcaaaacagatgctgctacgtactccagatagctttggccgtgttggaacctttaccaaggaacaatggttaactgctatatcgcctgatctgaaatctatatttaaaaagttttggatcgaagacagttaccaacaaaaatttgagaagctatttaatttgatgttggtcgccgcgttgttatctcataaagataataatgtaatgcaccagctttcttcactattcgaaatacactatcaacaagccccgcaacagttggggatcatttatcagtattattttgagcaagcaggagtttgtcattga

SEQ ID NO: 30380 - DNA, 6321 bp, Yersinia frederiksenii
atgactacacgctacttttcttcactcattgaacaatcactctctcgctcaacagaagcaacgcttagcatcatgggtgttacgaatcctcagctcagagaacatcttgcccttcaaatgagggcagattgtggcaaagcaggttctttccttgcgtctccagtatttgaacaaacatttggctgggaagaatcaaaatacaccatgaaaatgctggcaacggagaaaacattgcttagcaaaaaggtaattgactctctggatagtgaacaaaatggccgctatcgctttggcgctaactggaaaccatttacccaccagttggctagctgggaatcattactcgagaaaaaacattcggttgttgttaccagcgggacaggttcaggtaaaacagaatgcttcatggtgccagtactcgaggatctttatcgtgaattacgcgatagcggcaatcaaccgctagtgggagtaagagcattattcctctacccacttaatgctctgattaattcgcagcgtgaacgcctggatgcatggactcgtggatttagttcagggattcggtactgcctatataacggcaacacagaagaattgcatgcctcggtaaaaagcgagcaggcaaacaagcctaatgaagttttatcacgtgagaaaatgcgagaagagccagcaccaatactagtgacgaacggtaccatgctggaatacatgatggttcgtcaggttgatgctccaataattcagcaatcgaaagcaaaaaaatcattacgctggatagttctggatgaagcgcatacctatgtagggtctcaagcagccgagcttgccctacaacttcgtcgtgtaatgactgctttcggtgtcacgcctgatgatgttcgttttgttgcaacgtcagcaaccattgcaggaagtgactcagaaaagcagctaaaaaaattcttatcggaactgtcaggagtaccacaggaacgtattgatgttttgggaggcaatcgtgttattccagaacttgatgcatgcaaaaattatcccgtcacacttgatgagcttgagcatataccagactccggtaacgaaggaattagctttgagcgttatagtgcattaacacactcaccggaagcacgctatttacgcgagatgctggttagccaaccacgcccagtgaaacttgatgtaatgacgaaacgcttaaacgagctgacaaagaatcattacacgcaacaagaaattttacgctggatagatctctgtacaggcacaagttcaaacgcacaagatccggctttccttaaagtaagagcgcatattttccaacgtaatacccaagggatatgggcctgcgcagataagcattgttcagcgaagcacaacacggcactggaaaaaaactggccttttggttacgtgtatgtgaatcagcgacaaaattgccattgtggtagccctgtttttgagcttgcgttctgtaatgagtgcaacgaaccgcacctgttggcgaaggataaaaaaggtaagctcgtacagtgggacaataaaggtggggatgaattctcgctgtatgatgacatcccagatgactttgaaacatcgggggagaaagttcaaaaagaacatgtattccaggctccgcaaattattgcgccggaatgcaatactgaggccggatatataatccagcggctcgatcgtaatacccggagcattggtgttgttcataaagacagccttcctttggcaatgaacgaaaatgaacaaatttgtagcgccagcaattgtggctataaaggcgggaaaggtcagtccccttttagacgcgctttgctgggaggtcctttttatgtcacgaatattgtgccaacggtgttggaatactgccaggatttcgccaacggtgaaggtaaagagggcgtaggtccactatcattgccggggcgaggacgacgactgattacctttaccgatagccgccagggaacggcacggatggcagtaaggatgcagcaagaagctgagcgtagtcgtttgcgcggtagtgtggtggagttactttcctggcatcagagaaaacaggctgtaaatactcctaatgcactggccgatgtaacgaaactggttgagatggctaaacaagccagagatgaggcgaaaaacctgcgtgactggggtatgccggaagaggcaattctctcagaagaaaaagcagaacgtattgaacaggctatacaaaaagcaacaggtggaaaagttaatatcgttttaacttcgctgacctggcaggagatgattaatgagcttaaagataaggcagatatcaaaggctcgattctgcagtacaaccactatcttaaacctgagatttttactgagaacagtggacctctgaagctttcagagatgcttctatttcgtgaatttatgcgtcgaccgaaacgaaccaacagccttgaaacacaaggactggtacaggttggctaccaagggttggagaagctacataaaacccctgttcactggcatgaacaagggcttactctggatgattggcgtgattttctaaaagtcacactggatttttatgtcagagaaaacaacttcattcaactggatttagaactgaagaactggattggcagccgtttctcttcgaaatttgtacgcaaccctgaatcaaaagaccctgacgataaccaagtcaaacgttggccccaaattcgtcatggcaatgttacccatcgcttggttaagctactaatactcggggcaaaattcagcaccgtaaacactgttaccatcgatatagttaacgcatggttgaaagaagcctggctcgaattaaccggccctctggctgtgttaaaaccagacggtaaccgtttttacttgccgaaagaacatctgacattctccttgattcaaaaggcgagtatttgccctgttaccaataaattattggataccactttcaaaggactcactccttacttacccagacatatacagtttgaacgcctgacaaatacgcaatatagcgcctatatggcacaggaagtaacactacctgaagtctgggaacacgatcattcacagttggattatgtcgaagggttggcacaaacccgggaatgggtatcacaagatccgctagtagctcatttacgctcgcaaaacgtctggacggatattaacgaccgcgtagtggagggaggcttttactatcgtactgctgagcattcagcacagcaatcagcggatcgtctgcaaagctacgaaaagatgtttaaaaacgggcagcttaacgtccttaactgttccaccaccatggaaatgggcgtggacattggcggtatttccgccgtaataatgaataacgtccctcctcatcctgcaaactatttacagcgtgcggggcgggccggacgtagtaaagaatcccgcgcaatctcctacacgctgtgtaaaggaaaccctcacgatcagcaggttttcgccaatcctctctggccatttgagaccgtgattccagcaccgatggtggcaatgaactcagaacgattggtacaacgccacgttaattcgctactactttcagaatacttgtgccatgtggtgggagaaactaagaaagagaaaaccaatctgaatagcgcgtggttctttggtgaagagtttgggcagtctgtatgtaacagctttaagatttggcttgaacgccccaccctgataattgatgacgcgcttgagcgtctggtaaagggtaccgcgttaaatgctgcaagaccggaatttttgcgggaaaagactttccatgcgattactggcttacaaaaacgttggcaggggattttccacgatctcgtgaaacaagaacatgaatcacagccaaatactccgtatcgtaagcgcctgcaactggagaaaaaacggcattgtgatgaatacctattgcgcgaccttgcagcgcgaacgttcctgcctggctatggtttcccgacggatgttgtgaactttgataacttcaccatggaagactatgtccgcgagaaaacgcataaaagccgtaataagagcgaccgtgaagataacgtttcacgttataaaggactgccttcacgcaacctgtctgttgccattcgtgaatatgccccaggagctgagatcattctggacggacgtgtgttccgttcagctggcgtatcactgcactggcacaatctcaatgctgataccaatgaagcccaacggttggaccgcgcctggcgttgccagaaatgcggtacgttaggctatgaagaaggtattggtagctctgtagaattattctgtaccaacagcgactgtggtgagcgaattactcgtgacaacactcgtcaagtgctgcagccagccgggtttgtcacagatgcttatgacccggtaacgaataacattgaaacgatgaagtttatcccggtagttccggcatgggtatttgttaaggcggagcgtttgccactgccaaacccagagatgggctttatggcttcaggcgctaatgggcatgtattccaacagagtatgggcgaaggtggacatggttatgcactgtgcctgagctgcggtcgcgcggagtcgatgataagcgaaaaagacgcgccaaaatcaatggaggcgcattatccgccacgtccaggaaaagccgaccgtgacagccagaatcagcgaattatttgcccaggctctaccgcgttaaataccaaagtcacccttggagcgttagcgcgtaccgatgtatttgaactgattttacgtcgtccaaaggacggtgagtatattccagatagctcggaagaaggtcgtattgttgctatgacgttggctgttgcgctgcgtcgggcgcttgcgggtgtactgggtgtttctgctgctgagttgggctatgccgtgcgtccggtcaggttggagagcaaggaatcagtactggcagttcagctttacgacatcataagcggcggtgcggggtttgcttccagtgcaccattgcatatcgaagcgatactgcagggaatggtcaaacagctagggtgcacccactgcgataccgcctgtagcgattgtttactcgattcgcaaacgcgtcacgatcatgaccatctggatcgcaaagctgcactggcctggctgggggatgatttcagccactatattggtttgccagacgaggagaagttctcgctgcccgatgcgcagtattgccctggtacaattgaggatgcagtccgtcgcgcaattaacgaaggggccgataaacttacgctgtggatgaatgggccgctcaacgaatgggatttatatgcccgacagttccgcgcggcaatccagaactaccgacttaaagacagtgtcgtggttgagattgtcattcccgcaggtgttgacgatccggaggtattgcacgaactggcgcattttgcagctattggcgtaaggttgtgccatgccgaacaggaagtgtcattccctattgtggcgcagatcgctttcgccgatcgtgtcataacgctggtatcacgcagccagcaagccacggtgcctgggccgcactggcatcagaatgacgagctggtggttcgcagccaatgctatcgccctgttgctctgcgtgggtttgaactgccagccacgacagtgaactatagtgagctggtgaaagacattcaaatccataaagagttgaatggcccgttttcacagtttggtcaacgcttctgggatgtactttctaacggccatgaaaaagcacaaaacctgatgaagacaaatcggattacccatattcactataccgatcgctatctgcaaaacccggttgcgctggcgctgctgagtgctttacttaagccgctgaaaaccttaatgaccaaagatgcggaagtggtgattgataccttattcaaaaacaaagatcgcccaggaaatcgaccttcccacgattggatgagtgaagctgattttcaggattttgctgaccagtggtttgctgcatcaataggtaaggcggctgacataactgtgttcgactactcacgagatattccacatcaccgtaagttgacagtgaactttgataatggccaggtgctgaagatccgctttgatcaggggatgggctactggcgtatcgacttcccatatgtctggcgcagctttgacttcaatgatgatgttacttctcagctccacaaaatggcgaaagcttgtatggaaggaaaagtgattaacggagaggaaaactggtcaacggatgtggtagttgaagtgatggaaccttaa

SEQ ID NO: 30381 - DNA, 3303 bp, Yersinia frederiksenii
gtgagtcgatcagaatacatttatctagttaagtgtacttcttggctaactaaatttctaacccaccgtggattgaaggttacagatagccgaccgttatttgagtaccatgcaaccagtgatgagtatgaagaactaaaacggttactccgcgatgtagggcaggctgaaggacttaaaaacgataaaggttacgcagcgtgttttacgttatttagcgccgaatggtaccgaagggattatgagcgaattcatggctggagttgggagcctatctataaaactctggatatatctctatccgccccggaactgagtcttattgtaccgaaaggtcttgaagattactggagacgcccagttcgcttttacgactcagaacgacgcaactttttaggatctttgttcagtgaaggcggcctgccattcaagctattgaaagaatcggatagccgttttcagtctgttttttctagaattcttaatcaatacgaccaatctctatcgttaggttattcagttttagctttagtacaagcggttgtcgaaaagtcgcagcttccaactgtgtttaaggaagacacatcagttgagcttattggtcgtatggctgatcagcttatttcacttgttcagacttacgacctcagtaatcattcagaacccgtcaacgaacttgaccgtgttcatcctaaatggcgggatagtttcccaatgcccttagatgatgaaactggcaccagtttccttaatggccttttgcgcacagccactgttgaaactaaacctcgattacaaaaaaaaagtaaaacaactggctgtaatttctattggtcagaacaacatcctgatgagattcaagcacatattttccttccaaatgaattaacgtttgctatttccagtgagccatcaacgactcgtttcgaacttgctgtttatgaagatggtgaagaagtcgccagtctggggcccgcgtatgccaggcttgataaaacgcaggcgatcgtcaggctccgtaaaagtgaagtgagatttgtaagacaacaaacaactgcaagcctatcgttggtcgctcgagcgggtggcatcattgtcggttctatcaagctagatagaggagaaattgcagttggagatgttcctttgacgtttgtgcgtgacgaggatcgctggttattacaaggccaggcttcctgtagcgtgcatagcagtgatgtactcatcattcttcctacggaaggccgtctggcttcgaaacatgaagattgttcttctgatattcgggcgctggaacaccctgttttgtctataaaagggcgacaggacgtcatttttgaaggtaacgaaacgtatagaattcgaacaggtcgtgagcaggtaaaatatcctgatttagctttacagggaaatcagttagcttggttatgcagcccctatgaaacatttgctggaatacccagagtcattcacaagtttgccacagcacagagaattgaatacgaacgtttcctaagcggcaaaagtattgataaatgtgatttacatgaaacaatgggggcacattacatttcgattcgaaatgaagataatgaaacattattacgccgaaaagtagggattctaccttcggattttcagctagaaattaaaaacagagaacaagcaaacgagggggtgataattatttctactcaacatccttgtttatatagattaaaggataaaacgctcgaagttggacgtagcaaatcagcaaataaaacggaaataatgattaaagcggagggagtgccacctacttccgttgtattgcaggtaacccctaatcttgctggtaatcccatcgatattattctgcctttcccaacaaagggttgtttggtacttgatgttaatggccaacacctacgcaagaatataacaattaatgatctgttggggaccagagcatttctctttggaaaaaatggcgagccagccagattccgccttgagctgcgcctaatgtccagagcgagactgcaggtgtggtatgaatggcgttataccgcaggcgaacgtccagttgaactcaatttgtatagtctaagagaacatattgagaacttgctctctctggagaccggcattgaccagattgtggaaatgcgtatagatggcgcagggagcgtacttacctggcaaattcgacgatacaaatatagccttaactacgactatgaaaggcaggttctttttagcaactcagtgaatactcactccgggcagattccatcgccagtaatcatgttgctaagcgaacctgaaagaaagcctgtttctatcacttcgcgaatgagcgaaggtgtaccagttggtgaatttgagctgagctctgtaatacagaagaatggcccctggctggtagttcctggaaaaggtgaagaagccgcttttagaccatgttttattcgcggtgaaccaccattaccaactgaagttcacgccatccaatcaatgcaaaaagcgacacagctttttaaccctcggtcagatgtgaatacaatcaccttggttctcgatcaaatggcaagtagcccctcgcattcaggctggcagttcttgcgaagcttgtacgagcaatacggatatttacctctggccactttcgaagtatggcgagcacttgttcaacatccgcaagcgttggcaatgtcattgtttaaatttgaaatgtctgttgaatatctcagccgcattgaaaatgaatttcctattttctgggagtttttaccaatttttgaaataaaaggggcagcgaataggttttgtactttcctaacccataaaggtgcaccagaagaaatgcagaaaagattgctgaataaaatgtatcagcaattgggaactatttttccgacctatgccaatgaagtccaagagtggttaagtttagatttacaaccacgtccaatacctcattcgatgatgagagaaattatacagaattggtatcaggatcttctgcgtgagcatagtgaatcaagctggcctgaatatggtggctctcagctttatcactggattttgtcacaacaagattctgtagttgatgtttctcctgaaacaagagatcgctactccgttgcttggttacccgtatttgctgcagcggttgccagcggcaaaacaacatttgaaagtatttttggccatgagccaggcaccttatttttcttaagacaagtcagagattttgattcacgttggtttaattcgattttccagtacagcttattgcgtaatgttgccgaaaaataa

SEQ ID NO: 30382 - DNA, 6321 bp, Yersinia massiliensis
atgactacacgctatttttcttcactcattgaacaatcactctctcgctcaacggaagcaacgcttagcattatgggcgttacaaatcctcaactccgggaacatcttgcccagcagatgggggctgattgtggcaaagccggttctttccttgcttctccagtatttgaacaaacatttggttgggaagaatcaaattacaccatgaaaatgctggcaactgaaaaaacattgttgagcaaagaggtcgttgattctctggatagtgaaaaaaatggccgctatcgttttggtgctaactggaaaccatttacccaccagttggctagctgggaatcattacttgaaaaaaagcattcggttgttgttaccagtgggacaggctccggtaaaacggaatgctttatggtgcctgtactcgaggacctttatcgtgagttacgcgattgcggcaataaaccactggtgggagtaagagcactatttctctatcccttgaatgctctgattaattctcagcgtgagcgtctggatgcctggacacgtggatttgggaccggggttcgctattgcctgtataacggcaacacagaagaactacatgcctcggtaaaaagcgaacaggcaaacaggcctaatgaaattttatcacgtgagaaaatgcgcgaagagccagcaccaatactggtgacgaatggtacgatgctggaatacatgacggttcgtcaggttgatgctccaataattcagcaatcgaaagcacaaaaatcattacgctggatagttctggatgaagcgcatacctatgtcgggtctcaagcagccgaacttgccctacaacttcgtcgcgtaatgactgcgttcggtgtcacgcatgatgatgttcgttttgttgcaacgtcagccaccatcgcaggaaatgatgcaaaacaacagctaaaaaaattcttatcagaactgtcaggtgtaccacaggaacgtattgatgttttggggggcaatcgcgttattccagaacttgaggcatgcaaaaattatcccatcacccttgatgagcttgagcagataccagattccgataaagaaggaattagccttgagcgttatagagcgttaacacattccccagaggcgtgctatctacgcgagatgctggttagccagcctcgcccaatgaaacttgatgtaatgacgaaacgcttaaacgagctgactaataatcattacacgcaacaagaaattttacgctggatcgatctctgcacgggtacaagtcccaacgcacaagatcctgcgtttctcaaagtaagagcgcatatttttcagcgtaatacccaagggatatgggcctgtgcagataaacattgttcagcgaagcacaacacgccgctagaaaagaactggccttttggctacgtgtatgtgaatcaacgacaaaattgccagtgtggtagccctgtttttgagcttgcgttctgtaatgaatgtaacgaaccgcacctgttggcgaaggataaaaaagggaaactcgtacagtgggacaataaaggtggagatgaattctcacttaatgatgacgtcccagatgactttgaaacatcgggagagaaagttcaaaaagaacatgtattccaggctccgcaaatcattgcgccagaatgcaatactgaggccggatatataactcagcgactcgatcgtaatacccggagcattggcgttgttcataaagacagccttcctttggcaatgaacgaaactgaacaaatttgtagcgccagcaattgtggctataaaggtgggaaaggtcagtccccctttaggcgcgctttgctgggtggtcctttttatgtcacgaatattgtgccaacggtgttggaatactgccaggatttcgccaacggtgaaggtaaagagggcgtaggtccactatcattgccggggcgaggacgacgactgattacctttaccgatagccgccagggaacggcacggatggcagtaaggatgcagcaagaagctgaacgtagtcgtttgcgcggtagtgtggtggagatactttcttggcatcagagaaaacaggctgtaaatactcctaatgcgctggccgatgtaacgaaactggtcgagatggctaaacaatccagagatgaggcgaaaaacctacgtgattggggtataccggaagaggcaattctctcagaagaaaaagcagaacgtattgaacagctcatacaaaaagcaacaggtggaaaagttaatactgttttaacttcgctgacctggcaggagatgattaatgagcttaaagataaggcagatatcaaaggctcgattctgcagtacaaccactatcttaaacctgagatttttactgagaacagtggacctctgaagctttcagacatgcttctatttcgtgaatttatgcgtcgaccaaaacgaaccaacagccttgaaacacaaggcctggtacaaattggctaccaagggttagaaaagctacataaactccctgttcactggcatgaacaagggctaaccctggatgattggcgtgattttctgaaagtcgcactcgatttttatgtcagagaaaacaactttattcaactggatttagaactaaaaaactggattggcagccgtttctctgcaaaatttgtacgcaaccctgaatcaaaagaccctgacgataaccaagtcagacgttggccccaaatccgtcacggcaatactacccatcgcttggttaagttactaatacttgcagcaaaattcagcaccataaacacggctaccatcgatatagttaacgtctggttgaaagaagcctggctccaattaaccggacctctggctgtgttaaaacctgacggtaaccgcttttacttaccgaaagaacacctgacattctccttgattcaaaaggcgagtatttgccctgttaccaataaattattggataccgctttcagagggctcactccgtacttacccagacatatacagtttgaacgcctgactcatgagcaatatagcgcctatatggcacaggaagtaacactgcctgaagtctgggaacacgatcattcgcagttggattatgccgaaggattggcacaagtccgggaatgggtatcacaagatccgctagttgctcatttacgctcgcaaaacgtctggacggatattaacgaccgcgtggtggagggaggtttttactaccgcacagctgagcattcagcacaacaatcagcggatcgtctgcaaagttacgaaaagatgtttaaaaacgggcagctcaacgtccttaactgttcgaccactatggaaatgggcgtggacattggcggcatttccgcagtagtgatgaataacgtccctcctcatcctgcaaactatttacagcgtgcagggcgagccggacgtagcaaagaatcccgcgccatctcctacacgctgtgtaaagggaacccgcacgatcagcaggttttcgccaatccactctggccatttgagaccgtgatccccgcaccgatggtggcaatgaactcggaacgattggtacaacgccacgttaattcgcttctgctgtcagaatatttgtgccatgtagtgggagaaactaagaaagaaaaaaccaacctgaatagcgaatggttctttggtgaagagtttgggcagtctgtatgtaacagctttaagatttggcttgaacgccctaccctgacaattgatgccgcgcttgagcgtctggtaaacggtaccacgctgcatggtgcaaggccggaattattgcgggaaaaaactttccatgcgattagtaatttacaaaaacgttggctggggattttccaggacctcgtgaaacaagaaaaggaatcacaaccaaatactccgtatcgtaagcgcctggaactggagaaaaaacggcattgtggtgaatacctgttgcgcgacctggcagcacgaaccttcctgccaggctatggtttcccgacggacgtagtgaactttgataacttcactatggaagactatatccgcgagaaaacgcataaaagccgtaataagagcgaccgggaagataacgtttcacgctataaaggactgccttcacgcaacctgtctgtagccattcgtgaatatgcgccaggagctgagatcattctggacggacgtgtgttccgttccgctggtgtatcactgcattggcacaatctcaatgctgataccaatgaagcccaacggttggaccgcgcctggcggtgccagaaatgcggtacgttaggctatgaagaaggtattggtaactctgtagaattattctgcaccaacagcgactgcggtgagcgaattactcgtgacaacactcgacaggtgctgcagcccgctgggtttgtcactgatgcttatgattcggtaacgaacaacatcgaaacgatgaaatttatcccggtagttccggcatgggtatttgttaaggcggagcgtttgccgctaccaaacccggagatgggctttatggcttcaggcgctaatgggcatgtattccagcagagtatgggcgaaggtggacatggttatgcactgtgcctgagctgcggccgtgcggagtcgatgataagcgaaaaagacgcgccaaaatcaatggaggcgcattatccgccacgtccaggaaaagcagaccgtgacagccaaaatcagcgaattatttgccctggctctaccgcgttaaataccaaagtcacccttggagcgttagcgcgtaccgatgtatttgagctgattttacgtcgtccacaagacggcgagtatatccctgatagctcagaagaagggcgtattattgctatgacgctggctgttgcgctgcgtcgggcgcttgcgggtgtactgggtgtttctgctgctgagttgggctatgcagtgcgtccggtcaggctggagaacgaggaatcagtactggcagttcagctatacgatgtcattagcggcggcgcggggtttgcttccagtgcaccaatgcatatcgaagcgatactgcagggaatggtcaaacagctaggctgcacccactgtgataccgcctgtagcgattgtttactcgattcgcaaacacgtcacgatcatgaccatctggatcgcaaagctgcactgacctggctgggtggtgatttcagccactacattggtcttccggacgaggagaaattctcgctggccgatgcacaatattgccctggtaccattgaggatgcagtccgtcgcgcaattaacgaaggggccgataaacttacgttgtggatgaacgggacgctcaacgagtgggatttatatgcccgccagttccgcgcggcaatccagaactaccgacttaaagacaatgtcgcggttgagcttgtcattcctgctggtgttgacgatccggaggtgttccacgaactggcgcagtttgcggctattggcgtgagattgtgccatgccgaacaggaagtgtcattccctattgtggcgcagattgctttcgccgatcgtgtcataacgcttgcatcacgcagccagcaagccacggtgccggggccgcactggcatcagaatgacgagctagtggttcgcagccaatgctatcgccctgcagctctgcgtgggtttgaactgccagcaatcacagcgaactatactgagctggtgaaagacattcaaattcataaagagttgaatggcccgttttcacagtttggccaacgtttttgggatgtgctttctagcggccatgaaaaagcacaaaacctgatgaagacaaatcggattacccatattcactacaccgatcgctatctgcaaaacccggttgcgctggcgttgctgagcgctttacttaagccgctgaaaacctcaatgaccaaagatgcggaagtagtgattgataccttattcaagaacaaagatcgcccagggaatcgaccgtcccacgactggatgagtgaagctgattttcaggattttgctgaccagtggtttgctgcatcaatgggtaaggcggctgacataactgtattcgactactcacgagatattccacaccatcgtaaattgatggtgaactttgacaatggccaggttctgaaaatccgctttgatcagggaatgggctactggaatatcgacttcccttatgtctggcgcagctttgacttcaataatgatgttacttctcagcttcacaaaatggcgaaagcttgtatggaaggaaaagtgattaacagagaggaaaactggtcaacggatgtggtagttgaagtgatggaactttaa

SEQ ID NO: 30383 - DNA, 3303 bp, Yersinia massiliensis
gtgagtcgatcagattacatttatctaattaagtgtacttcttggctaactaaatttctaacccaccgtggattgaaggtttcagatagccgaccgttatttgagtaccatgcaaccagtgatgagtatgaagaactaaagcggttactccgcgatgtagggcaagctgaaggacttaaaaacgataaaggttacgcagcgtgttttacgttatttagcgctgaatggtaccgaagggattacgagcgaattcatggctggagctgggagcctatctataaagctctggatatatctctatccgccccggaactgagtcttattgtaccgaaaggtcttgaagattactggagacgcccagttcgcttttacgactcagaacgacgcaactttttaggatctttgttcagtgaaggtggcctgccattcaagctattgaaagaatcggatagccgtttccagtctgttttttctagaattcttaatcaatacgaccaatatctatcgttaggttattcagttttagctttagtacaagcggttgtcgaaaagtcgcagcttccaactgtgtttaaggaagacacatcagttgagcttattggccatatggctgaccagcttatttcacttgttcagacttacgacctcagtaatcattcagaaccagtcaacgaacttgaccgtgctcaccctaaatggcgggatagtttcccaatgcccttagatgatgaaactggcaccagtttccttaatggccttttgcgtacagccactgttgaaactagacctcgattacaaaaaaaaagtaaaacaactgactgtaatttctattggtcagaacaacaccctgatgagattcaagcacatattttccttccgaatgaattaacgtttgctatttccagtgagccatcaacgactcgtttcgaacttgctgtttatgaagatggtgaagaagtcgccagtctggggcccgcgtatgccaggcttgataaaacgcaggcgatcgtcaggctccgtaaaaatgaagtgagatttgtaagactacaaacaactacaagcctatcgctggtcgctcgagcgggtggcatcattgtcggctctatcaagctagatagaggagaaattgcagttggagatgttcctttgacgtttgtgcgtgacgaggatcgctggttattacaaggtcaggcttcctgtagcgtgcatagcagtgatgtactcatcattcttcctacggaaggccgtctggcttcgaaacatgaagattgttcttctgatactcgggcgctggaacaccctgttttgtctataaaagggcgacaggacgtcatttttgaaggtaacgaaacgtatcgaattcaaacaggtcgtgagcaggtaaaacatcctgaattagctttacagggaaatcagttagcttggttatgcagcccctatgaaacatttgttggaatacccagagtcattcacaagtttgccacagcacagagaattgaatacgaacgtttccttagcggcaaaagtattgataaatgtgatttacatgaaacaatgggggcacattatatttcgattcgaaatgaagataatgaaacactattacgccgaaaagtagggattttaccttcggattttcagctagaaattaaaagcagagaacaagcaaacgagggggtgataattatttccactcaacatccttgtttatatagattaaaggataaaacgctcgaagttggacggagcaaatcagcaaataaaacggaaataatgattaaagcggagggagtgccacctacttccgttgtattgcaggtaacccctaatcttgcgggtaatcccatcgatattattctgcctttcccgacaaagggttgtttggtacttgatgttaatggccaacacctacacaaaaatataacaattaatgatctgttggggaccagagcatttctctttggaaaaaatggcgagccagccagattccgccttgaactgcgcctaatgtccagagcgagactgcaggcgtggtatgaatggcgttataccgcaggcgaacgtccagttgaactcaatttgtatagtctaagagaacatattgagaacctgctctctctggagaccggcattgaccagattgtggaaatgcgtatagatggcgccgggagcgtacttacctggcaaattcgacgatacaaatacagccttaactacgacaatgaaaggcaggttctttttagcagctcagtgaatactcgctccgggcagactctatcgccagtcataatgctgctaagcgaacctgaaagaaaacctgtttctctcacttcgcgaatgagcgaaggtgtaccagttggtgaatttgagctgagctctgtaatacagaaaaatggcccctggctggtagttcctggaaaaggtgaagaagccgcttttcgaccatgttttattcgcggcgaaccaccattacaaactgaagttcacgccatccaatcgatgcaaaaagcgacacagctttttaaccctcggtcaggcatgaatacaatcaccttggttctcgatcaaatggcaagtagcccctcgcattcaggctggcagttcttgcgaagcttgtacgagcaatacggatatctacctctggccactttcgaagtatggcgagcacttgttcaacatccgcaagcgttggcaatgtcattgtttaaatttgaaatgtctgccgaatatctcagccgcattgaaaatgagtttcctattttctgggagtgtttacccattcttgagattaaagatgcagcggttagatttcgggccttcctggcccataaaggtgcgccagaagaaatgcagaaaagattgctgaacaaaatgtataagcaattggggactatttttccggcctatgccaatgaagttcagaagtggttaagtttaggtatacaaccgcgtccaatacctcatccgacgatgagagatattattcaagagtggtatcaggatcttctgcgtgagcatagtgaatcacgctggcctgaatatggcggagctcagctttgtcactggatcatgtcacaaaaagactctgtgattgatatttctcctgacacagaataccgctactccgttgtctggctacctgtatttgctgccgctgttgctagcggaaaaacaacatttgaaagtgtttttggccatgagccaggcaccttatttttcttaagacaagtcagagattttgactcgcgttggtttaactctattttccagtacagcttattgcgtaatgttgccgaaaaataa

SEQ ID NO: 30384 - DNA, 6321 bp, Yersinia pseudotuberculosis
atgactacacgctacttttcttcactcattgaacaatcactctctcgctcaacagaagcaacgcttagcatcatgggtgttacgaatcctcagctcagagaacatcttgcccttcaaatgagggcagattgtggcaaagcaggttctttccttgcgtctccagtatttgaacagacatttggctgggaagaatcaaaatacaccatgaaaatgctggcaacggagaaaacattgcttagcaaaaaggtaattgactctctggatagtgaacaaaatggccgctatcgctttggcgctaactggaaaccgtttacccaccagttggctagctgggaatcattactcgagaaaaaacattcggttgttgttaccagcgggacaggttcaggtaaaacagaatgcttcatggtgccagtactcgaggatctttatcgtgaattacgcgatagcggcaatcaaccgctagtgggagtaagagcattattcctctacccacttaatgctctgattaattcgcagcgtgaacgcctggatgcatggactcgtggatttagttcagggattcggtactgcctatataacggcaacacagaagaattgcatgcctcggtaaaaagcgagcaggcaaacaagcctaatgaagttttatcacgtgagaaaatgcgagaagagccagcaccaatactagtgacgaacggtaccatgctggaatacatgatggttcgtcaggttgatgctccaataattcagcaatcgaaagcagaaaaatcattacgctggatagttctggatgaagcgcatacctatgtagggtctcaagcagccgagcttgccctacaacttcgtcgtgtaatgactgctttcggtgtcacgcctgatgatgttcgttttgttgcaacgtcagcaaccattgcaggaagtgacgcagaaaagcagctaaaaaaattcttatcggaactgtcaggagtaccacaggaacgtattgatgttttgggaggcaatcgtgttattccagaacttgatgcatgcaaaaattatcccgtcacacttgatgagcttgagcatataccagactcaggtaacgaaggaattagctttgagcgttatagtgcattaacacactcaccggaagcacgctatttacgagagatgctggttagccaaccacgcccagtgaaacttgatgtaatgacgaaacgcttaaacgagctgacaaagaatcattacacgcaacaagaaattttacgctggatagatctctgtacaggcacaagttcaaacgcacaagatccggctttccttaaagtaagagcgcatattttccaacgtaatacccaagggatatgggcctgcgcagataagcattgttcagcgaagcacaacacggtactggaaaaaaactggccttttggttacgtgtatgtgaatcagcgacaaaattgccattgtggtagccctgtttttgagcttgcgttctgtaatgagtgcaacgaaccgcacctgttggcgaaggataaaaaaggtaagctcgtacagtgggacaataaaggtggggatgaattctcgctgcatgatgacatcccagatgactttgaaacatcgggggagaaagttcaaaaagaacatgtattccaggctccgcaaattattgcgccggaatgcaatactgaggccggatatataatccagcggctcgatcgtaatacccgcagcattggcgttgttcataaagacgccatccctctggcaattaacgaaaacgaacagatttgcagcgccagcaattgtggctataaaggcgggaaaggtcagtccccctttagacgcgctttgctgggaggtcctttttatgtcacgaatattgtgcccacggtgttggaatactgccaggatttcgccaatgatgaaggtaaagagggcgtaggcccactatcattgccggggcgaggacgacgactaattacctttaccgatagccgccagggaacggcacggatggcagtaaggatgcagcaagaagctgagcgtagtcgtttgcgcggtagtgtggtggagttactttcctggcatcagagaaaacaggctgtaaatactcctaatgcactggccgatgtaacgaaactggttgagatggctaaacaagccagagatgaggcgaaaaacctgcgtgactggggtatgccggaagaggcaattctctcagaagaaaaagcagaacgtattgaacaggctatacaaaaaacaacaggtggaaaagttaatatcgttttaacttcgctgacctggcaggagatgattaatgagcttaaagataaggcagatatcaaaggctctattctgcagtacaaccactatcttaaacctgagatttttactgagaacagtggacctctgaagctttcagagatgcttctatttcgtgaatttatgcgtcgaccgaaacgaaccaacagccttgaaacacaaggactggtacaggttggctaccaagggttggagaagctacataaaacccctgttcactggcatgaacaagggcttactctggatgattggcgtgattttctaaaagtcacactggatttttatgtcagagaaaacaacttcattcaactggatttagaactgaagaactggattggcagccgtttctcttcgaaatttgtacgcaaccctgaatcaaaagaccctgacgataaccaagtcaaacgttggccccaaattcgtcatggcaatgttacccatcgcttggttaagctactaatactcggggcaaaattcagcaccgtaaacactgttaccatcgatatagttaacgcatggttgaaagaagcctggctcgaattaaccggccctctggctgtgttaaaaccagacggtaaccgtttttacttgcctaaagaacatctgacattctccttgattcaaaaggcgagtatttgccctgttaccaataaattattggataccactttcaaaggactcactccttacttacccagacatatacagtttgaacgcctgacaaatacgcaatatagcgcctatatggcacaggaagtaatactacctgaagtctgggaacacgatcattcacagttggattatgtcgaagggttggcacaaacccgggaatgggtatcacaagatccgctagtagctcatttacgctcgcaaaacgtctggacggatattaacgaccgcgtagtggagggaggcttttactatcgtactgctgagcattcagcacagcaatcagcggatcgtctgcaaagctacgaaaagatgtttaaaaacgggcagcttaacgtccttaactgttccaccaccatggaaatgggcgtggacattggcggtatttccgccgtaataatgaataacgtccctcctcatcctgcaaactatttacagcgtgcggggcgggccggacgtagtaaagaatcccgcgcaatctcctacacgctgtgtaaaggaaaccctcacgatcagcaggttttcgccaatcctctctggccatttgagaccgtgattccagcaccgatggtggcaatgaactcagaacgattggtacaacgccacgttaattcgctactactttcagaatacttgtgccatgtggtgggagaaactaagaaagagaaaaccaatctgaatagcgcgtggttctttggtgaagagtttgggcagtctgtatgtaacagctttaagatttggcttgaacgccccgccctgataattgatgacgcgcttgagcgtctggtaaagggtaccgcgttaaatgctgcaagaccggaatttttgcgggaaaagactttccatgcgattactggcttacaaaaacgttggcaggggattttccacgatctcgtgaaacaagaacatgaatcacagccaaatactccgtatcgtaagcgcctgcaactggagaaaaaacggcattgtgatgaatacctattgcgcgaccttgcagcgcgaaccttcctgcctggctatggtttcccgacggatgttgtgaactttgataacttcaccatggaagactatgtccgcgagaaaacgcataaaagccgtaataagagcgaccgtgaagataacgtttcacgttataaaggactgccttcacgcaacctgtctgttgccattcgtgaatatgccccaggagctgagatcattctggacggacgtgtgttccgttcagctggcgtatcactgcactggcacaatctcaatgctgataccaatgaagcccaacggttggaccgcgcctggcgttgccagaaatgcggtacgttaggctatgaagaaggtattggtagctctgtagaattattctgtaccaacagcgactgtggtgagcgaattactcgtgacaacactcgtcaagtgctgcagccagccgggtttgtcacagatgcttatgacccggtaacgaataacattgaaacgatgaagtttatcccggtagttccggcatgggtatttgttaaggcggagcgtttgccactgccaaacccagagatgggttttatggcttcaggcgctaatggtcatgtattccaacagagtatgggcgaaggtggacatggttatgcactgtgtctgagctgcggccgcgcagagtcgatgataagcgaaaaagacgcgctaaaatcaatggaggcgcattatccgccacgtccaggaaaagcagaccgtgacagccaaaatcagcgaattatttgccctggatctaccgcgttaaataccaaagtcacccttggagcgttagcacgtaccgatgtatttgaactgattttacgtcgtccacaagacggtgagtatattccagatagttcagatgaagggcgtattgttgctatgacgctggccgttgcgcttcgtcgggcgcttgcgggtgtactgggtgtttctgctgccgagctgggctatgcggtgcacccggtcaggctggagagtgaggaatcagtactggcagttcagctttacgacgtcattagcggcggtgcggggtttgcttccagtgcaccattgcatattgaaacgatactgcagggaatggtcaaacagctagggtgcacccactgcgataccgcctgtagcgattgtttactcgattcgcagacgcgtcacgatcatgaccatctggatcgcaaagccgcactggcctggctgggggatgatttcagccactatattggtttgccagacgaggagaagttctcgctgcccgatgcgcagtattgccccggtaccatcgaggatgcagtccgtcgcgcaattaacgaaggggccgataaacttacgctgtggatgaacgggccgctcaacgagtgggatttatatgcccgacagttccgcgcggcaatccagaactaccgggtcaaagacaatgtcgcggttgagcttgtcattcccgctggtgttgacgatccggaggtgttgcacgaactggcgcagtttgcggctatcggcgtgcggttgtgccatgccgaacaggaaatgtcattccccattgtggcgcaaatcgctttcgccgatcgtgtcataacgctagcatcacgcagccagcaagccacggtgccggggccgcactggcatcagaatgacgagctggtggttcgcagccaatcctatcgccctgctgctctgcgtgagtttgcactgccagcaaccacagcgaactatactgagctggttaaagacattcaaattcataaagagttgaatggcccgttttcgcagtttggccaacgcttctgggatgtgctttctaacggccatgaaaaagcacaaaacctgatgaagacaaatcggattacccatattcactataccgatcgctatctgcaaaacccggttgcgctggcgctgctgagtgctttacttaagccgctgaaaaccttaatgaccaaggatgcggaagtggtgattgataccttattcaaaaacaaagatcgtccaggaaatcggccgtcccacgactggatgagtgaagctgattttcaggattttgctgatcagtggtttgccgcatcaatgggtaaggcggctgacataacggtgttcgactactcacgagatattccacatcatcgtaaattgatggtgagctttgataatggccaaattctgaagatgcgctttgatcaggggatgggctactggcgtatcgacttcccctatgtctggcgcagctttgacttcaatgatgatgttacctctcagctccacaaaatggcgaaagcttgtttggaagcaaaagtgattaacggagaggaaaactggtcaacggatgtggtagttgaagtgatggaaccttaa

SEQ ID NO: 30385 - DNA, 3303 bp, Yersinia pseudotuberculosis
gtgagtcgatcagaatacatttatctaattaagtgtacttcttggctaactaaatttctaacccaccgtggattgaaggttacagatagccgaccgttatttgagtaccatgcaaccagtgatgagtatgaagaactaaaacggttactccgcgatgtagggcaggctgaaggacttaaaaacgataaaggttacgcagcgtgttttacgttatttagcgccgaatggtaccgaagggattatgagcgaattcatggctggagttgggagcctatctataaaactctggatatatctctatccgccccggaactgagtcttattgtaccgaaaggtcttgaagattactggagacgcccagttcgcttttacgactcagaacgacgcaactttttaggatctttgttcagtgaaggcggcctgccattcaagctattgaaagaatcggatagccgttttcagtctgttttttctagaattcttaatcaatacgaccaatctctatcgttaggttattcagttttagctttagtacaagcggttgtcgaaaagtcgcagcttccaactgtgtttaaggaagatacgtcagttgagcttattggtcgtatggctgatcagcttatttcacttgttcagacttacgacctcagtaatcattcagaacccgtcaacgaacttgaccgtgttcatcctaaatggcgggatagtttcccaatgcccttagatgatgaaactggcaccagtttccttaatggccttttacgcacagccactgttgaaactaaacctcgattacaaaaaaaaagtaaaacaactggctgtaatttctattggtcagaacaacatcctgatgagattcaagcacatattttccttccaaatgaattaacgtttgctatttccagtgagccatcaacgactcgtttcgaacttgctgtttatgaagatggtgaagaagtcgccagtctggggcccgcgtatgccaggcttgataaaacgcaggcgatcgtcaggctccgtaaaagtgaagtgagatttgtaagacaacaaacaaccgcaagcctatcgttggtcgctcgagcgggtggcatcattgtcggttctatcaagctagatagaggagaaattgcagttggagatgttcctttgacgtttgtgcgtgacgaggatcgctggttattacaaggccaggcttcctgtagcgtgcatagcagtgatgtactcatcattcttcctacggaaggccgtctggcttcgaaacatgaagattgttcttctgatattcgggcgctggaacaccctgttttgtctataaaagggcgacaggacgtcatttttgaaggtaacgaaacgtatagaattcgaacaggtcgtgagcaggtaaaatatcctgatttagctttacagggaaatcagttagcttggttatgcagcccctatgaaacatttgctggaatacccagagtcattcacaagtttgccacagcacagagaattgaatacgaacgtttcctaagcggcaaaagtattgataaatgtgatttacatgaaacaatgggggcacattacatttcgattcgaaatgaagataatgaaacattattacgccgaaaagtagggattctaccttcggattttcagctagaaattaaaaacagagaacaagcaaacgagggggtgataattatttccactcaacatccttgtttatatagattaaaggataaaacgctcgaagttggacgtagcaaatcagcaaataaaacggaaataatgattaaagcggagggagtgccacctacttccgttgtattgcaggtaacccctaatcttgctggtaatcccatcgatattattctgcctttcccaacaaagggttgtttggtacttgatgttaatggccaacacctacgcaagaatataacaattaatgatctgttggggaccagagcatttctctttggaaaaaatggcgagccagccagattccgccttgaactgcgcctaatgtccagagcgagactgcaggtgtggtatgaatggcgttataccgcaggcgaacgtccagttgaactcaatttgtatagtctaagagaacatcttgagaacttgctctctctggagaccggcattgaccagattgtggaaatgcgtatagatggcgcagggagcgtacttacctggcaaattcgacgatacaaatacagccttaactacgactatgaaaggcaggttctttttagcaactcagtaaatactcactccgggcagattccttcgccagtaatcatgttgctaagcgaacctgaaagaaagcctgtttctatcacttcgcgaatgagcgaaggtgtaccagttggtgaatttgagctgagctctgtaatacagaagaatggcccctggctggtagttcctggaaaaggtgaagaagccgcttttaggccatgttttattcgcggtgaaccaccattaccaactgaagttcacgccatccaatcaatgcaaaaagcgacacagctttttaaccctcggtcagatgtgaatacaatcaccttggttctcgatcaaatggcaagtagcccctcgcattcaggctggcagttcttgcgaagcttgtacgagcaatacggatatttacctctggccactttcgaagtatggcgagcacttgttcaacatccgcaagcgttggcaatgtcattgtttaaatttgaaatgtctgttgaatatctcagccgcattgaaaatgaatttcctattttctgggagtttttaccaatttttgaaataaaaggggcagcgaataggttttgtactttcctaacccataaaggtgcaccagaagaaatgcagaaaagattgctgaataaaatgtatcagcaattgggaactatttttccgacctatgccaatgaagtccaagagtggttaagtttagatttacaaccacgtccaatacctcattcgatgatgagagaaattatacaaaattggtatcaggatcttctgcgtgagcatagtgaatcaagctggcctgaatatggtggctctcagctttatcactggattttgtcacaacaagattctgtagttgatgtttctcctgaaacaagagatcgctactccgttgcttggttacccgtatttgctgcagcggttgccagcggcaaaacgacatttgaaagtatttttggccatgagccaggcaccttatttttcttaagacaagtcagagattttgattcacgttggtttaattcgattttccagtacagcttattgcgtaatgttgccgaaaaataa

SEQ ID NO: 30386 - DNA, 6321 bp, Yersinia ruckeri
atgactacacgctacttttcttcactcattgaacaatcactctctcgctcaacagaagcaacgcttagcatcatgggtgttacgaatcctcagctcagagaacatcttgcccttcaaatgagggcagattgtggcaaagcaggttctttccttgcgtctccagtatttgaacagacatttggctgggaagaatcaaaatacaccatgaaaatgctggcaacggagaaaacattgcttagcaaaaaggtaattgactctctggatagtgaacaaaatggccgctatcgctttggcgctaactggaaaccgtttacccaccagttggctagctgggaatcattactcgagaaaaaacattcggttgttgttaccagcgggacaggttcaggtaaaacagaatgcttcatggtgccagtactcgaggatctttatcgtgaattacgcgatagcggcaatcaaccgctagtgggagtaagagcattattcctctacccacttaatgctctgattaattcgcagcgtgaacgcctggatgcatggactcgtggatttagttcagggattcggtactgcctatataacggcaacacagaagaattgcatgcctcggtaaaaagcgagcaggcaaacaagcctaatgaagttttatcacgtgagaaaatgcgagaagagccagcaccaatactagtgacgaacggtaccatgctggaatacatgatggttcgtcaggttgatgctccaataattcagcaatcgaaagcagaaaaatcattacgctggatagttctggatgaagcgcatacctatgtagggtctcaagcagccgagcttgccctacaacttcgtcgtgtaatgactgctttcggtgtcacgcctgatgatgttcgttttgttgcaacgtcagcaaccattgcaggaagtgacgcagaaaagcagctaaaaaaattcttatcggaactgtcaggagtaccacaggaacgtattgatgttttgggaggcaatcgtgttattccagaacttgatgcatgcaaaaattatcccgtcacacttgatgagcttgagcatataccagactcaggtaacgaaggaattagctttgagcgttatagtgcattaacacactcaccggaagcacgctatttacgagagatgctggttagccaaccacgcccagtgaaacttgatgtaatgacgaaacgcttaaacgagctgacaaagaatcattacacgcaacaagaaattttacgctggatagatctctgtacaggcacaagttcaaacgcacaagatccggctttccttaaagtaagagcgcatattttccaacgtaatacccaagggatatgggcctgcgcagataagcattgttcagcgaagcacaacacggtactggaaaaaaactggccttttggttacgtgtatgtgaatcagcgacaaaattgccattgtggtagccctgtttttgagcttgcgttctgtaatgagtgcaacgaaccgcacctgttggcgaaggataaaaaaggtaagctcgtacagtgggacaataaaggtggggatgaattctcgctgcatgatgacatcccagatgactttgaaacatcgggggagaaagttcaaaaagaacatgtattccaggctccgcaaattattgcgccggaatgcaatactgaggccggatatataatccagcggctcgatcgtaatacccgcagcattggcgttgttcataaagacgccatccctctggcaattaacgaaaacgaacagatttgcagcgccagcaattgtggctataaaggcgggaaaggtcagtccccctttagacgcgctttgctgggaggtcctttttatgtcacgaatattgtgcccacggtgttggaatactgccaggatttcgccaatgatgaaggtaaagagggcgtaggcccactatcattgccggggcgaggacgacgactaattacctttaccgatagccgccagggaacggcacggatggcagtaaggatgcagcaagaagctgagcgtagtcgtttgcgcggtagtgtggtggagttactttcctggcatcagagaaaacaggctgtaaatactcctaatgcactggccgatgtaacgaaactggttgagatggctaaacaagccagagatgaggcgaaaaacctgcgtgactggggtatgccggaagaggcaattctctcagaagaaaaagcagaacgtattgaacaggctatacaaaaaacaacaggtggaaaagttaatatcgttttaacttcgctgacctggcaggagatgattaatgagcttaaagataaggcagatatcaaaggctctattctgcagtacaaccactatcttaaacctgagatttttactgagaacagtggacctctgaagctttcagagatgcttctatttcgtgaatttatgcgtcgaccgaaacgaaccaacagccttgaaacacaaggactggtacaggttggctaccaagggttggagaagctacataaaacccctgttcactggcatgaacaagggcttactctggatgattggcgtgattttctaaaagtcacactggatttttatgtcagagaaaacaacttcattcaactggatttagaactgaagaactggattggcagccgtttctcttcgaaatttgtacgcaaccctgaatcaaaagaccctgacgataaccaagtcaaacgttggccccaaattcgtcatggcaatgttacccatcgcttggttaagctactaatactcggggcaaaattcagcaccgtaaacactgttaccatcgatatagttaacgcatggttgaaagaagcctggctcgaattaaccggccctctggctgtgttaaaaccagacggtaaccgtttttacttgcctaaagaacatctgacattctccttgattcaaaaggcgagtatttgccctgttaccaataaattattggataccactttcaaaggactcactccttacttacccagacatatacagtttgaacgcctgacaaatacgcaatatagcgcctatatggcacaggaagtaatactacctgaagtctgggaacacgatcattcacagttggattatgtcgaagggttggcacaaacccgggaatgggtatcacaagatccgctagtagctcatttacgctcgcaaaacgtctggacggatattaacgaccgcgtagtggagggaggcttttactatcgtactgctgagcattcagcacagcaatcagcggatcgtctgcaaagctacgaaaagatgtttaaaaacgggcagcttaacgtccttaactgttccaccaccatggaaatgggcgtggacattggcggtatttccgccgtaataatgaataacgtccctcctcatcctgcaaactatttacagcgtgcggggcgggccggacgtagtaaagaatcccgcgcaatctcctacacgctgtgtaaaggaaaccctcacgatcagcaggttttcgccaatcctctctggccatttgagaccgtgattccagcaccgatggtggcaatgaactcagaacgattggtacaacgccacgttaattcgctactactttcagaatacttgtgccatgtggtgggagaaactaagaaagagaaaaccaatctgaatagcgcgtggttctttggtgaagagtttgggcagtctgtatgtaacagctttaagatttggcttgaacgccccgccctgataattgatgacgcgcttgagcgtctggtaaagggtaccgcgttaaatgctgcaagaccggaatttttgcgggaaaagactttccatgcgattactggcttacaaaaacgttggcaggggattttccacgatctcgtgaaacaagaacatgaatcacagccaaatactccgtatcgtaagcgcctgcaactggagaaaaaacggcattgtgatgaatacctattgcgcgaccttgcagcgcgaaccttcctgcctggctatggtttcccgacggatgttgtgaactttgataacttcaccatggaagactatgtccgcgagaaaacgcataaaagccgtaataagagcgaccgtgaagataacgtttcacgttataaaggactgccttcacgcaacctgtctgttgccattcgtgaatatgccccaggagctgagatcattctggacggacgtgtgttccgttcagctggcgtatcactgcactggcacaatctcaatgctgataccaatgaagcccaacggttggaccgcgcctggcgttgccagaaatgcggtacgttaggctatgaagaaggtattggtagctctgtagaattattctgtaccaacagcgactgtggtgagcgaattactcgtgacaacactcgtcaagtgctgcagccagccgggtttgtcacagatgcttatgacccggtaacgaataacattgaaacgatgaagtttatcccggtagttccggcatgggtatttgttaaggcggagcgtttgccactgccaaacccagagatgggttttatggcttcaggcgctaatggtcatgtattccaacagagtatgggcgaaggtggacatggttatgcactgtgtctgagctgcggccgcgcagagtcgatgataagcgaaaaagacgcgctaaaatcaatggaggcgcattatccgccacgtccaggaaaagcagaccgtgacagccaaaatcagcgaattatttgccctggatctaccgcgttaaataccaaagtcacccttggagcgttagcacgtaccgatgtatttgaactgattttacgtcgtccacaagacggtgagtatattccagatagttcagatgaagggcgtattgttgctatgacgctggccgttgcgcttcgtcgggcgcttgcgggtgtactgggtgtttctgctgccgagctgggctatgcggtgcgcccggtcaggctggagagtgaggaatcagtactggcagttcagctttacgacgtcattagcggcggtgcggggtttgcttccagtgcaccattgcatattgaaacgatactgcagggaatggtcaaacagctagggtgcacccactgcgataccgcctgtagcgattgtttactcgattcgcagacgcgtcacgatcatgaccatctggatcgcaaagccgcactggcctggctgggggatgatttcagccactatattggtttgccagacgaggagaagttctcgctgcccgatgcgcagtattgccccggtaccatcgaggatgcagtccgtcgcgcaattaacgaaggggccgataaacttacgctgtggatgaatgggccgctcaacgagtgggatttatatgcccgacagttccgcgcggcaatccagaactaccgggtcaaagacaatgtcgcggttgagcttgtcattcccgctggtgttgacgatccggaggtgttgcacgaactggcgcagtttgcggctatcggcgtgcggttgtgccatgccgaacaggaaatgtcattccccattgtggcgcaaatcgctttcgccgatcgtgtcataacgctagcatcacgcagccagcaagccacggtgccggggccgcactggcatcagaatgacgagctggtggttcgcagccaatcctatcgccctgctgctctgcgtgggtttgaactaccagccacgacagtgaactatagtgagctggtgaaagacattcaaattcataaagagttgaatggcccgttttcgcagtttggtcaacgcttctgggatgtgctttctaacggccatgaaaaagcacaaaacctgatgaagacaaatcggattacccatattcactataccgatcgctatctgcaaaacccggttgcgctggcgctgctgagtgctttacttaagccgctgaaaaccttaatgaccaaggatgcggaagtggtgattgataccttattcaaaaacaaagatcgtccaggaaatcggccgtcccacgactggatgagtgaagctgatttccaggattttgctgatcagtggtttgccgcatcaatgggtaaggcggctgacataacggtgttcgactactcacgagatattccacatcatcgtaaattgatggtgaactttgataatggccaggtgctgaagatccgctttgatcaggggatgggctactggcgtatcgacttcccatatgtctggcgcagctttgacttcaatgatgatgttacttctcagctccacaaaatggcgaaagcttgtatggaaggaaaagtgattaacggagaggaaaactggtcaacggatgtggtagttgaagtgatggaaccttaa

SEQ ID NO: 30387 - DNA, 3303 bp, Yersinia ruckeri
gtgagtcgatcagaatacatttatctaattaagtgtacttcttggctaactaaatttctaacccaccgtggattgaaggttacagatagccgaccgttatttgagtaccatgcaaccagtgatgagtatgaagaactaaaacggttactccgcgatgtagggcaggctgaaggacttaaaaacgataaaggttacgcagcgtgttttacgttatttagcgccgaatggtaccgaagggattatgagcgaattcatggctggagttgggagcctatctataaaactctggatatatctctatccgccccggaactgagtcttattgtaccgaaaggtcttgaagattactggagacgcccagttcgcttttacgactcagaacgacgcaactttttaggatctttgttcagtgaaggcggcctgccattcaagctattgaaagaatcggatagccgttttcagtctgttttttctagaattcttaatcaatacgaccaatctctatcgttaggttattcagttttagctttagtacaagcggttgtcgaaaagtcgcagcttccaactgtgtttaaggaagatacatcagttgagcttattggtcgtatggctgatcagcttatttcacttgttcagacttacgacctcagtaatcattcagaacccgtcaacgaacttgaccatgttcatcctaaatggcgggatagtttcccaatgcccttagatgatgaaactggcaccagtttccttaatggccttttgcgcacagccactgttgaaactaaacctcgattacaaaaaaaaagtaaaacaactggctgtaatttctattggtcagaacaacatcctgatgagattcaagcacatattttccttccaaatgaattaacgtttgctatttccagtgagccatcaacgactcgtttcgaacttgctgtttatgaagatggtgaagaagtcgccagtctggggcccgcgtatgccaggcttgataaaacgcaggcgatcgtcaggctccgtaaaagtgaagtgagatttgtaagacaacaaacaaccgcaagcctatcgttggtcgctcgagcgggtggcatcattgtcggttctatcaagctagatagaggagaaattgcagttggagatgttcctttgacgtttgtgcgtgacgaggatcgctggttattacaaggccaggcttcctgtagcgtgcatagcagtgatgtactcatcattcctcctacggaaggccgtctggcttcgaaacatgaagattgttcttctgatattcgggcgctggaacaccctgttttgtctataaaagggcgacaggacgtcatttttgaaggtaacgaaacgtatagaattcgaacaggtcgtgagcaggtaaaatatcctgatttagctttacagggaaatcagttagcttggttatgcagcccctatgaaacatttgctggaatacccagagtcattcacaagtttgccacagcacagagaattgaatacgaacgtttcctaagcggcaaaagtattgataaatgtgatttacatgaaacaatgggggcacattacatttcgattcgaaatgaagataatgaaacattattacgccgaaaagtagggattctaccttcggattttcagctagaaattaaaaacagagaacaagcaaacgagggggtgataattatttccactcaacatccttgtttatatagattaaaggataaaacgctcgaagttggacgtagcaaatcagcaaataaaacggaaataatgattaaagcggagggagtgccacctacttccgttgtattgcaggtaacccctaatcttgctggtaatcccatcgatattattctgcctttcccaacaaagggttgtttggtacttgatgttaatggccaacacctacgcaagaatataacaattaatgatctgttggggaccagagcatttctctttggaaaaaatggcgagccagccagattccgccttgaactgcgcctaatgtccagagcgagactgcaggtgtggtatgaatggcgttataccgcaggcgaacatccagttgaactcaatttgtatagtctaagagaacatattgagaacttgctctctctggagaccggcattgaccagattgtggaaatgcgtatagatggcgcagggagcgtacttacctggcaaattcgacgatacaaatacagccttaactacgactatgaaaggcaggttctttttagcaactcagtgaatactcactccgggcagattccttcgccagtaatcatgttgctaagcgaacctgaaagaaagcctgtttctatcacttcgcgaatgagcgaaggtgtaccagttggtgaatttgagctgagctctgtaatacagaagaatggcccctggctggtagttcctggaaaaggtgaagaagccgcttttaggccatgttttattcgcggtgaaccaccattaccaactgaagttcacgccatccaatcaatgcaaaaagcgacacagctttttaaccctcggtcaaatgtgaatacaatcaccttggttctcgatcaaatggcaagtagcccctcgcattcaggctggcagttcttgcgaagcttgtacgagcaatacggatatttacctctggccactttcgaagtatggcgagcacttgttcaacatccgcaagcgttggcaatgtcattgtttaaatttgaaatgtctgttgaatatctcagccgcattgaaaatgaatttcctattttctgggagtttttaccaatttttgaaataaaaggggcagcgaataggttttgtactttcctaacccataaaggtgcaccagaagaaatgcagaaaagattgctgaataaaatgtatcagcaattgggaactatttttccgacctatgccaatgaagtccaagagtggttaagtttagatttacaaccacgtccaatacctcattcgatgatgagagaaattatacaaaattggtatcaggatcttctgcgtgagcatagtgaatcaagctggcctgaatatggtggctctcagctttatcactggattttgtcacaacaagattctgtagttgatgtttctcctgaaacaagagatcgctactccgttgtttggttacccgtatttgctgcagcggttgccagcggcaaaacgacatttgaaagtatttttggccatgagccaggcaccttatttttcttaagacaagtcagagattttgattcacgttggtttaattcgattttccagtacagcttattgcgtaatgttgccgaaaaataa

SEQ ID NO: 30388 - DNA, 6321 bp, Yersinia ruckeri; identical to SEQ ID NO: 30386

SEQ ID NO: 30389 - DNA, 3303 bp, Yersinia ruckeri; identical to SEQ ID NO: 30387

SEQ ID NO: 30390 - DNA, 6249 bp, Yokenella regensburgei ATCC 43003
atgggcgtaaccaacccgtatcttcgtgagcaccttacgcagcagatggcggctgaatgtggaaaggatggaacatttctggcttctcccgtgtttgaacaaacatttggctggaaagagtcaaatttcacgatgagggagcttgccacaaagcaaacgttactgagtaaagaggttgttgattctctcgataacgaagaaaacggacgttatcgttttggctcaacctggaaaccgttcacacatcagttagccagctggcaagcattacttgataaaaaacattcggtggttgtgaccagtggcacgggttcggggaaaacagagtgcttcatggttccggtgcttgaagatctttatcgcgagctacgggacaacgggggaaaaccactaataggcgttagagcccttttcctttatcccctgaatgccctgatcaattcacagcgtgaacgtttagatgcctggacccgaggctttggaaccgggattcggtactgtctgtataacggcaatactgaagagctgcatgcctcagtaaaaagtgagcaggcaaaccggccaaacgaggtgctttcgcgtgagaaaatgcgtgaggagcctgcccctgttctggtcacaaacggtaccatgctggaatacatgatggtgcgtcaggttgatgcacctatcattcaaaaatcaaaagcggaaaaatcattacgctggatcgttctggatgaagcccatacctacgtaggatcccaggctgctgaactggctttacaactccgtcgtgtcatgacggcgtttggcgttacacctgatgatgttcgctttgttgcaacatcggcgactattgccggaagtgatgctgaaaagcagctgaaaaaattcttatctgagttgtccggtgtgccacaggaacgtattgatgttctgggcggtagccgtgtcattcctgacctggcgccgtgccagcatctttctctatccctggatgagcttgagtgtattcctgattctgatggggcgggtattagccttgagcgctataccgcgctgactcactctccgcaagcgcgtcatctccgtgagatgcttgtgagtcaacccagaccgatgaagcttgatgcgctcacccggcgtttgaatgagctaacaaaacaccaatacactcagcaggatattttgcgctggctcgatctctgtaccggtacgcttcccaatgcgcaggaaccggcatttctgaaagtcagagcgcatattttccagcgtaatacccaggggatatgggcctgcgtagataaacattgctccgctaaacacaatactgcgctggagaaggggtggccttttggcaatgtgtatgttaatcagcggcagaactgcgagtgtggtagccctgtttatgaactcgcgttctgcaatgagtgtaatgaaccgcatttacttgcccgggacaaaaaaggaaagcttgtacagtgggataataaaggcggggatgagttttcgctgcaggatgaagcacctgatgattttgactcttcgagtgaaaaagttcaaaaagagcaggtattccagccacctcatattattgccgctgaatgtaataccgaaatgggctatatcgtgcagcgcctcgatcgtcaaactcgaagtattggcgtagtcaacccggatagtattccgttggcgatgaatgatattgagcaggtttgtagcgccagcaactgcggctatagaggggggaaaggtaaacaacccttccggcgggcactgttaggcgggcctttttatgtgacgaatatcgtgcctaccgtgctggaatattgtcaggactttatcagtgatgaaggtaaagagggggttggcccactttctttacctggacgagggcgccgattgatcaccttcactgatagccgtcagggaacggcacggatggcggtgcggatgcagcaggaagcggagcgcagccgtttgcgcggtagcgtggtggatattcttggatggcaccaacgtaaacagtcaacacatgcgccaaatgcccaggctgacgtaacgaagttgactgagatggcagcacaggcacgtgaagaagcgaaaaatcttcatgattgggggatgccggaagaagcgatccgtcgtgaagaacaagctgagcgcttagagcacgctattcaggtcgccactggtggaaaagttgatgcggttttgatttctctttcttggtccgaaatggtcaaggaattgaaagataaggcggatatcaaaggtcctatcctgcagtataaccactatcttaagcctgaaatattcactgaaaatggtggccctttaaaactcgctgaaatgctgcttttccgtgaattcatgcggcgccctaaacgcaccaatagcctggagacacaagggctggttcaggtgggttatcaggggctggagaaggcccatagcattcctgcccattggcaagataaagggttaaccctggatgactggcgtgattttcttaaggtcacgctggatttctatgtcagggaaagcaactacacccagctggacgaagatctgaaaaactggatcggtagccgtttctcttcaaaatttgtccgtaaccccgattcgaaagaacctgatgacaaccaggttaaacgctggccgcaaattcgtcacggtaacgtcacgcagcgcctggtcaaacttttgatcctcggcgctaaattcagcagcgtaaatacggtcacaatcgatatcgttaatgcgtggctaaaagaggcctggcttcagttgacggggtcattagcggtattgaaatccgacggcaaccgtttttatttacctaaagagcatctgacattctctctggtacaaaaagcctacatttgcccggtaaccaataaattactggcgacggctttcagaggtctgacgccttatctgccaatgcatattcagtttgaacggctgaccagtgcacaatatgacgcctttgtcgcccaggcggtgacgctgcctgagatttggcagcacgatcgttctcaggatgattatgtcgatgggttaagaaaagttcgtgactggctggggcaggaccctctggtggcgcaattacgttcgcaaaacctctggacggacattaacgatcgcgtcgttgaaggtggattttactaccgcacggcagagcattccgcccagcaatcatccgaacgtctgcaaagttatgaacgtatgtttaaaaacggacagctcaacgttcttaactgttcaaccaccatggaaatgggcgtggatattggcgggatttctgctgtggtgatgaataacgtcccgccgcaccccgctaactatttgcagcgtgccgggcgtgccgggcgtagcaaagagtcccgcgctatttcttacacgttgtgcaaaggcaacccgcacgatcggcaggtttttgctaaccctctctggccttttgaaacggtgatccctgcgccgatggtggcaatgaattctgagcgcctggtacagcgccacgtcaattctctgctgctgtcagattatttgtgccatgtcatcggtgaaaccgaaaaagaacgcaccagccttaatagtcagtggttctttggtgaagagcttgaacagtcggtgtgtaaccgtttcaaagcctggctggagcgtccgacgctgagtattgatgcggctttggttcgcttggttaaaggcaccgcgcttcatggcgttgcggcagaaaagctgcgggataaaacgtgcgacgcgattgcagcgctgcagaagcgctggctgggaatttatcgcgatcttgttaagcaggaaagtgaatcgcagccgaatacgccgtatcgcaaacgtctggagctagagaaaaaacggcactgcggcgagtatctgctgcgcgatttggcggccagaaccttcctgcctggatatggcttcccaacggatgttgtcacttttgacaacttcaccatggaagattatatccgcgagaaaacgtacaaagtccgtgataagagcgatcgtgaagataacgtctcgcgttataaaggcttgccttcacgcaacctttccgtggcgatccgtgagtatgcgccgggtgcggagattatccttgatggacgggtcttccgctctgctggggtgtctctgcactggcataatctcaatgctgataccaatgaagctcagcgcctggatagcgcctggcgttgtcacaaatgcggtacgttaggctatgaggaaggtattggcggttcgggagatttattctgtaccaatgatgcgtgcggcgagcgcatcacgccggaaaaccgacgtcaggttttgcagcctgcgggttttgtaacggatgcgcacgatccggtgaccaataacattgagaccatgaaattcattccggttgtgcctgcctgggtatttgttaaggccgagcgtgtaccgctgccgaacccgttgatgggctatatggcttccggggcggacggtaatgtgttccagcaaagtatgggggaaggcggccacggctatgcgctgtgcctgagctgcggtcgcgcggagtcgatgctcaacctcacggatgcaccgaaatccatggaagcacactatccgcctcgtcctggaaaggccgaccgggatagtcagaatcagcggattatctgcccgggttcaacggcgctgaataaaaatgtcacgctgggagcgctggccagaacggatgtcttcgagctgattgtccgtcgcccgcaggacggagagtatattgctgataacacggaagaagggcgtattgttgcaatgacgctggccgtggcgctgcggcgctcgctggcgagcgtgctgggcgtttccgcagcggagctgggctacgcggtgcgcccggtcaggctggagaacgagcaatccgttctggcggtgcagctgtacgatattatcagcggcggtgcgggctttgcttccagcgcgccattgcatattgaggccgtgctgaagggaatggtgaagcaactgggctgccaccactgcgataccgcctgtagcgagtgcctgctcgattcacagacccgccacgatcacgatctactggatcgtaaagcggcgctagcctggctgggggcggatttcagccactatattggcttgccggatgaggagaaattctctctggctgatgcgcaatattgtccagggagcattgaagatactctgcggcgggccatcaacgatggtggccgaaagctcacgctgtggatgagtgggccgttgaatgagtgggacctgtatgcccgtcagttccgcaccgcgatccagaactaccggctaaaagatgatgttgaggtggtgctggttatcccgcgaaacattgacgatccggagatccttctggaactcgcgcagtttactgcgataggcgtgcagctgtgccagtctgaactggatacggatacgccgctcgttgcgcaggtgacatttgacgatcgcctaatgacgttaatttctcgcagccatgacgctaccatccccgggccgaactggcatctgaatagccagatggttattcgcagccatttgcaggcgccgatagcgctttataaagccgagttgccatccgaggatgcgggcagcaaaggcctggttaacgatattgaaatccataagcagcttaacggcccggtttctcagtttggccagcgcttctggaacctgctgaccgagtctcaggatgatattcagcgcctgctgacggaatgccgggtgacgcgtatccactatagcgatcgctatctgcaaaaccccgtagcgctggcgttgttaggcgggttgttgaagacgttgaaaccgatgctgacacaagaggcggaagtgacgattgatacgctgttcaggagtaaagagcgcccggggaacaaaccgttccatgactggatgagtgaagcagacttccaggattttgccgaccagtggtttgcggcatccatgggacgagccgtggagattcaggcgttcaactctggccgcgacattccgcaccaccgtaagctgatggtgagttttgataatggccaggcgctgaaaatccgctttgatcaggggatgggatattggcgtattaactttgcgcgagcctggcgtgattttaactttaatgacgacgtctctttccagctggggaatatggcgcaagcctgcgcagaaggtctggtagtgaacagcgaggagagctgggcaaccgatgtgctggtgcaggttatcgtaccttaa

SEQ ID NO: 30391 - DNA, 2835 bp, Yokenella regensburgei ATCC 43003
atgttctctctcattcttaatcaatacgaacaggcccaatcatctaacatttctacgttcatgttagttcatgcagcggtagaaaaatcatccctgccagtcgtgttcaaagaggatacttcaattgagcttattagtcggatggctgaacagttagtatctcttgttcaaatttataatctgagtaaccataccgaacctgtaaaagaacttgaacgtgttcatccgaagtggcgagacggttttcctgtacctctcgatgatgatacgggtaccagtttccttaatggacttttacaaacagcttctattgaatccaaaccccgcctccaaaagaataaagcgactctctgccagtttttatggtcagaaaatcatcctgatatcgtccaaaccctcatttctctgcctgaagagctgagttttccgattgatagtgagccttcaacaacgcgtttcgagcttgccatctatgaagaaggtaacgaaattgctagcttgggtcctgcctatgcaacgctaagtaactcacaggcaaaaataagggttcgtaagcgcgaaattaaattttatcgaaaagctcctgatgtaagtttgttcattgtcgcgagagctggagggatgcttgtcggctctaagctgttggagggaagtgaaattgcagtgggagatgtgcctttagtttttgtttctgatcatgatgaatggttgctacaggggcaagcctcttgcagcgtacgtggtagtcatgtgcttattgtgctgccaaaggatggttgtctggcttcagaacatgaggattgtgaccctgacctttcggctttgggatgccgagctctaattatcaacggtcgacaggatatcaccattaaaggtgacgaaacgtaccggataaagacaggaagagatcagattattcaggctgggttctctttccagggaaaacggttgaattggacaagctgcccggatgaagtcttccttggtattcccggaattaccaaaaatcctgaggatcactcagagcatcattataaacgctttttcaacggtacgttcatagatgattgcaacgcgcaagagaagatgggaactcagtttctttcagtgcgtaacgataataatgaaacgttactgcgtaaaaaaataggcattcttcccaatgattttaacctggaaataaaaaacggagaacaagcaaacgaaggctctatcattattacaaccaagcattcttgctggtatggtttgaaagaaaaaacattggaggttgataggaagcgattccccggtggcacagaaataataatgaaaactgagggaattcccccagcatcgattttattacacataatgccaaaccttgctgcaaaccccattattgtttctctccctttccctgcccgaggttgtcttgccttcgataaagatgaaaagcctctcccaaaaaatttaacgattaacgaccttctgggagccagagcataccttttcggtaaaaatggcgaacctacgcgataccaacttgaactacgtttacgctctcgtagcggaatgcaggcatggtatgagtggcgctatagtgcgggagaaagcccggtagagcttactttatacagcttaagggagcatattgacaatttactttccctggagaaagggatcgatcaaacggtggatatgcgtattgaaggcggaggtagctccttcacctggcaaatcaggcgctataaatatagccttgagtatgatcgggaaatgcagcttcttctcgctaattcagtgagcaatcgtacggggcagatcccttcacccgttattatgttactcagtgagcccgaaagaaaagcaatatcgcttgtatcgagaacaagcgaaggcgtaccggttggtgaattcgaattaagttcgacgatacaaaataatggcccatggctagttgttcccaaacaaggtgaagaagcttcatttcggccttgctacattgcaggcgagccggtaatccaaagcgatacttcggcaatacagtccctgcaaaaggcaacgcagctttttaatccccggtcggatgtaaatactattacgttagttttggaacaaatggcgagcgaccctgcacattcgggatggcagttcttacgtaacttatacgatcagtttggatatttaccgctggctacctttgaggtatggcgtgccttggtccagcatccacaggcattggcaatgtcactgtttaaatttgagatgtccattgattatctcagccgtattgaaagcgagtttcctgttttctgggaatttttgcctattactgaggttaaacatgcctcaatgcgttttcgcgcgtttctgactcataaaggtgctccggaggaaatgcagacaaagttactgggtcgaatgttccagcaattagggactgtatttccaacctatgccagcgaagtgcaattatggttagaccaagggaaattaccaccgacttttccggcacaaatgataaaaggcatcattcatgagtggtatcaggagctcttacgcgaacatggtgaatctcgttggccagagtttggcgggccgagtctttttcgttggtacacatcgcaaaaggatcccattatagaggtttcgcccgataccagttatcgatattccgtcactttgctccccatatttgctgccgctgttgcatgtggtaaaacaacatttgacagcgtttttgaaaataaacctggtgccgtatttttcttaagacaagtcagagattttgactcgcgatggtttaatgccattttccagtattgcttattgcgtaatgtggctacgaaataa

SEQ ID NO: 30392 - protein, 543 aa, Bifidobacterium longum subsp. longum ATCC 55813
MADVMRELERLRPVYETGVLRLLLRQNAMLYVSLLRSTFDPLTGELPRETVEERFAQSLSSLADAGEYAPREDQTFAEAAHQILADLTREGEGDYAWLANSHDAASHRFLYRLTARAHRAIEALSRLEDESRALSGAQANSIIMEIEHARMQLTADPGERIKLLNREIKERKHEIKRIQQGKQHATLSEAQVEDVIAVIHNTLRGVPIDLRELVLDERDNGDALRRRMQAGDISVDENLTRYHDEYRRSFRESDSGRRFEDAFQVIITDEGRQQIDEALRAIAKTPYLAGESGVLLGQIRDELARIYDGIEAVRRQMRVSDEAISRLVRQQTDTRYRTMLTRLNRLYARLNADAKTHMGDASRPYDTATSDALFAPLPMRPAKSMTRATAPGLSDLAAEAPQSTPVADLRDMVNSGGPRLLRMVSLIRRNPVTVDRSDDRPGATLVDIAASFNRLPESERRESEIVGFLGGLGAVSGNAIADEPSTDGVGVGVDSDIATEPAPAQRGDTAIWHCVSIDGEPRNWITRPVLADMDELSIIVEEG

SEQ ID NO: 30393 - protein, 224 aa, Bifidobacterium longum subsp. longum ATCC 55813
MTVAEEHEEHEEHMDNANPYALFEGDIGDMPAEARMAAIALKRDRYISGPTYDTVLDNRDAVVRSLNNDLLDLVINERYRIMYATPVAGDDVTLRSLKTRVSLKREEAALLAFLRIRVLEYENVHADPADWLVSFEEIRAALATGAGYLAARNDEEGVAKQIGAIVSAMITYGYLVRLDDEAMYQITPLVPVVLDRELADTWLDVAEHGDGDTEDDDDDEKGAE

SEQ ID NO: 30394 - protein, 1182 aa, Bifidobacterium longum subsp. longum ATCC 55813
MMQATDVQMIADRWMLESRRLINWGSYEGYHEFRPSTDHKLPVTLLAGASESGKSTLVDAQISLLYPTGTPFNKASNSGRSERSDYTYLRGMVGVGSTETGDEPLYLRGRDENGAPQPVWGAIVDTYRNQTTGQVLSCAKFLYLMPGDGRGDVRRQYVVWGKPVDPRRMDQYRDAPFTPAQLKATYPDCLTFPSAEAFHTHIWSAMGLSEAACRLLHKIQSADAPSRLDDIFKQGVLGVPEALDLARTTVEDYERYDENFHAMDEKTRRMDTLRGIQQAYGEYAAARGKARAFEPVKPAVDGTVPAVLRDWALARMRGEVAVQLPADRAEQQNSEAEAKLLRRRTEDLRTRLDMIRGQMQGLDGGNLTRLELELDQARRTLEDVQANRTRIEQTFASIGETLPGDEQAWNERRINAVNFKREYNKRDGECEEALTAAINARAGARGDLERLQRDFDRQRSQRTRISQQMDETRAMLCRATGLTPAELPYVAELMDVNEHEEDWRLAMNVAYAPIAQTILVDKRHEQGFAAKVSTIDPRTMPRRTWQFVDTARHYDDTGAHANILTGKQDGDWLSGKLRYRDDSPFADWLRSQTQDERFDALCVTAIDDTDRTNRQVQADGQIKSGARGQHGTKDRAQVIGFVNETYLNALAAQVDAARNALSQADTDYTAAKTQSDNLHRELELANQLAYTSWERIDIAGAQRTITDTQDAIASIKNDPKLAELAKQRDELNAELDRVERQRIESDQAAARAGSAVEAALIWLRDHADTGTTDAAGATADNDDDAASGPLPDEVTAALAESYDNRFAGLADAAMRAHMIIGAGAAGTQAPGESFPERTIAGIGKDMASRINLLNGQADAARTGVESKMSTYIALYAADDDSLTASVEDYRYYLDELASLTQLAAVAATDAEYRRCLEQLLRSFLTIKRAIDTDASDIHDQLDRINAMLKGQQFGPKHGSLSLHADVRRPERTFWAQLIRVIGTLNDWKSADVNDSDASRKAFAACAPMVGLLRAELAQVKDANGVKSYGARNLDPRCRSSFYAIVHHADGPDERITSTGGRSGGALQELTSFVYGAALIYLLGGGLTSEPSYTTLFLDEALIKADGRYTQRALTVLPRLGFQVIVSAPESKTGEILEVSTKAYVTYKDPDTGLTSLREAVLHQNDMDDESSSDILKDDGVAE

SEQ ID NO: 30395 - protein, 397 aa, Bifidobacterium longum subsp. longum ATCC 55813
MGTMVGMKDIAAITTCVKKHMRSHMYDIEPAWPFPVPVGLPDQAFLETNAIAVHDNNNEIRQWASKNGCEIITKHRTIGTSVELISKVVVPDESIAMRVVGRTLAAECREARRRIACLVAACDVAPETIESAARMTGHEQPDDFDLLVSAVRYFRHHDVTGMTPRQIPLTGFSGKWLNESKTNRRKAICRLLGVETLGLSKRPTELRFRYLDPVRDDAELERIIWCPWEGEALSGIKYAVIVENKDTYQTMPPIAQGICIWGSGRAVSDAVPAVPALRDMRIVYWGDMDADGLEILSTLRESGIECDSILMDCDAYDRYHRFGTDRTERSAKIAMREPKPTPGLQSAERRLYERLCADKTIAYRRIEQERIPMRDAVDELRKLGIPVESIENQDLPI

SEQ ID NO: 30396 - protein, 510 aa, Xylella fastidiosa 9a5c
MDHATLTTLRERHPAWRLLTSPHAPLVASFLHRVFVAPNARMISETKITQALEDTLYALREHEGPEAYPKGALDYLNDWAAPDKGWLRKFYTPGTDEAQFDLTPATEKAILWLLSLTERSFVGTESRLLTLFALLEQMSTGTETDPIKRLDELRKKRNALDIEIAHVLAGDAPLLDDTAVKDRFQQFQQLARELLFDFRQVQDNFRQLDRKVREKIALWEGTKGALLDEIMGERDAIGNSDQGRSFHAFWDFLLSSRRREELSERLDQVLALPAVAALHPEPRTRYVHYDWIDAGAQTQRTISQLSQQLRHFVESRAFLENRRILDLLHSIERNALGLRDITPSDTVMYLDAIGADIQLPLERPLFTPRAKPRLADLVLVAGTDDIDTTPLFNQIVMDKARLRLAIQRALHTQSQISLRTLLQTEPLQQGLAELVAYLELAHTSNSNDPDGLRGIVDETVEEPIRWQANNTVGETVTRQARLPRIIFARRALSDHQKSSQGDRDHEGHAV

SEQ ID NO: 30397 - protein, 1144 aa, Xylella fastidiosa 9a5c
MRETSTLGLNFVADDKRVGFRLQHLEVVNWGTFNTRVWCYTLGGRSGLLTGDIGSGKSTLIDAITTLLVPAQRVAYNKAAGADARERSLRSYVLGYYKSERNDATGTAKPVALRGTSNYSVILGVFHNVGYDKVITLAQVFWLKDSQSQPARLFVVAERALGIAADFNNLGGDIKTLRKKLRGAGCEVFDSFPPYGAWFRRRFGIQHEQALELFHQTVSMKSVGNLTDFVCSHMLEPCDVGSRIEALICHFDDLDRAHQAVLTAKQQVKLLVPLVDDVQKHQTQLASIQALEAGRDTLRPYFAQLKGELLKHRLDALAAEAAQLTVEIQHLEEQRKAADSEVTQLRQALRDNGGDRLEELAAEIEQLEQAKAQRQKKSDRYQTLLTKIDETAPADAIGFLTQQQRFAQHTEELNAAIERLHNDKSEKDRALYDAREKHTTLLAEINSLQQRQSNISAAQIRIRHDLCMALSIDAEALPFAGELIQVRKEDARNWEGAAERLLHGFGLTLLVPDAHYKAVATWVNNQQLQGRLVYFHMRPRNTTQEAALHAQALVHKLIIKPESPHYTWLQQELQRRCNVVCCDTIEQFHCEARAITQAGQIKDPSGRHEKDDRHRIDDRSRYVLGWSNADKLHTLNAQRQHLEDSMGMLGQDIGTIQRECQKQQERLDALNKLGEYPEFADIDWMSLVRQIAGRKKEQEQLQATSNILQTLQQQLTAAQTQVSVLERKCKNAWHEQGEVKSQQKTAQQMWNQARSVWDDAPLSQAQITLLAGWRQQALGEHVLSVESCDNHEQQVRQWLQKRIDAENAHLRQLNDRITGAMHRFKNQFKAETVEMDADLAALPEYARMLNDLQKDDLPRFEARFKALLNVNTINEIASFNAQLNRERETITERIKDINQSLHGIDYNQDRYINQSLHGIDSQKGRYITLLAQPSPDAEIRDFQQDLRACTEGTLTGSDDEQYSDAKFLQVKRIIDRFRGREGLSDADRRWTAKVTDVRNWFVFSASERWRADESEYEHYADSGGKSGGQKEKLAYTVLAASLAYQFGLKWDEVRSESFRFVIIDEAFGRGSDESAEYGLRLFQKLNLQLLIVTPLQKIHIIEPFVSSVGFVHNKGGCDSQLRCLSIEEYQTEKANGSAAGGAAR

SEQ ID NO: 30398 - protein, 401 aa, Xylella fastidiosa 9a5c
MSWATPASLCAQVERLWKRGDLLRALVTDTHAMTWPHRLTLQTPSAADLSNRFQAVRDWVQTIADTPQIRIQWGEWNHRVQGTQRFPEAVYLNTLQAALAFIGKTHQAQQFEAVWQQTAAAQPVLLAWLLRRPIQALNVADRWERLLAVIAWLQAHPRPGVYLRQVDVPGVDSKFIETHKSVLTALLDLALPPESIDTAASGVRQFTRRFGFLDKPVPIRFRLLDAALPGLPGWAGLPDISLDAAHFAALTLPITRVFIIENEISFLTFPKVAGAIVIFGAGYGWEQLARAAWLHACQLHYWGDMDTHGFVILNRLRGYFGHVTSVLMDQDTLLAHRVHWDEESKPTRQALEHLTTEEAAVYDDLRYDRHQPRLRLEQERIGFHWVCDRLACLLSAPPQDA

SEQ ID NO: 30399 - protein, 489 aa, Xanthomonas campestris pv. campestris str. ATCC 33913
MKHQARIAGYRHLRDQPAWKLLAADHAPELIGLLQTLLMDGERRLPSAVLHARLQRQLDALRGDELSRELPRTAQAYLAHWLAQGWLERRLPEGAAEEEYELSRAATQAIRFIAGLRESGSSATESRLSLVIQQLVQLAGQTEADPDARLAALRAERERIDAEIERVAAGRVGALDGKRALERTRDLIHLSDELAEDFHRVRDDFEQLNRQFRERIIDDEGARGDVLEQLFNGVDVIADSEAGRTFEAFWSLLNDTQQSSQLDQALDALLARGFARKLDRRERAFLRGLTGTLLERGGEVHTVMQHFARSLRGFVQSRGYLEQRRLNQLLKQAQGEALHLRESLHATTATGYTQALSGSRLRSLSQWRLHDPRLTQVDGRVYAADAAEISLDSVGDLVAQSEIDVRSLRRDLHALLGERPRLTIGDALQQRPAVQGLGSVIGYLSLGTRHGLVIDGHMETVQWEGGDGTLRRARIPLVWFTREKRNELV

SEQ ID NO: 30400 - protein, 235 aa, Xanthomonas campestris pv. campestris str. ATCC 33913
MNWSEQAALDAHDDDDADAHASALRLPASDAASAAQGGALFLGDTGTLPFDARRALCQLLAGPSIDAQRHGGLWPALLRNEVAVRQVLCELFLELVLDREGGVAFTRQADTAELESPTLLRSAPLTFIESVLLLFLRQQLAEADTRGERAVVDEAQLVEALSVYEKNVSTDRAGFTRRVMTAIGKMRENQLLSRLRGSEERYEVSPVLKLLFSAEDVQALVVAYRELREGEVAAD

SEQ ID NO: 30401 - protein, 1338 aa, Xanthomonas campestris pv. campestris str. ATCC 33913
MNSQSNLSPASPGASLFAETLAEQRAQQFRMRRLQVHNWGTFNGLTEVPIAEKGFLFVGRSGSGKSTLLDAMSALLTPPSIVDFNAAAREAERSGRDRSLVSYVRGAWADQQDSASGEIATQYLRKGATWTALVLEYRNAQGEAVSLVRLFWIAGSGNAAADVRRHYMVVPRAFDVASELEGFDLDLRKLKARLGEDVAHFDGFAGYAERFRHALGIGNDMALRLLHKTQSAKNLGDLNAFLRGFMLDEPRTFEAADRLVEDFAELDGAHHAVVTARRQVETLSPAREHHAALMALRRSVGELRELQLGVDSYREQQRLALLEARLQEVDSQDRGLAGEEGQRRESLDNHEQKLAGLEREQRAAGGEQIEELERERVRVERERDERLRRRAQIEQACRQLGTALAAGASGFAAQVAHAQGVLDGGKQHASTLDEAIAERMGERRDDERRFAEIRAELDALKKAPSSMPAPMQALRARLCDDTGIAESALPFVGELLQVREDQVAWRGAIERVLHGFAQSLLVDERHYAQVSEWVNRTHIGTRLVYFRVRRNDELHSRRVDPNALPGKLQLREHAFTEWLRNELTRRFDYACVDNAAALRNADRAITREGQVKHPGDRYEKDDRHAVNDRKRWLLGHDNRDKLKVFEREAQALAQRIASCDADVAALRKQREQDQEKRLAAHTLVERDWDEIDVGPKLQRLSDIDEQLQQLREGDSGLRALGQAIDTARTLRDQAKRTYEDVRLERAQLARERVRLEQQQAACAGRAGTAALTPTQLQGLQERLAALAPLSLDTLEAHFRVVERGLAEQLAESQGRDSRLSAQLLECFRRYCQQWPEDSGDFTVSLASADDFLARLDRLESDGLPRHEHRFFDLLQTQSKNNLLALQRHTAEAHKGIKQRMDEVNASLEQVPFNRDTILTIEVSDRRLAEVQEFQQQLRAVLSHQQTEDRALAEAQFATLRTLVARLGAQEPEARRWREQVLDVRLHVEFIGVELDAQTRAQVEIYRSGAGKSGGQRQKLATTCLAAALRYQLGGEDGELPRYCAVVLDEAFDKADNEFTALAMNIFENFGFQMVVATPLKSVMTLEPFIGGACFVEISGRHNSGVLLIEYDEQAQRLKLPERSRGEEAAAPPAEQGGAVAPGERAERAPVIAVESGHAASVHLAETTAVLVQGDAVTDGQSRGHKRTRAAATASTAAPVPAPAGKRSTSAAATSATAAPATGTADASNARRKQAATPDTPPKPTKPASTRSGSSGTPAAKRTTTAKAAAVLKASNATPAVAAKRTGKAPKRVSKPASAQQVAKPVSKSKPTAKPATAASAKSRVASTRGSAPKARSKR

SEQ ID NO: 30402 - protein, 489 aa, Xanthomonas axonopodis pv. citri str. 306
MKHQARIAGYRQLREQPVWKLLAADHAPELIGLLQTVLMDGERRLPSAVLHARLQRQLDALRADELSRELPRTAQAYLAHWLAQGWLERRLPEGAAEEEYELSRAATQAIRFIVGLRESSSSATESRLSLVIQQLVQLAGQTEADPELRLAALRDERARIDAEIERVASGRVAALDGKRALERARDLIHLSDELAEDFHRVRDDFEQLNRQFRERIIDDEGARGDVLEQLFDGVDVIADSEAGRTFEAFWSLLNDTQQSSQLDQALDALLARGFARKLDRRERAFLRGLTGTLLERGGEVHTVMQHFARSLRGFVQSRGYLEQRRLNQLLKQAQGEALQLRDSLHATTATGYTQPLSSSRLRSLSQWRLHDPRLTQVDGRVQAADAAEISLDSVGDLVAQSEIDVRSLRNDLHELLGQRPRLTIGDALQQRPAVQGLGSVIGYLSLGTRHGMVIEGQMETVQWEGSDGAVRRARIPLVWFTREKRNELV

SEQ ID NO: 30403 - protein, 210 aa, Xanthomonas axonopodis pv. citri str. 306
MPMAQTSSAEPRGELFLGDTGTLPFDARRALCQLLAGPSIDAQRHGALWPALLRNEVAIRQVLCELFLELVLDREGGVAFTRQADTAELESPTLLRSAPLTFIESVLLLFLRQQLAEADTRGERAVVDEAQLVEALSVYEKNVSTDRAGFARRVMTAIGKMRDNQLLSRLRGSEERYEVSPVLKLLFSAEDVQALVVAYRELREGEVALD

SEQ ID NO: 30404 - protein, 1340 aa, Xanthomonas axonopodis pv. citri str. 306
MNSQSNLSPAQPGASLFAETLAEQRAQQFRMRRLQVHNWGTFNGLTEVPIAQKGFLFVGRSGSGKSTLLDAMSALLTPPSIVDFNAAAREAERSGRDRSLVSYVRGAWADQQDSASGEIATQYLRKGATWTALVLEYANAHGQTVSLIRLFWIAGSGNAAADVRRHYMVAPRRFDVATELDGFDLDLRKLKARLGDEVAHFDGFAGYAERFRHALGIGNEMALRLLHKTQSAKNLGDLNAFLRGFMLDEPRTFEAADRLVEDFAELDGAHHAVVTARRQVETLTPAREHHAALMALRHSVGELRELQLGVDSYREQQRLALLEERLQELDNQDRGLAGEEGQRRESLDNHEQKLVGLEREQRAAGGEQVEELERERARVERERDERLRRRAQIEQACRQLGTALAAGASGFAAQIAHAQTVLDNGKHDASALDDAIAERMGARRDDERRFAEIRTELEALKRAPSSMPAPMQALRARLCEDTGIAEAALPFVGELVQVREDQTAWRGAIERVLHGFAQSLLVDERHYAQVSEWVNRTHIGTRLVYFRVRRNDELHSRRVDPGALPGKLQLREHAFTEWLRNELTRRFDYACVDNAAALRNADRAITREGQVKHPGDRYEKDDRHAVNDRKRWLLGHDNRDKLKVFEREAQTLAQRIASCDADVAALRKQREQDQERQLAAHTLVERDWDEIDVGPKLQRLSDIDEQLVQLREGNSGLRALGQAIDTARTLREQAKRTYEDVRLERAQLARERVRLEQQQAACAGRAGSATLTPTQLQGLRERLAALTPLSLDNLEAHFRVVERGLAEQLADSQGRDSRLSAQLLECFRKYCQQWPEDSGDFTVSLASADDFLARLDRLESDGLPRHEHRFFDLLQTQSKNNLLALQRHTAEAHKGIKQRMDEVNASLEQVPFNRDTVLTIEVGDRRLAEVQEFQQQLRAVLSHQQTEDRALAEAQFSTLRALVARLGAQEPEARRWREQVLDVRLHVEFIGVELDAQTRAQVEIYRSGAGKSGGQRQKLATTCLAAALRYQLGGEDGELPRYCAVVLDEAFDKADNEFTALAMNIFENFGFQMVVATPLKSVMTLEPFIGGACFVEISGRHNSGVLLIEYDEQAQRLKLPERSRGDEPAVADATDAAPSIEAAAESAGVQGAASADGMATNGVPMHTASPATEETPPAAQETQTGQRKPAVATTSKQNKTAKTASSTRAAAQPQAKRPKKSPSRTPALAGKPASDKRPAGVPAVSSGVASRSNVGKTTRSSKTPGKPIAATSASNATSRKVAAASAALKTAAAKPRATAASTGQPARGAGKTTSTRAVAKPSPATTRGAKAGAPRSRGKR

SEQ ID NO: 30405 - protein, 513 aa, Xylella fastidiosa Temecula1
MTEMDHATLTTLRERHPAWRLLTSSHAPLVASFLHRLFVATNARLLSETKITQALEDTLYALREHEGPEAYPKGALDYLNDWSAPDKGWLRKFYTPDTDEAQFDLTPATEKAILWLLSLTERSFVGTESRLLTLFALLEQMSTGTETDPKKRVEELQKKRDALDIEIAHVLEGHTPLLDDTAIKDRFQQFQQLARELLSDFRQVQDNFRQLDRKVREKIALWEGTKGTLLDEIMGERDAISDSDQGRSFRAFWNFLLSSRRREELSERLGQVLALPAVAALHPEPRTRRIHDDWIEAGEQTLRTISQLSQQLRHFVESRAFLENRRIMDLLHGIERNALGLRDMTPSGTVMHLDAIGADIQLPLERPLFTPHAKPRLADLVLAAGTDDIDTTPLFNQIVMDKARLRLAIQRALRTQSQISLRTLLQTEPLQQGLAELVAYLELAHTSNSSDPDGLRGIVDETVEEPIRWQANNTVGETVTREARLPRIIFTRRALSDHQESSQGDRAHEGHAV

SEQ ID NO: 30406 - protein, 237 aa, Xylella fastidiosa Temecula1
MKDTLYESDVVATPRNALPTVPKLSHLMVYLLKGVLYRNQEERLWSSLLRLQTQVREHTAVLWLDLVLDEAEGYAFLKSRPDPDAAEGSARPPRLIVRRALPYKVSLMLALLRKRMAESDARGGAPRLVLTREEIAELMRVFLPDATNEARLIDQLDTTIKRVVELGFLRPLPSPSSSTPNHNNYEVSRILKAFVDAQWLAEFDARLEAYHAVPSDDQDDQDEPDTTPEAQGESGDA

SEQ ID NO: 30407 - protein, 1143 aa, Xylella fastidiosa Temecula1
MRETSTLGLNFVADDKRVGFRLQHLEVVNWGTFNTRVWCYTLGGRSGLLTGDIGSGKSTLIDAITTLLVPAQRVAYNKAAGADARERSLRSYVLGYYKSERNDATGTAKPVALRGTSDYSVILGVFHNVGYDKVITLAQVFWLKDSQSQPARLFVVAERALGIATDFNNLGGDIKTLRKKLRGAGCELFDSFPPYGAWFRRRFGIQHEQALELFHQTVSMKSVGNLTDFVCSHMLEPCDMGSRIEALICHFDDLDRAHQAVLTAKQQVKLLAPLVEDGKKHQTQLGNIQTLEAGRDTLRPYFAQLKGELLKHRLEALAAEAAQLTVEIQHLEEQRKAADSKVTQLKQDMRDNGGDRLEALAAEIEQLEQTKAQRQKKSDRYQTLLTKIDETAPADAIGFSTQQQRFAQHTEELNAAIATLHNDKSEKDRALYDAREKHTKLLAEINSLQQRQSNISAAQIGIRHDLCMALSIDAEALPFAGELIQVREDARDWEGAAERLLHSFGLTLLVPDAYYKAVAEWVNREQLQRRLVYFHMRPRNTTQDAALHAQSLVHKLIIKPESPHYTWLQQELQRRCNVVCCDTMEQFHREVRAITQAGQIKDPSGRHEKDDRHRIDDRSRYVLGWSNADKLHTLNAQRQHLEDSMGMLGQDLGTIQRECQKQQERLDALNKLGEYPDFVDIDWMSLVRQIAGLKEEHAELQTTSNILQTLQQQLTEAQTRVKVLEDKCKNAWHEQGEVKSKQKTAQQMWNQAHSAWDDAPLSQAQIALLAGWRQQALGEHVLSVESCDNHEQQVRQWLQKRIDAENAHLRQLNDRITGAMHRFKDQFKAETVEMDADLAALPEYERMLNGLQKDDLPRFEARFKALLNVNTINEIASFNAQLNRERETITERIKDINQSLHGIDYNQDHYINQSLHGIDYKRGRYITLLAQPSPDAEIRDFQQDLRACTEGTLTGSDDEQYSDAKFLQVKHIIDRFRGREGLSDADRRWTAKVTDVRNWFVFSASERWRADESEYEHYADSGGKSGGQKEKLAYTVLAASLAYQFGLKWDEVRSESFRFVIIDEAFGRGSDESAEYGLRLFQKLNLQLLIVTPLQKIHIIEPFVSSVGFVHNKGGCDSQLRCLSIEEYQAEKTNGSGPRGDAR

SEQ ID NO: 30408 - protein, 401 aa, Xylella fastidiosa Temecula1
MSWATPVSLRAQVERLWKQGDLLRALVTDTHAMTWPHRLTLQAPNAADLSERFQAVRDWVQAIVGTAQIRIQWREWKHRVQGTQQVPAAVYLDTLQDALAFIGKTHEALQFEAVWQQTAAAQPVLLAWLLRRPTQALEVADRWERLLAVVAWLQAHPRPGVYLRQVDVPGVDSKFIEAHKSVLTALLDLALPPESIDTAANGVRQFTRRFGFLDKPVPIRFRLLDAALPGLPGWAGLPDISLDAAHFAALTLPITRVFIIENEISFLTFPKVAGAIVIFGAGYGWEQLARAAWLHACQLYYWGDMDTHGFTILNRLRGYFGHVTSVLMDQDTLLAHRVHWDEESKPTRQALEHLTTEEAAVYDDLRYDRHQPRLRLEQERIGFRWVCDRLACLLSAPPQDA

SEQ ID NO: 30409 - protein, 490 aa, Xanthomonas oryzae pv. oryzae KACC 10331
MKHRARIARYRALREQPLWKLLAADQSPEVIGLLQTLLLDSERGLPAAVLHERLQRMLDDLNVDQLSRELPRTAQAYVAHWLAQGWLERRLPEGAQQEQYELSTQAMQAIRFADGLEQARGAATESRLALVMQQLSQLAALTETNPDARLSALRDERDRIDAEIARVAAGKVASLDGKRALERARQVIALADELTEDFRRVRDDFEQLNRQFRERIIDDEGERGEVLTRLFEGVDVIGDSEAGRSFQAFWALLNDAEQSAQLDAALETVLARAFARKLDRRERSFLRGLTGTMLERGGQVHDVMQHFARSLRGFVQSRGYLEQRRLNQLLKQAQAEALGLREHLRAQRSVGHDLNLTTSRLRSLSQWRLHDPRHTQVDGSIQRNDAAAISLDSVGDLVAQSEIDFRSLRRDLYELLGEHAQLSIAQVLAQRQAEQGLGSVIGYLSLGTRHGQVDAQRSEIARWRGGDGQWRGARIPLVWFSQEKRNELAG

SEQ ID NO: 30410 - protein, 232 aa, Xanthomonas oryzae pv. oryzae KACC 10331
MNWQADNAETDAHAPSAHADAAVPEADAATGLFPGDSGALPVDARRVLCQLLAGPSVDVQRHSKLWPALLRHEAAVRSRLADLFLELVLDRDAGVAFTRQADTGELEAPVLLRSLPLTFIDSVLLLHLRQQLAEADARGVRAVVEDAPLSEALAVYEKNLSTDRAGFMRRVGNAIQKMKDNHVLTRLRGEDNRYEVSPTLKLLCSAEDVSALAQIYRQLREQPGTVGDAERA

SEQ ID NO: 30411 - protein, 1098 aa, Xanthomonas oryzae pv. oryzae KACC 10331
MKSSSSSLFADDLPEPRVQQFRMRRLQVHNWGTFNGLTDVPIAAKGFLFVGRSGSGKSTLLDAMSALLTPPNLVDFNAAAREAERTGRDRNLVSYVRGAWADQQDSASGEIATQYLRKGSTWTALVLEYRNGEGRVISLIRLFWIAGSGAAAADVRKHYMVAERSFDIASELVGFDLDLRKLKARLGDDIAHFDNFSGYAERLRHQLGIANEMALRLLHKTQSAKNLGDLNVFLRGFMLEAPKTFDASERLVGDFAELDGAHLAVVTARRQVETLLPARAHYEDLQSVQRQRGRLQELKLGLDPYREQRRLALLDARLHALDVNDQGLAGEEGQRRAAVDNHQQRLSDLEAQRRSQGGERIDALEREQLQVQGELARRSDKRAKAEQVCRQLEQTLADNAHGFAQQSAQARAALEDGQRLAAEQDEAIGERIAGKREDSQRFAQVRAEIEALTRNPSNIAAPMQALRARLSEETGIPEAALPFVGELIQVREEDAAWRGAIERVLHGFAQSLLVDERHYAELAEWVNRTHLGSRLVYYRVRNNEQAFSGREPGSASLLHKLQLREHPFAGWLRRELGKRFDYDCLESAKALRTAERAITREGQVKHPGERYEKDDRHAVGDRRRWLLGFDNRDKLALYEREAIELAQRIAACDADVAELRARRERDASRRLAQHTLANLAWEEIDVAAQLQRRDDIASALRQLREGDANLRALGEAIERTRGDLEQAKRTFDGVREERIALGVERTRLEKQRLHCADADARVVTPLQREGLEERLANLGALSLDNLEAHFRQIGNAIAEQTSASDSEHNRLEQLLLGCFRRYSQQWPEDSGDFIISLAGAEDFLARLQRLERDGLPQHEARFFELLQSQSKNNLLALQRHTAEARKSIAQRLDEVNASLEQVPFNHGTLLTIELSDRRLPEVIDFHQRLRDVLGHHQTDQRDVAEQQFAVLRELVRKLGSADGEDKRWRELVLDVRLHVEFVGVELDAATRQQVEIYRSGAGKSGGQRQKLATTCLAAALRYQLGGEDGELPRYAAVVLDEAFDKADNEFTALAMNIFENFGFQMVVATPLKSVMTLEPFIGGACFVEIAAVTTRAYC

SEQ ID NO: 30412 - protein, 394 aa, Xanthomonas oryzae pv. oryzae KACC 10331
MMAPAAPMMLPAAALLALRGQWQRARGQWLIGEGAPQAIGLRAPTQAQAIARFDAFGAWLQEWSRTGLPGRVEYRAVSWTQLGPQRLPQTWVLDDAGQAAGALGEGERWARARQRSAALQARWPQAVALAARLRRQFDLLADWPEVEFARLVAVVEWLHQHRDSGLFLRQLPIAGIDSKWIEPHRGVIADWLAGLRGIAEPRSFASLSGLRNAPDRVRLRLLDPALRHHIGGLEDITAPIAQIAALRLPVRRVLIVENRETGLACESLPGTLVLMARGYAVEYVSNIGWLRELPLYYWGDIDTHGLAILHRLRTHAPHTTAVLMNEATLQATPRALWGHERRPHRAQRLAALSIQEQRLYADLRVGRFGPSPRLEQERIAWDYAWPRIQAALAD

SEQ ID NO: 30413 - protein, 543 aa, Bifidobacterium longum NCC2705
MADVMRELERLRPVYETGVLRLLLRQNAMLYVSLLRSTFDPLTGELPRETVEERFAQSLSSLADAGEYAPREDQTFAEAAHQILADLTREGEGDYAWLANSHDAASHRFLYRLTARAHRAIEALSRLEDESRALSGAQANSIIMEIEHARMQLTADPGERIKLLNREIKERKHEIKRIQQGKQHATLSEAQVEDVIAVIHNTLRGVPIDLRELVLDERDNGDALRRRMQAGDISVDENLTRYHDEYRRSFRESDSGRRFEDAFQVIITDEGRQQIDEALRAIAKTPYLAGESGVLLGQIRDELARIYDGIEAVRRQMRVSDEAISRLVRQQTDTRYRTMLTRLNRLYARLNADAKTHMGDASRPYDTATSDALFAPLPMRPAKSMTRATAPGLSDLAAEAPQSTPVADLRDMVNSGGPRLLRMVSLIRRNPVTVDRSDDRPGATLVDIAASFNRLPESERRESEIVGFLGGLGAVSGNAIADEPSTDGVGVGVDSDIATEPAPAQRGDTATWHCVSIDGEPRNWITRPVLADMDELSIIVEEG

SEQ ID NO: 30414 - protein, 222 aa, Bifidobacterium longum NCC2705
MAEEHEEHEEHMDNANPYALFEGDIGDMPAEARMAAIALKRDRYISGPTYDTVLDNRDAVVRSLNNDLLDLVINERYRIMYATPVAGDDVTLRSLKTRVSLKREEAALLAFLRIRVLEYENVHADPADWLVSFEEIRAALATGAGYLAARNDEEGVAKQIGAIVSAMITYGYLVRLDDEAMYQITPLVPVVLDRELADTWLDVAEHGDGDTEDDDDDEKGAE

SEQ ID NO: 30415 - protein, 1181 aa, Bifidobacterium longum NCC2705
MQATDVQMIADRWMLESRRLINWGSYEGYHEFRPSTDHKLPVTLLAGASESGKSTLVDAQISLLYPTGTPFNKASNSGRSERSDYTYLRGMVGVGSTETGDEPLYLRGRDENGAPQPVWGAIVDTYRNQTTGQVLSCAKFLYLMPGDGRGDVRRQYVVWGKPVDPRRMDQYRDAPFTPAQLKATYPDCLTFPSAEAFHTHIWSAMGLSEAACRLLHKIQSADAPSRLDDIFKQGVLGVPEALDLARTTVEDYERYDENFHAMDEKTRRMDTLRGIQQAYGEYAAARGKARAFEPVKPAVDGTVPAVLRDWALARMRGEVAVQLPADRAEQQNSEAEAKLLRRRTEDLRTRLDMIRGQMQGLDGGNLTRLELELDQARRTLEDVQANRTRIEQTFASIGETLPGDEQAWNERRINAVNFKREYNKRDGECEEALTAAINARAGARGDLERLQRDFDRQRSQRTRISQQMDETRAMLCRATGLTPAELPYVAELMDVNEHEEDWRLAMNVAYAPIAQTILVDKRHEQGFAAKVSTIDPRTMPRRTWQFVDTARHYDDTGAHANILTGEQDGDWLSGKLRYRDDSPFADWLRSQTQDERFDALCVTAIDDTDRTNRQVQADGQIKSGARGQHGTKDRAQVIGFVNETYLNALAAQVDAARNALSQADTDYTAAKTQSDNLHRELELANQLAYTSWERIDIAGAQRTITDTQDAIASIKNDPKLAELAKQRDELNAELDRVERQRIESDQAAARAGSAVEAALIWLRDHADTGTTDAAGATADNDDDAASGPLPDEVTAALAESYDNRFAGLADAAMRAHMIIGAGAAGTQAPGESFPERTIAGIGKDMASRINLLNGQADAARTGVESKMSTYIALYAADDDSLTASVEDYRYYLDELASLTQLAAVAATDAEYRRCLEQLLRSFLTIKRAIDTDASDIHDQLDRINAMLKGQQFGPKHGSLSLHADVRRPERTFWAQFIRVIGTLNDWKSADVNDSDASRKAFAACAPMVGLLRAELAQVKDANGVKSYGARNLDPRCRSSFYAIVHHADGPDERITSTGGRSGGALQELTSFVYGAALIYLLGGGLTSEPSYTTLFLDEALIKADGRYTQRALTVLPRLGFQVIVSAPESKTGEILEVSTKAYVTYKDPDTGLTSLREAVLHQNDMDDESSSDILKDDGVAE

SEQ ID NO: 30416 - protein, 394 aa, Bifidobacterium longum NCC2705
MAGMKDIAAITTCVKKHMRSHMYDIEPAWPFPVPVGLPDQAFLETNAIAVHDNNNEIRQWASKNGCEIITKHRTIGTSVELISKVVVPDESIAMRVVGRTLAAECREARRRIACLVAACDVAPETIESAARMTGHEQPDDFDLLVSAVRYFRHHDVTGMTPRQIPLTGFSGKWLNESKTNRRKAICRLLGVETLGLSKRPTELRFRYLDPVRDDAELERIIWCPWEGEALSGIKYAVIVENKDTYQTMPPIAQGICIWGSGRAVSDAVPAVPALRDMRIVYWGDMDADGLEILSTLRESSIECDSILMDCDAYDRYHRFGTDRTERSAKIAMREPKPTPGLQSAERRLYERLCADKTIAYRRIEQERIPMRDAVDELRKLGIPVESIENQDLPI

SEQ ID NO: 30417 - protein, 499 aa, Pseudomonas putida KT2440
MEDDLLSRAEHYSTLRTHHPAWLLLASLYAPLVLSSLRTLFEHGQEGIDLDDALHSLAQAIANNADQEQSQTEPGTALQQANRELGEWIKRRLIVERSGRLYATDALESAFRFVDSLDDRVMTSTASRLSVVQREIENLETNLNSDPKSRALSLKRRIRELQIELDRAKAGHVPIFDEAKAIEGIREIYALATSLGADFRRVEDSWRNADRLLRQSIISDQCTRGEVLDNLLDGQDALLTTPEGKVFDSFQLQLRAPVELDLMRTRIRNIMRHPAVPQALHKYQQTELLRLVPRLLQESAAVLRARARSERDVKSFLKTGLVAEHHRVGHLLNEFLSLALRINWQRQAIRRTPVPIPPVGMALFGVPAVERLRFKAIAEEHAPTLDLTPRPADLEQIEDEFWQSFDGLDRDAFVLETLRILAQEGRPLSLAELASLLPPTHDLECFTLWITMAREAGLLIDEQEIERFDLADAEDRWWRFNLPFTQLESEKLQNIKWEL

SEQ ID NO: 30418 - protein, 251 aa, Pseudomonas putida KT2440
MPSIFDELTSKPADQEAPEADKERDADTEPLDGDFFRKIDEELRTTRAVREVVQLLYKNGDIEESEDPGLYRAAVANADLVERIMEPFDLNVQLDELRGLAFVVVRQEPGDTADGWTHPLVRRHRFTLEQTLLIALLRQHLIAFEMESGVGAGVAQMTVDDVVTQLHTYLGEPGSDLKDRSRALNLLEQLKNHHLVTTIDSNDRFTIRPLIAHVANPDNLSTLIRWLETFGSSLDRSTNVDPVDEEGEEQP

SEQ ID NO: 30419 - protein, 694 aa, Pseudomonas putida KT2440
MTNPNGSYVLTAMELYNWGSYNGLHQAPIDPAGTSLIGTTGSGKTTFIDAFMTLICSNPRYNLASTGGVESDRDLVSYVRGVSGPGESQGTKQQCARPGRTISGICATFRRADTLVRMAALFSFEGTSSAAAELEKCWILSENPEQTLESWLVAYHGNGKRGLSQIENNVQNVWVHGTRKEYLARIRALFQVGDNAFSLLNRAAGIKQLTDIDSIFRELVLDDRSAFGRAAEVVKSFEDLSEIHQELEIARAQQKSLRPIADLWEIYKNESDSLQELKTVESVAPVWFAEQSHQLWLAERMRLESSAEESAQHLQQLISQRTELKQQCDMHLQAYLQKGGASIDQLRKRVEEWEAVREIRLNYSSQYQHLARKLKLPDELSFSALAENKEQAAKQASVLVNEIKDQRTQAFQRGIVESDMRTKLLAVNEEIDDIKQRPGSNLPGQYHLFRSQLAAHLQVEESELPFVAELVQVKLQEQAWRGAIERAIGGHRLRVLVPAGVAKAALQWINSRHNHLHVRILEVDPQVEARAFFQDGFARKLAFKAHPFRKAVEALIAANDRHCVSDADALHAMPHAMTKEGLMSGKEHFFEKRDQRLLSSDWFTGFDNRDRLAYLGQEAATADLQLAAAIDAVRAAQDRLGSLEETNAAYQLIRGVEFNLIDLPGADNQLIDLRGQLDYLTRPNTDVATAKKLL

SEQ ID NO: 30420 - protein, 543 aa, Bifidobacterium longum DJO10A
MADVMRELERLRPVYETGVLRLLLRQNAMLYVSLLRSTFDPLTGELPRETVEERFAQSLNALADAGEYAPREDQTFAEAAHQILADLTREGEGDYAWLANSHDAASHRFLYRLTARAHRAIEALSRLEDESRALSGAQANSIIMEIEHARMQLTADPGERIKLLNREIKERKHEIKRIQQGKQHATLSEAQVEDVIAVIHNTLRGVPIDLRELVLDERDNGDALRRRMQAGDISVDENLTRYHDEYRRSFRESDSGRRFEDAFQVIITDEGRQQIDEALRAIAKTPYLAGESGVLLGQIRDELARIYDGIEAVRRQMRVSDEAISRLVRQQTDTRYRTMLTRLNRLYARLNADAKTHMGDASRPYDTATSDALFAPLPMRPAKSMTRATAPGLSDLAAEAPQSTPVADLRDMVNSGGPRLLRMVSLIRRNPVTVDRSDDRPGATLVDIAASFNRLPESERRESEIVGFLGGLGAVSGNAIADEPSTDGVGVGVDSDIATEPAPAQRGDTATWHCVSIDGEPRNWITRPVLADMDELSIIVEEG

SEQ ID NO: 30421 - protein, 224 aa, Bifidobacterium longum DJO10A; identical to SEQ ID NO: 30393

SEQ ID NO: 30422 - protein, 1181 aa, Bifidobacterium longum DJO10A
MQATDVQMIADRWMLESRRLINWGSYEGYHEFRPSTDHKLPVTLLAGASESGKSTLVDAQISLLYPTGTPFNKASNSGRSERSDYTYLRGMVGVGSTETGDEPLYLRGRDENGAPQPVWGAIVDTYRNQTTGQVLSCAKFLYLMPGDGRGDVRRQYVVWGKPVDPRRMDQYRDAPFTPAQLKATYPDCLTFPSAEAFHTHIWSAMGLSEAACRLLHKIQSADAPSRLDDIFKQGVLGVPEALDLARTTVEDYERYDENFHAMDEKTRRMDTLRGIQQAYGEYAAARGKARAFEPVKPAVDGTVPAVLRDWALARMRGEVAVQLPADRAEQQNSEAEAKLLRRRTEDLRTRLDMIRGQMQGLDGGNLTRLELELDQARRTLEDVQANRTRIEQTFASIGETLPGDEQAWNERRINAVNFKREYNKRDGECEEALTAAINARAGARGDLERLQRDFDRQRSQRTRISQQMDETRAMLCRATGLTPAELPYVAELMDVNEHEEDWRLAMNVAYAPIAQTILVDKRHEQGFAAKVSTIDPRTMPRRTWQFVDTARHYDDTGAHANILTGEQDGDWLSGKLRYRDDSPFADWLRSQTQDERFDALCVTAIDDTDRTNRQVQADGQIKSGARGQHGTKDRAQVIGFVNETYLNALAAQVDAARNALSQADTDYTAAKTQSDNLHRELELANQLAYTSWERIDIAGAQRTITDTQDAIASIKNDPKLAELAKQRDELNAELDRVERQRIESDQAAARAGSAVEAALIWLRDHADTGTTDAAGATADNDDDAASGPLPDEVTAALAESYDNRFAGLADAAMRAHMIIGAGAAGTQAPGESFPERTIAGIGKDMASRINLLNGQADAARTGVESKMSTYIALYAADDDSLTASVEDYRYYLDELASLTQLAAVAATDAEYRRCLEQLLRSFLTIKRAIDTDASDIHDQLDRINAMLKGQQFGPKHGSLSLHADVRRPERTFWAQLIRVIGTLNDWKSADVNDSDASRKAFAACAPMVGLLRAELAQVKDTNGVKSYGARNLDPRCRSSFYAIVHHADGPDERITSTGGRSGGALQELTSFVYGAALIYLLGGGLTSEPSYTTLFLDEALIKADGRYTQRALTVLPRLGFQVIVSAPESKTGEILEVSTKAYVTYKDPDTGLTSLREAVLHQNDMDDESSSDILKDDGVAE

SEQ ID NO: 30423 - protein, 394 aa, Bifidobacterium longum DJO10A
MVGMKDIAAITTCVKKHMRSHMYDIEPAWPFPVPVGLPDQAFLETNAIAVHDNNNEIRQWASKNGCEIITKHRTIGTSVELISKVVVPDESIAMRVVGRTLAAECREARRRIACLVAACDVAPETIESAARMTGHEQPDDFDLLVSAVRYFRHHDVTGMTPRQIPLTGFSGKWLNESKTNRRKAICRLLGVETLGLSKRPTELRFRYLDPVRDDAELERIIWCPWEGEALSGIKYAVIVENKDTYQTMPPIAQGICIWGSGRAVSDAVPAVPALRDMRIVYWGDMDADGLEILSTLRESGIECDSILMDCDAYDRYHRFGTDRTERSAKIAMREPKPTPGLQSAERRLYERLCADKTIAYRRIEQERIPMRDAVDELRKLGIPVESIENQDLPI

SEQ ID NO: 30424 - protein, 489 aa, Xanthomonas campestris pv. vesicatoria str. 85-10
MKHQARIAGYRQLREQPVWKLLAADHAPELIGLLQTVLMDGERRLPSAVLHERLQRQLDALRADELSRELPRTAQAYLAHWLAQGWLERRLPEGAAEEEYELSRAATQAIRFIAGLRESSSSATESRLSLVIQQLVQLAGQTEADPELRLAALRDERARIDAEIERVASGRVAALDGKRALERARDLIHLSDELAEDFHRVRDDFEQLNRQFRERIIDDEGARGDVLEQLFNGVDVIADSEAGRTFEAFWSLLNDTQQSSQLDQALDALLARGFARKLDRRERAFLRGLTGTLLERGGEVHTVMQHFARSLRGFVQSRGYLEQRRLNQLLKQAQGEALQLRDSLHATTATGYTQALSSSRLRSLSQWRLHDPRLTQVDGRVQAADAAEISLDSVGDLVAQSEIDVRSLRNDLHELLGQRPRLTIGDALQQRPSVQGLGSVIGYLSLGTRHGMVIEGQMETVQWEGSDGAVRRARIPLVWFTREKRNELV

SEQ ID NO: 30425 - protein, 233 aa, Xanthomonas campestris pv. vesicatoria str. 85-10
MNWSEDAGPDADESTAVSAIDDRMPMTQASSAEPRGELFLGDTGTLPFDARRALCQLLAGPSIDAQRHGALWPALLRNEVAIRQVLCELFLELVLDREGGVAFTRQADTAELESPTLLRSAPLTFIESVLLLFLRQQLAEADTRGERAVVDEAQLVEALSVYEKNVSTDRAGFARRVMTAIGKMRDNQLLSRLRGSEERYEVSPVLKLLFSAEDVQALVVAYRGLREGDVAAE

SEQ ID NO: 30426 - protein, 1351 aa, Xanthomonas campestris pv. vesicatoria str. 85-10
MNSQSNLSPAQPGASLFAETLAEQRAQQFRMRRLQVHNWGTFNGLTEVPIAEKGFLFVGRSGSGKSTLLDAMSALLTPPSIVDFNAAAREAERSGRDRSLVSYVRGAWADQQDSASGEIATQYLRKGATWTALVLEYANAHGEAVSLIRLFWIAGSGNAAADVRRHYMVAPRRFDVATELDGFDLDLRKLKARLGEDVAHFDGFAGYAERFRHALGIGNEMALRLLHKTQSAKNLGDLNAFLRGFMLDEPRTFEAADRLVEDFAELDGAHHAVVTARRQVETLTPAREHHAALMALRHSVGELRELQLGVDSYREQQRLALLEERLQELDNQDRGLAGEEGQRRESLDNHEQKLVGLEREQRAAGGEQIEELERERARVERERDERLRRRAQIEQACRQLGTALAAGASGFAAQIAHAQTVLDNGKHDASALDEAIAERMGARRDDERRFAEIRAELEALKRAPSSMPAPMQALRARFCEDTGIAEAALPFVGELVQVREDQTAWRGAIERVLHGFAQSLLVDERHYAQVSEWVNRTHIGTRLVYFRVRRNDELHSRRVDPGALPGKLQLREHAFTEWLRNELTRRFDYACVDNAAALRNADRAITREGQVKHPGDRYEKDDRHAVNDRKRWLLGHDNRDKLKVFEREAQALAQRIASCDADVAALRKQREQDQERQLAAHTLVERDWDEIDVGPKLQRLSDIDEQLVQLREGNSGLRALGQAIDTARTLRDQAKRTYEDVRLERAQLARERVRLEQQHAACAGRAGSATLTPTQLQGLRERLAALTPLSLDNLEAHFRVVERGLAEQLADSQGRDSRLSAQLLECFRKYCQQWPEDSGDFTVSLASADDFLARLDRLESDGLPRHEHRFFDLLQTQSKNNLLALQRYTAEAHKGIKQRMDEVNASLEQVPFNRDTVLTIEVGDRRLAEVQEFQQQLRAVLSHQQTEDRALAEAQFSTLRALVARLGAQEPEARRWREQVLDVRLHVEFIGVELDAQTRAQVEIYRSGAGKSGGQRQKLATTCLAAALRYQLGGEDGELPRYCAVVLDEAFDKADNEFTALAMNIFENFGFQMVVATPLKSVMTLEPFIGGACFVEISGRHNSGVLLIEYDEQAQRLKLPERSRGDEAAVADATDAASAIEAASEPVGVQGAANADGITADGLPLHIALPVPGDTSPAAQNTHSSKRKPAAATATANKQNKNKQNKNAKTTSPTRAAAQPHAKQPKKSPSRTPAVAGKPVADKRTSGAQQAPAVSSGAASRSNVGKTTRSSKAQGKPIVAANASNATSSKVAAASAPVKNTAAAKPRATAASTGQPARGAGKTTSARAVAEPSPATTRVARAGAPKARGKR

SEQ ID NO: 30427 - protein, 490 aa, Xanthomonas oryzae pv. oryzae MAFF 311018
MKHRARIARYRALREQPLWKLLAADQSPEVIGLLQTLLLDSERGLPAAVLHERLQRMLDDLNVDQLSRELPRTAQAYVAHWLAQGWLERRLPEGAQQEQYELSTQAMQAIRFADGLEQARGAATESRLALVMQQLSQLAALTETNPDARLSALRDERDRIDAEIARVAAGKVASLDGKRALERARQVIALADELTEDFRRVRDDFEQLNRQFRERIIDDEGERGEVLTRLFEGVDVIGDSEAGRSFQAFWALLNDAEQSAQLDAALETVLARAFARKLDRRERSFLRGLTGTMLERGGQVHDVMQHFARSLRGFVQSRGYLEQRRLNQLLKQAQAEALGLREHLRAQRSVGHDLNLTTSRLRSLSQWRLQDPRQTQVDGSIQRNDAAAISLDSVGDLVAQSEIDFRSLRRDLYELLGEHAQLSIAQVLAQRQAEQGLGSVIGYLSLGTRHGQVDAQRSEIARWRGGDGQWRGARIPLVWFSQEKRNELAG

SEQ ID NO: 30428 - protein, 232 aa, Xanthomonas oryzae pv. oryzae MAFF 311018
MNWQADNAETDAHAPSAHADAAVPEADAATGLFPGDSGALPVDARRVLCQLLAGPSVDVQRHSKLWPALLRHEAAVRSRLADLFLELVLDRDAGVAFTRQADTGELEAPVLLRSLPLTFIDSVLLLHLRQQLAEADARGVRAVVEDAPLSEALAVYEKNLSTDRAGFMRRVGNAIQKMKDNHVLTRLRGEDNRYEVSPTLKLLFSAEDVSALAQIYRQLREQPGTVGDAERA

SEQ ID NO: 30429 - protein, 1143 aa, Xanthomonas oryzae pv. oryzae MAFF 311018
MKSSSSSLFADDLPDPRVQQFRMRRLQVHNWGTFNGLTDVPIAAKGFLFVGRSGSGKSTLLDAMSALLTPPNLVDFNAAAREAERTGRDRNLVSYVRGAWADQQDSASGEIATQYLRKGSTWTALVLEYRNGEGRVISLIRLFWIAGSGAAAADVRKHYMVAERSFDIASELVGFDLDLRKLKARLGDDIAHFDNFSGYAERLRHQLGIANEMALRLLHKTQSAKNLGDLNVFLRGFMLEAPKTFDASERLVGDFAELDGAHLAVVTARRQVETLLPARAHYEDLQSVQRQRGRLQELKLGLDPYREQRRLALLDARLHALDVNDQGLAGEEGQRRAAVDNHQQRLSDLEAQRRSQGGERIDALEREQLQVQGELARRSDKRAKAEQACRQLDQTLADNAHGFAQQSAQARAALEDGQRLAAEQDEAIGERIAGKREDSQRFAQVRAEIEALTRNPSNIAAPMQALRARLSEETGIPEAALPFVGELIQVREEDAAWRGAIERVLHGFAQSLLVDERHYAELAEWVNRTHLGSRLVYYRVRNNEQAFSGREPGSASLLHKLQLREHPFAGWLRRELGKRFDYDCLESAKALRTAERAITREGQVKHPGERYEKDDRHAVGDRRRWLLGFDNRDKLALYEREAIELAQRIAACDADVAELRARRERDASRRLAQHTLANLAWEEIDVAAQLQRRDDIASALRQLREGDANLRALGEAIERTRGDLEQAKRTFDGVREERIALGVERTRLEKQRLHCADADARVVTPLQREGLEERLANLGALSLDNLEAHFRQIGNAIAEQTSASDSEHNRLEQLLLGCFRRYSQQWPEDSGDFIISLAGAEDFLARLQRLERDGLPQHEARFFELLQSQSKNNLLALQRHTAEARKSIAQRLDEVNASLEQVPFNHGTLLTIELSDRRLPEVIDFHQRLRDVLGHHQTDQRDVAEQQFAVLRELVRKLGSADGEDKRWRELVLDVRLHVEFVGVELDAATRQQVEIYRSGAGKSGGQRQKLATTCLAAALRYQLGGEDGELPRYAAVVLDEAFDKADNEFTALAMNIFENFGFQMVVATPLKSVMTLEPFIGGACFVEISGRHDSGVLLIEYDEQARRLKLPERSRSAAADGAARATEPSADAVGGASVDGLH

SEQ ID NO: 30430 - protein, 387 aa, Xanthomonas oryzae pv. oryzae MAFF 311018
MMLPAAALLALRGQWQRARGQWLIGEGAPQAIGLRAPTQAQAIARFDAFGAWLQEWSRTGLPGRVEYRAVSWTQLGPQRLPQTWVLDDAGQAAGALGEGERWARARQRSAALQARWPQAVALAARLRRQFDLLADWPEVEFARLVAVVEWLHQHRDSGLFLRQLPIAGIDSKWIEPHRGVIADWLAGLRGIAEPRSFASLSGLRNAPDRVRLRLLDPALRHHIGGLEDITAPIAQIAALRLPVRRVLIVENRETGLACESLPGTLVLMARGYAVEYVSNIGWLRELPLYYWGDIDTHGLAILHRLRTHAPHTTAVLMNEATLQATPRALWGHERRPHRAQRLAALSIQEQRLYADLRGGRFGPSPRLEQERIAWDYAWPRIQAALAD

SEQ ID NO: 30431 - protein, 480 aa, Desulfitobacterium hafniense Y51
MKLFEILPESFFQLFTGKNRQVYAEALLLLYEQYQVNRFGVDYEVMRDLLQELIETQESLGYSFEVEEGEEAPEADLFRTQVNSILRRLKVLGWLDVETRDNFKQYILLPHYSSRILQVFKELCEERTVEFQRFAFVTYQLLTSEEAKRRPAFAMIEAEKTTEQFTGELTLLANNMKFHAEQVAAKTSIQEVLDHHFDEYKTKIVDKSYHRLKTSDHVSRYRHQILERVRTLLIDQEIFQEAVEDGIRSEFFATREEAEHKLRQALLSVEEVYRELDEVFNRIDLRHNQYLRASFDRARYLSQHSQGVDQRLAEILDWLSERRSSSKDIGAKILGPEGLRFLTLSQLSEPSVFTPRKKRLPHQAEDIEVIQLSPELKAQLREESLSKMRRNITREKVRDYVLAHLGQRETMGIAELAPQNLEEFLYLTYVYLYGYDGGAGYTLEREYNRVLEIGGYRFHDRQIRRLTAKKEGSHRVRATQ

SEQ ID NO: 30432 - protein, 145 aa, Desulfitobacterium hafniense Y51
MDERHECIYVFSKEGAHRLRLSQEESIALLVLRLIYQEKRQGVLLTAFPLTTKYEIRAKYETFRLPFPGKTRFLETIKLFTQYKLLQSLDDEVNLDECRFRLFHTLLYALDADSIERIHERIRAYDLEIDEEELLYEMDETASAR

SEQ ID NO: 30433 - protein, 1159 aa, Desulfitobacterium hafniense Y51
MKWMKRLRLVNWHYFQDESLEFGRQTLISGRNSAGKSTIIDALQVLFIADQRQIRFNPAAHEEAKRSLLNYLRGKIGSDEKSFVRERDFTSYILGEFYDDKTRKSFAIGAVMDVYSDNKIDDEFFIIPDLELAELEIQKGKRTYRNKEEFHRYALGIRPKTQFFRGRQEYQKAFLNRMGQLERRFYRTFLRALSFKPIQDIREFVYQYILDERELQLNIMKENFELHERYQRELKDLEERKTVLEKIARQHEQAIKYRDIAATQEYVIRGLKHLEITEKREDLEQAIASSQNELKSVKERAALTEEQHREAREQALEYYRQWSNHQLQKEKESLEARIEDMQKTLADQKRRLEIWVAKVKGEIRLLEGLATAFAVDGEVWRQEDRRKLENVLGALRTALDLAGRPNLEWAQEDQDVLGEEIRQSGLFLAALQMGFLQTQTRLEDRIREQEAQQERLNQEIRGLEQKKRPYREEVLRLKALLEERLAGRSPVWIFCEEMEVLDEAEAWRNAIEGYLHTQRFDLLVKPQAFSEALRIYEQEKWIHRLQGVGLVDTEKEERYLGKRESGSLAALLQTDNPIIQARIDHLLGRVMQAADEQDLRRHHTAVTRTCMSYTNLVARQIQKERYEIPYIGSQAIVRQLEIKRRELRTVQDNLRQLQAELIIMKEWVSSLADRKTLYEGLAQGLELPKMVEQQEYELLEVQIKLEELDLSEVERLKQEYEEWHRREGQLVEAMKELSGKITGLDLEIGRKQTDLYLLTRREQEAQELWDGWKAEYAPELWEKAAERWQEAQRQTQPASTKLVNWEGSQKGNVTRKLQEFGRLRDLRQDYNIRYTYNGSLDGEDNASYQSLLDEVAGVDIPDYQVKLAEALKQSEEEFKSDFVAKLREAIEMARHEFSQLNLALKNFPFHQDKYHFEVRPSSHYKRFYDVIMDPDIVNRGSLFDSLADDKADTLHELFERLVRGEAGDQEEFTDYRRYLDFDIAVTTETGRYYFSQVLKEKSGGETQTPFYIAVLASFYYLYNSGKTLRLVVFDEAFNKMDEERIQTSLRLIKKMGLQLIAAVPDEKMQHMAPEVSTTLIVHRDGHHCFIDMISREEMLDSLNGDEENAQDSQDDGVEGKGADTETDAGQEAESGVSADPAWMQIRMQAQMQNQIQRQT

SEQ ID NO: 30434 - protein, 417 aa, Desulfitobacterium hafniense Y51
MEDKEVREYKKKILTLLLRKYQNSLSFQTGTPGKQRPQLTMAKSELAADYEDELDFRKREWIHAALKELSREGIIQVTWPKLKEHIQVHKVYLNFAGVERAYQLLGETPLEDKLRRLKESLSPLAAHPWVWVRSWQRETCARLEERKSAGLDADNPQGYDDLVKVLKALPELEDSTPKRVFSQSLFQDSKYFEKKLEGRLISLLRKIYPEELDQDEDYLDQVGIVNNPKLTLLAGPLIIHPDRDLSHFSGGLGLSAQSVKELIIQDIPAQTILLIENLTTYHEVLQAPPILPAPVLAIYTGGFPHKSAQKLLEKVSGFLENRRQGQGLEIFHWGDIDYGGIRIFEYLRRNFFPNLKPYRMDGVTYLEYESAGLPFGEDQAKKLAALLSDPGYSDWHEVIGLLLSYRKRVEQEGIRVG

SEQ ID NO: 30435 - protein, 498 aa, Bifidobacterium adolescentis ATCC 15703
MERLRPVYETGVLRLLLRGNSMLYVALLRSTFDPLTGELPREIVEERFSRSLTRLAETGDYTPKEGQTSAEAAHTILQQLTKEGEGDYAWLANSLDVAAHRYLYRLTARAHRAIEALDRLEDTTKALSGAQANSIIMEIEHARMQLTVDPRERIRLLERDIEERQKQIDELKHSDTLDRLTSQQVGDIIGVIHNTLRGVPIDLRELALEERDNGDNLRRSMQSGSISVEQALGTYHDEYHRSFHESDSGRRFEDAFQVIVTDEGRREIDEAVRDIAQNPYLEGEPGILLAQVRAELKRIYEGIEDVRRQIRISDEAVSRLVRQQTDTHYRTMLDKLHRLFVRASDDAKTHPGSDERPYRTDTGTAQFQALPSRPAKSMARAATAGLDDAPSTNVDAPDLKAMVEMCGPRLTHMIGLIRRDPVKTADGRFVDFAASFNRLPQEERRESELIGFLSALRTQDGPATVAWHCVSIDGGERVWRTRPILTTEAALDEIIEEG

SEQ ID NO: 30436 - protein, 279 aa, Bifidobacterium adolescentis ATCC 15703
MTDNTDGFDTGIGIEEETGPESGMPSEGPDMTRDRPALFDGDTGDMPLEARMAAIALKRERYIDGSLYDRACQYREAVERSLNNDMLRLVDNTKYRIMYASPVTDAETNIRSLKTRVSLTREEAATLAALRIKVLEYENQKTKPGDWLISFDDIRALLATGAGFLTASNDEEGTAKKITSVISRMRTYGYLAETGDENMYVLTPLVPMVLDQKLADRWLGSDDTDGDGMKDADGDGYDDSSIGADGGDTSDSTGTVSSGVEQDAFDFDSADDAFDGGKH

SEQ ID NO: 30437 - protein, 1148 aa, Bifidobacterium adolescentis ATCC 15703
MKIVSDRWMLQSRQIVNWGSYGGYHVFRPSMDDAMPVTLLAGASESGKSTLVDAQISLLYPSGTPYNKASNSGRSERNDYTYLRGMIGISDGENGETPIFLRGRDADGTPQNIWGAIVDTYANRSDGGLLSCAKFLYLTAGDGPDGLRRQYVTWNQTIDPRLMDRHRDTSFTRGLMEQTYPGCTTHVNAQAFHASIWQDMGLSAEACRLLHKIQSADAPSKLDDIFKQGVLDVPESIRLARETVDDYNRFSENFHSMEDKMERVAILQDIQARYGEYAKQASERREYTPIDPDREQGETTLAAWTWSRMASEVRAGLPSAQRKAKESQDAIDRSQQRIDELDTQIEAVKERMNGIDGGSLQQLGKDFERARQDADEARRQRHAIAERFERVEGRLPADEQTWNAKRAALALSLDTYDKRLEDARSEYQRMVVERHARQGERDLLRQDYRRKIEHRTRISDDMDHARTLIARATGLDETELPYVAELMDVDEGDEQWRLAMDVTYAPIAQTILVDKRHEQGFAAKVSAIDPTRMTRRAWRFVDTDAQYDSACNEGWMSSKLRYKEDSPFVGWLKEQTASQRFDARCVEAIDDMDRAERQVQVDGQIKSGDHGFHGVKGLRQVIGFVNERYLAELERQLDGAERALEDADRRGRQMANAMTLLQDEHELALTVADLPWGKIDVDGLETKAERIRLQIERIESDPELAQLQDELKQLLRQKDDEGKTRYRAEAELENAQHAVQAEQAWLDMHGDSDFDDAALSDMVSNLLADTYETCFDTSRPQERPQRIAGGFDREGTAPFDVRVLRRIGNTVRARLQQIDERAVQLRADTERAMGDYLKHHSTEGDTVMASVEDYPYFLDELKNLNMLVTRAATDEEYANSVEKLYMSFQQLNRAFNTDEENVREQLDRINGMLKGQQFGPRGGRLSLHVDFHPIDRQFKSSLGRIMSKLDDWTRNARSNPMETRKAFAGCETFIGRLQAELGQIRDTNGIKEYGARNLDPRVRSSFYAIVHHNDLPDERISSTGGKSGGALQELTSFVYGAALIYLLGGDLTGKPTYTTLFLDEALIKADGRYTKRALTVLPRLGFQIIVSAPESKTAEILSIADKAYVAYKDPATGNSYLQELDREPATQAETQDATVEQTQPATEA

SEQ ID NO: 30438 - protein, 288 aa, Bifidobacterium adolescentis ATCC 15703
MSALAKEFGLEPENAMNVAKTLKDHDDTDFHLVIQAAHYFANHDCHTMTPRMAPIPGFSAKWLGTPNSQRRKAICQLTGQDNLTFQERPNELRLRLMDAEHHDQPDLIVTQPWVRSQPTDIEHAIIIENKDTYQAMPTVEHAICILGNGYAATSHITTLLPWLTTIPNIIYWGDMDANGLDILSKLRATGIPCTSILMDTTAYRTYEQYGTQLDAKNKPLTTQTPQPTPGLTTEERKLYETLCTGTDIQYLRIEQERIPIRDATTILHDQHHWPIDIPGNDIPNNNTK

SEQ ID NO: 30439 - protein, 504 aa, Corynebacterium efficiens YS-314
MPVDGVLSHPCGTLIFMSSIAQALSFQRILTDSPAVRLLAAKNAPFVMATVSVHFGGAPAPRPASEVYELMAADLTVLRQRGMDLPKTPAEYCTDWVRSGWLVRRAGSQRTGELLEPAEDALSALQAVQRWEKPRSAVTASRLESISEALRGLARDTDPDISSRLQRLQIERDRLDREIERVSQGDFELPSVERVSERLEDILTSASSVPADFARVRHEFEVLNRTLRRQLLDPDATRGDVLDDIFTGVDVISDSEAGRSFNGFYSIITDPERSAYIDAWIDQILASEPARHLDQDSRMSLRSLIRDMEEAGAEVNSVMTGLARSLRHYVASEQFAEDRKMIELIRETRALAADAVEESELNAIHAMETPLQRIGMSIQSVSSIELANPGEEVVEGETIVNAAQPLDVGELLATVRQSEIDLEELIDSVRDTVTAEAGRATISQVLARHPATQGLGSIVGLLHLGLQHGLPGGHTGHVTWDEDGITRHAIIDQYAFDTTSLEEM

SEQ ID NO: 30440 - protein, 206 aa, Corynebacterium efficiens YS-314
MSTIDPLWTGDTGTLSLDSRRALVQLLKGPLMRKTRHPELWSAVITDTQALRSRLADVFLDLIIDEDAGIAFTRMASPDNDLKIPAVLRVDRLKHVDTLILLHLRNELGLSAPGERVIVDVEELRDQVRSYQRADDLDDAAYARRFNAAITRIRNTYNLLDETETTGRYEVSPVLRHIFDVDTVTALRDEYARYAAGTAAGTKEQK

SEQ ID NO: 30441 - protein, 1120 aa, Corynebacterium efficiens YS-314
MSPIYPGQFRLSRIQLINWGTFSGYVDMPIARRGHLITGGSGSGKSTLLDAMAAILVPPVKVRFNEAAQQGLSREQGRTLASYIRGAWRRREDAETGGIASTFLRGKATYTVVGLTYDDAAGTVYTLVGLFYLRAGDTANAQVQKFYGTVPTDMDVREFEPYLKVGVDKRKIKSAFPEARFSDQYRVFADYFRPRLGMHTEEAQLLLHRTQSAKSLSSLDQLFRDYMLEPPTTFDMADEAVQQFDDLRQAYRRVIDVRAQIDILEPLVGLRDHRDAAQTRREHAAKMKQAFPTVRDTLHLENNRDRLAELATRRTAVDARVAQLREALDQAQQRVTSDTAALQSRGDGRLNVIEEQEARIRERRERRSADRARVQKAVQAVGGTMPTDAEKYAQLLVHAQEITSNSPDRIRRWEAEKLSDEVDRRDLKNKREELAAELSSLGQRSSNIDRRYILVREALAEALQVTEQELPFAGELIDVHQDHLRWEPVIQQLLGSFATTLLVPERLAHTINSYVNRTSLGICLIYRVIPAHVVVSRGSSSPRALSNKLQFPDAPMSTWVRNEVLRDHDYECVDTERELEELGTHQQGVTLNGLVRQRTYRDGSVGYIKDDRRRLGDRSSYRLGSSNDEKIELLRDALATLDAQITAAGNRITEKRRLITSERTLIDHARDIAQFTFDQIDVSVDDAHLSSLAQQRAEILSSPELAQLQQHVTESQQRYAEVDSAFRIADREAGQLATEIDTTTRDIARLESELAGRAHVDESLSRELSARIDVETRRVTQGNIDRITDTIVGELDATIASCETAITQANSGITRILARYIAEWPAEKAELQADPGFAGEAINRLMFLRRDRLGDFEGRFLDLMNESSVKNLGALSTSLRRARGDIETRLHPVNESLGRSEFNPGRWLRVEVRDNRNTDAQKFMDDLRMATDGAMAATRDRDIAEAEKRYQVLSVILDRLGSENADDQRWCRLVLDTRLHVRFIASEVDADGAVVNTYVDSASLSGGQAQKLVFFCLAAALRFRLAEADEDHPRYATVVLDEAFDRADPAFTRTAMNIFTEFGFHMVLATPLKLIQTLSPYVDGTVVISYSEGIDDNGNDVARSGWAHIDSSEEVTDAVS

SEQ ID NO: 30442 - protein, 370 aa, Corynebacterium efficiens YS-314
MRFPDDVSQRAGVHFRSRLPKLLTDDAYAWSLPLQPPTAATASRDFDTVQEFIRTWQAWRGPGSITVEEKHWHRVGLGVQPVPTRISTSTSAELAELAGTTGVFSELQHKLALLGVEHTERAVEVVPLWRDLPVEECTWVPRVVDWFRQHPGSGLRPRAVAVAGVHGKWLERNARLVRHLLGVEDLGLVTGDHLVRLRILDPSLGTGVTDISTPVAEAATMWPTAGPRIALIVENKETFLSLSTAWPGTVAVWGAGYAVGSLDRLPWLHRCDRLVYWGDLDAEGFAILHRLRSSFATVESVMMSPADVNRWAHLGVPDPGDPTTVLPLLTPSESDARRALLTEGKIRIEQERIPWDTAHRTLDEVLGLTD

SEQ ID NO: 30443 - protein, 495 aa, Corynebacterium glutamicum ATCC 13032
MTVVSHALGFKRFRQESLELSLLRSDNFPVVLAVVAQYFPQGAIAKPASELYQLLSDDFRVLREEGFELPKSPSDYVSDWVKSRWFVRRPGSSQTGETVEPSEELLAVLDSVQRWDNPHRSISASRIESLTQALQTLALESDPSTAKRLAELERERDRIERQIEAVHAGEFEVLTTVQIGDRVADILDLAASIPADFARVRHELSDLNRKLRRQLLDPEDSRGDVLEEIFRGVDLIGDSDAGRSFNSFFDVLLDRERSSLIDRWIREVLGRDEAIDLDSKLRTGLYRIFRDMEDASFEVNGEMTGLARSLRHYVTTEEFAESRRMIQLLRDTRSAAAKAAEAGEVTSLNHMDTPLVRIGMDVRSIAGLKLKNPGEERVEDLPEPVEEQELDTEVLMEQIRASEIDFEELEEAVSLVLAEQSHATITEVLEHFPATQGLASIVGLLYLAMRDGVPTGRAQIVEWESDDATHRRRITGWQFIRGLNSEDLAESEMDK

SEQ ID NO: 30444 - protein, 212 aa, Corynebacterium glutamicum ATCC 13032
MNDQLWEGDTGTLTFGSRKALVQLLKGPMVNALQHVEVWRAITTDQDALNAVLNNLFLELVLDEDAGVAFTRPANGRQEVLVGNNKTEAMPKVLRTETLSHFDTLIILILRQELTMAPPGERVIVDREEIREQVLLYRVDEERDEAKLAKRFDAAFRRIVDYSLAKKTETPERFEVSPALRQIFDADTVAGVRAEYEKFNKAAHDGNEEEQK

SEQ ID NO: 30445 - protein, 1111 aa, Corynebacterium glutamicum ATCC 13032
MTSEQALDPIHPGQFRLSRIQLINWGTFHGTVDIPVTREGILVTGGSGSGKSTLIDAITAVLLPQGKLRFNSAAQANTPRNKGRSLVTYIRGAWRAQEDPLQDQIVSTYLRPRATYSLVGLTYSNGEGVEHTLVAIFYLKSGHNLTSDISSYYGVFPVDQDINALLDFLKEGIDKRQIRAAFKEAIFSEQHSVFSGRFRSRLGISSEEALLLLHRAQSAKDLQSLDDLFRDYMLVEPDTFSIAKTAVEQFQDLEGAYEQVEDIKRQIHTLDPLVQLKNRREKAQQSKDHANALKKALPTVGNRIKKEEQETLVRQFTVEQTQAKSKVESAKIETDRAREMETLAHDNVKQIVGAQHGILSAKREGAVDKRRTISTARAGLDALVKGLGGAAPESAEELLELNNAARLTVDEYPAAREALESAGQRNVEDRTRAVDEFKAADQELSSLSKGSSNIEYRLLQVRENLCQDLGVSPRDMPFAGELIDPNNAEWEPVVQRILGGFAAEMLVPHGLLPRVRDWVNAKHLAALLKFNGVVTTGEYKTSRFPADSLIRKVDVVESPFRDWVNQELGKRFNIRCVRTPEELSALGPRDQGVTILGVRKFAQQTGDPTTRWEKDDRRKLGDRSTYRLGSTNDAKVETLRETVKAGKAVVQAADNRIAANRAELRELERQYQASQEILKVSWAQIDVESADAAIAELDRLLEELNNTPEATELSARHEAAKQTLARVSDLLVAAQSEETVASMNLKRAETELKRLESLPVAEVSEEIAREVEKLFLANTRRVHAANVDEQTIALREDLDKQIDANEAELRRCENQIVGILRSYIETWPANRADLQAEPEFVGEAINRLGELRSDRLAEFTAKFLGLMNEMSTRNLGQISRRLRDARREIEERIEPINASLAQSEFNEGRFLHIDIRDQSGPIVREFQQKLDAATSGDLGTSTEKQAFARYALIAEIISKLASHDSADARWRNTVLDTRRHVRFIGLERDSDGATVNTYVDSASLSGGQAQKLVFFCLAAALRYQLAEPGAHYPTYATVILDEAFDRADPAFTRQTMNVFHSFGFHMVLATPLKLIQTLGDYVGSTIVVSYTEKPNAQGAIQGNSSFSRIEK

SEQ ID NO: 30446 - protein, 400 aa, Corynebacterium glutamicum ATCC 13032
MSAPPSWSATPKNQTPRAQFRAIPVSLGSRNNMPLFIDDALHRSKKYFHAHLSELLLGEFAGLSLPLHPPTAAKAAADIDATREFIRQWEGRDDVEYAIRNWSPVGLGKTEVPVRLTLNTTEELVVFAQVEDEWSSLHERFSQLSGFTAEVVAKHVSLWRSLSNDDLSKAVLVVDWFLKHPNSGLLKRAVAVEGVHTKWLENHRVLIETLVADKRGEPGRADLGLGDAEARVRLRFHSVDAPAGLTDIEVPLSNLCELQEPQVILMVENLDSFLALPTWPGVTIAWGAGYRAVDIVRGPYFSNGRLLYWGDLDLDGFKILDGVRSHVPHTESVLMNSETVSRWRYLGVADREFKAESFDNLHDFESDALDLLITDGELRIEQERIRLDVAVEEIEKVIRG

SEQ ID NO: 30447 - protein, 190 aa, Bradyrhizobium diazoefficiens USDA 110
MDKIEDFRDRLERRIRTTVHYMDVMGEGSAERIVRLIEQLSKIGRDEVEIRLGSPDVGLPITSLALYTPPPPKAPPERTRFKVPKQDPYLRAYVEATTEFDRMVRVSDQRLLEFARRQMQGRDAVSSAEIEIESIPDLFAYRALPNLAAVGRSVRLGEFTIRLDEGRTANDWIDVTAFRIERTRTTADAA

SEQ ID NO: 30448 - protein, 213 aa, Bradyrhizobium diazoefficiens USDA 110
MLRDLSKLIDDADSEGHDGDQLQKELRQAAQSLWRAQFIYENDWGMKTSYEVLRRHMGYFENLFDALGYRVVGRPNDGYVGLVANELPPRQSMKLDESLLLLVLRLHYEEAFTRFEAKEFGEVEVESEQILQIYEDRTHRERPNFGRVKEILAGFRQRGLVRIEDRDDRNFTLFLRPALPIVVSKDTLGSLEEFVSRSIPATAKTDAASEVQA

SEQ ID NO: 30449 - protein, 1166 aa, Bradyrhizobium diazoefficiens USDA 110
MIELRRIILIDWYLFRAQQVDLRGMTAIIGPNGAGKSAIIDAVQTVLSGASMASIRFNPSAQSNVRSKRTLRDYCLGVVSLDEKGERSEPTRQHAYTYIILVFEDLADGSAVSLGVAFSASASRSDESCEARFIAKGAMAKDDILAAVGDDEVETLQWHAVRTALRARHIEVDDAFSSATDFVAESLRALSPAGFPLDPRRFQKAFRNALLLKPVDNPTDFVRNYVLDVQPLQVDRLRLGIEHWRSLTRRIEELRAQSASLAGILRIVGRAVENEKVIATNSWQIARLEWEKFCREARRQEEVIAQFRSVAGKAEVEAAAAAARHAALEAEHKTVELSIRTSDAEQLAQMYESDKAAALSQRANAMAPLKDIEGLIASIKKAVELNLLVRRDDLLHALLSAVVVARGRAPLSEWDKTLPGDWKDSASHLDAALGAVDQERLAAVRKSFSDAHFTARVATKDLQDRIDQIDSNLKRMDQGLSPIERGTRNLIDQLRSHGIEAEPLCDLVEIRDDKWRMAAEAVLGRSREALIVEPSRAVRALEIYRQGGEYSFQHAEVINTTKTDGTRPAEKGSLAQIISTENRHARAFLNYRLGRLMMVETMDRMVAAENAITPDRMMQGGRTVRRLPKPEHLKLGRATQGQMRQQLETERKDLTMQLAERAREVGLLEEEARLFEDMFARFQKTIEAGLTCSECGADLAAFDRKLAEIGKNIEDAKRNRDPKLVADLERLAGEVVTAGRRKLETQKAFDAAKSARDKAEGAYDDYMQKNSTTARGARRDRARQMRQDFPQSTAMRDYRPEVARMATEAIPNLIDGLTADRETRSTTRRSSLMREMTNAMNKHGQDFHVVPSFTAEEATPTAVEQWAATEKERLDGDELVQYEEQCRNAATEMTSAFRDDLLHRLDDAFMGIRNTLKELNRHLEDRQFHGRDYYSFKALDAPTHVDMIELVEESRKPEFNLPLFGDRSGDANSPMMRAVRQIEEILSNPEARTEDIEDPRKYFNFELYIKDAQGTIRSSLTSRAGTGSGGEGQLPFYIAIGASLAATYQNRRTGESGLSLAIFDEAFNRLDTKAIGQCSDFMRALGLQVVLATPDEKRHVFMEVVDTVVNVNRLGNQVMIDTEFLTEKARDAIVAIDPYRKGFDVFKSERIAAEKAEAIPRDQAAE

SEQ ID NO: 30450 - protein, 401 aa, Bradyrhizobium diazoefficiens USDA 110
MTDVRMTDAGVELLERLLERSERNPYRSWSASAAPDYDRLSTAQQMSRFHDQITAAERFGSVEVKWGKRDQGHLIERVVVRDAELLARHLGRPTAPATAQRVRDELLPVAATGEPWVITLLDDMTARWARSEAAYRLTAGQVDAAKEFFSLLASISREEARGLDARTFSKKATNDTKAFDRHASRLAAVLGVRIGQPGAAADVVWTHIGLERFSHPIHLRGPVAVGEADGRLVDGRARPFASIHPEMLQQLSVLERPTTILTIENYASFNRQVREIEDGSLIVYTGGFPAAGVVEFLAKVLTAVAAEVPFLHWGDVDAGGVRIFRYLEENLPRGPRPHLMTKDLAEKSGQPADADPSLASIARSDSALRELADWLAFGSDVRHLEQEALDPERPWADVTAS

SEQ ID NO: 30451 - protein, 518 aa, Bradyrhizobium diazoefficiens USDA 110
MRSGPGAASLTLFRHLHDDAFLAFSRDHKHLYAACLLDLHERFFSGAPSFPTPQQVVHAIYDVMRANPVLWNEGDDFGSLPEMISARRRRIRKADVALASEKGDKALGLARQLYARLLVWGWLEEEEYGLRVTVDMAMGPLLVLQRLASLNKDLSQRFGGLIVQIRLNLEAVEKLRPEITDRKQREAALAVREARNQADQFTKSLRAILADLKRVRRTVMESKTVATRLEAFFEEFIEQLLLKDFESILTVNHPYRFRDAIVDLARRISYSPETMQVLAEEYIASSMAADIEDGRMAAADDLLAIESIFDQIGEMFDRIEAFRRQLEARVRNTIKYAERGGQGLVGRAGGLVRRLDALLRDGRHHKATIEWSIEPLRSPWSEHHQAPARQPRRPVEARELAEPPSDPLYELRKKLRLEYIARIAPRPEDVRRFLEGQVPPFATREARFMEIDTVDDFLAFDCARRYALTGEVPAQVAAGFELEPCPDTPPHDSEWLRCANFLVKRSGALRKARAAHAQ

SEQ ID NO: 30452 - protein, 212 aa, Bradyrhizobium diazoefficiens USDA 110
MLSEFENVERSFGAEKAADLRKAQHFLLRRQFVFAGDPRTGTVYNTIMDGRFRDVVDGFFDSCGYRVHRDPEAQWAGIVAMDEDVPLPRMKLDETIVMLVLAAYWQQEVNVGAVEDRAVVVATLNDLFDRYREMAQHGGGGAISAARFRDILREVAQRSLVEIGDFDDEQQDCEIRIRPMIKLISGGDALQRLERYVRSEEARFPQPAGDEA

SEQ ID NO: 30453 - protein, 1144 aa, Bradyrhizobium diazoefficiens USDA 110
MMELRHLTMVNWHLFDVADIDVRGHVGVLGENRSGKSTILDMAQVVLTGGSRRFLRLNAVAGDSGKSRSGSKRSVVDYCLGTLGEDQRRRDEARTYIALGFEDTEGARSPVTIGMALEARKSDSRETVLALFVAVGTVLSSKDFIEQRGKSQFPAQWEDVRARIVAAVGEGNFVNHRDRASDYVREYMRHLLPHSSFGEQNASALQKSIVNAMTLDHNQTATQFVRNYILEDSPIGIKELRESIQTYRNISETIRKMRLRLEALRALRGVLAALEEALETKFREEWVAKRATWLAARATNLDFKTKRRTEMARRDAAAKELEFIDDDVKAIDKEIERLTAAIAEHDAKTGRKSLQQTADVAGQAAHRASADFKARMENIRRLEPLRAMCADGFEDFVPALERLLTATAGADIGGVSDEVTAAEKSFAASGAKWLPKIDEARQRIIAELSGLRGRRDEVLERIRQHAAGGARAYLGDDTELLCRRLRQGGMVPRVLCDIIEVAEPEWVGAAEALLGRDREAVFVDRADISAATSIFKEGRREFRHASLVSLNKLEQFRAKPERGTFPSIFRSQDPDAMAFIMRRYGNVRLADTLDQFNRPGRAIMKDGLYDDGLVRSHRWIESSQYKIGKAAQANALRSLQDQAEELGRILIDKGKEAHAAEQAFAALKNICEGRNDLGACAAAFAAAQTEVAEAQARLDALDGAGDGGLRDKKRAQQKLKEKRLEERKTQQKAFGEHDGEVRSAERRLGEGENVPGSELNLRVARSIYRKFFPLYSTAKGRAVYRDRLDAAAQKGFAEKHRAIAEKALKDANVSDNERARIERRVRELLYDYFDQFGMSSQVGAESEPLREVKPWMEQLISDIESNELRQYERQARDAAEKASTLLRGEFINALTARIGKMERELKSLNRSLYAHPFHNERYSFHRTQMVEFQPILKIIEIAKTSPEALDMLFRGDVPDDFPHKDTIVALEALLEDPDKDFTQFEDYRNFYTFEIHMEDVATGRSTRWEQRRGTGSGAEQQVPIYVAIGASLAAVYGSAERRAGKPAGFALAMFDEAFSKMDGKNQRQMMSFYKNLGLQFVIAAPFEKRVAVLEHMDTIVEVDRIGEQSRATVVELKEKAKRELMAIDPDLMSEDELATRLAAE

SEQ ID NO: 30454 - protein, 389 aa, Bradyrhizobium diazoefficiens USDA 110
MARRFTDAIGLLNDLLNRFEAGAASPIAHPDYPAFPSVVAADAFLKQIREAESAGAVSLGWGRGPMRDQVAHVRLASAEILYRYLRRTPASRIAEDAAVRLVAGAAMHDSLKNSASQVAEVWGRGKTWHGVASSDVETLRDAFVLAQAILANKHLGVDYKTFSRRTVGHSKTLERIEGAVVRLLSGILEFPPGARPREALRAIGLERFAPPLLIAGKIDLDGADLSGISPLYLGITPKEADRVRFREPPAYVLTIENFASFNRHIAEADPGRLGTTMYVGGYPSLATQQALRTIAGLVSEQTPIFHWSDIDPDGTWIFHTIERAVDRPIRAHLMSVEVAERLGQVPFKKSAPARCPPDSGIAALAAYLAKDGAKTLEQEELDPVLPEFH

SEQ ID NO: 30455 - protein, 489 aa, Xanthomonas campestris pv. campestris str. 8004; identical to SEQ ID NO: 30399

SEQ ID NO: 30456 - protein, 235 aa, Xanthomonas campestris pv. campestris str. 8004; identical to SEQ ID NO: 30400

SEQ ID NO: 30457 - protein, 1332 aa, Xanthomonas campestris pv. campestris str. 8004
MSPASPGASLFAETLAEQRAQQFRMRRLQVHNWGTFNGLTEVPIAEKGFLFVGRSGSGKSTLLDAMSALLTPPSIVDFNAAAREAERSGRDRSLVSYVRGAWADQQDSASGEIATQYLRKGATWTALVLEYRNAQGEAVSLVRLFWIAGSGNAAADVRRHYMVVPRAFDVASELEGFDLDLRKLKARLGEDVAHFDGFAGYAERFRHALGIGNDMALRLLHKTQSAKNLGDLNAFLRGFMLDEPRTFEAADRLVEDFAELDGAHHAVVTARRQVETLSPAREHHAALMALRRSVGELRELQLGVDSYREQQRLALLEARLQEVDSQDRGLAGEEGQRRESLDNHEQKLAGLEREQRAAGGEQIEELERERVRVERERDERLRRRAQIEQACRQLGTALAAGASGFAAQVAHAQGVLDGGKQHASTLDEAIAERMGERRDDERRFAEIRAELDALKKAPSSMPAPMQALRARLCDDTGIAESALPFVGELLQVREDQVAWRGAIERVLHGFAQSLLVDERHYAQVSEWVNRTHIGTRLVYFRVRRNDELHSRRVDPNALPGKLQLREHAFTEWLRNELTRRFDYACVDNAAALRNADRAITREGQVKHPGDRYEKDDRHAVNDRKRWLLGHDNRDKLKVFEREAQALAQRIASCDADVAALRKQREQDQEKRLAAHTLVERDWDEIDVGPKLQRLSDIDEQLQQLREGDSGLRALGQAIDTARTLRDQAKRTYEDVRLERAQLARERVRLEQQQAACAGRAGTAALTPTQLQGLQERLAALAPLSLDTLEAHFRVVERGLAEQLAESQGRDSRLSAQLLECFRRYCQQWPEDSGDFTVSLASADDFLARLDRLESDGLPRHEHRFFDLLQTQSKNNLLALQRHTAEAHKGIKQRMDEVNASLEQVPFNRDTILTIEVSDRRLAEVQEFQQQLRAVLSHQQTEDRALAEAQFATLRTLVARLGAQEPEARRWREQVLDVRLHVEFIGVELDAQTRAQVEIYRSGAGKSGGQRQKLATTCLAAALRYQLGGEDGELPRYCAVVLDEAFDKADNEFTALAMNIFENFGFQMVVATPLKSVMTLEPFIGGACFVEISGRHNSGVLLIEYDEQAQRLKLPERSRGEEAAAPPAEQGGAVAPGERAERAPVIAVESGHAASVHLAETTAVLVQGDAVTDGQSRGHKRTRAAATASTAAPVPAPAGKRSTSAAATSATAAPATGTADASNARRKQAATPDTPPKPTKPASTRSGSSGTPAAKRTTTAKAAAVLKASNATPAVAAKRTGKAPKRVSKPASAQQVAKPVSKSKPTAKPATAASAKSRVASTRGSAPKARSKR

SEQ ID NO: 30458 - protein, 482 aa, Chlorobium luteolum DSM 273
MALDYTTLDLLRQNHPAWRLLRAQHAPLVSSFLHRAFIAPNVRTLSEADLVEQLEDELFALRRQLGDTAYPGSAQSYLNDWAENDKGWLRKFYPVGEDEPHYDVTPATEKALAWLESLSERAFVGTESRLLTLFELLRQMSTGSQADPELRIAELNRRREEIDGEIARIHAGDISLLDDTALKDRFQQFLQLARELLTDFREVEQNFRTLDRRVRERIALWEGSKGALLEEIMGQRDAIADSDQGKSFRAFWGFLMSQSRQEELSVLLDEVLNLPPVVEMHPEPRLKRVHYDWLEAGEHTQRTVARLSGQLRKFLDDKAWLENRRIMDILHDIESSALGLNGQMPEGSFMPIADASASIELPFERPLYRPPFKPVIEGIALEAGDAEIDTAALYAQVIIDRAELTGNIRKALQEQKQIGLGELIALHPLQHGLAELVTYLQIAGEWPRTAVDDEVEERIEWEGENGFMRRATLPRIIFVRND

SEQ ID NO: 30459 - protein, 211 aa, Chlorobium luteolum DSM 273
MTTPIDAQTPRPATAPEELSPLVVTLLKGVLYEEENTALWNALLNMQAGVRDYISVLGLELILDEAEGYAFLRSRAAGEEESQDSMPRLVARRQLSYPVSLLLALLRKKLAESDAGGGDTRLILSREEVVELIRIFLPAGSNEVKLIDQVDASLNKIAELGFIRRLRNDKQTIEVRRIIKAFVDAQWLADFDRRLDEYRQLSGKSTEETDG

SEQ ID NO: 30460 - protein, 1121 aa, Chlorobium luteolum DSM 273
MAEALELGFISDDRLAGFRLQRIEVFNWGTFDSRVWTLRLDGLNGLLTGDIGSGKSTLVDALTTLLVPSQRIIYNKAAGADIRERSLRSYVLGFYKSERQESLGGGAKPVALRDSSAYSVVLGVFRNEGYDKTVTLAQVFWMKDPSGPPARIYAAAERDLSIAIDFSGFGPEITALRKRLKAGGVELFDSFPKYGSWFRRRFGIDNDQALELFHQTVSLKSVGNLTDFVRTHMLEPFDVEPRIAALINHFEDLKRAHEAVLKAKQQISMLDPLVEDCNRHRELSASNEELRGCRETLRPWFATLKLDLLHHRLTSLEEELVRHESSLRRLEAERLEQQERDRSLRLTIRESGGDRIESIASDIRMKQGELEHKKLKATRYAELLKPLGETPASSLEEFLHKRTLQVTMRENAAGQEARIQNELNELGVTLTREEQEYRELMAEIESLKARTNNIDDRQIAMRRDLCRALGIDENEMPFAGELLQVRQEENGWEGAIERLLRNFALSLLVPDRYYASVAEWVDCTHLKGRLVYFRVRTPSRSETMPPGPATLPHKLMIKADSPHFEWLEGEINRRFDVVCCDSQEMFRREKKAITMAGQVKMAGERHEKDDRHRLDDRSRFVLGWSNAAKITVLEENARQKNDCLGELNSRMKALRQEQTALKERLAILSRLDEYSDFHELDWQPVAVAIARLEAEKRELESTSDILRTLTLQLQEVEQELRETERQLNERKSRHAKTEQKISDAKELAEQAGQCLNEAVPESAERFPRLESLRLEMTENRAITIESCDNCERDMRDWLQSKIDAEDNKIRRLNDKIIRLMTEYNEKWKLETREVDVNIASADEYRSMLGNLRADDLPRFEVRFKDLLNENTIREVANFQSQLARERETIKERIGRINESLTKIDYNPGRYILLEAEMNLDADIREFQTELRSCTEGALTGSDSEYSEAKFLQVRRIIDRFRGRDEYSELDRRWREKVTDVRNWFVFAASERWREDDSEHEHYADSGGKSGGQKEKLAYTVLAASLAYQFGLEWGEVRSRSFRFVVIDEAFGRGSDESAHYGLKLFAQLNLQLLIVTPLQKIHIIEPFVSSVGFVQNKDGRNSELRNLSIEEYRTEKQKMAQ

SEQ ID NO: 30461 - protein, 403 aa, Chlorobium luteolum DSM 273
MSGTKKDWTTPADIREQVQRLWDRGTLLNALVDDRDLFPLRLGHSRPDSREISDRFIEVRDWIARLKAAEGPYRIVSRTLNHRVHGSDSIPYEIWIDSADDALGLIGKRRAAAAFVDMIELTRRYEPALLPWISKRPLRALELATVWPLMLNIVEWLRQHPRPAVYLRQIDIAGVHTKFIERHRGVLSELFDLALPKSSIDEHATGTTNFCRRYGFRDKALRVRFRILDSAYSILPYCTDQEITLTHTDFARLHLPVETVFVTENEINFLVLPPIPRAMVIFGAGYGFSNLAVVSWLQDKKLYYWGDIDTHGFAILNQFRQYFPTATSFLMDRETLLAHRQYWQREPCPETTALQRLTDPEQSLFNDLRQNNLGEHIRLEQEKIGYSMLLDALRKNPALSASS

SEQ ID NO: 30462 - protein, 482 aa, Bacteroides vulgatus ATCC 8482
MQVEEITQILRESPSVRLIKSRSVDFFLSFVIEAFEGQAAIMQERLHMLLENRLDEQENTLVEDDSEMTRLVESNEQKAKRLIKDWTDKGFLTNYQNEEGEVIYEISSHTSKLIDWVVSLKKEDYIGTESKFKTLFSQLKELVEYSNEDREKRLELLRTKKMEIEHQIQRLEMGEEVEVYEDYQIEPRYNSLNKLAKELLSDFKEVDDNFKGIIKEIYERQTENAEKKALLNYIFDAYGELKQSQQGKSFYAFWEFLLSADLQKEWDELAGALYKTLENRGIDAHDMFLKEMKKHLFDAGEKVAKTNDRMSEKLSRIIRQNGHMNAEATKQVINDIKKLLIEASRRKEKPDASLEYETIDINLPLECPLTLTPVKETVYKDKPDIAGLSLADLESIGKLYNPYHIDRKVLRDRINEVLNDRQQTTLAEVIERNEGVEKGLSEVFGYIGVLKEYKTVVSEERQQHIIFTENKTISIPEIIITR

SEQ ID NO: 30463 - protein, 194 aa, Bacteroides vulgatus ATCC 8482
MNAANIQPYSRAVVKLLKGIVEKDDVVWNDLLDYQSEIQDYISVMGLELIVKKDEGFAFVKQMKLDEDKTLNMVSRRSYGFEVSVILIVLRQILEDFDSNPTESQASDKYVTATEIKEEAELFLPATFNRAKFEKDLDRYIDSIAGFGFLVEAKHIEGEKRYKIHRIIKDKVTLDDILEFKNKLNDYNAADEPI

SEQ ID NO: 30464 - protein, 1133 aa, Bacteroides vulgatus ATCC 8482
MTIMQQMNLFNTSSEVAGFKLDYLEVWNWGTFDKKVYHMNLHGNNSLLTGANASGKSTLIDALLTLMVPLKRQRFYNQSSGVEKKGNRTEESYFFGNYGNQQQEGAASTTTLRLRDKGARSVLLASFCNVDKRVVTLFQVRYYTGEELKVLFGVARESLTIERDFSEFDLHGDWRKRLTKKYNTNETKRTIEFFDGPVAYGEKMITLFGMRSDKALTLFNQIVGVKVLDDLDSFIRTNMLEELPAEEKYQELKDNFQNLMEAKTNIDKVKEQIAQLEPINALTEELKEIDIRIVEMEQEKSVAAYWFAARTVDLCDKELVCCKSDLRKLEDRLKELKVQKGELEQEQMRLTVAIEKDEVGQQIHEIEKEINQRVRIRDNRKAKAEEYDKLAKLVKMEQSPDVEVFEINRATAKREKDALQVTIDRQLMEEKRQAQNRQDEISSNIEERMATIRYLQQHKNNISGRVAEIRDEILEAVGATTEEIPFIGELICVKDDERDWEYSIERILHNFALRLVVPEKYYKQVNEYVNGHNLRGRIVYQRYQGAETIREFEDRTLKADSLLRKLEYKPMCLYLDWLEDRLFAEFNYSCVDSLADFNHLQEKAVTKEGLIKARGGKHEKDDRPEIRGKEHYVLGWDNKEKIAVLQAEVRQLQQEEKMTAAKVRKLEEDIKNAQKKRETYLTLFSKYDKFDDIDWQSCVLVIQQKQEQKRQLEEANNRVKILQEQLAGVRKEIGLLDDENNEAIKKKTLSENRENKLKERRNESNSALAQIGVVDTDTFESQHTDLLNVALEDLNGKRDTLQHEIDLALQKQRETKSRKNSDLKNLIYRFKNPAEEITMKYHDWRSDVSRLPEAVEFMGEYQAYYQRLLDEDLPGFESRFNKYLQENIINKVSAFNVFFQNWCQSITKTIDQLNSYLIGIDFKDAPKTYIQLVATKRLNVDVKEFQNLLSSAIPNIHEMNSTIDGSKIHFEQHIEPLMSRLQVESWRKSVMDVRGWYTYKSEEFYQDDGQKRNTYEAMGQLSGGEKAQLTYTILGSAIAYQFGLTKSGLDSSFRFIAIDEAFRAQDEDKARYLISLCKQLHLQLLVVTPSDNIHIVENDISYVHYVERKGNCSVLYNMPISEFKAERERSMEV

SEQ ID NO: 30465 - protein, 388 aa, Bacteroides vulgatus ATCC 8482
MITAVEIRKKTERKYVDYLRSVVAGSEFEPIVIPCDKKASASMDEYQRELTDIRSQSKEVKGFGYTIEWKTVKTKALGEQDLPERVLFESASDIERFLQKCGEVSQFRKDVAMLLDEFPQLRSWVERYPLKVVENASFWSDLLKVLRYFVANPCPRLYIRELPIEVHTKFIERNKGVLRELLDIVIVEHVCSDEKVFEKRFGLRYDESWVRIRVLEASIANEYFSGVDDLTMPQSQFCALSLPVQKVFVVENKINFLTFPKLAGSLLIWGHGFTIGILKSVPFMRHASLYYWGDIDAQGFEILSQFRSYFPQTQSLLMDRTTFDTYFEGDKGTPSNVSKPLHLTPAEAALYDHVKFHNLRLEQEKIPQKCINNIFNSLLKNGQVISEV

SEQ ID NO: 30466 - protein, 390 aa, Carboxydothermus hydrogenoformans Z-2901
MGWFNLEEDNDYQQYVTITEPARVMLEALEKIANRQTEEYRGYVFATYSALCSPEAELQKDLALDSAYRETRNLLNSLKTLRDNIKGYIKEAVSKTSAKELLILHFEEYTQNIIDQNYHRLKTSDHVSRYRPAIINKINEWESEYVDEIIKLYQERDKEKPEEVIRQEFYEKTSFIRTAYRELDLYLEEIDRYNALYAKSSYRQLKYLLETDRDLTRTLIDILDYIAGQVMQKELSLKDYLEHALPVKLNEFKFFNNDPLYKPRRPASEHRPEQKLVELPLEKKKELLRKTLEEVRERYSVEVINEFFLEKARGRDEVEAVELVENLEDFIKLIYLNAYFRHKKAAYVIKEDKRRFAGEKVQKGPFAFKNIKIVRKGKNGRASFNQGLFA

SEQ ID NO: 30467 - protein, 200 aa, Carboxydothermus hydrogenoformans Z-2901
MEELLLIKDYSPKTREEFTRAVNKLLAQNFVIRDLEEDRKDYYFIYQHEKEVRAFLELAGWELVHFAAQRIYQAAGSSDFNKLRLNLVESLVLLILRTLYEEKRRELSLAENPLVTVFDIQERFRELGIKDKPLDKKSLRECLSLFSRYRLIILPDGAQTFPETRIVLLPTLAVVLTDKDLRAYLESLKSGDAEGEADES

SEQ ID NO: 30468 - protein, 1101 aa, Carboxydothermus hydrogenoformans Z-2901
MKVENFKELRGIKLINWHYFQNETIKLKGATLLTGDNGSGKSTILDAIQYVLVADQRKVRFNSSAGEEHSKRDLLGYVRCKTGADGALGKRVLRTGDVTSVICLEFFDHKKKEPFLVGVVIDAYSDDTLKEQFFIINNASINDDYFIVDQRPRNITEFRAKMGSLKNAELLAKDAYKHQLRTKLGHIHEKFFSLFVKAISFKSIKDIREFVYEYLLEPREIDLRNLLENLEQYDRFLVLAEETERKLHDLEVILEKHKQLKKDITTRNLHRYLVLRGNLADLQERYQSLIGRMEELAGEKAKLEEKLNILTKRLLEVREEKDNVNKALWENSAYRRLTEIEKEIKELQGEQKRLKTLQEKVQTFLQNEATIYKKYGFSQAEILKEMVLNLRLKDVKALLPELINFRKNLKEQTAQELYRIEAEISTKKALKQEIEEILEGLKQNKHTYPPEVGALINLLKEKFREEAKKEVEPKILAELLEVKDERWQNAVEGYLNTQRFDIILPPEDFDRALAIYERYKKERRISRVGIVNTGRVKKYLGQIEKNSLAEEVTSENPYALAYAQFLMGRVIKCEHEGQLKLYPRSITPTCMVYQNHTARQIDFKVYEIPYIGSRAIKKQIEKREQDLRELEQELDKLYREKFKLTERQEELSGARDEKDREYALLEDRLMELLKLAEIEEKIVKLSLERESIDTSGIEALEESLAKLVLEEKALEAEKDKVQGRVGMVTKELEFRAGEEKQLKMELESARREYDEFCSQNPDLVGDGEKRFEEELKGKSPGQIAQNFSSSLKGLETRINNLRADLTELRSKFNQKYAFGGSITGDDITDFLDLYRKLAESELPDYKERMERAKAQAEEEFKSHFVHKLKESIEEAKGVFRELNAALRGIKFGEDEYRFRYENAPEYKKYMELIDEVDKLTPGETSLFSGVLREKFKEVMDEMFEGFLHRDKEAGEFLNRLTDYRNYLTYDIEILHGDGTTSHYSKVYGLKSGGETQTPFYVAIVASFVQLYRIHRGDSTIRLMLFDEAFNRMDADRVESSIRFMKFYGLQPIIAVPSDKLALIAPHVETNLLVLRAGDQSFVEEFYYDGSKEGIRLGSASG

SEQ ID NO: 30469 - protein, 343 aa, Carboxydothermus hydrogenoformans Z-2901
MFHAALKDWEREGFITLVWERFEKDNLLRHVKLNPEKAELLYEKLSRQKPQEKEEHYRKLWANLNDFPAWLGELKKDMLLEPLFDDDAEIMVTVLNALSLNNEEIPKRVFSQRYLGDSKLFLKVERKVAALLQKYYFKDIEVSGDAVFAEFGVVNNPVYLHLAGPVILKYPDGRLFNLKGLNYDVAFPAGLALQLEIADFAAQRVVTVENLTSYYQYVRRYPEDLVLYLGGFAGKMERKFLRKIYEYCLNRGFNIDFYHWGDIDLGGFNIFLHLKRETGIPFKPLWMDLDTLLKYKERGMKLSESYRRKLTKALEDPVYQDFRMVIEMMLALNIRLEQEAIEL

SEQ ID NO: 30470 - protein, 481 aa, Pelobacter carbinolicus DSM 2380
MALDYATLELLRQNHPAWRLLCAHHAPLVAGFLHRVFIVPNVRNLPQADLVEALEDELFALREQLGDEAFPGSAQSYLNDWAENDKGWLRKFYPAGTDEPHFDLTPATEKALVWLEGLTERAFVGTESRLLTLFELLRQMSEGSQTDPQVRIAELHKRRSDIDAEIARILAGDIPLLDDTGLKDRFQQFLQLARELLTDFREVEHNFRTLDRRVRERIALWDGSKGALLEEIMGERDAIADSDQGKSFRAFWDFLMSQSRQEELSRLLEQVLSLPPILAMCPESRLQRVHYDWLEAGEHTQRTVAKLSEQLRRFLDDQAWLENRRIMDILHSIENNALAVREAVPSGGFTTLSETSATVELPLERPLYRPPLKTLITEMALDEGDADVDTAALYAQVVVDRAELTRNIRQELQGRSQISLAEVVTRHPLRHGLAELVAYLQLAGEWPETVVDDEVQEKVSWQLGTGVMRQATLPRIILLRN

SEQ ID NO: 30471 - protein, 211 aa, Pelobacter carbinolicus DSM 2380
MMNVADTNPGYFAKPLHELSSVLVPLLKGVLYREDNPGLWGLLQKLQASVRDYVAVLGLELMLDEAEGYAFLRSRRDDEEDAPVAIPRLVARRQLSYPVSLLLALLRKKLAEFDAGGGDTRLILSRDEVVELVRIFLPAGSNEVKLIDQVDATLNKIAELGFIRRLRGQGQMIEVRRIIKAFVDAQWLADFDKRLAEYRQQIAEPPEETDV

SEQ ID NO: 30472 - protein, 1121 aa, Pelobacter carbinolicus DSM 2380
MSETLELEFIGDDRLAGFRLQRLEVFNWGTFDGRVWTLRLGGENSLLTGDIGSGKSTLVDAVTTLLVPSHRVAYNKAAGAESRERSLRSYVLGFYKSERQETLGSAKPVALRDLNSYSVILGVFHNAGYNKTVTLAQVFWMKEAGAQPARLYAACERDLSIMADFSGFGSEILGLRKQLRASHVELFDSFPSYGSWFRRRFGIDSEQALDLFHQTVSLKSVGNLTEFVRSHMLEPFDVAPRISALIGHYEDLNRAHEAVLKAKHQVEMLEPLVDDCDRYRTLAQTADNLRACRDALRPWFATLKIDLLEKRLTSLNEELARHRTVIVRLEEQRREQQGQERDLRRTIAENGGDRIESIAGEILQKQDELERRKQKASRYEELVRALGQYPATTCDEFLRQRSEIANWRETTEETEIRTQNNLNEAGVLFKQGKDEYDQLQNEIASLKARVSNIDEKQIAMRRALCGALNLVEEEMPFAGELLKVRDDERDWEGAIERLLHGFGLSLLVPDRHYAKVAQWVDQTHLRGRLVYFRVRAKGRGELPSLHRDSLVRKIQVKPDSLFYDWIEREVAHRFDLACCQSQEQFRRETRAVTKAGQIKAPGERHEKDDRHRLDDRRRYVLGWSNAEKIAALEKEAKRQETQLAELAGRISTLQKEQAALKERLSVLSKLGEYTDFHDLDWKPVAVFIARLEAEKRELEAASDLLKTLTAQLIALEGELKETEEKLDGRKDKRSKTEEKISFAQELQEQAQALLAETTEEIVQRFSMLGEMREDALGDQVLTVESCDNRERDMRDWLQARIDAEASKIKRLSGNIIKAMTEYKGQWGLETKDVDADLAAAPEFRSMLDQLKADDLPRFEGRFKELLNENTIREVANFQSQLARERETIKERIAQINESLTQIDYNPGRYISLEAQMNLDADIREFQTELRTCTEGALTGSEDAQYSEAKFLQVKRIIERFRGREEHSDLDRRWTAKVTDVRNWFVFAASERWREDHTEYEHYADSGGKSGGQKEKLAYTVLAASLAYQFGLEWGSVRSRSFRFVVIDEAFGRGSDESAQYGLQLFAQLNLQLLIVTPLQKIHIIEPFVAGVGFVHSEEGRNSVLRNLSIEEYRDEKQRMQG

SEQ ID NO: 30473 - protein, 391 aa, Pelobacter carbinolicus DSM 2380
MTWTTPADLKAQVQKLWDRGLLLASLSGDESVFPRRLTFKGPDSQELSQRFSEVRDWIAQLSAAAGPYRIEWRCINHRVLGANEIPSKIWVDSLEDAVGLIGKRRAAEQFAALVELTREKQPELVSWLGKRPLRALELGADWPRLLAIVDWLHRHPRPAIYLRQIDLPGVHSKIIEKYRGVLADLLDLVLPESAIDATHKGVGGFCRRYGFLDKPTRVRFRVLDSNIRLLPVKAGQDITLTQEAFASFALPVSKVFITENEINFLAFPDVSDAMVIFGAGYGFDNLSAASWLHEKDIYYWGDIDTHGFAILNQLRGFLPHVVSFLMDQQTLLAHRALWGVETQPETGTLSRLLLDESALYDQLRQNHWGDRVRLEQERVGYDFLLEVLREL

SEQ ID NO: 30474 - protein, 474 aa, Geobacter metallireducens GS-15
MLFNKLPDEIFKPLAGANRYFFEEILLFLFRYFSDEDITNEAVFPRRGHVVREIEELLERKGRLLQIVDEEGDAEEDISNAPGPAARYIYKRLVVTGWLEEEEDGYHVNVIMPPHASLLLEALEGVAHAEKKNYGSTIASIHLQLQAIANHPEDNARAFIEVVRAARDFTRHLQNIFSGLRGFQDIITRQHNPKLALSTFFDDFVENLLISDYKSLQAENNPFRHRANVLNLLIQIEHIDSIMTALIKVYQEDKNLAPDAAREKVISDLHFIARVFRSVDRRLDAIDLYRMRLESRVAEMVRYMDRNVPDLTNRGIKLLEELGRRSLEQPDGELPALPQPPRWISHALLSHRSIRKPQRRRQPQFIELAREQELSTEVKERLRLIQDYLQRRVMSPAKVVAFIDRQMGERATFAAKDFKIESVDELVAFAFVPFLNQMKGKPVPNMPLFNIRRTGDRLDTPLLECSDFIVERKG

SEQ ID NO: 30475 - protein, 206 aa, Geobacter metallireducens GS-15
MLHELRRMLDKDENLAAEDLRRAASIALDRQFLFGDKSRDQRSFHQILDAEDYYRNLFDALNLELICDRTAGYVGVVPRESHLTVGLDTEHSLFLLVLRVIYERAAQECRVGEFSQVFTDSEVMLDTFVAHTGRKRPGLVRLREILRTFSRQGLLEIDEDEDKAIRFRIRPSIRDIVTHGFLQALEEYTKGGEGEENGTDEAGGGQ

SEQ ID NO: 30476 - protein, 1140 aa, Geobacter metallireducens GS-15
MKTLIKAVLIQWFRLEAVEIPIVGNTAFIGDNGAGKSALLDAIQTVLTGANKRLLVLNRGSNEQSSRKLWEYVLGVMSDPKKPELATKIKPRDKANCYLALNFHDVETGETTCVGLGIYACMADMAEKVEGYFICPGLVGHKDLFLEQGKGDSTIVLPWARVKERLAKRCHATRFHHEPGKFTQDLYGCLSEHPGSPNNDKTVLKALQAAFRLEKISDPTEFIRRYMLDRDDLQIKELQSALKNYRDMAEKTESVSRRVADLTRLEVCCEKVENARAQHVMAEYVSLNARIEQIEGSADPLRGALADLEEAREHMGKDKTVLEDQQAKVQEELGEKRGELKLCDVQVQRDRLQLESDQARQREGDVKARITEIRRLLQRFEKLKDVPVNDSLAVAISDIVKLMPGDDMISTAVWPSNPSEVDICLELLLVAVERSLPELSSRYDDFCADHKDLEKRLKNLVEALKQLQHGKAPLQPNTRNLIQFFKKHGIESKPLCDLVDVADETWRGTIESILGNIREALVVLPEQARKAVHLYRHEGRQEFPGCHIINTTQTDRWKASKQQGTLADCLNTDDVHARAFINRRLGNIVCVDTEKDLLHHDRAATADGMLSSGGTVSELKNVQPILGRGSREGLRVAYQRDLNELSTKQAGVVGEKENLGSLKVLLEDCKRQFSGDAVISLSALVEQRTASEKAIQEMQEKLAALASDAREQKLRDEIKKLEDKAEGIKKSLKDLDEKRLQAEKEYAQNDDKLKALDAQMDALQVVLEEKRGNPLLDPAKAADTLDRWREQNAGDFAAICERAEKEIGSALKTIEENNTRMIKEYTEYYLRFALEEGEESRPEHFEEYAVTIRRKKKHLVETTLAEYREKSARALQEAEDTFRSKFVGRLIGKVEAVRGSITQLNKTLEKHPFHGEIYKFRSSSNPEFKHIIDFAKACNSPASREVGGLFDPVADSNSPHRKALEDITTALQDPKAAERLQDYRNFLVFDVEMCDTEGTPTSDLEHRIQKGSGGENQTPFYVAIGASLAAAYRLKEEYGKHHGGMSLAVFDEAFSKLSVATCHSCIEFLKNIQLQLIVAAPDEKFATMAEVMDTIVWVTRDGGTVETEVISIKPAMRAMLRTDNPYRKASGTAEFLHEPV

SEQ ID NO: 30477 - protein, 401 aa, Geobacter metallireducens GS-15
MNQSSRQLLRKLLDAWQANPDRSRLVRLPITQARAPQYFEASLPEAKEAIHAGLLEAASAGTVALEWGRGYESHILKRITLTDGPGLANYLGMPLAAKQADDARSILETALSGRETWINEWVEDLLGKWSRNQSAAGMSPGDTASARLMVRALEAVVAGRHLNLDLRTFSTREFGDSKAMEGMLARFTSVWKKYHPTELTGEELLETLGLVRFPPPLLLSGPVVLKLSDRHLDCEGIRPFVGLPPQAIRGVSADKLPEYVLTVENLASFNRYAAEIRDNGLVLYTAGFPSPGLADFLRMLDVSLPSGMPFFHWGDIDEGGLKIFVYVQGLLRRTLQPHLMTVDLLASCGLPKPSLRVDEVKRTAEKYPAIALLAAAIISTDPPKTLEQENVNPFTPAVETQ

SEQ ID NO: 30478 - protein, 491 aa, Hahella chejuensis KCTC 2396
MSNPDRFQQFFSTDCPQFFRPLTSKYREMIVECLRLLYQRFYSSMADYGHALKREQMVEIFQTALTRAPELETDEDSETEGRFRTDRDKALWILNTLIDYGWLEVQVDEVTLQSSYHFSRKGRLFTQPFLELSGASVRTRHRNTRNTRNALRAFIEAGEVHDLLDAYEYSERIISDFTDIITELEDRKRQLVKEIEITALIKRASDEFFDFMDKRFQPDLSVRLSADSVEKHRDEIMSQVRQIRRLPKETKAHAESELRRLLPDRVVEGQSLLWLLLDNIEIRLTNACDIMLPALRSALRNFTRRADIIIRQMSYLASQRHNDMVQICQELTELPAEEQRARLERAGALMANLNVGLIDPKQISLREGRRKITVDSRVLNDEPLDQGARKELFIQHALDQAFVINDDRTRQYLIQALRGGQRIQTKHLPINAAPDLLAAMHAVELGSVSGLSSEYEFVVEPTGDLVSNEYLLQADDFIIEVRPKKAMQDTL

SEQ ID NO: 30479 - protein, 223 aa, Hahella chejuensis KCTC 2396
MILSQCLENELSSEGLQLTDFSELALRLLDYSIICRDESLIEQTLYDRYLRIDKLVDDYLSVLGVRLLHDRQFQYIRAYPPGAEAPGLDDEVDQPFNTGLRARLNQQEIALILVLRSQYDKALREGQVDDQGGVTLSFEALSIAMKNLLQRTLPENLTERRQLLKRLRQLRLLQFSQEDTLESGESWVRIRPQIVNFVSDEALSALRGEEAEQEDAAASPEEI

SEQ ID NO: 30480 - protein, 1209 aa, Hahella chejuensis KCTC 2396
MFLKKCIYVNWGNIPNSEFDFGPINLLSGGNGSGKTTSADAIQTVMTAAHDYLFTYNPGQDETTQRGRGGKQVRTLSSYVLGCDDGSFARLEPTEGYIAACFHPTMGESAEPFTAIICCRAHIDQAGSQRVARQDDLFFLILPGAEISLSALQGEDASGDKFVMPMDKIVARLRKNFEVEKYDTKKGYLKRLYGILRGKTHEVPEREAMNAARAFSRFMAYKPVKSINDFVANEILEKKDLGEAIRSVSDLLKTIHGMESDASRLKNAIRILSDAMGYGESYIQRWIDLNVWQYVAARHQYLTDQEAYLTAKKQQKSLQDEKVSNQQERDTLEARHDQIEGRLLELTAKRMGHQPLQQKDELEKLIAANGRALHEQAPGLLEQNHRLDAIFQATNNIINLMKNQNILDDAPRLGHKDVWAGALEFSQLKQHGQVDFAALLGRDWVDISPLENHLEQALLIQQKANQWQRQWHDGEISADGVSLRDQVSRALHRRESLNQKLEQQRHQKQAEIESLETRQVTYPYHVKTALEAIRRECPEADPRVLCDYVEIKDPKWQNAIEGYVGGGRFSILVEPEYEARATRILRSLKGSGQARVIQGEKARRDCERMNLDKDSIIHVMEFSHATARYYITASYGNVLRVRSEEELRMTRRGVTANGLGSGSYSMFRCDVADSELVFGQQARERALDAKREELQQIRIEHQRASEQWQELSNLLRAADQIKPLSYADRLKAMLDIHRELREAEDRLAHLDLADFELLEQELEQLKQQDKELKQRIEVLLKREGSLQTELAQKADLCKALSERKDASETKQDEKEESLRSIASLWPNFDSEARLQEADQCAESIRSDQLHLELQDTQSNIESLARQFENKLIEHNQSSNPLDQIAYLPDYDQMHNRAFFSRICEVSREIDKIRNRLKNNILVEKQEKLSQLKLAFNNTFVTHLCHAIYQAINDGKKILEDMNRELEHHRFGADRESFRFDWTWVPEFKEYWDFFKEIIALPNLGEGATLFDAELSKKASQVRDRMMAMLLSDDEQKAMRELERISDYRNYRNYEIYKEPQGKQPIPLSQYGTGSGGQLETPAYIIRSAAITSAFRFNEGDSHLRMVLVDEAFSKMDETRSREVINYLTQTLGLQLVFIMPTSKSGPFMDLISNQFVFTKCPTTRPVGELQTRVLVDRQKCNQEKIAELWANHRKQIRHQFALDFMEEFG

SEQ ID NO: 30481 - protein, 460 aa, Bacillus cereus Q1
MKKLFECIPENYFNLFAGKNRGFYAEVAFLLYEQFHINRAGILYSLMKDEVQELIETKEELGECIDIEDEIEEKEQDSAGRANEVLRRLKKLKWIDVEVRDQFEEFIVLPVYSSRILAVLKEICENRTIEYQRYCFTTYQLLTGVEAEERPASAILESEKYSEQLYDELTILLHNMKNHMETIAAKDDIQQVLEHHFGEYKKDIIDKSYHRLRTSDHVSRYRNKILERIQTWFLDDKFMKRAAEDAVESGYSANWEEAMDGLSKKMYRVEEIYSNLDEICNQIDARHYQYLRAVLDRSRYLSTYNDSINYKISYILEHIGQMDENILDSSLFRLVQLRQLQEASLLSPRKKKGVYEPEQHEVNEISDEMREELKAENIRRMEKVMNRKKIQKFVLEAMKGRQEIEMSELNLQNEDDALYLIYVYLYGYSKGTGYKLSEEPPEFITQKGYTFSNRTIKREN

SEQ ID NO: 30482 - protein, 197 aa, Bacillus cereus Q1
MQNVSEREREEMGIVVNYLFSHNFLLKEFEREKYHLAVRNKDIIKQYLQVIGWDFIVDEKHGCIVIVSPHYEHRLKLKKDETIWLLVLRLIYEEKRSALSISQYPFTTLQEIKGKYETFRLPFVSKTKLRELVQIGKQNQLLRPIDNDIESDDCRFQLFHSCIHVLQQGDLNVLYEKIKSYSEGGDHSEMDEETTIN

SEQ ID NO: 30483 - protein, 1111 aa, Bacillus cereus Q1
MGITVKWMKKLRLINWHYYSDETILFGKQTVISGHTGAGKSTVIDALQVLFISDERKIKFNSAAYEEANRTLINYLRGKIGTEEKPFVREGYFTTYIVAEFYDEKAGESFVIGISIDVFKDDEKVKEYFIIPKSEINMISFFSTKDEKRYVEKQADFCKKIREQFPEAIIEKSSNQYQKALLQRFGGLHERFVKTFARALSFKPIDNMKDFVYKNILDEKELKIDVMRNIFQTHEELQRELEELKERKEELERIDNIYLECVKLEADISIQEYVLRGLEYLLIQEEKSMCKKSIEQREKELRKCESDQKKTAEQKEHARKKETEYEIKIKDSAEQKRQKQLQEQIAQAKKECGDLECTKNIYVHSLAREEKDVSSLLNYQGNEYFSLSKDEKHALEIGRDCLAFLSHNDGTGGNREEQTLNKLGESLKRISGRFYKSTAELEHRSAELKTEEKELLSDIENLKRRKRPYPMSVEKLKGLLEKHLEDQSKVWILCEELEIKNDKWRNALEGYLNTQRFDILVEPHMFATALSIYEKEKWNLGLEGVGLVDTEKEQTYLGKVEKGSLAEEIVGGNPIVQARIHHLLGRVIKADNEQELRKYKTAVTATCMSYQRLVARQIPRKVYETPYIGAHAIQKQLEIKEENLKEIQTELQIVGYYIKDFKKWIEILEDKQSDYKNYILNFSLNDSILEFNKNINKWKSELNTLDLSRLESLRQKLKEWNGKYNQFNGEEGRLFEQIGKVKEELQRVNAELWKKEKAATEILEKWKNWKFEYRIELLQEAEQRYEQAISTNKAYGAIKNKYENNKKENQNKYEEKRGFLESERKSYNEARTFQGIIQAKDNKQYEEALRKIANLDIPKFEQEIKETLQQAEEEFQSHFIYKMREAIQAARREFNQLNHALGRFKFRNDTYRFVIKPSEQYKKFYDVIMDERVQPEISLFDFGDEDRAEILKDLFGRLVVGEYGENEEFVDYRNYLDFDLSINNENGTRFMSNLLREQSGGETQTPFYIAILASFQHLYRNKNTIRLVVFDEAFNKMDEERIQISLRLIKQLDLQLIAAVPDEKMAHMAAEADTAIIINRIGHSCFTDILSYPREDEAIGLQEQDSFSLIE

SEQ ID NO: 30484 - protein, 409 aa, Bacillus cereus Q1
MDYKSKILSVLLNKYENSKTAHTGERSAQRPQFSFRQKHELSKAYNDEMDYTNRLEINTALKDLIRKKIIEVKWEKWEENRIAEKVYLQYDFIPQAYREAGIEPKIEKMNRILKVLEPLAVHSWEWVRQWYKEVQQSFQNNKTARINLNDVKGYELLVKALSRLEGLEDSIPKRTFSQLVFGDTKLFETTIQNRLLIIYKRYGDIEYESDKEYLESIGILENIQPVYIKGNVDIRVRGEKIALGSFPGGFGLMDETIKELEIQYVHDESIMLIENMTTYYEQIKKNNNILFIYTGGFPKKNVQQLLKKLNIYLENHPVPVYHYGDLDYGGIQIFEYIKRSFFSGLEPYMMDVATYRQFVKYGMEFGEGYEEKLLKMLENEQYSLWHELIKEMLKEKKRVEQEVIVRNVI

SEQ ID NO: 30485 - protein, 485 aa, Moorella thermoacetica ATCC 39073
MKLFEVIPERLFQVFSGRNRYIYAEALLLLYEQYRVNRFGIQYEVMRDLMQELIESQEEAGLAFEVEEEQEQEPAASGLFNGDGEDQARLKAGVILRRLEKLKWIQVEVRENFRHYIVLPHYASRLLAVFQELCENRTVEYQRFAFVTYQLLSGEEARQRPGFAILEAQRMTQEFLEELRVLANNMKYHMEQVVAKTSIQEVLDHHFEEYKAHIIDRSYHRLKTSDHVSRYRQRILATVQEWLLDPEWMARAVEDALRNEFFATREEAAEQLRRALMDIEEIYRGLDEIFYQIDLRHNQYLRASFERARYLSQHSSGVDQYLARILEWMAAGIRRGDLPEEDCLPGMFNLMRLNQLNEQSLYTPRRRRAPHRPEPQVVVAVPEELKRQLREQNLQRVRQAITREKVSAYVLGRLGERREMGIEELAPTNMEEFLYLLYVYLYGYDGLAGYRLVPRGANRILDIGGYRFYDRRVVRVDTGRKGRAV

SEQ ID NO: 30486 - protein, 203 aa, Moorella thermoacetica ATCC 39073
MLNLGENLSEQEAGRLREVINRLLAVNFLNKEQEREHYLVARRHRQVLEEFFRFLGWEIVFDDRHECLFVLSPEAGCRRNLTRDESIWLLVLRLIYQEKRQGLSLSEFPVTTLHEIRAKYEAFRLPLFNKTRLQELVRLGTQYKLLEPLNDDIRSDDCAFRLFHTLLYAVQADTVEKLYQKIAAYEQGKEELPNEVDAPPAVD

SEQ ID NO: 30487 - protein, 1207 aa, Moorella thermoacetica ATCC 39073
MKWMRRLRLINWHYFYDETLEFGRQTLIAGRNSAGKSTIIDALQVLLVANQRQIRFNSAAHDEARRSLISYLRGKTGGEERKYLREGDFTSYIVAEFYDQQKRENFVVGVVMDVYGDDTIDDEYFILSGVELADLDFWSPAERWKNREEFHRYCQNLPGRHIFERSKTGYQKALLNRLGQVSERFFPVFVKALSFKPIQNVRDFVYQYILDEKELQLDLLRQNFEIHERYQAELEALEERREQLEAICRQFDTFARLRDTVAIQEYVIRGLKHTREVELRDRLEEEIRFLTAEVERLGRELDLARAKQLEAGQKAREAYQKWQSHQARQREQELKEGLARVDKDLREQGRLLAILRQTLEREKALLAGLQEMEADEYWQWQPGERERLGRALELLSGLVPAGDADWLPGEDTVAAVRDTGLFLAGLHSRCARAVGRLEDRLALLQQQKAELEGQIRDLENKKRPYPPHVLNLKRLLEERLNRRSPVWIFCEEMDLKDETWRDAVEGYLYTQRFDLLVEPRVFAEALAIYEREKGKHQIEGVGLVDTEKEQKYLGTAQEGSLAEEMVTGNPVIQAHIDHLLGRVMKARDEQDLRRYRTAITRTCMSYHNLVARQLEKHRYAVPYIGARAIARQLEIKRRELAETKEQIEVLKDKREKLAAWLERLADKKSLYAGISEQLDLPARIRRLEEERAALAAELERLDLGEVERLKEEYYYWERRGKELLDEVTEISGLKKSRENELNQKQTELHLQETRVQEAQAFWQSWREQYPVELLPRAEERWREAAGQELPVASKLINWENSQKGNTTRREQEFQRLRDLRHEYNLRYTYNADPGAPDNEAYRPLLAEIATVDIPRYREKLAEALKQSEEEFKSHFIFKLREAIEAARRDFNELNYALKNFPFHEDRYHFEIKPSERYRRFYDVIMDPGVMEQGSLFELPEDDRTAVLHELFEKLIRGEAGELEEFTDYRNYLDFDIVVTSGEHRYSFSQVLREKSGGETQTPFYVAILASFNHLYDTGKTVRLVVFDEAFNKMDEERIQTSLRLIKRMNLQLIAAVPDEKMQHMAPEVDTTLLVHRNGFHCFVDMISRQEVLAGDEVPTGDGQPAGPGDTDGGRAGGHKEAGYGGTGGEDSGDAGDDADDAGNDGPPLNDAASLSRPAGGEDGHRGQAGGSGGEDSGRPRRGGVRNGRDGQRPASAVPVQDSLFADQ

SEQ ID NO: 30488 - protein, 425 aa, Moorella thermoacetica ATCC 39073
MLISKYEGSRSFQTGTPGKQRPQFAMKKSPLAGDYFDEMDHRKREAIHAALAELAAAGVVEVTWPRFQEGRQVEKVYLNFDAIPRAYELAGLVPRAERICRLRQVLAPLATHPWEWVRRWWAGVDASLGERRSAGLDLEDPEGYGELVKVLLALPGLEDSTPERIFSQRVLGDSKAFEQRVKKRLLALLKSYGPEEYETDAEYLDSVGLTDNPKMVLVAGPMTFRVGRTTVNVGGLPGGLGLAAHMVRAMEITAVTAPWVLLVENLTSYYQVVQSVSELAVPCREGGGGRGLAVEGPAGLVVYTGGFPHRGVQLFLRRLQDYRESPGATARPPVYHWGDMDYGGIRICEYIRRNLIPDLQPYLMDVTTYTRYLPAGIPFGDEYAARLRHLAEDPAYAPWHPLLQAMLKHRKWVEQESIAINVSWA

SEQ ID NO: 30489 - protein, 481 aa, Syntrophus aciditrophicus SB
MALDYTTLELLRQNHPAWRLLRAHHAPLVAGFLHRVFIVPNVRNLPQADLVEALEDELFALREQLGAEAFPGTAQGYLNDWAENDKGWLRKFYPAETDEPHFDLTPATEKALAWLEGLTERAFVGTESRLLTLFELLRQMSEGSQTDPHVRIAEMQKRRSDIDAEIARILAGDIPLLDDTALKDRFQQFLQLARELLADFREVEHNFRMLDRRVRERIALWEGAKGALLEEIMGERDAIADSDQGKSFRAFWDFLMSQSRQEELSRLLEQVLSLPPILAMRPETRLQRVHYDWLEAGEHTQRTVAKLSEQLRRFLDDQAWLENRRIMDILHSIENHALALREEFPTGDFMPLVETSATVELPMERPLYRPPLKPLIVEMALDEGDADVDTAVLYEQVVVDRAELTRNIRQELQVRSQISLAEVVGRHPLRHGLAELVAYLQLAGEWPKTAVDDDVQEQVSWQLETGVMRRATLPRIILLRN

SEQ ID NO: 30490 - protein, 211 aa, Syntrophus aciditrophicus SB
MMNVTDIDSSHPVRPDHELSSVVVPLLKGVLYREENPGLWGLLLNRQAGVRDYVAVLGLELMLDEAEGYAFLRSRQDDDEDSLAAGPRLVVRRQLSYPVSLLLALLRKKLAEFDAGGGDTRLILSRDEVVEMIRIFLPAGSNEVKLIDQVDATLNKIAELGFIRRLRGQGQMIEVRRIIKAFVDAQWLADFDERLAEYRQQIAKPREGMDG

SEQ ID NO: 30491 - protein, 1140 aa, Syntrophus aciditrophicus SB
MTNGWRNIDNKLRNPGRGWMAEPLDLEFMADDRLAGFRLQRLEVFNWGTFDGRVWTLRMGGKNGLLTGDIGSGKSTLVDAVTTLLVPSHRVAYNKAAGADNRERSLKSYVLGYYKSERQETLGSARPVALRDFNGYSVILGVFYNAGYKKTVTLAQVFWMKEANTQPARLYAACERDLSIAADFSGFGSEMVGLRKQLRGSGVELFDSFPSYGSWFRRRFGIDNEQALDLFHQTVSLKSVGNLTDFVRSHMLEPFNVAPRISALIGHFEDLNRAHEAVLKAKRQVEMLEPLVADCERHRELARAADDLRACRDALRPWFATLKLDLLERRFTSLNEELTRHGAAIERLEEQRRAQQGQERELRRTIAENGGDRIEGIGEEIRQKQDELERRKRKASRYEELVRDLGQHPAATEEEFLRQRSETATWRETAEEAEAKAQNDRTQAEVDFSQGRSEYDRLKNEINGLKARVSNIDEKEIAMRRLLCQALNLAEEEMSFAGELLQVREDERDWEGAIERLLHGFGLSLLVPDRYYPKVTEWVDATHLRGRLVYFRVRDGRRGELPTVHPDSLVRKLQVKPDSPFYDWMEREVAHRFDLACCLSQEQFRRETRAITRAGQIKAPGERHEKDDRHRLDDRRRYVLGWSNAEKIAALEKEAGRQEAHLSELAGRISTLQKEQSALRERLSIFSKLGEYTNFRDLDWKPVAVAIARLEAEKRELEAASDLLKTLTMRLTALENELKETEDQLDDRKDKRSRTEQKISAAKDLQQQAKALLAGTAEDTVRQFAMLEEMREEALGSQSLTVESCDSRERDMREWLQDRIDAENSKINHLSEKIIKAMTEYRKEWMLETRDVDVHIAAGPEFKSMLDQLRANDLPRFEGRFKELLNENTIREVANFQSQLARERETIKERIAQISETLIQIDYNPGRYISLEAQMNLDADIRDFQTELRACTEGALTGSEDAQYSEAKFLQVKRIIERFRGREEHSDLDRRWTAKVTDVRNWFVFAASERWREDKTEHEHYADSGGKSGGQKEKLAYTVLAASLAYQFGLEWGAVRSRSFRFVVIDEAFGRGSDESAQYGLQLFAQLNLQLLIVTPLQKIHIIEPFVASVGFVHSEDGRNSVLRNLSIEEYQAEKLRMQG

SEQ ID NO: 30492 - protein, 391 aa, Syntrophus aciditrophicus SB
MKWTTPADLKAQVRKLWDRGLLLASLAGGEALFPRRLTLKSPDSRGLSERFPEVREWIAQLCSAAGFYRIEWRSVNHRVLGANEIPAAIWIDTLEEALGLIGKRRAADQFATLVELTRKKQPELVPWLAKRPLRALELSEDWPRLLEIVTWVLKHPRPAIYLRQIDLPGVHTKFIEGHRGVLAELLDLVLPGEAIDATHTGIGGFCRRYGFLDKPLRVRFRVLDRNIRLPAVESDQDITLTQASFASLDLPASKVFITENEINFLAFPDVPDAMVIFGAGYGFDNLAAAPWLHQRGIYYWGDIDTHGFAILNQLRGFFPHAVSFLMDLQTLLAHRSLWGVEKQPETGTLARLNSEESALYDQLRRNHWGERVRLEQERIGFGFLHDVLRRL

SEQ ID NO: 30493 - protein, 490 aa, Burkholderia xenovorans LB400
MSTQDTFALYEDLRARKEEPAWRLLATQQSPAICTCLHVLFLSERTLPSSAFHERLHRQLEIVRRAGADLPKLAADYSSDWIAEGWLRRDFPHGATEEMFELTAPAVDATRYLMRLSRPRATATESRLASVVQLLQTLAEETDNNPETRLAGLLADRDALNAQIQAVRSGKVTQLPPERAIERAREVLTQSNELLEDFVRVQESLAAINLQLRRELVENDGARADTLERIFDGIDVIKQTEAGRAFDAFWRMLVDPVASTRFEAALTQVITRSFLGSMDATERRSLTKLKSRMVERAADVHTVQATFASGLQSFVRSREFREQRRLVALLRSATVAAMAAAEDIRPTQKVDAFLFRTSAAIRSVSQWMLHDPTAHVVDATMTEIESSDARLEDIEELVQRSEIDMRSLKRNLVAALGLADGPISIAHVLERFPAEQGLGSVVGYIHLATRHAEPTERRERVRWEGGDGIWRSADAPLFYFYKECIDELRE

SEQ ID NO: 30494 - protein, 249 aa, Burkholderia xenovorans LB400
MPANLPSNVAHWLDTADNDEPAKPAAPPSTLLFNGDTGNLRLDTRRCLVSLLNGPSVDGRRQAGLWSVLLRDREVIQTYLHNIFLDLVVDIAQQVAFVRQVPDESETDIPILLRRHQLTLVESALVLFLRQRLTEADSANERAVVSTEEMVEHLSLFDQARNTDLARFDRQCDGAIKKCKALNLIRPIRSSATRFEVSPTLKLLFNAEDIQALTAAYEALKSAPGGTSELTMDQAIAEGEREADEDEDE

SEQ ID NO: 30495 - protein, 1137 aa, Burkholderia xenovorans LB400
MTTTSKTTLLPDFDLPPTPPDGPDNVRLKREREEQFRLVRIQSYNWGTFHGLLKLDVSEKGMLFIGPSGSGKSTIFDSHAALLTPPRWVHFNVAARESESKQDRSDLTYLRGVWGEQTANTGEIAQQQLRPGPTWSAISEVYRNGLGQVITLVHVYWIKGTSNQRKDVHKRFIVAERLLDLTELLFFPDSGFNARRFKSDLPDVWDTDSFPEYQERMRSRLGIETENALKLLHKTQSAKNLGSLTDFLRDFMLDEPKTQDMADQLVTQFERLENAHNEVVSAARQIATLLPAREFNLERQKKLSDKGRLDEARMGIDHVAKEMLQSLRVERRDTLEAKLAGEQAQELALEQALAAVRTTVQGLKQRRDGLGGQQLAALEASKVSAERDEGERSQRYGKVAEACKALGFTVPAKAEGYAELVTQGRRELPSAASGAGDTAQKQDALAVQKHELDKERSTILSELAVLARMPGSKMGADLITMRKLITDGLGYDEGALPFAGELIEVEPSEKGWTGPVERVLRNFSRTMLVPDNLHAAVAKFINSTNLRGRLVYLRVMRQPPRTPAPKPNGVYRKIKVSDGPFQDWVETELLQSYDAECVETERDLEDVVFGITRAGLLKTGGRRHEKDDRSDINNTRNWVLGGDTRSKALGLQDRERELTDAIDGVEAQLEQLRKKELARLNRALHWQTLVNFSWNEIDHRGAALLVAQFDTQIQELRATTPDLDILEVKIVVAAESEATAEKKYKAQSQASMAVQIKLNELREELENVSKLALTSPTPLQRETFLQKLDGAGRKPTIESMPDDVRFVDREIGKDIGTLESEAARLLTRIEAKFADYARTWEAESDGLDSTMASYDEFDAKLTRLQVDDLPRFEKKFKDLLNEQSNQHIALLSDRLEQERRDISDRMDTVNESLRQAEYNEGTHLVIEVEETTPPEAQELKSELRAALSHSLSMDDKVAEARFQSMKRLIKRLASQEPQHVNWKKLALDVRLHVEFVARELDEEGREVQTHRSGAGKSGGQRQKLTATCLAAALRYQLGGPGRVLPTFSTVFLDEAFDKADADFTDAAMKIFKSFGFQLIIATPIKSVMTIEPYVGGAVYIHIKDRMHSRALVLPYDDETQSIDYRQIDGSSANDEKS

SEQ ID NO: 30496 - protein, 429 aa, Burkholderia xenovorans LB400
MKSPEEVTKWVRQRYQRQRWAWLDGGGAWPLQVSLDLPTQKVALADPSAVRTWSSSWADWLAVHPADASRPLPELLTATVAWRNMGEQTLPGALAFSSPECVADYCGDGKVWRRIVSRRATMLARWPALHASGFGSNYTALGEFKDEDFERLLAVLEWLVANPKSGIYLRQLPVPNIDTKWIDLQRRGVVADLFSRIIKPQAALQAVQSFVEGEGAEIDATGQAYSIEKESSNFYDTCGLLRPPVKLRILILCPKLRTQVGGLRDIEATIEDWAQLQLKPRQLLVVENKDTCLAMPDVDGVVAVIKLGNAVALVTRIAWLVRVPVLYWGDIDTYGYSILVQARKKLHDVRSVLMDRSTVETHLDRLVEEGQQTKSIDRSLLTAAELDVYDALLAHDWGTSRRLEQERLEWPSALRTVLSALHQRESKSA

SEQ ID NO: 30497 - protein, 484 aa, Saccharophagus degradans 2-40
MFFEAHRYQFFRPLVGKYREQVVECLRLLYQRLYSSNADYGHSLSREQVIEILEEALVRAPVMELAEGEEGAADELAPQRFKSNREHASWILKQLLDYGWLEKQVDTATLQSTYPFSRMGRLFTQPLVEADSNQIRTRHRNTRNTLNALEAFLNRGEVHDLLDAFEYSERIVTDFTDVIAELEDRKRQLVREVESQQLVQQATDQFFEFMEKRFQPDVSVRLSADSVEKHRDQINKAVTKIRRKNKEFNREVEIQLRRLIPEMALPGQSVLWTILDTIERRMANASEIMLPALRRALHSFTKRADIIIRQLSYLTSQSNNDLLRVCKAVSELSQEEADERLNAAAEHMANMKLQLIDPAQIKLLERKQTRMVQTAVMEQQPLDAEAQRDLNIQQLLDQAFAMDNKSLRGYVFKALREGRKITSKNLPVDSAKDLLAMAHVIEVGGVNGLSSDYQFIVEPTGNRIESDYYHALDEFTIELKTKDD

SEQ ID NO: 30498 - protein, 452 aa, Saccharophagus degradans 2-40
MIDTFLEEQLKPAGLSREEFSEVVIRLLDYGVICRDESQIEASLYDRYLQCANTVEDYLAVIGVRIQHDRQFCFLRVFPPGANVPGMADEDCSPFNSGFRAKPNQQEVAAILVLRAEYEKSLREGQVDEKGRAMLSLEGLAIAMNNLLKRALPDGLVERKNLFRRLRQLRLVHFNTEDELDNSESWLSIQPSITSFVSDEVLSTLLDQSDASVPVNKPAINEAGKSEANAIEDEADKEIEEENKIIPSALFGSSDADSSAGADEVEEGATQKEPEQVDEQQAPPVVEARATNVEATKAEAVNKKTAEEKAAEATTSKQKAPAKKTATKPAAKKAVAAKTPAKPAAKAAPAKKAAPAKKAMVAKPAAKPASKQPATTKKPAAKKPTAKPAPAKKATTAKAAVKKAPAKPAATKATATKTPVAKKPAKKAPAKTAAAKKSPARKAPAKPKGGKA

SEQ ID NO: 30499 - protein, 1214 aa, Saccharophagus degradans 2-40
MFLKKGVFVNWGNIPHLEFDFGPINLFSGGNGSGKTTAADAIQTLMTAAHENLFNYNPGQDETTQKGRGGKQVRTLASYVLGCDDGSYARPWPTDGYVAGIFHPTQGETGEVFTAVMCIRAHVDSAGNQKQARQDDLFFVIVPGEELTLSHFVKTYSDGKHVVPINNITTLLKKEYGAKAIEVYDKKGAYLRRLYGALRGRRDAVSDREAKHAARTFSNFMAYKPVKSITEFVAREILEPKDLGDAIRNVSELMKTINQMESDTKHIRDSIDRLGQANGAASKYVDTWVERNLTQYAEATRLLSVNHTNYIAAKNEQQNIREGIEENEERQRICEQRKQQFHDERVALEAQRQGISALKDKDQLEQTIADRTRELGEKARPLLEQSQQLAKNLDATQKLMGQLSECSLAIEIPQLDSRDFRKQAKAVTAAENQVDIDLSRLLAKDWVGIEQLEQDLDHILSADALHRRWAEYLHTSERTGGSSSIRDQISLYLSGSDRRRQDLINKQKQKQKEIQLLESKKVSYPAYVETALAAINKACPQAEARVLCDYIEVLDPTWQMAIEGYIGGARFSIIVEQAYEAEAMRIVRALPDARRNKARVIQGYKAQRDAERISLPRDSIIDVMAFSHKTAEFYLRASYGSVVRVDDAETLRTTARGVTPEGLGSGSYSMWRCDLNDSELVFGQGARERALKAKEREYHQLTEDANNAEQDYQRIARIFDLVDAIKPVHCGDLIQGMLELHRQIGQAESALSRLDLSDFTQLEEQLANLKAQYAEQEKQSRNLGEESGRLKEKARQCERKVKDYADAEESLQTVQEEFEKAVYSMAELYPQVDTNLALQQADQKAQQAGKDFSFVDEVDTLTKRLESAERELYNAIMTHNQQCNSQDAVVYDTGVGEVHGEGFFKAILGLNEQVELIRNRLKNNVLVDKFGQLTSLKDSFNTAFVTNLCHSIYQAICDGKKILDDLNQELEHHRFGADRERFYFGYEWVPEFRDYWRFFKEVIDVPNLGDGTSLFEAELSEKACGVRDQMLAMLLDKDETVAMRELSRISDYRNYRFYEIYKEPQGKAPIALSQYGTGSGGQLETPAYIIRSAAVTSAFRFNEGNNHLRMVLVDEAFSKMDETRSREVINYLTETLGLQLLFIMPTSKSGPFMDLISNQFVFSKCPTTSPIGELKTRVLVDRKTCNQEKIKQLWANHRKTIRSQAMLDFMEDIT

SEQ ID NO: 30500 - protein, 416 aa, Saccharophagus degradans 2-40
MGCVLDSTLERTDEEGFLTRPRWLDEERLPNRVLDRFLTKLESGQRLSMRVNSKTTPELFDFQDEDVRYQWELLKSLDKEFHILNIKLERNKAHQESYENARLYFNPDKEPLVRHWLNRPAIDPYALVWEAELAKQKHHFDDYGQALFERIVRLPDRGPEQTIKAFARIGKELQKPITLRALSARCFWGDSKFLEHNEQLVRDLFPSVEHNILPRPILMCVHLPEQLEHVLFVENQDTFLALAAANLPNYALVYSAGFRGSALRIRTPGNAVFSFINHSNNAIKDAFEAWWFEANTKHASNKDSSNKVSTINPIKTWLWGDLDFAGFTILKALRQTFSTIKAWQPGYLPMLNKLETGWGHGHEESGKGLQKDPEQTGCEFTDTVLLPAMREEGGFVDQEVVSLEELMAVLEHGGSE

SEQ ID NO: 30501 - protein, 478 aa, Pseudomonas stutzeri A1501
MDYAQLLALRQRHPAWRLLRADHAPLIASFLQQAFVAPNRRSLDARSLASLLEDRLYSLNQEADEPLFPRSASAYLDEWADNANGWLRKFYPPGNDEAHFELTPASEKAIEWLASLGKRQFVGTESRLLSIFELLRQMVQGSETDPQARILELEKRKAALDEEIARIRAGEVALMDDTRVRERFLEVDASSRSLLADFRQVEQNFRDLDRQVRERIATWGGGKGELLAEIFGERDAISDSDQGRSFRAFWEFLMSPARQEELSELLHKAFALAPVQSLEPDRRLLRVHYDWLEAGEMAQRTVARLSEQLRRYLDDQAWLENRRIMHLLRDIETRALAVREQPPNAELLGIDAPAPELTLPLDRPLYSPPLRPKIETLILLEGEDESGGEALFNQFHVDKARLLEQIRQALRQRPRISLGELLETYPMQHGLAELVAYLDLAASDRHCAFDEHQPQLVQWQDASGTLRRASIPLIVFGQ

SEQ ID NO: 30502 - protein, 196 aa, Pseudomonas stutzeri A1501
MSDTTPDNAFSLLLIALFKGVLYREDDAAQWQQLLDRQAAARDYLGVIGLELILDEAEGYAYLAQRADEDGSALPRLVPRRQLSYPVSLLLALLRKRLAEADAAGGERLILSREQLAEMLRLFLPEGSNEARLVDRIDAHVAKIVELGFLRRLRGQDESLYEVRRILKAFVDAQWLNEFDQRLGEYAGQHGTEEQP

SEQ ID NO: 30503 - protein, 1127 aa, Pseudomonas stutzeri A1501
MNAPDTLSLLDFASSDERAGFRLHAIEVYNWGTFDQRVWRFPTRGDNALLTGDIGSGKSTLVDAITTLLVPAQKIAYNKAAGAEARERTLRSYVLGYYKSERSEAGLSAKPVALRDHNSYSVILGHFYNEGFDQHVTLAQVFYISDNRGQPERFYVVADRPLSITEHFASFGSDLNALRKRLRELPHVELEPSFAAYSAAFRRRFGIADDQALELFSQTVSMKSVGNLTDFVREHMLEEFPLDERIQALIHHFDDLNRAHEAVLKAKRQIGLLRPMVDNCQRYAEASEQAQGLVACREALAPWFAGLKAELLDKRLDNLAQDIARQREQRRALQEHQRQGQSKRDELTRAIAQNGGDRLASIRQEIARLEADQQRRQHAAERYDHLAGALQLPQANDAEPFLANRQALPGLVEQCQQQRDSAQNGQTEAAVELRDLRQQHRQLETELESLRSRRSNLPARILDIRSRLCQALELDEAALPFVGELLQVREDERDWEGVAERLLHNFGLSLLVPDARYAQVAQWVEQTHLGERLVYFRVRERRLQTPAETHPESLLRKLQIKPDTPFYDWLEQELARRFDYACCASLEQFRREDKAVTRAGQVKSGQERHEKDDRRRLGDRTQYILGWSNEQKIAALAGQADDLQTRIQRQAMQLAELQQRQRDLDERLGLLNQLSVFDSFEALDWRPLLTQIHGLEQERRQLEAESDTLRTLQRQLQALEDELREGRDALDEKNRELSRSEQKHEDAQALTDEARALHTAASPEQQARFVELDSLRAEALGEHTLTVESCANREQAMRGWLQGRIDSENKRLDRLSQNIIQAMSEYRIEFPLETREVDASLAAAEDYRAMLDSLEQDGLPQFEQRFKAMLNENIINEIANFQSQLRREEHDIRERIEEINRSLREIDYNPGRLIQLEAQSSGDGEIAEFRASLRACTEGSLSGSGDEQYAEGKFLEVRRIIERFRGREGLSDQDRRWTRKVCDVRNWFGFSASERWREDGSEHEHYSDSGGKSGGQKEKLAYTVLAASLAYRFGLEWGVTRSRSFRFVVIDEAFGRGSDESARYGLELFKKLNLQLLIVTPLQKIHIIEPYVASVGFVHNEQGRESKLRCLSIEEYRERKEQLGATQ

SEQ ID NO: 30504 - protein, 394 aa, Pseudomonas stutzeri A1501
MTVWTTPTDLKTQLQRLWDQGTLLRASLADEALFPLQLRLKKPNNQALAERFDEVRQWIRLLQAGEGAYRLQWKEINHRQLGRNQVPDGAWVDSLDAALTLLGRRREAERFRQLAEATLAAFPALHGWLCRYPLRVLEQGEHWHKVLAVLHWFRAHPHSGLYLRQLDIPGVDSKFIEQRRGLLGELLDLALPSTAIDAQARGARAFSRRYGLRDKPLRIRLRILDPRLAISGLSDLEMPVEQLAALHLEHRQVFVTENETNALAFPAQAGSILLFGQGYALDRLGDIPWLHRCPLHYWGDIDTHGFAILDRLRAHFPLARSLLMDRETLLEHRPLWGEEPPDKRCTATLRRLDDAELALFEDLRDDRLGQRIRLEQEHIRFGWLERALRGLHSF

SEQ ID NO: 30505 - protein, 479 aa, Mycobacterium ulcerans Agy99
MLRRPTNYRSRTQMHGDNAGLSATELLDLNRDLQGSRAIRLLATTNLSLYATLMERHLSDGALPETELVVQLDRDLEDVNDPQPGLALIKSWAAQGWLHRIVDERHGQNVCYLTQDARRALDFLRGLRRQDTIATGGSITGIAARLKQVAVKVDNDPARIRKHIEAEIAALHEELDQLDAGQRPQTDVTDCYDEARAIALQMERLITDIGQYGTMIERATSALDEPIDSNAEYRDRQRQMYSDYQAAWDSQGRDSHRAFLRMINDPDQRAEFEADVAAVAEALPRLDPALCKVMAGFFELVGHQIDEVERIQQRCAQRVKRFTAFGTMEQSRGVARQLNEAIAAAAPCSSRRSPTHAWTSRSRWRGTRSVPSVPSASGSATCPTPSPPNPATPRSTSPASPPSPPRSTRPRCPTCSTTRSPRGLSRYPTPSPCSTPPTWATSSCCGPGPSNSPTPTPPSRPPSASAPWTAVTSKSRYLV

SEQ ID NO: 30506 - protein, 231 aa, Mycobacterium ulcerans Agy99
MTLQDDEVDIDFSSLPQVDQNARPPVQRRPRFDGDVSELPDRACWALQHRLTRRYISAEADADVYSWVPEYRKDLAVRLSELDLLLRIVDAADVAFVEQARYESARGIKLLRREPLGTYDSILALHLAQMMRASGGQTVLISREEIHGLFSGVLNDTDRDAVSFAGRIDGAIARLTGLEILRKTRDDEDSYTISPVITAVMTASVITELQQQFEQLLNGGAPAEEEEPEGD

SEQ ID NO: 30507 - protein, 1113 aa, Mycobacterium ulcerans Agy99
MTEQFHLSRLQVINWGVFDGYHSIPFSVGGALIAGASGSGKSSLLDAISLGFLPFNRRNFNASGDNTAAGSSAGRRTVDKYVRGAWGQRSDGGTSRVMYLRGDGTAWSAVAVTYASDSGRTVTGLVLKWLTGESRNDSSSRFVLGDGDLDIEEVCNRWASGRFDAGVFKEDWRFSTKVESQYLAQLYAAIGIRASDAAQQLLGKAKSLKSVGGLEQFVREFMLDEPDSLARLPEALKQIDPLVEARELLAVAQKKRKILGDIEQIQQRYASESSDLGIIDLVDAPMVRAYTDHARLAQCPAQIATLDGTVDQLENEYEDVTRSLNLAKAEADSLNAQISGSSANIAPLQSQVTAAETQAEQVERRRTTYEDMLAAQGIEIPDTADEFWNLREELLAQATELLAKVERNREASTDAEYAQKATRIARDDVAKELKRVEHVGSALPEFALAMRDHICAAIKVDAAELPYIAELLDLRPGQTRWRLAVEKVLRGVGLRLLVPDQHWEKVLRFVNETDMRGRLQLHHVRAKFLGAEPAEPEPNTLAGKLFPVDPKHLCAAEAVDVITGAGDHVCVDTPDVFSRFRRAVTDTGLYKDSDRLAVKDDRRPVKLSEYLYQGDVTAKINALTVELTAAEEAYQKARRTADDIAAQRQQWRDRAAACKAICEQYPQWSQIDTETADGHAERLREQYELLMADNPDIEALNARADECWSQIQKLMTRRDSLDERRTRLLELQERLSPAFVSEPLTELLQRYAAQLPVALELLDPEPHRDALFAAIKKEREQLRESRRRSYDELARILNTFDTSFPDAIPNDSDDFDERVHDYVALCRLIDERELPEAYERMMRLVTEQAPDAILTLHRVAEQEERRISGQIDRVNTGLAAVEFNRGTRLTLRATPRHLVAVDELTQIVRSISRRIAEVGLGDKQAILDQYAEILRLRNRLASTAPEDKAWTRDALDVRNRFTFDCAEWDVDTEELIRTHSNAGDNSGGEQEKLMAFCLAGALSFNLASPESDNNKPVFAQLMLDEAFSKSDPQFAQQALHAFRKFGFQLVIVATVQNATTIEPYIDSVVMVSKTEPTGGNARPVASVATRTISEFTSLRQEMRKTAERVPAGV

SEQ ID NO: 30508 - protein, 480 aa, Mycobacterium sp. MCS
MQVDDNRGLSAAELLELNRDLHGSRAIRLLATHNLGLYATLMERHLADGVVAETELVVRLERDLHELDPDGQSGLALIKSWASQGWLHRIVDERSDQNICYLTQDARRALDFLRGMRRQDTIATGGSINGIASRLKQVAIRVGNDPARIRKSIEAEIAALQAELDDLEAGTRPEPDVTDAYDEARAIALQMERLITDIGQYGSMIEQATAALDEPIDSNAEYRDRQRQMYADYQAAWDSQGRDSHRAFLRMINDPDQRAEFEADVAAVAEALPLLDPALRKVMAGFFELVGHQIDEVERIQQRCAQRVKRFTAFGTLEQSRGVARQLNDAIGAARALLKTSLTDSRLGIDVPLARHAISSVGALSFKIGDLSAPKPAKPAGGEVDLATFAALTTQVDAPAMSDMLNAALPVSLSRAVDMLDNAYLGHVIVLWSWALKQPNDGRPASTTVRFRSLDGRDREIAVPDLMFTEPITTLAGVSQ

SEQ ID NO: 30509 - protein, 232 aa, Mycobacterium sp. MCS
MTSPSTEHDADFAAFSELPQVDQNARPPHQRRPRFDGDVSELPDRACWALQNLLTRRYISAETDSDLFSWVLEYRRQLSVRLSELDLILRIVDGTDVAFVEQARYESARGAKLLRREPLGTYDSILALHLAQMMRAAGGQSVLISREEMHGLFSGVLNDTDRDAVTFTARIDGAIARLAGLEILRRSRDDEDSYTISPVINAVMTASVITELQQQFEQLLGGGTPAEEVHVD

SEQ ID NO: 30510 - protein, 1120 aa, Mycobacterium sp. MCS
MTEQFHLSRLQVINWGVFDGYHSIPFSAGGALIAGASGSGKSSLLDAISLGFLPFNRRNFNASGDNTAAGSSAGRRTVDKYVRGAWGQRSDGGTSRVMYLRGDGTAWSAVAVTYAGDSGRTVTGLVLKWLTGESRSDSSSRFVLSDGDLDIEDVCNRWAAGRFDTGVFKADGWRFTTKVESQYLAQLYATIGIRASDAAQQLLGKAKSLKSVGGLEQFVREFMLDEPDSLARLPEALKQIDPLVEARELLAVAQRKRKILGDIEKIQQRYASESSDLGIIDLVDLPMVRAYTDHVRLAQCPTQIAQLDTTIDQLDNEYEDVTRSLNLAKAEADSLNAQISGNSASIGPLQSQVTAAETEAEQVSRRRSAYEDMVTAQGLDVPDTADEFWNLREELLTEATELLAKVERNREASTDAEYAQKAARIARDDAAKELKRVEHVGSALPEFALLMRDQICAAIGVDAGELPYVAELMDLRPNQTRWRIAVEKVLRGAGLRLLVPDQHWTKVLKFVNETNMRGRLALHHVRARVYGAEPVEPEPNTLAGKLFAVDPSHPCAAEAVDVVTGAGDHVCVDTPEVFARFRRAVTDTGLYKDSDRLAIKDDRRPLKQSEYLYQGDVSAKINALTVDLAAAEEAYQKARRVADEIAAQRQQWRDRAAACKAICEQFPQWSQIDVETADGHADRLREQYELLLADHPDIEALNARADECWSQIQVLMTRRGAIQTRRDDLDSRRTQLLELQERLQPAFVSEPLTELLHRYAGQVPVTLELLGPEPHRDALFAAIKKEREQLRESRRRSYDELARILNTFDTAFPDAIPNDSTNFDERVHDYVALCRHIDERELPEAYERMMRLVTEQAPDAILTLHRVAEQEARRIAEQIERVNTGLGAVEFNRGTRLTLRATPRQLTAVSELTEIVRSISRRIAEVGLGDKQAILDQYADILRLRNRLASTAPEDKAWTRDALDVRNRFTFDCAEWDVATEELIRTHSNAGDNSGGEQEKLMAFCLAGALSFNLASPDSTDNRPVFAQLMLDEAFSKSDPQFAQQALSAFRKFGFQLVIVATVQNATTIQPYIDSVVMVSKTEATGRNARPVATVATRTISEFGELRREMRANAKVPAGV

SEQ ID NO: 30511 - protein, 509 aa, Rhodococcus jostii RHA1
MSVIARYHDVSGAFDRDTLRLLHQKYAPVIVAVLGEVFSEDDQRVVAEDDLHDHVDFLLEQIGDAVPGTELPQQRGRALAYSWVEGAARGWLRYKDGSTPSGPTTYEITNEALDALRYVRETGRHAMVSESRVKDLITKVQDTALMISEDRERRIGILSTQIEKLTEERDRLLSGGDLEFAGTGEVIEVLDQILSEVNNLPSDIRKVGELFADMREQLRQEFRDDDRSTGEVLDLYRQRMDALLNNDDRGRAFVGAVELLQKTGMMRAFATDMDIVLAHEAAQGLKPEERRRLKRTSRELSREVQQVMVSHRHIVQTIYSYLSAPDRIQATELRTLLRELDRRLSERKAVAKVRSRVPIAFVPATIELDRLRTNLADPADFAAPPAARPHLAIPMSAEEQRELLRMGGPDVDKMRGILITRLKASPRATVAEVFNALPREDRRLVDLFALFEASADTMALRRSHTVGLTDRYLTVHPLGIEERVFEAPRLTYTDEDRSVLIANMERAQQ

SEQ ID NO: 30512 - protein, 262 aa, Rhodococcus jostii RHA1
MSTDPLDEWDDLLSQVVDDCEPAESDDEPDEFRFRPSDTILFTGDQGTLTYEARSVLTAILKRNYLSADQHPKLWALLLKHRYDVESRLNDLFLMLVCDTDAGIAYKVQVPGARFPTLMSTQNRAYTWTETILLRHLRETYANELGRDGNANVVISRTEMVERLQADKSIQRNDEKKQRENAEKAFERIESAGILVSTRDTGADRYRISPVIVPLISLDKLKALSAYLDTLDADDTVEPTDTDGEIAAVDLGPGEGSDDDLD

SEQ ID NO: 30513 - protein, 1143 aa, Rhodococcus jostii RHA1
MTSTETGTLFPDTGSPQWRIESMHLLNWGGYDGYHRIDFSPGSTMISGPSGVGKSTLMDAYTALMMPSNVPFNGASNAGQGRARGGNQRNVVSYVRGKTDSVQNSSGELTDRRLRGIDARGLPCNAAAVVAVTFRHDTGAYFTAARLFFVRASISSDGELGNPLRLTIDGTVDVERLYDLFVEGLGQQGYQRKLEATFVGSKVHDTYTKFLTVAQSTLSIGRKGEGDKALALLARIQAGQQEATIDDLYKKLVFEQPSTFDTAKQALDHFSELSNSYETMQRAYDQVEVLSDIQERHDRYQRAMANASDIVALRHKDSGDTPWVLWQSSVGDAEYGAALNAAEQDLEEAEDACRRTATAFDAADRKVDELKNAIRTEGGERLDHITAELKGWSETLEQRARKEAQFHARIAHLDDVVAPANAREMSSLQLRARAFMDGHTEQLEAVTAAAREADARHADAQRAHKSVSDELDDLRTRPDSKIPAYLHQRRTELAELCGITDPRRDLPFIGELIDLHADDERWRTAAEAEMGGIGRHILYNENIRAQFVRNADRLSKGVRLRSEAVPFNASAPTSIPDPSTLAGKVQYKPGPFIGWLEGFINTTFTHECVDTADALLIDDGRKRITAHGQTRQGRSGAHGAPLPKDYVLGFSNAERIAELETEVERLTDEVHAAHQRAEQLHSQRSTMVEHRVTWEAVLDLNWTEIDTGSARAAIDALEQERDAILAASDRIAELKRQQKQAEEDRDTASEAKAVARTQRKDLNASIAALEPLAERYASTHAALVITGSVTVTDAQQSLLDKMLGLSYTGDAHTLQEAFGKVFDSITDRLADATDETFNARRALEDMFKRFKAEWDNYEWGTDIASYPNYYNHYRRLVDSDVIRHRDDFLGEVNKWTGMELGLLSSEFETERRRIIDRLHDVNAILERIPFGRDGDRLRIDPAERETPTSRHFWSSLQQFIETSSSATPMTLDVAKARYHTITQFIRQIMPADQLPRGESSQREEILDVRRHISIKAQKVDPADPGNIKGTYAEFDAKSGGEMQEMVAFIVGAALRYQLGDEQNSRPTFAPIILDEAFIKADSQFASRAVQAWITLGFQLIAGSVVDKVSAISRKVDRVILINKDTEGYSTASAFIADAPVPTS

SEQ ID NO: 30514 - protein, 390 aa, Rhodococcus jostii RHA1
MKDPAAVITDLTKALTKHWAAWVVDEPTGWPRTYPIGTPARGDLETNYATTHRPVMQAWDRWGAQHVHLSCSLRYARRRVGRLLLNIPTHLDIYDLDTAAALAAEDWSITIARARHRRQILSDTLDLDLQPRLLQQTVALADTDFTLLCRTVDWFHHHDATGLTTRQVPIPGLDAKWLDKHTALVLALLDRDSLDLIDRPQRIDLTYLDQNWRARGNRMRDSLATDDTNATVAYPPDIIIITENKDSALFFPTLPRGIAVEGGGWAITHRITRHTWFQQCPRIVYWGDIDAHGYEILNKLRTEHSAVDSILMGPQTYDEYHQFGVRTDRRGNPISAQRKPLPNLTDSERVVYNRITDSEHSGPLRIEQERIPLQLAEQVVRSRTPRQPPD

SEQ ID NO: 30515 - protein, 538 aa, Pseudomonas aeruginosa UCBPP-PA14
MAQAIPAIEQAHPPGQIRIMRPRLTSVVSCWDYLWKVAAMEESAQQRSERYVSARSQHPAWLLLASRRAPLVLGCLRTLFERAHDGIPMEDALQALSEMLAAYASQELYEIDPDATHLQAGRELREWIKRRLVVEREGRIYATDALESAIQFVDSLDSRIMTSTASRLSVVQREIENLETGLNPSPTGRIASLRRRIQDLEHELARVEAGHVDVLDEAQAIEGMREVYNLATSLRADFRRVEDSWREADRALRHSIISEQSHRGEIVDRLLDGQDALLNTPEGRVFESFQQQLRQSAELEVMRERLRTILRHPAVPKALNRPQQRELRWLALRLVRESQAVLQARARSERDVRGFMKTGLAAEHHRVGQLLNDFFNLALSVDWQRQSERRKPACLPPVGVAITGVPAIERLRFKTLDDDDAGELDLSLKPAGLEQIDDDFWDAFDGLDREALIHDTLAVLVEQGRPVSLGELASLLPPAHDLETFALWLAMAREAGIEVLTEERQFVELVDEDEQRWGFNLPYVGLDHEALKDIDWEL

SEQ ID NO: 30516 - protein, 249 aa, Pseudomonas aeruginosa UCBPP-PA14
MAGIFDRIAGASGADETELTAEPMALDDGMDGEQPAMSANIQVDERRTPQRVREAVQEMLKYGLLEESHKPNLYRSALTNIEVVDRILEPLDLAMGVDEVRGLVFVTVRQGEVAEQDDWSHPLVRRQRLNLEQSLLIAILRQHFIAYEQESGTGASQALVAVDELIPQLQVYLGELGSEAKERNRIITLLDQLKGHGLVSALDAHDRVIIRPIITHLANPENLQALVVWLREQVEGAVTPAAGGEEDEA

SEQ ID NO: 30517 - protein, 1045 aa, Pseudomonas aeruginosa UCBPP-PA14
MTLLCANPRYNLASTGGHESDRDLVSYVRGVTGPGDGGVEQSHIARQGKTVTAIAATLERDGAQVRLGAVLWFEGTSSSASDLKKLWLLSESPEQTLEHWLSQHHAGGMRALRQMEKDGMGIWPYPSKKAFLARLRDYFEVGENAFTLLNRAAGLKQLNSIDEIFRELVLDDRSAFERAAEVASSFDDLTDIHRELETARKQQRSLQPVADGWERYRALQEQLQDKQALEGILPVWFAEQGYRLWLAETNRLEKEHKQAELDQAQCRSQLEIQKGVVDQHRQRYLRVGGAGIDQLRGRIADWVRECDKRRLKAEQYQRLAKGLGLADELSAAALEENQQQIAARLEILAQQTTDARQKAFDAGLVQQELNGRLQSLQQERAEVERRPGSNLPGHFHAFRGDLAQELGVDESALPFVAELVQVKPEELAWRGAIERAIGSHRLRILVPQGSSQAALRWVNQRHNRLHVRLLEVKEPSSRPVFFDDGFTRKLTFKEHPYREAVKALLADNDRHCVESTEQLRHTPHAMTAQGLMSGKERFFDKQDQKRLDEDWLTGFDNRDRLAFLAEQIREVNEQLVPAKLALDAAQGDVGQLESQASLLQRIEELQFDDIDRPGAERQLQSLRTQLDTLTRPDSNLAVIKAELDQAEALRESLDQQLQRLIEQCVQLKTQFDQAASATRKAYRGAEKGLSDTQRELAQAHFPILSTDDLGDIDELERKHTRELQGQLKTLGEKLGDQKTELAKRMSDALKADTGALAEVGRELVDVPRYLERLRVLTEEALPEKLKRFLEYLNRSSDDGVTQLLSYIDHEVSMIEERLDDLNSTMQRVDFQPGRYLRLVAKKVIHESLRTLQHAQRQLNSARFIDDEGESHYKALQALVGLLKDACEHSRNQGAKALLDPRFRLEFAVSVIDREGNNLIETRTGSQGGSGGEKEIIASYVLTASLSYALCPDGSSRPLFGTIVLDEAFSRSSHAVAGRIIAALREFGLHAVFITPNKEMRLLRHHTRSAVVVHRRGVESSLVSLSWEALDEHHQQRIRAMHEVAH

SEQ ID NO: 30518 - protein, 381 aa, Pseudomonas aeruginosa UCBPP-PA14
MKSPTDIGRNLARQWQRSSVRLERLLNPGSWPQSLNIGKPSARLFTDNIQAVLRHVENWRSVNVGKVDWEPVSYRAGLAPISLPMRWHLRSPSEWIAASDDPRVSQEYAQLEYLVEQVDSAFHTLLVAQRSLWLTRTPEEVVATAQLATQLAPGCAQGRPLRLLAEHGVDTKFFERNATLLTKLLDERFEGAASEQGLTTFLDAFEESSHWVLVVPLQPGLLPFKRLRLTTSELAETPLPGSRLLVVENEQCVHLLPETLPDTLAVLGAGLDLHWLASAHLAGKQIGYWGDMDTWGLLMLARARLHQPAVEALLMEQELFEQHSQGNTVVEPAKALESAPPGLLADEADFYRYLLVQERGRLEQEYLPKAQVELAIRKWAR

SEQ ID NO: 30519 - protein, 478 aa, Alkalilimnicola ehrlichii MLHE-1
MDHDHLYSLRRTHPGWRLLQAGNAPMVVAFLHRCFVVPNVRALPASELENALEDYLYHLRARLGDEAYQQGAHEYLAYWAADERGWLRKYYPQHSDEPHYDLTPATEQAIQWLAGLEQAHFIGAESRLTLVFDLLKQIVEGAETDPEARLRDLEARRDAIEREIDEVRAGHLNLMDPTRLRERFLQMADTARGLLGDFRQVEANFRALDRQVREQVATWEGGKGDILDQVFGEHDRIADSDQGRSFRAFWDLLMSPARQEELTELLERTLALEPVTEVAPDPTLARIHYDWLAAGEHTQRVVARLSEQLRRYLDDQAWLENRRIMGLIRELEQQALHLREAPPRDFTMALDEPAPRVELPMERPLFSPPVTPRIEQQVLEAGEAEGDVAALFDQAYVDRTRLQGQVRRALQTREQISLAALLEQHPLEQGLAELVVYLALATEDHRSVIDETRQQTVYWRDRDGVARSATLPQVIFCR

SEQ ID NO: 30520 - protein, 199 aa, Alkalilimnicola ehrlichii MLHE-1
MSEQDADFSAMLITLFKGVLYKDQNPRYWQVLEDHQARVRDHVAVLGLELMLDEAEGHACLRQRTPAEDEPELPRLVPRRQLTYPVSLLLALLRKKLVEHDAGGGDPRLILSREQIVELIRVFLPASANEAKLVDRVHADINKVVELGFLRRLRGQDNQYEVRRIIKAYIDAQWLAEFDQRLAEYREHAEATTTAGDGQ

SEQ ID NO: 30521 - protein, 1125 aa, Alkalilimnicola ehrlichii MLHE-1
METQGLDFAGSDQRTGFRLQRLEVFNWGTFHDRVWSLQPGGDNSLLTGDIGSGKSTLVDAITTLLVPAQRITYNKAAGAEAKERSLRSYVLGYYKSERSDAGLASKPVGLRDHNNYSVILGHFHNEGFGHDVTLAQVFWMKDTQGQPARFFVVADRPLNIAEHFANFGTDLANLRKRLRGLPHVELYDTFPPYGGAFRRRFGIDNEQALELFNQTVSMKSVGNLTEFVRSHMLEAFPVEERIEALIRHFDDLNRAHEAVLKAKSQVAQLIPLVRDADEHDQRATRARELRDCRQALRPWFASLKAELLDRRLDNLGQEHERLQQRIEGLSTRLTEQRARRDELKQAIAENGGDRLERIKAELERKRREKAERSEKAERYRRLAHRLELPDATSDEVFHANREALTVAREATETARSELQNRITEASVELHQLKGRHEDLDAELASLRGRRSNIPAEILAIRTALCRALEVPAEDLPFAGELLQVRDDERDWEGAIERVLHNFGLSLLVPDSHYARVAEWVDRTRLRGRLVYYRVREARDAPPPSLHADSLVRKLAIRPESAFYTWLEQALAQRFDYACCTDLQQFRREKRAITRAGQIKAGGGRHEKDDRHRIDDRTRYVLGWSNEAKIAALEAEADGLAERMQAIAKRIGGWEDERRAQEARRDTIQELTLFQDFQALDWRPLAADIEALEREYRELAEGSDVLRALERQLDELEKTIKGVEGEVRQADREISANELKQEQARAQWQDCHTLLESTPEEAQQTYFPRLAAMRDEALGEHTLTVESCDNREKDMREWLQGKIDAEDKRLAQLRDRIIDAMRRYQDAWPLDSQEVDVSVEAAGDYRAMLEQLQADDLPRFEARFKELLNENTIREVAAFQSRLHRERQAILERIGTINRSLREIDYNDNRYITLMAESAPDAEIRDFQQSLRACTEGAVTGSDDDQYSEAKFLQVKAIIERFRGREGTTDLDRRWTRKVTDVRNWFVFSASERWREDDSEYEHYADSGGKSGGQKEKLAYTVLAASLAYQFGLEWGETRSRSFRFVVIDEAFGRGSDESARYGLELFQRLNLQLLIVTPLQKIHIIEPFVASVGFVHNVEGRESMVRNLTIAEYQAEKAARQRIAP

SEQ ID NO: 30522 - protein, 395 aa, Alkalilimnicola ehrlichii MLHE-1
MSWTTPDELRQQLLRQWERGDWLAAYVRGESLFPLTLRLRRPTSRDLAEDFVAVRRWVQQLQAGSRDERGYGYGIEWRRVNHRVHGANDLPAGAIVPSEADGLRLIGREREAARFRALAGETLRRFPSLADWLARRPLQALAEAGAWPRILDVLDWFRAHPRPGIYLRQLDIPGVDTKFIEARRRLFTELLDAVLPEAAIDPSATGARGFERRFGLREKPALVRFRLLDPALYVQGLSDLSVPPEQFADLRLPVRRVFITENEINGLAFPDHPGGLVIFGLGYGLERLAGVGWLREVAVHYWGDIDTHGFAMLHRLRTRLPHARSLLMDRETLEMHREMWGREPANKRFTGRLSLLTEAEQALFQDLREDTLQDCLRLEQERIGFGHLERALRQI

SEQ ID NO: 30523 - protein, 510 aa, Candidatus Solibacter usitatus Ellin6076
MEDLTRRTRSRPANLPSLYHRGVPVDYRSLEQLRKSNPAWRLLVADHAPMIIAFLHKTFIQPNVRTMPQQELASRLADFLYGLRETLGEEAFPKRADQYLDDWAGDQRGWLRKYYPPGDDEPHYDLTPATERAIDWVAGFHQREFVGAESRLMTVFALLREIAEGTELDTAVRIADLERRKSAIDAEIQRIRAGHLPLLDATQVKDRFQQMAFTARSLLSDFREVEQNFRQLDRAIRERIALWEGGKGTLLEEIFSQRDAIASSDQGKSFRAFWDFLMSPARQEELSDLLHDVFALKEVQQLAPDRRLLRIHYDWLQAGEVAQRTVARLSEQLRRYLDDQAWLENRRIMQILRGVEQSALAVRRAPPQEPFMELDEPAPRLDLAMDRPLYSPPFKARFAQTAVSEGDQNVDAAALYDQVYVDKSRLTGQIRWALQTRPQISLADLVEHFPLQHGLAELVAYFSLAAEEQGAVIDDRHKQELSWEDAAGHRRRATLPLIVFSRPAVQEHRV

SEQ ID NO: 30524 - protein, 194 aa, Candidatus Solibacter usitatus Ellin6076
MSALSPVLIALMKGITTREEEPEIWQALLDLQARAREYVAVLGLELMLDEVEGYAYLRQRVAAEGEPELPRLVARRQLSYPVSLMLALLRKKLAEFDAGSGEARLILSAEQISDMMRLFLAETGNEARLMDRIDTDIRKIVEMGFLRKLRGNDDRYEVRRILKSYVDAQWLAQFEQRLSEYKQHITGEVRDEAV

SEQ ID NO: 30525 - protein, 1126 aa, Candidatus Solibacter usitatus Ellin6076
MRQSESLFTALDATSLAAQRPGFRLVRFEVYNWGTFHQHVWGLDLGGSNALLTGDIGSGKSTLVDAITALMVPRANFNKAAGAASGERTTETYFFGRYKSERGEAGLSSKPVSLRGADSYSAILGRFVNEALGQEVTLAQVFWAKAPQGAPARLFVIADRALSITDHLSGFGQDINTLKKRLRKLPQVELFDAFAPYGSAYRHRFGIENEQAMDLFHQTISMKSVGNLTDFVREHMLEASAVEERIHALIGHYQDLDRAHELVLKAGEQVGFLTPMVADCDERARLAEKVESLRACREALRPWFAARKQSLLEKRLANLAAELAKLEHAVLTSQETRTRQFADRDSIRQAIAGHGGDRIESIKREIAGKQQQKDERFRRAAQYDQRAKALELPPATAAEIFVANREEIREARAASELAQAEAQNALTEATVELRQMQHQYDELEAELESLRSRRSNLPRQMLELRAEMCRATGVREDDVPFAGELLQVRAEDRDWEGAIERLLHGFALALLVRDDQYARVAEWVDRTHLGGRLVYYRVIKPKAADRAGLYPTSLANKVAIKPESPFYPWLDSELIARFNYVCCETLEQFRREPLAVTRAGQSKGRGERHEKDDRHAINDRTRYVLGWSNQPKIDALEREQQSLAARREPLLTRIQALQAQRDTAASRARKLAELAVFEDFRELDWRPLVTEIERLDSERRELEEGSDILRTLQQQLGALEASVRETENRLVAQRKEQAQAEERRERARELFAACETLLAATSERVKTELFPRLEAMSAEALGDRAVTVESCENCERDMREWLQARIDAEDKRMRVLEERIVKAMQAYRGRYALETKDADASVEAAGEYRAMLERLLTDDLPRFEGEFKRLLNENTIREVANFQSQLNRERETIRERIETINRSLRGIDYNPGRYIQLEATANPDPEIRDFLHDLRACTEGSLGTPETAAYSEKKFVQVKRIIERFRGREGTGDLDRRWTEKVTDVRHWFTFSASERWREGDLEFEHYTDSGGKSGGQKEKLAYTVLAASLAYQFGLEIDAPRPRTFRFVVIDEAFGRGSDESARYGLELFARLNLQLLIVTPLQKIHIIEPYVYSVGFVHTDNGRISMLRNLTIEEYRAERAARAK

SEQ ID NO: 30526 - protein, 383 aa, Candidatus Solibacter usitatus Ellin6076
MRSSAWTTPADLRAQLLRHWENGRILAAPESLFPMELRLRGPDTRALSERFEEVRTWIRELEAGHGYEIHWAEINHRQLGRNRIPARIVVASERDALELIGKVEEAARFRALAVCTLQTFPELAEWFDRRPLTALASAHEWDRVLAVLRWFREHPASGLYLRQLDIPGVDTKFIEQRKPLLATLLDVILTGERLGKTFEQRYGLATKPPQIRFRILDRNLAIAGLTDLALVPREFAALDLPALRVFLTENEINGLAFPKTPGSIVIFGLGYGLDRLADAKWLRGRELYYWGDIDTYGFHILDRLRALFPAARSFLMDRDTLLQHRDLWVTESNPCTVELTRLTPPELALYDELRYNRLGAQVRLEQERLPFGRVRNALSFVGS

SEQ ID NO: 30527 - protein, 480 aa, Paenarthrobacter aurescens TC1
MSSADAISARLRDLEQLTRGPAWALTRSAPWVIAVLQASFTRTRPQLPLEEFHADVDAFLEQLRRQDPALGGQQNGKLFGDEWTRKQFLTRRNQSGQIVYEVTEPAARVLAFLDSLSSERSTLNGSRLGTLLGDVEKLANETNPDQSARLEALEEEIQERQQLVEDISSGEFDGLLDDEEAVEAAGNILDLAASLPADYKKMRDRIEELVGELRNQIIEESLSKGATMAQVLEADKRLRQSPEGRTFRSFTAFLEDPQQQLRFRSAIGEVLSRQFADDLSHEDRETLKNLVAELRTQHSQIQRIYGKLSESLNTYIQSDDVRQSVSLRKVLAEAEQAIRSMPYERDRPSLVRGPVLFNAGFESLAMVKLFDPDEFATPPRLADPIAFSDSDRVRSARTGKAKPTVVRAAMAGAATLGDAWENLPAEERHINTVRTLLSMALQTGAAFDRAAWEHIDFEQIDGSIRTAYLPVVSLNEDSDA

SEQ ID NO: 30528 - protein, 300 aa, Paenarthrobacter aurescens TC1
MPEEITTTDVTEADQVTEAVAEVGVEAEPAPEVSHADPFRITPRDTFVDGAALFPGDTGVLPMKVRHALVKLLKGPYIDGGRDEKLWTTLLDNQLILRSRLSELFLTLQLDHDRKIAVLRPVDPEVIGASSRSSILRQQRALSRVETIVLLRLRLLLDRHVTAQTDPTITREEISDLVANYTPAGQQDALRDSDVVTRTITKLLARQLILPTPLDDTYTISNALPLALPFENIGDIPAQIEALIAVAADESGTEPLLDLDSSDSNQPNPSGDDVDDDPEGDDRADVSTAADATTTDGTQK

SEQ ID NO: 30529 - protein, 1123 aa, Paenarthrobacter aurescens TC1
MHVDRKGTLLTGNSGVGKSTLFDAMLRVFDARPRSNEAAAQRSGGAVEDKRTTFTYMRGKVGDKAVGDSSASAFQRPGATWSAVALTFDNAAGTKVTVSALFDLPKNGTESSVGRFYVIDSKPLDLEAIEGIAQKRFTKGALESIFPDGQVFDVHKAFAERFRRLLGINSDQALPLLRVIQAGKGLGGSVNTFFRDQVLDAPATLAAADDVVEEFSNLMSIRQRLEDVRQQRDQLAPVPGLNKEYAQALLDANRLRELAGEEFEAYKQQLAVTVHAKTLARFKELAQSKAQELAAERTVRDALSKDLRDLELDYNNRGGNAISAIEQSLENAKVGLKLRQQVEDSAKKALADAGLNLEWSAEGWDQAHEQAAARSAELKDDSEALKELRFEAFDGHATKKRELAAAQQELLSLRSRKSLLPPSSIENRAAIAAATGVPEERMPFGGELIDLAEGQDQWRPAAERALRNLATTLLVPGEHFAAVTRYLNDNTVRGALRAVDVSKPLAGGALAVEDVSDGDLLTKLSILTSGANADAGEWIRERIALDFAYPCVEDPDELASMDKGLSLGGVVKRNRHTVEKDDRFTSRQDYVLGFDNASKLELVAARVGELENELVKAAELAQSREDSHQGMARQLEALRRVAEDERPWEQVSAAVAADELARIEQRLTDALAAQADLEPLRANIEAVREKHQSSTGAAAVLQSEYKALDHKMTTADGLLDAARLKLEQTPPSASTVTALEPYFGGAAEVSELYELDNLANSVRNKLLDELHAAESRGQATAERLTRMFEAFVRDWGSAISADHGTSIGAAGDFESRYHAIVSDGLPAQEAEFRLFFNQRTHESFSTLLHLLDEERRSITSRILPLNGILSQVNFHEGSFLELDIKQTLPATAKQFKDAIQNALKAKHTRPSRAAAAGSTAEIDDDAELTARYKSLETLVKRLGSQTPEDRRWRAEVLDVRGHLFIQCKEHREVAPKSGKAGGSGKAGKKKTDVFMHADTGSMSGGERQRFTAFIMAAALSYQLGIAEQGFTTYGTVMMDEAFVLASEEFAGAGIKALHEFGFQLLLAAPENVIDLSRHLGSVTEILRDKRTNRSGVLTAPVIAEPGEPGAWRSEANPVDIVLR

SEQ ID NO: 30530 - protein, 476 aa, Mycobacterium smegmatis str. MC2 155
MDYDAITALRDRHPAWRLLRAGNASLVLSFLGEFFVEANRGACPAGQVAEALDNHLYALSAGSGESRYPKEPRAYLEDWAATDAGYLRRFYPPGDDEVHYEVTPAFEKAYAWVVNLQSRSFVGTESRLHTVVALLRQIVHGTEVQPDVRLAELRRRRAELEAEIAAVEAGDIAVLDPTAVRDRYQQLSTTARELLSDFREVEENFRLLDRAARERIAAWEGSKGGLLEELVGSRSEITGSDQGRSFQAFYDFLLSEQRQAELAELIAKVSALDVLEADPRIRRIHHDWSEAADRAQRTVRQISEQLRRFLDDQVWLENRRVLDLVRAVESIALEVRDAPPTFGLEVDEPGIEIALPFERPLYQPPTEVAVESHVSAATEEVNADLLFAQTYIDQARLADTIRAVLPEDSSALLSDVVAVHPIEQGAAEIVGYLALNEDDLAIDVDDTEETVLEYPDPADPDITKRARLPKVTVRRR

SEQ ID NO: 30531 - protein, 240 aa, Mycobacterium smegmatis str. MC2 155
MSNERAVATAIIRLMQGVVYRDADEDTWLTLERAGAGVRDHFATIGIDVVVDDAEGYAYLRSRPSEDGEEELPRLVRRRALTYNVSLLLVLLRKRLVEFETSGGDGRLVLSTEQIVEMLRLFQADSTNDARVVDQAETTIRKTAEFGFLRQLRGQRDHWEVRRILKAYVDAQTLSDFAAKLRQYAGAGAGDELNDLSDSRTERASRGGISTPVRRDLQLGNVRRPGLAVHSRRRDRIADR

SEQ ID NO: 30532 - protein, 1081 aa, Mycobacterium smegmatis str. MC2 155
MLTGDIGSGKSTIVDALTTLLVPSHKAAYNKAAGADAKERTLRSYVEGHYRSERNEATGKSRPKGLRENRRTYSVILGVFRNHGHDETVTLAQVFQQRESTGQPYRFFVTATKELSIAVDFADFGSDLRELRKRLRSAGAEIFDEFPKYATSLRRLLGIRSEQALELFHQTVSMKSVGNLNDFVRDHMLEPSDSTERIREIISHFDDLTRAHDAVKRAREQLEALEPIADTAAKYDAALAERDGLEHERSAVRLFIAELRSGLLADEIGRLEADGAALWQQQDAAEADQRRLNHERDSLIEERAKAGGDRIGELERLAHEARAQAESRRQARTLFDSAVGEAGLTTVADEEAFLNLPTLVAAERTRLAAEKREVDAATVDAIGRERDCERKCTTLSAEIESLEQRTSNLPHEQVVMREELCAAIGLTPEQLPYAGELLDVYDERAEWRGAAERVLRGFALSLLVPQPHYDAVTRWVNERRLTVAGRGAKLVYERVAARRVRLQPAESDGLLLADCIEVREGPFEEYLRNELMKRADFRCATTLQEFRDLRRAVTREGQVRSGDRHEKDDRHRVDDPRRWVLGWVNERKLTALRDEFADLERDRQEAAAVAAALSARREVLQHRLDALVRIEGFRSWTELDADEAVSRAGAHDAERARLQSGSSRLEEITRALERNAEEAGVVAERIRQLTGQLATTAAAVQRAQQDRKRDQEFVTAQSPEQLEVARASYPALDRRLAASRPTRADDCAAAESALSEDLYRRIERLTRELGGYGQSLAQYMLEVLRRWPELRADMDATVEARGDFLAFRRRVATDDLPRFESEFKEQLNKNAIQELAGFNNWLSRQASAIDERIDRINEALGAVPYNPGRFIRLEKEPTTNQDVAQFRSDLRNLTNDALAVDGDQYSEQRFLDVKRIIERFRGREGYAESDRNWTRRVTDVRNWFVFSASERDVDTGAEWEHYSDSDGKSGGQKEKLAYTILAASLAYQFGLEWGAEESRDFRFAVIDEAFGRGSDVSTRYALDLFATLGLQLLIVTPLQKVHVIEPYVKAIGIVDNPTGTYSRLQTMTIEEYRARRNGTRP

SEQ ID NO: 30533 - protein, 389 aa, Mycobacterium smegmatis str. MC2 155
MSTMWATPGDIAAKVRRRWDDGSLLRAYGEGEPFAPIEVPLRGPTPAQIGDDVARVRDWVTALDAGRHDDARYMLEWKSVGGKKFGRNMLPARAVICSYGQAWTLLGVTAAVGRFDELLASAHDHPRIRQWVIANPHRALALAADMPKLIAACEWLDRHRHSQRYLREISAPGVDTKFVERRRSDLAGILGVPSSAQGFLTELGLRSKPSLVRLRPAPSLGLPAPLSELAVRPDELAQLDLRPRTAVIVENEISYLSVDVPEAGVVIWGKGFDVDNVGRLPWLAGVRVVYWGDIDTHGFAILDRLRAWQPTAESVLMDRATLIAHRDRWVVEDRPARSILPRLSPEEQQLYRELVEDSLGDRVRLEQERIDWGWVEGRLKAIYQGRIDS

SEQ ID NO: 30534 - protein, 488 aa, Mycobacterium smegmatis str. MC2 155
MPDADVGRPSLQRLHELNREVAESRSVRLLVANNLAGYLTLMERHLDRGTKLTEPELVARLERDLADLGADGEQSGLALIKYWASQGWLHRITEQAGDGERNVCYLTYEARAVLDFARRMRREDTIATGGSIAGIAAGLRRVAGQVSNDPERIRADIEAEIDRLRAELDALDEGRRPEPDPLDVEDEARAIALQMEQIISDIGQYGAMLNRITTRLLDASADSDVGYRERQRQLFDDYESLFASRESASYTAFTRMIQDPEQRAALVADIELVTSQLPQLDPSLREVMSGFFTLVSAQTAEVGRTRQRCARRIKRFVASGTLEESRGVTRQLNDALAAANALLSVSLADSRVGFEVPLARADFNSIGAVAFKIRDAVPPTPAQPSEGEVNLSAFGALAAQVDATELAELVNDTVVSRPLPLNEAIGMLDSAYLGHVIVLWSWALKQPAVGNAESVRVRFRSLEGPDREIEVPKLVFTEPIPIVSESLL

SEQ ID NO: 30535 - protein, 240 aa, Mycobacterium smegmatis str. MC2 155
MSDTSIDFDALPSIDAVERSAPERRAPRFDGDVSELPDRACWALQHLLSRRYISKHNHTELWSWVTRYRTELTVRLSELDLRLVVSDDHEIAYVEQAEYESHWRRKLLRRETLNTYDSILALHLAKLMRSANRDENVLITREDIHELFAAVNNDTDRDVASFDRRIDNAIERLTDIEILVRNREDEDSFTISPVINAIMTASTITELTQQFEQLRRAASGDPDPDPDPAAAEDEVDADGI

SEQ ID NO: 30536 - protein, 1118 aa, Mycobacterium smegmatis str. MC2 155
MASEPTNQFYLSRLQVINWGVFDGYHSIPFSPAGTLITGSSGSGKSSLLDAISLAFLPSHRRNFNASGDTTAAGSGTGKRTVDKYVRGAWGERRDGTSRQIMYLRGTGPAWSAVAVTYSDRTGRAVTGLVLKWLAAEKTSDPGSRYYLIDDDRDIFDLCNRWAAGGYDASVFREAGWNGGRSESQYLAQLYSIIGIRASEAAQQLLGKAKSLKSVGGLEQFVREFMLDEPASLAGVDEALEQINPLVEARGMLDVARRKRNTLGNIEAVQARYADEAAKFGVIDTIDNAMVRDYVDQLRLQQAGPEIENLDDQINQLGAQRDDFGAQQRQLKNEHNALMAQINSASVDLVPLQQRLSEAEKLADEVGRRRGAYEDKVTALQLTPPDTAEEFWSLRETLMEEADRLHRELFTGNQAYVEASAKEVRAREARDAVQTELERVRRLGSSLPKTEYEMRARIARAIGIPERDLMYVAELMELKPDESRWRMAVEKVLRGAGLRLLVPEAHLDAALRFVNENDMRGRIQLQHVKHDAQLRTPLEGTLASKLQVVDPTHDSAVEALNVIASVGDYMCVDSPDEFTTHTRAVTDQGLRKDSGRLSIKDDRSKLRPSDYIFVGGTEAKVAALQADLAAAEDVYAAARKARERLDQHRAALQARERACRALCDQYMQWTDIDTDSADEALTRLQDELDLLVSDNPDVEKLQQRADECWERVEKVIQQIGSLNERETLLDNRRTALLELTERLKPGEISQHARDTLDGYAADIALPLDLLDSEPFRNELVRVIGRERDRLRADRNRSHDELAGIMAAYDSSFPDAIPNDSDDFDERVHDYVALCRRIDERELPDAYERMQRLITEQAPGAILNLHMIADNEARRITEQIARVNTGLGAVEFNRGTRLTLHAGTRHLAAVDELNEMAQRISARVSLVSFGDETAMFEQYTDILQLRKLLAGNTPEDRQWTRDALDVRNRFVLYCEERDAETGVVIRTYSNSGDNSGGEQEKLMAFCLAGALSFNLASPGSADTRPMFAQLMLDEAFSKSDPQFAQQALSAFRKFGFQLVIVATVQNTTTIQPYIDSVVMVSKSDASAPNARPVASVTAASIAEFGELRRGAEPEAVPAP

SEQ ID NO: 30537 - protein, 482 aa, Chlorobium phaeobacteroides DSM 266
MALDYTTLNLLRQNHPSWRLLCAQHAPLVAGFLHRVFIVPNVRILSQADLVEALEDELFALRQQQGADLFPGTAQNYLNDWADNEKGWLRKFYPEGTDEPHFDLTASTEKALAWLEGLTERAFVGTESRLLTLFELLRQMSTGSQADPEVRIAELQKRRDDIDAEIERIRAGEISLLDDTGLKDRFQQFLQLARELLTDFREVEHNFRTLDRRVRERIALWEGSKGALLEEIMGERDAIADSDQGKSFRAFWDFLMSQSRQEELTLLLEEVLGLPPIIDMSPDSRLRRVHYDWLEAGEHTQRTVARLSEQLRRFLDDKAWLENRRIMDILHEIETHALELREDSPSGGFMPLDGFAAVIELPLERALYRPPFSPMIAGVALDEGDAEIDTAILYAQVVVDRVELLRNIRMELQVRNQVSIGEVVALHPLRNGLAELVAYLQLAGEWPRMTVDEGVEEKVRWQSATGMTRQAILPRIILLRNQ

SEQ ID NO: 30538 - protein, 211 aa, Chlorobium phaeobacteroides DSM 266
MTNPLDIDTGRPSYPVQELSFIVIPLLKGVIYQDESPALWSSLLNQLAAVRDYVAVLGLELILDEAEGYAFLRSHSESGTEGANATPRLMARRQLSYPVSLLLALLRKKLAEFDAGGGDTRLILSRDEVVELIRIFFPAVSNEVKLIDQVDATLNKIAELGFIRRLRGERQMIEVRRIIKAFIDAQWLADFDKRLDEYLERPVQSMEGKDE

SEQ ID NO: 30539 - protein, 1121 aa, Chlorobium phaeobacteroides DSM 266
MSDVIEMGFVADDRLAGFRLQRLEVFNWGTFDGRVWTLKLGGKNGLLTGDIGSGKSTLVDAVTTLLVPGQRIAYNKAAGADNRERTLRSYVLGYFKSERQESLGGGAKPVALRESNSYSVILGVFHNEGYDKTVTLAQIFWMKDASQPARLYAVCERDLSIAADFSAFGTEISTLRKRLRGSGIELFESFPPYGAWFRRRFGIDNEQALDLFHQTVSLKSVGNLTDFVRLHMLEPFNVEPRIAALIHHFEDLNRAHEAVLKAKRQIEMLAPLVDDCDHHQTLVRTTEELRASRDSLRHWFASLKLELLEKRLVSLDEELSRHHIAIERLDTERRSQQGRDRELRRTIAENGGDRIESISAEIRQKQEELERRNQKAARYEELARLLGEHPAATAEEFHSQQAGHSAMRDATAEVEAQVQNNLNEAGVLFTQGRHEHEQLTEEIKGLKARMSNIDEKQVAMRRSLCEALNLSEKEMPFAGELLQVREQEQLWEGAIERLLRNFGLSLLVSDHHYPKVAEWVEQTNLKGRLVYFRVRQHSRSEQLPDHPASLARKLAIKADSPWFDWLEREVAHRFDLVCCMNQEEFRREKKALTLGGQIKSPGERHEKDDRHRLDDRSRYVLGWSNAAKIATLEEKAGRQKRDLAELAGRISTLQQEQTKLKERLTILSKLDEYSDFRDLDWQPVAMAIARLETEKRDLEATSNFLQTLASQLAALEEEMRETERLLDDRKDKRSKIEQKITVIKELQQQTHTLLSEAGAESASRFAALRQMRSDAFGDQSVTIESCDNREREMRDWLQTKIDAENGKISRLSQKIIKAMTEYKEEWKLETREVDVNIAAGSEYRSMFEQLRADDLPRFEGRFKELLNENTIREVANFQSQLARERETIKERITRLNESLTQIDFNAGRYITLEAQLNLDADIRDFQSELRACTEGSLTGSDDAQYSEAKFLQVRRIIDRFRGREAYADLDRRWTAKVTDVRNWFVFAASERWREDDSEHEHYADSGGKSGGQKEKLAYTVLAASLAYQFGLEWGAVRSRSFRFVVIDEAFGRGSDESAQYGLQLFAQLNLQLLIVTPLQKIHIIEPFVSSVGFVHNQEGRCSVLRNLTIEEYRAEKEKAAE

SEQ ID NO: 30540 - protein, 391 aa, Chlorobium phaeobacteroides DSM 266
MNWTTPAELKAQVQKLWDRGLILSALTNGEELFPRRLTLKGPDSRELSNSFAEVRDWIMRLSGAAKQYRIVWRTVNHRILGANELPAEIWIDSLDDALGLIGKQREARQFAAMVTLTRDWQPALLPWLAKRPLRALELAEEWSHILEIVAWRLKHPHPDIYLRQIDLSGVHSKFIEGHRGVLGELFDLLLPPEEIDATVTGAGGFSLRYGFRDKPLRVRFRILDPKLALLPTNTDQDITLTQATFARLEIPVTKIFITENEINFLAFPEVPEAMVIFGAGYGFENMASVEWMRDRVIHYWGDIDTHGMAILNQLRRFFPQAASLLMDHETLMEHQPLWGAEPSPETGTLTRLTAQEGALYDQLRRNELGSRIRLEQEKIGFEWLVEALKKL

SEQ ID NO: 30541 - protein, 489 aa, Mycobacterium vanbaalenii PYR-1
MSPPLPSLKVVDYAALTTLRERHPAWRLLRAGNAALVLSFLGQFFVEDNRGACSASVLADALDDHLYALNADEVRYPKQPRAYLEDWAATDAGYLRRFYPPGDDEVHYEATPAFEKAYAWVHSLQGRSFVGTESRLHTVIALLRQIVQGTETEPEVRLADLRRRRDELDAEIAAVEAGHVAILDATGVRDRYQQLATTARELLSDFREVEENFRLLDRAAREKIAAWDGSKGELLAELIGSRSEIAGSDQGRSFQAFFDFLLSEQRQTELADLLAKVTALDSVDADERIRGIHHDWSEAADRAQRTVRQISEQLRRFLDDQVWLENRRVLDLVRAVEAAALDVRDTPPSFGLEVDEQGIDIALPFERPLYQTPVAVAVESRIADGTENVDADLLFTQTYVDQVRLAETIRAVLPENSSALLSDVIAVHPIEQGAAEIVGYLALNDDDVSVDMDDTDETVLDYPDPAHPDVTKRARLPKVTVRRHGGQQP

SEQ ID NO: 30542 - protein, 192 aa, Mycobacterium vanbaalenii PYR-1
MSNERAVAAAIIRLMQGVVYRTSDEDTWLTLERLGAGVRDHFSTIGVDVVIDDTEGYAYLRSRPEEDGEEALPRLVRRRALTYNVSLLLVLLRKRLVEFETGGGEGRLVLSTEQIVEMLRLFQADSTNDARVVDQAETTIKKAAELGFLRQLRGQRDHWEVRRILKAYVDAQTLNDFAAKLREYAGAATVDD

SEQ ID NO: 30543 - protein, 1123 aa, Mycobacterium vanbaalenii PYR-1
MTESRCDATQPGAGYRLQYAEVYNWGTFDDHSWRFTPGTDTALLTGDIGSGKSTIVDALTTLLVPAHKAAYNKAAGADAKERTLRSYVEGHYKSERNESTGRSRPKGLRENKRTYSVILGVFRNHGHDETVTLAQVFQQRESTGQPYRFFVTATKELSIATDFADFGTDLRELRRRLRGAGAEIFDEFPKYSTSLRRLLGIRSEQALELFHQTVSMKSVGNLNDFVRDHMLEPSDSTERVREIIGHFEDLTKAHDAVKRAREQLEALQPIVDTAAKYDAALAERAGLELERAAVRLFIAELRSGLLTDEIARLEADGAALLTQLDTAEAEQRRLGRERDSLIEERAKAGGDRIGELERLAADAREQAKTRSQTKALFDAAVAEAGLEPVADGDAFAALGAVVAGERPRLTGEKRDLDTATVDAIGREREHQRRCDVIAEEVASLEQRTDNLPQEQVVVRAELCAALGLTPDDLPYAGELLDVHDEHAQWRGAAERVLRGFALSLLVPQRHYDAVTAWVNGRRLTVGGRGAKLVYERVPQHRVRLQPTAHDGLLLADCIEVRDGQFEEYLRAELMKRADFRCAATLDEFRTERRAVTREGQVRSGDRHEKDDRHRVDDPRRWVLGWVNERKIAAMRAELAELESQRDEAAAQAARLVKERDALQCRLDAFRSVEGFRSWGELDADEAESRAKAHDAERVRLQAGSNRLAEITQALERNAENAVTVTDLIKKLTGMLATAQSRMNQAKQERSRDDEFVAAHAPDQREKARASYPALTARLADSPPARAADCADSEAALSDDLHRRIERLSGQLNGHALNLTQHMTAVLNRWQELRADMDVNVESRADFLAFRERVATDDLPRFESEFKEQLNKNAIQELAGFNNWLGRQASAIDERVDRINDALGAVPYNPGRYIKLEKEPTSNQDVAQFRSDLRNLTNDTLTADGDQYSEQRFLDVKRIIERFRGRDGYAESDKNWTRRVTDVRNWFVFSASERDVDTDLEWEHYSDSDGKSGGQKEKLAYTILAASLAYQFGLEWGVERSRDFRFAVIDEAFGRGSDVSTRYALDLFATLGLQLLIVTPLQKVHVIEPYVKSIGIVDNPTGTYSRLQTMTIEEYRDRRDRPLR

SEQ ID NO: 30544 - protein, 384 aa, Mycobacterium vanbaalenii PYR-1
MSARGWTTVGDIVARLRRRWDDGSLLTGHAKAEPFEPVEVPLRGPASAAIGDDIAAVRDWVAALDAGRRDDTCYELEWKSVGGRKIGRNELPARAVLRRRGQVWALLGVTGTVRRFDGLLEVSRRQPRVQEWITEHPHRALALASQIPQLIAAYEWLDAHRHSRRYLREISAPGVDTKFVERHRTELAGMLGVAASSSGFISDLGLRHKPALVRLRPSPSLGLPAALTELAVRAGELARLHVQPRVAVIVENEISYLSVDVPDDGIVLWGRGFDVDNVGRLPWLGGAEVVYWGDIDTHGFAILDRLRAWLPETRSVLMDRETLLAHHDRWVSEDRPARSALTRLTVDEFGLYTDLVEAALGDRVRLEQERIDWNWVERHLSLAT

SEQ ID NO: 30545 - protein, 485 aa, Mycobacterium vanbaalenii PYR-1
MHDNSTLSASDLLELNRDLQASRAIRLLATTNLGLYATLMERHLADGVTPETELVVRLERDLDELDDPQSGLTLIKSWASQGWLHRIVDPRSDQNVCYLTQDARRALDFLRGMRRQDTIATGGSINGIASRLKQVALKVGGDPARIRKSIEAEIEALHRELDELDRGERRTFSETDATDAYDEARAIAMQMERLITDIGQYGSMIEQATAALDEPIDSNVEYRDRQRQMYADYQAAWDSQGRDSHRAFLRMINDPDQRAEFEADVAAVADALPHLDPALRKVMAGFFELVGHQIDEVERIQQRCAQRVKRFTAFGTLEQSRGVARQLNEAIGAARNLLKSSLIDSRLDIELPLARHTISSVGALSFKIGDLSNPKPAKPAGGDVDLTSFAALTTQVDAPPMSDMLNAAVTKGPVSLPEAIEMLGRSGQGAYLGHVIVLWSWALKQPNEHEAPSTTVRFRSLDGKDREIAVPHLMFTEPISVGAAQ

SEQ ID NO: 30546 - protein, 229 aa, Mycobacterium vanbaalenii PYR-1
MTTEQEADFEAFSQLPQVDQTARPPHQRRPRFDGDVSELPDRACWALQHLLTRRYISAESDSDIYAWVLEYRNQLSVRLSELDLILRVVDGTDVAFVEQARYESAKGIKLLRREPLGTYDSILALHLAQMMRAAGGQSVLISREEMHGLFSGVLNDTDRDAVTFAGRIDAAIARLAGLDILRKSRDDEDSYTISPVITAVMTASVITELQQQFELLLNGGAPAEETDLD

SEQ ID NO: 30547 - protein, 1120 aa, Mycobacterium vanbaalenii PYR-1
MTEQFHLSRLQVINWGVFDGYHDIPFSEGGALIAGASGSGKSSLLDAISLGFLPFNRRNFNASGDNTAAGSSAGRRTVDKYVRGAWGQRSDGGTSRVMYLRGDGTAWSAVAVTYAGDSGRTVTGLVLKWLTGESRNDSSSRFVLGDGDLDIEDVCNRWAAGRFDTGVFKEDGWRFTTKVESQYLAQLYATIGIRASDAAQQLLGKAKSLKSVGGLEQFVREFMLDEPESLTRLPEALKQIDPLVEARELLAVAQKKRKILGDIEKIQQRYASESTDLGIIDLVDLPMVRAYTDHVRVAQCPAQIAQLDTTIDQLDNEYEDVTRSLNLAKAEADSLNAQISGSSASIGPLQSQVTAAETEAEQVSRRRGAYEDMLAAQQLDVPETADDFWNLREELLAQATELLAKVERNREASTDAEYAQKSARMARDEAAKELKRVEHVGSALPEFALTMREQICNAVGVDSTDLPYVAELMDLKPDQTRWRTAVEKVLRGVGLRLMVPDQHWTKVLQFVNETNMRGRLQLHHVRAKFLGAEPVDPEPNTLAAKLFAVDPAHPCAAEAVDVVTAAGDHVCVDTPEVFARFRRAVTDTGLYKDSDRLAIKDDRRPLKQSEYLYQGDVSAKINALTVDLAAAEEAYQKARRVADDIAAQRQTWRDRAAACKAICEQFPQWSQIDTETADGHADRLREQYELLLADHPDIEALNARADECWSQIQKLMTRRGAIQTRRDDLDSRRTQLLELQERLQPAFVSEPLTDLLSRYANQVPVSLELLDPEPHRDALFTAIKKEREQLRESRRRSYDELARILNTFDTSFPDAIPNDSDNFDERVHDYVALCRHIDERELPEAYERMMRLVTEQAPDAILTLHRVAEQETRRISDQIDRVNTGLGSVEFNRGTRLTLRATPRSLTAVSELTEIVRAISRRIAEVGLGDKQAILDQYADILRLRNRLASTAPEDKAWTRDALDVRNRFTFDCAEWDVASEELIRTHSNAGDNSGGEQEKLMAFCLAGALSFNLASPDSTDNRPVFAQLMLDEAFSKSDPQFAQQALQAFRKFGFQLVIVATVQNATTIQPYIDSVVMVSKTEATGRNARPVATVATRTISEFGELRREMRAGAKVPAPA

SEQ ID NO: 30548 - protein, 480 aa, Mycobacterium sp. KMS; identical to SEQ ID NO: 30508

SEQ ID NO: 30549 - protein, 232 aa, Mycobacterium sp. KMS; identical to SEQ ID NO: 30509

SEQ ID NO: 30550 - protein, 1120 aa, Mycobacterium sp. KMS; identical to SEQ ID NO: 30510

SEQ ID NO: 30551 - protein, 412 aa, Halorhodospira halophila SL1
MDYHHLDTLRRHHPAWRLLAADSAPLVLGFLHRAFVEPNCRARAQGELTNALEDYLHGLREELGEAVYPRSAAEYLNDWAADERGWLRKFYPPNTDEPHFDLTPATETALGWLDELQERQFVGAESRLMTVFDLLRQVVQGAETDPEARIEALERRRAEIDAEIAAIRDGQLALLDETQIKERFYQVERTARGLLSDFRQVEQNFRELDRQVRERITTWGGSKGALLGEVFGEADAIADSDQGKSFRAFWGFLMSPARQEELTDLLERVLELEPVQTLGPDRRLARIHHDWLDAGEETQRTVSRLSAQLRKFLDDQAWLENRRIMDLIQGVEQHALAVRDHPPGGSDRPARPDLRRAAGPARRAQAGHRRQWRGSPGAAQGGDRPQERGEGAAQRQCPHLQRAGPRPGAAAG

SEQ ID NO: 30552 - protein, 352 aa, Halorhodospira halophila SL1
MRDLRAEHAGLEEELESLRQRRSNIPARMLELRQRLCQELSLDEEAVPFAGELLQVHEQETDWEGAIERLLHNFGLSLLVPEAHYRAVAGWVDRSHLRGRLVYYRVREPRSSEPPALHPESLVRKIAIRPDSAFYAWLEQELGRRFDYACTRDLETFRREDRAITPAGQIKAGGDRHEKDDRHRIDDRSRFVLGWSNEAKIAALQEDDLPRFEARFKELLNENTIREIANFNAQLNKERAQIRERIATINASLFDIDYNSGRYIELVADTTTDPEVRDFREQLRACTEDTVTGSEDAQYNERKFLQVRAIIERFVASVGFVHGEGGCFSLLRHLSIEAYHAEKAIRRAATSG

SEQ ID NO: 30553 - protein, 395 aa, Halorhodospira halophila SL1
MSWTTPADLRQQVQKRWDRGELLAARVTGAALFPLSLRLRRPGSRELAEDFEGVRQWVQRLAAADRAQRGYGFEIQWRTVRHRVHGRNELPAGAVVPTEADALRLIGRRQEAERFDALCRQGLAAFPELADWLARRPLTVLEHAEAWDRILAVLRYFRDHPRPGVYLRQLDIPGVDTKFIEARRKLLMELLDAVLPAEAIQAEATGARRFAERYGLCQEPPLVRFRVLDPACAIAGLTDLTIPAEQFQALAPAVETVFITENKTNGLAFPAHPRALVVFGLGYGLERLAEVPWLHRVRVAYWGDIDTHGFAILNRLRRALPQAESLLMDRATLEAHRPLWTAEPSEHRFLGDLARLTEAEAALFEDLRQDRIGERVRLEQERIGFRWVVERTQGL

SEQ ID NO: 30554 - protein, 480 aa, Mycobacterium sp. JLS
MQVDDNRGLSAAELLELNRDLHGSRAIRLLATHNLGLYATLMERHLADGVVAETELVVRLERDLHVLDPDGQSGLALIKSWASQGWLHRIVDERSDQNICYLTQDARRALDFLRGMRRQDTIATGGSINGIASRLKQVAIRVGNDPARIRKSIEAEIAALQAELDDLEAGTRPEPDVTDAYDEARAIALQMERLITDIGQYGSMIEQATAALDEPIDSNAEYRDRQRQMYADYQAAWDSQGRDSHRAFLRMINDPDQRAEFEADVAAVAEALPLLDPALRKVMAGFFELVGHQIDEVERIQQRCAQRVKRFTAFGTLEQSRGVARQLNEAIGAARALLKTSLTDSRLGIDVPLARHAISSVGALSFKIGDLSAPKPAKPAGGEVDLASFAALTTQVDAPAMSDMLNAALPVSLSRAVDMLDNAYLGHVIVLWSWALKQPNDGRPASTTVRFRSLDGRDREIAVPDLMFTEPITTLAGVSQ

SEQ ID NO: 30555 - protein, 232 aa, Mycobacterium sp. JLS
MTSPSTEHDADLAAFSELPQVDQNARPPHQRRPRFDGDVSELPDRACWALQNLLTRRYISAETDSDLFSWVLEYRRQLSVRLSELDLILRIVDGTDVAFVEQARYESARGAKLLRREPLGTYDSILALHLAQMMRAAGGQSVLISREEMHGLFSGVLNDTDRDAVTFTARIDGAIARLAGLEILRRSRDDDDSYTISPVINAVMTASVITELQQQFEQLLGGGTPAEEVHVD

SEQ ID NO: 30556 - protein, 1118 aa, Mycobacterium sp. JLS
MTEQFHLSRLQVINWGVFDGYHSIPFSAGGALIAGASGSGKSSLLDAISLGFLPFNRRNFNASGDNTAAGSSAGRRTVDKYVRGAWGQRSDGGTSRVMYLRGDGTAWSAVAVTYAGDSGRTVTGLVLKWLTGESRSDSSSRFVLGDGDLDIEDVCNRWAAGRFDTGVFKVDGWRFTTKVESQYLAQLYATIGIRASDAAQQLLGKAKSLKSVGGLEQFVREFMLDEPDSLARLPEALKQIDPLVEARELLAVAQRKRKILGDIEKIQQRYASESSDLGIIDLVDLPMVRAYTDHVRLAQCPAQIAQLDTTIDQLDNEYEDVTRSLNLAKAEADSLNAQISGNSASIGPLQSQVTAAETEAEQVSRRRSAYEDMVTAQGLDVPDTADEFWNLREELLTEATELLAKVERNREASTDAEYAQKAARIARDDAAKELKRVEHVGSALPEFALLMRDQICAAIGVDAGELPYVAELMDLRPDQTRWRIAVEKVLRGAGLRLLVPDQHWTKVLKFVNETNMRGRLALHHVRARLYGAEPVEPEPNTLAGSLFAVDPSHPCAAEAVDVVTGAGDHVCVDTPELFARFRRAVTDTGLYKDSDRLAIKDDRRPLKQSEYLYQGDVSAKINALTVDLAAAEEAYQKARRVADEIAAQRQQWRDRAAACKAICEQFPQWSQIDVETADGHADRLREQYELLLADHPDIEALNARADECWSQIQVLMTRRGAIQTRRDDLDSRRTQLLELQERLQPAFVSEPLTELLHRYAGQVPVTLELLGPEPHRDALFAAIKKEREQLRESRRRSYDELARILNTFDTAFPDAIPNDSTNFDERVHDYVALCRHIDERELPEAYERMMRLVTEQAPDAILTLHRVAEQEARRIAEQIERVNTGLGAVEFNRGTRLTLRATPRQLTAVSELTEIVRSISRRIAEVGLGDKQAILDQYADILRLRNRLASTAPEDKAWTRDALDVRNRFTFDCAEWDVATEELIRTHSNAGDNSGGEQEKLMAFCLAGALSFNLASPDSTDNRPVFAQLMLDEAFSKSDPQFAQQALSAFRKFGFQLVIVATVQNATTIQPYIDSVVMVSKTEATGRNARPVATVATRTISEFGELRREMRANAKAGV

SEQ ID NO: 30557 - protein, 423 aa, Desulfotomaculum reducens MI-1
MAGLIANLENQMMDLQEEEGVLAFEDNLSGRAHFLIRKFLETGWLEREQDSQSFTEQFVVPMYASKLLNLFYDLVSGKTTEYNGFVYSTYSILKTADAERDDYMFDGLRQAHQLTENLDNALRELLANLRFYHQRLQEQVEVKEILAEHFDVFRQKISDKIYHPLKTFDSVPRFKNRILRILKNWLTEPELIEDMAVVGHKRGFGLDPEACRQRVIVMIGEIIDTYEGIDQLLKSIDKKNTAYTRASVERMQYYINTERDIKGKLVEIMKRLPKMNDRKREEEIGLLSRDLPLFQQVYVDEESLFTEPRKRKEHCPRTTNLASLINKEELDSEMQEFKKRLEKVYSHHKVLEYITEQLARQGVLRAKDLRLETDDDFIKLILACIKNDEADIPFTIDFKDDYLLVNGYRIPELLIAKKKEKIS

SEQ ID NO: 30558 - protein, 210 aa, Desulfotomaculum reducens MI-1
MWAEAWEKLTDRDKEEFVRVINLLLSKTFILRDEYEPKTKSLVINKDFRFVERHHSLIQEYLGIAGWYVQNDAYRGVIAAYNRFGTNRYRLDKPSTYFLYTLRLIYEESREKIALAKQCTTTVGEMVEKMFYLGLVEKKPPDTHLREGLNTLKRFNIIEKVEGDWAKADTRIVVYPSIELIVSNEKISNLYDQLTEEGEDDETTDQDIIN

SEQ ID NO: 30559 - protein, 1109 aa, Desulfotomaculum reducens MI-1
MKLLTRILLINWHYIKYQCIDFSDINFLTGKNGSGKSTIIDALQLVLLGDTSGFYFNKAANDKSQRSLKGYLRGEVAEDEETNTVYLRNDDFSSYLVLEFHDKKSNQYFCLGVVFDCYDDGSHDHQFFYLNDKLPANHFIEKGTELNRKGLKAFFFNNYSRGKYQFFETNSKYQEVALGKLGQINKKFFRLLKKAVPFSPIMDIKGFISEFVCDVENKIDITDMQENIRYYKQLEHDLEIVKRKIGILKEIESQHKFYCEELQRLETQKYLIDRGIQEQLQNRVAKIAQDIHRLREKIAANEGSLREKEEELTSLQEERDHLFAEKINSDVYRKREELGRQIEDLQRESKAIEHSKGILLGLIKGVLYTWREVYQWCRENLAEMPLLEEPLDYLANISEGKLELITREKLWFVKQALQEYVNKINDAYSTHRTELDGLMQYLGRLEEEIKNLRQGIKAFPPAILELKNLIAEKLSAKHQRDIKPQIFADLLEIKSDQWRNAIEGYLNTQKFYLIVEPKYFIEALKIYDEFKFTHKIYDVGIVDIEKIIARHPRPQPNSLAEEVESTNPYARSYADFLLGHVIKCEKVEQLRDFRTSITPSCMLYHNYVARQINPQRYETPYIGQRAVINQLRLKEAKYTEVSEQRDALGPKVAKLAQLRNSSVINDENISSILQNKQAVDRLPQVTHALDKATRQLAALDLSYLTRVEKLLKEAENNIGVVNKQIRELEKSKGKYYSERDEKEKALPLLEKDIAAQKEDIKSRYEAPWVEAVGEPRFRQELSQRKDPENIVNTFTTTVKGTQSRIENKWKAMLESRIIYNRDYNGALDVNAQGNAAYAQELRVLEDTSLVQYEEKIKDAQEKAQEQFKEDFISKLKKNIEDAREQIDDLNKALKDIPFGRDKYRFTVTPNPHYKKYYEMITDDMLLEGLTLFSASFQSRYQDVVEELFRQIIDVDEGLVSADRREELNKNLDKFTDYRTYLDFDLAVTDDRGMESRLSRVIAKKSGGETQTPFYISVLASFVQLYRIKSRNQDNTVRILVFDEAYSKMDHQRIKESINLIRKLGLQVILSAPTEKIGDIAPLVDRNLCVTRIKNETVIKSFDPREVEGA

SEQ ID NO: 30560 - protein, 412 aa, Desulfotomaculum reducens MI-1
MEFREHILNTLLDKYEKSLHYQGKAKVNRKIALSFNAKNFPWYWKSEAPHLKKAIHQVVEDLAGQGIVAYKWLPFEKGNLLDSVWLNLEQVDTAYRVIGRQPRKDKIKEVVGELENLLPQITQEWVKNFLIDCLKEMQDKKDFPLLLPAEKEERELLLKSFLGLEDKRDTVLLERVFSLKYLGHSKVFQRKVKGRLTRIAVQYLLNNSELLEDEVIQELGIEKNSEEVLVCGAITLLYKDKKIDYANSPFGGVVDTKYFSKMKIGSVKAAKVITIENKANFHYLVNNGMVDSTLLIYLGGFPGPQKRDFLVNLYQLKPNVSFYHWGDIDLGGFRIFETLRKVIPTIKPLFMDESTLLKYKGYCDELENNYARQLEKLLDKVEYKTFWPVIKVMLKDKIRLEQEALLVSEVDM

SEQ ID NO: 30561 - protein, 503 aa, Rhodospirillum centenum SW
MSLFGELHEDAFLLFSRANRHLYAQLVTDLFERFFSDTVTFPNRLEVVGYIYDLLRNQPELWADDGEDWSGVADVRTTGRRIRRARPEDRRQDLLLDCAYRAYGRLIDTGWLEEESYGLKITVDMPPAAMLLAERLAAIQRGLATSFRGVVVTIRNALAAVVNVDGRVNAVGLNKAAEMAVRFSRELRAVLSSLRSIERDILASESLNERLATFVQDFIGKLVLKDFESIYKTNHPYRFKHEILGYVDAISDEGYLRDQIIDGYVEGEVSLTRSEAGLQLDQDLFTIRNVFDNVDQTYDRINVYRVRLEGRLRNVLKYAELGDHRHSQRVTGLTARLDRVLTGLGEVGMMGWLDDRQPRGFVLPEVTPWAPHLLAQPRAPKPPVEATAVRRQQFDPVLAAFRRLLRDYNDLFVVETARVLRFLDCRVPPGCTGEARWLSINGVEDFLVFEQLRRLRYKPSSEFAQHYEILPCPEGAWRDDEWIRCKNFLIRTKIAGTAIDNDA

SEQ ID NO: 30562 - protein, 224 aa, Rhodospirillum centenum SW
MLKDLVDIEVRFGDRVVDDVRQVANQLLQRQFLFAGDRGTTHAYEIVTGPRFRSYFTALFDALGYQLRISETEQWVGLLPDPELDLFPKMRMDKTIVLLILALAWQDAANRGAAEARAVVKTTLNEVLERYRDIAGRNRKEALISARFEDALREFHRRGLVWLGDWDPEAADREIEIRPMLHLLVGGNALDLLERFAAEAESAITRERRTRSPQDDGEQEGTEE

SEQ ID NO: 30563 - protein, 1149 aa, Rhodospirillum centenum SW
MKHLIRIGMINWHLLPATDIDVSGDIGVIGENRSGKSTLLDLIQVVVTGNNGRYLRLNASATDGNRKRSLRSVQAYCLGRLSPDQVMRSQALTYIYLVFQDTGLPHHVTSIGLALEASQNEAAERPPVQFIADGISLSHTHFLELSADGAEQPRDWAVVRPHLERLCSEAGGTLLTYRNEPGKYVQDYMKILSTGGRFINTDQFLKAFVNAISFEQIPSATDFVRRYLLEDSPIRIGQLRESIATYHSFRKQVEEARTKLARLHALRSAISTFKDDLLAQDREQWIAARAQLDHAFVENRTLRRRRDQNLADQAEAKRARTQLEALREELGNELGTVRDAIAAQSGSAQRRQLESERALAETRLKETVGQLETIQKAVNQGAHALKFRMLLPTMPGEPFVVVERMRQAGGPARVPVWPNDPQALATALDDPRLRLPPLIDACERAANEETKAQGLKEQELREVVRQIKDIEATGIAIDSTVERLVAEMEGFGWRPRIVCTLLRVMDDRWRDAVEALLGRDREAVIVADAHVEDAIRYLQHNRVRLRGCRVVNSRKLSPAEGRPEPGTLAGVLASDDPLAMAFVVRRIGGVRLAYSVEDLHRPGRAVMQDGTYDDGLVVEMRAVAGGYKIGAGAGRIGLSALERRRNAIKEELEELEGRAKDLRTAAGCLTVLSAAVGRGTDLIAALDRYTWLKEKLDTLAEDIRALERNINPEFKARMVEIDQQIRLYTKGIEDAVRAEERATQSISTASMTLGGGENAVGSELSVQFARQKFQAVRHRIDRPASRAAYRAAVAAQKGNLTRTADLARRNAEAAAQRIQSVRIGIFDGYLAFNMEFGLKNEFTREQAQVLRDIAPWVEQGIARIEGIDLVRHQAEAEAAADRSRNFFQHSFAYELRRRFDALHSALEDMNRTLRAHDFHYEVYRFVAHPVEPYQAIIRLVEASRVDDSVFALLFDSQADDTHPHAIALKMVQELLLDEKRDVADFEDYRHYYSFNLIMKDIKTNREVDLETRRGTGSGAEQQVPFYIAIGTALAAAYHGKAAGDVAKEKGIGLAVFDEAFSKLDGRNQKACMDYYENLGLQVIVAAPFEKRATLYETLEYFVETFRNGDLIHVDWYGVGERTRQDLAEANPANLGLDGFRRMMAAQAET

SEQ ID NO: 30564 - protein, 377 aa, Rhodospirillum centenum SW
MAKRFRDAVGALEHMLSTIEREPGRTVVRVYPDYEGMRTGEELERFERVMTAAGKAGAVHIALERRPSGPASIRSVALADATKLAAHLGRVPATDEAARAIDVLRRLTGPLPAWVGEIVDEIAAAWAIRREGYPGLEPGDVATAAGFIRLLCAVDRGEHVGVDMRTFSRRACGDSKAAELGLPRLARALRKRFDLPDAPPREALAAFGIEKFPQPVLLRGSLTLSGDTRLDGRPYVGVPPEWLDTLVIVGRPGYFLVIENLASFNRYVREVDDGGIILYSGGFPALATLKAIRRMDALLPADVPFFHWGDVDADGVRILQYIARSISRPLRPHLMGVDAWSDTAVSELCSQLGEPAFLPMEQEQLDPESPLAITSAS

SEQ ID NO: 30565 - protein, 496 aa, Mycobacterium gilvum PYR-GCK
MLGPPATARTRRHTEQEPVDDNATLSAADLLERNRELQSSRAIRLLAATNLSLYATLMERHCADGVVPETELVVRLERDLDDLGDPQSGLALIKSWAAQGWLHRIVDPRSDQNVCYLTQDARRALDFLRGMRRQDTLATGGSINGIASRLKQVAIRVGNDPARIRKSIEAEIAALHEELDELDNGARPEPDVTDAYDEARAIAMQMERLITDIGQYGSMIEQATAALDEPIDSNVAYRDRQRQMYADYQAAWDSQGRDSHRAFLRMINDPDQRAEFESDVAAVADALPALDPALRKVMAGFFELVGHQIDEVERIQQRCAQRVKRFTAFGTLEQSRGVARQLNEAIGAARNLLKSSLIDSRLDLELPLARHAISSVGALSFKIGDLSNPKPAKPAEGDVDLASFAALTTQVDAPAMSDMLNSAVARGAVSLPEAVAMVDNAYLGHVIVLWSWALKQPNEASPGSATVRFRSLDGKDREMAVPRLMFTEPISVGVAQ

SEQ ID NO: 30566 - protein, 229 aa, Mycobacterium gilvum PYR-GCK
MTTESEADFAAFSALPEVDQTARPPHQRRPRFDGDVSELPDRACWALQHLLTRRYISAESDADIYAWVLEYRSQLSTRLSELDLILRVVDGTDVAFVEQARYESAKGIKLLRREPLGTYDSILALHLAQMMRAAGGQSVLISREEMHGLFSGVLNDTDRDAVTFAGRIDAAIARLAGLEILRKSRDDEDSYTISPVITAVMTASVISELQQQFELLINGATAEAETHLD

SEQ ID NO: 30567 - protein, 1126 aa, Mycobacterium gilvum PYR-GCK
MTEQFHLSRLQVINWGVFDGYHDIPFSEGGALIAGASGSGKSSLLDAISLGFLPFNRRNFNASGDNTAAGSSAGRRTVDKYVRGAWGQRSDGGTSRVMYLRGDGTAWSAVAVTYSSDSGRTVTGLVLKWLTGESRNDSSSRFVLGDGDLDIEDICNRWAAGRFDTGVFKEGQGERSDGWRFTTKVESQYLAQLYATIGIRASDAAQQLLGKAKSLKSVGGLEQFVREFMLDEPESLTRLPEALKQIDPLVEARELLAVAQKKRKILGDIEKIQQRYASESTDLGIIDLVDLPMVRAYTDHVRLAQCPAHVSQLDTTIDQLDNEHEDITRSLNLAKAEADSLNAQISGSSASIGPLQSQVTAAETEAEQVSRRRNAYEDLLAAQGLDAPETADAFWNLREELLAQATDLLAKVERNREASTDAEYAQKSARLVRDEAAKELKRVEHVGSALPEFALTMRDQICAAVGVDATDLPYVAELMDLKADQTRWRTAVEKVLRGVGLRLMVPDQHWTEVLRFVNETNMRGRLQLHHVRAKFLGATPVDPEPNTLAGKLFAVDPEHPCAAEAVDVVTAAGDHICVDTPEVFARFRRAVTDTGLYKDSDRLAIKDDRRPLKQSEYLYQGDVSAKINALTVDLAAAEEAYQKARRVADDIAAQRQQWRDRAAACKAICEQYPQWSQIDTETADGHADRLREQYELLLAEHPDIEALNARADECWSQIQKLMTRRGAVQTRRDALDDRRTRLLELAERLQPAFVSEPLTELLHRYAGQLPVSLELLEPEPHRDALFNAIKKEREQLRESRRRSYDELARILNTFDTSFPDAIPNDSENFDERVHDYVALCRHIDERELPEAYERMMRLVTEQAPDAILTLHRVAEQEARRISDQIDRVNTGLGAVEFNRGTRLTLRATPRSLTAVSELTEIVRAISRRIAEVGLGDKQAILDQYADILRLRNRLASTSPEDKAWTRDALDVRNRFTFDCAEWDVATEELIRTHSNAGDNSGGEQEKLMAFCLAGALSFNLAAPESSDNRPVFAQLMLDEAFSKSDPQFAQQALQAFRKFGFQLVIVATVQNATTIQPYIDSVVMVSKTEATGRNARPVATVSTRTISEFTDLRHAMRAEAKVPAGV

SEQ ID NO: 30568 - protein, 463 aa, Clostridium beijerinckii NCIMB 8052
MKEINIFEIVPENFFVPLSSQGKTLYIKIISLIYKLVQNGLSYGIDKDILVDEIEEYLGLINYDIENEEDEQLNNNREKANYLIRKLINYGWIYPEQTNDYKQIINFHDYAIVILEAFLKIVSKESLEYQGNIISIYSMLYSNEKAGVVIKQVFENTKGIISGLKNLNSNIKKYMDRLTKQKSPEEIMQEFFGNYTKEVIDKAYHRLKTSENVSKYRPQIIEKLNENLISSEFLSEAGEFYREDEELGSLDEGIEKVKDIVHNIINAFNELDDIMHDIDSKNAKYIRAAVTRAKFLLNNSKDMTGIVKGILEYISNEYKELELSLSSDYLEEVTDLFTLYSYGYIDETSLYIANEGKKSFKPGKILSDTLSKEERQRKIDEFKKKQEKQYSPKKVNEIVDELLGDKKMVLASEIEINSVDDFIKIIYIRLYGNHVLAKYSINRKDIIASNNGFTFKNFEIWRK

SEQ ID NO: 30569 - protein, 201 aa, Clostridium beijerinckii NCIMB 8052
MIYDSLSIKEKDEFKKVCNKLLSYCLICKQKEDTKKDYYFAEGHKDAINEYFEPLGFELEINKSIKAAQLINKFGNNKISLKLIDSITLLILRILYQEKMQELSLSQVVIVEIEEIQSRFMALGFKDRLMDKTLLRQALRTLKKFNIIETLDRDITLSDARIIVYPTIQMIVRSENITSIYEKLETYKRKGVKDDEEVNGD

SEQ ID NO: 30570 - protein, 1084 aa, Clostridium beijerinckii NCIMB 8052
MMKRLTGIRLVNWHAFKDETIEIKNSTLLSGENGAGKSTILDAIQFVLTCSKNNFNKAANENSKRSLSGYVRFKTGREDNEFERNGDVSAHVALEFYEESKKNYFIIGAVIDSASETSEKILWYRVEKCRFEDVTFIVNNEPTDIANFRLYGKELNMPFSSTRIVDAKKDFSHRLGRLNEKFFELLPKALAFKPISNVKEFVYTYILEEKSVNIDELRENIRTFKEFEDILNEVKIKIKKLEEIEVKYSSYESISRTISLHEFIVLKAEEELLKEEIEQKTKEITALNVNIDTLINKNNVIYDEITDKTKIANNIQADLYSNSEYKALETMKNSLEQAEKDYRHEKEDKNRFLKQLSEQKSYIKELNRLLFDTDTIGDFYNKMISLNENNIEEYKTTSINTENVIDKTKQDKEKYRAEKEYESKQKEGNRKDIEKQISELEKRNLQFPREVILLKEEIIKETRKLGREIVPKILCELLEVTDPVWKNAVEGYLNTQRFYLIVEEEDFDSVLKIYERLSKAQGLHSVGVINTRGLEKYDKPLENSLAGVVVSKSLDAKRYINMILGNVIRCTHVSELKEHKTSITSTCMMYKNNVARAINPKIYKIPYIGEDAYKYQLEQAKDNLNILLSEINVLKEDISVVTNIIKTINKLKLENLREKCDVLKRIVDISNKVSTLKDDILELEKNNSYMALQIKLNEVQEEIKSLNLSKRKIENELINKKGNLSSINNSIDEKRRVLSIKKGQVEENINKIGSLAKEAEERFIKETESKSFEIIKNNFNVSKERNKTILSKNEEDLKNLQGAYNITYDFGAEVGINGINTFLDELDNLVKSKVIEYEEQVKTSRKNAEEEFKEHFLSKIQENINTAKSEFKGLNKGLKDVKFGNEEYEFKIGKSKENKEYYDMIMDNENIGEGFTLFSTSYENKHKELLNELFDKLTLDNESNEAELIKLTDYRNYMSYDIEIKYNDNTTSLFSKVCREKSGGETQTPFYVAMAASFLQLYKGVSSSSESIGIILFDEAFDKMDDARIMSMMEFYDKFNSQLQLLIGAPPQKIEPITPYVNTVLLAIKADKFSIIEDMINEKL

SEQ ID NO: 30571 - protein, 393 aa, Clostridium beijerinckii NCIMB 8052
MKNYKKLLLDNLIDSYENSVIYKGDALRDTQIYFKFNLKSIKEYFDELNYKYKEEIDVACNQLEIEKFIKVYKGKGYKSHIIEKIQLNLENIEAAYLYLNRKEKKQKEDELSILLESYKEREDALGNFATYITDKLKSNGSVKKYLDIENSSECKDILKGIDEVLKQHKEIFRRNFSVKVYGDSKRYEALESKVIKIIKEFSNDEFLNDYNILKNYTYVYFKGDISLKLKESKINANDFLGGIAVSSKDIENIKEIKVSGSKLVTIENLTSFNNYTGDGGVIYLGGYHNSVRQNLLIKIYSENPHIYYYHSGDIDAGGFKILVHLRRKTKIPFKTLNMDSETLRENINYAKELTANDVNEINRLLESEEYKDYTDVLSTIIKLNKKLEQEIIF

SEQ ID NO: 30572 - protein, 464 aa, Alkaliphilus metalliredigens QYMF
MKLFEIVPDKFFSILSSKNKEIYSDCLFILFNQYTGNTSFGIDREIVVHVLTDYFEELGEVELFQDEDVTVKSAREEANFIIRKLDECGWIDIETTTSYKQIINLTDYTVMMLETLEKIVKNEQLEYQGYVYTIYSILFGNDNDQYNVILDQVHENTMKLMNGLKTLNANIKKYIGRITEQKTSEEIMKLHFEGYTQDIIDKGYHRLKTSDNVSKFRPKILEKLEIIKRDKAYLERASQQEVDIEKAESLEAAKEKIMGQLNGIIYVFENMDETIGEIDRKNTQYIRASLTRVKYLLNSSKDIEGQINEILKYVVERIESGEIDLKNDRIDEIDSLFRFYPQSFIDNKSLYIATEGKKDFQSQKLDEDQVMRQEERERRINEIKEKKKKSLSRGNIDTYVLEMLGDRAVMKASNLPLENKLDFIKLIYVLVYAKSRLVHYKVNKLEESIEIKGFKFNDFEVWRK

SEQ ID NO: 30573 - protein, 208 aa, Alkaliphilus metalliredigens QYMF
MGMTEKYNHLNSKQKDEFARIANKLLSIGFLTKKKEDNKKDYYFIENHKEIFANYFEISGWELEIDDTYGVIHLVNHHDQNRHHFKLYESIILLVLRLLYYEKMQELSLAENMVITVDDLHQRFFALKLRDKPLDKTTLRSALRLFRKFNLIDLIDSDISLGDARMIIYPTILLAVRVEDIRKVYEKLDTYRSGEVVEDEEADEDQVD

SEQ ID NO: 30574 - protein, 1081 aa, Alkaliphilus metalliredigens QYMF
MKKLTKIKLINWHYLTNVTIDIHDNCLITGDNGSGKSTILDAIQYVLTGGRARFNSAAHEKAKRDLLGYVRCKTGKDTNAYERKGDVTAHVALEFYEESKKRSFVLGAVIDSSSDLSNPKVIFYRIVNQKIEDKLFLNGAVPKNISQFKVSTKSFQTKILPTQTAAREDFNHSLGSIGHRFFELLPKALAFKAIENVKDFVYSYILDEKEVNIDYLKENVRTYMDFERVLEGIKQKLERLEEIQKEYEEVLRVEENIRIHDYIILKSQKDTEEEKLKSKNMLLSKRQEQSSKEKESEVQHINQLDLLKERESDIRKSLLTNDTYQLMRSLEHDIKLLENSKRELDNEQQGFMTALQTELDRMKKIHGLNIEIKGLKDFVERSQTLDNPPSVGDFCESAFVLEESFNEVSGQFNENLFKLKSSKEDKEKQLRKVNEEIQILDSKKLVHNKEVIALQRVIGSELEKLEGKRIEAKIICELLEVSDPIWQDAVEGYLNTQRFNLLVDPQYFDDSLHAYERYKKSNGIHGVGLINTQQLEKYQECDENSLAAVVTSKNKYAKYYINMVLGKVIRCDAVENLKKYQRSITPTCMVYQNHTARQINPQIYKKPYIGSEAYKKQLVLKVEEQKQLKEVLLGLGEEIEKLNEIMKLMIKPRFEYLREHSDVQIKVNQKHEEIGTKQEELKRIDRSTIMELDLELESIKKTIDAKEKELKTINGRVIRLDFEMEQLEKEINQFEDRVHGIAKQIINYETQHGEILDKANERYQAGLKLRKPYDIHQNFTRSRQGLDTKLNNAENELMYQQRQYNNDYHFGGAEGKAGMEDFNRENKVLRESKVIEYEEKINGARQKAEEEFKEHFISKLQENIVSAQNEFKKLNQALKGIQFGQDEYKFYFSANKQYDKFYRMIMDENNLGGNTLFTGVYRQKHKEAMEELFERITVDNDESRKALEKFTDYRTFMDYDIKIYHSDGSTSSFAKVCREKSGGETQTPYYVAIAASFVQLYDSGIHQDKLGIILLDEAFDKMDENRIDSMMSFFSKLDLQLLIASPPQKIETIGPHVGTTLVVTKEDNFSWVEAFRIDEEL

SEQ ID NO: 30575 - protein, 401 aa, Alkaliphilus metalliredigens QYMF
MKNYKKMILNHLVDKYEKSSLYRGDNKVNVTIGMTINKKNLSDYFNEWDYTLKKEINEQALSLQEEALIEIQWKKFQEGNILDKLKLNIESLDRVYEVLKRQPKSQLENDVGTIVMGYCDRTDWLGDFARDMKEKLVQKGSIKKYLDIEDRVEVKDVFMALDQIRAQTDEIPKRVFSIRVFSDSKRFERVESKVVRIMRDYGPYEVDMDILAEENIIQNPSYVFLKGKAVLLCNEETINLEKVDGEIGLGAGLIDNLSFKTIDAKRVLTIENLTTFHCYEPKDELVIYLGGYHNATRRRLLKKIHGFNPDLAFYHWGDIDLGGFRILNHLRNKTGINVKSYRMDRETLEMYKNHTKKIKSEQYSGELTKLLENEEYIEFHEVIRYMIENNMILEQEALDIG

SEQ ID NO: 30576 - protein, 463 aa, Marinomonas sp. MWYL1
MLFRHLPDEIFQALSGSNRALIEAVLNDLADVFYDHAEDPIKDKSTIIESIEDTLHKLDTLAWHDDQKESFDSPKTIHDYALRIYHRLVNTGWLVEEQELYRVSVLMTPQISMLLRSLVEISRHGKRNYGATVLSILSNLESVAKHPVERGVTLRQSAEASRDFSAHLNQILLGIRSLQRELFASRDPKAIVAGFFDLFVEGILIADYKTIKTSNNPFRFRRQILELTQEFLANPETMGQVAQCYVDQQLITMAEAQAMVEKDCRDIIQTFSNIEQRLERIDEYRYRLEKRAADTARYMDSSRPGMANKVAGIITDVAKYDKLPILKEVIGSRFIGMASAAQPTKRREPPPPRVMTPSEVSADAIRLRDQQRRFHEARQVTIPKMQSYLDKQIASGDSKHILDFTIESVEDFVCFDHLRYVGSLGVSAKKIEDLFEVQFTNQYLDVHNFVECREFTVVRRSKA

SEQ ID NO: 30577 - protein, 215 aa, Marinomonas sp. MWYL1
MLRELKKVVEESGKDAQEFQQTANFVIANQFASAYKHGQRKHYLLLESYQDYFDNLFDALGMKLYINENERLAGVLPIQKEAFVRLKTDETLFLLVLRQIYEEKIENFEVDNGFVATNTHTILDRFVQLVKREIPNETRFKDILALFSRHGIVIRGKSYEEDSKNQMINITPVVRLIVTEAYLRQLEAFNGTDPDEDEVADSDVETETTQETNQD

SEQ ID NO: 30578 - protein, 1138 aa, Marinomonas sp. MWYL1
MKKLNRIVLVNWYLLGAEEINIRGNTAIIGPTGSGKSSLLDAIQTVLTGASKRHLNYNASANDGKASGRSIRSYILGMIDSGQANAKAFGTQPRQDATSYLALIFEDSITGKESTVGLALSASLASPEEDVLGRFVLSNFGARKSDFIDAMEGKSYKAKPWIEVRETMKKICLDPYIKSGSASATQYINRYLEELSPSPDHLITLDSFLKNFKNALKFVPIASPTRFVQDFVLAEAPLQVGAYQKSLNEYRHLEAKTLEVSKRIDDLKLIQQDCEKKHQQEQSAINYQWIATEARFDELGSKQDDIQDQYELQKEREEEIEEELATQGSLLKQLQGQLLRFEQQYEHSDVGLKLQQLEQNKKLLTLQGQQDQKAILQVRQLTLLLSALNSFEDLLSKETNALVKEFAAFNGLITEEGRVEGNLKPLTQKLIALNEILDREKSQVFGQRSELNRTILNLKDECKQLESDVSSLKGGVSPLSQNTKRLIALLKDANITATPLSHLAEVTDRKWQDAIEGYLGAQREALIVEPEDAEESIRIFRAHRRQLMGCRVIDTTQTRLWLNRGDNHSALRFIRCNNDHAQAYLNRRLGGIKPVDTERELLREDSAMTADGMLKLAGTISTIRFVPHMMVGINTEGMRESREKQLASLSGELMNFLKADQRLEQADSLLGRVMANNQFDAESIGNASHTVTRLTQELESVEAEISQLQKHDDTELQERIEELKSRIANVELDQKKLDRERQQIAEQFGALNTQKSQLSSALSALDEERNRLTSNPKYDAEFASERYALLEGSMVNGAAIYKEAISRADKASEKARSFDQKVRKEVADHYGKYHHANLDNDVQLDYLESKFEEFEHYVSYQIDILSETELAKYAKRAELARKEAEETFRSDYVSKLKDSLDQVAHIIRELNHSLKRRPFNQEIYQFRYYPNGDMKDILDLVERFSAQDQANVGGLFDPHLSNDPDHIRAIASIQELISDDEKQQDLADYRKFYNFEVDILDAEGNKKTTLSQRIQTGSGGEHQIPFYLAIAAALSTTYRLHETMEGEIVGGFSLAMFDEAFNKIDMVKTSTCMGFMKDIGLQVIAAAPDDKRAVMAANMDTIISVWREGGAVSIDVAYPKEKGQILLNGQSDNLATPA

SEQ ID NO: 30579 - protein, 507 aa, Kineococcus radiotolerans SRS30216 = ATCC BAA-149
MSSIRDDLVRAQQAFARPTLELLRRPSGPLVVAVLTCVFAGQRTRVPADRLHSQVHGLLGELALHGHEVPDVPARDLCRGWVARQWLSLAASGEEGEEEYALTSHAQDAVEYVARLSGPRVLLGESRIRTILDTARRCATGARADREWRLQRLEEEIASLSAERDRLLAGGEVEEASDEQMLGEYLNLQDLLSALPGDFLRVSEEVRRLHREIVSDFRAEQRPSGEVLDDYLRRSEEVLTGSLSGRAFAGAVDLVRDEVTSRELHADIATILGHGFAGELPAEQAATLERTMQTLVEGIEVVLEQRRLLSASLRSHVLRHDPLRDRELDDALRACAERLTDWFATTGPRTTLDAGVAAGVSRLDVASLRTRLHDPADDAAPPPLRRHGEDPAGGSSLSDLRRFGGPDFERLREALGNPPEGPAPGTGALFESLPVDLRRPADLMGLLHLAVAGGGADPREARGRAVYATTRPDGVVHRFAGPDLPLPAPRPEPHEPHEPHEEFDHPA

SEQ ID NO: 30580 - protein, 244 aa, Kineococcus radiotolerans SRS30216 = ATCC BAA-149
MSTPDERTDGDDLDAADALDPASAGEDPAALDEEGLFTGDTGTLPRAVRTVLVQLLKRRYLSAERHPRSWRVLVENQRALRSRLNDVFLDLVVDQDHQVAYKQQAVSRTGQQRFPTLLHDQPWSREETALLICLRRLARSRSASGEGAVFVDREELLQEVAHFRPLDSTNHVRDEQSAAAGVDSLVRQEVLLETGTENRYRVSPILEVLLPVDVVQRIAARLGAGAPAGDAAEDVAGDVVGEPA

SEQ ID NO: 30581 - protein, 1146 aa, Kineococcus radiotolerans SRS30216 = ATCC BAA-149
MSAVTSGDAAIPGLALAGATREQWHVSHVQMVNWGGFDGHHRIDFDPRATLVTGASGTGKSTALDAYIAVMMNTTAAFNGASNDAVTGRARSATQRNPLSYVRGKLDEVLDEDTGRNRDATLRGTDAAGNPVNAWSAVAFTFRHTDGRTVTPLRLYYAPASATDPRDVKDHLALFRGDFDLRAVEPFAERRFDRRQMRGQLSGLEFYESYSRFAADLHPLLGIGADGDGTAAMKLLGRIQAGRDVVSVDHLYKSMVLDRPRTFEAADSAIAHFADLEATYETMRTAEEQIDVLGELPRLHQDLRGARGAIAMVDALDAEEPEDRSAFGHWVASTESALLVAEVEDARAAAGRAKEDLRTAQAARRDLEAQARENRESLEASGGGALEALRAQLEVAEETHRRTEEAWRSLQDRTRPLGALPGDRAEFEARRGESQRFLREVPAALTRLEERARTLTESASPDLAERRRLLEEQRWFAQRSDLVPRELDEARAAIARVLDAAPADLPFVAELLDVPREHARWRTAAELLLGGFARTLVVDRSLAEVFRRRVDGLDLAQRVRYRLADEDRPAQDLDPRSLVGRLELRADSPYRGWLSSVLAQEFPHLAVETPDGFRDDGVRRITLAGQVQHGDRGAHGGQRGLRAILGFSPEALLTRIQDELAAVGERLAAHQRDQDAVKEERNALLADREAHQRRAEARWEDVDTASTAAVVAGKRAEIDRLLGADDLVVVLSAERDRLAEAVEAARETEALARTTVRSTERTWADLVEQQDRVAVRLASLEERGVEPTPEQRAHLDAVYGQLKTDDSLLLFRRLVPKVRAATREGRTAAVQRESDAAARLERAFKAFQSRWPQPNLGSGVGSYEGYREILDELTAQGLAQRADAFRRQVVSWSGDDLLNLQSKFRQAGADILNRLAPVNEILAGLPFGSGGDRLHIEVQPQVSPEVAVFQRELRELASGTTRADDPAAVEARFLALRAFIDRIRPGGPRSLSERDLLLDVRKHSSVRALRVDATTGRTLSVYEHLGGKSGGEVQELIAFIVGAALRYQLGTSRNALPTFAPVFLDEGFVKSDGEFTARGVNAWRGLGFQLVVAAPLDKVTAIEPLMQRVVEITKNPQGFAAAVTLVDADADADVDAGAGEGGAAGA

SEQ ID NO: 30582 - protein, 481 aa, Mycobacterium marinum M
MHDDNAGLSATELLDLNRDLQGSRAIRLLATTNLSLYAMLMERHLSDGALPETELVVQLERDLEDVNDPQPGLALIKSWAAQGWLHRIVDERHGQNVCYLTQDARRALDFLRGLRRQDTIATGGSITGIAARLKQVAVKVDNDPARIRKHIEAEIAALHEELDQLDAGQRPQTDVTDCYDEARAIALQMERLITDIGQYGTMIERATSALDEPIDSNAEYRDRQRQMYSDYQAAWDSQGRDSHRAFLRMINDPDQRAEFEADVAAVAEALPSLDPALRKVMAGFFELVGHQIDEVERIQQRCAQRVKRFTAFGTMEQSRGVARQLNEAIAAARALLKSSFTDSRLDIEVPLARHAISSVGALGFRIGDLSNPKPAKPGDTEVDLTSFAAFTTQVDAPAMSDMLNHAITAGPVALPDAVAMLDTAYLGHVIVLWSWALKQPNPDTAESTAVRFRSLDGRDLEIAVPRLTFTEPINTIAGAST

SEQ ID NO: 30583 - protein, 231 aa, Mycobacterium marinum M
MTLQDDEVDIDFSSLPQVDQSARPPVQRRPRFDGDVSELPDRACWALQHLLTRRYISAEADADVYSWVLEYRKDLAVRLSELDLLLRIVDAADVAFVEQARYESARGIKLLRREPLGTYDSILALHLAQMMRASGGQTVLISREEMHGLFSGVLNDTDRDAVSFAGRIDGAIARLTGLEILRKTRDDEDSYTISPVITAVMTASVITELQQQFEQLLNGGAPAEEEEPEGD

SEQ ID NO: 30584 - protein, 1120 aa, Mycobacterium marinum M
MTEQFHLSRLQVINWGVFDGYHSIPFSVGGALIAGASGSGKSSLLDAISLGFLPFNRRNFNASGDNTAAGSSAGRRTVDKYVRGAWGQRSDGGTSRVMYLRGDGTAWSAVAVTYASDSGRTVTGLVLKWLTGESRNDSSSRFVLGDGDLDIEEVCNRWASGRFDAGVFKEDWRFSTKVESQYLAQLYAAIGIRASDAAQQLLGKAKSLKSVGGLEQFVREFMLDEPDSLARLPEALKQIDPLVEARELLAVAQKKRKILGDIEQIQQRYASESSDLGIIDLVDAPMVRAYTDHARLAQCPAQIATLDGTVDQLENEYEDVTRSLNLAKAEADSLNAQISGSSANIAPLQSQVTAAETEAEQVERRRTTYEDMLAAQGIEIPDTADEFWNLREELLAQATELLAKVERNREASTDAEYAQKAARIARDDVAKELKRVEHVGSALPEFALAMRDHICAAIKVDATELPYIAELLDLRPGQTRWRLAVEKVLRGVGLRLLVPDQHWEKVLRFVNETDMRGRLQLHHVRAKFLGAEPAEPEPNTLAGKLFPVDPKHLCAAEAVDIITGAGDHVCVDTPDVFSRFRRAVTDTGLYKDSDRLAVKDDRRPVKLSEYLYQGDVTAKINALTVELAAAEEAYQKARRTADDIAAQRQQWRDRAAACKAICEQYPQWSQIDTETADGHAERLREQYELLMADNPDIEALNARADECWSQIQKLMTRRGAIQTRRDSLDERRTRLLELQERLSPAFVSEPLTELLQRYAAQLPVALELLDPEPHRDALFAAIKKEREQLRESRRRSYDELARILNTFDTSFPDAIPNDSDDFDERVHDYVALCRHIDERELPEAYERMMRLVTEQAPDAILTLHRVAEQEARRISGQIDRVNTGLAAVEFNRGTRLTLRATPRHLVAVDELTQIVRSISRRIAEVGLGDKQAILDQYADILRLRNRLASTAPEDKAWTRDALDVRNRFTFDCAEWDVDTEELIRTHSNAGDNSGGEQEKLMAFCLAGALSFNLASPESDNNKPVFAQLMLDEAFSKSDPQFAQQALHAFRKFGFQLVIVATVQNATTIEPYIDSVVMVSKTEPTGGNARPVASVATRTISEFTSLRQEMRKTAERVPAGV

SEQ ID NO: 30585 - protein, 476 aa, Herpetosiphon aurantiacus DSM 785
MASAGEMRATMSLFETVPTTLFRPLASPGAAIYTQVLLALFAATKQQSQPLSRERALSLVEQQLELPNAEALTSDAHEEESELEQNNHASAILRSLRAWGWLRFEQQSDYSSAIILPDYAFRLLQLFEDLATKQRQHLRGMICGIHDVLEKACTGDAPHDRLSNAYEQTLFLTQALKELQHNIGLHIQKVLQTLKTKDVLEHVFGTYRKDIVDQAYHQLRTSDHLSRYRPAILQFLQKIERTNLLELSAQHLVSRGEAASFEVAYNRLTDQIDTIRSHFDQLDQLIGVIDLRHSQFVDSAVRNIELFLSASTSTSGQLHRILSQILPNQQAFEQASPEISEMLSIYEFQLTDQQSLSAPTRAAVPFEIQAESYAPLSEAEIAQAQADTLRQLRRSISRDRVRRYALQLLGDAEQRRGSEIELEGVDDLSLIIYLRSYGDGSLGYTVESIDDGVWVERDGVGFRDFLVRRVSTEQPA

SEQ ID NO: 30586 - protein, 210 aa, Herpetosiphon aurantiacus DSM 785
MSLVNFAEEYSQLSSTEQQLFADSVRRLLSDGLIWREDEQDRRIFAWLVRRIDLVRDYLAVAGWELHYAENLHIFHVFHRDGSHRRRFNRETTLWLLLLRLIYAEQYESLNPSLTRYPTTTVSDVYSRYGEFFPGQTIRKKGAFDEALRLFNGLKLVRAPNSKALRANDPDAVIELLPALEVIVPASGIAALAERLAEYQRPNSADEEQE

SEQ ID NO: 30587 - protein, 1093 aa, Herpetosiphon aurantiacus DSM 785
MIKLSRIFLYHWHRFDWHVLDVQDSLYLAGHNGSGKSSILDALQLVLVADLGRVRFNSAAQDRSQRSLDSYVRGKIGEQHWLRPGDTIGYVVLEWTEDLKHQAFVSGVCLEARAATQSVEKTFFIFDGHLNPDVFIEQGKPRTRREIKAMARNRSTAESFDQTGEYQAALLNRLGGLNQRFFDLFLRALTFQPIRNIREFVEQWLLEPNSLDVHTLQNVVERLRDLERKAKDVEEQLKSLGAIIKTQEEAKRLRGLHGKFEILAAHYSVAAIQQQINQQQQRLIDTRRDYELNQTDLEQQLGLQQNAQAALVEAQVQLSQSDVVRRKNQLAAEIQQLQQHIQKINQRWRQLQAKLIQIAALLNKLQPIAEQDLVNLLQQPEHIPQSQQIVPLLQQQSTAAGSALKLQLQAMTRTDDKISRLFEQESRLKQEITQLEQSNRQNHYPQNVENVRKYLKSALNIELFLLCELLEIPDEHWQNAVEAMLGQRRFNIIVEPKYYSQALDLLDQLREKERIYDVGLVDLQQASAEARPARPLSLATKVKAKTGLIDKYIAAILGDIITCQHVQDLRQHRRAITAEVMVYQEWTARSIDPRKFQPWFIGERAQRSQIESRRQQLTEIQAELAILRPEQQRQRQYYDQLEKLQQLLLGLDSYFEEELDSSELQTTLAELQREHDSIDTSGVAALEAEVKRLHIIHEEYALNIRRLERIIGTLNNQITQIEQQLQENQHQLLNAQSLFEHTQQRYPDQIDDALNDFQRENNEQAQFSRLQETAEQQGRGYNTRFNNTQEQLREQVILYNRDFRARELANIEQTSFQEKRAELEATDLPHFVQKIAEAKHETETELREHVLHKLRENIGRAKAELDRINDALQGLDFNGQRYHFRYEIADSLRDFYQLIEQSANVTSEMIQDSEFYQQHKATFDRFFQLLIQPGLTDQEKLEQAQITDYRRYLSYDIDVIERDGTRSRLSKIMGQTSGGETQTPFYVTIAASFVQLYKINERSKRSTIRIVAFDEAFSKMDQDRIGSTLDLFHHFGLQIITATPIERCEYLVPKMCTTLVLTGLKDRQQRVLVEPYRNYAARLEALNAESEQN

SEQ ID NO: 30588 - protein, 401 aa, Herpetosiphon aurantiacus DSM 785
MLNLNKTSNAILQQLLDQHEQPERQRVNRVQIKAAKFSRYFDDKQIDERQQTNNYLVELAKNQIIKLYWRKWEEGNWLEAVDLLDAAALYRLLKRQPLAEQQQALRTLLAEYVPVQGWLADWLAWLEQQLIQQRSIQPLDLTDPAWNRDVLRAIYGLTQLETPILERLFSVGWLGQSKRFSELEGAVLRVLRQFAPQAKQFGDNDRALLQAFNLEKVPEYVLLAGDLQLELHGNRLELGAFRPSLGLPSSMLRQAQVLDSACTEIITIENLTSFHSMLARQPQALLIYTGGFASPSLCQFLSKLAMALPNLTWYHWGDYDVGGLRILAHLRQHVAKIRLWQPDPAIFQRAGKATQSLNSKERQSLTELQQHPLLYDCQALIGAMLEQNIKLEQEQLDLLGH

SEQ ID NO: 30589 - protein, 410 aa, Acholeplasma laidlawii PG-8A
MIDKLVDYFDELKEDFQMGDSEVTTSRQKSVSVINVLKQNGWLGEEELGDYKTSLNLFDYSIKIIDLLKRIQMGEENEYTGEIYTVYSLLSSFDILDGLTIVEQAYQKIEDVLRKLKTLKANIYRFYFDLVKKDRKDDLQKVLEKLLIDYKTNFFDSAYYHLKTTDSLPRYKRSILENISYIYQNEGFMETMAEQALTKRKALQYNDAYNYVEERIRYIKDSIDAIEYLIEGIDNKNELYINAAASKIMFLTNTSEDLEGLMNRLFKIILSDKKVDYSQIFNLFRARNLDENSLQTVRRPRVDAVAEEIDYNQDISDEVKERKMASLLKANLFSKKEINNYVTYLLGDAPRILASHIELESNDDFVKLILIFLFSKSTGMVYDVRLLNYDTRIGHIKFTDFEIFVKGKSL

SEQ ID NO: 30590 - protein, 211 aa, Acholeplasma laidlawii PG-8A
MNKNQAIKKLSEEFVVLKEAEKTVFSRIVNKLLQVNFITRKKIADANDYRFVLAYKEIFEAYFCLSDFELIIERHEEVLYIKNISNFNHLRLRKAESILLLIIRMLYQSKMNVITLDENVEIYLSEVHDELTKVGYLDNKRMTKETLKPSLQLLKSYNIIDYMDSKLNDDARIKIYPTILYVIRTDSIKELLDHIDDYVKGGNVNEEVDED

SEQ ID NO: 30591 - protein, 1088 aa, Acholeplasma laidlawii PG-8A
MKKLTKIKLINWHLFTDQTIKIDGNTLISGENGAGKSTLLDALQYLLVGGKSGAKFNIAATDDAKRTLEGYVRGRIGAENKEFIRSGDVITHVALEFYDEQSDEFGIIGAVLELPKMGNLKERFYLLENLNLHDGIFMDKNTPRDYRSMKAYLKTLSIDFIPFDSQRQYRDALAKYFGIDAKKYSKILPKALAFRPIDLQSFVFEFLLDDEPIDIQSLKNNVTQLKRVEGQIRLDKEKLEKLEKIITLGESLNQNLDQITTNELIDQMAFIEKRETFLNHSENLLDKVNAKYEVLKRQKDDLDRQITSNDETILELETSRQNDDITRTLSNLKEQLHAKGNQYNEQKVIVSDLKATLNRELDLYRDFVNLNPNTHISAFLKYYSGHEENSNILELSSYIEGAQSAASGYLNALSVEKSELEKERNNILNELRIAENRLNALKRNVKTYPRNVQSLMDAINTELSNYYKKDVRVRAFSDLIEVKDEAWRDALEGYLNTRRFDLIIDPLYFNDALEVYDRVKNELSIYGVGLVNTAKIGEYTTCLPNSLAAKVTTDHPYARNYVNMTMGYVVTVDNLSDLKNHQRSITKSAMTYANHTARQINPSQYQVPYIGNSSTQLQVEMDTKLVGELTSDLKRVSNLLEKNQMSLRLLQQSKLGHIVSSNQIRYFDNIKQTRKEYIELEQKVANLSSNPKIAELESQLDEERNKKRQLRLDFEKLADQMADLRSEKTRILEQIEESRDALSNYLKEQKEWNQKYPTLLPIAYNQFNALKVRYQSNYDLISRDLAQSTIQIKSQNARAEADVVNLMRAYIINYHFGAAPDLSELIEFEKEYVLIKDNNLMKYEQEAIDLRKASETGFREEFVGKLRASIESAQIQIAELNQALTGKHFGTDSYELVTKPSENPEFRTYYDIIMDSDAVAKHTLFTENLSKRKEIILMELFNKIASFDPENDKFALQFLDYRYYMSYDIEVTNENGNKSYFSKVSKEKSGGETQVPFYIVIAASFQQLLSKNKRIDAGCMVLFDEAFNNMDESRIDAMMKFYNSLSIQLFIAVPPQRVSNIVNYVTTSLAIVKDNDFAIVEAFKREVI

SEQ ID NO: 30592 - protein, 469 aa, Heliobacterium modesticaldum Ice1
MKLFDILPDKFFLLFSGKNRPIFAEAVFLVYQQYQITRFGIAMDVLRDLMQELVESQEEQGFVFDVEEEQEAPGGQAPFDDDMFRMKANAILRRLDRLGWIQIETRENFRQYVVLPFYTSRILAVLKEICEERVVEYQRFAFLTYQLLTGEEIKHRPGLAVLEAEKITQQFQEELNILVNNIKHHMEQVAQKSSISDVLNHHFDEYKAKIVDRSYHRLKTSDHVSRYRQRILETVQQSLWDKDWFERAIEDGLRSEFFSDREEGEQRLRGALLFIEEAYRGLDDVFYQIDLRHNQYLRASYDRARYLSQHSHGMDQQLAGLLEWLGKEADDAAAEAALSRLFRLLRLRHLTEDSLFTPRRKRAPHQPEARVIVEIPEELKRELREKDLARMRRAITRDKVKAFVLEHMGARKEIGIEELAPTTVEEFLYLVYTYLYGYDGKAGYRLIRGKENRVIEMGDYRFYDRRVIR

SEQ ID NO: 30593 - protein, 201 aa, Heliobacterium modesticaldum Ice1
MFDTLGDQDRERLRDVINRLMAVNFLLKALERERYALARRLRPQLEEFFKFLGWEITFDERHECIAVASPEGMHRRPLSREESIWLLLLRLIYQEKRQSLSLSEYPTTTLNEIRAKYETFRLPLFTKSRLVDLVRLGVHYKLMDALDEDVRADNCRFRLFHSLQHAIDGEVLETLHGKIMRYEISGEEGMFDEVAETPALD

SEQ ID NO: 30594 - protein, 1193 aa, Heliobacterium modesticaldum Ice1
MKWLKRLRLINWHYFQDETLEFGPQTLISGRNSAGKSTIIDALQVLFVANQKQIKFNSAAHDEAKRSLISYLRGKIGSDDQKFVRDGDFTTYILSEFYDESKKERFVVGVVMDVFRDNNIDEEYFILAGVGIDNLDLIHPGGQKGQLRNREQFRRWCSGLKGRVVFERNKSAYQEAFLARVGHVSKRFISIFTKALSFRPIQDVREFVYDYVLDKKALQLDVMRENFEIHERYRRELDDLLKRKNQLERIVAQFENYAKLRDIVDTQEYVIRRLQHAQQAESLEKVEREITLLQEEIVRLEADLRLNDAQLAEAQNRVLVAYQNWQEHGVHKKEQELKEEIRNTNREIREKSQLLEALKDFLRREIVLLEDLARWDGDEHWQWAPEVGERERLQETIDLLASLPPQSLSEAEAQEEAFRDAGLFLSDLHSRFTKALGRIEDRLKALDGERDELQRQINDLEKKKQRVYEKEVLNLKALLEERLGDRSPVWIFCEEMEIDEKDEEWRNAVEGYLNRQRFDLLVRPEVFAEALSIYEQEKRRHAVEGVGLVDTEKEARYRGSAQAGSLAMVLKTDNPIIQARIDHLLGRVMQAENEQDLRRHAMAVTRSCMSYHNLVARQIPEKRYAVPYIGARAILRQLEIKRQELAQLEEKRTALAKRKAAVEGWTRNLAERASQYARMAPDLALPARIASLEQHREEKQGELARLDKREVERLKEEYDFWRKRQDELTDEGKERNGKKTLKDNRLKECFDEQQVLQNRVREAEEHWRAWNLSYPAELLPRAEERWREAERSGQATATKLLNLITNQKGNANKRDQEFQMLRDYRKDYNKEYNYNADVEGRDNGEYQPLLTEIASVDIPAYQAKLQEALAQSEEEFKSHFIFKMREAIHSAKREFGELNHALRHFPFSEDHYRFEIKASERYKRFYDVIMDPNVGERGSLFDLDQEDKAAVLHELFERLIRGDAGDQEEFTDYRRYLDFDIAVESRGNRYMFSQVLREKSGGETQTPFYITILASFYQLYGSNKTMRLVVFDEAFNKMDEERIQTSLRLIKRLNLQLIAAVPDEKMQHMAPEVTTTLIVHRDGYTCFVDLIDKAEAIGGGEEFADERRGAAAVGRSTSMRELLRDERGTKSSKEGAQSAQGGERNRLSEERVEGNGEGEDPVFDPKPRKVRREERSGKQQVSAQDTLFALEEV

SEQ ID NO: 30595 - protein, 390 aa, Heliobacterium modesticaldum Ice1
MVDCDDASLARDYFDEMNHRKREEIHLALEELASEGIVAIAWPRFKQGIEVDKVYLNYEAVDKAYRLAGLTPKGDQLTALRDTLRPLQDHPWEWVRRWWAETDEALAARKTARLDIDDRSGYQELVQVLEALPAVEDSVPKRLFSQSVLGDSKAFEQRVEKRLLPLLKRYLDEACDRDEEYLQAVGLLNHPQLVLLAGPIVLQLAQGGQVSADVPGGLGVSGQTVKDICGLIIDAPRLITVENLTSYHELVQQAQKAGKRAVIIYTGGFPNREIQRLLRRIGEEITQIDAQPGKIECYHWGDMDAGGIAIFEFLQSRFFPALQPMLMDGCAYLRHVDKGIAFSGEYGEKLRRLQREPRYERWCPLIEKMLACGKWLEQEAIPVSEAEVHI

SEQ ID NO: 30596 - protein, 495 aa, Cellvibrio japonicus Ueda107
MILNYSGYDIRKSPRVMSSSNPLEPDDIPPLFERLPPELFRPLAASNARRYWIVLCRLIDEMWGDGGRSPGEETLKSVVVRKIETLLAASDPWEEELETPIDIRAHEIVRYLTESGWLSQRRRGLAEMVTVRPVIAQFYTVLCEFARHEPEFLGSKVRSIYFNLRAVASGEASGDQYAEAAKQAKQCMAHIANTGCRVQDLMDELMKRTSAREFVRGFFEEYVEKVFIADYSELRTKDHPLQHRSQILAMTLQFQHDEAQREALIAWYQEKKTGGDRIRAEFLYERDTRLLMRLKDVDEQLQRLDEEIRDANQRAISFIEYKMRAPKQLDKLLAAAMQATDRLDEGHVALLPASGFRHAGPELLAKPRTVAKPTMATTVEKRPPTLQELAMEQLRKRMADNRLVNRVKLANYVVRHLENRTAVTSDELTIDSINDLCCYQRLLLIAAHGACPPSQRRSDPQLQMLKGVRIDFLPEGTTRNAYLEHPRFHIQREYA

SEQ ID NO: 30597 - protein, 199 aa, Cellvibrio japonicus Ueda107
MSHWERLAAQSQIYAEIDYQKAGYQLVMEQVLYASDRRSRIAYELIVKHRKDYDNLLAQLGMTITHNPHMGYVVATPSQYVADKMRLSDTRLALVLRRLYDDKMHATEILAGEAFVDMIELERAYKDLLNRELPTKAVLEEQLQAMKRYGIVRLEDTHDEQRLQVAIRPGIVDVLGEMALLQLAAYANTPGEEDTDETA

SEQ ID NO: 30598 - protein, 1132 aa, Cellvibrio japonicus Ueda107
MVQYFLYEREDLELGKNTAFLGPNGTGKTALLDAFQTVLLAADSNKTHFNASGEGKKRARSLREYCLGVYGQSDTERCRTSANTYINLVFRDPETNIPVTAGVSLAASVEDPNHTFNSLYILPGVALSTCNHIDPDAERETILPWRKFQHIAKDLCTMQGTTPVFTQNREDFLRQLFVGHLASPGERPNTRAIRSAFARSLKLNKDVDDLNETLRQHLIEQRLTNVKAFRIRLEQFRDVREMICRLVERIERAGTVADKYEQVKRERTTHANLDALRALYEAERIAEALDEQQDKAEELKQQLETTLLDLGRAETEKAQAQKARDHTFELRNADPEYLKQASESKSLKDKETQHANTRQELNNLLRLAQETAISAGKLPEMARYQDDFENTIQQLHELQQQAEALHVPEPAAIQSAMQGMARVRSLVNKALSAAEHGAKKAEDELRDARTARERSQRGQAQLRPAVIALQRLLADADIHATPICDLVKIGDPQWQPALETYLSTHADALLVPENRELDAIRIYKEHKEARSVFKVKLALPSRGRPWIAKSSGTFAAQLVEGENQAAVRYLQGELGQLSLADSAEQLQAGTKAISRDGMVSSGGGVERIRLSAPDELLIGRSDSDTQRHAAQKALDEAQGALKRAKAQVDLISPVEQRLALFADTETTYPRLEELFTAAAAGNRELLDLQNALLSTQSDRLVSLNVNFEAACKQLTDASDKEKQLIELKSRLANEVDNTQRRIDEFVEQQKLAALDEAKTRQHPLYNANEVDRHRVRYDERHGENWNELMRTLQTAISNADKAANTHDSDAWSKFTFYLRDFQLQNTDITNNQWERAYKFILNDKQRLEDLELAEQEAKSQEAYDAAVKVFRTDVAQTLLEGFEAIEEQISGLNEVLKHAPEFSNGERYRFKYTPVEQHRALYDFLKRVREHGAAEEDIFGGSGKVPEEFKALVEGDASSELLQETSPLNDHRRFFSYDVEIFTQNKSIGLLSKRLGPGSGGEHRTPLYVIFGAALAAAYGKSRGSNAGGGIMLLDEAFEKMDAQNVRATADYLNALGLQLVMAGPETDQAKMSSFLNIYYDMARYGSRTIQLTKNVVLDEARELLQSDNYLLHPELLEQAISKIAETEHASE

SEQ ID NO: 30599 - protein, 370 aa, Cellvibrio japonicus Ueda107
MLRGSDRAIQTAFNPGSAYWRQSYEERQHCHLCFTAAERAGAVGLQWAKQGGEDHPLEKVRLLDMNKLACFLGTATLSESVQAAQTILHPWLAGYPRVAELLEAWAQLKSPRGLGTDSARDFADALRALEALKQADDDDQIVRVLSRQLFQNTKRIEALARHIDLLTAERLSSSARQQEEVFGALGLLKEPQPFLVAGTGTLELHPSQRCPIAWPFIGVSNRHITGYAGTPAWVLSIENLTTFHLASQDTNAASGLILFTGGMPSPSWCRAYASILDSLPESIPVYHWGDIDQGGFRIAAHIRKQCIRRHTFHPWLMDAEQLDGVRYSEATEATRTNMARHARDAGWEPLSQNLLPRTIEQEGIAICLPI

SEQ ID NO: 30600 - protein, 512 aa, Cellvibrio japonicus Ueda107
MLAFILFIKSLNTMDASALDKSHRYIAFRHQNPAWQLLASRRAPLVLGCLQSLFDIASDGIAVEDALQTLAQMLVTYASQEEYGIEPDNTQLQAGRELREWIKRGLVIERENRLYATDALQTAIGFVESLDSRIMTSTASRLSVVQREIENLEVALNPNPASRMASLRRRIQALERELAEAEAGKVPVLDEAQAVEGIREVFNLATGLRADFRRVEDSWREADRELRQSIISEQYHRGEIVDRLLQGHENLLNTPEGRVFEGFQQQLQQRVELDHMKERLRTILRHPAANEALNRNQRRDLQWLVMRLVKESQAVFQARARSERDVKGFLKTGLAAEHHRVGNLLSEIMNVALSLDWQRQSVRRMPTPLPPVGIALSGLPLIERLRFKSLDEDAAGELDLNTVNADLDQIDDDFWAAFDGLDRQALIQDTLATLAKAGKPMTIAELASALPPVQDLETLALWLGMAREAGIAVEDGEPEVFELLDEQAQRWRFRVPRTGLSHEALCAIEWEL

SEQ ID NO: 30601 - protein, 253 aa, Cellvibrio japonicus Ueda107
MAGIFDHITGQPGAPNAAEDAPITDVGDHAPPTETSPLSDVSRTHKRLRDAAQELLKYGLLEEAQKPNLYRIVTTHVEEVSTILEPLDLALGLDEVRGLVYLRVRQDEAAEQDDDWAHPLVRRQRLNLEQSLLVAILRQHFIAYEQESGTGAGEALIAVDELIPQLQVYLGDLGSDARERTRVIQLLDQLKGHGLVSSLDAHERVTIRPIIAHLANPESLQALLAWLREQAAPSSDAADGKAAGEEDNEDNAE

SEQ ID NO: 30602 - protein, 1101 aa, Cellvibrio japonicus Ueda107
MNQATLWVDNDTYILRQMDVFNWGGFDGLHQAAIDPAGTAIIGPTGSGKTTLVDALMTLLCANPRYNLASTGGHESDRDLVSYVRGVSGPGDGGPDQSHIARPGKTVTAIAATFHNGEKQVRLGCLLWFEGTSSVASDLKKLWLFSSSPEQTLEHWLTVHHEGGMRALRAMEKTDTGIWTFPSKKSYLARLRDYFDVGENAFTLLNRAAGLKQLNSIDEIFRELVLDDHAAFDRAAEVVKGFDDLKDIHEELEIARRQQRSLIPVAETWEAYQKSERQLAEQETLKKILPVWFAEQAHGLWRQEAERLQAEQQSAQQAEAALADERQRQKKTVDGLRQAYLQVGGASVEDMQERIAEWRNTRARRESHAAQYRQLVNTLKLPDTLSAQALKANQQEAQSRSEQLKSDLASAQENAYAKGVAEKAVKDALAQWQQEYQEAKNSPNSNLEPKFQQFRTALAHQLGLTEDALPFVAELVQVKEHERAWRGAIERAIGSDRLRILVPPEQIEDALRWVNQRHNHLHVRLLEVKQPEKQPRFFEDGYTRKLDYKDHPYREAVKDLLAGQDRHCVNSPEQLRTTPHAMTVEGTMSGKTRFFDKQDQKRIDEDWLTGFDNRDRLAVLQERIAAARTELRDASAQVEAARARESELSAQQRLLQALLALNFDDINVPEADQKLQDLEARLVQLNAPDSDIAAAKKNMQLAEEQLEVLDQQYREAGVAVSTIERDFKQASTQQQKAWQRAQVGLTDADRILATAHFPAISAPQLGDLYDLEKQQQDSLQQSIDTLKEKLRKLESELVKKMSDAKKEDRGALSEVGRELEDVPQYLARLQVLTEEALPEKLRQFLEYLNKSSDESVTQLLSYVDNEVAIIEERIEDLNNTLRRVDFQPGRYLRLVSGRVVHESLRSLQKAQRHLASARFNDDAGESHYKALQYLVALLRDACERNRTQGAKALLDPRFRLEFKVSVIDRESGSVIETRSGSQGGSGGEKEIIASYVLTASLSYALCPDGSSRPLFGTIVLDEAFSRSSHAVAGRIIAALREFGLHALFITPNKEMRLLRSHTRSAIVVHRRGLSSTLTSLSWEALDEFHQQRSKNQHEVAR

SEQ ID NO: 30603 - protein, 381 aa, Cellvibrio japonicus Ueda107
MKSPADLSQRLARQWHNNVLREARLLSPSAWPLVLSIGRPTASVFAEATGLVHQHVQAWQHVSVGEVQWESVSYRAGADAVRIPVRWCLRSPSEWIAAAADALVTEEYAQLEQLIEQVDKTFHRQLVRQRALWLKKSPEAVIQTARLASRLSPGCAEGKPLRLLSGHGVDTKWIERNGGLLTAFLDERYKGAASEQGLITFLDALDEGDHWVLVAPLSEGLLPFKRQKVTTAELEKTALPGSRLLVVENEQCLHLLPNLPETIAILGAGLDLQWLSAKHLQQKTIGYWGDMDTWGLLMLARARAYCPQVIPLLMNQGLFDRYAEGRTVQEPVTAQPMSPDGLTAEEADFYQYLVRQPCGRFEQEFLPGEVVEKAVVGWANQ

SEQ ID NO: 30604 - protein, 487 aa, Cellvibrio japonicus Ueda107
MAECLRLLYQRLYTDLRDYGHAMNREQLVDIFKEAIARAPILDIDNGELNDGEEATEGRFKSQRDLAIFIINRLIDNGWLEKQVDETSLQSSYGFSRMGRLFTQPFADHHANEFRTRNRNTRNTRNSLQAFYEQGEIHDLLDAYEYSERIISDFTDVIAELEERKRQLVREVESRQLIQQASDEFFDFMETVFKPDLEVRLSADSVEKYRDQIGDIITKIRRKRKYGQGDPETAAKDWRAVMEIRLRKALPQKVVSGVSLLETLLQTIDSRLKNACDIMLPALRRALNTFTQRADIIIRQLSYINSRGQDDLMDIYRSLAHLPVEQQDAVLLQQGEAIAGLHMGFIDPAQIQLRARRNPQLIRSTLEEEKALDIDAQKTLFIQQALDRAFIFQSSNLRDYVYQALRERGEISSRELVADSMQALLNLSHAVEVGAAGNLSSRYYFRVEQEDAWLAVAPRVQDGQYFMRRDEFIIRLLDNQALSEIFS

SEQ ID NO: 30605 - protein, 254 aa, Cellvibrio japonicus Ueda107
MSDSLTQVLQAQLDKHNISLDNWRELIQRLLDYGVLCRDDSQVEAELYDRFIRIQATVNEYLGLIGLRFQHDPHFRFVRILPPGARMPGMDDESDEPLNAGLRNRLNQHEVALVLVLRAEYDKALREGSIDEQGGATLSLEAIALAMKSLLRRSLPENLGERRQTFRRLRQMRLIHFLAEADIDSAESWIKIRPLIINLVSNEWLAQIRSHLADSMLLLDDSEAHSEPDVNEEDDRGPGKQSPHLSRSLFAVDN

SEQ ID NO: 30606 - protein, 1217 aa, Cellvibrio japonicus Ueda107
MYLKKFIYVNWGNVPNTEFEFGPINLFSGGNGSGKTTAADAIQTIMTAAHDNLFHFNPGQDESSQRGRGGKLVRTLASYVLGCDDGAYARPQGCDGYLAAVFYPTQGESAEPFTALIAMRAFLETTGQGSALQKVARLEDSEFYILPDVVLGLKDLLKEEKTHKYVMPLDKLYASLRRQYGQQQVEKYDKKKSYLCRLYGILRGKKDAISEREAMSAARAFSRFMAYKPIKGIDEFVANEILEYRDLGEAIRTVSTMLKRIHTMETDARQLRQGIERMAQGKNLADQFIAGWLEQQVLQYSLAKRRFDDSQRLYLDAKHKQQLLRETANTQQQALSACEAQRDEIHQLILAATARRLGVPALRDKDQLEQEKQTQEKFLQTQIPELRRQHQQAQTNQDAAGQLAQALRQTSISLDVPGLKEAGLSIIAKTLETECTLPDLHQLLNRDWLDNNPLDQHLDAILTLQKHQNHFVASLFQIDSNAGTIRLNLRDQLAQERDKRKQQAERLQKSMEQKRRDIQSLEARQVSYPGFVRAALEAIGAQCPKADARVLCDYVEVTAPEWQAAIEGYLGAARFGIIVESEYEAEAIALVRGLSGQGQRARIIQGDKARLDLEKLTDNGRESIIEVMRFAHATAEAYVKASYGNVQRVETARDLKNTRRGITRDAMGSGNYAMFRCDMAEGDLVFGQGARERALEAKRQEFHNLVSEWQSAQAHAEECQSLLFAIDQLKVLAYAEILQTMVTAQHKIQALDAKLQQLDLADTQALEQELADLQARLQQQQLRYQQLNNTHIDCRAELKLADNQCQKLDTEQNKTLQVVDACESNLQGLVALWPDFDAEARLHVADEAVGQHSLGYFESQLAGVNTELKTLLHRLQQAVMQHNQFCGNVDTILFDVDYNDDLGSQNFTVICDIRRQFDALYNRDKNHILAQRHQEIESLRQSFNNAFVTNLCHSIYQAINDGKKILEDLNRELEHHRFGADRERFRFAWEWVPEFRDYWQFFKAVIDSPSLEQGENLFNLALDEKHQKVRERLMAMLLDEDEQKALRELMRIADYRNYRRYEIYKEPEGKSPIPLSQYGTGSGGQLETPAYIIRSAAITSAFRFNEGNSHLRMVLVDEAFSKMDEHRSREVINYLTESLGLQLLFIMPSSKSGPFMDLISNQFVFSKCPTAEPVGELKSRVMLDRQVCDQEKIALLMANHRRTIRQQAALDFMAEVE

SEQ ID NO: 30607 - protein, 494 aa, Xylella fastidiosa M12
MDHATLTTLRERHPAWRLLTSPHAPLVTSFLHRVFVATNARLLSETKITQALEDTLYALREHEGPEAYPKGALDYLNDWAAPDKGWLRKFYTSGTDEAQFDLTPATEKAILWLLSLTEHTFVGTESRLLTLFALLEQMSTGTETDPIKRLDELRKKRDALDIEITRVLEGHTPLLDDTAIKDRFQQFQQLARELLSDFRQVQDNFRQLDRKVREKIALWEGTKGTLLDEIMGERDAISDSDQGRSFRAFWNFLLSSRRREELSERLGQVLALPAVAALHPEPRTRRIHDDWIEAGEQTLRTISQLSQQLRHFVESRAFLENRRIMDLLHGIERKALGLRDMTPSGTVMYLDAIGADIQLPLERPLFTPRAKPRLADLVLAAGTDDIDTTPLFNQIVMDKARLRLAIQRALRTQSQISLRTLLQTEPLQQGLAELVAYLELAHTSNSSDPDGLRGIVDETVEEPIRWQANNTVGETVTREARLPRIIFTRRAPSH

SEQ ID NO: 30608 - protein, 234 aa, Xylella fastidiosa M12
MKDTLHESDIVTTPPNALPTVPELSHLMVYLLKGVLYRNEEERLWSSLLRLQTQVREHTAVLWLDLVLDEAEGYAFLKSRPDPDAAEGSARPPRLIVRRALPYQVSLMLALLRKRMAESDARGGDPRLVLTREEIAELMRVFLPEATNEARLIDQLDTTIKRVVELGFLRPLPSPSSSTPNHNNYEVGRILKAFVDAQWLAEFDARLEAYHAVPSDDQDEPDTPPEAEGESGDA

SEQ ID NO: 30609 - protein, 1144 aa, Xylella fastidiosa M12
MRETSTLGLNFVADDKRVGFRLQHLEVVNWGTFNTRVWCYTLGGRSGLLTGDIGSGKSTLIDAITTLLVPAQRVAYNKAAGADARERSLRSYVLGYYKSERNDATGTAKPVALRGTSDYSVILGVFHNVGYDKVITLAQVFWLKDSQSQPARLFVVAERALGIATDFNNLGGDIKTLRKKLRGAGCELFDSFPPYGAWFRRRFGIQHEQALELFHQTVSMKSVGNLTDFVCSHMLEPCDVGSRIEALICHFDDLDRAHQAVLTAKQQVKLLLPLVDDGQKHQTQLANIQTLEAGRDTLRPYFAQLKGELLKHRLDALAAEADQLAVEIQQLKEQRKTADSKVTQLQQDLRDNGSDRLETLAAEIQQLEQTKAQRQKKSDRYQTLLTKIDETAPADAIGFFTQQQRFAQHTEELNAAIATLHNDKSEKDFALRNARKDHNTLLAEINSLQQRQSNISAIQIRIRHDLCAALSIDAEELPFAGELIQVREDARDWEGAAERLLHSFGLTLLVPDAYYKAVATWVNHKQLTGRLVYFHMRPRNTTQDAALHAQSLVHKLIIKPESPHYTWLQQELQRRCNVVCCDTIEQFHREVRAITQAGQIKDPSGRHEKDDRHRIDDRSRYVLGWSNADKLHTLNEQRQHLEDSIRMLGEDLGTIQQECQKQQERLDALNKLGEYPDFADIDWMSLVRQIAGLKEEQAQLQATSNILQILQQQLTEAQTQVKLLHGKWENALREQGEVNSKQKTAQQMWNQARNVWDDAPLSQAQIALLACWRQQALGEHLLSVESCDNHEQQVRQWLQKRIDAENAHLRQLNDRITGAMHRFKDQFKAETVEMDADLAALPEYERMLNGLQEDDLPRFEARFKELLNVNTINEIASFNAQLNRERETITERIKDINQSLHGIDYNQDHYINQSLHGIDYKRGRYITLLAQPSPDAEIRDFQQDLRACTEGTLTGSDDEQYSDAKFLQVKRIIDRFRGREGLSDADRRWTAKVTDVRNWFVFSASERWRADESEYEHYADSGGKSGGQKEKLAYTVLAASLAYQFGLKWDEVRSESFRFVIIDEAFGRGSDESAEYGLRLFEKLNLQLLIVTPLQKIHIIEPFVSSVGFVHNKGGCDSQLRCLSIEEYQAEKTNGSGPGGGTAP

SEQ ID NO: 30610 - protein, 405 aa, Xylella fastidiosa M12
MSWTTPASLYAQVERLWKRGNLLRALVTDTHAMTWPHLLKLRVPNAADLSERFQAVRDWVQAIVGTPQIRIQWREWKHRVQGTQQVPAAVYLDTLQDALAFIGKTHEALQFEVVWQQTAAAQPVLLAWLLRRPTQALEVADRWERLLAVVAWLQAHPRPGVYLRQVDVPGVDSKFIEAHKSVLTELLDLALPPESIETAASGVRQFTRRFGFLDKPVPIRFRLLDAALPGLPGWAGLPDISLDAAHFAALTLPITRVFIIENEINFLTFPKGAGAIVIFGAGYGWEPLARAAWLHACQLYYWGDIDTHGFAILNRLRGYFGHVTSVLMDQDTLLAHRLYWDEESEPTRQALEHLTAEEAAVYDDLRYDRHQPRLRLEQERIGFRWVCDRLACLLSTAHVAPPQDA

SEQ ID NO: 30611 - protein, 490 aa, Xanthomonas oryzae pv. oryzae PXO99A; identical to SEQ ID NO: 30409

SEQ ID NO: 30612 - protein, 232 aa, Xanthomonas oryzae pv. oryzae PXO99A; identical to SEQ ID NO: 30428

SEQ ID NO: 30613 - protein, 1143 aa, Xanthomonas oryzae pv. oryzae PXO99A
MKSSSSSLFADDLPEPRVQQFRMRRLQVHNWGTFNGLTDVPIAAKGFLFVGRSGSGKSTLLDAMSALLTPPNLVDFNAAAREAERTGRDRNLVSYVRGAWADQQDSASGEIATQYLRKGSTWTALVLEYRNGEGRVISLIRLFWIAGSGAAAADVRKHYMVAERSFDIASELVGFDLDLRKLKARLGDDIAHFDNFSGYAERLRHQLGIANEMALRLLHKTQSAKNLGDLNVFLRGFMLEAPKTFDASERLVGDFAELDGAHLAVVTARRQVETLLPARAHYEDLQSVQRQRGRLQELKLGLDPYREQRRLALLDARLHALDVNDQGLAGEEGQRRAAVDNHQQRLSDLEAQRRSQGGERIDALEREQLQVQGELARRSDKRAKAEQACRQLEQTLADNAHGFAEQSAQARAALEDGQRLAAEQDEAIGERIAGKREDSQRFAQVRAEIEALTRNPSNIAAPMQALRARLSEETGIPEAALPFVGELIQVREEDAAWRGAIERVLHGFAQSLLVDERHYAELAEWVNRTHLGSRLVYYRVRNNEQAFSGREPGSASLLHKLQLREHPFAGWLRRELGKRFDYDCLESAKALRTAERAITREGQVKHPGERYEKDDRHAVGDRRRWLLGFDNRDKLALYEREAIELAQRIAACDADVAELRARRERDASRRLAQHTLANLAWEEIDVAAQLQRRDDIASALRQLREGDANLRALGEAIERTRGDLEQAKRTFDGVREERIALGVERTRLEKQRLHCADADARVVTPLQREGLEERLANLGALSLDNLEAHFRQIGNAIAEQTSASDSEHNRLEQLLLGCFRRYSQQWPEDSGDFIISLAGAEDFLARLQRLERDGLPQHEARFFELLQSQSKNNLLALQRHTAEARKSIAQRLDEVNASLEQVPFNHGTLLTIELSDRRLPEVIDFHQRLRDVLGHHQTDQRDVAEQQFAVLRELVRKLGSADGEDKRWRELVLDVRLHVEFVGVELDAATRQQVEIYRSGAGKSGGQRQKLATTCLAAALRYQLGGEDGELPRYAAVVLDEAFDKADNEFTALAMNIFENFGFQMVVATPLKSVMTLEPFIGGACFVEISGRHDSGVLLIEYDEQARRLKLPERSRSAAADGAARATEPSADAVGGASVDGLH

SEQ ID NO: 30614 - protein, 387 aa, Xanthomonas oryzae pv. oryzae PXO99A
MMLPAAALLALRGQWQRARGQWLIGEGAPQAIGLRAPTQAQAIARFDAFGAWLQEWSRTGLPGRVEYRAVSWTQLGPQRLPQTWVLDDAGQAAGALGEGERWARARQRSAALQARWPQAVALAARLRRQFDLLADWPEVEFARLVAVVEWLHQHRDSGLFLRQLPIAGIDSKWIEPHRGVIADWLAGLRGIAEPRSFASLSGLRNAPDRVRLRLLDPALRHHIGGLEDITAPIAQIAALRLPVRRVLIVENRETGLACESLPGTLVLMARGYAVEYVSNIGWLRELPLYYWGDIDTHGLAILHRLRTHAPHTTAVLMNEATLQATPRALWGHERRPHRAQRLAALSIQEQRLYADLRVGRFGPSPRLEQERIAWDYAWPRIQAALAD

SEQ ID NO: 30615 - protein, 456 aa, Methylobacterium radiotolerans JCM 2831
MLFAQLSDELFKPLASPSRGFNAALLLHLHRRVLGAEPVRKAELLAEIGDFAAGWSDPEVSGDEPISADPAERRTALYRRLLDTGWLIERRERYVPVAEFDPEARLLLEELSRLERGETRSYGGAVLEVLGGLESALSDPANRSEALSNAARAAAAFLSHVRGLAAGMRKVEERILREPDRAKTFRLFFEDFVERHLISDYRTLHTRFNPFRFRASVVREAGRALRDALTVRALAEGLIREGRSADLDAAQKAVRADLAQILAVFEGLDNHLDAVDAVVARLERRIASALHVMDRPDPSGVERVAAMLRAVGGSEIAPEVPGDVSLLRPPIGHAHLQAPRARKSAIDMEPLPDIEDDPVVDAFAAAKAEFRRRTTVTPESMSAFVEARLGKAVRLRGSQIVIAGVDDFIVFQRLREIDVLFDAKLGARYALTRLPERVVNGWLDCPDFLLERRPRA

SEQ ID NO: 30616 - protein, 208 aa, Methylobacterium radiotolerans JCM 2831
MLEGFRAIIDGDEPPPPGARAPDAEELCRALQVLLKGQVIYAETQGIGRSYELARHYAPFFTDYFACLGYALTVSHRDQMVSLSPAADAPRHDIVSERLRKDETLVLLALRLLYEEGLRDHRAGTDGIVDCTTDEIVEKIRAVARNEPPEEGRLADILRLYAKRGGLRLGERDRVERVTPLSLLPGVTVLASDAWMERLRAWSEAGEA

SEQ ID NO: 30617 - protein, 1145 aa, Methylobacterium radiotolerans JCM 2831
MYVLTDIAISNWYLIRREQIRLRGAAALVGPTGAGKSTIFDAVGTVLAGNNASRLALNASASGRSARTVRDYCLGWISDPAEGGRPTRESCETVLVLVFENPDSGRVVSVGLALAARAVEPKETVLSRFIAVGHRFEVADYARTAPGGTYTAPWSEIAADLRARASSFTEYRTSGERFTADVLATLREGAPAPEPRHFLRSFANAVAFKPIFDTSAFVRAFVLDPEPLDVERVRHSIANWRRLLETIAELESRLGRLRRLRDRYEAWGEAVLAAATHELRAASAELRRRSLDLIAVRSRLREGADTLRIARERVTASRGYVREIDGEIAEKKALAAASAAEGRLAASTLGLSMLERDRKELIGRIGDLVGLVGQMAKLQPVAPLLRQSCPQAARLAEACARAGLRRESSPEEILRPEGPLAELADGLARLPDFDEALERAAEDAALKARAQESEAERTAPRTGGGPAARLSSDTVAFRGELERRGIDALPICELAEIVDPTWGPALEGLLGRAREALVVAPDRLSEALGVLQSGRDRFSRCILVKTTDTAKQRSRRYDDGPLTVIETSDPHAEAFLGVRLGGYDLARDDAELARLSRAVAPSGRTTAGMAYTVTRNVDLLMTRGHRGPTADSRRAHEIAVAEARRLRGEAAVLREAARTAAAIRARVARGLDDVEALRAELDGLEGRRRTLQTEREGIEKRDTAGLTAEIAALTTERVGYLRELSEELEPKLDRLLADEAALRARMGPVREAVRAALSARRAALRQLSGGDAARVRLARAEPFDLGAVAEARRSLAGLDAKAAGARVSAERGLARDSAEAARSHGRIAERELAEACAAWRLENPLASGDAPAIDGFAWVRREYEAVEGHELRRYRAQAERAEAEMRRLMTEDLLTRLADRFERVHARLAALNERLSARSFTGQTYAFEAAVDRRYAAVHALATETARSPEAAQALLAGEAEGPMAAALEEITALIAGADDAARLADYRNYFVYEIGMRDRAGNRTTMSARALRGSGGEAQAPFYVAIAASLASAYYPGDRPGDENPGLGLCLLDEAFSKLDVRNSQALVDLYRAWGLQLLIAAPEDKRTTLTEVMDTIVTVYKSPDLTSVRIEAEHPLEAARRALHAINPDQVGIEGFRRSDAAE

SEQ ID NO: 30618 - protein, 510 aa, Xylella fastidiosa M23
MDHATLTTLRERHPAWRLLTSSHAPLVASFLHRLFVATNARLLSETKITQALEDTLYALREHEGPEAYPKGALDYLNDWSAPDKGWLRKFYTPDTDEAQFDLTPATEKAILWLLSLTERSFVGTESRLLTLFALLEQMSTGTETDPKKRVEELQKKRDALDIEIAHVLEGHTPLLDDTAIKDRFQQFQQLARELLSDFRQVQDNFRQLDRKVREKIALWEGTKGTLLDEIMGERDAISDSDQGRSFRAFWNFLLSSRRREELSERLGQVLALPAVAALHPEPRTRRIHDDWIEAGEQTLRTISQLSQQLRHFVESRAFLENRRIMDLLHGIERNALGLRDMTPSGTVMHLDAIGADIQLPLERPLFTPHAKPRLADLVLAAGTDDIDTTPLFNQIVMDKARLRLAIQRALRTQSQISLRTLLQTEPLQQGLAELVAYLELAHTSNSSDPDGLRGIVDETVEEPIRWQANNTVGETVTREARLPRIIFTRRALSDHQESSQGDRAHEGHAV

SEQ ID NO: 30619 - protein, 237 aa, Xylella fastidiosa M23; identical to SEQ ID NO: 30406

SEQ ID NO: 30620 - protein, 1143 aa, Xylella fastidiosa M23; identical to SEQ ID NO: 30407

SEQ ID NO: 30621 - protein, 401 aa, Xylella fastidiosa M23; identical to SEQ ID NO: 30408

SEQ ID NO: 30622 - protein, 488 aa, Leptothrix cholodnii SP-6
MDIDTLEALRRQHPAWRLLLADTAALVASFLHRVFVAPNRRVIGQADLAEALEDTLYAVREQRGGNVYPKSALEYLNDWAANDRAWLRKFYPPGSDEPHFDLTPATERALAWLGSLSERSFVGTESRLLTLFDLLRQMNDGSETDPETRVRELQRKRDQIDAEIERVRAGDLPLLGDTALKERFHQFAGLARELLADFREVEHNFRGLDRRVRERIALWDGSKGALLQDILGERDLIAESDQGRSFRAFWDFLMSRARQDELTALLDRVLQLEPVAELAPDPRLRRVHHDWLEAGEQTQRTVALLSQQLRRFLDDQAYLENRRIMDILRGIEAGALAVRARQPAGDFMSIDETAPDIELPMERPLYAPPLKLAITSARIDAGDEDDDEFDAAALYSQFIVDKAALAQHVRQSLQQRTQITLAELLDTRPLQQGLAELVAYLSLAAEPPIGVNAGVNAVIDDTLEERVSWLARDGRRKSARLPRVIFSK

SEQ ID NO: 30623 - protein, 208 aa, Leptothrix cholodnii SP-6
MATTIESAPAPTAELSAVLIPLLKGVTYRADDAAHWSALLQLQGRVRDHVAVLGLELMLDEAEGYAFLRSRPEPEDEALPKLPRLVARRPLSFPVSLLLALLRKKLAEFDAAGADTRLILSREQVVELLRVFLPEGSNEARLIDQVDSHLNRVVDLGFVRRLRGQDGLFEVQRILKAFVDAQWLAEFDARLATYRAQLEGKAGVADEE

SEQ ID NO: 30624 - protein, 1133 aa, Leptothrix cholodnii SP-6
MKNEALALDFGADEADGALAGFRLQRLEVFNWGTFDARVWTLRADGRNVLLTGDIGSGKSTLVDAVTTLLVPAHRVAYNKAAGAEARERTLRSYVLGHYKAARSELGGSGRPVALRGPDSYSVILGVFHNAGYDQTVTLAQVFWLKDPQGQPLRLYAVAEKALSIAADFADFGTDIVKLRKRLRAAKVVVEDSFPPYGALFRRHFGIHNEQALELFHQTVSMKSVGNLTDFVRSHMLEPFDVAPRLVALIAHFDDLNRAHEAVLKAQRQVALLQPLVADCERHGELAAAVEAQRAAREALQAWFAGLKAELLDQRLQHLGDDLARHLSQIERLTALQREQLSQERELRRAIADSGGDRIERLALDIARKETEKRRRTDKAGRYDALRQTLGLLAMHSAEDFLNQRALCAPLREAAAEHEARAQNALNELGVAFAQGRKEHDEMLAEIASLKARRSNIDAQQVVLRAALCEALKLREADLPYAGELIQVRDDERDWEGAAERLLRSFGLSLLVPDEHYAAVSDWVDRTQLKGRLVYFRIRPKARGSSQDGRGDLPALQPDSLARKLAIKPDTPFYGWLERELAHRFDLACCTGQEQFRREARAITRAGQIKSPGERHEKDDRHRIDDRSRYVLGWSNQAKIAALESRARVLQARLIETGQRLAALQNEQAALRERLQALDKLEEYRDFTELDWRSSVTELAALQDEKQRLEAASDVLKTLAVQLATLESVRDDTGRKLKDREAEQTRCALKHEQARALREQAQQKLDAADFAARAAHFGLIEGWRALALGDQALSVENCDGREQEMRRWLQARIDADDKRLAHLGEKIVRAMAQYKEAFKLDTQEVDASVAAGAEYRAMLAQLKADDLPRFVARFKELLNENTIREVAHFQSQLHRERETIKERIARINESLTQIDYNPGRFIALEAQTATDADVRDFQTELRACTEGTLTGSDDAQYSEAKFLQVRQIIERFRGREGSAEADRRWAAKVTDVRQWFVFAASERWREDGSEFEHFSDSGGKSGGQKEKLAYTILAASLAYQFGLEWGALRSRTFRFVVIDEAFGRGSDESAQYGLRLFQQLNLQLLIVTPLQKIHIIEPFVASVGFVHNEDGSASKLRNLGIEDYRAQRDGSMP

SEQ ID NO: 30625 - protein, 404 aa, Leptothrix cholodnii SP-6
MSDWSLPADLRAQVQRRWDKGELLAERVAPTQLFPLRLTLRVPSSSDLSERFDAVRRWVADLQQGSRAGYRLVLREVRHRVIGQNSLPAEAWVDTLDDALQVIGKAREARVFQSVLAATRERQPALLPWLQRQPLRALSLAEVWPQLLDLVAWLQAHPRPGVYLRQVDLPGIHSKFIEAQRGVLAELFDLALPPDAIDATAGGAAQFARRYGFRDKPLRVRLRFLDPRHAAWVSGTDADYTLTQQAFARLDPPAVRRVFVTENEINFLAFPPVADGLVVFGAGYGFEAMSQAGWLHRRALHYWGDIDTHGFAILDQLRAHFPQARALLMDHDTLLAHEAQWVDEPQPTQRDLPHLDDAERWLYDDLRWRRLRDAPVRLEQERIGFGRVEQVLAALSCGGVPSGA

SEQ ID NO: 30626 - protein, 482 aa, Natranaerobius thermophilus JW/NM-WN-LF
MNLFQQIPDNLFSPLTGRLKEVYTDLLFLIYDQHKKTIYTLDREAIINLFVEYVEDKNYKIDELTEQVHDNNISELEQLSKDARERAHYFLRRLLECGWIIQEQNYDYSYRISLPDYAFLLLESLDKIKSGYSMEFQGRVLSVYQNLTGDDGSTYVAVNQARETTEELINGLKSLNHSIKMYTERLLKTQQPKEIIQQILVDYYEEILGEQYYRLKTSDHISKYRAGILKQVKNLRHNRNEIISQAETMVKERQASNRIDAENMLYNWLEFIEENFQGMDEILNEIDNRNRRYVTSAMEKLQFQMTEGAGSEEQLKRVLRYLASQAKEEGEKQDLPSEIEQLLHLYPQRVVDDQSMKKPTRTSKEHDPAPVQVQKVDRRARDRSFARFKKRVEEEITIKDINQYVREYLGQKGSLYLHEFPRKSKQDWIKLIYILLYQNSQKAEYQITGARGDMIELDEGQVELPHQVVQLKNRSASKGASK

SEQ ID NO: 30627 - protein, 231 aa, Natranaerobius thermophilus JW/NM-WN-LF
MMKWVEQYEKMSEKDKEKFQVTANRLLNKTFLVYGKDKDRQYYRFVEKNLEVFQGYFSIAKWDLLHHKRLSVFQLYNIEEKNRYRFNLQETIFLLILRLLYDEKQKDLQLTRDIVVAGFEIQEKYMALQIKDRLPSKEEMRRILRMLSGYSLLELKTGDYKDPEAKYVLYPSLKMVVDDARLDSMGELLGMDDFSIELEESDEDLEREDEEQEDIETEDIETEDITGEGEH

SEQ ID NO: 30628 - protein, 1113 aa, Natranaerobius thermophilus JW/NM-WN-LF
MRSLTKVKLVNWHFFSDETMEMDNSVLITGDNGAGKSTLIDALQVVLVGNLAKVRFNSSAFEEKTTRNIKGYLKGKTGTEGETVFLRDDHDFTSYIIMEIFHSKTKTPYLVGVLFDYYQNREDFEHVFFRIDNEEYRDELIYKEENLPRNRDEFFRYLKGQGIKFKHYKNDLSGYLNDLRQLFGGVKQSFFSLIQKGISFSPITHLRSFVYDYILEERQVDVETMRDYFEKFRELEEYIEDTKKEMSALEQIDKTYQEIKQKQANLDTAKYMIYRGELEDRKARLQTKEQERTQEEQNLSKLLQDINTKEKEKTELDNKIKQVHQQIAQNSITIKIENLKKEIHNKQVEEQELSKLQENLRHQINSEAEEFEVLKKLLTTADIDSEFSNYQLLKQIIQEMRDLAKSLKENDNPEDISRAFSNSLEDMAATWKDIHRKISSTLYSLREEQKQLQNDKNQLEQEISDLEKNQILRSDSPTMKLKKILEEHLVNDRGEPVPVDIFCEAMDIKDKEWQNAIEGYLHTQRFDLLVEPGYFDDALELYERYKFSQGIDRVGLVNTDKLMESKIKVEDKALSQEIHAKKPHIKAYAEFLLGRIVKCDHERELKQYRRAITKTCMLYQNYTARQIPKNRYQPPYIGSDALRIQLETKKQELAKLKDKLSQVDQVISQLKQIEDYPDDKRDRFSNLESAYERISVLPQLRRELQELNQQLMSMDTSEIDRLKKQQKQLTKEYNETDEELGKLQTKEGQTRSNIDYLKEQIKELTDKVETASSELDNYLELIDENQRSNWKTKWDSEVQTKPPETLKANYEVQKNRLTTMINEDWNKLIQKRSDFNHEFDFPANPQSKTNDKYQQRYQNLKDSHLVEYQSQAKDVREKAEQSFREHFVAKLRENIEIAKQEVEELNRALKNMKFGTDSYRFKLSPKQELKGYYDMIMDPQLHEGHNLFTESFREKHGETINELFRDLNAEEDAFQEKMQELTDYRSYLDFEIVITDENGNQSYFSKVARDKSGGETQVPFYVAILASFYQVYGMYRNSDTLRLVIFDEAFNRMDADRVEEAIRFIDTLGFQPLIVAPTGKIQLIAPHVHTNLIVMKEKFTSFVERVSRKELLE

SEQ ID NO: 30629 - protein, 459 aa, Natranaerobius thermophilus JW/NM-WN-LF
MDSNSNNNSNLSTNSNVKLTKLQKRELSKLLDKYENRKDYGKESKNPRRDFLHITEKNYPDYYHVSDSKFRLDYNAEMKELEKHGFIDLIWKKYQEGEYLEKIALQYENLEQAYSVLNRKPKIEYYRELEKIFYKYYKEASSNLNNFYEEMLSKLKHLQKLPAQVKYETPHEIEELLIGLNQLTKNKELEILKRNFSVELYRDSKRWDKYERRIVWIIKNYWSNKTDNKELDQELNQELAKPLKDHIYDIYMMEDNELLAEFGLIENPRHVNISGYMKFSTHQGEIDLVAFYPDVGLPPQMVKDMKINTLKANCIITIENLTSFYHYLSVAPDNHLVIYLGGYHNRMRRHILNKLWDFVKYQGMETKFYHWGDLDLGGFRIYNHLKEKTNIPFAPLMMDEKTYLYHIDNGHKFNKDYEKKLTDLLKDDEYSEFHNLINLMLKHKVRIEQEAVRDIVLPE

SEQ ID NO: 30630 - protein, 484 aa, Burkholderia phytofirmans PsJN
MDFDYSTIDALRQNHPAWRLLRSDHAPLVASFLHRVFTAPNVRVISQADLAEALEDELYALREQFGTAAFPKAASDYLTDWSANDKGWLRKFYRQDSDEPHFDLTPATEKAIAWLATLTVRSFVGTESRLLTLFELLKQMSEGSESDPKARLAELHKRRAEIDADIARAEAGDISILDDTALKDRFQQFTTIARELLTDFREVEHNFRGLDRRVRERIALWDGAKGELLEEIMGERDAIADSDQGRSFRAFWDFLMSSSRQEELTELLDRVLSLPPVAELKPDARTRRVHYDWLEAGEHTQRTVAFLSQQLRRFLDDQAWLENRRIMDILHGVEARALALRDMLPSGEFMTIADIAADIELPMERPLYAPSLKPRIANIAIEAGDADIDAAALYAQVVVDKARLVWHVRHILQDRSQVTLRELCEIQPLQQGLAELIAYLQLAGDTFSTVVDEQVSETIVWVGRNDNGEQEIRQAKLSRVIFVR

SEQ ID NO: 30631 - protein, 215 aa, Burkholderia phytofirmans PsJN
MHEQEHGTTVSMHDLSSLLIPLLKGVIYREADMALWGALLDLQARVRDYVTVLNLELVLDEAEGYAFLRSRPDNGEEDSPALPRLIARRPLSFPVSLMLALLRKKLAESDAGGAETRLILTREQIVETVRVFLPAGSNEAKLIDQIDAHVNKIIELGFLRKLKPTAGKREEQASAFEVQRILKAFVDAQWLADFDARLAGYQTQLGTAASRNADD

SEQ ID NO: 30632 - protein, 1124 aa, Burkholderia phytofirmans PsJN
MTDMQLPGLDFVADDALSGFRLHQLEVFNWGTFDRRVWTLNPAGKNALLTGDIGSGKSTLVDAVTTLLVPAHRIAYNKAAGADSKERTLRSYVLGHYKSERNEASGAAKPVALRDSDSYSVILGRFHNAGYDLTVTLAQVFWMKEPHGQPARLFIGAERALSIATDFAAFGPDISGLRKKLRALGADVFDSFPPYGAWFRRRFGIENEQALELFHQTVSMKSVGNLTDFVRSHMLEPFDVASRMTALIGHFDDLNRAHGAVLKAKRQMESLSPLVEDCERHAQLVSQVEDLRACRDAMKSYAADLKLRLLDRRIDILAAEWERQDAHVKRLDVKRSAHRVEEAELRRNIAENGGDRLERLEAEIQSKDAECTRRRQKAQRFDDLAQVAGEQTPEDEQSFLALRRHLTERLDAAQSDEARLQNDLTEHGVSFRAGRQEHDALSAEIDSLKSRRSNIPAEQIAMRAALCNALALPEADVCFAGELLQVREDERDWEGAAERLLRSFGLSLLVSDEHYAAVTEWVDKTHLRGRLVYFRVRQSARRERPELHRDSLARKLSVKPESPFYEWLEYEVAQRFNVVCCDTQEQFRRETRAITRAGQIKAPGERHEKDDRHRLDDRRRYVLGWTNTAKIQALEAQSDQSASQLRELGTLISKIQSEQIELKTRLNALSLLSEHAEYREIDWRGVATEIADLRDEKARLESASDLLHELTQRLNQVDAALVAVEAELDEDKAERTRIEERQRIADDLHMQAQAVLDDPAYSTHRAYFERLADLWSEALGKHQLTVESCDNRESDMRKWLQDNIDAEDKKVSRQREKIVVAMREYCTAFPLETQEVDVAIEAAQEYRAMLDTLKADDLPRFEARFKDLLNENTIREVANFQSQLARERETIRERIALINESLTQIDYNAGRYIVLEAQLSQDAEIRDFQSDLRSCTEGTLTGSEDVQYSEAKFLQIKQIIERFRGREGLTEQDRRWSAKVTDVRNWFVFAASERWREDNSEHEHYSDSGGKSGGQKEKLAYTILAASLAYQFGLEWGAVRSRSFRFVVIDEAFGRGSDESAQYGLRLFAQLNLQLLIVTPLQKIYIIEPFVASVGFVDNREGRESRLRNLSIEEYREEKGRSET

SEQ ID NO: 30633 - protein, 392 aa, Burkholderia phytofirmans PsJN
MSWTTPADLRMQVSRIWERGELLAGLATGATLFPKRLVLKGPTSAEITERFEDIRRWSGGVRATAHCRVEMREFRHKVFGTNTLPIEVWIDSFEDAVALIGKQRDAASFALLLDVTRAREPRLVAWLAKRPLRVLELADVWGRLLDVCMWLERHPRPGVYIRQIDIANVHTKFIEAYRGVLSELLDVVLPEGTVDFERSGLGQFAARYGFREKPLRIRFRVLDAKKALFDPSSIEQDVTLDAASFARLELDVGRVFITENETNFLAFPPVDDSMVVFGAGYGFEMLTGATWLLHRRIHYWGDIDTHGFAILDQLRHQFDHVESFLMDRETLLAFKSQWDREDKQTLRDLPRLSRDEGQLYDDLRDNRLRANLRLEQEKIGFGWVEAALGRLG

SEQ ID NO: 30634 - protein, 480 aa, Desulfobacterium autotrophicum HRM2
MALDYSTLKTLRKNHPAWKLLVADHSPLIAGFVHKIFIAPNRRRMGQADLASALEDYLFTLRETEGQDAFPRRAEAYLDEWASQEKGWLRKFYPQGSDEVHYDLMPWVEKALAWLENLVQSPFIGTESRLMTIFDLLHQMVQGTELDARSRIQSLERQKAEIDAQLARVREGHMDMLDDTALKDRFLLINKTARELLGDFREVEYNFRRLDQKTREQIALWEGSKGTLLENFFGERDVIAESDQGKSFNAFWDLLMSPTRQDELSTLLHKVFELGAVKELSPDMRLKRIHYDWLEAGEQTQRTVAKLSGQLRRYLDDQAFLENRRIMQVIQSIESQGVQIKNNLPGNDFMTIDESSPGVWLPMERPLYTFPVKPVIEEIVSLGDGSDIPSDILHAAVFVDRLKLKGIIRNCLQTQDQVTLEQILEAHPLEQGLAELVTYLSLAGDDEKALFDESRNHRVSWTDKRGVTRGAQFCAVIFNR

SEQ ID NO: 30635 - protein, 200 aa, Desulfobacterium autotrophicum HRM2
MDILLESMSKPVIALMKGVVFRENDERLWQQLEDGQSALRDYVQVLGLELIVDASEGYAWLKTREPLEGEEPLPRLVGRRKLSYPVSLIIALLRKKLAENDSSGEETRLILSVEEITDMVKVFFPAGGNEARLVDRINSHLNKIADLGFIRRLKGRNDKIEVIRILKAFVDAQWLHDFDERLNQYRETIGAGSNDQGHEN

SEQ ID NO: 30636 - protein, 1125 aa, Desulfobacterium autotrophicum HRM2
MEQELLDFSTDDALAGFRLQTLEVYNWGTFHKKVWRLELNSRNGLLTGDIGSGKSTLVDAVTTLLVPAHRVAYNKAAGADTRERSLRSYVQGSYKSERSDIGHAAKPVVLRENNSFSVILGVFKNQGFVQEVTLAQVFWIKDNQGQPERFYLVADKPLSITSHFSDFGPDIGRLKKRLKKLSSVEIFDTFPKYGAAFRRRFGIENEQAMDLFHQTVSMKSVGNLTDFVREHMLESFDVAPRIESLIHHFDDLNRAHDAVLKAKAQIQRLTPLVKDCGQQRVLLDEKTGLRECREALTPFFAFHKRALLKKRIKNLLQEQERLDHKIETLTIKHQEETGERDRLKQDIADNGGDRLERIRSDMERLGREKEKRRHQADRYARLIQNLPLKPAATPDDFYDNAQQIQDQQQALGQKEADLQNQRTDTEVEFRALTSRHREVTLELESLSNRKSNIHVRQIQIRKDLCTHLKIAEKELPFAGELIQVREDQRSWEGAAERLLHNFGLSLLVPRNHYKAVTAWVDVTQLKGRLVYYLVHPEVQNKGVALHPASLAVKLSIKPDSIFYSWLEHELASRFDYACCTDIHQFHREPMAVTQAGQIKSGGKRHEKDDRKDIKDRSNYILGWTNTAKIQTLKLRCQEMEQTMQTLAARMSDLDTQKKQVQEQRNDLIRIGEYRTFNDLDWQSVTLELSHLDQEKRELEAASNLLKTLGLQLETLQGTINATEQSLVQTRDFRSKNEEKQHQANLDVQTCETDMQPARDMATDQRSTVFKRLEEMRRNLLEKHTLTIESCAGREKQLRQIIQGKLDNLDSRIKTIESRIIKAMHSFRNDFPLETREVDDTLASGLEYQEMLTRLETDNLPRFEHRFKELLNENTIREVANFQSQLMRERETIRERIERINLSLSEIEYNPGRYIVLEDQFNPDVDIRDFQQQLRACTEDALTGSTEDHYSEGKFLQVRLLIERFRGRQGTSDIDKRWRQKVTDVRNWFVFAASERWQEDHTEYEHYTDSGGKSGGQKEKLAYTVLAASLAYQFGLEWGAVRSRTFRFVAIDEAFGRGSDESTRYSLELFKRLNLQLLIVTPLQKIHIIEPYVSAVGLVYSRDGRVSHLRNMGVEAYRNSREKKTP

SEQ ID NO: 30637 - protein, 398 aa, Desulfobacterium autotrophicum HRM2
MTAWTRDIDIRKRLEKKWNNGQLLAQCVSPGPFNPLRIPLKHPTAKELTHEFDAARTWIGHLMAHAGKQSFKKFTIEWQESNHRTLGRNQIPRAVIFHTLDQILHYLGKTVAAERYQSLFREITALHPELAELLIERPLDVLAHDTVWPSLLAIVSFIRQTPCPGIYLRQLEIPGVDTKFIETHKAWLTRLLIQVLPGSAVNEQARGASAFERRFGFLSKPARIRFRTLDPDFTIMGLSDMEIPEHDFCHLPIMPDTIFIVENDINGLAFPRFPRALVIFGLGYGLSALSNAHWMQDKPIWYWGDMDTHGFAMLDQIRHYFPQTRSFLMDYATLLSHRALWGRETSPATRDLPLLTPDEARVYDTLRHNLHAPMVRLEQEQISFSQVRSVVKAIQTNG

SEQ ID NO: 30638 - protein, 541 aa, Bifidobacterium longum
  subsp. infantis ATCC 15697 = JCM 1222 = DSM 20088
MADVMRELERLRPVYETGVLRLLLRQNAMLYVSLLRSTFDPLTGELPRETVEERFAQSLNALADAGEYAPREDQTFAAAAHQILADLTREGEGDYAWLANSHDAATHRFLYRLTARAHRAIEALSRLEDESRALSGAQANSIIMEIEHARMQLTADPGERIKLLNREIKERKHEIKRIQQGKQHATLSEAQVEDVIAVIHNTLRGVPIDLRELVLDERDNGDALRRRMQAGDISVDENLTRYHDEYRRSFSESDSGRRFEDAFQVIITDEGRQQIDEALRAIAKTPYLAGESGLLLGQIRDELARIYDGIEAVRRQMRVSDEAISRLVRQQTDTRYRTMLTRLNRLYARLNADAKTHMGDASRPCDTATADALFAPLPMRPAKSMTRATAPGLSDLAAEAPQATPVADLRDMVNSGGPRLLRMVSLIRRNPVTVDRSDDRSGATLVDIAASFNRLPESERRESEIVGFLGGLGAASGSAIADEPSTDGVGIDSDIVTEPAPAQRGDTATWHCVSIDGEPRNWITRPVLADMDELNIIVEEG

SEQ ID NO: 30639 - protein, 220 aa, Bifidobacterium longum
  subsp. infantis ATCC 15697 = JCM 1222 = DSM 20088
MTVAEEHEEHMDNANPYALFEGDTGDMPAEARMAAIALKRDRYISGPTYDTVLDNRDAVVRSLNNDLLDLVINERYRIMYATPVAGDDVTLRSLKTRVSLKREEAALLAFLRIRVLEYENVHADPADWLVSFEEIRAALATGAGYLAARNDEEGVAKQIGAIVSAMITYGYLVRLDDEAMYQITPLVPVVLDRELADTWLDVVEHGDGDTEDDDDEKEAE

SEQ ID NO: 30640 - protein, 1184 aa, Bifidobacterium longum
  subsp. infantis ATCC 15697 = JCM 1222 = DSM 20088
MMQATDVQMIADRWMLESRRLINWGSYEGYHEFRPSTDHKLPVTLLAGASESGKSTLVDAQISLLYPTGTPFNKASNSGRSERSDYTYLRGMVGVGSTETGDEPLYLRGRDENGAPQPVWGAIVDTYRNQTTGQVLSCAKFLYLMPGDGRGDVRRQYVVWGKPVDPRRMDQYRDAPFTPAQLKATYPDCLTFPSAEAFHTHIWSAMGLSEAACRLLHKIQSADAPSRLDDIFKQGVLGVPEALGLARTTVEDYERYDGNFHAMDEKTRRMDTLRGIQQAYGEYAAARGKARAFEPVKPAVDGTVPAVLRDWALARMRGEVAVQLPADRAEQQNSEAEAKLLRRRTEDLRTRLDMIRGQMQGLDGGNLTRLELELDQARRTLEDVQANRTRIEQTFASIGETLPGNEQAWNERRINAVNFKREYNKRDGECEEALTAAINARAGARGDLERLQRDFDRQRSQRTRISQQMDETRAMLCRATGLTPAELPYVAELMDVNEHEEDWRLAMNVAYAPIAQTILVDKRHEQGFAAKVSTIDPRTMPRHTWQFVDTARHYDDTGAHANILTGEQDGDWLSGKLRYRDDSPFADWLRSQTQAERFDALCVTAIDDTDRTNRQVQADGQIKSGARGQHGTKDRAQVIGFVNETYLNALAAQVDAARNALSQADTDYTAAKTQSDNLHRELELANQLAYTSWERIDITGAQRTITDTQDAIASIKNDPKLAELAKQRDELNAELDRVERQRIESDQAAARAGSAVEAALIWLRDHADTGTTDAAGVIADSGDDDNATTGPLPDEVTAVLTESYDNRFAGLADAAMRAHMIIGAGVAGTRAPGESFPERTIAGIGKDMTSRIDLLNGQADAARTGVESKMSTYIALYAADDDSLTASVEDYRYYLDELASLTQLAAVAATDAEYRRCLEQLLRSFLTIKRAIDTDASDIHDQLDRINAMLKGQQFGPKHGSLSLHADVRRPERAFWTQLIRVIGTLNDWKSADVNDSDASRKAFAACAPMVGLLRAELAQVKDANGVKSYGARNLDPRCRSSFYAIVHHADGPDERITSTGGRSGGALQELTSFVYGAALIYLLGGGLTSEPSYTTLFLDEALIKADGRYTQRALAVLPRLGFQVIVSAPESKTGEILEVSTKAYVTYKDPDTGLTSLREAVLHQNDMDDESSSDILKDDGVAE

SEQ ID NO: 30641 - protein, 481 aa, Chlorobium limicola DSM 245
MALDYTTLDLLRQNHPAWRLLRAQHAPLVASFLHRVFIVPNVRILSQADLVEALEDELFSLRQPQGADLFPGTAQNYLNDWADNEKGWLRKFYPEGTDEPHFDLTAATEKALAWLEGLTERAFVGTESRLITLFDLLRQMSTGSQADPEVRIAELKARREEIDAEIERILAGDISLLDDTALKDRFQQFLQLARELLTDFREVEHNFRILDRRVRERIALWEGSKGALLEEIMGERDAIADSDQGKSFRAFWDFLMSQSRQEELSLLLEEVLALPPIVTMRPDSRLRRVHYDWLEAGEHTQRTVARLSEQLRRFLDDKAWLENRRIMDILHEIEAHALDLRDDFPAGGFMPLEGFSAVIELPFERALYRAPFRPLIAGIALDEGDAEIDTAILYAQVIVDRAELLRNIRIELQTCSQITLGEVVARHPLYNGLAELVAYLQIAGEWPRTTVDEGTEDEVSWQSASGITRQATLPRIILLRN

SEQ ID NO: 30642 - protein, 211 aa, Chlorobium limicola DSM 245
MMNHSDIESSYLQSPAQDLSFVVIPLLKGVIYQDENPALWNSLFNLSAAVRDYVAVLGLELIFDEAEGYAFLRSRSDSQEEGTNPMPRLMARRQLSYPVSLLLALLRKKLAEFDAGAGETRLILSRDEVVELIRIFLPVGTNEVRLIDQVDTTLNKIAELGFIRRLRGERQMIEVRRIIKAFIDAQWLADFDQRLDEYLQRPVDPKEERDE

SEQ ID NO: 30643 - protein, 1121 aa, Chlorobium limicola DSM 245
MSEVLEMGFIADDRLAGFRLQRLEVFNWGTFDGRVWTLRLGGMNGLLTGDIGSGKSTIVDAVTTLLVPSHRIAYNKAAGADTRERSLRSYVLGYFKSERQESVGGAKPVALRDSNSYSVILGVFHNEGYDKTVTLAQVFWMKDAVAQPARLYAACERDLSIAQDFTGFGTEIAGLRKRLRSEGVELFDSFPPYGAWFRRRFGIDNEQALDLFHQTVSLKSVGNLTDFVRTHMLEPFDVAPRIAALIQHFENLNRAHEAVLKARRQIEMLEPLVADCDRHHDVAETADNLRSCREALRPWFATLKLDLLDKRLAALDDELTRHNMAVGRLQEQRRTQQERERELRRTIAENGGDRIESIGAEIRQKQESLDQCRKKSLRYEELVRLLGESPALSVDEFHNQRTGHAAMREECADGEARVQNDLNEAGVLFTQGRQEHERLTAEIKGLKARRSNIDEKQVAIRRSLCHALGIAEDEMPFAGELLQIRQEEREWEGAVERLLRNFGLSLLVPDRHYGGVAEWVDRTHLHGRLVYFRVRHQPQGSTQPEHEASLVHKIAIKADSPYFDWMEREVAHRFDLVCCTNQEEFRREKKAITLSGQIKAPGERHEKDDRHSLDDRSRYVLGWSNAAKIAALEESAGRQEKHLAGLAERMYSLQQQQKALKERLAVLYKLDEYPDFRDLDWQPIAVAISRLEAEKRELEAASDILKILAGQLDEVEGELQATEHQLDERKDKRSKTEQKISGFRELHQQTETLRDESGPEAAGQFALLESIREEALGGHSLTVESCDNREREMRDFLQNKIDLEDKKLSRIGEKIIRAMTEYKEEWKLETREVDVNIAAGFEYRSMLDQLRADDLPRFEGRFKELLNENTIREVANFQSQLARERESIRERIARINESLTQIDYNSGRYITLEAQMSLDADIRDFQSELRACTEGALTGSEDAQYSEAKFLQVRRIIDRFRGREEHADLDRRWTIKVTDVRNWFVFAASERWREDDSEHEHYADSGGKSGGQKEKLAYTVLAASLAYQFGLEWGAVRSRSFRFVVIDEAFGRGSDDSAQYGLQLFAQLNLQLLIVTPLQKIHIIEPFVSSVGFVHNQEGRCSVLRNLTIEEYRAAKEGEPE

SEQ ID NO: 30644 - protein, 391 aa, Chlorobium limicola DSM 245
MSWTTPADLRAQVQKLWDRGILLSSLMGDEELFPLRLTLKSPDSRQLSESFSDVRNWIGQLADGARYYRIVSRTLNHRILGSNEIPSEIWIDSLEDALACIGKLRDADRFADLVSLTRETKPELIPWLRKRPLRTLELAGSWPNFLQIVGWLQMHLRPHIYLRQIDLPGVHSKFIEAHRGVLGELFDLALPSSAIDAGASGAAGFCRRYGFRDKPLRVRFRILDPELALLPVEADQDISLTEAVFAGLNLAVETVFITENEINFLAFPPVSRSMVIFGAGYGFENLAAAHWLHERKIHYWGDIDTHGFAILNQLRRFFPEAASLLMDKKTLLAHRTLWGIEPSPETVELTRLTGEEMALYDNLRSGSLGERVRLEQERIGFEWLVDALGSV

SEQ ID NO: 30645 - protein, 482 aa, Chlorobium phaeobacteroides BS1
MVLDYTTVDLLRQNHPAWRLLRAQHAPLVAAFLHRVFIAPNVRTISQADLVEALEDELFALRRQLGDNAFPGSAQSYLNDWAENDKGWLRKFYPAGDDEPHYDLTPATEKALAWLESLSKRTFVGTESRLLTLFDLLRQMSSGSQTDPEIRIAELNRQRMEIDAEIARIDAGKISLLDDTALKDRFQQFLQLARELLTDFREVEHNFRTLDRQVRERIALWEGSKGALLEDIMGQRDAIADSDQGKSFRSFWDFLMSQSRQEELTALLEEILELPPVAEMLPEPRLKRVHYDWLEAGEHTQRTVARLSGQLRKFLDDKAWLENRRIMDILHNIESKALTLRETSPSSGFMTLDVASASIELPLERPLYRPPFKPLIEGVALDEGDADIDTASLYSQMFVDQAELSQNIRKALQERNQVGLGELIARHPLRHGLAELLTYLQLAGEWPHTAVDEETRERIEWEGESGVRRQASLPRIIFVRNE

SEQ ID NO: 30646 - protein, 211 aa, Chlorobium phaeobacteroides BS1
MMNTTEHQTPQPAYSPQELSPVVVALLKGVIYQEENAALWNALLNLQADIRDYVAVLGLELMLDEAEGYAFLRSRPAGDEANGDAMPRLVARRQLSYPVSLLLALLRKKLAESDAGSGDARLILSRDEVLELIRIFLPSGSNEVKLIDQIDATLNKITELGFIRRLRGEKQMIEVRRIIKAFVDAQWLADFDRRLEEYRQLAGNTTEENDD

SEQ ID NO: 30647 - protein, 1122 aa, Chlorobium phaeobacteroides BS1
MTEALEFGFISDDRLAGFRLQRLEVFNWGTFDGRVWTLRLDGRNSLLTGDIGSGKSTLVDAVTTLLVPGQRIAYNKAAGAETRERSLRSYVLGFYKSERQESLGGGTKPVALRDSNAYSVVLGVFHNEGYDKTVTLAQLFWMKDPTGQPARLYAAAERDLSIANDFSGFGTEITPLRKHLRAKGVEVFDSFPKYGAWFRRRLSINNEQALELFHQTVSLKSVGNLTEFVRSHMLEPFDVQPRIAALIRHFEDLNRAHEAVLKAKRQIEKLTPLVEDCDRHREINASTEELRGCREALRPWFASLKLQLLEHRLASLKEEMARHESAVERLEQQRREGQMRERNLRRTIAENGGDRIESIASEINTKQEELDRKKQKSSRYGDLVLQLGEAQATNVEEFFRQRAGHETMREEIEEREVSVQNDLNETGVSVASMQQEYRELTAEIKSLKARQNNIDDRQIAMRRELCQALEIDEEMMPFAGELLQVREEETAWEGVIERLLRNFSLSLLVPEHHYAQVAEWVDRTHLKGRLVYFRVRPPARRETMPDNPGSLPRKLMIKTDSPHFHWLEREIGHRFDAVCCDSQEEFRREKKAITMAGQVKMPGERHEKDDRHRLDDRSRYVLGWSNAAKIAVLEKNARQKRDELGELNHRMKVMQQEQSTLKERITILSRLDEYPDFHDLDWQPVAVAIARLEAEKRELESTSDKLRTLTMQLDEVEKGLEKTERLLDERKDKRSRTKEKISSARELEEQALLFVNEAASGTTDRFSRLKALQSEMQESRVLTVESCDNREREMRDWLQARIDAENKKLSRLNEQIIRAMTEYSEKWKLETREVDINIASADEYRSMLQELRKDDLPRFEEKFKELLNENTIREVANFQSQLTRERETIRERIARINESLTKIDYNPGRYISLEAQINLDADIREFQAELRSCTEGTLTGSDNAQYSEAKFLQVRKIIDRFRGREEFADLDRRWTVKVTDVRNWFVFAASERWREDDTEHEHYADSGGKSGGQKEKLAYTVLAASLAYQFGLEWGEVQSRSFRFVVIDEAFGRGSDESANYGLQLFEQLNLQLLIVTPLQKIHIIEPFVSSVGFVHNEDGRNSVLRNLSIEEYRTEKRNMQK

SEQ ID NO: 30648 - protein, 404 aa, Chlorobium phaeobacteroides BS1
MSRTTTKWTTPADLKTQVQKLWKRGTLLASMVKGDNLFPLRLTLKGPDSRQLSERFDEVRDWIGQLSTAAGPYRIVWRKVNHRVLGSNDIPSEIWLDSMEDALGLIGKQHEASKFTSLAILTREQEPCLLPWISKRPLRALELAAVWPLMLQTVTWLREHPRPGIYLRQIDLPGVHSKFIESHRSVLSDLFDLALPPEARNSGATGNINFCLRYGFREKPLRVRFRLLDPDLAILSVGTDQDITITREAFARISIPVETVFITENEINFLAFPPVRGATVIFGAGYGFRNLANIEWLHNRKHFYWGDIDTHGFAILNQFREFFPHAASFLMDRQTLLTHRSHWGMENQPETSTLTRLTSEEKALYDDLRHDRLGNRIRLEQEKIAFTTLLDALEKLESPPFSAT

SEQ ID NO: 30649 - protein, 511 aa, Eubacterium rectale ATCC 33656
MYMAKNVGICYYMSMTLKDRIPKEFYSLFRTKNMDAYMQIVVALYEENNEVYASLGLTREECQIIIADTISKTGIVWQTDYNEDESDKDSGSMDNHDDYNPDSEIDVIYDQATFAYTLTPSAILGRLINWGWIRSDFDEKLNTYVIAFPQYSQMYAELFKKLLVDDDSRERESILAVYSALFTYFSDPEKNNDILKNALYTSKNLGQLLSNMQDGMRAYFDELSRMKDFIGIQKVLIKEINNSDSRRYAILTTTDSFYRYKEAVKELISKILNQNDDRRAELEGILSQTTPGTFERKRYEYSVEYCDKASELVYKVEHEFDLIERKYNKLIEQKTIFAKRALARIHYILQEGADDEDNIVKLINLIDKSDKTDEILGALRNRMKFTRQFYNVTDDSFPGRRERGRSEFVPFVIDDASAGEDDMADFVPKPLYTKKELQSFRDKNMRDGMFVTDEQTVESMEDLEKLLFLWQEETNERMGEDTVSLDGEITKSDGVSYSRLVISKSDSKREA

SEQ ID NO: 30650 - protein, 241 aa, Eubacterium rectale ATCC 33656
MFEYMENVSPNEAENIRKTIQDLLRQTCILQMKCDPVTLIQRDNPRYQVCLRNREFISDYLAVLDCELVHDQQEHLFRITGDGVMLEKMTLLTARIVIIMKIIYRDKIMGEGLNATTTNLAEIREYGRNTNLITRKLTNQEWSDALLLMKTHQMIELPGAIANLEDNTPIYIYGTVNIFCSAMDINELVRMYSDEVELIKYDNESAATLEAAGLNTEGSSVNHTHEFAKNSEMEELPIESV

SEQ ID NO: 30651 - protein, 1111 aa, Eubacterium rectale ATCC 33656
MCLNNWGGINHKVLQFNEYVNLFSGKSGSGKSTVMDAIQVILYGSFSPTFLNKAADDAKNRRSVLSYLRGEQKDGSANRGDCDFCSVIALEIEDTGSHTFTCIGIAFEVRKNDSEIKRFVYFSHSGRMPEPSYVTADGFCYSNNDIKKLVNTRSQSADRRARGDVNRIYASKEAYLGTLYDVILGYIDPNRFITMEKSAIALRMTNGTGQFIRDYMFPKSDSGTIETISEQLDAYRQIREKIEDMRKRIELLKEIKESGQELVNIQSDIVMAETMIRCIDIEDMRARIQAAEDDKKRIEEEQDRLSEKADDIAGQQADLQQEYIQVCADLKSSDLGSKKDQLRELEKRSLMLTDNSRQWIKITNGLKAWDEDEVITDYVSNAVLNLIEEIVDGDVTEAKCQELHLKLESIKKDIEDELEDNTSQKNEITKELKEKKRLVDDMKNNRKSYSESLRSARAALQRDLSDRFGEPVKVQVFADMFDVQDEEWKNAIEGRMGRLKFSLITEPRYAHTAAVIFRDMKQFEDVDLINSKAIMDSEPKAMDGSLYEAVDTKEKYVDVCLKRYLGHIIKCRSVDELEQVRDGVTPDCYSYSNFIFRHLKKRDYTTNACIGGRVSKARLAEYEADVERLEKDQIQLMGIISSLKAQRDFECLKGEPEYFVGLSEASDELKAVNSQKNELEEIIRTMENGQYKELKEKKRLLEKNIDALKSAFSLNQQQINEKISQHEKIIGANEQRRAQLEDMLQGYVAREELEKQVQDMLQHSSGASVKSKQREKLIELQGADGNGGRQQSCVETLQTARYRYIKEFPSGQFSGAEKSNKAYEELLEKYEKDYEPEYESEFEEQCKVIYKSLRENVIGTIHGDIKAAKRHAYEINRLLRETNFSDSTYQIKIEPAKNENGQFYDMLMAEELDSKNPDNGGIAGQISFGEDDFYKKYEQKIKLLTDKFMPPRDEDEHLRMQKRKEMGQYADYRNYLSFSMYEQVTDENGRVIRENFVDDMAGRDSGGEGQNPKYVALLAGFAMLYMQQSNRDSKIKLVLLDEAFSKMDQERSAVCLKYARKMDLQLIVCVPDERLQSLIRNVDCVYGFRRHNNQISMMHIDKGDYLKLMEG

SEQ ID NO: 30652 - protein, 483 aa, Pelodictyon phaeoclathratiforme BU-1
MALDYSTLNLLRQNHPAWRLLCAQHVPLVAGFLHRVFIVPNVRILSQADLVEALEDELFALRQQLGADALPGTAQNYLNDWADNDKGWLRKFYPDGTDEPHFDLTASTEKALAWLEGLTERAFVGTESRLLTLFELLRQMSTGSQADPELRIAELQKRRDDIDAEIERIRAGEISLLDDTGLKDRFQQFLQLARELLTDFREVEHNFRTLDRRVRERIALWEGAKGALLEQIMGERDAIADSDQGKSFRAFWDFLMSQSRQEELSLLLEEVLALPPIVSMRPDNRLRRVHYDWLEAGEHTQRTVARLSEQLRRFLDDKAWLENRRIMDILHNIETQALDVREDIIPPGAFMPLDGSSAAIELPLERTLYRTPFKPLIAGVALDEGDAEIDTAVLYAQVVVDRAELLRNIRLELQMRSQVTLGEVVERHPLHNGLAELVAYLQLAGEWPRTTVDEGVEEQVQWQSSTGITRKATLPRIILLRNG

SEQ ID NO: 30653 - protein, 210 aa, Pelodictyon phaeoclathratiforme BU-1
MNHTESENSAAPFHGQELASIVVPLLKGVIYQEDSPALWGSLLNLMAAVRDYVAVLGLELILDESEGYAFLRSNSEGDPEGTNSAPRLMARRQLSYPVSLLLALLRKKLAEFDAGAGDTRLILSRDEVVELIRIFLPPASNEVKLIDQVDATLNKIADLGFIRRLRGERQMIEVRRIIKAFIDAQWLADFDKRLDEYLQRPVKGMEKDDE

SEQ ID NO: 30654 - protein, 1121 aa, Pelodictyon phaeoclathratiforme BU-1
MSESLEMGFVADDRLAGFRLQRLEIFNWGTFDGRVWTLKLGGKNALLTGDIGSGKSTLVDAVTTLLVPSQRIAYNKAAGADNRERTLRSYVLGYFKSERQENLGGGAKPVALRELNGYSVILGVFHNEGYDKTVTLAQIFWMKDAAQPARLYAACERDLSIAADFSAFGTEISTLRKRLRGAGVELFESFPPYGAWFRRRFGIENEQALELFHQTVSLKSVGNLTDFVRLHMLEPFTVEPRIAALIQHFEDLNRAHEAVLKAKRQIEMLGPLVADCDTHHTMAERAEELRASRDSLRPWFASLKLELLEKRHVSLHEELNRHQITIERLDEERRTLQGRDRELRRTIAENGGDRIESIAAEIRQHQQELERRNQKATRYGKLASQLGEHPATNAEEFYQQRAGHAAMHEATAEAEVRVQNDLNEAGVLFTQGRQEHELLSAEIKSLKERMSNIDEKQIAMRRSLCKALNLAEVEMPFAGELLQVQEGEQLWEGAIERVLRNFGLSLLVPDHHYPKVAEWVERTNLKGRLVYFRVRPLSRSEQLPDHPASLARKLAIKGDSPYFDWLEREVAHRFDLVCCMSQEEFRREKKAITQAGQIKSPGERHEKDDRHRLDDRSRYVLGWSNAAKIAVLEEKGKQQQNELTKLAGHISTLQQEQKTLKERLTILSRLGEYPDFSDLDWQPLAVAIARLEKEKRDLEATSNILQTLTEQLAAVEQKLHETEQQLDDRKDKRSKIEQKISVITELQQQTAALLDEAGGEAAARFPLLQLMRQEAFGDQSLTVESCDNREREMRDWLQAKIDSEDRKLSRLGEKIIRAMTEYKEEWKLETREVDVNIAAGSEYRSMFQQLQADDLPRFEGRFKDLLNENTIREVANFQSQLARERETIKERITRLNESLTQIDFNPGRYITLEAQLNLDADIRDFQSELRACTEGTLTGSDDAQYSEAKFLQVRRIIDRFRGREAYADLDRRWTAKVTDVRNWFVFAASERWREDDSEHEHYADSGGKSGGQKEKLAYTVLAASLAYQFGLEWGAVRSRSFRFVVIDEAFGRGSDESAQYGLQLFAQLNLQLLIVTPLQKIHIIEPFVSSVGFVHNQEGRCSVLRNLTIEEYRAEKERSVE

SEQ ID NO: 30655 - protein, 391 aa, Pelodictyon phaeoclathratiforme BU-1
MNWTTPAELKAQVQKLWDRGLILSSLIGGESVFPRRLTLKGPDSRELSNSFAEVRDWLARLTSAAKPYRIVWRTVNHRILGANELPAEIWIDALDEALVWIGKRQEARQFAAMVTLTRDWQPALLPWLAKRPLRALELAEEWPRILSILAWRLKHPRPGIYLRQIDLPDVHSKFIEGHRGVLGELFDLVLPPEEIDATATGAIGFCRRYGFQDKPLRVRFRILDPSLALLSTKSDQDITVTQETFAQLELPVTKLFITENEINFLAFPEVPEAMVIFGAGYGFENLASVEWMRNRVIHYWGDIDTHGFAILNQLRGFFPHVASLLMDSKTLMEHQPLWGVEPSPETGALMRLTADESALYDQLRKNELGHQIRLEQEKIGFEWLVEALGRF

SEQ ID NO: 30656 - protein, 489 aa, Stenotrophomonas maltophilia R551-3
MKHRERISRYRHLREQPQWKLLAADHAPEIIGLLQGLLMDGERTLPSSVLSERLQRALDQLNGDELSRDLPRTAQAYIAHWLAQGWLERRLPEGADQEQYELSTAALQAIRFADGLEQARVAATESRLALVIEQLSQLAAQTESDPDARLSALRDERDRIDAEIARVGAGRVIALDGKRALERARQIIGLADELTEDFRRVRDDFEQLNRDFRERIIDDEGERGDVLSQLFEGVDVIGESDAGRSFQAFWRLLNDAEQSAQLDAALEAVLARGFARRLDRNERNFLRGFTSTMLERGGQVHDVLQNFARSLRGFVQSRGYLEQRRLNQLLKQAQSEALALRDEFPAQRGIGRDLQLTTSRLRSWSQWKLHDPRSAQVDGNVEYNDAAAISLESVGDLVASSEIDFRTLRRDLHDLLDAQPRLSIAQALSQREAPQGLGSVIGYLSLGTRFGNVIAGEQELAEWRGGDGQIRRARIPLVWFTQERRHELA

SEQ ID NO: 30657 - protein, 233 aa, Stenotrophomonas maltophilia R551-3
MSWHEDPIDAAQADVAEDAYEAEPVAAVAQPRRGNDVYYLGDTGRLPLDARRALCQLLIGPSIDQLRHAKLWPALIRSEAAIRSSLADLFLELVLDRDSGVAFTRQADTEDVDAPVLLRTSPLTFIDSVLLLYLRQQLAEADARGNRAVVADAEMAEALAIYEKNLSTDRAGFNRRVASAVQKMKDNHILTRLSGQEDRHEVSPALKLLFSAEDVSQLSAVYRQLRETPAAEA

SEQ ID NO: 30658 - protein, 1126 aa, Stenotrophomonas maltophilia R551-3
MAISKHTPALFNEGLPDPRLQQFRMRRLQVHNWGTFNGLTEVPIAERGFLFVGRSGSGKSTLLDAMSALLTPPAIVDFNAAAREAERSGRDRNLVSYVRGAWADQQDSGTGEIATQYLRKGATWTALVLEYRAGDGRVVSLVRLLWISGNGTSAGDVRKHYMIAERPFDIAKDLGGFDLDLRKLKQKLADLHHFDTFSGYAERFRDLLGIDNEMALRLLHKTQSAKNLGDLNVFLRDFMLDTPKTFDAAERLVSDFAELDGAHQAVVTARRQVETLLPARAYYGDLKQMHRQRGDDEALKLGVDSFRESRRQALIEARLREMDVRDRGLLGEEAQRRAALDNHTERLAELELQRRQQGGERIEELEREQGRAEAERDRRKAKRDQAQEAAQQLQAELPDDAHGFAELVERAQNELQDRQRASAALDDAISDRLGGKRDDERRFGEVRSELEAMQRTPSNIPAPMQKLRARLAEETGIAEAALPFVGELIQVRSEEQGWQGAIERVLGGFALSLLVDDKHYNEVAEWVNRTHLGMRFTYYRVRRNDDAFAREPSAKSLLHKLELRDHVFESWLRRELGKRFDYECVDAKQLRNVDRGITREGQVKHPGDRFEKDDRSAVGDRRRWILGFNNHDKVGAFEREAQELAKRIASCETDIARLRGQRDRDNERRLACHELVSISWNEIDIAAPQQRLSDIEATLRDLREGNADLAKLAKQIDAVRADIEQSRRTYEDVRVERGQLVKERDRLDRARQQSRALVLPSLAQEHEAGLAERLQEQGPLSLETLEAHMRQVSNALNEQLSSSQQDLNRIENQLIGCFRRFIQQWPEESGDFTVSVASAEDFLARLERLERDGLPQHEERFFDLLQNQSKNNLLALQRHSAEARKSIGQRLDEVNASLEQVPFNRGTLLTIELNDRRLPEVGEFHLQLREVLSQQQTEQRELAESQFTVLRQLVNRLGSQEGEDKRWRELVLDVRMHVEFIGVELDAETRQQVEIYRSGAGKSGGQRQKLATTCLAAALRYQLGGADSQLPSYAAVVLDEAFDKADNEFTALAMNIFDNFGFQMVVATPLKSVMTLEPFIGGACFVEISGRHDSGVLLIEYDEEGKRLKLPERSRQQANEPEEAEA

SEQ ID NO: 30659 - protein, 450 aa, Azotobacter vinelandii DJ
MEDALQALSEMLAAYASQELYEIDPDATHLQAGRELREWIKRRLVVEREGRIYATDALESAIQFVDSLDSRIMTSTASRLSVVQREIENLETGLNPSPTGRIASLRRRIRDLEHELEHVEAGHVIVLDEAQAIEGIREVYNLATSLRADFRRVEDSWREADRALRQSIISEQSHRGEIVDRLLDGQDALLNTPEGRVFESFQQQLRQSAELGAMRERLRTILRHPAVPKALNRPQQRELRWLALRLVRESQAVLQARARSERDVRGFMKTGLAAEHHRVGQLLNDFFTLALSVDWQRQAVRRSAVCLPPVGVAITGVPAIERLRFKTLDDDDTGELDLSLKPAGLEQIDDDFWDAFDGLDREALIHDTLAVLLEQGRPVSLGELASLLPPAHDLETFALWLAMAREAGIEVLTEERQIVDLVDEDEQRWRFNLPYVGLDHETLKDIDWEL

SEQ ID NO: 30660 - protein, 220 aa, Azotobacter vinelandii DJ
MDDEQTVISAAVQVDERRTPQRVREAVQEMLKYGLLEESHKPNLYRSALSSTEAVDRILEPLDLAMGVDEVRGLVFVTVRQGEVAEQDDWSHPLVRRQRLNLEQSLLIAILRQHFIAYEQESGTGANQALVAVDELVPQLQVYLGELGSEAKERNRIITLLDQLKGHGLVSALDAHDRVIIRPIITHLANPENLQALVAWLREQVEGATTPAADGEEDMA

SEQ ID NO: 30661 - protein, 979 aa, Azotobacter vinelandii DJ
MGAVLWFEGTSSSASDLKKLWLLSESPEQTLEHWLNQHHAGGMRALRQMEKDGTGIWPYPSKKAFLARLRDYFEVGENAFTLLNRAAGLKQLNSIDEIFRELVLDDRSAFERAAEVASSFDDLTDIHRELETARKQQRSLQPVADSWERYKALQEQLQDKQALEGILPVWFAEQGYRLWLAETRRLEKEHKQAELDQEQCRSQLEVQKGVVDQHRQRYLRVGGAGIDQLRERIADWVRECDKRSLKAEQYRRLAKGLGLADELSAAALKENQQQIAARLEILAQQITDARQKAFDAGLVQQGLNGRLQTLQQERAEVERRPGSNLPGQFHAFRSDLAQALDVDESALPFVAELVQVKPEELAWRGAIERAVGSHRLRILVPQGSSQAALRWVNQRHNRLHVRLLEVKEPSSRPVFFDDGFTRKLTFKEHPYRETVKALLADNDRHCVESTEQLRHTPHSMTAQGLMSGKERFFDKQDQKRLDEDWLTGFDNRDRLAFLAEQIREVNEQLAPAKLALDAAQDDARQLETQASLLKRVEELQFEDIDLPGAQSQLESLRTQLTTLTRPDSDLAMIKSELDKAEGLQDSLDQQLRQLIEQCVQLKTQFDQAASATRKAYNGAEKGLNDTQRELAKEYFPTLAPEDLGDIIELERKHTRELQQQLKSLSEKLSYQQAELAKRMSDALKVDTGALSEVGRELADIPKYLERLRVLTEEALPEKLKRFLEYLNRSSDDGVTQLLSYIDHEVSMIEERLDDLNSTMQRVDFQPGRYLRLVAGKVIHESLRTLQRAQRQLNSARFIDDEGESHYKALQELVGLLKDACEHSRTQGAKALLDPRFRLEFAVSVIDRESKNVIETRTGSQGGSGGEKEIIASYVLTASLSYALCPDGSSRPLFGTIVLDEAFSRSSHAVAGRIIAALREFGLHAVFITPNKEMRLLRHHTRSAVVVHRRGVESSLVSLSWEALDEHHQQRIKAMHEVAH

SEQ ID NO: 30662 - protein, 460 aa, Bacillus cereus B4264
MKKLFECIPENYFNLFTGKNRGFYAEVAFLLYEQFHINRAGILYSLMKDEIQELIETKEELGECIDVEDEMEERVQDSAERANEVLRRLKKLKWIDVEVRDQFEEFIVLPVYSSRILAVLKEICENRTIEYQRYCFTTYQLLTGVEAEERPASAILESEKYSEQLYDELTILLHNMKNHMETIAAKDDIQQVLEHHFGEYKKDIIDKSYHRLRTSDHVSRYRNKILERIQTWFLDDEFMRRAAKDAVESGYSTSQEEAMDVLSKKMYRVEEIYSNLDEICNQIDARHYQYLRAVLDRSRYLSTYNDSTDYKISYILEHIRQTDENILDSSPFRLVQFRQLQEASLLSPRKKKGVYEPEQHEVTEINEEMREELKAENLRRIEKVINRKKIRKFVLEAMKGRQEIEMSELDLQNEEDALYLIYVYLYGYSRDAGYTLSEESPDFITQRGYTFSNRTIKREN

SEQ ID NO: 30663 - protein, 197 aa, Bacillus cereus B4264
MQNILDREREEMEVVINYLFSHNFLLKEFQREKYQLAVRNKDIIKRYLKVIGWDFLVDEKHGCIVIASPHYEHRLKLKKDETIWLLVLRLIYEEKRSSLSISQYPFTTLQEIKGKYETFRLTFVSKTKLRELVQMGKQNQLLRPIDNDIELDDCRFQLFHSCIHVLQQGDLNVLYEKIKSYSEGGDHIEMDEETTIN

SEQ ID NO: 30664 - protein, 1107 aa, Bacillus cereus B4264
MKWMKKLRLINWHYYNDETIIFGKQTVISGHTGAGKSTIIDALQVLFISDERKIKFNSAAYEEAKRSLINYLRGKIGTEEKPFVREGYFTTYIVAEFYDEKVGESFVIGISIDVFKDDEKIKEYFIIPKSEINMISFFNIKNEKCYVETQADFSKKLRAQFPKAIVEKSSIQYQKALLHRFGGLHERFIKTFAKALSFKPIDNMRDFVYKNILDEKELKIDVMRSIFQTHEELQRELEELKERKEELERIDNIYMECVKLEADISIQEYVLRGLDYLLIQEEMSMCQKHIEQKEKELKKCELDQMKTAEQKEYARKKEIDYEIKIKDSAEQKRQKQLHEQIAQAKKECDDLERAKNVYVHSLEREEKDVSSLFNYQGNKYFSLSKDEKHLLEIGRDCLAFLSHNDGTGGNREEQTLNKLGESLKRISGRFYKSTAELEHRSVELKTEEKKLLSDIENLKRKKRSYPMSVEKLKGLLEKHLEGQSKVWILCEELEIKNDKWRNALEGYLNTQRFDILVEPHMFATALSIYEKEKWNFGLEGVGLVDTEKEKTYLGKVEKGSLAEEIVGGNKIVQARIHHLLGRVIKADNEQELRKHKTAVTATCMSYQRLVARQIPRKVYETPYIGAHAIQRQLEIKEENLKEIQKELQIVGYYIKEFKKWIEILEGKQSHYKNYTLNFSLNDRILGFNRNIDKWYSELNTLDLSQLENLHQKLEEWKKKYNQFNREEGRLFEQIGKMKEELQSVKSELWKKEKVAIEILEKWESWKFEYRIELLQEAEKRYNQAISTKKAYGAIKNKYENNKKENQNKYEEKWSFLESERKSYNEARTFQGIIQAKDNKQYEEALRKIANLDIPKFEQEIKETLQQAEEEFQSHFIYKMREAIQAARREFNQLNHALGRFKFRNDTYRFVIKPSEQYKKFYDVIMDERVQPEISLFDFGDEDRAEILNDLFARLVLGEHGENEEFVDYRNYLDFDLSINNENGTRFMSNLLREQSGGETQTPFYIAILASFQHLYRNKNTIRLVVFDEAFNKMDEERIQISLRLIKQLDLQLIAAVPDEKMAHMAAEADTAIIINRVGHVCFADMLSYPKEDGVIGLQEQDSLSLIE

SEQ ID NO: 30665 - protein, 406 aa, Bacillus cereus B4264
MDYKSKILSVLLNKYENSKTVHTGERSAQRPQFSFRQKHELSKAYNDEMDYTNRLEINTALKDLLSKGIIEVKWEKWEENRIAEKVYLQYDFIPLAYREAGIEPKFEKMNRILKVLEPLAIHSWSWVRQWYKEVQQSFQNKKTARIDLNDVKGYELLVKALSRLEGLEDSIPKRTFSQLVFGDTKLFETTIQNRLLIIYKRYGDIEYESDKEYLESIGILENIQPVYVKGNVDICIRGEKIALGSLPGGLGLMDETIKELEIQYVHDESIMLIENMTTYYEKIKKNNNMLFIYTGGFPKKNVQQLLKKLNVYLKKHPISVYHYGDLDYGGIQIFEYIKRSFFAELEPYMMDVTTYRKYINYGMEFSEGYEEKLLRMLENERYSLWHELIKEMLKEKKRVEQEVIVI

SEQ ID NO: 30666 - protein, 524 aa, Bifidobacterium animalis subsp. lactis AD011
MADVRSELAQLRPVYETGVLRMLLHKYSDIYIAMLRACFDPLTAEVPQERLLARMREAIGELAADGTYTPREGEDDMMAARRILKELKAEDAGDYAWVADSIDRRQHRLMCRLTQRAHRAIEALATLQQRTVSLSGAQVNSIIMEIESARKQLTVNVEERIELLEREIEERRHQIDNLKAHGIGQRPTREQVSDIINVVYNTLRGVPVDLRELVITERDNGDALRRRIDDGSMSSNDMLTFYHEEYERTYRLSDEGRRFNDAFQVMYAPQSREELNEALQDISNSEWLHGEADDLMSVVNREFEDIYDGIDDVRHQIRVTDESVKLLVRQQTDMQFRTMSRQLAKLFTQLGESVHAKGRYDIGTATTSLLTLPTRARETPVKTAAPELQMQADDGIAQVDLNGIVAAGGPRIHHMIELVAAHPVLIDDAGDALADSVVDIAASFNELPADERRESEIVGFLSYLGSASPAGAAGNSDGGQIPVPRESLWHCVTTDGRTRVWRTCALFVPGQVLKDFLDDTMVED

SEQ ID NO: 30667 - protein, 247 aa, Bifidobacterium animalis subsp. lactis AD011
MLSAEYEEGVADEAGMADLANVHALFDGDIGDMPAPAREAAIALKRNRSISGDMYHQALDYMEHVRRSLNNDMLVPVIDTYYEVMYAEPITADEYGIRSLKTRASLSAREAVMLAALRRKVLDYENVGAAAADWLISKEEIVNTMSTGAGPLAGRNSEEAVQAQVDRLIGSAKNNGFLAPVEDDEGMYVITKLVPVVLNPERIAAWLGADDASTAQPEPDGTGDDSDGSGHTGQDEHPEDDDMEALF

SEQ ID NO: 30668 - protein, 1165 aa, Bifidobacterium animalis subsp. lactis AD011
MSETSDIYASIELMPPHWALASRQLVNWGSYDGYHVFEPSTAGNDTVTLLTGQSESGKSTLVDAQVSLLYPANAAFNKASNAGRSDRSDYSYLLGLRGIRNNNGHDEPVYLRGRSGNGEPYAVWGAIVDHYVDTANSGALWIAKFMYLPADGAPESMVKLYVVSGYAIDPRLMDAHREERFSVPLIKQVYPGVTVYNYAKQFHEDIWKRFGLTESACRLLHRMQASDAPSQLDDIFRKGVLNEPRAVEFGKLAIDDYEQFAENFSSMERTRKRVRQLEAIASEFAEYESAERGVRELSTIAPEQGDSARIRTQWLDDRIHADITEVLPEYEQHATDCSASAQAAKERAEQMREQADSLNRQLQGMGGDEISRLEDRIRDAQRRQREVLGRRELLASRFSASGEALPESRGQWDALVAEYTQFESEYQQRKTELHGLQYPLIDAQKKAEQRTKALEKDLERKRQSKTRISSDMDEARNMIARATGLSPQELPYAAELMDVGEENEEWRTAMNVAYRSLATVILVDSCHENGFAAKVSQIPQEALPRRNWRFVDTSVHVEAEEREGWLSSKLTFNVESPFADWLRARVTEARYDAWCVEAIDDTNETTRQVQRDGQIKEGRKGSHGTKNMPAVIGFVTDAYLRDLEADIAEARKTRDAATRDLEQYDVQLNALEQRHSLAQTLQDHAWNDIDAYGVEEEIASLQQRVDELEQNPELAQLNATLKVQQQEMAKANSACYAAEDKLKRANAAVRSTRQWLEAYDRRTQSVERRPLNEACGRLLERGYLAYFGESTQSANERMGRILGLDGQSCTSLGGHVRENEACAKHVRELLGTLAQTVGRQVKELATQRDNRKRSCEASMRSYLDQYASGDERVSAEVENERYFRKDLEELKPGVIGDEATNVEYMNSLDKMLQDLVQLQTMLKLDQQRITEQIGKINHLLERYPFGARGGRLSIVVQVHRPDAKFTTALTGQIGRINAFKANDEHDVERCRKLFAGLAGLIEMLRGSFDEYAGNGRGNANLDPRKRSRFFGSVTNPDGVVESINSTGGGSGGYLQELTSFAYGAALMYLLATDNATEPSYATVFLDEALIKADGQYTRRALSVLPGLGFQVIVSAPESKTGEIMGSASKVIVARKDQASGRTTLMQGDLLGDADGDESSMGERSE

SEQ ID NO: 30669 - protein, 406 aa, Bifidobacterium animalis subsp. lactis AD011
MTDTATLKTPADVRGDVARIVQRELFAAESPWPRTIHIPWPKETQLVADVAGVHAANNALKEFAARFGCQTDFISRKMGTAVSLVAHIHVPDEATALAIAGPTLRRPRERVLARAAQLEQRCHVDHALAMDVVRRLNNESDVDFGLFVEAAQWFGRHWAEVPGLTAREIPLPGFSAKWLAGSRSRRRAAICTVLGVDRLPLRERPGEVRYRYMDQRFAAEPDRVATSVQCVPERPVSLAVIVENKDTYQAMGPIDGAVCVFGSGFAVNRVPELLPWLAGDGVRVVYWGDIDAAGFEILSGLRASGVACESVLMDRMTYAEYERFGTTRDAASHEIRCGEPKHGLHLSPEEYALYRDLCTGELAVPRIEQERIPIAEFMRLISAGRSDGSDGARADQCHSQSLRTPK

SEQ ID NO: 30670 - protein, 484 aa, Thauera sp. MZ1T
MPLDFTTLDTLRSHHPAWRLLRSDHAALVASFLHRVFVAPNVRGMAAADLAEALEDELYALRLLRGDDAFPKPALDYLNDWAAADKGWLRKYYRPGTDEAQFDLTPATEKALAWLAQLSERQFVGTESRLLTLFALLKQMGEGSETDPARRIAELQRKRDEIDAEMARVLAGDIPLLDDTALKDRFQQFMQGARELLADFREVEHNFRQLDRRVRERIALWEGSKGALLEQIMGERDAIADSDQGRSFRAFWDFLLSSRRQEELSDLLDQVLALPAVAELNPDARTRRVHYDWLEAGEHTQRTVAQLSQQLRRFLDDQAWLENRRIMDLLHGIESKALALRAAPPPGPVMEIALPGAAIELALERPLHTPPTRPAIAALRVEAGDEDVDPHALFEQVTVDKARLARHIRHALQDRAQVTLAALVAAQPLEQGLAELIAYLQLGSDAFTTTVDEATPEPIEWQASAADGAMVTRKARLPRVIFMR

SEQ ID NO: 30671 - protein, 227 aa, Thauera sp. MZ1T
MKHSMDDEDLAPSPAEPPGPAAAPDLSVLLIGLLKGVLYREADERQWSGLLQLQARVREYVAVLALELVLDEAEGYAFLRGRPEPADDDPAPRLPRLVARRPLSYPVSLLLALLRKKLAEFDAGGGDTRLVLGRDDIVELVRVFLPEGPNEARLIDQIETHINKVVELGFLARLKPASASATAPASFEVRRILKAFVDAQWLADFDARLAAYRAALADGKETPSDEP

SEQ ID NO: 30672 - protein, 1140 aa, Thauera sp. MZ1T
MNDPQSLGLDFVADDTLSGFRLQRLEVLNWGTFDRHVWTLQLDGRNGLLTGDIGSGKSTLVDAITTLLVPAQRIAYNKAAGADTRERSLRSYVLGHYKSERNEVTGAARPIGLREPGSYSVILGVFHNAGYDQTVSLAQVFWFKEAQGQPARFYLGAEHALSITDDFSGFGPDITQLRKRLRGAGAEVLDSFPPYAAWFRRRFGIDNEQALELFHQTVSMKSVGNLTDFVRNHMLEPFEVGPRIQALIDHFDDLDRAHQAVLKAQRQVSLLGPLVDDCHRHDALAADISALRRCREALQPHFAARKLALLDHRLELAAEEWARADAQVMRLDTLREEQAGRIDALKQAINANGGDRLERLAAEIRKQEQVRDARLAKARRYGELAAVLGASAAADAEAFASQRLHFAASREEARNRDAELQNTLTEHAVTLRQGKLEYDALSAEIDSLKRRRSNIDDRQIQIRAALCGALGIDVEDMPFAGELLQVREDERDWEGAAERLLRGFGLALLVPDAHYKAVAEWVDGNHLRGRLVYFHVRPPRAGELPALHPDSLVRKLAIKPDSPHYDWLERELAHRFDVACCATQEQFRRETRAITRAGQIKDPSGRHEKDDRHAIADRSRYVLGWSNTAKIEALEAQRRQLEARLGEVGSQIGRIEAERRTLAGRLDALTRLEEFTAFDELDWHGVAGAIATLEDERRALEAASDLLKTLNQQLADLQRIRVDTERELGAARERRAKVEQRQADAEALRTATLALVDAAPIDPELVPRLEALCAEVLGEHPLTVESCDNREQEVRTALQSRIDAEDLRLKRLAEKIIKAMAAFKQQFPLETAEIDASLEAGFEYEKLLAQLDRDDLPRFLARFKELLNVNTINEIANFNAQLARERETIKERIAHINKSLGEIDYNPGRYIVLESQASPDAEIRDFQQELRACTEGALTGAGEGDDEQYSEARFLRVKGIIDRFRGREGLSDQDRRWTAKVTDVRNWFLFAASERWREDDSEHEHYSDSGGKSGGQKEKLAYTILAASLAYQFGLEWGAVRSRSFRFVVIDEAFGRGSDESAQYGLRLFEQLNLQLLIVTPLQKIHIIEPFVASVGFVHNEGGSASKLRNLSIEEYRAQKAEMRAAAQAAPRAGGGASAS

SEQ ID NO: 30673 - protein, 441 aa, Thauera sp. MZ1T
MSWSTAQDLRAQVMRLWERGELLREGLPQDSGAPPCACLPEEESEGSGAQPCELPADAAAYTAVGPPAGHSRFPLRLTLKTPTSDDITRHFDAVRAWVAAISATPHVRLEWQETRHRVQGSQRLPASAWVDRLDDALAWIGKRAEDARFRALHAETAARQPLLLPWLHKRPLRALELAAEWSRLLDVVAWLQAHPRPGMYLRQVDLPGIHTKFIESQRGVLAELLDLALPAAAIDPSRTGAQQFAARYGFLDKPVLLRLRILDPALGLLPGAPCPDLALDADSFARLRLDVARVFITENETNFLAFPRVDKAIVIFGAGYGWEALARAEWLQRCPIHYWGDIDTNGFAILAQLRARFAHVESLLMDRATLLAHEALWGREDSPRPADVSRLSAEERGLYEDLRNHHIRPSLRLEQEHIGFGWLEKALRIVHAVDDFQPSDG

SEQ ID NO: 30674 - protein, 487 aa, Thauera sp. MZ1T
MTALRTSAALLALRGKPLWRLLAADKAPLVMGLLQSLLLDQDKTLSSSVFHERLAREMELLRDHGHELPQTAQAYVADWIGEGWLTRRFPPGASEEEFELTADAAVALRFINGILRPRTSATESRLANVMQQLSRLAEETDTNPKTRMAALTAERERIDREIAALERGGVKTLPDERALERAREIISLAEELANDFRSVRDAFDKLNRSLRQSLMESDGSRGQVLEALFSGVDLIAESEHGRTFSAFWRLLTDGEQSAVLLESLDEVIARPFAQQLELRERRFLQNLTATLMSEGGGVHDVVQQFARSLKTFVQSREFQEQRRLHGLLKEAQQAALQARPAVRPSAHIDYFFNLTSSRIRSVSQWELHDPTLSVADASMPEAEASELGLDVVEDMVRQSEIDFRTLREHLRVMLTSMSQVTIGQVLEHFPAEQGFGSVVGYVALGAKHGELTDKLETVSWVGADGISRKGRVPTIYFVRERALELLD

SEQ ID NO: 30675 - protein, 236 aa, Thauera sp. MZ1T
MGVGTDGFCPEAEASGGDSGAAFPGDSGRLPLETRRVLVQLLLGPAVDGRRQTKLWPVLVRDEVVVRERLHELFLELVIDHEQKVAFTRQVTADDTEIPVLLRRANLTYLESVLVLFLRQRLTQADTQGERAVVSLPELLEHLSVYEKDDNVDHARFVKQRIAAIEKAKKLSLLQKIRGADDRFEVSPTLKLLFPAEEIMALTRTYAALAQRTGTSAADDEVDEGAESDTGGEGDE

SEQ ID NO: 30676 - protein, 1124 aa, Thauera sp. MZ1T
MNSEMSATADLFGDAGAEASQFRLARIQTFNWGTFDKLFTFDISEKGYLFVGPSGSGKSTILDAHAALMTPPKWVDFNVAAREAERHGRDRNIITYIRGAWSQQTGDSGEYVSQYLRPDTTWSAISETYRDGRGRVVVLAQVLWVRGKSTATRDARKLYVVLQREFDVRELEFFPASDFDTRRFKFDLPDAFVRDEFSAYQERFRYLLGIENERALRLLHKTQSAKNLGDLNTFLRDFMLDAPETFELADRLVSQFQELNEAHRAVVDARRQIETLQPAKDEAERLEAARLAKNELDELSAGIDPYREQKRKSLLEEAIRLAEAEIVGQAAEAARLGELAGREFEKLRDLQDKRAGAGGNLIEQLTRDISTAEGQRRERLAKREKAQAACAAMGWAYPEDTTSFAGLVAESKQQVHAAPEWREQQADKQYALRQARDRKENDFKELRREIEAMERQRSNIPARMLDVRERLAKALNIPEERLPFAGELIEVKAEEADWQGAIERVLGGFARSLLVSDKHYSAVSAYINDTHLGERLVYLRMTEFLPAGRSLSSNSLVKKLNFAAGPYRDWLLEEVKTHFDYECADSVQAFRSAPRALTREGQVKHSTTRHEKNDRRPVGDKSQWVLGFDNARKLKLYQEQALALVGEIEEIKKALTALVDAGRLNEERLMHCQTLANLTWAEVDVGSVLERISDLQSRLETEREAHPDLAVLDAQVVEQDRLYKHAVNAANETEGGLRAKESVLASLEKRLSGLQEALLSVALTPFQLTGLDERLAQIPIPMELERVDEIVGRLERGIGAERTGLLTRIGEHEKKVERCFQTFVTTWPAEAGGLDPSIESAPDFFSKLARLIGDGLPEYEERFLRLLHEQSDQNLTRLSAQLDQERKAIRDRMDLVNESLKTAPYNPGTHLVIETTDRMLDDVRQFKQSLKESLSHSFSADPLMAERRFEVLNALVKRFSSQETVDRNWRGLVLDVRLHVEFVARELDASGLEVEVYQSGAGKSGGQRQKLAATCLAAALRYQLGGQDRALPMFSTVVLDEAFDKADAEFTSMAMNIFKTFGFQMIVATPMKSVMTLEPFIGGACFVHIKDRKHSAVVLIDYDEGAQRLKLNSDTPDDEEAAVT

SEQ ID NO: 30677 - protein, 398 aa, Thauera sp. MZ1T
MTKKLLLPEDVRALLQRRYTNQQKSWLIGEGQWPLSVALGLPTEKDVTADPAGVRRWVQAWAEWSSGGSVSWMSRQWGRLGTQQLPASLAFATPHEVAAVVGDGSRWEQVELRYQSITDRWPQLSGPAVVSKLFNVLAEYDDADFRRLFALLDWLERNPASGLMVRQLPVEGLDTKWLEKRKGLIADLVRQLRSVIPEGDFHSICGLRRQPNRVRIRILCPTLRHRVGGLRDLEAPTEELAALSLDPSTALIVENLETGLALPDLQGVVAFMKLGNAVSTLSQLPWIRDARGLYWGDIDTHGFAILNVARGVMPAVESLLMDEHTLMAYRRLCVEEPAQTSLLELPLLTASERSVFEGLITGRWGPRLRLEQERIPWDYALGRIRTATTYPMGAMEGS

SEQ ID NO: 30678 - protein, 480 aa, Desulfitobacterium hafniense DCB-2; identical to SEQ ID NO: 30431

SEQ ID NO: 30679 - protein, 202 aa, Desulfitobacterium hafniense DCB-2
MFEQLSEQDREKLRDLINRLLNVNFLVKELEREHYQNARKLRPYLDEFFKFLNWDFQLDERHECIYVFSKEGAHRLRLSQEESIALLVLRLIYQEKRQGVLLTAFPLTTKYEIRAKYETFRLPFPGKTRFLETIKLFTQYKLLQSLDDEVNLDECRFRLFHTLLYALDADSIERIHERIRAYDLEIDEEELLYEMDETASAR

SEQ ID NO: 30680 - protein, 1159 aa, Desulfitobacterium hafniense DCB-2
MKWMKRLRLVNWHYFQDESLEFGRQTLISGRNSAGKSTIIDALQVLFIADQRQIRFNPAAHEEAKRSLLNYLRGKIGSDEKSFVRERDFTSYILGEFYDDKARKSFAIGAVMDVYSDNKIDDEFFIIPDLELAELEIQKGKRTYRNKEEFHRYALGIRPKTQFFRGRQEYQKAFLNRMGQLERRFYRTFLRALSFKPIQDIREFVYQYILDERELQLNIMKENFELHERYQRELKDLEERKTVLEKISRQHEQAIKYRDIAATQEYVIRGLKHLELTEKREDLEQDIESSQNELKSVKERAALTEEQHREARERALEYYRQWSTHQLQKEKESLEAQIEDMQKTLADQKRRLEIWVAKVKGEIRLLEGLATAFAVDGEVWRQEDRRKLENVLGALRTALDLAGRPNLEWAQEDQDVLGEEIRQSGLFLAALQMGFLQTQTRLEDRIREQEAQQERLNQEIRGLEQKKRPYREEVLRLKALLEERLAGRSPVWIFCEEMEVLDEAEAWRNAIEGYLHTQRFDLLVKPQAFSEALRIYEQEKWIHRLQGVGLVDTEKEERYLGKRESGSLAALLQTDNPIIQARIDHLLGRVMQAADEQDLRRHHTAVTRTCMSYTNLVARQIQKERYEIPYIGSQAIVRQLEIKRRELRTVQDNLRQLQAELIIMKEWVSSLADRKTLYEGLAQGLELPKMVEQQEYELLEVQIKLEELDLSEVERLKQEYEEWHRREGQLVEAMKELSGKITGLDLEIGRKQTDLYLLTRREQEAQELWDGWKAEYAPELWEKAAERWQEAQRQTQPASTKLVNWEGSQKGNVTRKLQEFGRLRDLRQDYNIRYTYNGSLDGEDNASYQSLLDEVAGVDIPDYQVKLAEALKQSEEEFKSDFVAKLREAIEMARHEFSQLNLALKNFPFHQDKYHFEVRPSSHYKRFYDVIMDPDIVNRGSLFDSLADDKADTLHELFERLVRGEAGDQEEFTDYRRYLDFDIAVTTETGRYYFSQVLKEKSGGETQTPFYIAVLASFYYLYNSGKTLRLVVFDEAFNKMDEERIQTSLRLIKKMGLQLIAAVPDEKMQHMAPEVSTTLIVHRDGHHCFIDMISREEMLDSLNGDEENAQDSQDDGVEGKGADTETDAGQEAESGVSADPAWMQIRMQAQMQNQIQRQT

SEQ ID NO: 30681 - protein, 417 aa, Desulfitobacterium hafniense DCB-2; identical to SEQ ID NO: 30434

SEQ ID NO: 30682 - protein, 485 aa, Pseudarthrobacter chlorophenolicus A6
MPRSARSSADAISARLRDLELLTKGPAWALTRSAPWVIAVLQASFTRTRPQLPLEEFHADVDSFLEELRRQDPGLGGGANGKSFGDEWTRRQFLTRRNQSGQIVYEVTEPAARVLAFLDSLSSERSTLNGSRLGTLLGDVEKLANETNPDQSARLEALEEEIGERQQLIEDISSGEFDGLLDDDQAVEAAGNILDLAASLPADYKKMRDRIEELVGGLRNQIIEESLTKGATMAQVLEADKRLRQSPEGRTFRSFTAFLEDPQQQLRFRSAIGEVLGRQFADDLSPEDRETLKNLVAELRQQHSQIQRIYGKLSESLNTYVQSDDFRQSVRLRQVLREAEHAIRSLPYERDRPGLVPGPVLYNAGFEALSMVKLFDPDEFAAPPKLADPIAFSDSDRVRSPRTGKAKPVVVRAAMAGATTLGDAWGQLPPEEQHINTIRALLSEALHAGADFNRSDFEGLDFEQIDGSTRRAYLPVVTFAKDSDD

SEQ ID NO: 30683 - protein, 282 aa, Pseudarthrobacter chlorophenolicus A6
MTEEITTPAVEQVGSETLETVVETVETADDPMPASHVTAAVSPRDTFVDGAALFPGDTGVLNMKVRQALVKLLKGPYIDGGRDEKLWTVLLDNQVILRSRLSELFLSMQLDHERKIAVLRPVDPDVIGGSARSSILRQQRALSRVETIVLLRLRLLLDRHVTAQTDPTITREEITDLVAHYQPSGQQDALRDSDVVTRAITKLLARQLLLPTGLDDVYTISNALPLALPFENIGDIPAHIEALVAASTDQSGTEPLLDLDADPVAEPADGEDHDNDDTEAAK

SEQ ID NO: 30684 - protein, 1153 aa, Pseudarthrobacter chlorophenolicus A6
MTIPSMLPLGEETNPGQMRLALVQVVNWGTFHGAHTMRVDRNGTLLTGNSGVGKSTLFDAMLRVFDARPRSNEAAAQRSGGAVEDKRTTFTYMRGKVGDKAVGEGSASAFQRPGATWSAVGLTFDNAAGTRVTVSALFDLPKNGTESSVGRFYLIDNVPLDLDAIEGIADKRFTKGALETVFPHAQVFDVHKAFAERFRRLLGISSDQALPLLRVIQAGKGLGGSVNTFFRDQVLDAPATLTAADDVVEEFSNLMSIRQRLEDVRQQRDQLAPVPGLNREYAQALLDANRLRELAGGEFESYRQRLAVTVQQKILARFKELAQAKARELGAERSVRDGLAKNLRQLETDYNSQGGNAISAIEQSLENARVGLRLRRQVEQAAQQALSDAGLELEWTASGWEQAHEQAAARSAELKDDSQALQELRFEAFDAHASRKRELAAAEQELVSLKTRKSLLPPSSIENRAAIAAATGIPEDRMPFAGELMDLAEGEERWRPAAERALRNLATTLLVPGEHFRAVTRYLNDHNVRGALRAVDVSKPLAGGALAVEDAHDGDLLTKLDILASGAAAEAGEWVRERIALDFAYPCVEDPDQLAALDRGLSLGGVVKRNRHTVEKDDRFTSRQDYVLGFDNAAKLELVAGQVEDLRQEVAKAAELAQSREDSHQGMSRQLEALRRIAEDDRPWDQVSAAVAADELAGIEQRLKDALAAQADLEPLRATIEEVRQKHQSSTESAAVLQSEYKALDRQLTAADSLLEAARHRLAEAPPSDATVTAMEPYFADFGDVTEMHELDNLANRVRTALQGELHTAESRGQATAERLTRIFEGFVREWGSAISADHGTSIGAASEFEARYHAIVNDGLPAQEAEFRQFFNQRTHESFSTLLHLLDEERRSITSRILPLNGILSQVNFHEGSFLELDIKQTLPPTAKQFKDAIQNALKARHTRPAKTEPGAERDDDAELTARYKSLETLVKRLGSQAPEDRRWRAEVLDVRGHLFIQCKEHREVTAPSGKGKKAGKKTEVFMHADTGSMSGGERQRFTAFIMAAALSYQLGIAEQGFTTYGTVMMDEAFVLASEEFAGAGIKALHEFGFQLLLAAPENVIDLSRHLGSVTEILRDRRTNRSGVLTAPVIRPRQGEEGAWRSEANPVDIVLR

SEQ ID NO: 30685 - protein, 470 aa, Methylobacterium extorquens AM1
MLFTHLADDLFRPLASPSRAFNAALLLHLHARVFGDAAEPLRKSELLAAIGDFSAGWSQAEIADDEATPVDPIERRSAVFRRLIEAGWLVERRERYVPVVDFDPDARLLIEELARIERGETRSYGGAVLEVLSALESAIASPADRSEALRNAAKASRTFLGHLRGLAGAMRKLEERILREPDLSAAFRLYFEEFVERHLVSDYRTLHTRFNPFRFRSGIVREAGRALRDPLTLRALADGNLREGRAADITAAERMVRTDLVEILSIFEGLDPHLDAVAEVVARLERRISAALRYRDPRDSARIERAAAALRAVGAGEDDLAGLPLPQISLLRPPIGPPQLTNPRMPRRIIEYEPLPEIDIDPAIEAFIAAKDEFRRRITVTPERIVAYLDARLAQVKALRGSDIQVDDVDAFVVFQRLREIDVLFDGVLRSRYRVARIEGRVSNGWLDCPDFMIERIPPPAARRGAGKAG

SEQ ID NO: 30686 - protein, 211 aa, Methylobacterium extorquens AM1
MLEPFRAILDGEETPPPGSAAPSEEELTRALQVMLKSQCIYAATTGIGRSYELARHYAPFFRDYFACLGYRFEVAHRDQMVFLALPPDGVRHDAQGERLRKDETLVLLALRLAYEEGLRDHRVSTDGTVECTTDDIADAIRSAARTEPPDEARLIEILRLFARKGALRLGERDRAERVTPLMVMPGITVLSPDAWMDQVRAWASAGEGRGV

SEQ ID NO: 30687 - protein, 1159 aa, Methylobacterium extorquens AM1
MYRLTDIAISNWYLIRREQIRIRGAAALVGPTGAGKSTIFDAVGTVLAGNNASRLALNASASGRSARTVRDYCLGWISDPAEGGRPTREACETLIALVFENPASGRIVTVGLALAARSEEPKEETLSRFIAIGHRFEIADYVRETSEGSFVAPWAEIAADLRRRADTFEEFRTSGERFTAAVLATLREGAAVPDPRQFLRTFSNAVAFKPIFDTSAFVRSFVLEAEPLDVARIRQSIETWRRLLETIEELEKRLAHLSRICARYEGWARASLTAALDEMRAAGADLRRRILDHAEARRLLAETSERLRIARESVATSQGFVREIDTEIAARKALIVGSVAEARLAASHAGLAMVARDRRDLTNRLAGIVGLVQDAGRLSAIAGPLRRIDLQAARIVEACARSGLRREAPPEDILRVDGPLKGLLEGLAQMPDVSGILEEEAEDLALKARERENEVRGLDGQVNAGRSSAARLSSDTEAFREELGRLGIEAAPICELAEIVDPKWGPALEGLLGRAREALVVEPDRLDRAFALLESRKNQFFRCLLVKTTDTARRAARRFDDGPMGLIETDSDHAEAFLAARLGGYDLAPDDAALRNMSRAVAPSGRSTSGMAYSVVRPVPLMMTRGQRGPTAETRRRLDEAREEARTLRAEATVMREAARIAALLRSRLAEAPIDLEALRAEADAIEGRRRSLSTEQETVARADAGVIEAELKELQKERSAYLTELVQVLEPKRDAALAEEAGLKARVAQGREAARAAFLAYRTALKRWTSGDTVRIRLTGTVPADVPDTVAGIAAARADRAALDTKALASLASQARASAREAADSVRNQGRAAERDLAEYCAAWRVENPLGSGEQPASFGYAWATRERDEVAGHELRRYRDQSLRAEAEMRRLMTEDLLTRLADKFERMRARLDALNERLASQTFTGQTYAFEAEVDRRYAAVHALATEVARSPDAAQAVLPSPDNGAEGGPDNSPLAAALAEITALIEGEENAARLADYRNYFVYEIGMRDRAGNRTTLSSRALRGSGGEAQAPFYVAIAASMASAYYPGDRPGDETPGLGLCLLDEAFSKLDVRNSQSLVDLFRAWGLQLLIAAPEDKRTTLTEVMDTVVTVYKSPDLGSVRIEAEHPLETAKRALAEINPDRRGIDAFRLPSAAE

SEQ ID NO: 30688 - protein, 524 aa, Bifidobacterium animalis subsp. lactis Bl-04; identical to SEQ ID NO: 30666

SEQ ID NO: 30689 - protein, 269 aa, Bifidobacterium animalis subsp. lactis Bl-04
MAMDDSTGQGIAGDANLGMVSKVLSAEYEEGVADEAGMADLANVHALFDGDIGDMPAPAREAAIALKRNRSISGDMYHQALDYMEHVRRSLNNDMLVPVIDTYYEVMYAEPITADEYGIRSLKTRASLSAREAVMLAALRRKVLDYENVGAAAADWLISKEEIVNTMSTGAGPLAGRNSEEAVQAQVDRLIGSAKNNGFLAPVEDDEGMYVITKLVPVVLNPERIAAWLGADDASTAQPEPDGTGDDSDGSGHTGQDEHPEDDDMEALF

SEQ ID NO: 30690 - protein, 1165 aa, Bifidobacterium animalis subsp. lactis Bl-04; identical to SEQ ID NO: 30668

SEQ ID NO: 30691 - protein, 406 aa, Bifidobacterium animalis subsp. lactis Bl-04; identical to SEQ ID NO: 30669

SEQ ID NO: 30692 - protein, 490 aa, Corynebacterium aurimucosum ATCC 700975
MSVEARALSLRRLMRDSAAIRLLAADNAPVILALIAEYFPRGTRARPAAEVYELMVTDFEVLASEFSMPRTPQNYCNDWVKAGWLIRKSGKSSHGETLEPSEDALSALEAIERWEAPVTAVTASRVESISSALQRLARDTNEDIASRVASLEAERDRIDREIEKAHLGQFESLTAAETEERVQDVLNMAMAVPSDFARVRHELEALNHQLRRQLLDPEGYRGEVLEEIFNGVDHIAESEAGRSFRGFYSLLMDRERNAWLDQWIKEVLESEPGQQLAPDRRQRLRSLFRDMEETSFEVNQTMTGLARSLRNYVSSEQFAEDRRMIELLREARGMAIDAAQNSELKAFHRMDTPLQRIGMSIHSVSRIRLANPGREVVEETPVAYHPGTEDPQALYELVRESEIDFEELHEAVRMAVAKSGPCTIGQVLQAHPPTQGLASVVGLVHIADSHPLPSLKEGHETVTWTEEDGTVRCAQIPTMYFDHTTVKELQ

SEQ ID NO: 30693 - protein, 226 aa, Corynebacterium aurimucosum ATCC 700975
MTAANNPRVDAAHEPPLWEHDKGTLTYHSRRALVQLLQGPLIRAQKEPVLWAAIISDEENLRARLHEVFLELVVDETEGFAFTRMVEEDSLSIPQVLRTDKLKHIDTAILLNLRQELGLTLPGERVIVDVEDLRESIGYVRAVDNRDEAGFTKRFNAAMKRIQNDYSLISATETEGRFEVSPVLRQLFDASTVSAIRDEYARLAQAEDQDEQEPEQMQLQEDASDD

SEQ ID NO: 30694 - protein, 1130 aa, Corynebacterium aurimucosum ATCC 700975
MTKNTTYYPGQFRISRIQLINWGTFHGYFSIPVARKGFLITGGSGSGKSTLLDAMSAVLVPQSHVKFNAASQQDLGRHNGRNLVSYVRGAWRQRENTQTGEIAPEYLREGATNSVVALTYDNGAGKQHTLIAIFRLNGGENSVGQIKKLYGLVPGDEDIDKLSPLLTRSLDTRKIKAMYKGPGASFTPTYTTFADRFRKRLGIKNVEGQLLLHRTQSAKSLSSLDQLFRDYMLDGPATFEKADEAVEQFEDLRQAYLRVEDVKAQIDTLAPLPQLHSQRTGAEADKAQAEAMAEALPAVRARLVAEELDVRIRALSAQLAEAQSQAASLEADVAHLDDAERLAAVAVSQLSSGELDALRAKIETAEKEIEHRTKEFQRLSAAAGQWTDHYELSPHGFAQLQANAKIRIADFEADFEDLINQQQEAGVAARDAATACSTLDSELRSFSSRRTNIDKSLVELRSQLARDTGYAESELPFAGELIDISPHQSEWEPVIQKLLHNFAATLLVPEAAREAINQWVNSRNVGTRLEYRTIPEFAPAPAAARSPRQLIHKLEFQDHAMASWVRHHISRRFNYECVDSVAELEKVTKAPAITRDGLESRPKDKDGSTRFIKDDRTRFNGTAWYRVGSTNTAKIELLRSHLTEAKATARATAKQVQDLNRKMDILRSQRDKAQQVLDTSFQDIDTASAEARRRDLQEQFDSLASSPEAQALAAAHTQAKQKLNAARTKLNEAQKHLGNVEGELERSTTRRRGIGPVPEIADKEIETAVVEALHKGKRSLTIDDIDARRDEVQASLQQTSRTAARRIEEANDKIVSVLHAYLSQWPAEAADLEPQASFAGEGIEKLKFLRADRLADFRARFLELLNGQTVRNLSHLATDLRRARSDIEMRMEYINKSLERSPFNGERTLRIDVKDARGQVVQEFQRDLDAATSHSLGEIGSDDSEAALARYHALDKILSRLGSSQPEDLRWRNVVLDTRRHVSFIGRELYPDGTTANTYQDSASLSGGQAQKLVFFCLAAALRFRLAEPDQDVPTYGSIILDEAFDRADPTFTRTAMSVFTSFGFHMILATPFKLIQTLSPYVDGTIVVNYDEPTIDGRPQARSGYKLIDASTTHDPQQPDPKDSDDADS

SEQ ID NO: 30695 - protein, 378 aa, Corynebacterium aurimucosum ATCC 700975
MRTPKDLQAHAAKYLRNHFAEALAEPAALNLDWPLHPPTATSAAHDITATKDFIRAWQRWPHQEEVIYESRNWSRAGLGTNDVPTRAILTGAARIAAAAGLMPDYNRALQRAQDIAAIFPDTPEFAHTVHRSYNQWKDLSAYDLRCLGPCLTWLRANPHSGEWERAVPVEGVDGKWIGNHRRLLLTLLAPFGITDLGLRRSDARLRLRYLNHAPALSEIEIPLADAVKLFPDAPPRVLIVENKQTFLALPTLADASPTTIALLGSGTAAHQLQALDWLHRTDITYWGDLDAAGFAILNAVRAHFPHTTSLLMDPATVTAFQHLAVPDPGDGSATLTHLTTEEQRAYRLLFTAGRLRIEQERIPFAHVNAVIHATLAAA

SEQ ID NO: 30696 - protein, 524 aa, Bifidobacterium animalis subsp. lactis DSM 10140; identical to SEQ ID NO: 30666

SEQ ID NO: 30697 - protein, 269 aa, Bifidobacterium animalis subsp. lactis DSM 10140; identical to SEQ ID NO: 30689

SEQ ID NO: 30698 - protein, 1165 aa, Bifidobacterium animalis subsp. lactis DSM 10140; identical to SEQ ID NO: 30668

SEQ ID NO: 30699 - protein, 406 aa, Bifidobacterium animalis subsp. lactis DSM 10140; identical to SEQ ID NO: 30669

SEQ ID NO: 30700 - protein, 476 aa, Teredinibacter turnerae T7901
MFFSSERQHFFKPLNSKYREQVVQCLCLLYQRLYSSNADYGSALGREQVLEILEEALARAPVLDAQDNEDETRFKNTREQANWTLKQLLDCGWLEKQVDTATMQSTFPFSRMGRLFTQPLVESDTTQIRTRHRNTRNTLNSLEAFLTRGEVYDLLDAFEYSERIVTDFTDIISELEERKRQLVQEVESQQLVQQATDQFFEFMEKRFQPDVSVRLSADSVEKHRDQIHKAIGKIRRKSSDSKRHMELQLRRLVPEIARNNHSALWFILDTIERRMSNAAEIMLPALRRALHSFTKRADIIIRQLSYLNSQPNNDLLQVCQQLQKLSPAQWDERMSRASEQLSGVKLQLIDPAQIKLLERRKTPPLNTAVNEEETPDQDVLRESHIQQMLDQAFTINNQQVREYLVSALRAGRAISTAALPVSSAQDLLAVAQIVEVAAINNLSSDYAFRVEPTGRSTHSEFYAEQDEFIIELDNQQ

SEQ ID NO: 30701 - protein, 233 aa, Teredinibacter turnerae T7901
MLDTFISEQLQTCGLRKEEFSELLIRLLDYGVICREESQIEATLYDRYLQCTDLVEAYLALVGIRILHDRQFNFVRLFPPGAEIPGMSDDDNSPFNSGFRVRPNQQEIAVILALRAEYEKALREGQVDERGQVLIPLESLAIAMNNLLKRHLPETQVDRKRLFTRLRQLRLIQFNQEDDFESNEIWLSIQPSITSFVTEAVLNTLGEPLPESEEPATSEAEPESTMFNDEAPQ

SEQ ID NO: 30702 - protein, 1208 aa, Teredinibacter turnerae T7901
MFLKKGILINWGNIPHLEFSYGPINLFSGGNGSGKTTAADAIQTLMTAAHENLFNFNPGQDETTQRGRGGKQVRTLASYVLGCDDGSYARPQAADGYIAGVFHPTAGEQGDVFTAVMCMRAHVDAAGAQKQARLDDLVFLILPGEQLTLSHFVRSYPDGKHIVPITEIANLLRQEFGSKSVEIYDKKGAYLRRLYGALRGRKEAVSDREAKHAARTFSNFMAYKPVKSINEFVAREVLEPKDLGDAIRSVSELMKTIHQMESDTRALLNSIDTLEQAQTSTSQYIETWIERSVTDYTEAARKMAINQQAYITAKNQQAETREAIAENEEAANLCEQRKRQTHEEVIALEAHRQGIGALKDKDQLEQKIVDANRTLLEKTRPLLEQHQQLEKNLQAGQVLARRLTEMSLGVEIPALERKAFRSLLKSVASNTAFSEFELTRLLGNDWIDISPLEHYLEQVVSAEADHRRLAEQLHQPGDSIRDAVAVIASSHKRRYEDLQQKARAKHKEIQRLEASKVSYPAYVETALAAISKQFPAANPRVLCDFIEVLDARWQMAIEGYLGGARFSIIVEQDFEADAIRVVRALSDSKRNRARVIQGYKAHKDAERLSLANDSIVSVMSFSHKTAEDYLRASYGNVLCVEDTETLRTTARGLTPDGLASGNYSMWRCDLDDSELVFGQGARERALKAKLREAEALASNSTALEKEQQLLADVFNHIDAIRPASCGKVVREILDLHRQIESAQSQLDNLDLSDFKHLEEQLHTLKAEYREQESQQRDLNKQAGRLHEREQQTARKAKDLADALELFQEAREAAEVAIERIADWHPDFDADTALAQADQAAAQASGDFSYTDILATLNARLEETERKIYQTVLSHNQQCNPHDAIVYDTGYGERHDDTFFQRLVKLRSEIGLIHNRLKNNVLIDKHDKIANLKDTFNTAFVTNLCHSIYQAISDGKRLLDDLNQELEHHRFGADRERFYFGWEWVPEYREYWRFFKEVIDLPNLGDGASLFDAELSEKACAVRDKMLTMLLDPDEQVALRELNRISDYRNYRQYEIYKEPEGKAPIALSQYGTGSGGQLETPAYIIRAAAVTSAFRFGEGHTHLRMVLVDEAFSKMDENRSREVINYLTESLGLQLLFIMPTSKSGPFMDLISNQFVFSKCPSATPIGELNTRVLVDRKTCNQEKIMELWANHRRLVRHQGMLDFMEGL

SEQ ID NO: 30703 - protein, 385 aa, Teredinibacter turnerae T7901
MNAEEKGFRSRPRWVDEEPMVAGLLDTFLHKLEHGHRLTMRVNSKTMPELFDFNNEETKYLWSLVKSLNNEYHILSIRYGRTKPFQEAYDNAQLLFNDEKEELVRDWLNRPALDPYSLVWHEALRKMADKFEDHGQTFSEQIVRLPDRGAEQTLRAFARIGGELQKPITLRALSARCFWGDSKFLDHREELVRTLYPNSSHNLQTRPVLMTVDLASHFRRVLFVENQDTFLALSKMALPEVSLVYSGGFRGASARIRTSGNVAFSYLGITDEDTRNAFERWWLGLDDDKVAKVYFWGDLDFTGMAILKALRVCFPKIAAWKTGYYPLLKRLEQGLGHDQETSGKERQKDPELTGCEIADLELLPAMRTAGEFVDQEAVLMRELEI

SEQ ID NO: 30704 - protein, 487 aa, Micrococcus luteus NCTC 2665
MSSLAQALRVHRLVQDDVALRMLRMDSLPLVAGVLATHLGAPNASLPTHELHDALDAELDTLRDHLDLSGRTAKAYCEDWRQAGLLERRIADEAREEVYELTPAARQGLRVVEQLLAPRASVTESRLVSLLTALHQLALETDPDTSRRLAALRAEQQALAERIERIASGEDTVLDERRAVERLDDVLTQAADLPVDFARVRARFGELNQELRRRILTDEGLPGDVLENVFRGVDLIESSDEGQTFAAFSRMVRDPAMSAAFQADIRAVLERDFAADLPPATRRAVRGLARTLQDGSSAVQDTLTEFARGLRRYVLSQEYHRDRRLHVALREALSAAADAAPATRPYRQTGRDLDLTGMSLRSVGEISLHDPREFDVGPALADAAVATVDMAALRALARETEIDFTELRENVNRTLEGKDGAPASATVADVLELHPATQGVASVVGLLSLAAQHGQVDPDAVDLLRWPAAAGMHSAHVIRHRFTERLP

SEQ ID NO: 30705 - protein, 226 aa, Micrococcus luteus NCTC 2665
MTPDSDDAATPPATDAAHTAGAAPTLWEGDLGTLGEQSRRALLELLQGPYLSGRRRPQLWQALIADEAAIRSRLHDLFLDVVIDQHDEFAFTRRVATDEIAVPAALRSKSMTFLDTAMLLVLRQHLLTAAGERRVIVGRDEVFEQLAVYQQGDDSGWARRLNSSWTKMLNSFSVLQQLEDDRAEVSPVLKVMIGPEEARAFTELYREIAAGQNDDDADVTTQEDDR

SEQ ID NO: 30706 - protein, 1118 aa, Micrococcus luteus NCTC 2665
MTAPHPAQEQDTFDLGIEFPGRDTADIRQWRLEEVQIANWGTMDGRIHRFPVSRRGHLITGPSGSGKSSILDAIAAVLTPDKWLRFNQAAQGGAERTATRGLVSYVRGAWTRRQDEDEDRVVSAYLRPGATWAGVVLTYRDGAGGVVSLCRQFFLRGTAMSRADMKDLCLLERSAVDLAELQTLIDDGIRTRRVQARWPQAVVTTNGGHGPFYARLRSVFGIRDDAALHLLHRTQSAKGLDSLDQLFRNHMLERPPTFAMADRAVEEFGALRTAYERVVDLRRQRDHLLEVRTAAQEYEAAVAEESRLRRLEAAIHPYHQARFLAEIRRALEEVQASLAGLHAARTEADAEQERAEQRRQHALIALASVGGDRVAELGRQIDAAREQHRERLARRAVLANRLRAADVDAEPSTAVEFGELQAAIAADLEAPPEHPGPSHAQLTELSRLREAVRELEADITALRRRGSTVPRHLASVREDLAEHLGVRTDAVPFVAELLDVDARHQEWTGAIERVLAPLSLTLLIPTRLLSAARTWIDRRHLGVRLRFEEVRPTRAAIRPASSQDSLVHKVTVKQGVFHDWLQARLSERFDLACVSTAAELARHERAVTAAGQVKLSATRYEKDDRFRVDDRSRWVLGDPAAKLEVLVEERAARQAAFAVVEGEVQRAQERADAERRRRATLRSVLETPWTDVDHAALERRIADLRAQADELSAASGDLQAARRRDEAAQQDLRTARQAADEARLAAAQAERRRAELTQEARELEAESTGREPLPAELTAELDARFRAVRRSATRSALTESADLVRRDVSALAERARSAGAQAGERCTVLTTQFSRQWAVAAADASPGVEDRGTYLAILERIVGQGLPEHEDRFHQILHERSSVLFGELHRAISTAPGEIEDRVDPINSALRRSPFDEGRFLHLRVRVRRPEAAQQFLRDLSAVAENAWADDSLDDAERRYTALAGIMDRLASSDHVDRVWRQQCLDTREHVTFLAQEVDDAGAVHATYDSGAAMSGGQQQKLVVFCLAAALRYQLAAPEDPRPRYGTVILDEAFDKADARYTRMAMDVFVEFGFQMVLATPQKLLQTIAPYVGGITTVENPTRRLTQIAEVMWEDEEK

SEQ ID NO: 30707 - protein, 426 aa, Micrococcus luteus NCTC 2665
MVAPEAARELARRALARSHRGWTLGEVPTPAWSLPLKPPTEQVVLADPQAAQSWARGWRAATLPAGIRVEWAERSWRSVGRQQVPVRVHAVTPDALVAWVGGREAREQRVFAERVAAMRRLAEAWGGSGPSAAGGAGSAPQTQDDDGEAAADPRELTLAAALRRHAQRLTDLSEPDFLRVVAVLEWLRTTPVQGLRPRQLPIRGVDSKWFGAHRTLLEALHAPQEGGLGIVDAHPTVRVRILDPALRPEGLRDLEVPLEQAAAWPIAPARVLVVENSETLLCLPDAPGAVAVWGRGFDTAATVLPWLRGAELHYWGDLDSHGFAILHRYRTRLPQLRSVLMDVRTLEAFRDLCVPDPTPFRGALATLTSDEARALERLRAEGDVRLEQERVGWDHALSALDAHFVFCDAGDRAAGGEDADGRRIAS

SEQ ID NO: 30708 - protein, 480 aa, Variovorax paradoxus S110
MQFFAPPREHFFRPLTHDSRELCAAVLRQLHERVHGANADYAEALTRDVVLEVVLRSLSDPALRALAFDGGRTASAEEERGYAGELLRKLKEYGWLEDYRDPIDLKPTLKLSRAGKAFSETFASLDDSRAKTRQRNMRSARKALSAFLDTRDADELLDAHEFASRVVQDLQDDIEYFRHLIQSLTREALTQKVAWGEFNEFIDKRFAREYAVRLVADSVERHRGQIVETLDEVRALTEDVRSQSDGHLLQRAPWLEREAQGRSPMLWLTDRIESMVEAACGLKLPMLRSEMNNYVRRFTSLLRQALSLDYGAESALGRTMAWLKDRPESEHDLLLDVLAARLSTTEIRLAGGVLRWTIRNRELAQEEQAPLVVDDESRLNAALRRAEAEAFSFSDQDVLQSLLPYLAKGPVTLAALPMATAEDAVRVLHAVGAARSAEGRRLMRARKSTNQMQNAFFQADDYELEAEVQSTVQASQPVRS

SEQ ID NO: 30709 - protein, 229 aa, Variovorax paradoxus S110
MLQSISQFIENRLTTEGAGNVKPARFAELVGRLLASGVLWRDHSRPEAALYDDAAQCEQLLREWFGCIGFVLIHDTDARLVRLYPPGEGGAEEEEDGVRKLRARLSRDFAATVIALRFLYTEALTGRRPLVDERLAISLEELSQAVVSLLAHRLPASATERMALLRDLRKHRVVHFIEGDDAGDMQMGLAVLRPVMSFVSDEAMEEALRLVGHKAALLSPSPAHDGSAL

SEQ ID NO: 30710 - protein, 1228 aa, Variovorax paradoxus S110
MKIAKLLTWHWGSLEDREWIFADTVLLTGESGSGKSTLLDAIQTVLTAAHQHLVQFNIGQDESTQSRRGGKEPRTLAAYALGQQADGVFLRSRSTSYAGIVFEASRHAGEQSPPFTALVGVEAFEDGRRPVLQGSPQFFIVRHALSLDHLARRNGEALARSPLSLKELYVQLQHRLQAGTDTVVQRFPDKGGYLQHLYGALMGKTAVGENDAVRAAKSIVRAMAYKELGNVNDLVRDEILEPHDFSRDLEKMRELMRSIASLKAEADRLALNLERLGVATESAQSALDESRRFVVATIAHALRARSDTRDELASVQRQIATQDKRQAQLQEKLASLAAQETQLREQLKLVEKRLEESDVAREKAMLDNQIRLQADQFRLHWNRVQEAVRGIGVMATKLQQLLALDLEAVPSLAAAVELMRPAGAAVLKPWPAMAQAYAREAQLDVELPAFELEAFDTHLTALQRGIHDGENSLQGTVVLALTDVGVRLRSVGDETQQLDAELRVLQTGRSLGLPAARDATAAVVLIEQELPQAHPYMLAQLVEPRAGTGWQNAIEGYMGGDRFAIIVEAGWEAKCARLVKQRYPVRSPKVVQGRKAMEDTEGRQLEARAMLHELQCKHPVANAFLMAQYGRVRKVDSEEELARTPQGLMKQGLGSRGYGMFACRALDGELTFGEAARQRRKRWCEDELARLARETQTLETLRGSLTAITRMFNGAAFTPLTPLLLAVLESQAQHANAEQALKALDLSSIDELLAHQRDLIDRIETARTQHSEEKEHVGASKSTLGGLRRRESELQTRLPELDGTCANASVWASRFVNAVSELATEAQLLGEAESMAQESETTLDALRHRAQSLRENLPRTLRELAQAVGIYLSGARDDAERFVWTDPPRTIDRLDELLPLVFRTRQAIAEQTQRQQAIGLAENAKSLQEAEASFNHVFTSSFCFKLRDDVKQGAATLQRLNRHLQDIRFGNDTFKLEWDWIPRMRKVQEFFEAVEGVVEGLERERGSIFASPQLSDEQRATAEEIRRLLLANDQGASERALKELADYRNYRRYDIVRTSPVGETRLSTWGTGSGGELETPFYVVRSAVLAHALGHFGRERREAPALRLMLSDEAFSKMDESRSRSVLRFLSQTLGLQLVVAMPTSKSGAVKPEFDKEFTFSKVMASRDGKELFISEVQEKTLNRQALTRLWDAHAAQAREVARVAYEADRQSSAQVQQESTPDPESTG

SEQ ID NO: 30711 - protein, 401 aa, Variovorax paradoxus S110
MRHVDSLSEHPFLQRIARALLQKAERSISPGQTRLQLDRKNAPELYAQTDVEQLQLWLMLLDDLCATGWVTLVLNPSRDFATFTDRSPRLELRDFEALAAWAGYTPKALRWQRQWLGHLGAHWAAPGAVAPSDPEAVLDYLARSPLTLVEDLPLMDATRSLDALVALCRSGRTLSLREASAKVFQARSKVLDNREELLRLLGAAPGQFREAPIQLLVALPDMKADFEEVLFVENLVTFERMADSRSPGWASSLLVYAAGFKGSSKRLRSREGCKPYVRTMTAHAAEMGTATSASIQRIEEWLFGDAPWAVRFFGDLDYSGMQILAALRDVFPHAQAWEQGYSVLGQLIDRGGGHLPSQAGKELQIDPGQTGCSHADQYLLPLMRRHGRFVDQEAFSPEAST

SEQ ID NO: 30712 - protein, 474 aa, Geobacter sp. M21
MLFNRLPDEIFKPLAGPNRYLFEEVLLFLFKYFSDEDMANEAVFPRRSHVLREIEELLERKGRSLQVFQEEGDADEQLRNAPGLAARYIYNRLVDTGWLEEEEDGYHVNVLMPPHANLLLEALEGVAHAEKKNYGSTIASIRLQLEAIANQPETNARAFLEVVRATRDFTRHLQNIFSGLRGFQELISRQHNPRLALATFFDDFVENLLISDYKSLQAENNPFRHRANVLTLLLHIEHIDACLAALVKVYQEDRNIDAAQARERVIKDLHFIARVFHSVDRRLDAIDLYRMRLESRVAQMVRYLDRNVPDLTNRGVKLLEKLGQTSQQRDDGELPDLPQPARWMNVGLFGQRSVRKPQKRRQPQFIELGEEQELGPEVRERRRLIKEYLQRRVISPAKVAAFVDRQMGEKTVLTAHDFHIETVEDLVAFSYIPLLGRPNAKPTPNLPRFNFRRTGGRIETAYFECGDFIIERKG

SEQ ID NO: 30713 - protein, 210 aa, Geobacter sp. M21
MLQELRRLLDKDETLVAEDLRRTASLALERQFLFGDKSRDQRYFLQILDAEDYFRNLFDALNLDLVCDRTAGYVGLVPREHQLTVKLDTEHSLFLLALRVIYEQAVRECRVGEFSQVFTDSEMLVESFVAHTGRKRPGLVRLREIVRTFSRQGLVEIDEDEDKAIRFRIRPSIREIVTHRFLEALEEYAEIGDREESGADEERSEHEDAY

SEQ ID NO: 30714 - protein, 1141 aa, Geobacter sp. M21
MKTLTKAVLIQWFRLEAVEIPIIGSTAFIGDNGAGKSALLDAIQTVLTGANKSRLVLNRGSNEQSSRKLWEYVLGVMSDPKKPELATKIKPREKANCYLALNFHDEETGESLCAGVSIYASLAEMAEKVEGYFICPGLAGHKDLFLEQREGESMVVLPWARVKERLAKTCPASRFHYEPGKFTQDLYGTLSEHPGSPNNDKTILKALQAAFRLERISDPTDFIRRYMLDRDDLQIKELQSALKNYRDMADKAESVSRRVTDLTRLEGLCDKVEHARVQQAQGEFLSLKIRSEQLFEQADPLREAMAAIEESLEELKERRGTQGARLEALQVELAEKRAEQKNSDLRIQRERLQLDYDKAILGEEEVTKKIAEIRRLLQRFERHKDLPVAEPLSVSLPELLKLLPNDGLVESQLWPEKPELLDGCLAALVGAVEKSLPELSRRYDALCAGIDGLTKGVKETTEALNQMQRGKAPLQAHTKNLVEYLKKNGIAARPLCDLVDVADERWRETIESILGNIREALIVIPEQAQKAVHLYRHEARRDFPGCHIVNTTQSERWKDARREGSLADLVTSEDVHVRAFVNRRLGNIICVETEKELLKHDRAATADGMLSSGGTVSELKVLPPILGRGAREGLVATYRKKLLELSGELDETGNRKKKLGALKELLDEFQTNFADGTVSLAQLAGRRTAFAEQVGTLREKIQQLDMDKRERRLQEEIEKLEKDAKVSKDELGALEKQTRDSEREYDKKEAEVSGLEQQMDLLKTLLDEKRQDALVDPVKAAEVLLRWQEQPCADFAAMVVRADKEVKSAEKTILDASKEVVRDYTEYYLRYAAEEGDEERPEEFGDYAATIRRKRKYLVETTLAEYREKSQKALHEAEDAFRSKFVGRLIGKLESVRGTILQLNKTLERHPFHGEIYKFRSSANPEFKHIIDFAKACNSPVSLQVGGLFDPGNDPGTPHKKALDDIATALQDPKAAERLQDYRNFLVFEVEMCDTDGTPTADLEHRIQKGSGGENQTPFYVAIGASLAAAYRLKEEYGKHCGGISLAVFDEAFSKLSVPTTQSCIEFLKKIQLQLIVAAPDEKFATMAEVMDTIVWVTREGGTVETEVVYIKPSMRALLRSDNPYLKSTGTAAAEFLHEPA

SEQ ID NO: 30715 - protein, 403 aa, Geobacter sp. M21
MNQPSRELLTKLLHAWQGNPKGARKVSLSITKARAAAYFQAVLPEEKGALHAGLEEAAASGAIALEWGKGFESHILRRVVLVDGAVLAEYLGVPLASQQADQARSALESCLEERESWIDRWVAELLDHWSRNQGFNGIAPGEVATATLLVRALSAVAAGRQRNLDLRTFSTRELGNSKAMESILAKFASIWKKHHAADYPAELTNEELFEAIGLVKFPQPLLLRGPLTLRLAGRDVDCEGIEPFVGLPPQAMLDVLADQRPEYCLTIENLASFNRYTTEVRDRGVIVFTSGFPSPGVADFLRLLDRALPAAIPFFHWGDIDEGGLKIFLYLQGLVKRGVQPHRMTPELLTAKGQPSPGLRRREVGRLIADDRTVALLAEAILSTAPARILEQENIDPVAPSVA

SEQ ID NO: 30716 - protein, 477 aa, Saccharomonospora viridis DSM 43017
MLALLHQTHAPFVVTALAMVFTAERPSVAVADAHAEIDDALQQLRAAGYGEDDNQPLPAGNARDLCRQWVQAGWLVRHVSDGDVEMYRLSAHGVGALEVAGRVGGVRTRVSESRVRTLLQAIERLAQDADPDVMSRISRLHEEILQRQRELARLERGGEVETVPDEQLLEAAENVLHLARELPADFARVAESIKAVQRDVVAELRHDVRPTGEVLREYLERGKQILDATPEGRAFAGALRLIGDPAQIHNLWSQLRTVLRHKFTELLSDQQRRELADISRRVEQGVKEVLAAQRQASHVITTQVRNHDPLRDRQVDELLRNVMSELHEWVPASRRGEPVEPLRRLPVADIGHLRQRTSELRPPQPPAPLREWEETEDVTTADTRAWGGPRYAELEEHLVTFAGGEGSVDVVAAFRAADEDLRRPVDLLGLLEIAHDAGMTETDEVTTVDTVRPDGTRRRFALGGVVAANPADRNGER

SEQ ID NO: 30717 - protein, 221 aa, Saccharomonospora viridis DSM 43017
MSELEHDDWSTGAAAGFIDPVPMEDDPTELFPGDTGTLEADVRRVLVQLLRRKFLLAEKNPAQWRTLLENQQIIESRMHDLFIRLVVDHERGVAYKQQVRSSELDVPILLRDESYNRAETLVLVHLRTVFQRERGSGETSARVDIEELEQTVLTYFDPEDHNLARTQQEVRGAVQRLATEGLLVEESAGRYRITPLVEVVLSTEKLAELQQWLRERNEATA

SEQ ID NO: 30718 - protein, 1114 aa, Saccharomonospora viridis DSM 43017
MSMIDTLFGLIPAASRGQQWVARDLQLVNWGGYDGYHRVRFAPGATLLSGGSGSGKSTLMDSYIALLMPHTTPFNGASNGGVVGRPRGKDQRNILSYARGKLDESRADGETKVRVLRGDGCDTWSAIAMTWVDHTGAEFTALRAWYVPAAARTLEDVVAVRATCDRHYCLRDLEGPAGKRFARAEVEATGVTCFDTDRDFTARLHSTLGIGAAGDGHKAVALLGRIQAGQQITTVDALYKTMVLEEPSTVATADAVVQQFDELSGTRQRMIVARQQVKALTPIREHRRAIDDAVERLRLIDAVGSFTEESSPAALWCHERRLDLLRAAEQDLAQRHRRAKAELAETEALVKATEAQYEGAAEALRSSGGDRLETALRELRNVDQRLVDVERARNRLDRALEDIGATVSTADDFAALVETAHRTLADAEARRTAQNHFAEAMAEKKQAETELAELRAEHKAVKSRRGNIPTELHAARAALAEAAGLTPDELPFVGELIEVSTEFEPWREAFNLALGGFATLMLIDVGRLNAFREAVNKVKTTRRVHFQGVRTGVRDEVTLNPKTLPGRLDYRPSPFTAWLKSELARRFDYVCVDTPRQLSQYTKALTISGQTSERGGRGAHGGHGRANVLGFTNDRLLADLDHRIDLARRRLEEAAAWVSRAEEELNSFEARRAAYRTVTELSWDQVDVASLQAEREHWNLLVEEVRAGNPKIDQLQEQVEELRRRAKELTERVGEQKKTEKELAEAWASIVDEVDRAQTALDVAVRTGTVVLPEHREYLEELFSGASDDGPMTELAEFDAAVKRATDRLVTDRRAATETIARSRKALEDTFSTFLERWPNPNLGTDPDASYRDFDRILTDLETSGLHELEAEWRDSLLKLSGNDLTALDSELAAAVREIRDRIDPVNRILAELPFADDNHRLRIDPQESHSAVRARFRKELRDVRALIDSATTDAERERAYHRMAKVIDRIRRTAPDFADLIDVRNHVRISAEKCDLDGNHVAVYDHIGEKSGGESQELIAFIVGAALRYQLGDAGATRPRYAPVFLDEALIKADARFTGRAIGAWRGLGFQLIISAPNDKHSAIEPHVDAEYLILKNSEGRSWAKPLVGVPDA

SEQ ID NO: 30719 - protein, 408 aa, Saccharomonospora viridis DSM 43017
MNTLVTPEDACAELRRRIDRKWAEAVCTGVNGGETVIFSVPLRPGVTTGKAVERLGYGVWHEWRMRWRDVADRLPHGVCLVHRTLSIRGVAGDFPARLVADLDGGVAFLAEFGAEPPTVDVERARQLASALRSVDAVLTPATLRAVHRLQAHDVGVLLRAVDWLRQHPDLSAWTLRQLPIRGMHTKWLDSHGALLREVSGRDVRAEVRPRPAVVHLTYVDPGYLASGRRRHDAWTTGDVHEIAYRPRVVLVVENRDCRLRFPQVRDTIVVEGGGKAAAALLAEVPWLRAAEHVVYWGDIDTDGYAILDRFRAALAEPTPDGAPPKSVSSILMDDTDLHRYAEHGVNHDKHGRPLTSSAEVPPHLTEAERLAYDTIATAGPTPFRRIEQEVIPFEHAVARLLHVTNSRD

SEQ ID NO: 30720 - protein, 488 aa, Chitinophaga pinensis DSM 2588
MNKDDLYWLISTSPAIQMLRLRNTQWILPFLYGVFKEENRFSISEGQLTRLLAETLGQQDDGTEDLEEAKINFGEDEETRARKYILNWVQKRLLQDLPDAEGNTQYQLSAYTEKVFQWMQTLQLRQHVGTESRFKLLFNSLRDIVENTEDDRAKKLEILKNKRSELDKEIKALELGIVPDRYNNAQVEERLELFTRLCYELISDFREVEDNFKAIHRTIVEQHTKAEQSKGAIIGFAFEAYDSLRNSNQGKSFYAFWDFLISRAGQEEWRELTEQLVHTVEERNIKADDQFLLNIKSMLLQQGKTVYDANDKMAEKLSRIISEKEIARHRRLRKQINNIKEFVFDLIEDQNVECGINIDDSAQIRMVMEKKLSLEQKKSVVEVKQPANATEQIADVERFSRMLNTSFINRKQLWEKVETVLKDKQTATLKEVLEQSPLEFGLAEVISYYDFLREKSSRAYIVKNTTELIPLNPEQTRFVEVPYLLFGK

SEQ ID NO: 30721 - protein, 198 aa, Chitinophaga pinensis DSM 2588
MSTAKILPYAPVVVKLLKGPVEYVEKGAWEKLLQYKVELTGFLQQLGLYLVLDEQDGFAFVKHALTEDDEAYVSWIHRRSFSYEESIMLVLLREMMAEFEISESGSRELIKKRREIKEYAELFFKEGASRIKFLKEIDRLIDKVEESGFLHRIENHEVPDEQKFRIRKIIKAKVDSEALETFQQQLSELAIGSSVEAE

SEQ ID NO: 30722 - protein, 1133 aa, Chitinophaga pinensis DSM 2588
MQLNVFSTDNHKSGFRLQYLEVLNWGTFDEHIHSIKPNGETSLLTGANGSGKTTFIDALLTLMVPEKRYRFYNQSSGSEKKGDRTEDSYVMGGYGMVNNEATGVAKTLYLRENKEEAYSILLANFANEAEQYVTLFQVRYFVNGDMRKIFGVAHRAMHIADDFSPFDMGGTWKRRIDQLYNKGGRRQVEWFDAASKYAQRMVEALGMQSIQAVQLFNQTVGIKVLGNLDDFIRTNMLEPRNMEEQFQELKKHLTTLLDAQRNIEKAEEQIRLLGPIKEHHENFSSYLTSIMQLKQELNTATIWNSFTRNQLLTQALIDRRHEVESLQKKIEETKVNMADLLEQERVTKNLMEQNKAGQRLQQLEKDIQDLEKRKAEAEDSLKEFASWCDTLHVKEEEVNDDATYQRILKEANRAALKLETEQRLNEEDEYSAKRVKERAESEKESLEKEIELLHQSRNNIPSHLVDLRKEICSSLRIDVSEILFAGELIQVKSEEIEWQPALEKLLHSFSLRLLVPEKHYKKVTSFVNNNNLRTRLIYYQIKESALTLYPEDDTVYHKLDFHPDHKLSPWVQQQIIQNFSYVCVNSERELQRNDMAITVEGLIKNRDRHEKDDRAHSNDASRYVMGWNNERKKDALISKRSKLNEAIISSNEILQTCKSRSARLQKQFYAAGRLKEHKGFDEINIGKLQKAIRKAQDQIGSLTDENQELDGLKQQLLDIERQKEDNQELQAMLIRNEALEQRNIEEMEEEQQAMQHLLQHVTEGDKDELLNFQQQNSHLLGNVTLENVAAIYKSLRENKEQDLRLAEDARHKEEVMLNRSINRLKNPQAEILQRFPDWISDVHALSDDAVHATEYIEWLDKLTNDNLPGYKKDFESYINVTITYKIGGLNEEMEKWERDISNTIQKLNDSLAGINFNRLPDTYIQLVKRPVASGSEAREFKSRLLDALPQSANWQQSTFEEKAQHFRERVQPLIAALDESEAYRARVLDARNWFEFWADERFRETNESKKIYRQMGQLSGGEKAQLTYTILCSAIAYQFGITREGKNARSLRFIAVDESFSNQDEEKATYLMELCKQLHLQLLVVTPSDKIQIVQNFIAHVHLVQRVNGRQSILYNMTVKELQHKMADSEVSV

SEQ ID NO: 30723 - protein, 522 aa, Jonesia denitrificans DSM 20603
MDHLIAHLERTRSAFDQPTLALLNRHYAPTVLTILAQVFPPHRASVDAEQVALEVEQHRLALAHHNCDDLDGHSVRQLLSRWVREKWLIRHLADDGTELFTLTSHTKDALDFVHRASGAHPLVSSTRMRTLIDTLDRFAHEAQPDRDQRIARIDHDIAQLSRERDELAAGAPMPTMSVQRMVENLDNVRHLVRELPADFARVAESMKDLQRHILTQLRAGDRRAGDVLDDYLDQAQHLLTATPEGRAFTGALDILRDDATVAALNHAIHTIVSSPAGQSLPFAEKEALRSIVSSIVDSVDVVLSEQQRASRSLTTHLRHYNPAHDREIDDALEHALSALTRWFPSTSRGERVPALPRFRRAHIGKLRTTVPDIRPAQGPPALVDDGEVAAELDRGYARAMGGPHHKDIRQVLEAAPRHGYTTLAEVFQHAPTELQRPVDVLGFQEIMMNDAAPDLDEDHLATTQRQSSKDTAPPADHGKTVREEHLPWDTVTAVRPDGTTRTFLVPRMALPTASQPTEGGTQ

SEQ ID NO: 30724 - protein, 229 aa, Jonesia denitrificans DSM 20603
MTSSSADAFVTVPPAEETPEVCFDHDRGVLEPHVRRALALIMQRRFIARSAHPTEWATILEEEAVLQSRLNDMFLTLVIDRNYEVIYKEQVRLDGIHVPILLRDEPYRRVEAVLLVQARALRRRATLEGSTTAVVDSEDLVDLVQSFFDTSDTNLAGQQNEIKAGIAQLTREGVFSEVGSGRLVVSPVVDIIVPVERLRELSQWCEQDSIHGTVDAEDDEHEEGQDDVH

SEQ ID NO: 30725 - protein, 1151 aa, Jonesia denitrificans DSM 20603
MTFTESLFGLIPASSTGQQWVAESMQLVNWGGYHGYHTVPFHPDGTLLSGASGSGKSTLLDAYIALMMPHTTPFNGASNAALTGRARGSEQRNILSYVRGKTDDRPQGANGVVEALLRGSDGDTWSAIAMTWRDQAGALVTAMRVFYVPRGAKRNDECVFHRVVSEGKYDVRRLEPFAAARFPRRVLTRAEGLTFFDSDAAFFTRLHDTLGIGAAGGGAKAMQLLARIQAGHHISTVDALYKQLVLEDPATFETAAKAVSHVDELSAVREELLSAEQQVQHLLPIRELHERRTRAQSTVDELDALGVIGGVQPGSAVSQWRDQRALAVLNDALRLNRATYRSLRDQRAATQARLGALEEHRDVVRAALTREGGEQVADLRRDVRLLRDRFESVTAVRAALDDHARMVGVEVHDERSFEAAQRMSRAFVEDVPRAEKKARQDHYEALARRDGLVKKRQVLVDQVASLGARRGNIPEDLHHARDLLAKACGWTPADLPFVGELLEVKAQYEPWRTAISQALGGFAVTLVVAQDQLPQFRAAINRVQLPRRVHFEGVPTFSEPVVCDDSRVIPGRLEVLGGPFAGWLQGRLMQSFAAVCVDDPKELGEHPFAVTITGQLSQGRRGSHGGTSRSVLGFSNDDAVARAREQIAALDNEIAQTTRVLEVMDREQGAWRDVVRAHEVIAAAVWPDIDVDGARKTLTEREQHIESLTSGHSVVAELSAEERRLVTQTNEVRTQIATMSAQMGSLDDEYAELVDADDEAKTRLGENPGDIDHRLVTILEDRLGNRALDSVADLDRVVGELVREFTAEREHAHTEVDRANGELRRLFDTYVSRWPHPDLSTDPVRAYNDYEAILADLEHQRLHELRGKWDRTLTLLSGHELTTLNAQMARSLDDIRRRMEPVNDILWSVPFHDEGHRLRIVARVREGNDVKRFRSELSALARELGDHDTHQDPVARESRFQRMRALLERVRPTSAERNRLIDVREHVRVEAVKVDIQGTEVSIYDHIAGKSGGESQELVAFIVGAALRYQLGDADAVRPRYAPVFLDEAFIKADSRFAGRAVSAWKGLGFQLVIGAPLDKVSALEPHVPLLIHTVKDARGITRVNWSLAADGALSVSDFTVPASAEREGVSETPDLRVTGESLFPANDHSR

SEQ ID NO: 30726 - protein, 485 aa, Candidatus Accumulibacter phosphatis clade IIA str. UW-1
MTLDYATLELLRQSHPAWRLLRSEHAPLVASFLQRVFIVPNVRVITQADLAEALEDELFVLRDRLGAQAFPKSALDYLNDWAANDKGWLRKFYAQASDEPHFDLMPATEKAIAWLGTLAERSFVGTESRLLTLFELLKQMSEGSETDPEARIAELHRRRDEIDAEIARVLSGDLPLLDDSALRDRFQQFVAMARELLADFREVEHNFRRLDRRVRERIALWEGAKGALLEEIMGERDAISDSDQGKSFRAFWDFLMSSRRQDELTALLERVLTLPAVAELRPDARTRRVHYDWLEAGEHTQRTVAQLSQQLRRFLDDQAWLENRRIMDILHGIEAKALALRETPPAGEVMSIADTAAAIELPMERPLYSPPIKPSIADLELESADDDEVDAAVLFSQVVVDRAQLVRHIRQALQERSQVSLRELCETRPLEHGLAELVAYLHLAGDSFKSVVDEGVNELIVWSGTTADGQPYARQARLPRVIFVR

SEQ ID NO: 30727 - protein, 201 aa, Candidatus Accumulibacter phosphatis clade IIA str. UW-1
MASPDLSALVIPLLKGVIYQEADAGQWNALLTLQARVRDYVAVLDLELVLDEAEGYAFLRARPEPEEGAATRLPRLVARRPLSFPVSLLLALLRKKLAEFDASGGDTRLVLARDEVAELMRVFLREGSNEARLIDQIDFYLGKVVELGFLRRLKVEHGQPPMVEVRRILKAFVDAQWLAEFDQRLAAYRSLLPGRQEAADE

SEQ ID NO: 30728 - protein, 1122 aa, Candidatus Accumulibacter phosphatis clade IIA str. UW-1
MNDPQSLGLDFVADDTLSGFRLQRLEVFNWGTFDGRVWTLHPEGKNALLTGDIGSGKSTLVDAVTTLLVPAQRIAYNKAAGADSRERTLRSYVLGHYKSERNEISGTARPVALRDHNNYSVILGVFHNAGYDQTVTLAQVFWIKDAQGQPARFFLAAERDLSIAGDFAHFGSDIGALRKRLRRPGNDLFDSFPPYGAWFRRRFGIDNEQALDLFHQTVSMKSVGNLTDFVRSHMLEPFDVAPRITALIGHFDDLNRAHEAVLKAKRQVAMLTPLVADGERHAAVVAQVEELRACREALKPYFAGLKVGLLDKRLAGLAEEWRRQDAQLRRHADQRDAQRVEEAELRRHIAENGGDRLERLAAEIRRLENERQVRARRAQRRADLLHAIGEEAAEDEAAFLDQRQRLAALAETARGREASLQNDLTELGVSLRQGKQEHAELSAEISSLKARRSNIPAEQILMRSALAKALSLPEERMPFAGELLQVRDEERDWEGAAERLLRNFGLSLLVPDDDYAKVAEWVDKTQLRGRLVYFRVRHSARNEMASLHRDSLVRKLAVKPDSACYDWLERELSHRFDVACCATQEQFRRETRAITRAGQIKAPGERHEKDDRHRLDDRSRYVLGWTNAAKIDALEAKARALELRLAELGGRIGKILAEQNALKERLTALSKLDEYGDFQELDWQSLASEVAKLAEEKRLLEATSDVLQNLAVRLTRLQADLAQTEAALAEKTRDLGATQARREAAEALRQQTLALVSEAAQDTAHFVRLGEMRAEALGEHQLTVESCENREREMRDWFQKRIDACDDKLRTLRDRIIDAMRAYCLVFPLDAQEVDVAIAAIGEYRAMLDKLQADDLPRFEVRFKELLNENTIREVANFNAQLAMWRETIRERIGRINGSLTQIDYNPGRYIALEAQATPDADIRDFQGELRACTEGAMTGSEDAQYSEAKFLQVRRIIERLRGREGLSEQDRRWTAKVTDVRYWFVFAASERWREDDSEHEHYSDSGGKSGGQKEKLAYTILAASLAYQFGLEWGAVRSRSFRFVVIDEAFGRGSDESAQYGLRLFAQLNLQLLIVTPLQKIHIIEPFVASVGFVHNEEGRTSKLRNLSIEEYHAEKARAAG

SEQ ID NO: 30729 - protein, 391 aa, Candidatus Accumulibacter phosphatis clade IIA str. UW-1
MSWTRPAGLRAQVQRLWDRGELLASVVTGESLFPRRLLLKGPTSAEMSERFNELRAWIGELQAMAHCRVELREFRHRLFGTNAVPQEAWVDSLDDALALIGKRRDASRFGALLDLTRLRQPALLDWLARRPLRALELADAWGRLLDIVAWVHAHPRPGVYLRQVDVPGVHSKFIEAHRGVLGELLDLVLPAEAVVLSAAGASQFARRYGFREKPARLRFRILDREHALLPGDPEQDLTLDARSFARLDPGVSRVFITENEVNFLAFPEVTDSLIIFGAGYGFELLSEARWLSRCRLHYWGDIDTHGFAILDQLRAQFEHVDSFLMDRATLLAFESLWGEEDKQTLRDLPRLSPTESALYDDLRDNRLRRNLRLEQERVGFAWVKAALAALP

SEQ ID NO: 30730 - protein, 492 aa, Eggerthella lenta DSM 2243
MAVVSSTLAFISLQQDNVAWKLLHAQNAPIILSILDENLGKETGKRTVADLVSLVDADLEVLRERVPEIGPKRSARDYCEQWRRDGYLVRKPLADSRQETYELSAGALAAISFAKGLAKPHRAATKSRLNMILDQIAESSLATDCDIDRRRKVLLAEKQRIEDQLAELDQGTLDTMDPDQALEQARDILNLAQEIPRDFVSVSAEFEEIAKNLYIKLIGYEEGYQDTLEGVFAGIDHITQSPPGQSFGGFYALLRDSEALEKLQDDIDSILDTDFACMLEAEERRFLRRFVQTLLDQARDVNETKTGLSRGLRKLVQSQSFQQDRVLRRFLDQTLGMASVLTESYSCTFALPIELELTKTMIAPISRLELYNPADASAQPIPASAFEENGRLTLAELYEQVREVEIDYDELVGNVNAFFAERDASNSKHPSIGEILDKYPATQGIASIAGLMVLASDQGIRTNESEIIRWQSKSGRHLQARVDTFLFVKEVR

SEQ ID NO: 30731 - protein, 227 aa, Eggerthella lenta DSM 2243
MDDFWNPSPDTVERCDEDRPLDERHLWPQDTGKLPYDARCALLQLIKGPHIDESDPLWSAVLNNQQDLSSHLADMLLELYVDAETGIAFARNASTGERTVLKATRSNVMTLLDTIMVLTLRKELQMGGTNRVFIGQSELFEQLAQYRRLESQDQSSYQSKLKASWNRLVEARILLKSDIEDRFEISPVLKLIFGTEEAAAVSEEFELMLKRAQQAVPNQGEPHDDDR

SEQ ID NO: 30732 - protein, 1136 aa, Eggerthella lenta DSM 2243
MTTTVNTAGSVPYPGQWRLARVDMANWGTFNGFQSLPVDRRGLLITGPSGSGKSTVLDAVAAVLTPPTQLSLNAAASNGGQRDKGRSISNYVRGACGHSADEEGEVVHTYLRPKAAVWSGVMLRYEDGFDIEQCSPSEARRHEAINVLGIFFQKANTVNPEGLKKFFAVVRGDHALSEFEPYGLNEADMAQFNKDHKETGRAWRDHAAFEGYLCNILHISSPKTLTLLHKTQAAKNIGSLDDLFRKYMLDTPRTHALATAAVAQFKELEEAHDGVVDQRRQTECLEPLLRHEEAYVEAKITEDQNRQLLDKLASFADDTSITLLKRRLERQLHDADALTTAVKEAESEQAFAKQKLEAAEAVLNEQGGIALEAALMQVSDRERQLLHIEGNRDSLEKDLEMAIESPLPSTREEFEALKRTLAACADTARAWLDGHEDEKIARFGEVSEQKKRHAEIAGELRFLRGQRSNISSRLHDIRLSIARHLGVSTEDLPFMGELIDVKPEEDSWQPAIERVLGGRARTMLVEKRHAASINEYLESIHLGERFEYDAVPDDVSVPDRPLHPQSLVRKVTVVQVPSHESLSRWANKLLRDRFDYVCVDSPADMERHDRALTRGGQTKAGEHHVKDDRRKITDRSRWVLGSTNDRKIERLEQELRLCSESLAVATNATAEITAKEQECQALCRTERSLRDKHWEDYDNAQAAFDLERAQAFYDELAQSDAFREAESRRATAQGRLDEANKAVQKALVNQQTNEERIQDTRSDIAEVERRINKRNPSGIAMDDETRAQFIDLFSSANDRFDSDTSLVYQTSNDVQRILDARVAKAARAQQDARRRTELVLQQYKSTWKLLAADLSASFEDRDAYIGRYRQIRASGLPQYERKFLDVLNSFSQDQITAISSEIRNAFREVRDRLVPVNRSLLLSEFSSGIHLQIEVKEHRSLRVNEFLADLKEITRGSWEEDDLEAAERRYARTAAIMKRLGSNDRSDQTWRMACLNTPDHMKFIAKEVAGDGAVVNVHSNDGGLSGGQKQKLVFFCLAAALRYQLSDEDQPVPSYGTIILDEAFDKSDRHFAEEALGIFEAFGFHMVLATPGKLLQTAEDHIGAMVMVTCSDDRHSRLSSVVFEADDRWMEVVDGR

SEQ ID NO: 30733 - protein, 413 aa, Eggerthella lenta DSM 2243
MADSPPCMVSVPEASQKAARRFDRDSRSWAALLFRQEIGQCADGEPVRCSISLHPPTERRVLNNPGAARAWAQSWRACPWTDAILWEKREWGSAGPQTVPVRLVLEDPDAIARCANRSEQWNTLVLRSKQLADRWSNRWSEMCPDAQADVLVAAVQSSVGKCCELEERDWSIVLGVLDWLVGHPDATPYIRQLPIRGIDTKWMERHRAVVDPLHRAMIGRNPCFCKQSTQFRMRALDVRLALGGLTEVSVSAAQLDRCTHRPDVVIVCENLVNVLAMPSIEGAFAIHGSGYAVKDFREVSWFASTPILYWGDLDSNGFAILNQFRCYFDHVNSVMMDEATLDRHYDLCVEEPKPNTGTLSYLKESEQAALARLLAGDANQGFGAIRLEQERIEWPWACNQLQKHLLPLDTVQR

SEQ ID NO: 30734 - protein, 497 aa, Bifidobacterium dentium Bd1
MERLRPVYETGVLRLLLRGNSMLYVALLRSSFDPLTGELPRDVLEERISRSLSRLAETGDYTVKDDQTVRQAAHAILLELSREGDDDYAWLANSLDVASHRYLYRLTARAHRAIEALHRLEDTTQALSGAQANSIIMEIEHARMQLTADPRERIKLLRKDIEERQKEIDELERNETIERLTSEQVGDIINVIHNTLRGVPIDLRELALAERDNGDALRRRMQSGAMSVEDILTAYHDEYRKSFRESDSGRRFEDAFQVIVTDEGRQEIDDAVRDIAKNPYLDGEPGALLGQVRAELERIYSGIEDVRRQTRASDEAISRLVRQQTDTRYRTMLATLNQLFAKTNAEAKASPNATDRPYHTDTGLSQIAVLPTKPAKTMVRNATAALNDSAPTVGLPDLKAMIEVCGPRLRHMVDLIHRNPVMSHDGTRVDFAASFNRLPASERRESEIIGFLSALRTENDMACATWNCVSLDGTPRTWRTRPILATAQTLDDIIREG

SEQ ID NO: 30735 - protein, 235 aa, Bifidobacterium dentium Bd1
MTDEHSETVGIERSLPTVEQPALFDGDTGDMTADARMAAIALKRERYISGELFDLVKDNVEAVERSLNNDMLRLVSNEKYHVMYAAPVSGIESNIRSLKTRASLSREDAAMLAFLRIHVLEYENQKTPVADWQVSRDEIRAALATGAGYLAGGNDEEGTTKKIAAAISRMTTYGYLEPTDDDEMLAITPLVPIVLDRQLADEWLDMTTPSMTHDTDAGMLDPISEENETTDEEER

SEQ ID NO: 30736 - protein, 1169 aa, Bifidobacterium dentium Bd1
MMAGDDMKIIADRWMMESRQIVNWGSYDGYQEFRPSIDAESPVTLLAGASESGKSTLVDAQISLLYPNGTPYNKASNAGRSERNDYTYLRGMIGISDGDNGETQIFLRGRDANGTPQAIWGAIVDTYVNRTTGSTLSCGKFLYLPAGDGKDEVRRRYIAWNRKIDPQIMDRYRDTPFTPSMFKKAYPDCSIFPNASAFHAYIWQEMGLSAEACRLLHKIQSADAPSRLDDIFKQGVLDVPEALRLAQDTVDDYDRFNANFHSMEDKARRVAKLQDIQTQYDAYAKHLTQVREYEAVNPESQQGLETLTLWMRSRMASEVRAGLPAAERKVKQQECDLHEAQERISDVNRQREAIVERIKGIDGGTLQRLSDDLERARRDMQDVRSQRQSIVEKFEGVEGALPSDETSWNAKRDALARSMETFDERMGNLESKRDRLIGERTAASQECAQLRRDYDRKRRQRTRITQAMDEARALIAKAVGLSPDELPYAAELMDVCESDERWRTAMNVTYAPIAQTILVDSRHERGFAAKISAIDPALMIRRTWQFVDVDKSYDCTRNDGWMSSKLQYCEDSPFAGWLKEQTASARLDALCVETIDDAAHERRQVQADGQIKSGVHGFHGIKGMNPIIGFVNEGYLTELKKQLDEAHHRLSDTERRCGMVRKSIDLMHAEKNLADLVANMTWNKIDVVGAETLVENLKRRIEQIEDNPEMTRLAERREEIDRLLDEANARFYHAKSEMQSTQAAVDAEHAWLEAYEGIEFDDDALSGDVSNMLADVYEGCFGGVVHAEDRPKLIAGGNDEIGGHSFETRVGHAMERAMREQNAALGKRAGELRTVVEQSMASYLERYAPDDDSATGGVEDYRFYLEELHSLQMLVTREATDEEYANSLDKLTKNFLQLNRALNTDQENVKDQLERINGMLAGQKFGPRGGRLSIDVEFRPIERAFVSSLKATLNKLDEWFRNDKDDPDATRKAFTSCATFIERVRRELEQVRDVNGIRSYGARNLDPRARSTFYAIVHHDDGPDERISSTGGKSGGALQELTSFIYGAALIYLLGGDVTGSPTYTTLFLDEALIKADGRYTQRALNVLPRLGFQVIVSAPESKTAEILGVSTKAYVAYKDPSVGRSFLQELTSEDIARQEAELHDAIDDMPAAPNDIGPTTATILEQVF

SEQ ID NO: 30737 - protein, 486 aa, Gordonia bronchialis DSM 43247
MPVNYDEIASLRKSSAAWRLLRADNAPLILSFLGRVFVEDNVREMSSSQLIALLDDELYALSERLGADTHPKSAKAYLDDWSAGEVGWLRKYYVSGSDEPHYDATPAVERAVGWVNSLRERSFVGTESRLNTVFELLRQIVYGTETDPEVRLTELRRRRAEIDAEIDAVERGDYRLLDATSRSDRYQQFADTARALLSDFREVEANFRALDRETRERIATWDGTKGELLDEIVGTRNLISDSDQGRSFQGFYDLLLSADRLDELTELIGRVQSLDDIAGADDRLGHIHHDWLDAGSRAQATVRQLSEQLRRFLDDQVWLENRRVMDLLRNIETSAIALRDERTAGFTHEIDALTPAITLPLERPLYRKPAAASVDSEGIQAGHADSSSDALFEQMHVDPQPLIDGVRHRLRRQSQVTLAEMIDAEPLRQGLAELVTYLSLSDDAFAKLFDETATDAITWTDDNGTERTARIPRVIYTRASPGRQRV

SEQ ID NO: 30738 - protein, 198 aa, Gordonia bronchialis DSM 43247
MSRNVARDELNLSLAVTTLMKGVVYRDSHEVIWQHLTGLAAQVSDYVATLGLTVEINEAEGYAYLRSRPDDELEERGIPRLVPRHQLSLHTSLLLALLRKRLAEFDSSDSGTRLVLSGQQIVEMMTPFLPQTTNEARAADQVETALRRVVEQGLVRRIPKQENQFEVRRVIKAFVDAQWLSDLDSHLSEYAELLAGDR

SEQ ID NO: 30739 - protein, 1130 aa, Gordonia bronchialis DSM 43247
MTALFSTTDLHDSDALTGFRLHRFQVLNWGTFDGRVWTLSLDGRNGLLTGDIGSGKSTLVDALTTLLLPANRVAYNKAAGADIRERDLRSYVLGYYKSERNEVTGSSRPVALRGTSSYSVILGVFVNEGFDEEVTLAQVFSMRHDNGQPERFFTVADRALDITADFTDFGPELKALRKRLRQNGTRIHDHFPEYGRDYRRALAIKSEQAMELFHQTVSMKAVGNLNSFVREHMLESFDSSSWVDTLVTHFQDLTAAHDAVVLARTQLAELEPLLADHDRYAEHTAKVDELRSRRDALRFYFAQRRESLLEAEISGHEAALGAAHSDLDEVDASLTVLRTRLDELRLEQAGLGGNEIATLEQRITEAGQQRDERQRQYDRFSGFLTDADLPTVTDRAQFDQRVRDIEGLTTELDTEVTERRNAVTELSVDRRQLDVDGRKLAEEIASLRGRTSNIPDRNLRIRQMICEGTGIAAEDLPFVGELIGIRDDETRWEGAAERVLRGFGLSLLVSGDCYDPVSQWINDNHLGGRVVYFKVPPRTSMQGVTTPPPPALAHKLDIKDGPFYDWLERKLYERARHVCAETLDEFRREEFAVTTAGQIRSGGGRHEKDDSHRVDDRRNYVLGWRNEQKIAALLAEGQRIQNDLNRIDGQIDEHTRRLGVLQRRRAALDKLTVFTSFDMVDWMSVATRVADLQRRKAELEQSSHELARVTAEIERTVTHIDESGVRRDELRDTIARLTVARDDAVDARTAAAAILADDGFADATVHFAGIDAGLDPTTTLSLQNCAAIESTLSSKLTSEAEQHQGRASNLATRVVNQMSVFKRNHPVLTTEMDADIAAAGEFRSLQQRLADDDLPRFEAEFKNYLNTNAIRDIAIFSAQLGKKVQQIHDKIDTINDSLAGIEYNPGRYIRLEATLSPNAEIREFRDELRRCSDGSFDADADDHYAEEKFLLVKSLVERFRGREGYTDIDRKWTAFVTDVRNWVTFAASERTVADDTEFENYTDSDGKSGGQKEKLAYTILAASLAYQFDLKWGVHTSRDFRFVVIDEAFGRGSDESARYALSLFKRLGLQLLIVTPLTKIYTIEPFVSAVGYVENRSGAQSQLQCLSIEEYRERKRVRDMISMVDESGTG

SEQ ID NO: 30740 - protein, 394 aa, Gordonia bronchialis DSM 43247
MTSATGPAWTAPTDVLTRLRRRWDRGDYLRARALGEPFTPIDMAIRGPRPGELGERYDEVAAWARAWHDTARSPHLRVTMKSVGGKKFGVTTLPDRVIIETIDHLARLLGTTAQISRHDEMLAAVSDQSKVRDWVATKPGRALAHHDDWPSIVAALRWLATNAGSGRRLREIDEPGVDTKFIETHQRILLELGALVVEPDLVTPSAKSIAGRFGFATGHLRVRFRLLDQQCRTPTPGFDDIEVRADDLARSPIDVEKVIVVENLATYLSFPATPRSALIFGGGYAASVIGSLRWLREREVLYWGDLDTHGFAILDRVRVTVPHARSILMDRVTLLAHRERWVTEPAPVDRRLPNLTDDEASVYRDLVEDAFGPSVRLEQERIPMAVVELVKMFV

SEQ ID NO: 30741 - protein, 511 aa, Gordonia bronchialis DSM 43247
MRSSVQNGLGQNGLGHNGLGHNGLGDAAVGRSSLADAWEANRAIHRSAAVRLFAAANSALYVTLMEQHLDFGVRLPETDLAVRLERDIAELGAAEEPNGLELIKLWAKQGWLHRVTDSAGDAAPNICYLTSDARSVLDYVRRQRREDSVATGGSINGVAAGLRRVAGQVTNDPEQIREEITQQLTELDAELADLDAGRRPAPDLRTAEDEARAIAYQMEQIITDIGQYGTMLDRITTQLLDDPHDSDLAYRDRQRRLFDDYEALLESSQSASYHAFSHMIGDPQQRARLIADIETVTAQLPGIDTGLRTVMENFFGLVTQQMGEVGRTRQRCARRIRRFVASGTLEQSRGIARQLNDALATANELLKTSLADRRIGYELPTATPSLASIGRLAFEIRDPAPPAPALPADGDTDLSSFASLAGQVDTVELTEAVNAAVEAGPVPLTEVIAHIEEPYLAHVIVLWSWALRQPGNTAGESTRIRFRSLQGEDQSIEIPALTFTEPIPTVEVDAL

SEQ ID NO: 30742 - protein, 266 aa, Gordonia bronchialis DSM 43247
MSTETEPDEFAGYDDLPAVSTATVNQRPTGPRFDGDVSELPDRACWALQNLVARRYVSGDRHPQLWSWVSEYQDVLRVRLSELDLRLRIADELQVAFVEQAGYDSRWGRRILKRETIQTYDAILALHLAKYARASREEHVLITREEIHELFAGVSNTIDRDLALFDKRIERAIDKLEELEFVRRQRDDPDTFTVSPAISAVMTASVITDLQRQFDQFISSGEEADGPDTPAPTSGEADHHDLDHQDPDHHEPDERDLDGDDEGDDW

SEQ ID NO: 30743 - protein, 1121 aa, Gordonia bronchialis DSM 43247
MSAHVDQYSLSRLQLINWGVFDGYHSIPFSPNGSLITGSSGSGKSSLLDAISLAFLPDNRRNFNASGDATAAGSSSGKRTVGKYVRGAWGERRDGANAAREIMYLRGTGPAWAAIAVTYTSTSGSSITGLVLKWLAAGKMTDAHSSYFIHDGDADIADVCNAWATSNHNSARLREAGWRGGPGEGRYLATLYSLIGIRASEAAQQLLGKAKSLKSVGGLAQFVREFMLDEPTSIAGIKDALEQIDPLVEARELLDVARRKRAILGNIEAVQERYVSESATFSVLDTIDSSTVRAYVNNLGLHNAVPEVADLDDQIARLDGDLAALTAQHDQLRQDHSHLLSRIATSTGDLAPLQEQLAGAQKVSNEASIRRASYEHKVTALGFSPPNDAEEFWTLRETLISDATHIDGQLEAGKAHFAETLAREVAARTQRDTVAEELQRVRQAGSALPRAEHDMRRVIANALQVDESELRYVAEMVELDPDEERWRLAVEKVLRPAGLRLLVPDRHFRVALRFVNNNDMRGRIQLHHAEDRPAPTPQAGTLGATLRPVDPGHPCSAEAVSILTRLGNYVCVDSTAEFGDHPKALTDKGLRKDSAKLAVKDDRAPLRPSQYIFVGNVDAKIAALQDELDEEQRAYDEAREASATLDRERTEREQRRDAYRRLCEQFTQWSEIDLDSADDRVDQLSEQYDLLMEEHPDIEALQRKAEDLWEQVRGAISQAALVRDKMATHDQRRTALLDLMDRLKPESVPAQAQSTLDGFREELAATLDVLAPDAFRTDLMKAVVRDRDRMRSDTRRSRDELARILDRYDEEFPDAIPNDSDDFDERTHDYVSLCRRIDERELPSAYDRMRRLITEQAPGAILNLHMAADAEERRIIEQIERVNSGLGAVAFNRGTRLRLHPGRKNLAAVAELTEKAKHISGRAAPVSFGDEQAILEQYADILLLRERLAGATPEDRAWTRDALDVRNRFDFYCEEHDAETGETIRTYSNAGDNSGGEQEKLMAFCLAGALSFNLASPSGDDNRPIFAQLMLDEAFSKSDPQFAQQALSAFRKFGFQLVIVATVQNTSTIQPYIDNVIMVSKTEGTVSTSEGTSARPVATAMSTSIQAFSDLRRTSGARLPV

SEQ ID NO: 30744 - protein, 510 aa, Sanguibacter keddieii DSM 10542
MNHDDVEALRRDNAAWRLLRADSAPLVLSFLGRVFIEQNVRAIGETELVSLLDDALYDLNAGHDPAPYPRTPKAYLDTWAAPEAGWLRKYYRPGSDEPQYDATPSVEKAVGWVATLRGRSFVGTESRLNTVFELLRQLAVGTETDPDVRLGQLEARRAQIDAEIEQVRAGVVPVLDAGSQRDRYQQFAAMAAELLSDFREVEDNFRSLDREMRERITGWDGAKGELLEQVVGSRDAIAESDQGRSFHAFYDFLLSRERQEEFTELITKVQTLDAVSAMSGGDKRLRRIHYDWLDAGERTQATVRVLSEQLRRFLDDQVWLENRRVMDLLRSIEGHALAVRDSAVGAPELVTEIDGVSLDIVLPMERPLFRPQTVAKIDSEHVAPGEVDFDTSRLFDQVHVDPARLTAGVRDALRHESQVSLPDVVAAQPLDQGLAELVTYLSLDDPRFRVVVDAEHTDEVRWMLGDVERVATVPRVTFVRRSGSSPSDLTAAPSDQIAAPASHAQPEETS

SEQ ID NO: 30745 - protein, 210 aa, Sanguibacter keddieii DSM 10542
MSQPTARADSELSHVVTALMKGVVYRDTHAQTFADLITLQPQVRDYVAVIGLSVVVDDTEGYAYLRSMDDDTEREGTLRLVARRSLPFEVSLLLALLRKRLALFDSEGGQTRLILGRDEIVEMVRVFLPTSSNEVRLVTRVEGMVHRAVELGFLRGLGEGQYEVRRVLKAFVDAQWLADLDARLAEYSGYAAQGHASQAAQDVQTDGTVE

SEQ ID NO: 30746 - protein, 1166 aa, Sanguibacter keddieii DSM 10542
MEGLFSAVELHDAEADVDQRAGFRLERLEVLNWGTFDRTTWSFDLEGRNALLTGDIGSGKSTIVDAVTTLLLPANRISYNKAAGAEAKERTLRSYVSGYYKSERNEATGTSRPVGLREGSTYSVILGEFVNRGFEATGVLAQVFWLKDGDQGQPSRFYVTAASSMTIAEHFANFDGDITRLRKRLREAGAQVRDTFPEYGKDFRRMLGIESDQAMDLFHQTVSMKSVGDLNEFVRQHMLEPFDSGQWTDRLVAHFDDLTRAHDAVTRARAQIMQLTPLVADCDRFAGLVDQASAATAQRDALRVFTAQRKDSVLTAQIDAYDAAIRARDERLVSLDVEIRTSEAERRRLELERAGHGGDRLAQIEAESARLDAVRADREKRAAEYRSNLEAAGLEGVADAAEFAARRDQVLAQVATEKTELQQVETAIGEIDYALREQKVVSREITEEIRSLQGRSSSLPARSLQVRAQIATELGIPEDELAFAGELIAVRDDHRDWEGAAERVLRSFALSLLVPAAHYDAVSGWINSNHLGQRLEYYRVPAEVRPRVESGGGADWPHLSEMLEIQESTVSRWLEQELARRADYACVDSLDEFRRAHRAVTREGQIKHSASHHVKNDRNRVDDRSTYVLGWSNQTKVDTLLAQATTVSETVADLTDQRAALIATKDAVVDRAHALNRLEMFRDFTELDWEQVVHQVGELTAEKRRIEANSVELAELASTLQEQTRRGAELAEERDRLISRNGGERHAVESFRTQREAARKVSGGAGAGAGADGAATTGAAGVDQEALDAVAALWEALPGQGGGRPGATVAGGPGSGDAATTMAEIDAAEAALRTQLTGVVEARQREQGQLATSVAKQMTAFSQQFPVETSEMDNDVRAAGEYRELLERLERDDLPRFEENFKEYLNTNTIRDVAQFAAELQKQSDLMSDRVDVINDSLRAIDYNPGTYIRLEMTSTPNTEVRDFRTQLRACTDGILGEDLDQYSEQRFLRVKEIIERFRGREGQTEADQAWTVRVTDVRNWFVLSASERSKADDVELEHYSDSGGKSGGQKEKLAYTILAASLAYQFRLDWGAVRSKAFRFVVIDEAFGRGSDESTRFALQLFRNLGLQLLIVTPLQKIHVIEPFISAVGYVDNPTGRGSRLQTLTINQYRSKRSEHLLGALGAEV

SEQ ID NO: 30747 - protein, 499 aa, Xylanimonas cellulosilytica DSM 15894
MNRVEGAYQGAVRAFRSPMLALLHKRDAPLVVALLSSVFRPDRRTVQVADAHTEMDDALAQLRAAGHDDVSDRSARELCRTWVDAGWLVRQVDDASREAGVPREGAEVYRLSAHAVDALEVASRAGGGHARVSRSRVLTLLEAVERLADDADPDVMTRMLRLQREITVRQAELDRLDRTGEIDPVDEEQLLEAAENVLLLVRELPADFARVAESIRAIQRETVTALRQDARPTGEVLQDYLERAEHLMDATAEGRAFSGAKRLLDDPERMDALVDGLDTVLRHPFAHRLPEHQRAELRAVALRIEAGFAEVLTAQRIASRVITTQVRHHDPLRDRQVDELLRDVVAALGAWMPTSRRAQPVEALRRLPRARVGRVRTTLADLTPRRGPEPLTEWDDDEAGSLEHAAAWGGPRYAALRGLLDEAGGARLDDVFAGGPDDARRPVDFVGLLELAARAGLDDLDEVAYVDTIRPDGTRRRLAFEAAALARAARTTAEGDTDD

SEQ ID NO: 30748 - protein, 250 aa, Xylanimonas cellulosilytica DSM 15894
MTDIPVSDGFIEPVAMEADPTELFAGDTGTLDAAARAVLVDLLRRRYLSADASPQRWAALLEHQSAIESRLHDLFVTLVVDRDRGIAYKRQVRSGEVEIPILLRDEAYTRVETVLLVHLRTLHQREQGAGEVAARVDAEELEQHVMSFLDPAETNVAARQREVRAAIARLATEGFLDEESPGRFRITPLVEVVLPVDRLAELAQWLRSGGRPAVVADADGVADADDAEADDGDTDDGDTDDGDDQAEEDD

SEQ ID NO: 30749 - protein, 1120 aa, Xylanimonas cellulosilytica DSM 15894
MTMIDTLFGLVPAASTGQQWVARDLQVVNWGGYDGAHRIRLAPTATLLAGGSGSGKSTLMDAYIALLMPHTTPFNGASNGGVVGRPRGKDQRNVISYARGKIDESRTADGTRERVLRGDGRDTWAAIAMTWADQSGALLTAVRAWYVPAGAASMDALVPVRATIAGPFELASLAVPAEARFARAALTALGLTCFDTDKEFAARLYSSLGIGAAGGGDKAVGLLARIQAGQQITTVDALYKSMVLEEPETLAKAADVVEHFDELSGTREQMVTAQQQVRALRPIRAHRAAVDEARDRLDVIDGVGGAADDASAVGLWRAEHRAALLRAVEDDVRGRSRAETAQVRDLKARVDARKDELEGVRQTLWASGGATIQNAERELAAAEARLTDARRTRGRLDAALEVLGTTVTTEADFDRLAAASRSRLADTAARHAAFDARDKARDAEKAATAELAALETERAGLAARAGNVPEELHRARVALAQAAGLTPEQLPFVAELVEVRTEHEAWREAFNLALGGFATTLLLDAADLPRFRAAIDSVPSRRRLRFEGVTTGLDSRSAIDPATLPGRLDYAPGVFRGWLREHLAERFAFRCVDSTTALAQHPKALTRTGQTSEGSRGAHGGQGRPNVLGFTNARRITELDRQIEEARTVLRTAAEAFRGAGLRLDAVEEQATAARTVAELRWASLDVRGAEAACEQWRSVIAAARADNPELGVLETRARELDAEVERLQKELGATEQRAGALADRWERVSEEVDAVQAVLDAAADDGATLTDRQRTYLDELLGEATATPGTDGAAEPEPAQALAAFDAVVARVGERLRHDHETAVTAVATGTDALRTIFEAFVRQWPSPDLGTDPDASYRDFERVLTVLETDRLHELEGEWRRSLLRLSGDDLTDLERTIARSLREITERIDPVNRILADLPFADDDHRLRIDARAAASSVVAKFRKELRDLRELLASDASDAEREARYARMSRLVERLRPGSPERADLIDVRRHVRLSAEKVDLAGNHVALYDHIGEKSGGESQELVAFIVGAALRYQLGDAGADRPRYAPVFLDEALIKADAQFSGRAVGAWRGLGFQLVVGAPNDKVSALEPHVDASYVVTKDAAGRSRPRAVIGVP

SEQ ID NO: 30750 - protein, 524 aa, Bifidobacterium animalis subsp. lactis BB-12; identical to SEQ ID NO: 30666

SEQ ID NO: 30751 - protein, 269 aa, Bifidobacterium animalis subsp. lactis BB-12; identical to SEQ ID NO: 30689

SEQ ID NO: 30752 - protein, 1165 aa, Bifidobacterium animalis subsp. lactis BB-12; identical to SEQ ID NO: 30668

SEQ ID NO: 30753 - protein, 406 aa, Bifidobacterium animalis subsp. lactis BB-12; identical to SEQ ID NO: 30669

SEQ ID NO: 30754 - protein, 486 aa, Allochromatium vinosum DSM 180
MKADKAIATYRRMRTQPLWRLLASDNGPTVIGLLQIHLYESEQSLPASTFHERIGRSLEVLRAQGEDFPQTAQAYVANWLADGYLERRFPAGASEEEYELSTAAIEAIRFVSGLTQPHSAATESRLTLVIEALTRLAEDTDTDKFRRIDRLMAEQARIDKEIDAIQKGQMRVLPHAAALERTREIITLADDLAGDFRRVRNQFEQLNRDLRERLMDNDGNRGEVLDSLFAGIDLISESEAGRTFSAFWRLLTDPEQAATLDQALDSVLSREFVTQLDAKERRFLLRLTRTLLEQGGMVHEVLQTFARSLKHFVQSREYLEQRRLNHLLKDAQRAALALKDEVRATETLQYTLELSSSRLRSLSQWVLYDPSLQALPGQMAEGDALPIDLESVGELIAQSEIDFRTLKANVLAVLEHRSQASIADVLERFPAAQGLGSVVGLLALGSRHGFRSDHSETVGWIGGDDQSRSARIPKILFLRERANELV

SEQ ID NO: 30755 - protein, 236 aa, Allochromatium vinosum DSM 180
MSWSEIDEAALPDEERAPDAVPASANTLFIGDSGELPLDTRRALVQLLAGPSLDGYRHPKLWPILIRDEVPIRRRLAELFLELVIDRDMQVAFTRQADTGELEVPTLLRRAQLTFIDSILLLHLRQRLTQADSRGDRAVVSTDEIMEFLNLYERASNTDRAGFVKRIHASIEKIKKHSILQKIRSSEDRFEISPTLKLLFSAEEIQALTHLYQRMAADETPAPVTRTESDDEEADP

SEQ ID NO: 30756 - protein, 1124 aa, Allochromatium vinosum DSM 180
MILEPQTASLFAREQFRMARLQVFNWGTFSGLHDIPISERGFLFVGRSGAGKSTLLDAISALLVPPQWIDFNAAAREADRSGRDRNLVTYVRGAWAEQKDGESGEIATRYLRPGTTWSALALTYQNTLGQTVVLVRVFWLRGSANGSADVKRHYLILERPFDLRELEDFGQSNFDVRKLKQSFPNAFARDEFRPYCERFSRLLGIESEMALRLLHKTQSAKNLGDLNTFLRDFMLDKPETFEVANRLVSEFDELNAAHQAVVTAREQVETLLPAREQDQHRESLLSRRNGLEELRLGVDGYRETRRIELLKQQVASLEVQAGGTEGEISRCKSTLDNHKTTLRDLERQHREAGGDRIEQWESEKSGLETQRTDRLRKRSQAEEACKKLGWSLPDSPQAFAESLGNARQEIENREQFSNENREEQFRLAGRKKDAETAFSQAVKEVQALQRQPSNVPADMLEMRRDIAAAIGISESALPFVGELIEVKADEAEWRGAIERVLHGFALSLLVDERHYSALANHINDTHLGQRLVYYRTGRPETWQVRPIGPNSLVLKLNVKEGAYSDWLQAELRQRFDYVCVDGMTSFRTADRAITREGQVKHNKIRHEKDDRRNVGDRRSWVLGFDNREKLALFQAQAQELAATISRLAREIDALASQDKDRADRAMQCQTLVSLQWQEIDVVPLLDRIAAIERQIREAREGNTALLHLSERIEQQQKRVAEAEQGLQDARVTHESVLKKIRESTQELESLLQDASRVPLTPHQITGLDERFDKQADVLSLNNLGKVATTVERALNTEITDIDHAIRDCEKIIEARFTDFKRQWPMDAGDMDTSLSSAPDFFARLVRLETDGLPAHEHRFFELLQNQSHQNLAALASYLRDERKAILERMDLVNDSLSQVPFNQSANQRTYLHIDTSDRQLADVKEFQQNIQRALSHAWSEDREFAEARFSVLRQLVEQLASQEPEHRRWRESVLDVRQHVEFIGREIDECGVEVEIYRSGAGKSGGQRQKLATTCLAAALRYQLGGNDHGVPMYAPVVLDEAFDKADNEFTALAMHIFANFGFQMIVATPLKSVMTLEPFIGGACFIDISDRRVSGVLMIEYDNDRQRLRLPEHAQEEADVEAS

SEQ ID NO: 30757 - protein, 389 aa, Allochromatium vinosum DSM 180
MKLPEDVRQLLARRFQSKHRSWLAGESGENQWPLKIALGVPTEQAALRQVEGVRVWVSAWQHWHGPGALSWCERRWKTLGVQRVPDTLILNGPDEVAQWIGEGTRWKQAQSRYQTLIARWPLLARPLRKYFDVLADYGDADFRRMADMLAWIASHPNSGLYPRQLPVSGLDSKWLDGRTGLLKDLMAAIQGDAANDLDFYERCGLKAPPLLVRMRILDQGLRTWIGGMGDITAPVEDLARIHLPASHVFIVENLQTGLAMSDMPGAVVFMRLGYNVNVLAGLPWLTHAQCIYWGDLDTHGFAILHRARSYLPGLRSVLMDEDTLLRHKALWVDEKEQHAAAELTLLNETEREVYQGLKQQRWGQNVRLEQERIAWDTAWPTLQRLVGTL

SEQ ID NO: 30758 - protein, 481 aa, Mycobacterium liflandii 128FXT
MHDDNAGLSATELLDLNRDLQGSRAIRLLATTNLSLYATLMERHLSDGALPETELVVQLERDLEDVNDPQPGLALIKSWAAQGWLHRIVDERHGQNVCYLTQDARRALDFLRGLRRQDTIATGGSITGIAARLKQVAVKVDNDPARIRKHIEAEIAALHEELDQLDAGQRPQTDVTDCYDEARAIALQMERLITDIGQYGTMIERATSALDEPIDSNAEYRDRQRQMYSDYQAAWDSQGRDSHRAFLRMINDPDQRAEFEADVAAVAEALPSLDPALRKVMAGFFELVGHQIDEVERIQQRCAQRVKRFTAFGTMEQSRGVARQLNEAIAAARALLKSSFTDSRLDIEVPLARHAISSVGALGFRIGDLSNPKPAKPGDTEVDLTSFAAFTTQVDAPAMSDMLNHAITAGLVALPDAVAMLDTAYLGHVIVLWSWALKQPNPDTAESTAVRFRSLDGRDLEIAVPRLTFTEPINTIAGAST

SEQ ID NO: 30759 - protein, 231 aa, Mycobacterium liflandii 128FXT
MTLQDDEVDIDFSSLPQVDQNARPPVQRRPRFDGDVSELPDRACWALQHLLTRRYISAEADADVYSWVLEYRKDLAVRLSELDLLLRIVDAADVAFVEQARYESARGIKLLRREPLGTYDSILALHLAQMMRASGGQTVLISREEMHGLFSGVLNDTDRDAVSFAGRIDGAIARLTGLEILRKTRDDEDSYTISPVITAVMTASVITELQQQFEQLLNGGAPAEEEEPEGD

SEQ ID NO: 30760 - protein, 1120 aa, Mycobacterium liflandii 128FXT
MTEQFHLSRLQVINWGVFDGYHSIPFSVGGALIAGASGSGKSSLLDAISLGFLPFNRRNFNASGDNTAAGSSAGRRTVDKYVRGAWGQRSDGGTSRVMYLRGDGTAWSAVAVTYASDSGRTVTGLVLKWLTGESRNDSSSRFVLGDGDLDIEEVCNRWASGRFDAGVFKEDWRFSTKVESQYLAQLYAAIGIRASDAAQQLLGKAKSLKSVGGLEQFVREFMLDEPDSLARLPEALKQIDPLVEARELLAVAQKKRKILGDIEQIQQRYASESSDLGIIDLVDAPMVRAYTDHARLAQCPAQIATLDGTVDQLENEYEDVTRSLNLAKAEADSLNAQISGSSANIAPLQSQVTAAETQAEQVERRRTTYEDMLAAQGIEIPDTADEFWNLREELLAQATELLAKVERNREASTDAEYAQKAARIARDDVAKELKRVEHVGSALPEFALAMRDHICAAIKVDAAELPYIAELLDLRPGQTRWRLAVEKVLRGVGLRLLVPDQHWEKVLRFVNETDMRGRLQLHHVRAKFLGAEPAAPEPNTLAGKLFPVDPKHLCAAEAVDVITGAGDHVCVDTPDVFSRFRRAVTDTGLYKDSDRLAVKDDRRPVKLSEYLYQGDVTAKINALTVELAAAEEAYQKARRTADDIAAQRQQWRDRAAACKAICEQYPQWSQIDTETADGHAERLREQYELLMADNPDIEALNARADECWSQIQKLMTRRGAIHTRRDSLDERRTRLLELQERLSPAFVSEPLTELLQRYAAQLPVALELLDPEPHRDALFAAIKKEREQLRESRRRSYDELARILNTFDTSFPDAIPNDSDDFDERVHDYVALCRHIDERELPEAYERMMRLVTEQAPDAILTLHRVAEQEARRISGQIDRVNTGLAAVEFNRGTRLTLRATPRHLVAVDELTQIVRSISRRIAEVGLGDKQAILDQYAEILRLRNRLASTAPEDKAWTRDALDVRNRFTFDCAEWDVDTEELIRTHSNAGDNSGGEQEKLMAFCLAGALSFNLASPESDNNKPVFAQLMLDEAFSKSDPQFAQQALHAFRKFGFQLVIVATVQNATTIEPYIDSVVMVSKTEPTGGNARPVASVATRTISEFTSLRQEMRKTAERVPAGV

SEQ ID NO: 30761 - protein, 486 aa, Mycobacterium abscessus
MNDLTVEELFAHNDDVQKSRAVRLLAAKNLAPYITLMERHLDRSAKVSEPQLVAKLDRDLSAVGLGEQSGLALIKSWASDGWLHRASDGTGPDAENVCSLTEDARSALAFVRRLRRADTVATGGSIAGIAAGLKRVATQLDGDPSRLRADIEAQIAELQTQLHAIDDGYRPEPDIVDLEDETRAIAYQMEQVITDIVRYGSMQNEITAGLIDAAEDSDSGFRDRARRMFADYDALFDSRERASYSAFTRTIQDPDQRAALRSDIACVAEGLPDLDPGLREVMRNFFKLVSQQIAEVSRIEQRCAQRIRRFFAAGTTEQARGRARQLNDALAAGHALLKMSTADSPIDAELPIGRSAAAAIGALSFTIKDTAPPVLAQDAPSGPLDLSGFSALATQVDMAALADTVNSAIASGPVSLPDMISHVEAPYLGDVIVLWSLALKQDNTADRESVKVKFRSLDGQDRVMEVPQLMFREPVLATLEEEGSTL

SEQ ID NO: 30762 - protein, 249 aa, Mycobacterium abscessus
MTTQASGTALGNINFDDLPGVEPDASAPRMAKGPRFDGDTSELPDKACWALQNLVARRYLSKDGQPELWASMIEHRKVLAARLSELDLRLRVFDDLEVAYAEPAPLENPSVYGARVLRREPLGTYASIVALHLAKIARTAHDEHVLVSRDDIHELFANVSHDIDRDEAMLRDRVDEAIKRLSKAEILQRTRDDEHSYTISPVINALMSAQMIEALQRQYEQLQRGGAAPEDADGADPTDEEDGETDDDE

SEQ ID NO: 30763 - protein, 1115 aa, Mycobacterium abscessus
MTTSDAATQQFWLSRLQVINWGVFDGYHSIEFSRRGTLITGSSGSGKSSLLDAISLAFLSSNRRNFNASSDTTAAGSSMGKRTVDKYVRGLWGELKNPGERPKQMFLRGKGGAWSAIAVTYSGTDGRVITGLVLKWLAPGSDSDSSSRYYLIDADADIRDLCNAWASKGYAGSVFEGAGWRGHKSERWYLEQLYAAVGIQGSSAAQQLLGKAKSLKSVGGLEQFVREYMLDEPESMAAISEALGQITPLVDARAALAIAQRQRQTLGDIEQIQQTYASDAAQLATVDVVDHHTVRDYVDQQRLALAGPEIDLLDTEITRLGGECDEIQSRQDILTGERDKLLGRIAAADSNLAPLKSELAHARARAEEVSRRRTAYDSALWDLGHEDDIESAEEFEAMRVESLRAVTRINAELEAGHDAYVMAAGALSTARDQLRAASAEFKRVEHLGTPVPPDEDRMRGEIAAALGLTAKDLPYVCELMDLRPGQERWRKSVEKVLRSTGLCLLVPDQHHRQVLRYVNENPMRGYLQMERVIPSGTPRRAEPGTLADCLRLTNPNHECASAAMNLVAGVGDYVLVDSPDEFSKHRRAVTDQGLRKDGDRRAVKDDRRELRASQYIYQGNAGDKRAALSDDVVEAQQAVSDAEKFIGEMDTKREELRSEVVRWSKLHSQYEYWSQIDTDSAEAAVARLQDQYDAMLEANPDLTGLQQQADSYLDEIKRLSERIGALRKQESEHDSRRTRLLDLLDNLSPREVGGHTRSGIEAYVPQLSSSLDVLEPDAYRLELWRQIEKDQSVLRESVTRSRNELNRILNAYDRDFPDSIPNDSENFDEKIHDYVALCRRIDERDLPAAYERMLRLITEQAPTAVLRLHQLAEEEAHRITDQIDRVNSGLGSVEFNRGTRLTLRAEPKALEAVGELNERARRISGRAVAVSMGDEKAIHDQYQDILQLRNLLAAETPEARQWTRDALDVRNRFVLYCEERDARTGEPIRTYSNAGANSGGEQEKLMAFCLAGALSFNLANPETGDNRPVFAQLMLDEAFSKSDPQFAQQALSAFRKFGFQLVIVATVQNTTTIQPYIDSVVMVSKPDGPGVRPVASTRTVPIGELGDVRKAVSAR

SEQ ID NO: 30764 - protein, 476 aa, Cupriavidus taiwanensis LMG 19424
MVDSGYPQFFRPLTLKRRKLIAACIRAFYARLYGSHADYRSILGREDLRDLFVQTMQSATLPADPAGEDGDDGFAAGDLADDQKLASAIVRLLVADGWLETAEDRVRLVTAYRFTRAGKIFAQALTLADRPRERTRQRNMRSCKNALSAFIERRDVEDLLDAYEYADRVIADLSEDIELFYDLARKILLDAHVQGNWDGFIEFVERRFRDEFSPRLVYDNAERHRLDIGALIERLNDLSAAEMQAIDDDLANHAAWAAQAAPDGAILRWMLDRIDEMVTAACRTKQPELFRAMESYVRRHVVLLSQSLFMGASGSGAALSTLIRRLGEMPERDQGAWLERQGAALAPVSVALYDPAAVQPRKTAERNRAQAVSIVPEITREERLRQFVRQAQERAFSLSHHDVVDYLLGSMRGTGALRLSELPVDDAIQALSLLRAVEAARDHEGLDVERLDAEPLDNAIMSGTDYAIRRRHIGHG

SEQ ID NO: 30765 - protein, 228 aa, Cupriavidus taiwanensis LMG 19424
MDEITIGQLVEAELKAGGVRPEAFGQILGRLFGLSILHREDSAIERQLYDDAVRIEGLLNAYFDVGGFRLLHERHQSYFRLYPPGARVPGLPAEDDAIAVDAVRAKLSADFVACCLVLRLLYNESLRQGSINERNEALVTVEYLNATLTAQARRSLPAKTAREKLFADLKRARLIDYRADSEVEDADALVAIRGTILQFVADSAIDALLTETRTPVSAVTSPEPDDEA

SEQ ID NO: 30766 - protein, 1223 aa, Cupriavidus taiwanensis LMG 19424
MRLEKLILVNWGFVVSREYPFGHTTLLSGSTGVGKSSFQDAIQLVMTGGKQHINVFNSAQDESGASRAGGKVRRTLASYAVGMRDNLCVRPYGSHTYVVAVFAPDEWESAEPFTAVVAVEAAVSGTREQGRSVDVARKLYFVLPGSRVMEADFIESRKGNSITAVKVEDIYHRLRQRYPRVLPFENSIEDYLCKLYAEFRGGGKTLVGPREAEAAARAFVQSIARKTVGSVDELIREQVLAEPDFSDQIGHIASLMQNVQRLRKIATELLACRERLGVLKAHADAFLAAFEEAMEAELGEVLRRQRDVEEEIQRLEACRRLALADVEKQQALADRHAQALKRATELHGTAKGRLNGNPVAQDRERLSREIAVATDGRSRIALDVLAALAGLRGVLDELAALAKLPAGPASAYASHVERLVVDATAIDGADGQAAARELAAMLTGAQIEPASLRRDRFAKLDAALAPIAQRLHGADGLYGAVVQEQARESDRAAALQGEIDDLKRRRQGLEDGHFDLPAHVEVAVRYLEAQMPGARPRVLCNLVQPREGSRWQNAIEGLLGGNRFVILVDAQYEASAIRALRHELVATRQGREASVVQGELAKRRAENQALSPDAVLQELVIADETARAYLVASYGRYVKVADAQALRGAPQALTVDGMASGGFKMFSSWVDDGELAFGAEARRKRVVRLVRQIDEKSQERDAHRAGAAELAAWGARLLALQLVPVAPMLDKLGETQRELNSLAAQLASLDDADLIVLERRVARAEQLLEGHHRLSNTASRLAGEAEGRARGFEANIGDAEAKLVECKDAVRQINARVAELIRLNPHFDPVRLEQRAREAAKEQTAASFDGRRRQQAGIYRQEREAFERKLEAHNLLSSSFDERVDFQPCQSTQGEYEWQAYGGVPAARRQISAMLERLDQVRILNNTSELRDAEKSFNNTFSTHFALAVRTAVEQGIDPLKRLNEKLKRLAFGEDRFEIEYGQMVKEYKKYFDLFQELNRLAETQTPVDLFSAAEGVLSAESVVALDDIKLLLLDTNRDHALRRLKDIADYRNYRQYDIRKYSEDGREASLARMATFSGGELMTPAYLVRAAVLAQAFRQFEKTPSLKLMMIDEAFDKMDEGRTAAVMRYLNENLGLQLVVAMPSRASGPLLELFSFEHRFSLMKVEGLAGELDKITEVDSSLLKADRLHALWTERREAVRREAAWQFDLQEARKQLISDMGA

SEQ ID NO: 30767 - protein, 387 aa, Cupriavidus taiwanensis LMG 19424
MSADDIPGRRPDALTALLNALVDRIEAKPFAERRRDIGFPLSAGTWPEFFSIDLHGERMFVWRALEALQAQPGFALMLDQRRGQRDLDIWERSPKLVIAAQAEAFLRDETGRQPNAVVAWMAQWRKAVPARVNNAALCERLLSRPILILPRSPEQVLERFAGIPALASESLMLHEVASRQFWGLSKVLNGQQEAIALLLDTEVCPFPDKPVQLLVAARTADPAAPVLFVENAATFESMAAGRLSAAEGFVLIFASGYKASARRLRQPGGSSVYFAPSVFERNAALGRSFLAWLHGTDDTRPVHFWGDLDFAGMDILKELRVVFPDAQAWKAGYEALLARLLAEESHAADEARKSGQTDPGFTGCPYADEVLLPALRRHGRFVDQESL

SEQ ID NO: 30768 - protein, 466 aa, Corynebacterium urealyticum DSM 7109
MLRAHNAPAVLSVLSAVFEGSNRQIAGSDLTLSVESLLIDIREQTNLELPKSAVAYINDWVKLGYLTRRSPQGSREEFYELTTDAHVAIDYVQQLISPQRVVTKSRLGTLFNNLQDLAAETDPDEARAISRLEAQRDQIQARIDNIRINGVGVISDEEAVERAREILALARDLPTDFSRVREEVENVDHELRESLVEGQLNAGEVLDNVFRGVDLIAESEAGRAFNSFYELFLDPEQSKQLDAVMDAVQSRDFMEQLGPEERIEIAQLVDMLDSSSGQVHTSLTGLSRSLRRFVQSREAESQQALTRAINQAQQQALELAKRGIAPYEKVGYELELTTRQPTSLSSWELHNPKEYRIERSMEVNESGEIDFEQMRQRIRESEIDWQELRVAINDVVGSKGQASIREVLEEHPATQGLASVVGLIKLAHDHGERSDGTEILQWERPSGKRYQARYERFEFRRKVGRI

SEQ ID NO: 30769 - protein, 195 aa, Corynebacterium urealyticum DSM 7109
MENKLYEGDTGTLTGLQRRALAELIRGPYVSSVKSPEVFTAISNSREILAQQLDNLFLTLILDENAGVAYTKAWEADVPEKRALLRKQSLTFMDTVVILHLRRELVTTSPNERTIVDEGEVFEATLPYQGHAGTDKSTQRKRFTAAWNKLKNYSIIASTPTEGRFEVSPVLRIIFSSEEIAAVTETFRALLEEEE

SEQ ID NO: 30770 - protein, 1116 aa, Corynebacterium urealyticum DSM 7109
MTTTLPGQFRLSQIQVYNWGTFDNLHCVEVPREGFLITGPSGSGKSTLIDAISTILVPPGKIRFNAAADNQAHSGRNLVTYCRGAWRREHSIEADELTQSYLRTGATWTGVALRYSDGAGETVTACRLMFLPANAYSRQEITDLYILLPRDADLTEFEDLAQKNLPVTEAKKTYGDALHVSRNHPKFSLALRRAVGIADAGALDLLNRTQSAKTLGDLNHLMRTFMLPEPETFEIAEQAAENFTDLRTAYESVVKTRKQIEQLVPVRVAAEKRAEVEDSLTRVKEDRDGVETFVDEWRQRFAEQERDQRISEIKAVSATIEEATGERDMHRAQVDQLRTLIHGAQDSALVSAQARRDRLQDRLERVTKEEKAFNSRLKAIGATKPGSAEEFTNLVLQLSEERKRLSAACETEDGKLAQAHVRVHELGENKKERIAELEALRKYESAMDNRLLRARALIAERSGVRESDLPFIADLVSMRPGEGHWQGTAERVMGGFARRILVPDEHYDQVSSAIDGTYLGAKVSYTRFTQDLEEQRPSRFVPNSLGLKINVKPGRYHDWIQTQLSKNFDYLCCDSMEEFRAARRAVTAKGQVKHNRNDHIKDDRRRIDDRSNWVLWGNLADKIDALQASVRSTVAKLEDAERQRKTIAAGQEKRRAQIATIERLLETERFQDIDVSSVAQELAEAQSDVDELTDGNAELAQLKAKLKSVESALDKVEEQVMALRNQLSGFKIRLEQAEETLERVRNRRGGKTVSEDVAARLTERCKAIDRTIRSDNIDALSNQLVRGIEDQLAELNARFTKHGGDLVNAMNLYLVRWPDRAGDLKADMEWEQDFLQELGRLEADDLPRFEQRFRDMLQDETHKHLGRLRRLIRDAAAKTRSSIQMINDSLAEVEFYPGAYLTIEVREAQPAIARDFVELLDSALAGIINDADQEESEQRFHKLQAVIDAVTVSDGTSTRDRQLRLDTRQHVKFLGVEYSEDGARGAVYDSSEGLSGGQAQKLSSFCLAAALRYRLTGMGLPAAQEKKSIVRVGEDIYPRFGTIVLDEAFDRADTEFTRAAMEAFRRFGFHMILATPEKLLQTVQDYIGGVLMVECPDRKRSRTSSLTIEEVQDEDS

SEQ ID NO: 30771 - protein, 371 aa, Corynebacterium urealyticum DSM 7109
MKTPDQVRQRAAVFYSRNHRSWLAGKFKTLTINLDPPTGRAAERDNGAAVRAWVAQWNRSSITAEWEDKKLSYLGTYSLPRRVVLSDADTAARVAGKLDHWQRLQAVLGRFCMELGESVRPELIRHLSSWEDWGDVTVEQFIAVVRWVHEHEVSDFYIRELPIFGVDSKWFEAHRAVVEAVVGPLNFKSKPQLVEVRSLDPALDISGMRYLACPVAELGETPGERVLIVENHQSFLALPDLPATVAIFGGGLNAARIVQQIPSLGEIDVLYWGDLDSYGFYILELVRRYVPHARSVLMDLDTVRDHVDLAVEEPQPSRFDPELLSYGERLALDYLRGRSAGGCLRIEQERILFDYAQQQLCHAVSPNGAGA

SEQ ID NO: 30772 - protein, 489 aa, Xanthomonas campestris pv. campestris; identical to SEQ ID NO: 30399

SEQ ID NO: 30773 - protein, 235 aa, Xanthomonas campestris pv. campestris; identical to SEQ ID NO: 30400

SEQ ID NO: 30774 - protein, 1338 aa, Xanthomonas campestris pv. campestris; identical to SEQ ID NO: 30401

SEQ ID NO: 30775 - protein, 489 aa, Stenotrophomonas maltophilia K279a
MKHRERIARYRHLREQPQWKLLAADHAPEIIGLLQGLLMDGERTLPSSVLNERLQRALDQLAGDELSRELPRTAQAYIAHWLAQGWLERRLPEGADQEQYELATAALQAIRFADGLEQARVAATESRLALVIEQLSALAAQTEADPDARLSALHDERDRIDAEIARVGTGRVVALDGKRALERTRQIIGLADELTEDFRRVRDDFEQLNRDFRERIIDDEGERGDVLSQLFEGVDVIGESDAGRSFQAFWRLLNDAEQSAQLDAALEAVLARGFARRLDRNERNFLRSFTSTMLERGGQVHDVLQNFARSLRGFVQSRGYLEQRRLNQLLKQAQSEALALRDEFPAQRGIGRDLQLTTSRLRSWSQWKLHDPRSAQVDGNVEYNDAAAISLESVGDLVASSEIDFRTLRRDLHDLLDAQPRLSIAQALSQREAPQGLGSVIGYLSLGTRFGNVVAGEQELAQWRGGDGQVRRARIPLVWFTQERRHELA

SEQ ID NO: 30776 - protein, 233 aa, Stenotrophomonas maltophilia K279a; identical to SEQ ID NO: 30657

SEQ ID NO: 30777 - protein, 1126 aa, Stenotrophomonas maltophilia K279a
MAISKHTPALFNEGLPDPRLQQFRMRRLQVHNWGTFNGLTEVPIAERGFLFVGRSGSGKSTLLDAMSALLTPPAIVDFNAAAREAERSGRDRNLVSYVRGAWADQQDSGTGEIATQYLRKGATWTALVLEYRAGDGRVVSLVRLLWISGNGTSAGDVRKHYMIAERPFDIAKDLGGFDLDLRKLKQKLSDLHHFDTFSGYAERFRDLLGIDNEMALRLLHKTQSAKNLGDLNVFLRDFMLDTPKTFDAAERLVSDFAELDGAHQAVVTARRQVETLLPARAYYNDLKEMHRRRGDDEALKLGVDSFRESRRQALIEARLREMDVRDRGLLGEEAQRRAALDNHTERLAELELQRRQQGGERIEELEREQGRAEAERDRRQAKREQASLAAQQLGAELPDDAHGFAELVERAQNELQDRQRASSALDDAISDRLGGKRDDERRFGEVRAELEAMQRTPSNIPAPMQKLRARLAEETGIAEAALPFVGELIQVRSEEQGWQGAIERVLGGFALSLLVDDKHYNDVAEWVNRTHLGMRFTYYRVRRNDDAFAREPSAKSLLHKLELREHVFESWLRRELGKRFDYECVDAKQLRNVDRGITREGQVKHPGDRFEKDDRSAVGDRRRWILGFNNHDKVGAFEREAQELAKRIASCETDIARLRGQRDRDNERRLACHELVSISWNEIDIAAPQQRLSDIEATLRDLREGNADLAKLAKQIDAVRADIEQARRTYEDVRVERGQLVKERDRLDRARQQSRALVLPSLAQEQEAGLAERLQEQGPLSLETLEAHMRQVSNALNEQLSSSQQDLNRIENQLIGCFRRFIQQWPEESGDFTVSVASAEDFLARLERLERDGLPQHEERFFDLLQNQSKNNLLALQRHSAEARKSIGQRLDEVNASLEQVPFNRGTLLTIELSDRRLPEVGEFQLQLREVLSQQQTEQRELAESQFTVLRQLVNRLGSQEGEDKRWRELVLDVRMHVEFIGVELDAETRQQVEIYRSGAGKSGGQRQKLATTCLAAALRYQLGGADSQLPSYAAVVLDEAFDKADNEFTALAMNIFDNFGFQMVVATPLKSVMTLEPFIGGACFVEISGRHDSGVLLIEYDEEGKRLKLPERSRQQANEPEEADA

SEQ ID NO: 30778 - protein, 470 aa, Methylobacterium extorquens DM4; identical to SEQ ID NO: 30685

SEQ ID NO: 30779 - protein, 211 aa, Methylobacterium extorquens DM4
MLEPFRAILDGEETPPPGSAAPSEEELTRTLQVMLKSQCIYAATTGIGRSYELARHYAPFFRDYFACLGYRFEVAHRDQMVFLALPPDGVRHDAQGERLRKDETLVLLALRLAYEEGLRDHRVSTDGTVECTTDDIADAIRSAARTEPPDEARLIEILRLFARKGALRLGERDRAERVTPLMVMPGITVLSPDAWMDQVRAWASAGEGRGV

SEQ ID NO: 30780 - protein, 1159 aa, Methylobacterium extorquens DM4
MYRLTDIAISNWYLIRREQIRIRGAAALVGPTGAGKSTIFDAVGTVLAGNNASRLALNASASGRSARTVRDYCLGWISDPAEGGRPTREACETLIALVFENPSSGRIVTVGLALAARSEEPKEETLSRFIAVGHRFEIADYVRETSEGSFVAPWAEIAADLRRRADTFEEFRTSGERFTAAVLATLREGAAVPDPRQFLRTFSNAVAFKPIFDTSAFVRSFVLEAEPLDVARIRQSIETWRRLLETIEELEKRLAHLSRICARYEGWARASLTAALDEMRAAGADLRRRILDHAEARRLLAETSERLRIARESVATSQGFVREIDTEIAARKALIVGSVAEARLAASHAGLAMVARDRRDLTNRLAGIVGLVQDAGRLSAIAGPLRRIDLQAARIVEACARSGLRREAPPEDILRVDGPLKGLLEGLAQMPDVSGTLEKEAEDLALKARERENEVRGLDGQVNAGRSSAARLSSDTEAFREELGRLGIEAAPICELAEIVDPKWGPALEGLLGRAREALVVEPDRLDRAFALLESRKNQFFRCLLVKTTDTARRSVRRFDDGPMGLIETDSDHAEAFLAARLGGYDLAPDDAALRNMSRAVAPSGRSTSGMAYSVVRPVPLMMTRGQRGPTAETRRRLDEAREEARTLRAEATVMREAARIAALLRSRLAEAPIDLEALRAEADAIEGRRRSLSTEQETVARADAGVIEAELKELQKERSAYLTELVQVLEPKRDAALAEEAGLKARVAQGREAARAAFLAYRTALKRWTSGDTVRIRLTGTVPADVPDTVAGIAAARADRAALDTKALASLASQARASAREAGDSVRNQGRAAERDLAEYCAAWRVENPLGSGEQPASFGYAWATRERDEVAGHELRRYRDQSLRAEAEMRRLMTEDLLTRLADKFERMRARLDALNERLASQTFTGQTYAFEAEVDRRYAAVHALATEVARSPDAAQAVLPSPDNGAEGGPDNSPLAAALAEITALIEGEENAARLADYRNYFVYEIGMRDRAGNRTTLSSRALRGSGGEAQAPFYVAIAASMASAYYPGDRPGDETPGLGLCLLDEAFSKLDVRNSQSLVDLFRAWGLQLLIAAPEDKRTTLTEVMDTVVTVYKSPDLGSVRIEAEHPLETAKRALAEINPDRRGIDAFRLPSAAE

SEQ ID NO: 30781 - protein, 489 aa, Xanthomonas albilineans GPE PC73
MKHRARIARYRALREQSLWKLLAADQAPEIIGLLQTLLLESERRLPTAVLHERLQRMLDDLNADQLARDLPRTAQAYVAHWLAQGWLERRLPEGAQQEDYELSTQALQAIRFVDGLEHARGAATESRLALVMQQLAQLAALTETNPDARLSALRNERDRIDAEIARVSAGKVASLDGKRALERTRQVIALADELTEDFRRVRDDFEQLNRGFRERIIDDEGERGEILGKLFEGVDVIGDSDAGRSFQAFWALLNDAEQSAQLDAALETVLSRGFARKLDRRERSFLRGLTATMLERGGQIHDVMQHFARSLRGFVQSRGYLEQRRLNQLLKQAQAEALALRDRIPAQRSIGRDLKLTSSRLRSLAQWRLHDPRQQQIDGSIQRNEAAAISLDSVGDLVAQSEIDFRRLRRDLFELLAVHRQLSIAQVLAQREANQGLGSVIGYLSLGTRHGVVLAEQHERAHWRGGDGQWRSARIPLVWFTQEKRHELA

SEQ ID NO: 30782 - protein, 235 aa, Xanthomonas albilineans GPE PC73
MNWHDHADAPDPTCDTDTATAADTGSGLFAGDSGGLPLDARRALCQLLSGPSVDAQRHSKLWPALLRNEAAIRSALSELFLELVLDREAGIAFTRQADTGELETPVLLRSAPLTFIDSVLLLHLRQQLAEADARGVRAVVEEAQLSDALAVYEKNLSTDRAGFLRRVGNAVQKMKENHVLTRLRGEEERCEVSPALKLLFSAEDVAALAQVYRELREAPESVENSDAAADVSGDG

SEQ ID NO: 30783 - protein, 1149 aa, Xanthomonas albilineans GPE PC73
MKSSASSSLFACDLPDPRLQQFRMRRLQVYNWGTFSGLTEVPIAARGFLFVGRSGSGKSTLLDAMSALLTPPNIVDFNAAAREAERSGRDRNLVSYVRGAWADQQDSASGEIATQYLRKGATWTALVLEYRDGEERVVSLVRLFWIAGSGAAAGDVRKHYMVAERAFDIATDLAGFDLDLRKLKQRLSDVHHFDSFAGYAECFRHQLGIGNETALRLLHKTQSAKNLGDLNAFLRGFMLEEPKTFDAAERLLGDFAELDGAHQAVVTARCQVETLAPARDYHAELMVLRRQRSELEELKLGLDPYREQRRLALLDARLQALDTQDRGLAGEEGQRRAALENHQRRLDDLEAQRRAQGGERIDALEREHAQVEAERDRRAAKRTHAEQACGVLEQALAGSAHGFAEQAAQARAALEDGQRAAAELDEAILQRMAVKAEDEKRFAEVRAEIETLTRNPSNIPAPMQALRARLSADTGVPEAALPFVGELIQVRADQAAWRGAIERVLHGFAQSLLVDERHYADVADWVNRTHLGIRLVYYRVRDNAQALSSASAPGSVSLLHKLELREHAFAGWLRRELGKRFDYDCVDSAKALRQAERGMTREGQIKHPGERYEKDDRHAIGDRRRWLLGFDNRDKRALFEREGQELAARIAACDADVVALRARRERAGMQRLAQHTLANLGWDEIDVAAPLQRLDDIAQALRQLREGDANLRALAEAIDRARADIQHADRTYQDVRSERVVLGKERARLEKQRLECADADARVLTPLQRQGLGERLEVLGTLSLDNLADLFRNLERGIEAQLGTSQQEHHRLEQLLLGCFRRYCQQWPEDSGDFSVSLSGADDFLARLQRLERDGLPQHEARFFDLLQSQSKNNLLALQRHAAEARKSIAQRLDEVNASLEQVPFNRGTLLTIELSERRLPEVIEFQQCLREVLGHHQTEQRELAEQQFAVLRALVRRLGSQEGEDKRWRELVLDVRLHVEFVGVELDAATRQQVEIYRSGAGKSGGQRQKLATTCLAAALRYQLGGEDGELPRYCAVVLDEAFDKADNEFTALAMNIFANFGFQMVVATPLKSVMTLEPFIGGACFVEISGRHDSGVLLIEYDEDAKRLKLPERARTADPTAAELVEIAAPTGSTSRRRVTADASPKT

SEQ ID NO: 30784 - protein, 372 aa, Xanthomonas albilineans GPE PC73
MAVAPWCLLIDAATPAPIALRVPTQAQASAGFAAFGQWLQAWRGTALPGRVEWGEVKWSQLGLQRLPQVWHADASEAASALGEGARWQQARQRCALLAQRWPQTTGLAARVHRQFDLLADAPEGDFARLIAVVDWLHAHPDNGLFLRQLPIAGIDSKWIEPRRGVIADWLAGLRGIAEQRSFDSLSGLRRAPDRVRLRLLDPALRARLGGLEDVHAPIAQVAALQLPVRQVLIVENRETGLACEDLPGTLVLMARGYAVDYVRAIEWLRPLPLYYWGDIDTHGLAILHRLRRHAPQTVALLMDETTLRDTPSNLWGHERRQHRAQRLDALSAAEQTLYTGLRSGRFGPAPRLEQERIAWNYAWPRIRAALGE

SEQ ID NO: 30785 - protein, 502 aa, Tsukamurella paurometabola DSM 20162
MAQSAAELYAAFTDNADNDVALRLLRSPNAVAYLALMAARLGTGPVDAEELADALTVDLQTLAQHFTDRARPVPDGSDVLDTWVKNGFVSRTLDDEDREVCQLTRGATTALGQVQAVSLDRNVATETALELVTARLAAVAVTVSPDPDDHLRALDEQIAELTRRREALRAGLIPEYDQGKVVDDLKIVSSLAERMPADILGYGEKLREHTRALLTHGLDAADSSEAEAYARTLQRLFDGHDELANTPEGKAFDAFYTLLSDHRLRRRLEDSVAAVVVGVELPDDLRESLTGFLDRMWMQVQRVDEIRGQVYRRINTFVKDGDFLQYQSLRARITEAQRAAVEAFDTVSAGRDTGLAVPMSAVDTTSVGALKFHDGIVTLPPEVRETSGEFTIDPARLIGREAIDWDSLANAVNTAVAAADGASLTDVLDAIDAPRAGDVVGVWSLGARYGTVDADRPVTVLAHTARGPRELTVPHVVFSAALPPLTPSSAAPEPTTLFEQEA

SEQ ID NO: 30786 - protein, 253 aa, Tsukamurella paurometabola DSM 20162
MTDESLDIDAGALPEIDLADFSIADEDAVRSLRGADTAPRFDGDTSQLPNSVCYALQELIAAPHVSARSKNWAVIEAEETLLRSRLSELNLLLEINRETKHAFTRQVSENDPRQRNLLRAQSLSLAASVLALFLRLKHLSSPDETAVVERQEMIDHLLSFRPTRDTDEAGFVKKADAAINQLETRRLIRRVGTSDRYAVHAVIASLLTPEQVDLYTAAYRDLANTDHDLAETAAPDEGTIDESTADTETEEQK

SEQ ID NO: 30787 - protein, 1120 aa, Tsukamurella paurometabola DSM 20162
MTRRHLGQYRLTRLQVVNWGTFDGYKDFPIDERGVILTGPSGSGKSSLMDAHSVVLLPTYDQSFNASADMTAKGAKRAARSMADYVRGAWSVNDDEHQQSKVQYLRGDSATWSAVAATYDNGAGTVTTAVAVKWFAGSGTDGSSLKSWYHLHSGPFDLLDLQDWATAGFDTRGWRSRHADVESFDTQAAYQEALRRRVGIGTSSAALALLGKAKAMKNVGDLDAFIRTYMLDRPQTYARAERLVENFTQLDEAYRAAARAEAQEKVLRPMPEAYEKYRTATVGTTRAADLLGAPVRSYLRGHRLRLLQEEMDRIEGERAGMDAQIARWEDKAEERKQRYNDLLHRLRQEQGEVGVLEAELQSRELQTQARQRAYERFATAVEKLGERAPESAEEFAALREQVPGIRDRATEAAEALAGRVHSAYTDESDARRAVESVDDELAVLDRRASLLPPALLDQRDVIARSTGVPAEELPYAAELIDVKPAEQATWAAAAERVLRPLATTLLVPARHQRAVADHVNAHRVQGVLTYQVVEGPDRTAAVEGSLATKLIVDERTDAGQWLAGAVARAARHICVDSPAELEDHDQAVTPEGLVKGAGGRFRKDDRRAVADRSQWVLGTNTGSKREALQRRRDELASVHVKAAEASATLRDDLAEYKAVADGATGVLGYASWSELDHWAAKAEAEDLADRISDARSGNADLSELELQADNAYGELAEAQTRIGALTETMNRAGSEFDDLLAEFEKLDGESAPKLTDEDREFLDTALWHLLTADETRRRRLTLDTYGEIRADLRAELERQQAAATAERDAAETRIVRTAEQFLREWPDASTELRAAVASAPDFVAVHENLIAHGLAAATEKFRRLITTDVSHSVSNLFKEVDDTHRAITRGIADVNAGLRRVEFNEGTYLQIAYAARPTPEATEFATLVDEMVRDAPAAKRAEPEAMAAQFKRIRGLVLRLTGDDPESRRWTENVLDVRTGYSFYGRENAVGAEPDAPAVVTYRNTATNSGGEQEKLVAFCLAAALSFALGSHGIDGSNEPAFAPLMLDEAFSKSDERFSAQSLRAFEQFGFQLIIAAPIRMVGIVEPFIGQVILVDKHTGADGARSDARYATFGELTTAR

SEQ ID NO: 30788 - protein, 580 aa, Bifidobacterium longum subsp. longum JDM301
MCSKSDILVLGGREHAWRGRGVVRGYRLVWCGHDRGRHAVADVMRELERLRPVYETGVLRLLLRQNAMLYVSLLRSTFDPLTGELPRETVEERFAQSLNALADAGEYAPREDQTFAEAAHQILADLTREGEGDYAWLANSHDAASHRFLYRLTARAHRAIEALSRLEDESRALSGAQANSIIMEIEHARMQLTADPGERIKLLNREIKERKHEIKRIQQGKQHATLSEAQVEDVIAVIHNTLRGVPIDLRELVLDERDNGDALRRRMQAGDISVDENLTRYHDEYRRSFSESDSGRRFEDAFQVIITDEGRQQIDEALRAIAKTPYLAGESGVLLGQIRDELARIYDGIEAVRRQMRVSDEAISRLVRQQTDTRYRTMLTRLNRLYARLNADAKTHMGDASRPYDTATADALFAPLPMRPAKSMTRATAPGLSDLAAEAPQATPVADLRDMVNSGGPRLLRMVSLIRRNPVTVDRSDDRSNATLVDIAASFNRLPESERRESEIVGFLGGLGAASGSAIADEPSTDGVGIDSDIATEPAPAQRGDTATWHCVSIDGEPRNWITRPVLADMDELNIIVEEG

SEQ ID NO: 30789 - protein, 220 aa, Bifidobacterium longum subsp. longum JDM301
MTVAEEHEEHMDNANPYALFEGDTGDMPAEARMAAIALKRDRYISGPTYDTVLDNRDAVVRSLNNDLLDLVINERYRIMYATPVAGDDVTLRSLKTRVSLKREEAALLAFLRIRVLEYENVHADPADWLVSFEEIRAALATGAGYLAARNDEEGVAKQISAIVSAMITYGYLVRLDDEAMYQITPLVPVVLDRELADTWLDVVEHGDGDTEDDDDEKEAK

SEQ ID NO: 30790 - protein, 1184 aa, Bifidobacterium longum subsp. longum JDM301
MMQATDVQMIADRWMLESRRLINWGSYEGYHEFRPSTDHKLPVTLLAGASESGKSTLVDAQISLLYPTGTPFNKASNSGRSERSDYTYLRGMVGVGSTETGDEPLYLRGRDENGAPQPVWGAIVDTYRNQTTGQVLSCAKFLYLMPGDGRGDVRRQYVVWGKPVDPRRMDQYRDAPFTPAQLKATYPDCLTFPSAEAFHTHIWSAMGLSEAACRLLHKIQSADAPSRLDDIFKQGVLGVPEALGLARTTVEDYERYDGNFHAMDEKTRRMDTLRGIQQAYGEYAAARGKARAFEPVKPAVDGTVPAVLRDWALARMRGEVAIQLPADRAEQQNSEAEAKLLRRRTEDLRTRLDMIRGQMQGLDGGNLTRLELELDQARRTLEDVQANRTRIEQTFASIGETLPGNEQAWNERRINAVNFKREYNKRDGECEEALTAAINARAGARGDLERLQRDFDRQRSQRTRISQQMDETRAMLCRATGLAPAELPYVAELMDVNEHEEDWRLAMNVAYAPIAQTILVDKRHEQGFAAKVSTIDPRTMPRRTWQFVDTARHYDDTGAHANILTGEQDGDWLSGKLRYRDDSPFADWLRSQTQAERFDALCVTAIDDTDRTNRQVQADGQIKSGARGQHGTKDRAQVIGFVNETYLNALAAQVDAARNALSQADADYTAAKAQSDNLHRELELANQLAYTSWERIDIAGAQRTITDTQDAIASIKNDPKLAELAKQRDELNAELDRVERQRIESDQAAARAGSAVEAALIWLRDHADTGTTDAAGVIADSGDDDNATAGPLPDEVTAVLTESYDNRFAGLADAAMRAHMIIGAGVAGTRAPGESFPERTIAGIGKDMTSRINLLNGQADAARTGVESKMSTYIALYAADDDSLTASVEDYRYYLDELASLTQLAAVAATDAEYRRCLEQLLRSFLTIKRAIDTDASDIHDQLDRINAMLKGQQFGPKHGSLSLHADVRRPERAFWTQLIRVIGTLNDWKSADVNDSEASRKAFAACAPMVGLLRAELAQVKDANGVKSYGARNLDPRCRSSFYAIVHHADGPDERITSTGGRSGGALQELTSFVYGAALIYLLGGGLTSEPSYTTLFLDEALIKADGRYTQRALTVLPRLGFQVIVSAPESKTGEILEVSTKAYVTYKDPDTGLTSLCEAVLHQNDMDDESSSDILKDDGVAE

SEQ ID NO: 30791 - protein, 524 aa, Bifidobacterium animalis subsp. lactis V9; identical to SEQ ID NO: 30666

SEQ ID NO: 30792 - protein, 269 aa, Bifidobacterium animalis subsp. lactis V9; identical to SEQ ID NO: 30689

SEQ ID NO: 30793 - protein, 1165 aa, Bifidobacterium animalis subsp. lactis V9; identical to SEQ ID NO: 30668

SEQ ID NO: 30794 - protein, 406 aa, Bifidobacterium animalis subsp. lactis V9; identical to SEQ ID NO: 30669

SEQ ID NO: 30795 - protein, 490 aa, Cellulomonas flavigena DSM 20109
MITRVEGAYLGAVRAFRNPMLDLLHKRHAPLVVALLSLVFTSERPTVPVADAHTEVGDALEQLRAAGHGDDLPVGGPRDLCRQWADAGWLVRQVVEDDVEVYRLSAHAVGALEVAGRAGGARARVSQSRVRTLLEAVERLALDADPDVMVRIARLDTEVKRLQAEIARLERTGVVEEVDDEELLEEAENVLHLVRELPADFARVAESIKAMQRDVVTALRQDQRPTGDVLREYLRRGEQVMDATPEGRAFAGALRLLGDPQRLDELATQLDTVLRHRFSARLPAAQRTELREVVRRIEQGLDQVFAAQREASYVITGQVRHHDPLRDRQVDDLLRDVMTGLQTWLPDSRRGQAVAPLRRLPVAGVEHLRQTPGDLRPPRAPDALVEWDDDADVTDGDARAWGGPHYADLEMHLRELGADSPAVDLAAAFRSAPEHLRRPVDLLGLLEIAHQRGMTESDELAFVDAVRPDGSRRRFAFGAATTRTKDGSDD

SEQ ID NO: 30796 - protein, 272 aa, Cellulomonas flavigena DSM 20109
MTETDVVTDVVTGTDDATSPGDARADAFIAPVAMEDDPAELFAGDTGTLDADVRRVLVRLLQRRFLLAERHPAQWRTLLAHQQLVESRLHDLFVHLVVDHERGIAYKRQVRSAELDVPVLLRDEPYTRAETLVLVHLRTVFQRERGAGETSARVDVEELEATALTYFDADDTNVAAHQREIRTAIARLAKEGVIEEESEGRYRVTPLVEVVLSNERLVELREWLRTRHEAPAPAGAGDDGTTDADAPSDDEDDETQDDDAQDGADDDEETAP

SEQ ID NO: 30797 - protein, 1125 aa, Cellulomonas flavigena DSM 20109
MTMVDSLFGLIPAASTGQQWVALDLQLVNWGGYDGHHRVRLASTATLLSGGSGSGKSTLMDAYIALLMPHTTPFNGASNGGVVGRPRGKDQRNILSYARGKLDESRTEEGTRQRVLRGDGKDTWSAIAMTWADQSGTRFTAVRAWYVPSAARTLEDVTAVRATCDGPFDLRDLEPAAGQRLARPAVTAAGLGCFDTDREFTARLHSTLGIGAAGDGGKAVALLGRIQAGQQITTVDALYKAMVLEEPDTLTTADAVVEQFDKLSGTREQMITARQQVKALEPIREHRAAIEQAAARLRVVDAVGGFDDGTSPAALWRHERRLGLLRAVESDLRTRHREAQRVAAETSARAAAARAERDGVKQTLWASGGDRLATAQRELHGVAARVEEVARARARLDEVLTSTLGTSVTSLDEFTDLVGRARHALADSDAKGAARQALFDAMSERKEAAADLAVLRRDHADAKHRHDNIPGDLHATRAALAEAAGLTPQDLPFVAELVEVRTEHEPWREAFNLALGGFATLMLIDVAHLQAFRRAIDSVRTGRRIRFEGVPAGLRDDIGLDGRTLPGRLDYRQSPFTGWLKIELSTRFAYVCVDTPGELAQHEKALTRGGQLSEGRRGAHGGQGARNVLGFTNTRRLTDLNRRLEAAEERLRDAEARVGEAEAAWDRHDATLRAYATVVELTWDQVDVAGVEAERDRWRRVVDEVTSGNPDVVRLQERAVELDVLIQDLTEQLGRTKGAATELGEQWSQVTDQVDVAQGALDAAQDAGTVLDDEQRAYLERVLGGTDEDLPRVDDRTDPAAALAAFDGVVARAADLLNADRTAAQQTVGASREALRRAFETFVERWPDPNLGTDPDASYGDYERILTELETQGLHELEAEWRASLLRLSGNDLADLHSALSRSVREIKERIRPVNDILADLPFADDDHRLRIDARDTQSTVVARFRKELRDLREVLSTEATDAERERRYHRMAKVIDRIRRTAPDFADLVDVRRHVRLSAEKVDLEGNHVALYDHIGEKSGGESQELVAFIVGAALRYQLGDAGASRPRYAPVFLDEALIKADARFTGRAIGAWRGLGFQLVIGAPNDKFSALEPHVDLKYVVLKDTAGRSRTKAVAGVAADAGA

SEQ ID NO: 30798 - protein, 516 aa, Kyrpidia tusciae DSM 2912
MRDLFEVVPENLFSLLAARHRAVYFRALMVLRECYQRELTFSRGDLVTYLISRMERDLVDWSEEEEAADDATEGRRESSSAEQRTPAAVGAEGPLTLDLLLVREDEPEPGSLSGRAHALVRRLIETGWLYAITDSDGFGETLVVPRYASILLDALHAVVEPAQQRHNALVYSIYSNLRTANDERDEFMLQALQSAHDATIALRENLRTLLHNIHTYYQNLHLREDVRELLAEHFDSYQLSVAIAAYHPLKTFDSVYRFRPRILQILRDWLGLPSLLQQMAAALKQQRDDLDDTAARGEVVRLIHFISDTFESMDDLLREIDHRNTAYNRASVERLQYLLNSDRDIKGKLVQLLRSLPPWHSQVGSAQLEAMRELPLYEVHYLDPEALYSEPVRRERGQPQPLRRPSGAEDAAFEQEARELMERANALFSQQRIAEFILSQMDERGRLPTPVMRLDEWDDFIRTIVAVVRGDEPEMPYVIEWDEASRSVVVGPYRIPLLTFLRKEGAEWIGRTNTSP

SEQ ID NO: 30799 - protein, 256 aa, Kyrpidia tusciae DSM 2912
MDWPNQYLALTDAEKEEFARVISLLFERTFLVREEWDGKQRRLVGNRDYRFVERHLELFHEYLKAGGFELQLDGRLGVMALHNRFGRNRIKVDKYTTYLLYTLRLLYEENMERVSTRREVVVSLQEILAKWFALGLMDRRPPSQHIGQALSRLRRLHVLARVEGSPQDLDSRWMIYPSIVRAVPDERINHLYEQMQKAELWPASGDSGAGENGGAAKPVHREPPGEEEVGDGDGDAWDSEAGEESWDDASEGEGDA

SEQ ID NO: 30800 - protein, 1155 aa, Kyrpidia tusciae DSM 2912
MKLLRRMLLVNWHYFVHEMIEFAPVTFLTGKNAAGKSTILDALQLVVLGDTSGHYFNKAANDNAKRTLRGYLWGEIAEENERVVALRSGQFSSYIVLEFTEERGRRPICFGVVFDCAPDGSYEWRFFSLADSLPDFHFIRDGVPLDIRGLRAWGQQQKQRFEVYESNKRYQEVFRARMGNLKDTFFRLFRKAVPFQPIMNIAEFISEFVCDVKHELDIADMRENIRHYRRMEDELRLVQARVEALEEMRETFRGIDATRQKIRTYEYLLDRAQWAEAEGSLERLRTAREERERELKDVDAKLQEETAARNRAQTRRDELIEEKANSDVYQRQQLLQQRKKSLEVQFESIRGDGERQDRMLGDHGARWRAVAQGLSEAEGWFEEVRPVDGESPWPPRGGGGAEGEEPERRLWGSAPFYGQARRALGAALGRWPAPSGWRGHGLLDDPLPSVDAEAAAEAAEHFQEASRLLQQARGVMQESVQGWGEEAQTLQRAIRELEQGIKQYDPKVLQLKQLLAEGLEKEGLPADVHIFADLLEVRDPSWQVAIEGYLYTQRFYLIVAPEAFTPALRLYDRLKGERRLFGVGLVDIEKVMREAPERRPGSLAEEIETDHPLARAYADFLLGRVMKCDHVDELRQHRTAITRDGMLYQNYVARQLDPSRWATLYIGKRAIQQQLEQKRQRFSRVETWLGAFRLRLAKVEQWAVEPVPTRSELEGLAEFERRLPELPQLREDYRRVLDEFGGLDLLVLARIEEAIARCEDELKRREQELERLRDRRGRLSEQRERLLNEEIPRAEKDLEERRQWVLSQYDPDFRNEVGEPRFQQEWKRLGSAETIRANFGRQLNVEKNRAEEARQVLLRQREAYNRQYGAGFDIQRPDNEAYDKELTWLKATQLTEYAQQIQEAKERAQIQFQEDFINKLRSNIETVEQQIRDLNHALRDISFGGRERYQFRISPNPEYERFYRMIMDELLMEGRSLFTQAFLDKHGDTLEELFRQIVDVDERDPGVQAELEKHLKTFTDYRTYLDFDLIVRDEEGRESRLSRVIAKKSGGETQTPFYIAVLASFAQMYRVYQPGFDNTLRLMAFDEAYSKMDHQRIRDSIRLVRDLNLQVVLAAPTEKIADIVPWVDRTIVVQRIKSETRVVLFEPVAEEGMRA

SEQ ID NO: 30801 - protein, 454 aa, Kyrpidia tusciae DSM 2912
MNLGREGAAPWMPREESTVKILDALLKKYESSQALVKGSSRRRPQVSPSESVVPGYVSGGMDPEVRKRFHGELARLEQEGVVSLRWVRFEEGNVLDRVYLEWEGVDRAYACLGRAPVREESAALAEEMEDWLDGLAPTGAWAWVERWVEDVVDAARGRGRVGPRLVPGDPEERRRLLNAIEGLIREGGESLPVRLFSKRYLGNSKVFEQQVQGRLIGLLQRYAVPSWGADPDMYSEPADLLREVGIEVTHDWVAFCGPIRFRFRQAVATQDKWGGPGGQGGAWVDAGALPHGLAIDAADVDRLEFERASCTRIVSIENKANYRAYLRSERREGELVLYLGGFASPGQRRFLRRLRAWWEGRGESPPPFDHWGDLDYGGILILQHLRETCWPEAAPWRMDPEILCQYADRLEPYDSTYRAKLERLLEQERYRWAWPLVRVLLEKGGTLEQEATLV

SEQ ID NO: 30802 - protein, 471 aa, Thermincola potens JR
MQLFKIIRNPHFFSLLASPNREIYVEALFVVYRCYKQEFMIKKEELVNMLIATLENRMFELAAEEGEELDDYSLSGRAHWLVRRLLATGWIELDPLVHSVDEYIAVPDYSVKILQVLYEISEDRPKEYNSLVYSTYSNLSKAQEERGDYVAEALMAAYSLTDRLVDSLKSLLNNMRSYYLALQEQDEVREVLREHFDRYQVLISDKIYHPLKTFDSVPRFRTRILSILREWLVDGELIEKITAQLVRKGRFADAPAARDETVRMITFIIDQYEKMDRLLKEIDRKNASYTRASVERTQYLLNTNRDTKGQLIEIIKALPKINREVPDDILNDLWLSVNLFEQHWVDSNSLYREPKKRVFTRPEPLERGNRSDPGEFEAEFDQIKKRVRDSLTHKKVMDFMKSLLNGQDRVRAHQLELEVTEDFIKLILGVIKADEKGVPYRITFEEGYLVVNGFRIPDLTIEKKGGEKHVD

SEQ ID NO: 30803 - protein, 217 aa, Thermincola potens JR
MWIDDYQRLNDRDKEQFTRLVNLLLARTFLLRERVDPREKAVVIDRDFRFLERYYSIFKGYLDLAGWDLTLDPQLGVAALCNRYGTNRYRLNKYETYFLLVLRLIYLEESEKLTLRRDVVTTVRNLLEKMALFNLLEKKLPDKSLTEGLSTLKEFNIIDRVGGEWKEPETRIVIYPSILFAVSDEQVKHLYEKSREWGNPREEVIGFDETASEDAAD

SEQ ID NO: 30804 - protein, 1099 aa, Thermincola potens JR
MKLLQKMLLINWHYIVHQTIEFKRLNFLTGKTGSGKSTIIDALQVLILGDTTGSFFNKAANDQSRRTLKSYLLGEIAENEAEGVVYLRQGKDFSSYIVGEFFDAKEKKSFCLGVVFDSYADGGKEEHRFFYLNGELPANHFIVNNIPMDIKTLREWAYSKVGKNNFRYFDSNATYREHFRHLMGGLGEKFFSLFRKAVPFSPIMDIKDFIANFVCNVPSKVEIDDMRENIRYYKQLEGELELVKRRIAALEAIEKQYRSFCEEDKRLLMHRFLVDRADQEKVAVSLASSRERYKAWQDDLAGLVVQMQEMEKRQKDLESLYQEAVNEKARCEAQRQKEYLEGQLKQLREKLDFLHTNQTRLGSLLKQYSAACAELECISERLGAYSHRLNPETVETLTGDFWRDFQREFQEALGQVREEHFRLREGLEQGRKRAEELRAEIYRLKQGIKPYDRSLVALMEAITSELSGAGKAVRPRVFADLLEIRNPKWRDAIEGYLHTQKFYLLIEPQYFIRALQVYDRLKFERKFYDLGLVDVEKLMARARPPRPGSLAEEIVTDDPYARAYANYLLGGVMKVERVEDLRRFPTAITPTCMLYRNYVARQINPERYAVPYIGKKSIEDQIRIKEKALQEQEEEIANLSSRLDLYGRLVRIPELRDDDLERIEQYISEKGAMPGIKKQIDELTTELGRLDLSKVYELEERIRQLEKEKESCAKKLQQISGQYAVKEGDLKRLGQETIPQLEERLMDHRARLEEDYPEEWRRQTGEPRFQAELSRLGHPDRVYANFSSQLARTESQREEKWNALLKQRSDFNRDFRGTFEVTAATNEAWAGELQRLVETCLPEYEEKIRGAKEKAQREFQEDFISKLRQNIETVKEQIDELNKALKDVPFGRSKYRFKVTANSTYKEYYDMIMDELLVEGYTLFSNEFQARYQPVVEQLFNRIVATAEAELSPEQREELEKNLRKFTDYRTYLDFDLLDIDEEGRESRLSRTISKKSGGETQTPFYIAVLASFLQTYRVNQPNHNNTFRLLVFDEAFSKMDHQRIQESIRLLKDVGLQVIIAAPTDNIADIAPLVDRNLCVTRVRQETVVKSFDPRDFE

SEQ ID NO: 30805 - protein, 410 aa, Thermincola potens JR
MKQDILEKLLDKYEKSKHATGEARVRRRVTLKTDELTGYFSHDLEYRKSLHRAALDLENRGLIKIEWVPFEKGNLIKALHLVLDRVEEAYMEAGHKSRLDVLGDLENRLAGLNLSIPWASAFVQDCLDEMGGKLKYPSRLPREPKKLELLLNTLKGIQNKGQEEMLERVFSKRYLGSSKAFEQHVRRRLVGILRTYLGGAGMEEEDLLAEVGLVRAASEVLVCGPLKIRLKDRTADLAPFCYGTGLGTETIEAIEIVDCNCRRVISVENKAVFRDLVRAGTDDQTLLVCLGGFAGPVKRGFLTKLYGFLGNTVEYYHWGDIDYGGMQIFCHLRRACIPGLQPLLMDAATYEAFVHLGEKFEAVYRNRLEGLLKQEDFACFHDVINIMLEHGCTLEQEAVPVAECMDILRK

SEQ ID NO: 30806 - protein, 504 aa, Gordonia sp. KTR9
MEFSAFPAPVEAPGASSAPESAQLTLADAWESNRSIQKSAVGRLFAATNSALYVTLMERHLDYGTKLSETELSVRLDRDLADLELTDQANGLELVKMWARQGWLHRVTDTTDPNAPNLCHLTSEARSVLDFMRRQRREDSIATGGSITGIAAELRRVAGQVSNDPDQIRSEIEAQMSDLDAELADLDAGRRPPVDLRVAEDAARTIGYQMEQIISDIGQYGTMLDRITTALLDDPGDSDLAYRDRQRQLFDDYEALLDSPQSASYQAFSQMIQDPERRARLKHDIETIVDNFPAMDAGLRSVMDNFFGLVTQQMAEVGRTRQRCARRIRRFVASGTLEQSRGLARQLNDALATANELLKTSLADRRIGYELPLATPTVNSIGRLAFEIREHVPPAPALPAAVDADLTSFASLSGQVDTTELTDTVNAAVAAGPVALADVIGGLEEPYLAHVIVLWSWASKQQAAGEKVPMTTVRFRSLIGDDHAIEVPDLTFTEPIPTAEVDAE

SEQ ID NO: 30807 - protein, 307 aa, Gordonia sp. KTR9
MTSLPPEVDADSSLPEVPGDDPLLPEVRAKRASKGPDTDPLPPEVRAQRATKGAPETDEFAGFDDLPTVANRAASHTPDAPRFDGDVSELPDRACWALQNLLTRRYISGDRQPQLWSWVSEYQDALRGRLSELDLRLRIVDELQVAFVEQAGYDSRWGRKILKRETIHTYDAILALHLAKYVRAARDESVLITREEIHELFAGVTNTIDRDLALFDKRIERALDKMEELEFLRKQRDDADTFIVSPVISAVMTASVITDLQRQFEQFIGSGDTGEVPPEDLADEPAERDDDAADLDNAYGDDEGDDW

SEQ ID NO: 30808 - protein, 1114 aa, Gordonia sp. KTR9
MSGQVDQYHLSRLQLINWGVFDGYHSIPFSPNGSLITGSSGSGKSSLLDAISLAFLPDHRRNFNASGDATAAGSSSGKRTVGKYVRGAWGERRDGTNAHREIMYLRGTGPAWAAISVTYTSSSGEAITGLVLKWLAAGKMTDAHSSYFIYDGDADIVEACNEWAANNYNSAKFRDRGWRGGPGEGKYLSTLYSLIGIRGSDAAQQLLGKAKSLKSVGGLAQFVREFMLDAPTSIVGIADALDQIDPLVEARELLDVARRKRTILGNIEEVHERYAGEAATFSVLDTIDNTTIRSYVNNLRIRNAEPEVADLDDQITRLDGDLAALTTQHDQLRQDHSLLLSRIATSTGDLAPLREQLGGAQKLSTEVTARRNAYEDKVSALGFTPPTRAEGFWLLREELQEEATKIDGQLDAGRAHYAEALASEVAARTRRDAAMEELGRVENAGSALPRTEHEMRRVIAHGLQIDESELKYVAELVELDPDEERWRLAVEKVLRNVGLRLLVPDKHFRAALRFVNSHDMRGRIQLHQADSRPMPVLEPGTLASKLRPVDASHPGAAEAMTVLSKLGSHMCVDSPGEFSQYAKAVTDQGLRKDSAKLAVKDDRQQLRRSQYIFVGDVASKIAALRDELDYEERAFEDARQDCAELDRERSAKEKRRDAYRRVCEQFTQWNEIDVDSVDDRVDQLTDQYDLLIEENPDVEALQRKAEDLWEQVRNAISQAALVKDKIARQDSRRTQLLDLIDRLKPEDVPAQAEKTLDGFREDLSATLDVLNPEPYRQEIVKAASRERDRMRSDARRSRDELARILDTYDEEFPDAIPNDSDDFDERLHDYVAVCRRIDERELPAAYERMRRLITEQAPGAILGLHMAADAEERRIVEQIERVNTGLGAVAFNRGTRLRLRPGRKKLAAVEELTEKARQISNRATAVSFGDEQAILEQYSDILLLRERLAGNTPEDRQWTRDALDVRNRFDFYCEEHDAESGETIRTYSNAGDNSGGEQEKLMAFCLAGALSFNLASPHGNDNRPIFAQLMLDEAFSKSDPQFAQQALSAFRKFGFQLIIVATVQNTSTIQPYVDNVVMVSKTEAGPELRPIATATSTGIKAFSELRRSGSQLPV

SEQ ID NO: 30809 - protein, 453 aa, Clostridium saccharolyticum WM1
MILMNEIPDRFWGLFRSINRSTYIEALLKINEEYEYSNYFLSREVCIQVLEEYFTAKRLVIWQDELEDEADVSEPTAVRVLNWLLRAGWLRKVDDYASMTVNIVIPDYAAVMIGAFFKLARDEEDETQIYIQNVYAILFSLKHNPRAGISLLNTAYINTKRLNKTLQDMLHNMDKFFESLLEKKAYGELLKEHLEGYVEEIVKKKYHMLKTSDNFYLYKNDIKRWISSMRDDVEWMEQMSRRSGQKVTAGDIGEKLDQIERGFDDIEHRIANMDREHSRYIRATVTRLNYLLNQEDNMKGLVIRLLNHLSETADQDEAVKEVGSRMNLSQTSILSERSLYKKRKTRSGFKENLLPEEASVELTMEEILELNRLKSRYSRKEIESYIESHLENGRMEVREDTVDSPEEFEKLILAYDYSTRRKSLYQVEDPETELIDNGRYRYPKLVFVRRKES

SEQ ID NO: 30810 - protein, 216 aa, Clostridium saccharolyticum WM1
MTYEESAGIISHIPYYDALGQGEKEEVRAALRLLLQQTFVLEHKYDKRDNRFVFNPEFKICNKHLEFIRAYLAVSGVTVQENSQLGLIYIQGENTVGDKLPKLATLYLLILKLIYDEQMAAVSTSVNIYTTLSEIHEKLGNYRLFKKQPSPTEIRRAITLLKKYQILEPLDIMEDLDGDSRMIIYPCINVVLFGDDVRALLEAFGEGDDDDDEPEI

SEQ ID NO: 30811 - protein, 1127 aa, Clostridium saccharolyticum WM1
MTNRKFEALSRILLNNWHYITRKTLSFHQEINFFTGHSGSGKSTVIDAMQILLYANTDGRGFFNKAAADDSDRSLIEYLRGMVNIGENNEFAYLRNQNFSSTIVMELKRTDTGECQCIGIVFDVETNTNEISRKFFWHKGPLWDNGYRTGSRTMTTHEVSGYLQTLYEKEDYFATSHNERFRRQLYDVYLGGLDSEKFPLLFKRAIPFRMNIKLEDFVKEYICMEQDIHIEDMQESVMQYGRMRKKIEDTGVEIAYLKEMGEKFSAVREKEEEISENTYFFRKMEILDYQARIQALTDKTGLAREDLSRQEEQKSALERQMEDLTLQGNELLRRISSTGYEDLKNQLDSGKELLSHLSKSSARWAQTGERLKEWINEEATSNQTIWDIEEFEKNTIDEEKLDRLKRSIAEMRKETEETQKEAEGILRDIRKKERQTREELAQLKAGNKAYPKYLERARSLIQQRLLEETGKAVEVHVLADLLDIRDETWRNAVEGYLGNNKLSLVVAPACSETALAVYGELDKAEYFNVAVLDTERVGRNSYEVVKGGLAEEIIVREAYLQPYIDLLLGKVVKCRSLEELRRCRIGVTPDCMLYHTFRLQHMNPDNYTKFAYIGKDSVRRRIRLLEKNLVSLEEEKKPQEQVLKECRRILSMEGLSEDVGVYLEWQQDMAAFKEKEKEIRRLEQKLEKLKAQDVEEWVKERESILQLCDRKREEQRTVDKLIFGINSELERFRRESLQLQEELVLKERELEPDEELENKVKEFLESRETHRYDQLKNKFWGKCREAEEGRGQAFQALVGARGDYARKYPNRNFSLTAKDNDEYDRLLKILECGSLEEYKKMAAEQAKSAVLHFKDDFMFKIRSAIRDALLRKDELNRIISKLDFGKDKYQFVIGRNKGADGRYYDMFMDDSLEVNPAHLTDSLDNQMNFFTMEHESQYGEVINDLINIFIPPENATAEQMEEAKRNMDKYADYRTYLSFDMQQIIQNEDEVIKIRLSKMIKKNSGGEGQNPLYVALLASFAQAYRISLSPKIQRNPTLRLVVLDEAFSKMDAEKVASCIELIRGLGFQAIISATNDKIQNYVENVDKTFVYANPNKKSISIQEFERESFPELMRELDEDEAYGDTVS

SEQ ID NO: 30812 - protein, 468 aa, Butyrivibrio proteoclasticus B316
MAPNVFNRIPPGFFNLLSSGSDYKNNASCLLEIYSQYDMEVSYRISRKQLRDALSSYIFENNLSFSEENSDEKITDVANSIIRKFTDEDCGWLIEETDDSTYEKYIVMTEAGIALAEFLITLEQPEKVEYSSYIYNIYNTLMNPEQWRADPYVNAIKSVYNNSKALSKSLKRLSTFIRKKIEELTREASLETLTNHLLEYCDGEFIREYARLTKQQNIHMYRSYIRAKLNEMINDPEIHELLIYGCAIEENITEDEAETMIIDMVDNTKKFLNEDYDRIMRDIKHKINTHIHIAIGRIRFICNSGKDAQGNVEQVLKMLRVSIDEGDLLDVLPDEMINLYRFDKNEYIDTASLYPFRKSRAIKKPITTDIEVLTEQDKEEAISELKKQAYNQFSKRRMKLYLDEQMKGKSELDSSQLPLSCKKELLANIAAVTYCEENGYEITVEDGYTEANGMVLHRFKIRRKKDGV

SEQ ID NO: 30813 - protein, 224 aa, Butyrivibrio proteoclasticus B316
MGFETEWDIYTSNEKEIFKRVCRKLLKSTFIVKEKDDENKKLYAFAVKNEEFLSLYLGYMGFDIKVDRDNGVAMVVNLGNSDDSSKIQANRLKLRKADTVVLCCLWTVYLDRIRRGNLSKGIVVSVIDLKQELEKYGFRDDFDGKTLMAKILDLFKAYNLIDVSGKLGDPDCNIKIYPSIQFALDSVEFQNLVEENDRRIKSIKLAANEEDEEDETMGESEYDE

SEQ ID NO: 30814 - protein, 1088 aa, Butyrivibrio proteoclasticus B316
MTSNRKSAKGIKLINWAQFFNPGTMKIEGSALITGRNGTGKSTTLDAITYLLTGNTQFNIAAKDKDRSVVGYVRGDTRSEGADRYLRGDMDVVSYIAMEFDSPMDNSNMVAFVSIELKKDESKTNSYWYVAKDTTLSDIVFAEEKGGKLLVYPKNQITIKGKHISSKEFMGKEKGTRQVLQAMGLRCDVSKYRSKLVKMMSFDPEKNVDKFIQECVLEEGKVSSLDELKEQRANYEEIRQTYEDMLESKKTLEHIEERTREYEQKYLDYNKRRLVLGYQKWKGAVQAIEKLKNTKGQEEAELAFLMERKDKKDKELDAARQKLEGLSNSRDYQDINTTLKRFESQIETLTKEQDIHSNSVKKVEALQRWVDELMQEYSEELKLDLEVKDELTSISSKGDATKKIAAFYTLSSEISHICENKKLAQLKNKVQIEKDNEALAQKHNEKKQLEGNKLVFDPGYEKARKLISDELKKQNIDTDVKFFVELITNVKDKKWRRAIETFLGGKRFNIIVEPKYTEQALRIINDNPATKGKVIIADRLEPTEIVIGSAAEQLEIINPTARMYANYLLNGIHLCETVEELHDYPKGAIMSNGMLAKGYAVGKMQINSTKLFIGQDAIKLQIEDLTKEICMLEENVESLTSFNESLNAEVDSLQKYSLNQDDYDFEAVNELATVKESLRAVMRDKENYEKDPSLTAMLEALSKAKKEFNRLEEEKGALYRNIGGVEKEIERIQREISSKEQLQDLVKKEFEDECKKMPGLKQPAIDMYEQQIHKKETAITEKTVRNKEIELNNAIKDLENAHLQYCKINDTDIQMRGVSFIGYYREQYRSLANVQIEEAKQKLEKQGKRLQSAFVGDFVAEINEAINNAKEEINRINDELKKRPFGNDVYKFEVDDRLDSEGKALFFKICKQMQDYINNSEYYLNSIKDDESSENDIKEFIDIVLNEEDETEYTDYRKYLTYNMEIKSKKGDEEVKSYLSKKQGSASNGEKQTPYFIILAASLLQLYPKDRSSARLAFIDEAFSALSQERIEQMVDYFEANDFQVIYAAPPEKISSIGSRVQSTITLTSKGRQSFAVEGLVLDDEEDF

SEQ ID NO: 30815 - protein, 411 aa, Butyrivibrio proteoclasticus B316
MADKQVKLNKRQKDVLKALLDKLEKSKTYRGENTVSQNFRVNPADFFKEYDSDFANLDDQDDFERELDTLEKAGLVTLFIESGVIKSIDMVLSAQDKYYSLLERIELKQLEEMQISMYKAFLGRNKLIDLFCNEQIARLQGRKKAEYDIPIAKEVIGIIEYISQNKEEILERELSIELFGDSKKFEKEYRNKVITVLKKYGEFSDLVENIPDDTELGHAILAEYNVFKNPTYVNFKGKGTIWVKDGEKLELNTSMPVAIDSSTLERIDSVMIKAQRIVTVENLTSFNRLQDKNTFFIYLAGYHNTDKQNFIRKIAETNLFKTWYHFGDIDPDGFYILEHLKKKTGIAFSPLGMGIEELTKYKEYCKPLESNDLKKAKSLVDKGLYEDIVQYMLENNVKLEQEVISWKQLSI

SEQ ID NO: 30816 - protein, 486 aa, Gallionella capsiferriformans ES-2
MKADKTIATYRRMRTQPLWRLIASNNGPTVIGLLQSHLYESDRSLPASIFHERIGRDLEELRAQGEDFPQTAQAYVASWLAEGYLERRFLPGAKEEEYELSTAAVEAIRYVSGLAKPHSAATESRLTLVIDALARLAEDTDTDKFRRIDRLMAEQARIDKEIDAIQKGQMRVLPHTKALERTREIISLADDLAGDFRRVRDQFDQLNRDLRERIMDNDGSRGDVLDSLFAGIDLITESEAGRTFSAFWRLLTDPEQAATLDQALDRVMSREFVAQLDAKDRRFLLRLTRTLLEQGGMVHEVLQSFARSLKHFVQSREYLEQRRLNQLLKDAQRAALVLKDEVRATEALQYTLELTSSRLQSLSQWVLHDPSLQALPSQMTDGDAAPIDLESVGELVAQSEIDFRNLKANVRAILEQRSQASIADVLDLFPAKQGLGSVIGLLALGSRHGLKVDLNETVAWVGDDDQRRSAKIPKIFFLRERANELV

SEQ ID NO: 30817 - protein, 239 aa, Gallionella capsiferriformans ES-2
MSWSENASGQEMAASPTEVELPVTAEIPTNTLFIGDSGELQLDTRRALVQLLQGPSLDGRRHPKLWPMLIRDEGIIRRRLAELFLELVIDLDVQVAFTRQAETGDLEVPLLLRRAQLTFIDSILLLHLRQRLTQADTQGERAVVSIEEIVEYLIPYERTANTDRSGFTKRVHASIEKIKKHSILQKIRSSDDRLEISPTLKLLFSAEEIQALTHLYQRMAAGETPAPAIQSEHDEEAEQ

SEQ ID NO: 30818 - protein, 1124 aa, Gallionella capsiferriformans ES-2
MNSESQTGLLFAREQFRMSRLQVFNWGTFSDLHDVPISERGFLFVGRSGAGKSTLLDAFSALLVPPRWVDFNAAAREADRSGRDRNVVSYIRGAWAEQKDGESGEIATRYLRPGTTWSALSLSYQNSIGVHVTLVQVFWIRGNANGNTDVKRHYLIFERAFDLRELEDFGQSNFDIRKLKLSFPEAFSRDEFRPYCERFSRLLGIESEMALRLLHKTQSAKNLGDLNTFLRDFMLDKPETFDVADRLVSEFGELNAAHKAVVTAREQVQTLVPAREQHQHMQSLQRKRNELQELQMGVNSYRDTRRIALLKQNIFDLDISASGAAGEIVKKKGIRENHAATLRDLEGQHREMGGDQIEQWEAEKKGLETQRDERLRKRSQAEDACKKLGWALSDSPQGFAELVGSARQEVENCEQRNNETRENQFKLSNKKNTTESEFSQAVREVQALQRQPSNIPANMLELRRNIADAIGISEEALPFVGELVEVKSDETEWQGPIERVLHGFALSLLVDERHYAALANHINGTNLGRRLVYYRTGRAESSQAKPIGANSLVLKLNVKQCNHADWLQAELRQRFDYACVDSIQTLRSTDRALTREGQVKHNKNRHEKDDRSRVDDRRNWVLGFDNREKLAIFEKQAQDLAEAISLLTEELKTLLDQDNKRASRAIQCQTLINLQWQEIDVTPLLVRISNIERQLKKVREGNTALLQISERIEHQTVQVKEADEALRKAEIRHDKILDHIQESNQKLESLLQNLTIIPLTPYQTQELDERFAKLPDAVHLENIDRLTTSVVQALSKEIEEHNQGISGCEKIIENRFADFKRQWPMDAGDMDSSLSSASDFFAKLVRLEADGLPAYEQRFFDLLQNQSHQNLAALSTYLNDARKAILERMELVNDSLGQVPFNQSANQQTYLHIDATDRQLPEVKEFKQDIQQALSHAWSEDREFAESRFIALRRLVERLSSQDPELKRWRDSVLDVRQHVEFIGCEIDESGVEVEIYRSGAGKSGGQRQKLATTCLAAALRYQLGGNEHGVPMYAPVVLDEAFDKADNEFTTLAMNIFTNFGFQMIVATPLKSVMTLEPFIGGACFVDISDRRVSGVLLIEYDHDRQRLKLPEHAHEGSTIEAS

SEQ ID NO: 30819 - protein, 387 aa, Gallionella capsiferriformans ES-2
MKLPDEVRQELIRRFQNKHREWLVPGPSNETENTRWPLEINLGIPTEVAALKQPEGVRAWVTTWQNWRGVGTLIWNDRRWRSLGAQRLPDKLVLQGPADVASWTGETARWECACIRHAEITTRWPSLALGITRYFDVLADYSDADYKRIYAMLDWVIANPNSNLYPRQLPIAGLDSKWLEGRKGLLSDLVATIKGYTSERDFFQLCGLKPLPYPIRMRVLDQEIRNKIGGLGDLSAPLDELAALNLSVSRVFIVENLQTGLAFPDMLGTVVIMRLGYNVDVLARLPWIAKARCIYWGDLDTHGFAILNRARSYLPNLQSVLMDEETLLSHRTLWVKEKQQHAAEAHPLLTDAEQAVYGGIKQHQWGQNIRLEQERIAWDYVWNSLIT

SEQ ID NO: 30820 - protein, 468 aa, Clostridium cellulovorans 743B
MNLFNIISEDFFKPLTSKHKSIYVDCIRLIYNTYKTELSFGVDKEVIISELENYFDKESNMEMVFDEDDEIAKDSRAKANAILRRLKESGWLEYELSNDYKVKVNLFDYAATMIESFNKIVKNEELEYQSLVSQIHATLLNKEAYVKPYEYIIKRVIENTEELIIGLKKLNTNIKKYIDAITNEKTASEIVKDFFVYHKDIGSKAYHRIKTSDNISHFRTSIIENLYNIINDRNIFDRAVVGYMEVEQIDEKVEAEELLRGQIMNIISHFRKYDDIIEEIDNKNSKYINSAVARAKFLLNNSNNTEGKISRILAYLSEEFNKDETLNLCDETDDTLFEVFNIFPQSFIDSDSLYVVPISKKMALPEKLSDKFGISEEERELRKLALKEKNKNRFSRKNINAYVHELLKDKKAVLASTIPLTTKRDLIKIIFISLYGKDRKSIYKTTQLNEIISVNDLRFCDFLIERCE

SEQ ID NO: 30821 - protein, 199 aa, Clostridium cellulovorans 743B
MQKDKFRVAANKLLNNCFIIKKKEDTRNDYIFIIQNKELFIEYFDLLGYKIEINDMQGVVALISTYGTGRLRFKKVESIILLILRLLYIEKCKELSLNEDVVVLVDEIHQKYNMLKIEAKLNLDKTILRDTIRLLKRYNIISNLDSDVTMSDARIKIYPSVLFAVSNDNLTVIYDAINDKLNKYMNGEEQNDDEEVMQD

SEQ ID NO: 30822 - protein, 1068 aa, Clostridium cellulovorans 743B
MMMKKLCRIRLINWHYFVNETINVSGSFLISGENTAGKSTILDAIQLVLTTNNRKFNTAANEKSNRDLKGYVRCKTGNENKSYIRMNSVITYVALEFYEEKTGKYFTLGVKIDSPDEESKLTTKWFREECKLEELSFLKDGRPATAEEFRRKDKKVQLISQVSEAKARFAQRLGNLEDRFFDMIPKSLAFKPMDNVKDFINKFILSEKTIEVSTLRNNIAALKELEDLMELTKEKIAELDRIISKNNDILAKKQEIKTNEILIKKAEIEAKKLECEKLEQSRHICEQRLIDEQNNETTLKKSLENERERFTNLQIVLGQNETTQLIVNTKHRIEILQKDKQVAEASVKKLHNMLSRSEDALSLINKYEVFILSKEELSKVGSADFETEEKIKIVYKLKKEFQKLQEGYSSELVRTKDLLDKSQKSKATLENEIKNLKNRKFTYPENTTKLKTAIEKEFLSRGIKSEVRIFSDLLEITDTKWQNAVEGYLNSQRFYIILEPQHYKVALEVYNKIKKEVHTVGLINTGKLDINSLADMASLAYVIKSDNRYAKAYAVYLLNRVVRCEEVQSLKEHKIAITPDCMLYQNYAVRKIDEKIYNTPFIGAFALEIQLKNKQNELMNLKEDIKKLNEKSSVCTLLIEKLNTCKIDVLEENLNAPKELRNYEELIAKEKIELKKAEANPSYIQIQIQIEECRKVVDSKDREHSLSNQRIGELEKTLKANKTDIENLLGVILNLENIFNLFCEKDAGVTILGLNKFNEQIKIKTPETIVQNFSPLKVGLENKKNEFCMELIKLQSSYCSKYDCDLGSGYEQVHEYIMEHQKLVLADIIKYEEELKKAKDNCQLEFRESFLARLKENIENAKLEFRNLNYALRDIYYGEDSYKFELTHNKQKESIYQMITSKNNEAGFNLWSNSFEEEYKEEMEDLFAKLTAYDDKGEKVLTEYTDYRSYLDYDIVVEKKDGTLQRFSKIYGEKSGGETQTPYYVAIAASFVQLYKHGDTIRIIMLDEAFDKMDDNRISAMMDFFNSQDFQIILATPPAKIEEIGEKVDTILMAIREGSTSIIEEYDL

SEQ ID NO: 30823 - protein, 390 aa, Clostridium cellulovorans 743B
MIGKYEKEIITKLLDKYEKSKSFIGENKINQKFSVKIASVFPKYTDHSNYEMFQELNEAIDVLVRKGFIIAKANSAHVYNNAVLNIDDLEEIYKYIGRMPKKGINKSVLELMEKYKGRNEILDRYFEMQYERIHSNKSIQYFSNDLIELENILVAVDELLKVDTETFVRDFSVRTFKDSKMFERIVAKVINLIYEFGNFPEKSQILGNLNVFKNPTYVNFKGAGSITIKGQKIELTNLSGDIAISSAMLNDIERIDVAGNAVITIENLTSFHTFSDENVFAIYLGGYHNCVRREFIKKLYKQNQNIAYYHFGDIDAGGFYILQHLKHQTGVDFKPFNMDIETLKSYSKYIKPLTENDRDRLSKLINSEYCMVIKYMIENNCKLEQEAINN

SEQ ID NO: 30824 - protein, 472 aa, Selenomonas sp. oral taxon 149 str. 67H29BP
MELFDVLPERFFGLLAGKCRRIYAEAGLCLYEQYRLAQFGIEQEILRDKFQELIESWAEAGVAYEDDVFSDKDNAIEESRAKANHMIRRMKEFGWLDYEQRENFKIFILLPHYSSRLWGLFANLCEGRAVEYQRFAFTTYQVLSGDGAKVQPSMAVLEAERLAEEFVEELRILLNNIKSKMEQVSSQTSLQDVLSHHFVEYRADIVDRSYHRLKTSDHVSRYRIRILQEVQDIRQNKERFRSLCDDAVRRQLADSMDAAEYRMKASLQAIEEIYRGLDDMFAQIDRRHNQYVRASYERALYLQQEGSARTESMIAGILMAVAEARDQRRDIDELPCIFRLQTTNMLLPSSRYVPRKKRVLRPNTDTPVRSIDETLRERVRRESAERVARSISRQKIETWILNVLGQRSSMEIDELLALLRETESPDLLQLLYVYLYGYDDWAKYRLGKNKEIEEQDTVRYSNRTVRRKGKIK

SEQ ID NO: 30825 - protein, 199 aa, Selenomonas sp. oral taxon 149 str. 67H29BP
MKLELLNEEERTRIRSVIQALLSCNFLTREHDTALYIAARRYREEIAEYFQVIGWEFRVDERYEIVWLLSTGMAHRRALTMEESIWLLVLRLIYEEKRTSLNLSAFPMTTLAEIRAKYLALHLPDLKKTAIQRLTQLTKQYRLADVLDRDLSEESRIRLFHTLALAVDGEELSDLYSRLDIYRQRKEEDYEDAAENEGD

SEQ ID NO: 30826 - protein, 1106 aa, Selenomonas sp. oral taxon 149 str. 67H29BP
MKTLRKMKVINWHYFDEEEIAFGSATMLSGHSGAGKSTLLDALQYLFIGSQTQTRFNAAATQEARRTLLHYLRGKIKAEGVQYLRADEFTSYIALEFYDDIKKNSFIVGYVVDVFHDDRMQEEFFLIDQHTLSELDFRNTDGTLYTQETFHRRYAHGSSVFETGKKQWQKRLMNRLGQLSSRFLPAFSRAIAFRPIDQVRDFIYEYVLLPRDLKLDVLREVFYSYQKFERDLQDLRARKHELEILKDHYDTYCKLRDTAYEQEFVLLSFRHKNADEKLAVGRRQRQTCRDRLDDLQTKLHAQERLSKRRNQEQQEAYAAWQGNDEKRRRDELLETQKERVEKYRSLTDARQLMRKELMGEFEEVSALGAYPAGEFFRLPEGMPQALEELARTLKYAAEDTIQTTQIEQIQEQLKAGGEILAAVSNLWQRGNLLLEQAQSAAVQRREELCSEIEGLKRRQRRYRPEMMRLKALLEERLAGRSKVYVLCEEIEILDEEWRDTLEGYLNTRRFDLLVEREFFREALHIYETEKRERNIEGVGLVNTEAEKKYLGQQENKSLAALLLTQNPLAQACIDHLLGNVMQADNEQDMLRYRSAATKSCMSYKGLVARQIPRRFYEIPYIGAGAIDRQLEIRERELAEVRQRLVVLAEGAGHMKQISSVLHEPLHRYANAAKRMNVLAELDACKADLERISGELNAMDLSEAVRLKSVYEESKRRAEEAAHDCAETMRAQAHAESELDQAERSIPILERTAAAAAEAVESWRETYPDLCTGAEARLASLMQEARGGRSMEERLQSYEISRRGNETRRDNMWQKLLVAREHYGLAHGDTGHVYDPDHSYYTEILERLSGTDIPSFEEKAREALAQSEMEFKAHFIFSMREAIESARYEFRELNYALNQFQFHKDKYSFLVTPSAKYKPLYDAVMMADWETAGGLFADADTAANEQAMELFDKLVKGTPEEQEEFSDYRRYLDYDIRITDTAGQNYLYSRVLRQTSGGETQTPFYIAILAAFQQIYNDKTIRLTVFDEAFNKMDEERIKSCIELIKRMKMQLIVAVPDEKLAAIAPLMDQSIIVTNVGNHCFTDELGDVATWEKGLNHGADASADAL

SEQ ID NO: 30827 - protein, 419 aa, Selenomonas sp. oral taxon 149 str. 67H29BP
MELMPLQMHYEDIILTTLLEKYENSKAAVGELGRRPQFRILKSALSADYTDEMDVDKREAIHAAACELERQRLILVVWERHGAGRIERILLSANVSTLYQRMGKVMPLIRVNEYQTKLLALANVRTPWVQNFYATMMESLADNVIPAILPKEQVLYANLIRAILALPAEGESAIPRRVFSQRIFRNSKYFEQHIELPLLRLLRRFVDEPCASAAEYMDAAGIAVTQGKVWIAGNLTFLLGDRRYFLADFPGGLMLTYDTITAMKIDVLPPEILTIENLTNAETLTRMVDTNHLLIYTAGFPNRTVQALLLKIAPLHRTFHIRHWGDIDYGGIRIFEFLRRRYFPTLSQYRMDVETFRAYLPFAQSLTPAQRKPLSGLLEQKDFSTWHSLIRVMLDEGKWVEQEVMLWQDSSGMDSLNEE

SEQ ID NO: 30828 - protein, 470 aa, Corynebacterium accolens ATCC 49726
MRLLAADNAPVILALIAEYFPRGTRARPAAEVYELMVTDFEVLASEFSMPRTPQSYCNDWVKAGWLVRKSGKSSRGETLEPSEEALSALEAVERWETPVTTVTASRVESIGSALQRLARDTNEDISSRVASLEAERDRIDREIEKAHLGQFERLTAAETEERVQDVLNMAMAVPSDFARVRHELEALNHRLRRQLLDPEGYRGEVLEEIFSGVDHIAESDAGRSFRGFYSYLMDRERSAWLDQWIKQVLESDVGQELAPENRRQLRNLFRDMEETSFEVNQTMTGLARSLRNYVSSEQFAEDRRMIELLREARGMAIDAAQASELKAFHRMETPLQRIGMSIHSVSRIQLANPGREVVEEAPEAFQPGQENAEALYELVRESEIDFEELHGAIRGAVGKAGPCTIGQVLQAYPPTQGLASVVGLVHIADQHPLPALHDDHEKVTWTEEDGTIRAAYIPTMYFDSTTVEEL

SEQ ID NO: 30829 - protein, 216 aa, Corynebacterium accolens ATCC 49726
MSATDNHRVDSAHEPPLWESDKGSLTYNSRRALVQLLKGPLVRAYKEPVLWSAIISDEDNLRARLHEVFLELVVDEAEGFAFTRMVEEETLPIPQVLRTDKLKHIDTAILLNLRQELGLALPGERVIVDVEDLREGIGYVRAVDNRDEAGFNNRFNAAIKRIRNEYSLLSATETEGRYEVSPVLRQLFDAATVTAIRDEYARLAEAESDQEDASDD

SEQ ID NO: 30830 - protein, 1123 aa, Corynebacterium accolens ATCC 49726
MTNLYPGQFRISRIQLINWGTFHGYFSIPVARKGFLITGGSGSGKSTLLDAMSAVLVPQKDLKFNAASQQDLGRHNGRNLVSYIRGAWRQQENAHTGEIAPEYLREGATNSVVALTYDNGTGTQHTLIAIFRLNGGENSVSQIKRLYGVVQGDEDIDKLSPLLTRSLDTRKIKAMYKGPGASFTPTYTTFADRFRKRLGIKSEQGQVLLHRTQSAKSLSSLDQLFRDYMLDTPSTFERAEESVEQFEDLRQAYLRVEDVKAQIETLAPLPQLHSQRTTAEADKHKAEAMNEALPAVRARLVAEELDYRIRALTAQQAEAHSAAEALEAEVTHLDDAERRAAVAVSQLSAGELAALEAKIETAEKEIEHRSKEFHHLAAAADQWTDHFELSPHGFAELQANARLRIADFEADSAQLTEQQQEAGVAARDAATASASLESELHSFSSRRTNIDKALVELRTQLARDTGYAESELPFAGELLDIAPQQAEWEPVIQKLLHGFAATLLVPETAREAINQWVNSRNVGTRLEYRTIPEFAPAPAPARSPQQLIHKLEFQDHPMAPWVRHHISSRFNYECVNSVAALEQVTKTPAVTRDGLESRPKDKDGSTRFIKDDRTRFNGTRWYRVGSTNTAKIELLRSQLTEAKANARAMAKQVHELNRKMDILRTQRDKAQRVLETKFQDIDTASAEARKRDLQEQYDSLASSPEAQALATAHEQAKEKLTAARAQLNEAQKHLGNVEGELNRSTQRRQSIGTVPTVADQGIAKAVEEALHKSRRKLTIDDIDARRDEVQANLQETARTAARRIEETNTKIVSVLHKYLSQWPAEAADLEPQASFAGEGMEKLKFLRADRLADFRAQFLELLNGTTVQNLSHLASSLRHARSDIEQRMEFINKSLERTPFNGDRTLRIDVKDARGQVVQDFQRDLDAATSHSLAEISADEPEAAVARYHALDKILSRLGSSEPEDIRWRNLVLDTRKHVSFIGRECYPDGTTANTYQDSASLSGGQAQKLVFFCLAAALRFRLAEPDQDVPTYGSIILDEAFDRADPAFTRTAMSVFTSFGFHMILATPFKLIQTLSPYVDGTIVVNYDEPIIQGRPQARTGYSLIDATSYPQESQESPNADA

SEQ ID NO: 30831 - protein, 377 aa, Corynebacterium accolens ATCC 49726
MQMPSDLHTHAAKYLRNHFAEALASPDSLSIDWPLHPPTAANAARDVPATQEFIRAWQRWPHQEEIHYEQRNWSRTGLGTNSVPTRAVLTGAPRIAAAAGLSAEYSRALQRSHDIAGIFPDSPAFADAVYRTYTQWKDLDTYDLCCLAPCLTWLRAHPDSGEWERAVPVEGVDGKWIGTHRRLLLALLSPFGITDLGLRRTDARLRLRYLNHAPALSDIEVPLSQAAQLFPTAPPRVLIVENKQTFLALPLLSDAAPPTIAILGSGHAARQLHALAWLHDAEITYWGDLDAAGFSILNGVRAHFPHTESLLMDTATVTAFRHLAVPDPGDGSAMLSHLTTEEQRASRLLFTEGKLRIEQERIPFAHATDAIQSTFQR

SEQ ID NO: 30832 - protein, 510 aa, Bifidobacterium dentium ATCC 27679
MEGESPLADVRREMERLRPVYETGVLRLLLRSNSMLYVALLRSSFDPLTGELPRDVLEERISRSLSRLAETGDYTVKDDQTVRQAAHAILLELSREGDDDYAWLANSLDVASHRYLYRLTARAHRAIEALHRLEDTTQALSGAQANSIIMEIEHARMQLTADPRERIKLLRKDIEERQKEIDELERNETIERLTSEQVGDIINVIHNTLRGVPIDLRELALAERDNGDALRRRMQSGAMSVEDILTAYHDEYRKSFRESDSGRRFEDAFQVIVTDEGRQEIDDAVRDIAKNPYLDGEPGALLGQVRAELERIYSGIEDVRRQIRASDEAISRLVRQQTDTRYRTMLATLNQLFAKTNAEAKANPNATDRPYHTDTGLSQIAVLPTKPAKAMVRNATAALNDSAPTVGLPDLKAMIEVCGPRLRHMVDLIHRNPVMSHDGMRVDFAASFNRLPASERRESEIIGFLSALRTENDMACATWNCVSLDGTPRTWRTRPILATTQTLDDIIREG

SEQ ID NO: 30833 - protein, 235 aa, Bifidobacterium dentium ATCC 27679
MTDEHSETVGIERSLPTVEQPALFDGDTGDMTADARMAAIALKRERYISGELFDLVKDNVEAVERSLNNDMLRLVSNEKYHVMYAAPVSGIESNIRSLKTRASLSREDAAMLAFLRIHVLEYENQKTPVADWQVSRDEIRAALATGAGYLAGGNDEEGTTKKIAAAISRMTTYGYLEPTDDDEMLAITPLVPIVLDRQLADEWLDMTTPSMTHDTDAGMLDPISEENGTTDEEER

SEQ ID NO: 30834 - protein, 1169 aa, Bifidobacterium dentium ATCC 27679
MMAGDDMKIIADRWMMESRQIVNWGSYDGYQEFRPSIDAESPVTLLAGASESGKSTLVDAQISLLYPNGTPYNKASNAGRSERNDYTYLRGMIGISDGDNGETPIFLRGRDANGTPQAIWGAIVDTYVNRTTGSTLSCGKFLYLPAGDGKDEVRRRYIAWNRKIDPQIMDRYRDMPFTPNMFKKAYPDCSIFPNASAFHAYIWQEMGLSAEACRLLHKIQSADAPSRLDDIFKQGVLDVPEALRLAQDTVDDYDRFNANFHSMEDKARRVAKLQDIQTQYDAYAKHLTQVREYETVNPDSQQGLETLTLWMRSRMASEVRAGLPAAERKVKQQECDLHEAQERISDVNRQREAIVERIKGIDGGTLQRLSDDLERARRDMQDVRSQRQSIVEKFEGVEGALPSDETSWNAKRDALTRSMETFDERMGDLESKRDRLIGERTAASQECAQLRRDYDRKRRQRTRITQAMDEARALIAKAVGLSPDELPYAAELMDVCESDERWRTAMNVTYAPIAQTILVDSRHERGFAAKISAIDPSLMIRRTWQFVDVDKSYDCARKDGWISSKLQYREDSPFVGWLKEQTASARLDALCVETIDDAAHERRQVQADGQIKSGVHGFHGIKGMNPIIGFVNEGYLTELKKQLDEAHHRLSDTERRCGMVRKSIDLMHAEKNLADLVANMTWNKIDVVGAETLVENLKRRIEQIEDNPEMTRLTERREEIDRLLDEANARFYHAKSEMQSTQAAVDAEHAWLEAYESIEFDDDALSGDVSNMLADVYEGCFGGVVHAEDRPKLIAGGNDEIGGHSFETRIGHAMERAMREQNAALGKRAGELRTVVEQSMASYLERYAPDDDSATGSVEDYRFYLEELHSLQMLVTREATDEEYANSLDKLTKNFLQLNRALNTDQENVKDQLERINGMLAGQKFGPRGGRLSIDVEFRPIERAFVSSLKATLNKLDEWFRNDKDDPDATRKAFTSCATFIERVRRELEQVRDVNGIRSYGARNLDPRARSTFYAIVHHDDGPDERISSTGGKSGGALQELTSFIYGAALIYLLGGDVTGSPTYTTLFLDEALIKADGRYTQRALNVLPRLGFQVIVSAPESKTAEILGVSTKAYVAYKDPSVGRSFLQELTSEDIARQEAELHDAIDAMPAAPNDIGPTTTTILEQVF

SEQ ID NO: 30835 - protein, 484 aa, Dickeya dadantii 3937
MSLHEQQARFRRQFSEHAAWRLLHADNAPIVLAFINDLFAQESEVPFGKARVALEAELPQWQEIFGLHDNAGTYLRQWIQAGWLREHDDKLTRTDAFELALRFAQGLDQRDSNATASHLRIVQDAVRDLAVALNPNPEERITLLIARKQEIELEIGRLRSGKIPELTEPEQRERIRGLYQLTSVLTGDFRRLEDEIRQLDHRMRVRMIESESGRGEVVKALMEHEGELLQTDAGLAFDGFYQLLCDQNRITEFREQIRSILARPAAQYLKSDELRYLSHLVRELGKESERVFQIRRRTEESLRAFVESTAQQERRAVERLLRQLERLAVNFKEQDISLREPVALDLPTGSLRVRSPSTIHLRLPEERLDTRQVAANTNSHVASRGMLDHLNTVKVLEVAQAMKRLLGEHGPMTVAHIVHHRPIIGGLEELVAHVRIAKAVNAVVLEHTENLVVADRVGNRIRANIPALLISAEQFPVDLEELAL

SEQ ID NO: 30836 - protein, 251 aa, Dickeya dadantii 3937
MNEEKQHSQQAPALFDQYRTRGPTQPPTRNEMETVEDSPVEPPSAETSEVGMPLEARRALVLLLRQGVVMADSKRLAFEALCRHEALIAEYLGNIFMHMLLDMKAGIAILLQQETADRDEEADEASRLINKRTLSLYDTLLLLVLRKYYQERETAGEQKIIIDIERIEALLAPFLPLTDSSRAERRTLNGSLTSLKDKRLIGAVRGDDERVEITPVIRYVVNADFLERLLNEYARLADEAGAQTDEEAQDA

SEQ ID NO: 30837 - protein, 1140 aa, Dickeya dadantii 3937
MKRERKRTKRHKMLEMTEIRQNALFTHAQIRLAELSVYTWGSFHGLHSAKIDPGGTLITGDNGAGKSTLIDGLMALLLPSSKASFNVAAAQGDRSDRTLMSYVRGNYGKAHNGNETATLLKRSGATATGLRALYQAEDGSKITLAALFWITQASNSLDDLKRLFVVGKRDVRLEELLHIFGEGNARVLKQRLKEDPRTEPFDSFTEYQETYMRLLRMENRNAPVLLSRALGLKKIDDLTGLIRDLVLEPSQVKEHARHAVSEFDDLVGTHNELDDARRQRDTLIELPETNQALNQARGEMGRISSELAGLPVYFGEQCSRLWRIRLEQYQTELFQLEDEMARQEAMETQATERAQTLFHAYQSQGGERLEGLRRDLKIAEQAHEKSVQNAHTYQIDVRTLGLADTLTLDSFKQNQAKVQDSLANMPALRQKGQDRFASSAASFSREQERLKELTSEIEAIEARPDSNIDQRYQQLRDQLVESLSLECTEVAFVGELIDVRDEHRAWQGAIERAFGGLRTTLLVPDRQYRLVTKWLNARHTGLHVRVQVVRLNPHQQTAEFLADGFLKKLDWKPHPYRDWLKKYLSRFDLHCVTSTEILDQTDFSMTIQGLVHLDRGRFEKKDQQRIDDPRYWYLGFNNTRRLAALKADRVELVAKVLNLDKLVVDARTAMDDLEEHARIWERIDRLTWGDVDARSAQDRVQSLKADLHALERPDSELGAAKARWEQANVELKNIQDQKGRISKRVGGLENDVTHANQQINQADERIKAGVTDEVRERLDRRVGQLCLDDLDSVSELEGRQRSALEEVRKKTNSHEVKAATKAGGIVAEFKAKWPIIANDWLTGVDGLDEYLDHLTHLENEGLPDLVERFRERLNRNATQSLARISQAIQAEREDIQDRIETINNVLLRTEFKQGTYLRLGSRSEIFEHVKVFNSQLMRVLARAGSDEHEARFVELKDLIEKLEKATNPATSSNLESLRLLDSRYQLSFFAEEIEKNSQKVRDVLDSSGGKSGGEKESFAGTIVAASLAYVLTPDGCDRPLYCTVFLDEAFSNTAEAVSRRVLKVFQELKIHVNLITPYKNLNLARESAHSLLIAERNQERHESRLCEVTWEEIDEQLAQYEQQGLSNAAGSLGINVEPTR

SEQ ID NO: 30838 - protein, 397 aa, Dickeya dadantii 3937
MKTWGRLPKDAIEELRRREWDHPGRLRERLLGTRPLPITCVLKPPTGNEALEDLGHFHSYIAAWRKWPWPDQVVWVKKQYRQLGEFTVPIRLEIESTKALITALGTKAIERSQGWAERMEPLLSLDRALYPPLIRQLEELEKLSMADIRLLALVLPQLRRGLGQRRYLRALPLQGVDTKFVELNRPLIATLLDTMHDQEISASGGLEAWLDCRVTPSNWLYVKPLSPEVKSHFAELDLLRLSFDQLMTAPLPAGNVLIVENLQPGYGLPELPDTVAVFGGGANTAWLQAEWLKDRRIGYWGDIDTWGLKFLADVRLRQPHVEAVMMNQETLLSHVQRGVCEKRPTELPGKGLTPAEQTLFEVLRTNRYGVSRLEQERLSQDYVEQRLAAWLHAPVKL

SEQ ID NO: 30839 - protein, 488 aa, Cyanothece sp. PCC 7822
MFMDYDQIKNELKHSSSLQLLRSQNAPLIVSFLHKQFKENQRTAIKNSELTSKLEDYLEFIRESEAEGAYPQSPQQYLNQWCDDQYLRKTYEPGSDDPVFKLTPAIEKVLKWLGELIQPPEFVVTESRFYHIFDLLKEIRDYSTTDVETRLAQLEEERDRIQQEIDKIRQTGVVTRYDSTKIKEKFILANNVASELLGDFAEVTERFRALTRTIQEEQLQENSYKGSVVGRVLNADQEIKESDQGRSFYGFWNFLMSGDQQRELKSLIQEVYNLDELRSLMQKYGLLRRIERHLMDAGEQIIQSNHRLAEKLRQMLDESNLSENRRVAELIREIEGLAIRVAKQPPLDEDFFVLEGEPNVNLVMERRLHDLEECKPPTFSLNFDNLPPVNLDEELTELYHQLYVDETELERRIAQALEHRPQVTLAELVEIYPVEQGLSEIVAYLAIASKSEQHLLNDNIKESIRVASLEPEKQLRLTLPQVIFRRLF

SEQ ID NO: 30840 - protein, 192 aa, Cyanothece sp. PCC 7822
MLPQSTLPYAPAILKLLQGAMYSDDVHWNQLQTYLTAIQKYFAQIGLEVRNHETDGFAYLEQPDPDPQDKSEPLPRLTRRNPLTFRVTLLCVLLREEWRKFDTNSTTGQLVLNIEKIREMLKLYLPDGNNEDRLRLEVERLVGKVRELGFLRRLSQEDESYQVLPILKAKIDADQLALLKQKLEAYATSSPD

SEQ ID NO: 30841 - protein, 1124 aa, Cyanothece sp. PCC 7822
MQLPLLIEQNGYSNNDDLAGFRLQRFEVYNWGTFDQRPWVVNLGGKTGLLTGANGSGKSTLVDGLLTLLVPNKKRNYNQASSMTGKKERDEKSYVQGAYGQIRNEEFYGSKSKLLRKEGKLTVVLAYFLNELTQQKVTLAQVLWMEQSALKKFFVIANDNLSITSHFSKFKHTSELKKALKASGAEIFEEFIKYSQRFRKLLGLQSEKALDLFNQTVSIKEIGGLNDFIRNHMLQKTDIQTKINNLIEFYQDLTVSYQAICQEKKQLEILEPLKEEEKKLHKSTEEIEFLQRLKKLTPAYIARLKLALLTEELEKIERQLNQSQDHQKECDDRLKDLRQNEQRLVIAIENDSVGQRLNELKEKSEQRQKEVNRRKHQAEKYDRYAKSLKLPTYLDRDGFYRAKKQAEDLAQTIQLALEEIGNKLDGHKIQQNDLNRKIEPLENEIKSLRQRKNQIPSENLQIRERLIAHLNLDETDLPFVGELLQVRLEAQEWEGAIERLLRGFGLCILVPEQHYRAVNAYVQANHLKGRLVYYRVKPSTPNPTARAFSLQQIPHKLDIKNDNNIFFNWLREQLVQHFSYVCCDSEEQLQHETRAITRNGLIKHGEEQHEKNDRSRIDDRRHYILGWNNANKIKVLEAELKEINEELGQVQKHIQDLKDQGSQYKNQQSLLQAFKTFTDFIEIDWRSVHLELQDLERQLKELEASSAHLNQLKEQLKEVKQQIQDATEQRDQLMQEIGRLKTKQQNFQFSQSLCELKLSQFLPQEIDELIPWFTKQLKKKELSINTIAEIEKEIIELVSSTIDREKEKQNGCKNLIYRVTDKFLKEFPEFTLNLGTSVDFLPAYLALQDKIERDDLPRHEENFKKLMNEKVIQEISWFKTSLEKQEEEIQDNIDQLNQCLREINYTDSTYIELCYEMTRDTEILEFRNDLKICLGKIVEYGAEDNEKRFKNIQERLIKRFKEEERWKNKVIDVRNWLNFSVSERYRSDHSEKEHHTDSSGKSGGQKAKFAYTILASSIAYQFGLNQEDSRSKSFRFVVIDEAFSKLDDNYARYAMELFKNLNLQLLVITPKDKINVIEPYIINLHFVCNNSDYSYSQIHSISIEEYQKKRNQVLNKANDQSFGN

SEQ ID NO: 30842 - protein, 385 aa, Cyanothece sp. PCC 7822
MINPSEIKKKAERLYPDLLKAVVKAECFFPKDFPIGTLPKDFIALRNEVIVLIEQSKQTLGYGYNLELKTRNTHKYGHQSLPERITIETEIDYLKFINKEKELTQFKRDIELIRLKVPELENWIYDNPLKVIQHTEKWEDLLKVCQYFQKNPRPNLYIRELPIQVHTKFIEENQTIIRSLLENILPPDALQSVESPKEHSFEKRFYLKYREPLIRLRILDNSIKKIYKFPISDFQTPISEFRELNFQPHRFIITENLMNFLTLPPLINTCAIWGGGYAVQALKSVSWLADCPLFYWGDLDTHGFEILSQFRGYFPHTVSVMMDEQTFKSFEEFTVSGVTSKIENIPHLTAEEYHLYVYLKQHQKRLEQERISQNFVNEYLQNLFK

SEQ ID NO: 30843 - protein, 513 aa, Xylella fastidiosa subsp. fastidiosa GB514; identical to SEQ ID NO: 30405

SEQ ID NO: 30844 - protein, 237 aa, Xylella fastidiosa subsp. fastidiosa GB514; identical to SEQ ID NO: 30406

SEQ ID NO: 30845 - protein, 1143 aa, Xylella fastidiosa subsp. fastidiosa GB514; identical to SEQ ID NO: 30407

SEQ ID NO: 30846 - protein, 401 aa, Xylella fastidiosa subsp. fastidiosa GB514; identical to SEQ ID NO: 30408

SEQ ID NO: 30847 - protein, 450 aa, Pseudomonas aeruginosa 39016
MEDALQALSEMLAAYASQELYEIDPDATHLQAGRELREWIKRRLVVEREGHIYATDALESAIQFVDSLDSRIMTSTASRLSVVQREIENLETGLNPSPTGRIASLRRRIQHLEHELAQVEAGHVIVLDEAQAIEGIREIYNLATSLRADFRRVEDSWREADRALRHSIISEQSHRGEIVDRLLDGQDALLNTPEGRVFESFQQQLRQSAELEAMRERLRTILRHPAVPKALNRPQQRELRWLALRLVRESQAVLQARARSERDVRGFMKTGLAAEHHRVGQLLSDFFNLALSVDWQRQSERRKPVRLPPVGVAITGVPAIERLRFKTLGDDDTGELDLSLKPAGLEQIDDDFWDAFDGLDRETLIHDTLAVLVEQGRPVSLGELASLLPPDHDLETFALWLAMAREAGIEVLKEERQLVELVEEDEQRWRFNLPYVGLDHEALKGIDWEL

SEQ ID NO: 30848 - protein, 224 aa, Pseudomonas aeruginosa 39016
MDDSMDDEQPVMSAAVQVDERRTPQRVREAVQEMLKYGLLEESHKPNLYRSALSNIEAVDRILEPLDLAMGVDEVRGLVFVIVRQGEVAEEDDWSHPLVRRQRLNLEQSLLIAILRQHFIAYEQESGTGASQALVAVDELIPQLQVYLGELGSEAKERNRIITLLDQLKGHGLVSALDAHDRVIIRPIITHLANPENLQALVAWLREQVEGAATPVAGAEEDEA

SEQ ID NO: 30849 - protein, 905 aa, Pseudomonas aeruginosa 39016
MGENAFTLLNRAAGLKQLNSIDEIFRELVLDDRSAFERAAEVASSFDDLTDIHRELETARKQQRSLQPVADGWERYKALQQQLHDKQTLEGILPVWFAEQGYRLWLAETNRLEKAQKQAELNQEQCRGQFDIQKGVVDQHRQRYLRVGGAEIDLLRARIADWVREFDKRRLKAEQYQRLAKGLGLVVELSAAALEENQQQITARLEVLAEQITEARQKAFDAGIVQKELDGRLQSLQHERAEVERRPGSNLPGHFHAFRGDLAQALCVDESALPFVAELVQVKPEELAWRGAIERAIGSHRLRILVPQGSSEAALRWVNQRHNRLHVRLLEVKEPSSRPVFFDDGYTRKLTFKEHPYREAVKVLLADNDRHCVESTEQLRHTPYAMTAQGLMSGKERFFDKQDQKRLDEDWLTGFDNRDRLAFLTEQIREVNEQLAPAKLALDAAQGDVRKLEDQASLLQRVEELQFEEIDLPGAERQLESLRAQLDTLTRPDSDLALIKSELDEAEALLDSLDRQRQQLIEQCGQLKIQFEQAASATRKAYRGAEKGLSDTQRELALAHFPTLSAADLGDIVELERKHTHELQGQLKALGEKLGDQKSELAKRMSDALKVDTGALSEVGRELVDVPKYLERLRVLTEEALPEKLKRFLEYLNRSSDDGVTQLLSYIDHEVSVIEERLDDLNSTMQRVDFQPGRYLRLVATKVIHASLRTLQQAQRQLNSARFIDDEGESHYKALQELVGLLKDACEHNRNQGAKALLDPRFRLEFAVSVIDRESKSVIETRTGSQGGSGGEKEIIASYVLTASLSYALCPDGSSRPLFGTIVLDEAFSRSSHAVAGRIIAALREFGLHAVFITPNKEMRLLRHHTRSAVVVHRRGVESSLVSLSWEALDEHHQQRIKAMHEVAH

SEQ ID NO: 30850 - protein, 113 aa, Pseudomonas aeruginosa 39016
MQWLASAHLAGKQIAYWGDMDTWGLLMLARARLHQPAVEALLMEQELFEQYSPVSAVVEPTKALDSAPPGLLADEADFYRYLLVQERGRLEQEYLPKEQVERAIEQWARKIPV

SEQ ID NO: 30851 - protein, 510 aa, Bifidobacterium dentium JCVIHMP022; identical to SEQ ID NO: 30832

SEQ ID NO: 30852 - protein, 235 aa, Bifidobacterium dentium JCVIHMP022; identical to SEQ ID NO: 30833

SEQ ID NO: 30853 - protein, 1168 aa, Bifidobacterium dentium JCVIHMP022
MAGDDMKIIADRWMMESRQIVNWGSYDGYQEFRPSIDAESPVTLLAGASESGKSTLVDAQISLLYPNGTPYNKASNAGRSERNDYTYLRGMIGISDGDNGETPIFLRGRDANGTPQAIWGAIVDTYVNRTTGSTLSCGKFLYLPAGDGKDEVRRRYIAWNRKIDPQIMDRYRDMPFTPNMFKKAYPDCSIFPNASAFHAYIWQEMGLSAEACRLLHKIQSADAPSRLDDIFKQGVLDVPEALRLAQDTVDDYDRFNANFHSMEDKARRVAKLQDIQTQYDAYAKHLTQVREYETVNPDSQQGLETLTLWMRSRMASEVRAGLPAAERKVKQQECDLHEAQERISDVNRQREAIVERIKGIDGGTLQRLSDDLERARRDMQDVRSQRQSIVEKFEGVEGALPSDETSWNAKRDALTRSMETFDERMGDLESKRDRLIGERTAASQECAQLRRDYDRKRRQRTRITQAMDEARALIAKAVGLSPDELPYAAELMDVCESDERWRTAMNVTYAPIAQTILVDSRHERGFAAKISAIDPSLMIRRTWQFVDVDKSYDCARKDGWISSKLQYREDSPFVGWLKEQTASARLDALCVETIDDAAHERRQVQADGQIKSGVHGFHGIKGMNPIIGFVNEGYLTELKKQLDEAHHRLSDTERRCGMVRKSIDLMHAEKNLADLVANMTWNKIDVVGAETLVENLKRRIEQIEDNPEMTRLTERREEIDRLLDEANARFYHAKSEMQSTQAAVDAEHAWLEAYESIEFDDDALSGDVSNMLADVYEGCFGGVVHAEDRPKLIAGGNDEIGGHSFETRIGHAMERAMREQNAALGKRAGELRTVVEQSMASYLERYAPDDDSATGSVEDYRFYLEELHSLQMLVTREATDEEYANSLDKLTKNFLQLNRALNTDQENVKDQLERINGMLAGQKFGPRGGRLSIDVEFRPIERAFVSSLKATLNKLDEWFRNDKDDPDATRKAFTSCATFIERVRRELEQVRDVNGIRSYGARNLDPRARSTFYAIVHHDDGPDERISSTGGKSGGALQELTSFIYGAALIYLLGGDVTGSPTYTTLFLDEALIKADGRYTQRALNVLPRLGFQVIVSAPESKTAEILGVSTKAYVAYKDPSVGRSFLQELTSEDIARQEAELHDAIDAMPAAPNDIGPTTTTILEQVF

SEQ ID NO: 30854 - protein, 645 aa, Burkholderia pseudomallei 406e
MRRPICWRHACVASEKTAGDMGARSSRKSSTVAPTPGVLAFWMRCKYSSGALPANFGLNASVPVIGACGVARVTTSPNSLINADSNRLAWTAWMPKTSRTRALSSWPSQRNKISISRRRCSAGVSGVRMNVILCDNLSCKIIPQNCTEALPEGITLNSSSLSPAPRAGASNTPVFFDAERQRFFRPLNSSRRELVAACLRALYDRLHGPAADYAHHLTRDVLRELLLPVVRQYQTTLADDGSDDEFSAVDASDPQLLVAMVIRALVADGWLEQFADRTGLVAAFRFSRPGKLFSEALWALDRPSRSRQRNMRGCRNALEAALSERGDAHDLVDAYEYAEKVIEDLADGIDYFQELVRHLMQAASAHTQWNEFVDFLDRFQRDYSKQLTADNATLNRQAIRQKLEKLRAVPEAKFNRMDAQLRDIAHWMAKEYTGSSLYDWLLGRIEDIVDAACESKQPGFLKAMETYLKRVNGLALQSMMLRSGQTRHAYLAAVQKVAESPKLEQDRLLKLVGQFLAPAEVRVLDPASFKLKTATQRRKAVTVSIRPRPTREERLAAAMARAEAEVFSIPNEDVAQGLRADLRLFQHPIRVSAMPTASARDVIRAMQAVEAARSAIGGDLIVKKLPTRLENEFYGANDYEIDLKK

SEQ ID NO: 30855 - protein, 223 aa, Burkholderia pseudomallei 406e
MSLSNLIDEQLAIANVKRERFREILVRLMAYGVIVRDEDKTEQLLYDDARRVESLLDEYLDFAGFRLHHDRDNRFYRLYAAGAVVDGLPPDVYEPAPSLRARVSPDFVALALTLRFLYQNKLNAGDIQPQGEALVNFEEIAATMQTQLKRALPSSMGDKMALLAELRRHRLLRYAPEFSISDEDALLAIRPTILGVVSNDALTAALDADGVLEQQTTVEEKDA

SEQ ID NO: 30856 - protein, 1210 aa, Burkholderia pseudomallei 406e
MKLDRIVLVNWGQLRPGDYDLGNMTLLTGPTGAGKSTMLDGLQTIMTAAYQGIVAYNPGQEEVQQGQRSGKSKRTLESFVVGAEYSRFSRPHGAHGYMAAVFRPGPDEDSAKTFTALVAASAQVDGIGERRVPKLERLELVIVDDAALTVDDFLKDAEQSEWVAVEEIVKRLKARYSKVVTYDGHKRDYLCALYGRFRGRISITWDEAQNAAKAWCQSIAYKKIGSVHDLVRDDILEYDGKQLQESITRISDLMRQVTNLKQEGQRLEATVGRLRGLKTAIAQTTSAFEEQVQYDLLLAKMLVAADDERIAQEQKRINDDSALVTRCEQKVKAEERLKAGVDRSRIDIAAKLSGIAANAEKERLDQQLELANSAARHKLAELNTGLQEAAQIVNAATGLLRKPIPEQFPKLKASVDAVGRVTASTDVARLDGLLGAVLDASSDAQLNVEKLFRLTPAFAGVEEGLAALHSYLVGTEDSVLMAVASETSELTQRVEATRKARKELADRKELLASGASDYNRDTRMALPRIRECLPEAGVQVLCDLVEPVSDEWQEAIEGYLDNARFNLIVKPEWEARTIDLLHSWGSRCKVIQGKRCLQRADAGRVPSDSIIHELRTDHPIARAYLIEQYGAVVKVRDSEQLRDTARGLTKDGKGSGSRTMFVGERRDLVLGRKAREQALRATIEKLDAADRGIREFEQLQDTLSSVKRLLGNLREPVFDAMPLGQAAGEIDSTRRSLAQLDLTEVEQLRAERAKLELLIAGHDAEITAVNKEITLASQRITDAQGAIERINGGRDARFREREDQIRRLGQMCETNSEKTYTVIAEEVEGLLKSRRFDVHSVQVRLNTLRAQPDKLLGDVREMLAEYNANARQEERFQSALPHLHDATMFDPYYGPLVALGRAVGALHSELEGIGLYNNRAKVEEAERSFHDVFTKQFCVEIKSKVDDGVRLLRQLNMELERLKFGTDRFSIDWSKWEPEFQEYYSFFSAVTDLADSVETVDLFGETELTPKHVEVRDRLVKLLLDSDQERAGRELLRIADYRNYRRYEIWNDSDSGGRIALSTWGTGSGGQLETPAYIVRAAVVTNRLKFFEKGPSLKMLVSDESFSTMDEPRARAVLQYLRESLDIQVISAMPTRGAGGLRPEFDREYSYSRVPVDANGELDFILEYDERIFKKDKMRELWEKQRAAARAQAELAFGAAEAAQQAEALK

SEQ ID NO: 30857 - protein, 452 aa, Marinomonas sp. MED121
MHSKFFSESAEFIDTSIPIPRIKAFIEEALHEENWNTEGEGEGGCIKSRAIYVYNRLLETGWLNIRKDGIKQDIYMSSKVSMLVDFIENIQLYSSGEIGGGVLSIRNNLESIISPRKRTSATDISQMLDQVVQDTQSLSKTMKNLALHLTDISQDFRRFTKLDEKMTLFFEEFIKNSSFSDYNLIKGQHHPFRFKSEILDMLYSIEYEVDTTEQVVNSIQEHNRLKTAQDLPYEKALESLKNKVRLIRNIFENTEYLIEKIDASHARLGRQVNESIKYHSRTPSSAINDFESLLKTIKETGVKGTISNPLPVYPFFSLELVARVPKQRKQITQRKNTIKTLIPEEVIRQKEEKRLALERRTINQEKLTKWLDALFNQHGELGQINSINIPVSTIEDFVAFTVCRRLGIEDEKLHRNYSDTLTQYNFILAGDDLIEHEHTFCQPFNIVKMFGS

SEQ ID NO: 30858 - protein, 219 aa, Marinomonas sp. MED121
MFNEVRNLINNTAVEESQIIETFNYLQNHQFVFRKRSKDRKHYAFISEHFDLFRSGFELFGKFLIQNNDYGYIGINSTSSDDFNRLTMIDTAILVTLRVIYHQEKESRSNEDGSISISGSHLVTQYKQYTERNDLVDSKSRFMEYLKLFKQKRILSLSSEVDEETLLPIITIFPTIEVIMTPEVALRLNQEIANRANSASSDDDTSQIKISSYTMEEEV

SEQ ID NO: 30859 - protein, 1127 aa, Marinomonas sp. MED121
MKLKSVILVNWYLFDPITVPIHGNVALIGENGSGKSTIIDAIQTVLFGGNQKSIHLNASASVAKTNRSIRTYCLGYYKPGNKDDESSSTYRKRDESITYLGLVFEHPNNGSHVSLFVGIEAYEDDPAPNFKIRGIYQGNRALEAKDFITIHDDGSFESLTAINLKKSLSLQGITPYYADKSKDFMEAMVKLIGPTAHHDWIDPEILRGSLSKSISLKKEITEVSQFVESFVLEPRDIKVDDLIRTKNHYQNLTTKINELSQQKEILDELNATLNRAITQRKKMHSLSWIALEKQLEGIQEDQYVRKQGLAQYIQKRWDNRKAERQLKKTIATLRNKQSELSIQISNDDEQRRRDNLTKEIEKIVDKINSIQRDMLSDIAHYRQFCKQDVSVLHEESINLLTSKMRPMLEQTANMSFDFESFDDLSEALIGQIDAIEDLIDLKQKPLIAREVQIEEQVTTLTENINRVSSGKRLLTPETEFLIQYLVEHGIQATPVCNVVEISDATWQPAIEAFLANNVEALIVPEDQEVEAIRLYRRLKNTHQIYKRVIVKASLCVNWYDSIALAPNSAATLLESNNQYALGFLYKLLGRLELVDSDSELRRSRFALSKDGMVTNSVGISRLKLISHLKMMKDQSHNLETWRNKRRDLSTEKDDQITPTRSKLKDVSDSLAHLKMVQRDTERQSFQARNLAITQQEKLKEKNEEILKGIDLTHIDSLIQERDKIEKKLLPLRTKELEKLLDEKGGMRAQIKDTKTYLLALNKKVEVKYEEQGKIEASVYFDVQYNDELQIKSEDEDADIVKGKHESLSKQFYNALNRNEFTMKDIAETNESFNPEAYFPLNNETLEPVTQYVHECITKIVEMNIVKYKEAAERASKELNESFRTDVTNRLREVFKMQNRQFRDLNKALSQRLFHSERYKFIKKPKSEFRDLINYIEKTDLTTNTDDLFDSMPPEVEAQIELLISSDKDDTLNIRDYRKYFVYDVEVTSDVTQERYYVSDQMGTGSGGEKQSPFYVAIASSLATAWGTLSNPGRSAGLALLDEAFDKLDEENLKNAMDFMGDTGLQVIVATPAQQEYVFKPAVNSVIYVSKHILSKDKATASLDIEILTERGWEIFNPVQAIPSEVLV

SEQ ID NO: 30860 - protein, 402 aa, Marinomonas sp. MED121
MNDPAKSEQILIEILTKLLLKQEQLLGSGSNKQADIGTRESVFKPYAKSQPLGIVKYINILIQKYEKEGILKASWHTENISLKRIYLQDYERLCELIKHTPILKKLSIALQYLDYKVLDIPLYSMLRDAIRANWLEHKSFHKCTVDQYETLAKGFQGAHIALSLYQKKEAIDYRHFSIKAFKDSKKLSSYKALIANLLKSQYSELEGFGIDEVFRFFGITPIEQPILLSGSLNFTQHGSILDASFPPAVGLFPTEELLVSTQIAITSVITIENQASFMRYVKEEKQPTEIVLYTSGIPTPKFIELFQKVSNTLESETNFLHWGDIDLGGFRIWNILNKSIEREVKPHRMSPDDYPSSQHLKDLNESEKTQLETLSNPSIAKLIQRITSVGKKYEQEMWKGKQ

SEQ ID NO: 30861 - protein, 461 aa, Marinomonas sp. MED121
MLFKHLPDEIFQALSGSNKQLVEAVLFDLSDVFYDYAEDPIKDKSTIIEAIEDSLHKVDILSWQEDQKESFESPKTIHDYALRIYHRLVNTGWLVEEQELYRVSVLMTPQISMLLKSLVEISRHGKRNYGATVLSILSNLESVALAPLERGVTLNQAAAAARDFSAHLNQILLGIRSLQRDLFASRDPKAIVSGFFELFVEGILIADYKTLKTSNNPFRFRRQILELVQNFLANDDALYAISQCYSEQQLIPIEKAQALVEQDCRAILQTFNNIEQRLERIDEYRYRLEKRAADTARYMDSSRPGMASKIANVITNVARFDNLPVLKQVVGVKVLGMESAATPSRRREPPAPRVVTPASVSEQAIQIRDAQRRFHEARQVTVAKLQSYLQRQMNNESEKHIKSFSIDSVEDFVCFDHLRYVGSLGVNAKIIEKDFEVKFSDRYLDVHQFVECREFVVVRRR

SEQ ID NO: 30862 - protein, 212 aa, Marinomonas sp. MED121
MLKELKRVVEESGKDVQEFQQAANYLLSHQFVSAYKHGQRKYFLLIETYQHYFSVVFDALGMKLYVNENERLLGLLPVEREAFVRLKTDETLFLLVLRQIYEEKIENFEVDNGFVASNTHAVLERFVQLVKREIPTETRFKDILTLLSRHGVLIKGKAYDEDSKNLAIHITPVVRLVVTEAYLRQLESFNGSDAEQDEDQDDAIQLDTASEE

SEQ ID NO: 30863 - protein, 1137 aa, Marinomonas sp. MED121
MKKLSRIVLVNWYLLGAEEIEIRGNTAIIGPTGSGKSSLLDAIQTVLTGASKRHLNYNASANDGKASGRSIRSYILGMIDSGQQNAKVFGTGPRQDAVSYLGLVFTDTNTGKESTIGLSLSASLASPEEDVLGRFVLSNYGVVKGDFIEELEGRSFKAKPWLDVREAMKKVCLDPFIKSGSASATQYINRYLEELSPSADQLITLDGFLKNFKNALKFVPIASPTRFVQDFVLAEQPLQVSAYQKSLNEYRQLENKTQEVAKRIDDLNLIALDCDKKRQQEKANINYQWVATEARFDELGSKQDEIQDKYETHQERDDEINLELDTHNELAKQLQGQLVRLEQQYEHSDVGLKLQQLEQSRKLLDLQGQQDKKSLLQCKQMLIILASLYDYEDLLSNELLALSARAGDLHKKISEEGQLDTESHHFDKVLADLSNLLDREKTELFRQRSELNRTILNLKDDCKQLESDVSSLKGGTSPLSGNTKKLISLLKQTGIEATPLSHLAEVTDHKWQDAIEGYLGQQREALIVNPEDAEEAIRVFRAHRKQLMGCRVIDTTQTRLWLNRGDRSSLLQYIRCNNDHAQAYLNRRLGGIKPVDTERQLLREDSAMTYDGMLKLSGTISTIRFTPHMMVGINTDGMRQSRETQLQTLSAELMDLLQTDQRLEKADTLLSRVAANHQIDVDKLTAHSNALNKQSHDIAEIDAEIHLLQQKDDTELQDKIESLKARIAQVELEQKKLDRERQQIAEQYGSLNTQKAQLSAALSNLDEDRTRLKNHAFYQAEFASERYELLESSMVNGAAIYKEAMSRAEKAQEKARNFDQKVRKEVADHYAKYHNADIDSDIQLDYLESRFEEFENYIHHQVKVLSETELARYAKRAELARKEAEETFRSDYVSKLKDSLDQVAHIIRELNHSLKRRPFNAEVYQFRYYANGDMKDILDLVERFSSQDQANVGGLFDPASAENSEHAKAIESIHDLISNEDKQQDLADYRKFYNFEVDILDQEGNKKTTLSQRIQTGSGGEHQIPFYLAIAAALSTTYRLHETTEGEIVGGFSLAMFDEAFNKIDMAKTSTCMGFMKDIGLQVIAAAPDDKRAVMAANMDTIISVWREGGAVSLDVSYPKSKGRQLLTGQTENLALS

SEQ ID NO: 30864 - protein, 494 aa, Blastopirellula marina DSM 3645
MIRLGKLLVYFETSPAVSLLQSRNAPFVIGFLDQQFKQSGQIVIPHSDLISALVLFLDELKETHPDRMTAKPDAYLADWCDPEKRWLQRFLEADREEPVYQLTTHTEEVLLFVDRAINLDLGFVGTESRLKLVIETLSDLVVGSSDDPETRLIHLRKERDRIVREIEQIEQDGQISKYQPAQIRERFATAVSLLRQLQGDFRAVEDSFREITSQVQKREQEGLERRGAILEFALDSEDLLKQEDQGVSFYEFVKLILSPSQTERLEKVIQEVRCIPELYSLHEGLETVRNMITLLQNEAEKVMRTNQRLSATLRRLLDARAFADRRRIAQLLQEIQSLAITYEGNSRDQAPGVSFDFALDIDSPFRRSFWVEPPQFETIDLTNFLPSSEERREVFHEFASLQHLDWRRMRDCIRHLLATEHSATLGQLLAVHPISAGVVEVIGYLQLANEDGHLIDPTEDEVIHVAAASPLDRSYQVTVPRITFLPSRSRRRAK

SEQ ID NO: 30865 - protein, 206 aa, Blastopirellula marina DSM 3645
MRSDYPEYREWSLPLVRLLQGVIEQEDGKAWDVLMSNISQVEQFVARLGLQLVTDETEGLAYLRQFSEEETPAGYDALPKLFRASRLSFGQTVLAVVLRDLLRRFDEEETRDARCVVDEATLLDTWKAFFPNQFDEVKLQKDLQATLRKLEELSFVRRFGKDSASWEVRRILKARLTADSLEHLRDQLANAVQRKSDAEVSTGDSQ

SEQ ID NO: 30866 - protein, 1128 aa, Blastopirellula marina DSM 3645
MIQSNLPFGSSATTGFRLQKIEVLNWGTFDGQIYRASPGGDSTLLIGKNGSGKSTLVDALLTLLVRPGVRNFNVAAGAKKRERDEKSYLLGAYDRSSDDDSQSIRVKHLRPKGDSYSVLLAFFHNADIEKSFTVAQVLYLASDQSVEKVYCFTDDERSIQTDFGELQAAESILKILKQRGVRATRTFQEYEGWFNKATHVKSKAMEVFNQTVAVKDIQKLNDFIRSHMLEAHDWSDKVERLLGHFMQLNEAHDCLVRARQQRDLLEPVARFGEEYRIIENSIRRIENLQNAAPAYEAQRAIDLFTPLMEKEERELKEVRSRLVSIADETARLRSNHRWLLNQIDNVGGDRLKLIPALIGLEEVESRNKHSAFVSFQDSLATIGIESEMSNAEAFVKAISEFPERKSSLESESEQVARIRSDLAHRQITARSLLVDLRAELTGLERRRDNMPEWCVQMRKSISDALGIAIGEIPFAAELMQVRADERDWESSIEKVLHGLALSLLVPDRFYPLIASHMERTRLIAQGHGQRLVYQRVTDRRHGRTGGMNSPQSLVEKLDLRDRHPLLPWLKIELSEHFDFRCCESIDEFRSFEGQAMTQNRHVKYGKRRHEKDDRDRVVDPRNFVLGWDNRDKKRRLAEEIQRLSTADSVLTGEIDQADRQYRRIQRQLTAIEEAQRITNFDQIDFPRHDVEIARLKEEQQAIESQSNELQTLKRHLQETEALITDLELEKDELIGDERERKNSIDSAQKAIANAERCLDRWRGDGSLAQFLPLYEEIDEVLREPPVTAFSLFERLKAQIANWHQVIEQQRKNLTESQNRLTTAMSKFLGVCPEKTDDLSASSVYLDAFLDLRQQILEDDLPRHEQRFKERLNQKVIEEIGLFRNSLEQERRGIEGKIELLNVSLKKLEYRSGTHIELQPRPMRDSEISDFQSQLRECIEGSFEDTAEANEARFLRIKKLIVRLRDEESKRWRDKVTDVRRWFDFVAAVIDQDSGKTVSVYQDSSGQSGGEKAKLAFTILVAAIAYQYDLEPDLPVSDRFHFVVVDEMFSKVDDQHAEYALNLFRQFGLQLLIVAPLDAKARVTQPYVGRYLHVVKKENRSAIYEMTATEFDEVAEASQSYSKDGAAMS

SEQ ID NO: 30867 - protein, 395 aa, Blastopirellula marina DSM 3645
MIRPEEIKRKAIRLYPQWQKAWLNQEPFFPRTIPCEKQLDENLAVARESILALRNGSKEKVGCGYSVDWKEKNSRRHGKNWFPERVFIESEEDLLRLVEKQREFRLFKSSVDAIRDRYPELATWIGTHRKDLVDVAESLDGLLEVLDYFVGYPRPNRFARELPLSVDTKFIEQNSRILRCWLDLVLPPEAIRADEEHFCRRFGLRYAEPLVHVRFLDEELQRETASLWPELAVPLHALAETPLPGNRVLIVENKVNLMTLPFIQEGVAMGGLGNSVTDMRYLTWLAKKEVWYWGDIDLEGFEILSRLRTFLPHIRSLMMNEEMVRTWGKSLAGVGNSGRREPSLNLTPEEMSAYQICYETNLRIEQERVPQNFVIEELDRVVFENLQSKKPFSTH

SEQ ID NO: 30868 - protein, 491 aa, Reinekea blandensis MED297
MFFDQNRVQFFRPLTSKYREQVVECLRELYRRLYTSSSADYGHALTRDDVIETFSAALVRAPVLQTDDDDTEGRFRTSREQAGWVLNQLLEFGWLEKQVDEATLQSSFNFSRFGRTFTEPFVATDASQVRTRHRNTRNVRNAMSSFLENGEAYDLLDAWEYSERIISDFTDVIAELDDRKRSLVQQMENQVMIQQATNDFFDFMEKRFQPDLAIRLSADNVEKYRNEISQKIQQIRQQDKGFKQQAERRLRELLPDMVQDGQSVLWMVLDSIEHRLQAASDIMLPALRRSLQSFTKRADIIIRQMNYLASSTHNDMVQVLQQFTEKPITEQEALLDRASQLMSVPQIGLLDPAHMRLHNRRIQRSLALDVVPDSDEEFDRDAHKELVVQQWLDQAFLINDNQVREFLVRHLMAGESIRTDDLPVRSAADLLNLSHAIEVGSANSLSSELLFDVTYVGDAPVATEYFTQQDLFEIRLRDASVPASEESPHAS

SEQ ID NO: 30869 - protein, 249 aa, Reinekea blandensis MED297
MLHDLEKQLDKAGITRNEYSELLIRLLDYGVLCRDESQTEQVLYDRYLRIDGLVADYLEVIGIRIQHEPRFHFVRLFPPGAEVPGMAEPHQQPFNNGFRVKLNQSEVALVLILRSLYDRALREGQLDEQGCVLVSIENITISLRNLLKRTLPDKLTERRQLFGRLRQLRLIQLNQEIHEDSADLWIRIRPMIISYVSDDVLSTLLGEHSSDSETVTEPEFETAATADTEEEPRLLTDDLPEDHSVFTKE

SEQ ID NO: 30870 - protein, 1193 aa, Reinekea blandensis MED297
MDFEFGPINLFSGGNGSGKTTAADAIQTIMTAAHDTLFHFNPGQDEATQRGRGKQVRTLASYVMGCDDGSFARTEPTVGYLAAVFHPTQGESAEPFTAIIGVTAYIDKAGATPVARQSDMMYMIVPDAELTKADFVQDIDGVSRVVSLDRLNAHFKHQKIESAEKYDTKKQYLRRLYSALRGRKDAISEREAMNAARSFSRFMAYKPVKSIDGFVAQEILEKKDLGEAIRTVSDLMKTINGLEGEANRLKSIIDRLVRARTQANGYVDRWIEYNVADYVAAKSRFLADQKKYLATKSEQQRVRHELDQLNDDLDIATERRNQTDEQRVSMEARRLGIGALQDKDRFENKIAASTATLQKQATPLLEQNDALEGTLSASAVIHKTLLTSSLATELPSMADKSLLQTSKKVAQSQALGIDFRSLLNQDWIDISPLEQHLDSAIAQQALLNEWRELWFNAELHADGVSRRDQLQRLVDRREQKLMQVRTNLSRKQQDIDSLSTEQINYPYHVRMALEAIRRECPEADTRVLCDHVEVVDEKWQAAVEGYMGGARFAILVEADYEAQAIQIVRGLPKDNRARVIQGSKARQDAARVSLPANSIVHLMSFDHAVAKAYVTASYGLVEQAKDAQALKSIRRGVTANGLGSGAYAMYRCDIPESELVFGQGAREKALSAKKRELNELATQANELQARVSEVSELYKAVNQLRHLQHGQLMRDMLETQRELRKAEQALAALDLSDAQGIEEEYRAVVTQLNELNQKIRDGDEKKGSLNQRIEALTRQCELLSAQQEKTELRAEEKEQYLRDIVEVWPNFDVEKRLAEADQQAEDSDADTEENLRKSLESELNAKSHEFEQLLKEHNQDCQPQDAIVVELNYSVLHNVEFFRGMVGLARDVDRVHNRVKNNVLVEKVDQLGVLKESFNSAFVTNLCHSIHQAINDGKKVLMDLNRELEHHRFGADRERYWFDYEWVPEFKEYWHFFDEVYKSPSIGEGKTLFDTTLSARSLKIRDQLMEMLLDADEQKALRELERISDYRNYRSYEIYKQPEGKQPIALSQYGTGSGGQLETPAYIIRSAAITSAFRFNEGDSHLRMVLVDEAFSKMDETRSKEVIRYLTESLGLQLLFIMPTSKSGPFMDMISNQFVFSKVPLLNGQRRGELSTKVLVDRQQCNQEKIQELWANHRKVIRKQAELDFLEGL

SEQ ID NO: 30871 - protein, 243 aa, Nitrococcus mobilis Nb-231
MALQQCAAWAACAIMAARLTCTVETLMDSLTRTMDHDYLQTLRRLHPAWRLLAADHGPLVIGFLHRCFIEPNVRTLSEEEAAARLEDYLFQLRERFGEEAFPKRALDYLNDWANDQRGWLRKYYRETRDEPCFDITPATEQAIQWLAGLEQQQFVGTESRLLTVFDLLRQIVQGTETDPETRIADLLAEHPLQQGLAELVVYLSLAAADRKAVIDEQTPQSVAWTDETGRIRRARLPAVVYTR

SEQ ID NO: 30872 - protein, 969 aa, Nitrococcus mobilis Nb-231
MNDDLCKRLRGLTDVELHETFPPYGAAFRRRFGLGHEQALELFNQTVSMKSVGNLTDFVRGHMLEAFPVEPRIEALIGHFDDLNRAHAAVLKAKAQVEALEPLVADAQRHAELAGEIETLRACRDALRPYFAALKGELLTRRMDNLDQELTRCGNRIVELQDARRGEQSRRDELKRAIAENGGDRLERLKAETVERQRERHARRKRAEQYNALARELELPEPAGAEAFLANRRALETERAACEPHLEQVQNRLTEANVEFHGFKTEHGGLQTELESLRQRRSNIPARMLAIRERLCEVLELNEEAVPFAGELIQVRAEARDWEGAAERLLHSFGLSLLVPDAHYARIAEWVNATHLSGRLVYFRVLERRAAEPAERHPESLVRKLAIRPDSAFYPWLEVELVRRFDYACCEDMARFRREQRAITRAGQIKAGGDRHEKDDRHRLDDRSRYILGWTNEAKIAALEQQAGHLEQRMQAVGREIATQQAEQKRLQTRLQKLGNLAMFSDFRELDWRPLVTEIERLEEERRRLEVESDILRALEEQLQSLEAAIERAEEALTRAQREQAAAESKHEAARLALEETRQQLVATPQALRTRYFPRLEAMQAEALGEHRLTVESCDNRQSELRDWLQKRIDAEQRRLDRLRDSVIDAMRSYQNAYPLETQEVDVSIDSAAEYAGMLERLRADDLPRFEARFKALLNENTIREVASFQGQLNREREAIKERIETINRSLHEIDYNPNRYITLLAETAADPEIRDFQQELRACTEGTFTGSEEAQYSEAKFLQVKHIIERFRGREGSTELDRRWTRKVTDVRNWFGFSASERWREDSAEYEHYTDSGGKSGGQKEKLAYTVLAASLAYQFGLEWGETRSRSFRFVVIDEAFGRGSDESARYGLELFRRLNLQLLVVTPLQKIHIIEPYVASVGFVHNAEGRESMLRNLTIEEYRTEKAARGGGVAAAEQSAAVSSAGR

SEQ ID NO: 30873 - protein, 120 aa, Nitrococcus mobilis Nb-231
MSWTTPAELRAQVTRLWERGEILRARLSGEPLFPLRLRLRRPSAREIADHFGEVGDWIRRLQAGSREQRGAGYAIEWRRINHRVHGANRLPDSISVPSEHDALTLIGRTAPPWRSIATCG

SEQ ID NO: 30874 - protein, 477 aa, Neptuniibacter caesariensis
MLFNKLPDNLFLPLSGQNRQVYQAVLISLADLFFDEDLVDPFVPKDLVRSTIEGAVIRLGVRRWEPEEDDSEEEQQELPRSTAEYTSRIYRRLVATGWLEEEQRIYRTYVLLSPANSFLLRTLVSIANLEKRSYGGAVLNVLSSLEAAINDPQGRGITLSEAAQTAADFSAHLTDMMLGLRELKINLSQTNNPQEIVRNFFDRFVEHILVSDYKTLKTKNNPFRFRQQILSILRELQFDTVKLEQLIMHYQQQFEVDVHDAEARVHQHINRIIRIFESVDQRLAIIDDFRYRLEKRVSDTVRYMDKTTPGMASRLSRVISEISQKDGREIPRIRTLETVGFLAPGSVRAPVKRKTPAEPKVITRQEIDPKVLQLRQLFKEYKERREVKVDRIEAYLERHLIGRDQVDAADFEIDCIEDYICFSYVRHLQSLGKKAKKTIQKYDIRFEENYVNVADMVECRNFSITRKDHSKDVSNAR

SEQ ID NO: 30875 - protein, 240 aa, Neptuniibacter caesariensis
MLGDLQKIIGRSDHYQASDFSRAANQLLTNQFLYAERPAHRESYFLVASHVDYFTNLFEAIGWSFVHQPDEAYMGIIPKGEERFMRLRLDESLLLLCIRQQYEQKLESFEVEAGQAYTSTDDLLTLYENLTGKEIPNETRLKEILSLFSRHGVIERGKPDEMAPKNIPLKINPVIRQVVVEDFVRQLEGLCDPDEQENALIDELSAPVEAPSQEAEVEETTNEEPVAAQETAAAEEVETP

SEQ ID NO: 30876 - protein, 1150 aa, Neptuniibacter caesariensis
MKQLNRIILVNWYVLGAVEIPIKGNVAVVGPNGSGKSSLLDAIQTVLMGGNKRHLSFNASAGEKSERSLRTYCLGFLDDDGKKNTARHDSLCYLALSFFDTETAKETTVGVAISASTASADEDVLGRFILPDFSVSLDDFTEKKGEGRLPKSWDSVRAHLLKQCPEMIIEKRSSRFVKEMVSHLSYDPEMPNDDEKFVKNFKNALKFVPIDSPTRFIREFVLDENIVHVGAFRKSLDEYRAMETKTREVADRIGELEKVQELCNGIQRNVKNAAEYEWVVHETRFENADLKKEDAAERLDDNREKEEQLQKDLGNKSEELNQIMQNLADARAELNTSDSAHKVKALESSITAKTHEVNVVKERIQGVYNLMRTTVGFAENSELLPEKFRPVVEQCVQQWRSGQDMMADLWPHSPVEVDNVLENLKLQVEGVRRDVARRYEHSVIRINELRSEIQNQKSAVEALKQGHAPVRRNTRELMELLQGYGIESTPICELADINDDKWRIAIESFLGARREALIVDPDRVKEAITLYRRKGRHLKGCRIVNTTKSGDWLNRYKAGSLAHFIDTDNDHARAYMNRALGGVMAVETETELLRHERALTYDCMLQTEGSTTAINELQPIMGIRRRSDQAALQGKQVDQMVTEFTELGRSHESLEKLRDALITLNNGLDNVNERVFDLVNQREQLATEIDGQRQAITDLRNQDDTGVQQRISDLVTEQKEAEQMQRTLMDKLQKIRTSIIKDTASLEVFDQELEEHSNARSQCEEKVAFDAQSAQEKRDYLDETCSGELERIIFEAAKKAQSELSLHEKKKNAVRDGVAQYKAKYHGGGLSHQQLDKISPDSSHEELSAFVDETVQALKDSELANYSQKAERARLEAETAFRSDFVAHLNDQINKIKDMIRELNQHLKGRPFHKEMYSFEMTPNPELKDILELVEAYTQMDSANVGSLFDLKFDSDKPHKDALAKIHEVLKDEGESSLLQDYRNFYNFELVVKDLQGNRKTTLTQRIKTGSGGEHQVPFYVAIAAAQGATYRLREGNDGQPIGGMSLSVFDEAFNKLDSENTVTSLGFMSDLGLQTIIAAPDEKYSLLSSCMDTIINVCRDGRVVDLDVEFPTLQGRELLNSDNPLKMMAALEADEAENSAEESFEVEPA

SEQ ID NO: 30877 - protein, 483 aa, Bermanella marisrubri
MFFVQERLQFFRPLTSKYREQLVECLRELYRQLYSSSHAGSAEYGQALSRDAILNIFSEALVRAPIIQDDEEDESRFKSHRELAGFILNVLLEHGWIEKQVDQATLQSSFSFTRHGRQFVEPFLEDRLTNQVARHRNTRNVRNMLESFLEHGEVYDLLDAYEYSERIISDFTDVISELDERKRDLVREMEGQMLVQKASDQFFDFMEKRFQPDLSVRLSADNVEKYRDQISELVDDIRQSPKAFKAKAEKRLRELLPDLVHENQSVLWTVLDDIEHRLKSACEHILPLVRKALQNFTKRADIIIRQMSYLASQKHNDVVSVCKQLASMNEEQQAEQLERVADLMSVPQVGFIDPQHVRLAPPRRRTVIDTQVDEGLESVDEDSRKELYVQQALDQAFFVNNNKVRSFMIDQFKHRDEVISHEIPIDNANDLLALAHVVSVGAVDNLSSEYHFELNWIERSEHEYFEQKDVFSIRLVKNDSAAA

SEQ ID NO: 30878 - protein, 277 aa, Bermanella marisrubri
MLNSIEQQLEKEGIQLKEFSELIIRLMDYGVICRDESQVEQTLYDRYLRLEHLVQDYLSIMGIRVQHDKRFQFIRCFPPGAQVPGMDEDDQPFNGGLRVRLSQNEVALVLVLRSQYDKALREGQVDEQGCVLVSLESLSIALKNLLGRSLPEQMTERKSLFRRLRQLRLIQLSSEDALESAEFWLKIRPMIMSYVSDDVLSTLLAEDESPVEVGDEESESKVENEATDEENQSQAEASTEEEAQVNESDDQPEEPQEPSLTAIDVEDGPSVFAQETN

SEQ ID NO: 30879 - protein, 1212 aa, Bermanella marisrubri
MFLKKFVYVNWGNIPATEFEFGPINLLSGGNGSGKTTAADAIQTIMTAAHDTLFSYNPGQDESTQRGRGKQVRTLASYVLGCDDGSYARPGGANGYLAAVFHPTQGESGQPFTAVMGVSAYIDKAGNQAVARQSDMLLMIVSGHELTQSDFLLDEEEGKQVVGVDKIYKRLQKRCGQRAVEKYDTKKQYLRRLYGALRGREDAISEREAINAARAFSRFMAYKPVKSINGFVANEILEKKDLGEAIRTVSDLMKTIHAMESDANRLIENIDVLLDAKSNSQTYIDQWIDYQVAHYVAAKSRYVEDQKAYRDAKNQQQHLRSELSNKQSERETADARRKQAREQLVSLEARRQGIPALKDKDHLEQEIEGFKKQLQQQAVMLLEQDKQLKFTLDASKSIFKTLQNTSIGAEISALNERNFLKQAKDVVALADEDQLDFAAILNKDMIDMAPLESHLDEGIKRQQQINEWRDRWFNPELTTDGVSLRDQLARLADRREQKLQSQQKKMQQIQMDLDRLNASQVSYPYFVEAALDAIRRECPQADPKVLCDYVEVKDPDWQNAIEGYIGGARFSIIVESDYESQAISIVRNMQGGNRARVIQGSKAKQDAERGNTPHNSIIHLMSFEHATARHYLTASYGSVEQVPDADTLRRTRRGITKQGMGSGSYSMYRCDMSDTELVFGQGARERAEQAKQRELQQLADQASQAQQSLREAQDLLLAVNQLRHLTYADQLQQMVSVNRSWQNAEKNLEQIDLSDFSELEVEYEQLAEQAQELDASIQILDSELGQTAQQLKECEKRCAVLSDQQEFTSEKADENEDNLRSIAKLWPDFDVEKCLEDADAEAERTTAEIAQNQQQAILSELNSRAQCLDRALADHNQRCQTLDAIVYNPDYSNEHSADFFQGICDVQREIERIHNRLKNNILVEKQDKLVGLKESFDNAFVTNLCHAIYQAISEGKRTLEEMNKELEHHRFGTDKENYWFDWEWVPEYRDYWNFFEEVIKNPAIGEGQTLFDVELSAKSTKVREQLMSMLLDDDEQKAMRELERISDYRNYRNYEIYKQPEGKEPIALSQYGTGSGGQLETPAYIIRSAAITSAFRFNHGDTHLRMVLVDEAFSKMDETRSKEVINYLTESLGLQLLFIMPTSKSGPFMDLISNQYVFSKVPLAGAGKRGELNTRVLVDRQQCNKEKIQALWAQHRKVVRQQAELDFMEEFA

SEQ ID NO: 30880 - protein, 486 aa, Ruminococcus torques ATCC 27756
MSLMERIPKDFYKLFSSKYTDYYMLFLTAIYEEMSLSYSVLGLTEKECRAVMNEKIAAAALLWDEENYDEEGEFLTRSNMASVCLKHFQEWGWLKQDYDEALNSYVVTFPEYSQMYVELFRSLLDEQESEERESVMTIYSHLYTYSSDKEKNNEILKSALRVSKKLVQMLVNMQDGMRGYFDELSRQKDFRGIQDVLVKEINNSDSRKYAILTTTDSFYRYKEAVKELLDRNLQENDMSRLKLLRELEEVRQKKMKDEENAGKVKDPKKTDEAEKIKELRLERAAAMCEEAADTLIRIERQFDAIERRYNKLIEQKTIFASRAAARIRYVLQEGAEEDRTVALVDLLNKSRRKEEISEKLAERIRLSRPHRALTDESLYKRKEKGREAFVPATVSEGGQAEENLESFVLKPLYTRKELQEFKERNSVGNVFRTTRQTVRSAEDLEKLFFIWQEATENAFGSGEITVGEEEETEQGMRFSTLEIRED

SEQ ID NO: 30881 - protein, 212 aa, Ruminococcus torques ATCC 27756
MFEYLESISITEGEQIKKTIQALFRQTCILQVKYDPATLVPKDNVQYEICVRHRHFIEDYLSVLGCELTHDAQEHIFCLTGDGAAREKLNMTETVILLIIKLIYKDKIMGEGLNAPVTTLKEMREYGKNTNLIVRKLKADEWKASLYLMRLHQIIDVPGAVRDVEDDTPIYIYSTINLYVTAKDMNDLIEEYREEADGYETAEENFYKNADQ

SEQ ID NO: 30882 - protein, 1121 aa, Ruminococcus torques ATCC 27756
MKQPKKIFTRMLINNWGGISHKMLEFHEYVNLFSGKSGSGKSTVMDAIQVVLYGSVSANFLNKAADDSKNKRSVLSYLRGAQKDGTANRGDVDFCSQIVLEIEDTATHIVTCVGAAFEVAKGDTDLKKYTYFSHSGRIPKDEYLENNVPYSIAQIRKLTEERSRSADNRGRGEVNKVYPSKEAYLYTLYGEIFGQVEQGRMITMEKSAIALKMTSGTGQFIRDYMFPKTKEDTVATISEQLGAYREIKERVEDLEKRIEMLDKIQVYDRELTNVRAEKVRTETVLKCIDIEENIIRLKGRESELESVEKEADEAKKEQKILQDELQTIRDERARVQAELNNSDYGKKEQELKDLEYRIALLADNSAQWRQIVKGLKRWEEEDVVTDYVSNRALQLIQEIRGGALTEKLCKELRTHLDLALDNITNELSELRISIHETEKDIKEKQDAVEDLQNDRKPYPLELKKARQELQRALSDRYGRKIEVHIFADLFDITDEKWKNAIEGRLGRIKKSMITEPAYALDAAKIFRRMQQFEEVDLINSEAVQKDSPEADENSLYEAVHAESGYVDRCLKRYLGRIQKCETVEELSTVKDGVTPDCYSYSGYMFRHLRRKDYTKNACIGTKVSKAKLRELQEEIIDLQSSLIADRQTEESLKEARQFERFGQEPEHLMRLAGAADELADHYRRQDRLKEEIKELKNGTLAAELQAKTKELTSRIEEKEQAAGRLREKEIETGKKKGKLEEKIKALKERLDFLMKGYVPNDEIFAEVRSALETKSEAAYKKEMTVMAERLFEKETKLQDERIKSRNAFNNTYPAYGFSGVEHDNEVYDKVLERCRKDFEPKYKEEFEKQYELVYHSLRDNVIATIHGEIKSAYRHRRQINKMLSQIRFSDSIYQIDISPAKNENGQFYEMLMAEELDSKVIDHSGFDGQMSLMEDEFFRKYERKIGLLTEKFMPSREEDGAGREKHKNEMERFADYRNYLDFNMYEQSIDENGIEKKNYVDDMAGVDSGGEGQNPKYVALLAGFAMLYMQQSNRDSKIRLVLLDEAFSKMDKERSEVCLKYARELELQLIVCVPDERLQSLIRNVDSVYGFRRFRNQVTMMHIDKGNYLDMIAGESRSEEV

SEQ ID NO: 30883 - protein, 410 aa, Ruminococcus torques ATCC 27756
MSGNLLAKWIIGKAEKSEAYRAGTLTGMKHPKPDREMIKAAGGLPELIRQADELEKSGYIRTEKSNLGADMKKIYYSIDVIPKLCEKEGIEDPRKQQLRYIKQIEQLRAEVQGSFLEGYYDEIIRRLELGEIVKSPDMEDVDFFRCLNAVVNLKKSLWMRVFSAAVLNDSKRFKKDYEKKVVKVLVRSPLYEEGMTDDEILSVHGILSYAQVMEWKGPLLYKLKGGQEYIEDKAREKEYEIDTSQNQYGTVINSQTLERAFPVSIKGVQRIVTIENKANYEEMKYREDTLYLFCHGFYSPKERIFLKRLMEVAEGEIQYFHWGDMDMGGIRIFRFNKKNIFPKLKPYKMDREAFQEALERGAGIPLEEKKKEKLEKLNAGELEELKKCILEKGVEIEQEILLAENAIAEN

SEQ ID NO: 30884 - protein, 454 aa, Dorea longicatena DSM 13814
MQLMNEIPDTFWSLFRSVNRDIYIEALLCINEEYEYNNYFLTKEVCIQILSDMNAKKRFELQREENDTDFDMLETPSSRILNWLLRSGWLKRIEDYNTLVTNIVIPDYAAVMIDAFEKLNSEDASETDIYIQNVYATLYAFRNDPRASIGLLRTALVNTRRLNKALQDMLHNMNKFFAKLLQQDSYSGILREHLDSYVEEIVWKKYHILKTSDNFYIYKMDIKKCLREIRDDEAFIMKVQVRSKMLGDNQDDVLDLLDLIERGFDDIEHRIANMDKEHTKYVRATVTRMNYLLSGETDTKGLVVQLLNKMSEDPDQMEEIITETGKRMNLSLLEILSEKSLYKRRKSRKDFISQLLPDETTGDLDKDDILRLNRIQMRFSKKQIEEFIENNMEDEVMDASKINIADEEEFEKLILAYDYSTRKNSRYMVLEEEPEMVEKDGYRYPALRFVKRRA

SEQ ID NO: 30885 - protein, 214 aa, Dorea longicatena DSM 13814
MIDYYEQLTQEEKEEVTEVIQTLYRQTFLLERKFDKRAGRMQYTKEYRTCTKHLEFFKAYFEVAGIILRENVHMGVIYIQGEQLWGEKLPRLATIYLLVLKLIYDEQMQTASSSSHVVTTLGAVNGKAGEFHVLKSLPSITEMRRTIALLKKYQIIEPLDVLEELNESTRLVIYPCIHTVLLGDDIRELLATFSEEDQIGDEAAIQSTLEDMPE

SEQ ID NO: 30886 - protein, 1032 aa, Dorea longicatena DSM 13814
MVNISENNESQYLRNRNFSSTIVLELTQTNTRDKQCVGVVFDVDTSNNDVSRLFFWHTGELLPNHYRSEGRCLTTAEMREYLQRSFTPEQFYCGPSNERFRRQLYDIYLGGLDMEKFPKLFKRAISFRMNIKLEDFVKEYICMEQDIHIEDLQESIMQYGRMRSKIEETMEEIRRLKLICGKYEQYAEKSDEEKVCSYQIDRLEIMNHEVKSQEARDRIKVRQEAIEDLKKQQQVLEQEEKDLQKEYEEIILRIADSGYARLESDLDTLNETLERLNNGKVRWEQTAEHLKAWTEKDITPNQVIWDIEKFADGSISEEELVRLQEGLKDLQEELEDQRQEADADLRRIKKEEKEARAELKELKQGKKAYPRELEEARFELRNRLHERCGKFVNVHILADLLDVKDERWHNAVEGYLGNNKLQLIVEPKYARAAMDIYQEMDTKRFFRAAVLDTEKLTKDKHQVQPGALAEVVKAKEAYVQEYINFFLGNVKKCESLDELRECRIGVTPDCMLYQSYKLQHMSPENYTRRAYIGETSMRQRIRKLEEKCEKLNGERMPVQELLEEIRQAMQMEMLKQPAEDYLGWLADSKAIISKEKKKAQLLEQMQKLKDESVAAWEGKKKEVQAAQDAKKESVSKVQETIWENKKEIERLNAEVLESEEQMKDVKRKVADKRYEKEFQEYLASRKSENYEYLRRQMVSRVYTLREEEEDAYRKLVEERSSYIREYPNRTFSTSIRDNVPYEKLLNSLSCDHLETYRESAKTQAKAAVEHFKDDFIFKIRSAILEAYQRRDELNRIISKLDFGKDKYQFVITKNKGADGKYYKMFMDDSLQIRPSDLDDTMDNQLDMFTMEHENQYGEMMNELINIFIPPENATKDEMDEAKRNMDKYADYRTYLSFDMQQIVHGDKEMTIGLSKMIKKNSGGEGQNPLYVALLASFAQLYKINLSPKMHRSPTLRLVVLDEAFSKMDAEKVASCISLIRGLGFQAIISATNDKIQNYLENVDKTFVYANPNKRHISIQEFEKTEFGELAEE

SEQ ID NO: 30887 - protein, 498 aa, Bifidobacterium adolescentis L2-32
MERLRPVYETGVLRLLLRGNSMLYVALLRSTFDPLTGELPREIVEERFSRSLTRLAETGDYTPKEGQTSAEAAHTILQQLTKEGEGDYAWLANSLDVAAHRYLYRLTARAHRAIEALDRLEDTTKALSGAQANSIIMEIEHARMQLTADPRERIRLLERDIEERQKQIDELKHSDTLDKLTSQQVGDIIGVIHNTLRGVPIDLRELALEERDNGDNLRRSMQSGSISVEQALGTYHDEYHRSFHESDSGRRFEDAFQVIVTDEGRREIDEAVRDIAQNPYLEGEPGILLAQVRAELKRIYEGIEDVRRQIRISDEAVSRLVRQQTDTHYRTMLDKLHRLFVRASDDAKTHPGSDERPYRTDTGTAQFQALPSRPAKSMARAATAGLDDAPSTNVDAPDLKAMVEMCGPRLTHMIGLIRRDPVKTADGRFVDFAASFNRLPREERRESELIGFLSALRTQDGPATVAWHCVSIDGGERVWRTRPILTTEAALDEIIEEG

SEQ ID NO: 30888 - protein, 281 aa, Bifidobacterium adolescentis L2-32
MSMTDNTDGFDTGIGIEEETGPESGMPSEGPDMTRDRPALFDGDTGDMPLEARMAAIALKRERYIGGSLYDRACQYREAVERSLNNDMLRLVDNTKYRIMYASPVTDAETNIRSLKTRVSLTREEAATLAALRIKVLEYENQKTKPGDWLISFDDIRALLATGAGFLTASNDEEGTAKKITSVISRMRTYGYLAETGDENMYVLTPLVPMVLDQKLADRWLGSDDTDGDGMKDADGDGYDDSSIGADGGDTSDSTGTVSSGVEQDAFDFDSADDAFDGGEH

SEQ ID NO: 30889 - protein, 1152 aa, Bifidobacterium adolescentis L2-32
MEDGMKIVSDRWMLQSRQIVNWGSYGGYHVFRPSMDDAMPVTLLAGASESGKSTLVDAQISLLYPSGTPYNKASNSGRSERNDYTYLRGMIGISDGENGETPIFLRGRDADGTPQNIWGAIVDTYANRSDGGLLSCAKFLYLTAGDGPDGLRRQYVTWNQTIDPRLMDRHRDTSFTRGLMEQTYPGCTTHVNAQAFHASIWQDMGLSAEACRLLHKIQSADAPSKLDDIFKQGVLDVPESIRLARETVDDYNRFSENFHSMEDKMERVAILQDIQARYGEYAKQASERREYTPIDPDREQGETTLAAWTWSRMASEVRAGLPSAQRKAKESQDAIDRSQQRIDELDTQIEAVKERMNGIDGGSLQQLGKDFERARQDADEARRQRHAIAERFERVEGRLPADEQTWNAKRAALALSLDTYDKRLEDARSEYQRMVVERHARQGERDLLRQDYRRKIEHRTRISDDMDHARTLIARATGLDETELSYVAELMDVDEGDEQWRLAMDVTYAPIAQTILVDKRHEQGFAAKVSAIDPTRMTRRAWRFVDTDAQYDSACNEGWMSSKLRYKEDSPFVGWLKEQTASQRFDARCVEAIDDMDRAERQVQVDGQIKSGDRGFHGVKGLRQVIGFVNERYLAELERQLDGAERALEDADRRGRQMANAMTLLQDEHELALTVADLPWGKIDVDGLETKAERIRLQIERIESDPELAQLQDELKQLLRQKDDEGKTRYRAEAELENAQHAVQTEQAWLDMHGDSDFDDAALPDMVSNLLADTYETCFDTSRPQERPQRIAGGFDREGTAPFDVRVLRRIGNTVRARLQQIDERAVQLRADTERAMGDYLKHHSTEGDTVMASVEDYPYFLDELKNLNMLVTRAATDEEYANSVEKLYMSFQQLNRAFNTDEENVREQLDRINGMLKGQQFGPRGGRLSLHVDFHPIDRQFKSSLGRIMSKLDDWTRNARSNPMETRKAFAGCETFIGRLQAELGQIRDTNGIKEYGARNLDPRVRSSFYAIVHHNDLPDERISSTGGKSGGALQELTSFVYGAALIYLLGGDLTGKPTYTTLFLDEALIKADGRYTKRALTVLPRLGFQIIVSAPESKTAEILSIADKAYVAYKDPATGNSYLQELDREPATQAETQDATVEQTQPATEA

SEQ ID NO: 30890 - protein, 410 aa, Bifidobacterium adolescentis L2-32
MAAARNTTGETDIRRKLDEYVDAHLTRHMYDTDESWPLRKTIRLPKQAELEQHYNQIRAQNETIRDWARQHHCETSEKTKIVSSGLIQQKSPLIDSVTIPDLDTALRIATKQTRERYLREHDRMSALAKEFGLEPANAMNVAKTLKDHDDTDFHLVIQAAHYFANHDCHTMTPRMAPIPGFSAKWLGTPNSQRRKAIRQLTRQDNLTFQERPNELRLRLMDAEHHDQPDLIVTQPWVRNQPTDIEHAIIIENKDTYQAMPTVEHAICILGNGYAATSHITTLLPWLTTIPNIIYWGDMDANGLDILSKLRATGIPCTSILMDTTAYRTYEQYGTQLDAKNKPLTTQTPQPTPGLTTEERKLYETLCTGTDIQYLRIEQERIPIRDATTILHDQHHWPIDIPGNDIPNNTK

SEQ ID NO: 30891 - protein, 453 aa, Anaerostipes caccae DSM 14662
MRFGYDIPDSFWSLFRSVNRDHYIEALLKISEEYEYNNYFLSREVCIQVLSDWNADKRIWLQREEFESELDVLETPPNRILNWLIRTGWLKKLDDFSTLTSNIVIPDYAAVFLDAFEQLVNPQMEDTEIYIQNVYATLFSFQNDKRINLGMLKTALINTKKLNKALQDLLHNMDKFFGRLLKQQSYGDVLAEHLEGYVEEIVKKKYHMLKTNDNFYLYKMDIKKCLQEMWEDAEWIERVRAKARAEGRDEKEDVLDILDAIERGFDDIEHRIANMDKEHSKYVRATVTRLNYMLSGEADMKGMVVSLLKHLEIDEKREERLSKVAEKMNLSRLEVLSEKSLYRRKKRRDFISRLEPDEDVRELTREEVLRLNKIHTRYSKKEIEEFLESHMEDGSMEMRDVNIGDDESFEKLILAYDYCTRKNSRYQVIERENKMLENGKYRYPDLLFVRRKS

SEQ ID NO: 30892 - protein, 218 aa, Anaerostipes caccae DSM 14662
MIEYYEQLSDEEKDDVKRVIQILFRQTFVLERKYEKRTGRFAFQKDYRILNQHLEFLREYFSIAGLELRDNSHMGVFYIQGETVLGEKLPRLATIYLLILKLIYDEQMETASASSYVYTSLGEINEKIGDFALLKNLSSATEMRKTISLLKKYQIIEPMDVLEDLNEESRMVVYPCINAVLLGADVQKLIETFTEEDERGEEDGEQTGIQSTIEDLSE

SEQ ID NO: 30893 - protein, 1127 aa, Anaerostipes caccae DSM 14662
MEKKTESKQAFKALSKICLNNWHYIERKVLSFSEGINFFTGHSGSGKSTVIDALQIVLYANTDGRGFFNKAAADDSDRSLIEYLRGMISVGDNNEGKYIRNRNFSTTIVLELEQTVTGAKECVGVVFDVETATNEISRLFFWHKGGILENRYRKEDRAMATTEVRDYIKEHFPKEEFYFGSSNERFRRQLYDIYLGGLDAEKFPRLFKRAIPFKMNIKLEDFVREYICMEQDIQIEDMQESVLQYGRMRRKIEDTLKEIGSLKQIGTGYDRFSRAEQEVRVCQYLMEKLVMLQLKEQIRDLHEKIEKAGEDKKTQEKNRKELSGQLADLAEEYDRLVKQIANSGYENLKTELQGVNELLDQLQKSRAAWQQTSTGLSRWAELDVTPNQTIWDIESFSKGDISLGELRRLRHSLKEIREEVENDRQDAASELRRLKKREKEIDGELKELKKGNKAYPRELENARYELQNRLSSKFQVAVKVHILSDLLDMKSETWHKAVEGYLGSNKLSLVVEPDYAKAAMEIYGEMDEKQFFRASILDTEKILKEKPSVMDHALAEEVIAKEPYVRNFVDLLLGRVIKCQTIEELRNQRTGVTPDCLLYKNFQLKRLNPADYTKRSYIGESSVKQRIRDLKEEFKQLSAKKEPFARMLAEAEDILRLEALGRSEEEYIEQQEALKKIREKTALKRDLQDQMMKMKEESIGELEERQRENKRLQAQKQELLNEVSRAVWNREKQIEDWQRLYVSANSELTEQERSFCRSEELEKAFDDYMQGRMPSNLESLKNGTFRKIKQAENSREEAYRSLVELRSEYLREYPNRTFSPAIETNEPYEELLQKLECDHLADYQERAREQARSAAEHFKDDFISKIRYAILEAYQRRDELNRIISRLDFGKDKYQFRITKNKGPDGVYYPMFMDESLQIDPSTLDASMDHQMNLFSMEHENRYGEVMSDLIDIFIPPENASPEELEEAKRNMEKYADYRTYLSFDMEQIVEGEEKLTIGLGRMIKKNSGGEGQNPLYVALLASFAQAYRINLSPKLRRSPTIRLVVLDEAFSKMDAEKVASCIELIRGLGFQAIISATNDKIQNYLENVDKTFVYANPNKKSISIQEFEKREFDHLMEEAEDEEGTA

SEQ ID NO: 30894 - protein, 403 aa, Anaerostipes caccae DSM 14662
MKKELLKMIIEKTEKSASDWKKGAEGNRSFLVHQELYDQIGKTEFINAARELECQGLLKIEWEAVGVDIRRIRYSLKDLALIYEMSGIRPKFQVMEENMAAVENLLHSVKGLWIKDYLRDCMKRLEQGKIPSEFSKREELFRCLKGIDGLKEPLYKRVFSKYCLGDSKLFEKKLESTVLSIARKYHTDIEEGMDHTQVLSQLFIEEYSQELALKGPLRISVDGQEINLGQFRYGAVLNSQMLVHAKPQSGQNIKRILTIENKANYMAAPYDEEAVIIYSHGFFTPKEREFLINLRESLCAETECFHSGDLDYGGILIYRYIKQKIFPDLMPCQMDEEIYHKYEKYAVEMEPETLKKLKKLRMDEIPELMEMKELLVREGKGLEQESFLLASGEPQENAELRCR

SEQ ID NO: 30895 - protein, 460 aa, Clostridium bolteae ATCC BAA-613
MILMNEIPDRFWSLFRSVNRSTYIEALLKINEEYEYSNYFLSREVCIQLLSEYFSQKKYVIWQDETEDDWDELEPPATRVLNWLLRTGWLRKVDDYASMTVNIVIPDYAAVMIEAFSRLLGDDEDETQVYIQNVYAILFSLKNDPRSSVSLLNTALINTKKLNKSLQDMLHNMDKFFGSLLEQKNYGTLLKEHLEGYVTEIVNKKYHILKTSDNFYLYKTDIKSWIAAMREDSSWINKMCAKSAASARGQKKAPLTEYDIVEKLDQLERGFDDIEHRISNMDKEHSRYVKATVTRLNYLLNQEDNMKGLVIRLLNHLSEYGCPEEELASVSARMNLSQMTILSEKSLYKRRKTKADFTEQLKDEEESEELSMEEVLNLNKVRNRYSQKEIEAFIEGSMTEGKMVVDEQTIHSDQDFEKLILAYDYSTRRKSPYKVEEEDSEMVHCKGYTYPRLVFVRRAR

SEQ ID NO: 30896 - protein, 277 aa, Clostridium bolteae ATCC BAA-613
MENMELENSMTDIAPAAGYTGNGVPYYDNLMQSEQMEVTEIIRLLWRQTFILEHKYDKRTGRFQYNRDYRVCSKHLEFMKNYFAISGVELRENSQMGVMYIQGETVVGDKLPRLATLYLLVLKLIYDEQMESVSTSVNVYTSLREIHEKLGNYRLFKKQPAPTEIRRAVTLLKKYQVIEPLDLLEDLKSESRMIIYPCINVVLMGDDVRCLLSSFEDDSDESGVQLKADLEEEEPDATDGMTEDGMAEDEMTQDEMTEDEMTEDEMASEEGEPWNRK

SEQ ID NO: 30897 - protein, 1130 aa, Clostridium bolteae ATCC BAA-613
MEQKIANDRFLALSRICLNNWHYITKRTLSFNDEINFFTGHSGSGKSTVIDAMQIVLYANTDGRGFFNKAAADDSDRSLIEYLRGMVNIGENNEFSYLRNQNFSSTIVLELKRSDTGQCQCVGIVFDVETATNEISRRFFWHKGPMWDNGYRGGKRTMSIVEIEDYLQANYSREDYFLTSHNERFRRILYDSYLGGLDSEKFPLLFKRAIPFRMNIKLEDFVKEYICMEQDIHIEDMQESVMQYGRMRKKIEDTCAEIQSLKQIEDRFLTYADKEQQIEKCSYFVQKLEILQLQSEVRTLADRAKLAGEDLKKQVQARSSVDEQIGELTRQSDELLRRIASTGYEELKSQLKSLNELLEQLGKSESRWQQTATALKRWEEEDITSNQTLWDMEEFENRTIDLETLERLKKNMVSMRTDTEKQHQEAAAAVRELKKQEKQTRDELEKLRSGSKAYPKYLENARSYIQRRLLEKTGKSVDVHVLADLLDVKRDEWRNAVEGYLGNNKLNLVVSPKYARAALEIYGELDKKEYFNVAVLDTEKASQNQPQVQKGALSEEVTVRESYLKPYIDLLLGKVIKCNTIDELRECRIGITSGCMLYHTFRLQHINPDNYTKFAYIGKDSVRRRIRLLEQELASLEEKKKPLEETARESLRILALPWLSAEPTEYMDWLNDINSYKAKEREKKKLIQKLELLKEQNVDQLERDRQAVITLCDGKKRERDSLNVLIRDKEREIEGCRNKSIDSQSLLTSKERELKQNPDYDNELSAYLPSRDTVRYDREKETFIARCSKLSEAREAAFQELLAVRTSYIRTYPNRNFTVNARDNAAYDRLLSDLKCDNLEEYKQKATQQAKSAVEHFRDDFMYKIRSAIREALIRKDELNRIISRLDFGKDKYQFVIGRNKGPDGRFYDMFMDDSLDINPADLNYSYENQMDLFTIEHEKQYGDLMNELISIFIPPENATPEQMDEARRNMDKYSDYRTYLSFDMQQLIQNEDEVIKIRLSKMIKKNSGGEGQNPLYVALLASFAQAYRINLPSKVERNPTIRLVVLDEAFSKMDGEKVASCIELIRGLGFQAIISATNDKIQNYVENVDKTFVFANPNKKSISIQEFERERFVELMQDIEDGDEFADTL

SEQ ID NO: 30898 - protein, 392 aa, Clostridium bolteae ATCC BAA-613
MNAPLECIIQKYEKSTVDWKKGMSGKRSVIFREQDFKETGKRDFMNQLMELEMEGLVKVKWYQYGIEAEKAWYSLEQMETIYQRLGKIPKFKRINKLKEEVDQQLALIQSQWIRSYYQSFLQSLDKGDVPKALDTPKRELLFTCFKAIDCLQEPVYKRIFSKKYLGKSKAFEKHLQSKVLSAARAYLDTVNDDMDDRQVLDQLMINGYAQELAVKGNLIIELAGNKINLSLFPSGFVFNNQTLRSASIPPEQSISKVITVENKANYESMPYEEGTLIIYSHGYFSPDERAFLIQLERVLSGIHTSCGTAYLHTGDLDYGGVKIFQYIKKRIFPKLYPYLMDTQTYDQYMAYGEPIETSKLEKLQRTAEPLLQPLIDKICAEKQVIEQESFLF

SEQ ID NO: 30899 - protein, 466 aa, Faecalibacterium prausnitzii M21/2
MKFFEVVPSELFSPLASPNRILYADALDVLYAAYQENLKIREDVLYSMLRGRLEQELADATFEDEDIDEEELRDISGRARFLIRKLCSKGWFEKERGDDFEEYITIPNYSSRLLELFHQLRDDSPARGYSYVFGTFSVLKTADDSNNAYDKMTALYSAYDNTTALISLLQMVYHNVKHYFQTQIDMQDVNQVLAAHFNDFGQKVVEAYIRPLKIKDSVPKYRVPIQSVLRRWEEDDTLLMAMANEALRDKRGKTLEDCRADLLRKIFWIEERYDNLEKDYLEEIDTQVRRYTRAATQKIENLTNRDQSVRGNLNVLLTALSRNRRAAELVDQIQLAFQLYEQSFLSEKSLWYRKRPEKRTKTASVLIQDDQAPNTEEQVRAAQLLQSKYGRAAVNAYVQGWLGDADIRCSEELSLEEDKDYIMSLLAILGSKDASAGYVVQELDGIFCKNGYSIPQMQIRRKEKKP

SEQ ID NO: 30900 - protein, 215 aa, Faecalibacterium prausnitzii M21/2
MNFDFVTNATAKELEQFKSVCNQLLSRTYIVRTIYQPGKGRVDNPDYLFLSRHYEAVQEYLSLLDWDLRRDELNGYFYVLNTDEANRCNLNKKETAILLALRLIYEENMERLGLEQDAVCTVRDVLEKVVTDYPVFPAKPNMEEVKRAFTVLENHSVIQRLEGKFNQGSCRIAILPTILSAVSSEKLNLVVSVLKKEETDEEAEEDPADQLALFQ

SEQ ID NO: 30901 - protein, 1127 aa, Faecalibacterium prausnitzii M21/2
MKKLKKILLINWLYFSKELIEVGDINFLTGKNGAGKSTVIDALQIVLLGETNARNFNQAANEKSQRTLEGYLRADMDDNSPYSRRGKDFSTYIVCEFQDEMEGSSFVTGVTFDCRSDGSYRDTFFIYTGTLPENCFIEQGEAMETSALRRFLKQNYARAEFYDTQKEYRRNMLAKWNVHNEQVLRMMKKAVSFRPIVDIQKFITENICDIPDKPNIELMQQNIRDYKRHELLAQRQQEKLDALQQISRLYQEMNQAIDRCQIQKFLVRWAEKEAAQTEIDQRELERTECKENLANVNEQREELEQQIEQKETRRSELELACRQSNVFQEEERLLNMEKALRDEQKKLEQGLQNLEVEIKREARHLQRFCGEIQELEPEELLIPVQEAANTVQKAYAVFTGDEKGLFARPVELFETGQQAAAELSDAVRSAAHKTEDRIAELKKQADQKSAVLANLRRNIKDYPHGLLLFKDRLEKDLADKTGHAVPVYILADVLEMADERWRGAVEGYLNNQKYYLLVEPGRYQDALNIYDRLKQEAEYRAFGLVDIGKLREKETLRPLPGSLAEKVETENKLARSYVDYLLGRVICCDTAEQLRCYKTAITAEGMLYQGYVARALRKGWMEDAFIGRRAVQLRIEHLEKELACLQEELRHWQPLQKQLTGLKEPLFTQRFVRIDVAQKQEDYQRVQMIIKEIAEVKNQLSQLNLFWLDEQRRIIEQLKEEILAFNKEKDAKNVQKGKLESRIHQLEYEILPEKYQRYEAIEDVLNEEFTKEYRETIGVPRYRQELVRLKKADVIRKNFGDSLAQSTKAMDGAQKKLFAARREYAERFKPCAFQIEVMDNTEYEEERRTLQESELPRYKEKIRAARESAMEQFQNDFLAKLKSSIDQVQEQVHNLNKALRQAQFGTDKYQFRVGPNPDYLDYYNMITADELMEGESGLFALPFQQKYGPLIEKLFSQITMADDTQINARKQSELQENIVRYTDFRTYLKFDLETTDQNGSKQLLSQTLNMKSGGETQTPFYIAVLASFAQLYRVNDATRFGNTVRLVVFDEAFNKMDSDRITESVLLLRKMGLQAIICTPPDKVSDIMPIADRTLLVDKSGYRMHIIPFGKEMQNEGSTGDPESSAG

SEQ ID NO: 30902 - protein, 412 aa, Faecalibacterium prausnitzii M21/2
MKEAQVILNRLLDKFENSKHLSEPNTSRRRVMLSIDKRELPEYQYEDAVVRDAYNIAARELEQQALVRLEWARKQSVLSCIVLDLERVAQCYECADRVHPRKKAEEVANIIMQKLADNPVPWIAAWRDAVCAQVRNSMKVPTYCRENDGLLQELLLTFQRYAELSGSVTMRAFSSQCFHDTKYFERNVRELFLTIARKYNTQLAAACTEAELGERDQLAFLGIYARPELYELSGDCAICLKKGELRLSATEPYGLALPSTLVSEIVDIELKNICCITFIENKTNYDEYLLAEKQPEELVVYHGGFLSPRKKKLFEKLAAAAGETMQIRFWADIDLGGFCMFENLQTVFPQLEPMRMEGRFVEQYHKNGLKRPEQYLKKLKEERNAGRHTLFVDAIDKILQYGVTIEQETFLE

SEQ ID NO: 30903 - protein, 476 aa, Faecalibacterium prausnitzii M21/2
MQLFELVSPRLFRPLAGPNRAFYAELLLLLWEECRHTADYSISRAEAVSRAEDYFAALAKPLALDADGAGDEDEQPTRDPHTLAVGFLLRLRRTGWLEEQPGSYESEPTLAFMPEVTPLLDALEEILNPRVVTYTGKLYKAWQLLGSIGQEKSPYENVLREVAADLETLNKSLRALNASIGHYIDRLTHNRTPQEVLELFDQYEEKVVAAAYHRFKTSDNLFNYRAYLEEELDDCEQNQLPRLALDYARVERCAPGEAAPRVRALIQQQRDALEEMSTLMKEIDASHIRYRKRAVQRAQFLLLSDRSAQGSVTALLRRYAEEIRSPEQLFEPDDGPVAARLHLYPAAVFGAKPLYPPAAPRTEAPLAPVRTEPLDPDRLRQEQQLLLDYARLAVTEENVALLARQALAARGQVNASTLVEEYPGDFTGIIGLHTYSQSPHREYDITMTGNWVERGGFRFQDFVLTRRKEVNTDGNH

SEQ ID NO: 30904 - protein, 202 aa, Faecalibacterium prausnitzii M21/2
MATIDLLEETANYLLNHCFVLGCVEEQRAKYLYIQDHLNEVRAVFKPLGYAVLLYPAPMQAAALVNEHEGSQARLLKYESILLLVLRLLYLQKRESLAASADEVLVTVEEVQAELQKMNLPRKLDQQTLEKLMRTLRRYNLARPVGRLSGLDSRIEVFPTVLLALPDADLADAAAESARTRTELGLYERPEGADTEAGEGEA

SEQ ID NO: 30905 - protein, 1099 aa, Faecalibacterium prausnitzii M21/2
MIELKRLKLINWHNFENTTFDCARLTYMIGVNAVGKTTILDAIRYCLTTNRNFNALGNKKSGRTLQGSVHAKQRGENAYRRPGHTVAYIGAEFWDSVKHTSFVIAVRVESEGPMQELHPGDQTWYISEDGITLEQLPFIDPRTGAPSAKEDFKPAEGRLSYTRSPSEARDRICRALGIGRAASPLGKKFNEVFQMGTSMDEIPNFREFLYQYILPQPELDLEALQGDRLELENLHAVLAEAQTRADALDEIVRFGREATEKQTEALVNRGAALLARAAADAGEKAVWQERVDAGRRQQETLRTRYAEAKTAEAEARRAYLTAHSAAGASGEGRALDALSEELAHRQTALDAAARRADTAEKAAEKTGNLLAVLRRSGFAAGQKMADLTPDTLPALTDWLTAQEKPLEEAYFAARQHTAALQRQQTEKRAELDAVSGGKWVYPHGDAATRVRDAVNAELKSRGMEPDARIFCELLNVEDESWQDCVEACLGDRRFDILVPPAHYAAAKSAFVALKEKVGPISLLDTPGLRKANRRADTAPADSLAAQVTSENPLAAQYADTILRRIVCCDTPDTLENYPDSATRDLLRHHPFRLERLRTPQRYIGLEARRARAGALAGEMNALAEEVRAAAQAEQNLKAAYSQYQTLLRGTTLEELAALWDARAALTAARAAVDEQAAKLAECRENPLLQQLYKEEEVREAAWEAARTAVEQTGGDLRVCEKQIASCEAEQQKAVDTAEKSAQAAESFFAAHPLVEPLSRSRQQALTGPDKSPRAAAQAAEKAQAKLDDALTVYLNSTLEPAQREYNRRYVCDYPLGLAGLEQYRAQHESLVRIDLERYAARLEQAQRDCKDRFRKDILFRMKDDIFNARRQFRELNKVMEQLTYGEEVYRFELEPSRDPQLAAFYQVIVDKGNQQMTEGDSLDNLAATADPAYERQVDELMEKIMADVDENTRARQEGRTAAGATLSDYVDYRTYLDYDIKVTNQVTGQQAYLSRVSRDSSGGENQAPFYVAICASLLQIYQKSENSIRLVLLDEAFSKMTSDRIRPMMELFRRLQLQVLLISTVEKSTAIQPYCDITYSIVRHGDANAIAPFFRLAEK

SEQ ID NO: 30906 - protein, 471 aa, Clostridium scindens ATCC 35704
MIKLKRPMKSRTSWRIQMQLRNEIPDTFWSLFRSVNREIYIDALLYINEEYQYNNYFLTKEACIQILGDMNARKRYELQWEESESEFDMLETPSSRILNWLLRTGWLKRIEDYNTLVTNIVIPDYSAIFIDAFERLSSEDMEETDIYIQNVYATLFSFQNDARANLGMLRTALVNTRRLNKALQDMLHNMDKFFARLLDQKSYGDLLREHLDGYVEEIVRKKYHILKTSDNFYIYKMDIKKCLRDMREDEAWIEQVRERSRAMGDTGEDVLELLDLIERGFDDIEHRIANMDKEHTKYVRATVTRLNYLLSGESDTKGLVVKLLNRMSESADYDEVLAKTGEKMNLSLLEILSEKSLYKRRKGRRYFISQMEPDEEIADLDKEDVLKLNRIQVRYTKEQIEAFIESHMDQNDIMDAAQVDITDEESFEKLILAYDYSTRGSSKYMVLEEEPKMIEKGPYKYPALKFVRRRL

SEQ ID NO: 30907 - protein, 214 aa, Clostridium scindens ATCC 35704
MIDYFEQLSQEEQEDITEVIQILYRQTFLLERKYDKRSGRMQYVREYRICSKHLEFLRAYYKVAGITLKENAHMGLIYIQGEALWGEKLPRLATIYLLVLKLIYDEQMASVSSSSYIVTTLGAVNGKAGDFRVLHGLPSPTEMRRTIALLKKYQIIEPLDVLEELNEHTRLIIYPCIHAVLMGDDIKELLETFGEEENIGDEAAIQSTFEDMPE

SEQ ID NO: 30908 - protein, 1069 aa, Clostridium scindens ATCC 35704
MIDAIQIVLYANTDGRGFFNKAAADDSDRSLIEYLRGMVNISENNESQYLRNKNFSSTIVLELEQTNTREKQCVGVVFDVETATNEISRLFFWHTGELLNNHYRTEKRCLTTIEMREYLQRTFPPEGFYCGPSNERFRRQLYDIYLGGLDMDKFPRLFKRAIPFRMNIKLEDFVKEYICMEQDIQIEDLQESVMQYGRMQNKIEETQEEIRRLNLIREQYEEFCKEHREVEACTYQIDRLEELWLEAKIQECRDKSLGRQGEIGKQEAVKEQLESQARILQKEYEDIILRIADSGYANLESELAGLNETLERLGASKARWGQTADRLKEWKQQDVTPNQSIWDIDKFADGSISEGELERLKESLLDIQEELEEQRREADSDLRKIKKEEKDAREELKELKQGKKAYPRELEEARYELRNRLHERCGKFVNVQILADLLDIKDERWHNAIEGYLGSNKLLLVVEPGYAREAMDIYQGMDRKKYYRAAVLDTEKVMEDGHQAKEGSLAEEIVAKEPYVRAYIDFFLGNVMKCESIEELREHRIGITPDCVLYHSYRLQHINPDNYTRRAYIGETSMRKRIRQLEEKCQHLQEERLPLQEMLEEIRKTMQLEMLMQPISDYLGWLSDIEQIPAKERRKKQIVEKMQRLKEESVDTWNRQKEEIQRQQEDKKAQIDQVQKDIWNNQKDIERFREELIQSESALVQQKQKTVENPEYEQEFQEYLAGKKSSNYEYLKRQRIAERYPKQEREEQAYQKLVDIRGEYLRNYPNRTYSAAIKNNEAYDKLLNTLQCDDLESYRESAKEQARQAVEHFKDDFIFKIRSAIREAYQRRDELNRIISRLDFGKDKYQFVITKNKGADGKYYKMFMDDSLQINPSQLTNTIDNQLNMFTMEHEDQYGDLMNELINIFIPPENATKEELDEAKKNMDKYADYRTYLSFDMQQIVKGDKDMTIGLSKMIKKNSGGEGQNPLYVALLASFAQVYRINLSPKIHRSPTIRLVVLDEAFSKMDAEKVASCISLIRGLGFQAIISATNDKIQNYLENVDKTFVYANPNKRHISIQEFERKDFGELKD

SEQ ID NO: 30909 - protein, 412 aa, Clostridium scindens ATCC 35704
MYIVDKIINKCEKSSRDWRSGASGRRTIQIMQSDYDRCGKSVLISEVKELEFRGLIEIEKWVTRGSDVDIIAFRVEKLDKFYELAKSEGRMVWPKQERVDYYRGMLEAELGKGIEKNWIREYYRYLISRLDKGNFPKDVEKLELYTCCLRGIDELEEPVYKRIFSKKYLNNSKKFEKEVQGHLISVAKKYWDEIEEDMDDKTVLSQLLLEEYAQELEMKGPLRLIIESGGKMQSEEGTEIEGETPPDQEIDISAFIYGVTLNSAMLKYSRIAPKQPDIRRIITIENKANFVSVPYDPHTLYIFSHGYFSPKEREFLKKLAYILNEEDVGYYHSGDLDYGGIKIYEYIKKRIFPELRPYLMDVETYDRYLEYGEEAPESVLKKIKTVGLPEFQGLIGRMLETGLMIEQESFLI

SEQ ID NO: 30910 - protein, 494 aa, Clostridium sp. SS2/1
MIIIVRFRTYVNYYFIGNHFTRSFESVKIKSQRIKYNQRRKLPMKFAYDIPDSFWSLFRSMNRELYMEALLKINEEYEYNNYYLSKEVCLQVLEDWNESQRIWLSPEEFESENDASQTPPNRILNWLIKTGWLKRIEDFSTLTTNIIIPDYAAVFLTAFEELVNPSTDDTEIYIQNVYATLFSFWHDKKMNLAMLKTAFVNTKKLNKALQDMLHNMDHFFSRLLKQKSYEEVLAEHLEGYVEEIVEKKYHILKTNDNFYLYKNDIKRCLREMREDIPWMEQVQKKADKEKGEDVLSIINAIERGFDDIEHRISNMDKEHSKYIRATVTRMNYMLNGESDTRGLMIQLLKTIGDSKDSEEKIEKVGQSMNLSHFEVLSEKSLYKKRKRRDFASQVEEKQQEELSREDVLRLNKIHTRYQQAEIEDFIESYMQDDHMEVKDIDIRDEESFEKLILAYDYSTRRNSKYKVIERDDKLIDNGSYRYPALTFVRRKPKS

SEQ ID NO: 30911 - protein, 218 aa, Clostridium sp. SS2/1
MIPYYEELNDEEKNAVTKVIRTLLKQTFVLERKYDKKSGRLVYNKEFRTVDLHQEFLREYFKISGIELRENLHLGVFYIEGETLIGEKISRLSTIYLLILKLLYDEHMAEASSNTSVYTSLGEIHEKINDFHLMRTLPSITEMRRSIALLKKYQIIEPLDVLEELNEETRMMIYPCVNVVLLGDDIRRLIESFSKEEVDSEFDEDEAAISGIIEDMPE

SEQ ID NO: 30912 - protein, 1071 aa, Clostridium sp. SS2/1
MIDAMQIVLYANTDGRGFFNKAAADDSDRNLIEYLRGMVAVGEKDEVTYLRNKNFSTTIVLEFTQTESDEKECLGVVFDVDTARNDTSRLFFWHKGGILENAYRTEEHAMTISELRKYMQKNFKKEDFYFGTSNERFRKQMYDIYLGGLDMEKFPRLFKRAIPFKMNIKLEDFVKEYICMEQDIHIEDMQESVMQYGRMRQRIEDTLKEAKSLEEIKESFVKFKTKKEEQDYCQYRMNKLDVLKLKTDIHLLQQKIEDGEKDLKTQEENETVLEKKLEKLAKEYDALVAQIAGSGYDQIATRKKDVQELLGQLNHSVQRWEQTSKDLKKWCDLDITPNQAIWDIEKFEQGDITEDDLNRLKHTLDILRKETEEERQDNASALRTLKKQEKSISDELKELKKGNKAYPKEVLDARYELQTKLSEKCGDFVKVNVLADLLDMKDERWHKAVEGYLGSNKLTLIVEPKYVKDAMEIYRDMDQKKYWRISIADTQKIDKQDMKVEENALSEEVLAEQSYVKKLIESLIGRVIKCETIDELRNCRTGITPDGMLYKNFQLKRLDPKQYTRNSYIGDNSLRHRIKELEKEKDKIFDKKDPLEKEVLSAVVILDYEYLPQSAEEYLKQQETLERAKERQEEYEDLENQLTKLREGALKGLEEERDQNRLKQEDCKQEINAMKEAIWATQNALKECRQQIIDQNEALIRAQNELPANGEYEQQFAQEIEKTDTEDYERLKKRAARKYYDAGTKKEEEYRKLVEVRTAYLREYPNRTFSAVDENNDVYDKLYKELSSDHMEMYREKAAKQAKTAMEHFKDDFVYKIRSAIREAYQRRDELNRMISGLDFGKDKYQFKITRNTGADGKYYPMFMDDSLNIDPSVLNTTMDDQMNLFSMEHENKYGELMNELIEIFIPPEGATGEELENAKRDMQKYSDYRTYLSFDMEQIVDGDEKLTIGLSKMIKKNSGGEGQNPLYVALLASFAQAYGIHLSPKVRRNPSIRLVVLDEAFSKMDAEKVASCIDLIRNLGFQAIISATNDKIQNYLENVDKTFVYANPNKKNISIQEFEKCEFDNLLTEE

SEQ ID NO: 30913 - protein, 456 aa, Ruminococcus lactaris ATCC 29176
MQSHYEIPDTFWSLFRSVNREIYIESLLCINQEYEYSNYFLTREVCLQILNDMNTQKRIRLEREESETELDLLETTSSRILNWLVKTGWLKKIEDYTSLTTNIVIPDYAAIFIEAFEKLSSQELEETDLYIQNVYATLYSFQNNPKVNLNMLRTALVNTKKLNKALQDMLHNMDKFFERLLDKKTYGELLREHLDGYVEEVVRKKYHILKTSDNFYIYKMDIKKCLREMRENDEWIESVRARAKAAGDEKEDVLEILDQIERGFDDIEHRIANMDKEHTKYVRATVTRLNYLLSGETDTKGLVVQLLNRISAEENGVKKEEKLRKTAERMNLSYLEILSEKSLYKRRKSRTDFISKMETEEETEDLNREEVLKMNRIQMRYSRAEIEEFIQAHMTGDIMDAGAMKDMTDEDFEKLILAYDYSTRRNSKYAALNEEDRMVENGRYRYPDLKFIQRRP

SEQ ID NO: 30914 - protein, 214 aa, Ruminococcus lactaris ATCC 29176
MIEYYDLLNEEEQDDMRDLIQLLLRQTFLLERKYDRRAGRMVPVREYRFADRHLDFLKEYFRIAGITLRQNVHMGLIYIQEEALWGEKLSRLATIYILILKILYDEQMASVSSSNHVVVTLGMINGKAGDFHILTGMPSPTEMRKTIALLKKYQILEPLDVMEELDENSRMVIYPCINTVLVGDDVRELLGTFSEEEYSGDETAVQGTIEDMPE

SEQ ID NO: 30915 - protein, 1067 aa, Ruminococcus lactaris ATCC 29176
MQLVLYANTDGRGFFNKAAADDSDRSLIEYLRGMVNIGENNESQYLRNKNFSSTIVLEFTETESRQSQCVGVVFDVETATNEISRLFFWHKGGLLENDYRADKRCLTTGEIREYLQRNFSTTDFYCGPSNERFRKQLYDIYLGGLDMEKFPRLFKRAIPFKMNIKLEDFVKEYICMEQDIHIEDLQESVMQYGRMRSKIEETLKEIRHLEEIRDRYAVYQTQVKEVENDQYQIDRLEILRLEAKLQELLDKIKESQEDIGRQEQAKAELETKQQTVQGQYEEVLLRIANSGYSALEQKLGNVNEMLEHLQLSRAKWQRTAAGLAAWKSKDVTPNQTLWDIEKFETVALDEETLKRLQTSLVQIREELGEDLKDAEAKLRVIKKEEKDAREELKELKQGRKAYPKEVEEAKYELRTRLQERCGRLVPVQILADLLDVRDEKWHNAIEGYMGNNKLLLVVEPNYVKDAMEIYQGMDKKRFSRAAVLDTEKVLSSDKKAKAGSLAEEVLAKEEYVRAYIDFFLGNVIKCDGIDELREQTIGITADCMLYQGYRLQHINPESYTRRAYIGETSMRQRIRRLEERCDALQQERLPLQEMKEEIQRVLTLEALSQPAEEYMSWKKEIDEIQKKEREKRQIQEEMKKLQDGEVSALKAQKEDLLRQQAQLRQELEELIGKISESRGNAQRNQNFYQTVETELQDRQKEFHEDPQKEEGFRAYLDTKRSVNYEYLRQQRSKELDAVEVEKDKAYSQLVDRRTIYLKLYPNRTFSPTIEENTPYEKLLSELQCDELEDFRLAAKEQAKSAVEHFKEDFIYKIRSAIKEAYQRRDELNRIISRLDFGKDKYQFVITKNKGPDGRYYKMFMDDSLSINPSQLSDSMENQMNLFTMEHDEEYGDMMNELINIFIPPEDATREELDTAKKNMEKYADYRTYLSFDMQQIIHGEKDMKIGLSKMIKKNSGGEGQNPLYIALLASFAQVYRINLSPKIRRPSTIRLVVLDEAFSKMDAEKVASCISLIRGLGFQAIISATNDKIQNYLENVDKTFVYANPNKKHISIQEFEKVEYDQLKVEE

SEQ ID NO: 30916 - protein, 407 aa, Ruminococcus lactaris ATCC 29176
MEYLLQLLIEKIENSENQWKPGANGWKSLSNKAGNLYDDRKHLKSDVVKAAKDLEKTGLVKIEWVQGYREQDIQAIRYRQEDIPALYKLYRERVDSDFCARAELVRKYQEEIRAELQGLRTPWIRAYYEKLLQESESGRAKKATLEKAWKLFRKRRACWRGIDELEDPMYKRLFSKKYLKDTKIFENEFQDFIVSTAKIYAKELLDDAMNDSEILSVLLIEDYAQELALKGPLHLKWEDGTEIHNEDWRYGNILNSDTLRYAQIAGQQPEIQRVITIENKANYMMMPWEEHTLYIFTHGFFSPKECRFLQSLNQVLEHTEVEFYHSGDLDYGGIKIFLYIQKNIFPELQPLMMDVQTYEKYRNYAEKIEDTTLEKLKKLQIENPVLRQLAEKLAREKKGIEQESFLL

SEQ ID NO: 30917 - protein, 506 aa, Bifidobacterium bifidum NCIMB 41171
MGDIRREMERLRPVYETGVLRLLLRQNSMMYVALLRAAFDPLTGELPRETLEESFSQSLSRLVDSGEYQLREDQTIADASRRILADLTREGDDDYAWLANSHDAASHRFLYRLTARAHRAIEALSRLEDDSRTLSGAQANSIIMEIEHARMQLTADPGERVALLNREIKARKHEIRQIRHGQRQAALTESQVEDVIAVIHNTLRGVPIDLRELVLTERDNGDALRRRMQAGDMSVDDILTSYHDEYRRSFSESDSGRRFEDAFQVIITDEGRQQIDAALRDIAHTPYLAGESGVLLDQVRAELSRIYDGIEAVRRQMRVSDEAISRLVRQQTDTRYRTMLGKLNRLYAHVNADAKAHQGDDARPYRTDTAAGRFPPLPSRPARPMVRTTTPGLSVPQTPGDATAPDLRSMIDNGGPRLRRMAALILESPVYADDGNGAIDIVASFNGLPKAERKESELVGFLGELGCGDGAGVAWHCISADGSPRDWITGPVLAQEDELHDIVKED

SEQ ID NO: 30918 - protein, 301 aa, Bifidobacterium bifidum NCIMB 41171
MGAADVEYDGADAEGAVNPYALFEGDTGDMTADARMVAIMLKRERYISGRFYDLALDNRAAVIRSLNNDLLDLVVNEHYRVMYATAVSGPDMTLRALKTRASLKREEAALLAFLRIRVLEYENAHVAPDEWLVSFEEIRAALATGAGYLASRNDEEGVLRQVGAIVSVMCTYGYLRQLDDDETMYRITPLVPVVLDRQLADSWLAVADRDDDDEPAGDMAPAGSRSAAGDTSNADASGADDDGDSDDAGPDAELFEAPLFDDDADADAAENIKGADDANGANDSDIDDETASDGGTAREGE

SEQ ID NO: 30919 - protein, 1194 aa, Bifidobacterium bifidum NCIMB 41171
MSGKDMQMIADRWMMESRRLVNWGSYEGYHEFRPSTDSQLPVTLLAGASESGKSTLVDAQISLLYPTGTPFNKASNSGRSERSDYTYLRGMIGVGGSDGVDEPMYLRGRDESGVPRSIWGAIVDTYRNFTTGQILSCGKFLYLMPGDGRGDVRRLYLAWDKPIDPRRMDVFRESPFTPTQLKSTYPGCVTFPNAEAFHTHIWDVMGLSAEACRLLARIQSADAPSRLDDIFKQGVLGVPEALDLARATVEDYERYDANFRSMEEKTRRMGKLRAITASYGDYESARDAVHSFDAVNPATKSGSATIRAWAIRRMIGEVNERQPLDRRLRDERRSEARAAGKRIESLRTRIDAVRERMRGLDGGDLTRLDAEMRQAERALADITAGRQRIGRMFEAAGEEFPKDEHAWDERRIEAVTFMRSYEQRKGLLDDMRNQTYAAHASVKQTLQRLNDDYERQKSQRTRISRQMDETRAMLCRATGLGPSELPYVAELMDVREDQEHWRLAMNAAYGSMAQTILVDKRHERGFAAKVSAIDPHAMARRTWQFVDTERGGAGNGPGGANTGATGGTDGEVWLSSKLRYREDSPFAGWLREQTSSERLDALCVDGIDDSDHAVRQVQADGQIKSGKRGQHGIKDRQQVIGFVNESYLAQLRTRIQDAQRQCDETAQSYASAKEQADRLQRERELADQLAYTAWEKIDENSAKAAIADIERTIASVRNNPKLAELDTLQESLSKELDRSQRQRIDIERQAELADQAVNAAQAWLDEHAAQPQPQTRPLDGEAADISPKAVTNGRTLLTDEVEEALAESYEQRLSGLGDATTRAHMIIGAGAPQRMAQGDTFADRVIAGIGKDLEARVSMLEGRAASARTAVEARMGAYIEMYAGGDDTIAASVDDYRYYQDELESLSKLATVEATAVEYHNCLDKLLMSFLTIKRAIDTDAGDIHDQLERINAMLDGQQFGPRHGSLSLHADVRRPERAFWSALTRVIGTLNDRKAAQTDDDLDGARCAFASCAAMIDMLRREIGQIRDVNGVKSYGARNLDPRCRSSFYALVRHSDGQVERITSTGGRSGGALQELTSFVYGAALIYLLGGGMDNKLKPSYTTLFLDEALIKADGRYTRRALSVLPRLGFQVIVSAPESKTGEILEVSTKAYVTRKDPDTGYTTLHEARLDGIDETEGADEPEGTVESDDAAE

SEQ ID NO: 30920 - protein, 539 aa, Bifidobacterium longum subsp. infantis CCUG 52486
MRELERLRPVYETGVLRLLLRQNAMLYVSLLRSTFDPLTGELPRETVEERFAQSLNALADAGEYAPREDQTFAEAAHQILADLTREGEGDYAWLANSHDAASHRFLYRLTARAHRAIEALSRLEDESRALSGAQANSIIMEIEHARMQLTADPGERIKLLNREIKERKHEIKRIQQGKQHATLSEAQVEDVIAVIHNTLRGVPIDLRELVLDERDNGDALRRRMQAGDISVDENLTRYHDEYRRSFSESDSGRRFEDAFQVIITDEGRQQIDEALRAIAKTPYLAGESGVLLGQIRDELARIYDGIEAVRRQMRVSDEAISRLVRQQTDTRYRTMLTRLNRLYARLNADAKTHMGDASRPYDTATSDALFAPLPMRPAKSMTRATAPGLSDLAAEAPQPTPVADLRDMVNSGGPRLLRMVSLIRRNPVTVDRSDDRPGATLVDIAASFNRLPESERRESEIVGFLGGLGAVSGNAIADEPSTDGVGVGVDSDIATEPAPAQRGDTATWHCVSIDGEPRNWITRPVLADMDELSIIVEEG

SEQ ID NO: 30921 - protein, 224 aa, Bifidobacterium longum subsp. infantis CCUG 52486; identical to SEQ ID NO: 30393

SEQ ID NO: 30922 - protein, 1182 aa, Bifidobacterium longum subsp. infantis CCUG 52486
MMQATDVQMIADRWMLESRRLINWGSYEGYHEFRPSTDHKLPVTLLAGASESGKSTLVDAQISLLYPTGTPFNKASNSGRSERSDYTYLRGMVGVGSTETGDEPLYLRGRDENGAPQPVWGAIVDTYRNQTTGQVLSCAKFLYLMPGDGRGDVRRQYVVWGKPVDPRRMDQYRDAPFTPAQLKATYPDCLTFPSAEAFHTHIWSAMGLSEAACRLLHKIQSADAPSRLDDIFKQGVLGVPEALDLARTTVEDYERYDENFHAMDEKTRRMDTLRGIQQAYGEYAAARGKARAFEPVKPAVDGTVPAVLRDWALARMRGEVAVQLPADRAEQQNSEAEAKLLRRRTEDLHTRLDMIRGQMQGLDGGNLTRLELELDQARRTLEDVQANRTRIEQTFASIGETLPGDEQAWNERRINAVNFKREYNKRDGECEEALTAAINARAGARGDLERLQRDFDRQRSQRTRISQQMDETRAMLCRATGLTPAELPYVAELMDVNEHEEDWRLAMNVAYAPIAQTILVDKRHEQGFAAKVSTIDPRTMPRRTWQFVDTARHYDDTGAHANILTGEQDGDWLSGKLRYRDDSPFADWLRSQTQDERFDALCVTAIDDTDRTNRQVQADGQIKSGARGQHGTKDRAQVIGFVNETYLNALAAQVDAARNALSQADTDYTAAKTQSDNLHRELELANQLAYTSWERIDIAGAQRTITDTQDAIASIKNDPKLAELAKQRDELNAELDRVERQRIESDQAAARAGSAVEAALIWLRDHADTGTTDAAGATADNDDDAASGPLPDEVTAALAESYDNRFAGLADAAMRAHMIIGAGAAGTQAPGESFPERTIAGIGKDMASRINLLNGQADAARTGVESKMSTYIALYAADDDSLTASVEDYRYYLDELASLTQLAAVAATDAEYRRCLEQLLRSFLTIKRAIDTDASDIHDQLDRINAMLKGQQFGPKHGSLSLHADVRRPERTFWAQLIRVIGTLNDWKSADVNDSDASRKAFAACAPMVGLLRAELAQVKDANGVKSYGARNLDPRCRSSFYAIVHHADGPDERITSTGGRSGGALQELTSFVYGAALIYLLGGGLTSEPSYTTLFLDEALIKADGRYTQRALTVLPRLGFQVIVSAPESKTGEILEVSTKAYVTYKDPDTGLTSLREAVLHQNDMDDESSSDILKDDGVAE

SEQ ID NO: 30923 - protein, 394 aa, Bifidobacterium longum subsp. infantis CCUG 52486
MAGMKDIAAITTCVKKHMRSHMYDIEPAWPFPVPVGLPDQAFLETNAIAVHDNNNEIRQWASKNGCEIITKHRTIGTSVELISKVVVPDESIAMHVVGRTLAAECREARRRIACLVAACDVAPETIESAARMTGHEQPDDFDLLVSAVRYFRHHDVTGMTPRQIPLTGFSGKWLNESKTNRRKAICRLLGVETLGLSKRPTELRFRYLDPVRDDAELERIIWCPWEGEALSGIKYAVIVENKDTYQTMPPIAQGICIWGSGRAVSDAVPAVPALRDMRIVYWGDMDADGLEILSTLRESGIECDSILMDCDAYDRYHRFGTDRTERSAKIAMREPKPTPGLQSAERRLYERLCADKTIAYRRIEQERIPMRDAVDELRKLGIPVESIENQDLPI

SEQ ID NO: 30924 - protein, 459 aa, Clostridiales bacterium 1_7_47FAA
MILMNEIPDRFWSLFRSINRSTYIEALLKINEEYEYSNYFLSREMCIQLLGEYFSRKKYVLWQDETEDDWDTLEPPATRVLNWLLRNGWLRKVDDYANMTVNIVIPDYAAVMIEAFARLASDEEDETEVYIQNVYAILFSLKNDPRSSITLLNTALVNTKKLNKSLQDMLHNMDKFFGSLLEQKNYSSLLKEHLDRYVEEIVNKKYHILKTSDNFYLYKTDIKRWITAMRQDEEWTRHMCSRATGFFGRRPPDVTEAQVMEKLDQLERGFDDIEHRIANMDKEHTRYVRATVTRLNYLLNQEDNMKGLVIQLLNHLSEYDCTDQDVQVIGGKMNLSQLNILSEKSLYKKRRTKSDFKEHLKDEDVSEELSMEEVLNLNKVRNRYSKKEIEDFIEDRMENGIMEVDKDTARSDEEFEKLILAYDYSTRQKSPYTVENPEPEMIHNGRYSYPRFVFARRKR

SEQ ID NO: 30925 - protein, 268 aa, Clostridiales bacterium 1_7_47FAA
MALEEGIAYYDTLLQEEQARLTASIRLLLHQTFILEHKFDRRSGRFQYNPDFRDCNKHLEFIRSYFAVSGIEVMENTQTGIIYIQGGNLMGDKLPKLATLYLLVLKLIYDEQMESVSTSVNVYTTLREIHEKLGNYRLFKKQPSPTDIRRAVTLLKKYQILEPLDLLEDLNSESRMIIYPCINVVLMGDDARQLLAFFDESAEDEGVQVKADLDEVDRERLIQPPGLDDRGDEDDGTDEYGSDEYESVGTEPGGNEPDENEPDENEPD

SEQ ID NO: 30926 - protein, 1125 aa, Clostridiales bacterium 1_7_47FAA
MPRKRTENKGRFLALSRICLNNWHYINKRILSFNEDINFFTGHSGSGKSTVIDAMQILLYANTDGRGFFNKAAADDSDRSLIEYLRGMVNIGENNEFSYLRNQNFSSTIVLELKRSDTGECQCVGIVFDVETSANDISRRFFWHKGPMWDNAYRTGKRTMSIAEVESYLQEHFNKEECFATSHNERFRRVLYDTYLGGLDSEKFPLLFKRAIPFRMNIKLEDFVKEYICMEQDIHIEDMQESVMQYGRMRKKIEDTCAEIEELNRIRQAYGVYQEKEQELEKYAYFVKKLEILDLQSQVRTLADRLSLAKEDLKRQEDTRTAVETQIADLTEQGDDLLRRIASTGYEDLKKQAEALNQLLERLGKSEARWQQTTQSLKAWEDEDITSNQTLWDIEEFENRTIDNKTLCRLKESIASMCADTEKQRQEAAAEIRDLKNREKQTKDELEKLRSGNKAYPKYLEHARSFLQRRLLEETGKGVDVHILADLLDIKKDQWRNAVEGYLGSQKLSLVVPPKYARIALEIYGELDKKEYYNAAVLDTEKLSQSQPTVLAGALSEEVSVRESYIQPYIDLLLGKVIKCATTQELRQCRIGITDSCLLYHSFRLQHINPENYSKFAYIGKDSVRKRIRLLEQELKSMEEQKKPLEEIVRECQRILSLERLGGEPEEYLEWLRDMGAWNEKQREKKQLLSKLEKLKTQDVDQLEQERKAVVSLCDGKKRERDGLMNLIRDKENEISRYQNTAISLNAALTDQERGWVSNSGLDTELAGYLSAKDHPRYDREKESYSTRCSRISESRDTAFQDLMTARTDYLRRYPNRNFPVNHKDNQAYDHLLKSLSCDHLEEYRQKAADQARAAVEHFKNDFMYKIRSAIREAMLRGDELNRIISRLDFGKDKYQFVIGRNKGADGRYYDMFMDESLEVNPSQLTDSFDNQLDLFTTQHENQYGVLINDLIGIFIPPENATPQELEEAKRNMDKYADYRTYLSFDMQQLIRNEDEVIKIRLSRMIKKNSGGEGQNPLYVALLASFAQAYRINLSPRMERNPTIRLVVLDEAFSKMDAEKVASCIELIRGLGFQAIISATNDKIQNYVENVDKTFVFANPNKKSISIQEFERDRFQELVKDLEEE

SEQ ID NO: 30927 - protein, 452 aa, Coprococcus comes ATCC 27758
MQLRFEIPESFWSLFRSVNRETYIEALMAINEEYQYSNYFLTREVCIQVLRDLYMKKQIELKREEDETEFDMLETPSARILNWLIRKGWLKKIEDYNTLVTNIVIPDYAAIFVDAFERLSTEDLEETEIYIQNVYATLFSFKNDPRVNLNMLRTALINTRRLNKALQDMLHNMDKFFARLLEQQFYGDLLKEHLDGYVEEIVRKKYHILKTSDNFYIYKTDIKECLRQMRDDEEWIEKIRERARATGDTGEDVLELLDMIERGFDDIEHRISNMDKEHSKYVRATVTRLNYLLSGESDTKGLVIQLLNRMAEDDYEEVIQKTGEKMNLSLVEILSEKSLYKRRKNRKDFVSQMAPEEEVDDLDKEDVLRLNRIKRRFSKKQIEEFIEEHIEKDVLDTEKLSLTSEEDFEKLILAYDLSTRKNSKYKTLEEDAETIEKNGYRYPALKFVRRHL

SEQ ID NO: 30928 - protein, 208 aa, Coprococcus comes ATCC 27758
MIEYFEQLTQEEQEDLTDVIRLLYRQTFLLERKFDKRAGRLQYQREYRICEKHIDFLKMYFQIAGITLCENVHLGLIYIQDEMVWGEKLPRLATIYILLLKLIYDEQMALVSSSSQIVTTLGALNGKAGDFRVLRSIPSPTEMKRTIAMLKKYQMIEPLDVLEELNESTRLLIYPCIHAVLQGDAVREVLESFGSSREEEEETLGNIG

SEQ ID NO: 30929 - protein, 104 aa, Coprococcus comes ATCC 27758
MDNRQPFWAISKICLNNWHYIDRKILTLSEGINFFTGHSGSGKSTVIDAIQIVLYANTDGRGFFNKAAADDSDRTLIEYLRGMVNISENNESQYLRNKNFPVRS

SEQ ID NO: 30930 - protein, 466 aa, Tyzzerella nexilis DSM 1787
MSIKNRIPKEFYKLFNSKYVEYFQRILIALYEQSASSYSLLGLTEEECQDTIEMEISTFTMDFSQSDLEEEGELLTRANMASVMLRKLEEWGWLRKDYDESLNCYVVSFPDYSQMFTELFGRLYNEESSMERESLLTIYSHLFTYHSSKEKDNEILKSALQSSKALLQMLSNMQEGIRGFFEEMTKQKTFLGIQEVLVQEMNNTDSQKYAILTTTDSFYRYKEEVKELIDQNLMGNEARKQELLQRRKGLEADSFAWRRNERGVQSCDEAMEILFQINREFDGIERRYNRLIDQKRVFAKRAAARIRYILAEGDVEEDHTKALIRLLNMSDRKDEILKKLGERMGMTERFAVLKERSFAKPRDAKKKAFEPQELVKTGQSEEQLDEFVVKPLYTKAQIREFRRQNEVDGAFQVTKDTVHTVEDLEKLLFVWQEATEIAQETEEIVIGEEFTTEEGLQYSGFTIRRK

SEQ ID NO: 30931 - protein, 212 aa, Tyzzerella nexilis DSM 1787
MEQYLESLSVTEAEKLKKTILSLFRQTCILQEKYDPVTLVPSDNEQFAICRTHRNFIENYLSVLGCELLYDSQERIFRLVGEGVEAEVLSKETTIIVLLIKMIYRDKIMGKGLAATVTNLEEIREYGKNTNLLNQKLPDGEWKSALAIMKKHQIVEYPGALRDLEDDTPIYIYSTINLYCSSALINELIEAYREENAEDEAGKEDIYTNFDE

SEQ ID NO: 30932 - protein, 1134 aa, Tyzzerella nexilis DSM 1787
MKQAKKIFTRILMNNWGGIDHQVLCLNEYVNLFSGKSGSGKSSVMDAMQVVLYGSVGNDFLNRAADDSANKRSVLSYLRGEQKDGTANRENQDFYAHIVLEIQDTGRKSYTCIGAVFEVGKNDMDLKRFRFFSHAGKIPEDEYVTVSGIPYSIAQIQKLVHEREQSEDAKSRGNVNRIYPSREAYLNIVNDIIFGYVDAGRFKTMQKSAIALRMTKGTSQFIKDYMFPKSKEDTITAISEQLAAYREIKERVEDLEKQITLLEEVQAHDRKLTLAKAEQVKTETLLRILEIENRRVQLLSKTEEFSNTCEKIAQFEEQIKDLEMTLNGKREELIGVRTELRASDFEKKKEDLTKLQETIRLCGNEAREWGELLKRLNRWNETDGVCEYVSNPLCNLLEEIEERNITEENVNGLKKRLKETYESIKSEVEELKAERRRVEADYQEQKEMLEDLQNDKKHYSKEVKVVRRKLQEELSARYGRTISVEVFADLFDITDEAWRNAIEGRLGRIKYGLIVEPRYALDAANIFRGMKKREYETVDLINTAAIQRDEPQAMDETLYDAVKTDIPYVDFCLKRYLGHIKKCETVEELHEVKDGVTQDCYSYSNYMFRHLREKDYRYQTIGRKVSKKQMQELEEGVYRLNVELIRLGGEISELEQAEDFERLQTYDYETMLQKSNAASRLKEYYEEEARLSEEIRELQAGTRVAELQKQEQSLNESIRKLEQEKNGVQKEVTNYSATKGKQEQDIKERTEYLEKLEEGFVPNAELKETVLAVIDKGNEYRFEREQKKTFEQLRSQEEEEFKQRGDAREQFNKAFPSYDFSPFEKDNTAYDELLENCKQNFEPKYKAEFDKQYQLIYQMLRENVIATINSEIKEAKRHRREINAMLSEIRFSDSIYQIDILPTDDENRQFYEMLTAEELNMKVIDRDMEGQLSFGEDAFYQKYEAQIKRLTDKFMPPKEDEPSARERHKRDMEKYADYRTYLKFSMYEQTEDQDGNIKKNYVDDMAGRDSGGEGQNPKYVALLAGFAMLYHQQTNRDTKIRLVLLDEAFSKMDKERSEVCLAYARKLGLQLVVCVPDERLQSLVQNVDCVYAFRRANNRISMIHIDKGAYLRMIEGEADEEENSDAVTVAHRTE

SEQ ID NO: 30933 - protein, 399 aa, Tyzzerella nexilis DSM 1787
MKKKTVTLSQWLIEQNDTEAYRAGKLAGKKHPKVDQKLIDAVGGMQNLIRQARVLEQDEALGKSGMIQFRWRNLGSDISQIDYEVAAIPLLCRKLGVKDVREHQAELITRVQMWKNKVSECEWVENYYDTLLSRLTLGKKVSEAEDEKLFLCLNAVAAQQEFIWERVFSARVFHNSKTFQNEYKNSIVTILKNCSPYYEEEIDAETLLAAHNIHSYAQTLEWKGCLEYRLDNGNVVDTDENTYGTVINSQTMEHASVTDLSGCKRIMTIENKANYESMIFSEETLYIYCHGYFTPKEVRFLKKIPELADADCEFLHWGDMDYGGISIFQFIKKNVFPELKPYKMDRTAFEGALKDGAGIVLEHETRKKLEAKDAGLLEELKQVILETGKTIEQELVRGK

SEQ ID NO: 30934 - protein, 426 aa, Roseburia intestinalis L1-82
MREDNETEEDEETALPGRILNWLVRTKWLRKIEDYEAMTTNIVIPDYAAVMIEAFEKLADEPLDDTDLYIQNVYATLFSFKNDHRMNLTMLKTALVNTKKLNKALQDMLHNMDKFFERLLNKQSYDELLKEHLEGYVEEVVRRKYHILKTSDNFYIYKMDIKRWLKEMREDDAWVERIRQKQRMEQKNAGSRSSVLEPQRSEEDLPFLHARRNRQEDVLDLIDQIERGFDDIEHRISNMDKEHSKYIRATVSRLNYLLSDETERHGMLILLLNRLGAAETESEQSEMLKEVAGHMNLSSFDVLSDNPLYKRRRRRKFEDDLQEEEEDAELSREDVLRLNKIEHRYTAKQIEEFIEEKMTDGILETEHMDIADDESFEKLILAYDISMRKNSRYRVQVENSQIQNGNYCYPKMTFSTKQKSIESEQN

SEQ ID NO: 30935 - protein, 235 aa, Roseburia intestinalis L1-82
MFEGYEELNAQDVERMQEVIRTLLSQTFLPERKYDKKYGRMMPDRMYDFCDRHLEFLTEYFAVAGIKLCQDTELGIIYLEGADGIGEKLPKLATIYLLLLKLIYDEKMAAVSSSVNVITTFGELNGKAGEFRLIKGPSSMTEIKRAFAILKKYQMVEFLDVFDEQLENTRIMIYPCINLVLMREDVNGLLGSFSDEVKDNEVDGQENLEWSSEETLSENDMTDEESDLEPEEMNV

SEQ ID NO: 30936 - protein, 1121 aa, Roseburia intestinalis L1-82
RQKMEQMNQAYKVFTRICLNNWHYIDRKVLGLNESINFFTGHSGSGKSTVIDAMQIVLYANTDGRGFFNKAAADDSDRSLIEYLRGMINIGENNQAEYKRNKNFSTTIVLEMEQTITKEKECIGVVFDVETATNEINRLFFWHKGELIPGDYRTESRAMTIGEVRSYLQQNFPKDEMFYTSNNERFRRNLYDVYLGGLDMEKFPRLFKRAIPFKMNIRLEDFVKEYICMEQDIHIEDMQEGAMLYGRMCRKIEATMQEIEELKQISAQYQVMEEKKKELLNCRYRMDKLTILQLEQTIEEMQQRVENWKKDVVLQNESLTELLQVKENYEKEYGEINEQIAGTGYARLEEQLKSLEENLSLLERSKNKWDGICARLNGWEDVDIVSNQILWDIEKFKEGTITGEEIERLKRSLVEVQKEAEKDRQEASSEIRSMNKEADVLEKELTELKLGKKAYPRELELARSEIARKLSEQTGKNIQVRIFADLIDIKDETWRNAIEGYLSWNKLALIVEPAYVKQAMEVYETLDEKRFFRVSLVDTEKLMQEDWRVKDNALAEEVEAKEPYVRAFVDFLLGNVIKCTSVDELRQCKIGVTADCLLYQSYQLRRLNPDNYKKHVYIGEKSKKQRQKELAASLEKLEQDRAEYKERETEARNILAQEFLNDTVEEYQNLILDLSEKKEKEKQKIKTEKKMAEIGAGTVETLKKQAEEIHTKQKELEAKIDDLKYQIRKKEDAIEKDGNDFITRNEELLAKKRELRGSIEAEEAFEAYIAGQKNKKYDSMKAATQEDMNQAAVQCTEQKNKLVDVRMNYLQNHPKRDFSASAENNDDYDNLLSELSCNELEEYQKKAAEQAKAAVEHFKEDFVYKIRSAIKEAYVRRDELNRIIRNLNFGKDRYQFKITRNKGADGAFYDMFMDEDLEIDPSSLASPVEHQMNLFSMEHENKYGMLMSELIRIFIPPENASQQELDEAKQNMVKYADYRTYLSFEMEQIVEGDERLVIGLSKMIKKNSGGEGQNPLYIALLASFAQAYHINLSARLTRRPTIRLVVLDEAFSKMDAEKVASCIELIRGLGFQAIISATNDKIQNYIENVDKTFVYANPNKKSISIQEFEKKDFSQLVVEEE

SEQ ID NO: 30937 - protein, 498 aa, Corynebacterium glucuronolyticum ATCC 51867
MLAVADALRLVRVREESPAWSLLAATNAPVILAVLAEVFRGDNRTLTGTELFLAVDPLLVDIRESTGLPLPKSAVAYVGDWVKAGYLVRRSPQGETEEFYELSSDAHVALDYIAEIVEPQRVVTGSRLGTVYTGLSDLAADTDPDEQAAITRLEAQRDQLQERIDTIRERGISVVDDDRAVEKAREVLSLARVLPTDFARMRTDVEKVDSSLRESIVESTLNAGEVLDNVFRGVDLIQESEAGRAFRGFYEVFLNNERSARIDAVIDSVMERPFMQKLSVEERDELRSLMRILDESSGQVHDSMTGLSRSLRRFVQSREAESQQALITSINEAGRLAMRVGKAGIASNAKIGEELELTTRLPQSIASWNLYDPSDYRIESDLVEAEAGTIDLEALQRRIRETEIDWQELSGNINALVTRRGQATIADVLTEFPATQGLASVVGLIKLGARHGQRADGSELLRWTSATGKKRQARVNRCVFTECVPETYHSRIFGGNHG

SEQ ID NO: 30938 - protein, 200 aa, Corynebacterium glucuronolyticum ATCC 51867
MDEQIHLTETDTGTLTLSQRKALVKLIKGPFITTTTPADREDFRVIVESRTLLSQQLDNLFLTLVVDETAGVAYTKVWDTEVDGARTLLRAKPLTFVETVIILHLRRQLAKSNPNERTIVEKQEVFEATAPYQTAQGTDHTKQEKHFDTAWNSLAKARVVTETSTPGRWEVSHVLRVAFSSDEIKAVTASFTHLLEDSHD

SEQ ID NO: 30939 - protein, 1118 aa, Corynebacterium glucuronolyticum ATCC 51867
MTSTIAPGQYRLTTLQVYNWGTFNGLHTVDVARAGFLIFGPSGSGKSTLIDAVSTILGSPGRHRFNAAATESGKKSGRDLVTYCRGAWQKEHDADLDDVTRSFLRPGPMWSGVGLHFSDDDGGEITALRIMCLTANTTTQSEVKNLFLLLPGKVSLVDCEELGKHSVGQADAKKQFPDLIAINRNLSPFSAALRKRLGIADEKAIELLQRTQSAKTLGDLNQLMRDFMLPEPATFKIADDAAENFTELKTAHATVVTARNQINKLRPIRDSADKHAELTKTIRDYTMDLDAVPVYANTQRLGFARSDLRTNQGELDDAQASLETVQEKAAELAERVTNLHVAIRGEKDDGITAAEHRRDKLRDECARVENEAKKFFTVLSELTPFQPASQEDFINLRVQLEEEIADIEARQQTYGDTRTDIYSRLSTLKQAIDQGEKDIRMAEKFRSNMDPRLLRARERICEITGIARGSLPFVADLIHIAPAFAQWQPAAERVMGGFARMLLVPDEFYPQVAAAVDATHLGTKLTYQDIDAKLASLRPQAISARSLAATIVVEHGRYEGWIQHQLSTRFDHVRAESIEEFRSHRRAVTKAGQLRDGSRHVKDDRSRIDDRSRWVLFENSDARIDVLTAQQRQRKNELNAVAEEQKQFESKAKADAARIVSARRALETEKFAQIDVSGAQNLLDEAQKDLDALVDNNDRLAGLQAELRTALGLTNLQETEKANLQQRIGVARDRVSEATATIERLTSQLAGAEPLPPDVERRIAGRMKAYARAINASNIDAATIEVERKIRADKSAAEGQCSNLHNSIKLAMNRYLDAWPERQGDLTPEVEALGDFLAELQRLEDDDLPRFESNFRELLFDQTNTHLGRLRREIATAASSIRKEIDRLNESLTLVDFYPGRTLQIEVRESQPAEARDFARKLAAAVDGTLENDEGAAEQRFERLSAVIEDLVESDTTTARQRKLRLDTRWHVAFYGVEVDADGNRGAVYDSAEGLSGGQAQKLSSFCLAAALRFRLTGMGEPPAKARKSRVVIGEDVYPHYGTIILDEAFDRTDAEFTRTSMEVFDRFGFHMILATPEKLLQPVEDYIGGVLMVECPDRKHSQTAALTIEEAETYADD

SEQ ID NO: 30940 - protein, 371 aa, Corynebacterium glucuronolyticum ATCC 51867
MRTIKDVEKRAATFYRNNSTDWLAGNFSPLAINLQPPTARDVDKDGGEAFRRWKGEWASHWAPVEYADKRLGVYGVYSVPTRLVIDSPEMAARLAGTTHQWEHLVRVLELLVADLGEEFPSTTVREVLARKATAWETWSDVTVDQFVAVTRWLHTHNASAYYQRELPIMGVDTKWLENHGGLVRALVGEPVFKPKPVMVELRSLDPEVPVIGGLDHVSAEAAALSGVPVGFAQVVIVENYTTFIALPQLPETLAVYGGGFSVSERIGFIGANVPVWYWSDLDTAGFAMLTRVRSRLPQVRSVLMDLDTTLSHLPFSVEETQTTAVSEELLHADEQATLALLRERAEGSCLRIEQERIGFAWAAQKLQELSW

SEQ ID NO: 30941 - protein, 498 aa, Bifidobacterium angulatum DSM 20098 = JCM 7096
MERLRPVYETGVLRLLMRANSQLYVALLRSSFDPLTGELPREVLEERFTRALSQLVESGDYAFKDDQTLPDAAHRILVELSREGDGDYAWLANSLDVASHRYLYRLTARAHRAIEALSHLEDTTQALSGAQANSIIMEIEHARMQLTADPHKRIELLNREIEERQKEIEQLEQDGAVEQLSSKQVEDIINVVHNTLRGVPIDLRELALAERDNGDALRRRMQAGAMSVENILSAYHDEYRRSFRESDSGRRFEDAFQVIVTEEGRREIDDAVRDIAKNPYLDGEPGVLLNQVRAELERIYEGIEDVRHQMRASDEAVSRLVRQQTDTRYRTMLGKLNALFAKISGEAKANPNSASRPYHTDTGAVQLAVLPTRPAKPMIHAAPPSLQERESVPTVDSPDLKAMIEVGGPRLRHMMDVIRRSPRMLADGRVDLAASFNALPERERRESEIVGFLSALHAQSDAQYVQWHCVSLDGTPRVWRTKPIAASMQTLDEIVGEE

SEQ ID NO: 30942 - protein, 342 aa, Bifidobacterium angulatum DSM 20098 = JCM 7096
MAGGTGGTDDRHDTTKRSEVNNQNGNAMEYEPNEITDNAAGGADAQAAQAVDLDRPAEAVANPYALFNGDTGDMTVEARMAAIALKRDRYISDDLYWLVHDDISIRESVTRSLNNDLLELKENRKYRIMYAAPVNGAETSIRSLKTRASLTREEAAMLAFLRIRVLEYENTRVEPKGWIVSHDEIRAALTSGSGYLASSNDEEGSAKKIRSTISRLMTYGYLDQGDGDDMYLITPLVPVVLDGDVADQWLGVSTDDAAESDGIDEAVADGQADGSDKAMDDADGTNASESPRNGDDPYDADEARDAQADVVAQQEAVDLWVSMGTGASDAAGMAGNEHEENL

SEQ ID NO: 30943 - protein, 1165 aa, Bifidobacterium angulatum DSM 20098 = JCM 7096
MTDNDMHIIADRWMLESRQVINWGSYEGYHEFKPSMSDKMPVTLLAGASESGKSTLVDAQISLLYPTGTPYNKASNSGRSERNDYTYLRGMLGSSDSENGETPIYLRGRSEDNAPQAVWGAIVDTYLNRTTGAVLSCGKFLYLASGDGRGEVRRQYIAWNRKIDPRKMDRFRDTPFTATMLKKTYPECDSFPNAEGFHAYIWHEMGLSPEACRLLHKIQSADAPSRLDDIFKQGVLGVPEALELARTTVDDYERYDENFRSMEEKAKRIAKLRDIQNQYGEYTEALQARREFDAVNPDDEQGNATLGAWAYSRMAGEVRSGLPIAQRKCKEYERKLEAASRESSDLEIELNEVREQISGIDDGSLARLEGDLERARRDAEETRKQRTSVQARFQQAGETMPNDEESWNAKRDAIAQALDSYDIDKAQRENQRDAMYDEVRDCRKERESLQADLNRQRNQKTRITQAMDEARAMLADAVGLDPKHLPYVAELMDVREDSEAWRVAMNVTYAPIAQTILVDKRYEQGFAKKVSGIDPRLMIRRTWQFVDTEASYDTASTKGWMSSKLRFKAGSPFTGWLREQVASERFDAKCVQTIDDDNRDERQVQTDGQLKSGAHGFHGIKNTHMIIGFVNERYLTELQRKLEKAVEQLAEATIRHERAKRQVDLLRDQKELANFISDMDWSKVDVVGAEHAVEDIKTRIEEIRSNPELAKLTARRDGLLAQVNQANMAKAQAQVDVNSASHIVQAEQDWLDAYGKAEFDDSRLPSVLSNQLTDIYEATYGISSNVNRAEIITANVVGGSGVFADRVLHNMANEIRKRITSLNDQAGVMRANVETRMADYLGSYAPDDNMVTASVEEYRFYVEELKSLDMLSTRKATDEEYVNSLEKLRMSFMQIARAVDTDKKRIDEQLDRINAMLKGQQFGPRHGSLSISAEVHNPEHEFVGLMKNTIADLNDWKQSDQGNPAATRKQFERCRALVERLRQELGQVRDANGIKSYGAKNLDPRCRCSFYALVKHEDGPDERITSTGGRSGGALQELTSFIYGAALIYLLGGDVTGQPTYTTLFLDEALIKADGRYTQRALGVLPKLGFQVIVSAPESKTAEILEVATKAYVAYKDASNGRSYLQEITSDEITRLESEIAADMDGETGEGRTDGDAESGDGSDR

SEQ ID NO: 30944 - protein, 403 aa, Bifidobacterium angulatum DSM 20098 = JCM 7096
MSSRNAGSVTERERRLAARTEQWLVGKVEDYLDKQRFSANPQWPYEFNVKQPSKSELIRDSDTCIAQARAIRSWAQSYGCRYGEKSRSLGAYCGTTPLVTRVCVPGEHEALEIAGRQCAHRYCATQQRFSCLRGEFDVSEDVLAAVVYKLKDMDDLDFELVCQAAHYFARHDASGMRPRAVAIPGFSAKWLGGKGSVRRKAICLLLGRESLDFEERPGEIRLRYLDSAHCGYPDLYVTQPWRTADCARFRYAVIVENKDTYQEMPQIDDCICVFGCGRAANRMVSLLPWLADTPHVVYWGDMDADGLEILSGIRESGIDCDSILMNMDVYRRYRRFGTEYTEQGRRIEPRKVGAVPGLRAEERELYEALCTGEGVEYLRIEQERIPIVDAVAELCAAGFPIVV

SEQ ID NO: 30945 - protein, 485 aa, Pseudomonas coronafaciens pv. oryzae str. 1_6
MSLYEKQARYRRLHSEQSAWRLLRADSAPIILAFIDSLFADEQEVLFARAKAALEAELPTWQGAYGMQDNANSHLRNWIHAGWMREHDDHLTRTDAFHQALRFVEGLESRDTTTSATHLRRVQDAVRDLAVALNPSAEERLLVLRERMAELSEEVMRLEAGIVPELSSAEQRERVRGVYQMASGLTGDFRRVEDDIRQLDQSIRVQMIESEGGRGLVIQNLLDNEDALLQTDAGQAFDGFFRLLCDENRSVEFREQIRSILNRPTARSHLNAQEIRFLTHLVRELSSESQRVISIRRRTQESLRAFVEAGAQSERRAVEQVLRQLEKLAVTFKDQDIGPRTSLKVYVASGPFSVSSPSSIRLMQPQASLDTSKVVPQSNQTTVSDTILECLEAVQIQEVAEAMRDLLKSQGPMSLAQIAELRPIQGGLEELVALVRIAKAIEAVSLEGVEHLVVADRQGQTIRAKIPVLLLSADQFPENLESLPL

SEQ ID NO: 30946 - protein, 265 aa, Pseudomonas coronafaciens pv. oryzae str. 1_6
MNREDQNNDALAPSLFDTYRQVAVTALADTGHREEGLAKQEEPGELDEVAVQPESQVVYDIMPAEARRALRLLLNTGVVRAEKKRLAFEALCQHRALIAAHLANMLLCMTLDQKAGIAILLEQDLSESGFEDLTDEDGSSLVGKRTMPLYDTLVLLVLRKYYQEREVIGENKVMIDVDTIAELMTPFLKLTNSSALERKTLNGSIAKLREKRLLANVRGDGERLEITPVIRYVVNADFLNTLLSEYQLLAERGSVMGQQEVEDDV

SEQ ID NO: 30947 - protein, 1129 aa, Pseudomonas coronafaciens pv. oryzae str. 1_6
MSDTTNTSFGDLFSTGQIRLAEISAYNWGSFHGLHTAVIDPEGTLITGDNGAGKSTLIDAHMALLNRPGQTSFNIAASQGDRSDRNLMSYIRGNYGTAHDGSQTLNLMKRDGATMTALRALYRADDGSEITLVSMFWIRQAGASMTDLKRFYLVGKRNVSLEVLLQQFGSNNVRQLKQYVDDDPMLKHFDNSFSAYQEYFTRLLRMENSNAPALLQRALGLKKIDDLTALIRELVLEPSKVRDLATGVVKEFDDLIAVHNELDTAKQQKEVLSILPDHNRNYESSLEEQGQVNSEATGLTAFFGEQGNRLWGMRCEDLDRSLDDLTSDGKRLAESVSRNEERVTSLLHAYQQQGGDRLDSLRREVEDAERGFQTTTNKAHDYQKDTRDLGLAETLTASAVRDNIASAKAVLVDLPAQIDDAKNAFGESRGALSGITQQIKNLQAQISEIEKRPNSNIDAAFQRLRDEMVESLQLNKDGVVFIGELLDVRSTEARWRGAIERALGGHRTTLLVPEDKFRMVTGWVNSRHTGLHVRVQVVSNTERNPEFLGDGFLRKLEWKEHPYRDWLKRHLARFDLHCVDSTEVLNDTPYSMTREGLVHMEKGRFEKKDGTRVDDKKNWYLGFNNLSRLAALQEEGERLREGLDSARSDESVKRQEMDILLASEAIWKRVAQTLWDQIDVTLAKQHLDTLKNDLAAINAPDSDLSKAKALLELAKKELQEIRNAQNQNARAVGGLELEIQQANKSRQVSALAASAGLADAVRQSLSLRVGILTLEHLDKLNQLEKTQREFLDDALNSIGKRANHYNGRMIAIINSFKTKWPLVANDWLTTIEGRQDYIDYLDKLNNEGLPDLVERFQQRLNNNTTQSLGRMQRAIDDEREDIRDRIATINEVLERTEFNHGTFLRLKHEDEHYAHVKEFTALLGSVLKHASSVDHESRFLELCSLISKLEKATNSATAINLESQRLLDSRYRMTFYANEIVKETGAVRDVLRSSSGKSGGEKESFAGIIVAASLAYVLTPDGAPHPMYCTVFLDEAFSNTADKVSRRVLRVFRELKIHVNLITPYKNLNLARDSARSLIIAERKIDGHESRLSQITWDQLDQQSAERREAKQTQLAGVAEGLGIQMEQL

SEQ ID NO: 30948 - protein, 398 aa, Pseudomonas coronafaciens pv. oryzae str. 1_6
MRSWGRLPTDVMREVERLEWDNATNLRGRLQGTRRFPISLTLKPPAAGDALMDIDHFHNWVNAWRQWSKQSQVKWVTRRYRVVGDVEVPERLDLSNVKDLIEAIGPAAVQRSQIWAALMEPLLAVDRNLYDTLIGQILVVEQMSHRAAQQMAKVLPQLRQGMGDGCYLRGVPVQGIDTKFLETHTPLLTTLLDVIHNGALCEAGGLEAWLGCLQTPSNWLYIRPLCPELRQQMGGFSVLQIPLEEFLARPLPGRRVLVVENTKPGYALPELPDTVAIFGGGRNTQWRMAPWLAERDIAYWGDIDSWGLTILAHARQALPGITALMMDHETLMAHMDFSVEEPRSTNLPAVGLLSEERLLFESLIKSAQSIIRLEQEYLAQNYVLSKLYSWAKCCTTKS

SEQ ID NO: 30949 - protein, 484 aa, Bacteroides sp. 9_1_42FAA
MDMQVEEITQILRESPSVRLIKSRSVDFFLSFVIEAFEGQSAIMQERLHMLLENRLDEQENALVEDNLEMTRLGESNEQKAKRLIKDWTDKGFLTNYQNEEGEVIYEISSHTSKLMDWVVSLKKEDYIGTESKFKTLFAQLKELVEYSNEDREKRLELLRAKKMEIEHQIQRLEMGEEVEVYEDYQIEPRYNSLNKLAKELLSDFKEVDDNFKGIIKEIYERQTDNAEKKVLLNYIFDAYGELKQSQQGKSFYAFWEFLLSADLQKEWDELTGALYETLENRGIDAHDMFLREMKKHLFDAGEKVAKTNDRMSEKLSRIIRQNGQMNAEVTKQVINDIKKLLIEATKQKEKPEASLEYETIDINLPVERPLTLAPIKETVYKDKPDMAELSLDDLERIGKLYNPYHIDRLVLRDRINKVLYDRQQTTLAEVIERNEGVEKGLSEVFGYIGVLKEYKTVVNEERQQYIVFAENKTISIPEIIITR

SEQ ID NO: 30950 - protein, 194 aa, Bacteroides sp. 9_1_42FAA
MNATNIQPYSRAVVKLLKGIVEKDDVVWNDVLDYQSEILDYISVMGLELIVKKDEGFAFVKQLKLDDDKTLNMTSRRLYGFEVSVILIVLRQILEDFDSNPTESQASYKYVTATEIKEEAELFLPTTFNRAKFEKDLDRYIDSIVSFGFLVEAKHAEGEKRYKIHRIIKEKVTLDDLLEFKNKLNDYDAADESL

SEQ ID NO: 30951 - protein, 1130 aa, Bacteroides sp. 9_1_42FAA
MQQMNLFNTSPEVAGFKLDYLEVWNWGTFDQKVYCMNTQGNNSLLTGANASGKSTLVDALLTLLVPLKRQRFYNQSSGVEKKGNRTEESYFFGNYGNQQQEGAASTTTLRLRDKGARSVLLASFCNVDKRVVTLFQVRYYTGEELKVLFGIAREPLTIKRDFSEFDLHGDWRKRLTKKYNTNDTRRKIEFFDGPVAYGEKMIALFGMRSDKALTLFNQIVGVKVLDDLDSFIRTNMLEEVSAEEKYQELKDNFQNLMEAKTNIDKVKEQIAQLEPINTLAKELMAIDTRIAELEQEKSVVAYWFAARTVDLCNEELARCKSNLRKLEDELKALKVKKSELEQEQTRLSVAIEKDEVGQQIREIEKEINQKVKMRDNRKAKAEEYDKLAKTVELTQSPDAEVFDANRATAKHEKDALQVKIDRQLMEEKRQAQNRQDEINCTISERVDTIRYLQQHKNNISGRVAEIRDEILEAVGATAEEIPFIGELIRVKDIECDWEYAIERILHNFALRLVVPEKYYKQVNEYVNGHNLRGRIVYQRYEGTEPLREFEDRTLKVDSLLRKVEYKSKCLYLDWLEDRLFAEFNYSCVDSLADFNYLQEKAVTKEGLIKARGGKHEKDDRPETRGKEHYVLGWDNKEKIAMLQAEVRQLQQDEKEVATKVRRIEADTKNAQEKRETYSKLFDKYDKFDDIDWWSCALVIQQKEEQKRQLEETNDKVKMLQGQLERVRKELGALEEKFNEAIGNKALLENRENILKKQSNDCALALAQIGVVDTDAFESQHTDLLNVALVGLDKMRDTLQSDINSALRKQRETKGSKSGDLKNLIYRFKNPTEEITAKYRDWRSDVNRLPEAVEFVGEYQTYYQRLLDEDLPGFESRFNKYLQENIINKVSAFNMFFQNWRQSITKTIDQLNSYLVGIDFKDAPKTYIQLVAAKRLNVDLKEFQDLLSSAIPNIHEMNSTIDGSRIHFEQHIEPLMSRLQDESWRKLVMDVRGWYTYKAEEFYQDDDQKRNTYEAMGQLSGGEKAQLTYTILGSAIAYQFGLTKNGLDSSFRFIAIDEAFRAQDEDKARYLISLCKQLHLQLLVVTPSDNIHIVENDISYVHYVERKGDRSVLYNMPISEFKAERERSMEV

SEQ ID NO: 30952 - protein, 384 aa, Bacteroides sp. 9_1_42FAA
MITAAEIRKKTERKYVDYLRSVVAGSEFEPIVIPCDKKASASMDEYQHELTDIRSQSKEVKGFGYTIEWKTVKTKALGEQDLPERVLFRSASDVERFLLKGGEVSQFRKDVAMLFNEFPQLRPWVERYPLKVIENASSWPDLLKVLRYFVANPCPELYIRELPIEVHTKFIERNKGVLRELLDIVIVEHVCSDEKEFEKRFGLRYDEPWVRIRVLEASIASEYFSGVDDLTMPQSQFCALSLPVQKVFVVENKVNFLTFPKLAGSLLIWGHGFTVGILKSVPFMRHASLYYWGDIDVQGFEILSQFRSYFPQTQSLLMDRATFDTYFEGDKGTPSNVSKPLHLTPAEATLYNHIKSHNLRLEQEKIPQKCIENIFNSSLKISQV

SEQ ID NO: 30953 - protein, 441 aa, Enterococcus casseliflavus EC20
MESLFHIDALLQGNIYFSRDKVVDSLQNHLSSLGVTLNGLEYADEYEEEIKTLRMLVQSILRQLEKKGWLRVNLEEGFTQQVSFPSYVNSFIQILREINSNQSASYSSCVFSTYSALKTGLEDPSNLLEALESAWTSTKGLQRAIQNAYFDLSEMYTQIVDDLSTSEMLSQHFDIYKQEIIDQVLFPLKTRDSLPRFKNTILTLITKYNSDEVIELLITQNLKNQIQSISGFELEAEKQVLTYLNGIADFYRDVSFLIDKIDNKKNEYTEKSIGKIQYRLRSDFQLKDKIDRLIHQIKADKDTQTYDLANIVEFQLIDQESLFEPRKKKEDISNKTRKKIEVFKKKEDGFEQEQYQLLKKLANPRYSSKKVDQFILELLKEKETISTLDYKISSYEVFILTIMGAIRGYEENGSGYIVAIKKEYVRNGYYKLPKLIFKKEN

SEQ ID NO: 30954 - protein, 198 aa, Enterococcus casseliflavus EC20
MYELNFVEAYDNLTSEAVLKFQKAVTRLLNCTYINRIKNDGQNWDEDYLFIEEKFELFEEYFKFGGYEVRINRDINVISIQGQFSSARKKLDKETTLYILALRLFFDEKIKEFNGSSTIVVRVAEFIDKLLEYGIKDKKPNLQALSRCLRYLSTVGILGKKSGKWEDADTLFIIYPSIKLLLPNERLDEKLKLIVGGQ

SEQ ID NO: 30955 - protein, 1108 aa, Enterococcus casseliflavus EC20
MIKLKRLLLIHWQAYDFQLVEFEGITLITGQTGVGKSTIIDALNVILLGEKQKHIFNKAANENSRRTLESYLYGKLGDDGGDGFFYLREENFTSYLVAEFENEETCEYFCCGFVADCSSDHSSPNVQWLTTKSKLPADYFINEEERIPYSINELIYENNFKTENEKVTLIVTDKDYRKKIAGLFGQIRDDYRRLLKQSVSFTPVKDIEMFLTDFVSETESPINVEEMQKSIRRYNDLEQESDKIKSKVAKLEDIKSELQGLEKRKLLELRQEYFIEKAKLDALQEQKENYHIDVENYQRQIEKNTRDIADSSKRIDVLGAKKEEMRDKRDSLVVLKDKVFLNNQIKSVNEQVQTIQNQTEQGQEAIALMKYFIRVVKALPIELPSITNLVKVFEKYNQEQKLISKFVEMNDLLDQIVKELVSYKHFVNEQEKRLKSKVSVLLNEEERLKKGIKMVPEQIRVFKEALQKYLSNYDKNAQVEYLSDVIDFKQGEESWQKAVEAYLGGQRYYLVIDPKFYNKALQYYQSVQKQKEIYGIGIINLEKLQKKHFNAKKNSLARKLKTGDQLVQAYINFLLGHVIACEDIFSLAKFSTSITIDGFLYKGFVTRKLQFKNLTMSIGSTAVKKQLLDVQEKLNGCQEELRTLEKKLTILKEVENYQKKDSYSCEIVTEYADSEKLNQKLADLKTLENKLNNLDDSELVELDEKIKCLDKEVSDLTVQITKITTNSNTSQETMNQINQTLLPQCLEKIMAQEKIFQTKFESCQQLPSFEEAYRVAVNKLDILVYQKFITNYENNQKQTQVSINELEEKIREKMNDYNQMFTENLSINLKQSNLYLEEYEKFTNSELPKFELDIKDAKEKAVYEFRYEFLGKLKSNIENIQRQVNEINDALKNRKFGEDTYRFKITAASNNKEYYEMIMDEMLMDNGEWNLLSAAFESKYAQQIEVLFSILSGNDLDNGQSKESRIQAFSDYKTYLTFDMIVTKGDSTQRLSKTYEQKSGGETQIPLYISLLAAFSQVYRVNNTRRNNTLRLIIMDEAFNKIDGEKIKQCIQMIKGFGLQAIFSTPPEKISEIMEEADKALVVFRNQNQATLREFSSLYEMIGEPYEV

SEQ ID NO: 30956 - protein, 408 aa, Enterococcus casseliflavus EC20
MKYDVYLLSQLLNKYEASVGFVNGVSLRRVLYKPEKDLKLSRKLEDPIEKRVFFKVINKLKEEKVIDFKWEKFEENNLISEIWLITEEASLVNAYALCQRVSKDKIATQSIKILREKQLTIKTPWMLELFSIILGEADSIGKSWKFILSPKQTSEVCNVLELLDDYQGTNIDKRILSVNLFSDSKYFEQNVQTKLLKLITRYLFDCSSTLTDREKLQQIGIGFAPELLYFTGPVELVLKNGEKVNCEFLSKGSYLGADMLAEIETINCFYNKIVTIENLANYYWYIQNEREHETFIIYTGGFLTRHQTLFFKMLKIEDLSELYHWGDIDLGGFRILLQIQKIWPEIQPLKMNVATFEKYSNVRKKVSNEYIQKVKAALEKKEFALFRESLIKIVETKQILEQEAELYF

SEQ ID NO: 30957 - protein, 480 aa, Mycobacterium kansasii ATCC 12478
MEYEAINSLRERHPAWRLLRAGNATLILSFLGGFFVEDNRGACPASQVATALDDYVYALNTEIPTENGQQRFPRDARSYLEDWAATDAAYLRRFYPAGDDEVHYEVTPAFEKAYAWVMGLKGRSFVGTESRLHTVVELLRQIVHGTEVEPDVRLAELRRRRNELDAEIAAVEAGVVQVLDATGVRDRYQQLATTARELLSDFREVEENFRLLDRAAREKIAAWDGSKGELLAELVGSRSQIAGSDQGRSFQAFYDFLLSETRQAELAELLAKVCTLETIEADHRIRGIHHDWSEAADRAQRTVRQISEQLRRFLDDQIWLENRRVLNLVRAVESSALELRDNPPPFGLELDQPGIEIALPFERPLYQVPAAVAVESTIPPASEEIDTDLLFAQTFIDQARLMETIRDVLPENSSALLSDIIAAHPIEQGAAEIVGYLALNDEEVSVEMDDTDETLLEYCDPADPEIAKRARLPKVTVRRR

SEQ ID NO: 30958 - protein, 192 aa, Mycobacterium kansasii ATCC 12478
MSNEHATASAIIRLMQGVVYRESDEDTWLTLERLGAGVRDHFATIGVDVVVDDAEGYAFLRSRPSEDGDDALPRLVRRRALTYNVSLLLVLLRKRLVEFETTGSEGRLVLTTDQIVEMLRLFQAESSNDARVVDQAETTIKKAAELGFLRPLRGQRDHWEVRRILKAYVDAQTLSDFATKLREYAGAVTSDE

SEQ ID NO: 30959 - protein, 1132 aa, Mycobacterium kansasii ATCC 12478
MSETPSATAALGDTRRVGYRLQHAEVLNWGTFDTQVWRFSPATDTALLTGDIGSGKSTIVDALTTLLVPSHKAAYNKAAGAEARERTLRSYVEGHYKSERNEATGKSRAKGLRENRGTYSVILGVFTNHGYDETVTLAQVFQQRESTGQPHRFFVVATKQLSIATDFADFGSDLRDLRKRLRAAGADIFDEFPKYATSLRRLLGIRSEQALELFHQTVSLKSVGNLNDFVRDHMLEPSDSTERVRDIIAHFDDLTKAHDAVKRAREQLEALEPVVATTAKYDDAQTQRDARERERSAVRLFIAELRSNLLAGEISQLETEGAALWREQDSAKARQQMLTRERESLIEERAKAGGDRIGELERLAREARDQAETRRRARTLFDVAVATAGLGEIAGSAEFAALSALVSTERPRLAAEKRDLDTACADAIGREKELQRKCDHIAQELTSLQQRTSNLPVEQVEVRAELCAALGLTPDDLPYAGELLDVFDEHAQWRGAAERVLRGFALSLLVPPQHYDAVAGWVNGRRLTFHGSGGKVTGAKLVYERVARQRVRLQRSEHDGLLLADCIDVKDGQFREYLINELTKRADFRCAASLEEFGSQRRAVTREGQVRSGERHEKDDRYRIDDPRRWVLGWANERKIAALRAELAELEAERDATACEQARLSGLREALQERLDALLRLEGFRDWADIDVDEAQSRASDLEAERVRLQAGSSRLEEIARALEDNAKQAEAVANSIEQLTGRLATTAARAKQAELDKNRDDELVANQPHGALAAARESYPALDERLGKNRPKRAAECAETENALAADLHQRIDRLNKELGGYAQSLIQSMLKVLTRWPELRGDMDANVDARQEFLAYRDRIATDDLPRFESEFKEQLNKNAIQELAGFNNWLHRQASVIDERVERINEALGAVPYNPGRFIRLEKEPTNNQDVAQFRSDLRNLTNDSLALDGDQYSEQRFLDVKRIIERFRGRDGYAESDKNWTRRVTDVRNWFVFSASERDVETGAEWEHYSDSDGKSGGQKEKLAYTILAASLAYQFGLEWGAQRSRDFRFAVIDEAFGRGSDVSTRYALDLFATLGLQLLIVTPLQKVHVIEPYVKAIGFVDNPTGTFSRLQTMTIEEYRTRRDGRRP

SEQ ID NO: 30960 - protein, 386 aa, Mycobacterium kansasii ATCC 12478
MSAGWTTPNDIAARVRRRWDDGSLLRAYANGDRFDPIEVALRGPKPSQVGDDLAAAREWVGALDAGRRDDSRYTLQWQSIGGRQIGRNRLPVRAVVSMDQAWALLGVTTLVRCFDELLVLAQQHPQVRKWIVDNPHRALALAHEMPQLIAAYTWLDTHRNSNRYLREISAPGVDTKFAERHRPVLAAMLAVSSTATGFLAGIGLRCKPGLVRLRPAPSLGLPPPLTELAVRSEELAQLAVQPRAAVIIENEISYLSVDVPEHGVVVWGKGFEVDSVGRLPWLAEAEVLYWGDIDTHGFAILDRLRAWLPQARSVLMDRETLLAHRDRWVTEDRPATSVLTRLTPDEQDLYSELVEDALGERVRLEQERIDWQWTIHRLSGVISAGI

SEQ ID NO: 30961 - protein, 471 aa, Clostridium asparagiforme DSM 15981
MRLKDRIPGDFYKLFASKYRDNYICFLLAIYEETTRLYSALCLTEAECRAVIDECMEAEGLIPSEDEEFEEGDSLVYSPGSTRFLYNLAQWGWLKRDFDERTNSYFYSFPGYSLTYLETFRKLWSEEEDLSHESIRSVYSLLHTYLTDREKDVEILADALNASKRLLQLLSNMQDGMRSYFDELSRQKDIRGIQEVLVDEINNTDSRKYALLTSTDSFYRYKEAVKEIVQEILEDNEARRERMERELTALQPESAQALRRRKNIDRSREADSLVYETLREFDFIEVKYNRLIEQKAVFAARANARIRYLLREGEEEDDNLMAFIGVLRRSPDQEEILAKLRESYALTALSRVVGENSFYARRDEKRAFEPAPPELPAAPDSSDLTDFVVRPEYTQKEIDAFILKNSRGGAFSVTEDTVSGVADLEKLLFVWRDAAAGDGGMRITGTDSDPIRKFGCKYTKFTMEKSENSDD

SEQ ID NO: 30962 - protein, 243 aa, Clostridium asparagiforme DSM 15981
MIEYVNSLTPQEAEELKRTIRDLMRQSCIIETKYDTDRDCLKDNPRYRVCMRHREFLTDYFDIMGCTLVFDPQDHFFRLSGDGVGLEKFSETTTLFILLMKLIYKEKIMGEGLKATVTNLEELRRHGVDTGILNRKLTDREVYEAVSVMKTHQMLEIPCAIGDLEDDTPIYLYNMINVFCRGAAVTELYQRYKKREEEAADGLLQERLRLEEQGGAAREGAPGLIREAAPDAAQEGDTQDETL

SEQ ID NO: 30963 - protein, 1152 aa, Clostridium asparagiforme DSM 15981
MKPCKKIITRMCINNWGGIGHQVMEFNEYVNLFSGMSGSGKSTVMDAIQVLLYGSLSQNFLNKAADEKNRRTVMTYLRGAQKDGTSNRGNRDFCANLVMEIRDTQDESYRCIGVAFDVRSGDLDINKYTFFSHDGMLDHSLYRNEDGIPLMVKEIADLVKRHQKDPKGRLRGEDINRTYPTNDAYQTALYDQIFGYIDGKRFITMEKSAVALKMSNGVGQFIKDYMFPKSSSEAIEKISRQLGDYTDIRDTVLDMEKRIDLLAAVRESDGRLTVAKAAVLQNEYILKRLRLTAIEEELTRLEIERSGKNLLRDSLAQKRDLLKAEMDRIHGELVETESSLKASDYGKMKEQLAQLDETIVLLNRNCAAWDRFVASLSKWEENEAVYDLVSNAALQSMEDLRDRKADADTLDALRTALKETMEEINEARDNLADERRDVNRELKEKRDRLADWKSGQKSYRNRPGLKEARRELEQALFRETGSKVRVSILADTFDVRDPEWKDAVEGRLGRVKYSLITPPAFSHTAAVLFREMKQFENVDLLHVANIVRDGQEARENALYEAVETDVDYVDACLRHFLGRVIKCRTVEELEQVRDGVTADCYSYSNYTLRHLLSKDYRDNACIGKTIPKSRIDQLEAEVKALEETGRELTGRITALEQARSYENLSQENDYYLDLAGAEKERKKHELRREKLAREISELEQGAMRELRERLEETKKRYALKEDEYTRAGNEFAAAERELGTIEADLRNQKAQHAEAEYGFTPNQAEDERIAERLKGRSLNGYRAEAARALESAKSDVENYTGERQAARMKFNLAYSACGLTGTEESNKPYEDLYERYSRQYVEEYKEEFERKCREVYRSLRDNVIATIHGDIKAAYRQVREVNRVLGATAFSDSVYKIGITPASNENNQFYEMLTAPELDSKVVNEDDVEGQISFGDDVFERKYEREISLLVEKFIPDRTGDERESAKKRAEMEKFADYRNYLTFNMYEVTVDESGQEKRIPVDEMAGNDSGGEGQNPKYVALFAGFALLFAHQNHRDSRIKIVLLDEAFSKMDKTRSSVCLNYARKLGLQVIICVPDERLMTLVKNVDCVYGFRRYKNQISMLMIDKGSYLDMLEGSDEQGNESEPEQETEQRQQREPQRENDAVGMDTETE

SEQ ID NO: 30964 - protein, 382 aa, Clostridium asparagiforme DSM 15981
MTLLEWILKQNNTPGWRTGVSSGERHPQITQEAIEAVGKRELLEQAAVLEGSGLIAVDWREMRNDIARIHYRLEDVGRMYEMAGIPDPREALARAGSLVRQYRACLENEDFKPFYDKLLEQIGKGSLPEYVENEDFFRALNAVADNRESLWETQFSARVFGNAKYFGKNLRKPVLRKLCRYGSAVEDGMEEDEVFAEYGIMSYSQQLECKGPLLVDTPDREGKRRLASGENFPLGMVLNARTLAAASPVGLPGVRRMITIENKANYESMEYSGDTLYIYCHGFFSPKERRFLRRAEELAGPETEFLHWSDMDYGGIRIFRFMKEKVFARVKPFHMDAGSFERYRLAGAGIPLEEKKRQKLLALDVPELEGVKSLYFTIRAGN

SEQ ID NO: 30965 - protein, 492 aa, Fusobacterium periodonticum 2_1_31
MEKVDLGNFMSYSYLTSLRKNHPAWKLLTSHQAPFIASFFYAVFLKPKQREIPEGKLVSQLENFIDEINFEEKSSFTPQEILTQWSNSDYAYLRKYYPKDKDEIHYDLTPAAQKAVEYLISFEQKSFMATESRLRTVFNLLKEIVEKSNENPEFRIQELEKQKKDIENKIEGVKAGKIEILSPIQIKDRFLQAMNTSHEILSDFRIVEQNFRNLERKLREKIVTWDSGKGELLHNFFEEEEGIQESEQGKSFKAFSDFLSSNESQKDFKNLIEQVLSMKEIIPIQGSLSFERIKDDWMKGSEHVLDTLALLSKQLNLFINENSYAEERRIKEIIKNIEATALQLDGKNIKNFIEMKTFYADIKFPMNKKLYSIPNKIFLDELALNNEEIDIDFSALYLQLFMDKNKLKDRINNLLLDREEISLKELVEVYPIKSGLTELLTYFVLAKREINAEIYYDDLFELSWVYENGDSQSAKVPMIIFKNSENEDDRDG

SEQ ID NO: 30966 - protein, 197 aa, Fusobacterium periodonticum 2_1_31
MDKINIDLSNAYISLLKGIVIKENKEKIWDTILNYRNQIEDYFRHLGLKLRIYEEEGYCYLQQDEDEELKDLFKLVPKVQLSLHLSLLLATLRKYMYESTANGDEKIVISKEEIFLRMKSYLKETSNEVKQEKEIESYLKKIEEMKFIRKLKHSDDKYEVLRLISSFVDAQWLDDLNKHLVEYKDFIKNGGTDGDSE

SEQ ID NO: 30967 - protein, 1124 aa, Fusobacterium periodonticum 2_1_31
MEILNDFSEIKKNGFRLHNLEGLNWGTFQGKWNFNPKEETTLLTGESGSGKSTLVDALTTILVPPYKIKFNQAADVDSKERTILSYVRGYYGQKSNAEGKGNIEALRDYNSYSVILANFYEQTLKQEVGLAVVFYFKETNSTPSKFYIVSEKFLSIDNDFIFRFNDIKILRDSLKQKSYSVFNDYSPYFNYFSKRLGNLTEQSIQLFQKTISMKKMGELSDFIRKNMLEKLDIEVSIEKLIQHYNDLNRAYEATVKARKQLEMLNPISEKGKIYLSEREEKLKFQSAIDRLEIWLAKKKDKLYEEKISNLMEQKKEKEISYDSEDKKFKECRKELENLRLEILQNGGDKLREYNTKLKHEKENFKQKEKRVNDYSSFAKNINLNIPNRIEEFNNNRKILERIAKENGELIKKTNEIRDEKVIENSKIRDERKNIEAELISLRERTSNIPLKYVELKEKIQRALNLEETDISFVGELIEVKSEEKDWEGAIERFLHSFSLTLLIKKEDYAKVVEYVNKNFLNLKLVYYYVDVKKTKYELSYIETFSVLNKIDIKADSIFSAWIKKQLYDRYNYICCDNLEDFRVNKKALTKTGQIKSDSRHEKDDRADINDRRNYIMGFSNKNKIKIWESYLQEKENLLKNLSCDLDKLDEELKKMNNIKNSIDSLERFKDFEDLDILTSKNKIEELNEIIEKLKKDNNILKDLESRAAFLAKEEVKLENKVKNLSSSIIELEKDLSYINKEYQQNKFVSEEDPHFLYLDDYDFLKKHSQFWNDFPLTLENISSFQNKYSLYLNRRILDLEEKLKLLEKNIESLMREFKREYPIESQDFDDNVEALKEYNTFLEKILKDELPKYEEKFKTELQENIFRHIIHFKTNLDIQERTIKDKIKEINDSLEGIDYSKGRYIKLIQKRTVDKDIIDFRNSLNDITTNSIDDNNLIEEKFLEIKKIIDRFKGRANETDRDKKWTAYVTDVRNWFHFSATEYWRDNNEEYEHYTDSGGKSGGQKEKLAYTILGASLAYNYGINTKNRTSFRLIIIDEAFLKSSDESARFGLELFKKLDFQFIIVTPLLKINTMEPYIRHVGFVSYNDNSHISTLTNISLSEYIEMKEKMQGRKLEWDGLTLKK

SEQ ID NO: 30968 - protein, 387 aa, Fusobacterium periodonticum 2_1_31
MGWTDFKEIKNIILKKWEKGDIARGKLLFPWKIKLKVPTSKEILSDISKFLVWRKELKKTDKSSLGYGYNIIEKEIKNKILGKNPIPAYIEIVSIDDALKLIKKENEMKRILENSSFILEKYPKLQKWIEKNIFKILIEKGEIKKILAVVEYILKNPVKDTYLREISIENIDTKFIENHKKMIFSMLDEILSDDSSLLEEKLSIKKKPQLIRFRILDEKYYIHGFSDISVPIEEFNEWENNFSNVFFTENEISFLSFPSYKNALIIFSKGYNVHAFKENKWLNKKKLYYWGDMDTHGFNILGIAREIFPDLKSFLMNEEIFFKHKEFWVVEDKPFLAEVKGLNYEESLFCKKLQENIWGKNLRLEQERINFSYLKEYLKKLEADSNS

SEQ ID NO: 30969 - protein, 489 aa, Stenotrophomonas sp. SKA14
MKHRERISRYRHLREQPQWKLLAADHAPEIIGLLQGLLMDGERTLSSSVLNERLQRALDQLNGDELSRDLPRTAQAYIAHWLAQGWLERRLPEGADQEQYELSTAALQAIRFADGLEQARVAATESRLALVIEQLSQLAAQTESDPDARLSALRDERDRIDAEIARVGAGRVIALDGKRALERARQIIGLADELTEDFRRVRDDFEQLNRDFRERIIDDEGERGDVLSQLFEGVDVIGESDAGRSFQAFWRLLNDAEQSAQLDAALEAVLARGFARRLDRNERNFLRGFTSTMLERGGQVHDVLQNFARSLRGFVQSRGYLEQRRLNQLLKQAQSEALALRDEFPAQRGIGRDLQLTTSRLRSWSQWKLHDPRSAQVDGNVEYNDAAAISLESVGDLVASSEIDFRTLRRDLHDLLDAQPRLSIAQALAQREAPQGLGSVIGYLSLGTRFGNVVAGEQELAQWRGGDGQVRRARIPLVWFTQERRHELA

SEQ ID NO: 30970 - protein, 233 aa, Stenotrophomonas sp. SKA14
MSWHEDPIDAPQADVAEDAYEAELVASVAQPRRGNDVYYLGDTGRLPLDARRALCQLLIGPSIDQLRHAKLWPALIRSEAAIRSALADLFLELVLDRDSGVAFTRQADTEDVDAPVLLRTSPLTFIDSVLLLYLRQQLAEADARGNRAVVADAEMAEALAIYEKNLSTDRAGFNRRVASAVQKMKDNHILTRLSGQEDRHEVSRALKLLFSAEDVSQLSAVYRQLRETPAAEA

SEQ ID NO: 30971 - protein, 1126 aa, Stenotrophomonas sp. SKA14
MAISKHTPALFNEGLPDPRLQQFRMRRLQVHNWGTFNGLTEVPIAERGFLFVGRSGSGKSTLLDAMSALLTPPAIVDFNAAAREAERSGRDRNLVSYVRGAWADQQDSGTGEIATQYLRKGATWTALVLEYRAGDGRVVSLVRLLWISGNGTSAGDVRKHYMIAERPFDIAKDLGGFDLDLRKLKQKLSDLHHFDTFSGYAERFRDLLGIDNEMALRLLHKTQSAKNLGDLNVFLRDFMLDTPKTFDAAERLVSDFAELDGAHQAVVTARRQVETLLPARAYYNDLKEMHRQRGDDEALKLGVDSFRESRRQALIEARLREMDVRDRGLLGEEAQRRAALDNHTERLAELELQRRQQGGERIEELEREQGRAEAERDRRQAKRDQAQEAAQQLQAELPGDAHGFAELVERAQNELQDRQRASAALDDAISDRLGGKRDDERRFGEVRSELEAMQRTPSNIPAPMQKLRARLAEETGIAEAALPFVGELIQVRSEEQGWQGAIERVLGGFALSLLVDDKHYNDVAEWVNRTHLGMRFTYYRVRRNDDAFAREPSAKSLLHKLELREHVFESWLRRELGKRFDYECVDAKQLRNVDRGITREGQVKHPGDRFEKDDRSAVGDRRRWILGFNNHDKVGAFEREAQELAKRIASCETDIARLRGQRDRDNERRLACHELVSISWNEIDIAAPQQRLSDIGATLRDLREGNADLAKLAKQIDAVRADIEQSRRTYEDVRVERGQLVKERDRLDRARQQSRALVLPSLAQAQEAGLAERLQEQGPLSLETLEAHMRQVSNALNEQLSSSQQDLNRIENQLIGCFRRFIQQWPEESGDFTVSVASAEDFLARLERLERDGLPQHEERFFDLLQNQSKNNLLALQRHSAEARKSIGQRLDEVNASLEQVPFNRGTLLTIELSDRRLPEVGEFHLQLREVLSQQQTEQRELAESQFTVLRQLVNRLGSQEGEDKRWRELVLDVRMHVEFIGVELDAETRQQVEIYRSGAGKSGGQRQKLATTCLAAALRYQLGGADSQLPSYAAVVLDEAFDKADNEFTALAMNIFDNFGFQMVVATPLKSVMTLEPFIGGACFVEISGRHDSGVLLIEYDEEGKRLKLPERSRQQANEPEEAEA

SEQ ID NO: 30972 - protein, 485 aa, Corynebacterium matruchotii ATCC 33806
MSIVARTISNRRLEEKSAILKLLRSPLMPVVLGFVAEHFPPSTKARSAIEIYDLLDADLKMLRAEGLELPHDPQTYITDWVKAGWLVRRPGNAVTGETIEPSATTLNALDSVESWQHPHSAVSAARIHSIADSLENLSRESDPDINTRLAQLAEEKEALEQLIADTERGYFEVLSADQISERVLDVLELAGTIPADFAQVRTELEEINRTLRRQLLEPEDSRGQILDDIFRGVDVIAESDAGRRFRDFYTALLEHKKSTPIDEWITNILNRESAKDLDATIADHLRRLFQDLESEGYQVNMLMTELSRSLRDYVRTQDFTENRRMLELLRETRALAGRTIEHQHLGPLVQLHTPLTQIGMNIHSIDSLEMKNLGEEMVETLPVPLEEAHIDTEALFESVRASEIDFEELRSHITGSVDKRGQATIGDVLQDYPATQGLASVVGLLYFAMANGIALESLETVTWDDNGTPMQAVITGWLFTHDNNL

SEQ ID NO: 30973 - protein, 713 aa, Corynebacterium matruchotii ATCC 33806
MTNNTPINHNDQNEEGEGKHRNSGEHNSFPFIAPREIESPAPTRHRAELAYTDRYFGGRNATGRNDAGIVKADIVEAEIIDAEVLDVQFDDDTDAPQTTHGSRRALHYSAHSPADTDTDTADTADAAGNVVDDAEVETTAESESGRTVTAPESPAGRRFTGAGATEASEPQLEVSPEETSDDAAAADKPRDRAAQPDAHRTTSEVDAHTDTDDDLDQEAAATDPEGSPATLPTTDAGENTAPTTGLRNPGYAGFVGAGFENRTTDEYAVDGDTDDAGELTDNDDPHGESDHGDLGVDATTPVREARHTPLEIQEEARKLVNSINAAASYEDFDAYPTQGDNPQEEFLDDDAADLSDEDIVDEVLTSADATAPTTEPEAAEVAEDVTEAEESQASEPASAAVSAAAETLTEANDEPEDLTHTNLAEESEESEEEEAETAEAPAEGVDKHKPGQPTPEQPATLVTPPAQPAAPTAAHATASAVTTNAAPVETEDTFDWMEDDYVHTSIGGDNLWDSDAGTLSFDSRRALVQLLQGPLVRAEQHPPIWKAILSDETALRQRLADMFLDLVVDEDAGIAFTRIANSGNPIRVGKEHYVDMPHVLRVKTLTIIDTIVLLDLRTRLGLAVPGERVIVDQEELRENASQFRALDDRDEATFNRRFDASLDRMRRDYSLLGDTETEGRYEVSPALKHIFDAQTVAGIKAEFEELLAREESK

SEQ ID NO: 30974 - protein, 1121 aa, Corynebacterium matruchotii ATCC 33806
MITQPTYDREIVHADQWRLSRIQLVNWGTFDGIVDIPVSRRGFLVTGGSGSGKSTLIDAISAVLVPSDRLRFNAAAQHEARRGKGRDLVSYIRGAWRTTEDPDLGMVVAQYLRPKATFSIIVLTYSNGMGLCRSLTGLFYLKSGDNNPANVVRLFGVFPEQVVEAQAFIPFLAKGLDKRGIKKEFSSASFFEDHAPFAEMFRPLLGISSMEAQLLLQRTQSAKSLDNLDHLFREFMLVEPDTFAYARTAVEQFADLESAYERVQDVKAQVEALSPLEQLHKQVLTAQAEIASTTSLQRALPSVANQLKIAELEDAQVAAEITLEQAQVANTKATEKYRYALEEFSQANQAMNSADGGRVENLQMLVGHHKQQLAERRKAYANLQKRIESHGGVMPTTVSEFNDLINSAKVSIAEHPANMERLNRDLAQSFVSLDQATNEVSTLQQELEVVAANNSNIDARFLARREAICDEFNIKESELPFAGELIDIVPSESEWEPVIQRLLADFAHELLVPVRYYPAVQNYINRTHWGVRLRFSSIDSSHSYPNPRVHPQSLVRKVDVVDHEFSAWVSHELATRYSYVCVNNPGDLDRLDPHEKGVTRSGLVRQAFRRSDPTSRLQKNDVHALGDRVYYRLGSNNQAKVELLRKHLSDAQTTLKARQNENQLIHSRIAQENAQVQFALSIVDEEWENLDTAIIDEHIKSLNQQLEQLTENPDVKTLTENAQQAEQKLQDAQEQMQLCNRNVGAAQHTLDGIQASLAEANAEATIDVDDATFTTVHKLFLRHTRRVTSKNVDKLMTILTNEFSANLKKNNETLNTANNKITIRLTSYIERWPAERADLEATPDFITEALAKLQQLKGERLAEFTNQFRALINDMSTRNLADISHRLRQAQNEIRERIAPVNHSLASSEFSEGRFLRIDVRDARGEVVTTFQRQLDEAVSGGMNEQNDAEAEQRYHNIATLIKRLGSKEAGDVRWQKAVLDTRRHVSFVGVEVDEDGTVLNTYVDSSVLSGGQAQKLVFFCLAAALRYQLAKPDAQYPSYATVVLDEAFDRADPTYTQRAMNVFDAFGFHMILATPLKLIQTLSQYVGNTVVVSYDESPNELGQVRGRSSISRIDFGKATG

SEQ ID NO: 30975 - protein, 481 aa, Clostridium sp. M62/1
MKLLNEIPSSFWGLFRSPNREIYIEALLKINEEYQYSNYFLSREMCIQVLGDYFSRRQVEIEREQEEAEADTLEPPATRILNWLIRTRWLRRQEDFVNLSVNIVIPDYAAVFIGAFERLIGEEGDEADIYIQNIYANLFSYRNDPRASIALLNTALVNTRRLNKTLQDMLHNMDKFFTSLLDQKFYGELLREHLDGYVEEIVKKKYHILKTSDNFYLYKADIKQWLKLLREEPEYLELTIRRGGKKLELSEAVRLLDDIERGFDDIERRIANMDREHTRYVRVTVSRLYYLLNKEEDTKGLILQLLNRMSREEDPEPLIRKTAARMNLSRRELLSDKSLYRKRKPREAFREKLQPEEAPKELSREELLSLNRVSAKYTREEITDFIRERMEDKAAAITGDSVRSEEDFEKLILAYDYSLKKESPFRTEGEPESIDNGAYVFPALVFREKTKAGEPERRAGEETKGSYHTGKGQIREDDTIF

SEQ ID NO: 30976 - protein, 231 aa, Clostridium sp. M62/1
MIPYFNELLQEEREELTQAIRLLERQTYVLERKYDRKTGRYQYSGVYRTLERHMEFLREYLEISGISIYEDIQLGVIYIKGEAVLAEKLPKLATLYLLILKVIYDEQMTEASNSLAVHTTLGELSERLGVFGLTGRTAPTEIRRALSLLKKYQIIEPLDLMDDLDGNMRLILYPTINLILTGNDVRELLSELGEGEGQDRQLTRDTEEAADREENETDGEENETDGEEDSR

SEQ ID NO: 30977 - protein, 1141 aa, Clostridium sp. M62/1
MNDKGFKALTRICLNNWHYISHKVLSLNSGINFFTGHSGSGKSTIIDAMQIVLYANTDGRGFFNKAAADDSDRSLIEYLRGMVNIEENNRFAYLRNQNFSTTIALEFTETEGGEAQCVGVAFDVETASNQVNRLFFWHKGRLPEHFYRTADRTMTISEVRDFLKKNFTKEDSFYGPHNERFRSQLYSTYLGGLDKEKFPLLFKRAIPFKMNIRLEDFVKEYICTEDDIHIEDMQESVMQYGRMKKKIDDTVREMEELSELNQAFLQVREAEGEMEGYHALAKEMEILALKGRVRRLGREAEAAREEAKRQSESKAQLEERIQEKEAGREELLKKIASTGYEDLKEKLKTLKELIEQYEKSEARFQKTAAGLKGWEEADCTANQTLWDIEAFEKREISEEGLHSLKQSIEAMRKEADEERKEAESEIRRLKRAQTEARENLKELKQGRKAYPKELLNARTYIQKRFLEEFQKPVQVDILADLLDIRSERWRNAVEGYLGGNKLSLVVEPRYVRSAMRFYNELDRRAYYRVSVVDTEQAVRDSHPVLDHALSEEVSAQTEYVRSYVDFMLGKVIKCEGIDELRQCRIGITDDCLLYHSCRLQYINPENYTRGAYIGALSMKKRIENLEEELREIGEELKPLEETRQTCDQVLSLEPLSLTVSEYGEMFEDLKNLKKKRAEKKRQEQALLELSEGQISAWEKEREELQKEIEQDRGALKALEENLWKLNRDIQGREKQNIELQGELSQRERELSEMKKEMEEKSGTHALEQFEAKKEEALLSAFKAVPDGYSTAEYALERPAQCERLRETFENLERESGERRESRFERLEKQRIEYLRRHPGRRFSPSDRGNEEYDKLLAELSCDRLSEYREKAAEQARTAVEHFKDDFIFKIRSAIKEAYHRRDELNEIISSLDFGKDKYRFVIEKNRGADGKYYDMFMDEALEINPASLSQNMDNQMNFFTMAHEDRYGAMMNELIDIFIPPDQAAAREQEEARRQMEKYADYRTYLSFDMQQIIEGEETMYIPLSRMIKKNSGGEGQNPFYVALLASFAQAYRINLPARFRRNTTIRLVVLDEAFSKMDAEKVASCIRLIRGLGFQAIISATNDKIQNYLENVDKTFVFANPGKKFISIQEFERKEFGELE

SEQ ID NO: 30978 - protein, 470 aa, Clostridium sp. M62/1
MSFFETLNEKFFNPFCCRNRVLYFECISQLIEKSKEISVLYETDARNTLILYLQNCTYSIETENIGEEIAGGKTPQENASTILRYFRACGWITPQEIGRSGDNIASVSAYCRKLIDAIHKIFDGDANGAITNYIFSMYEILKFSFSKDNARSIRPYQNILIPLVENECDLKNELLILKDSIREIMRAVMKMADANSFGQFLMKDELLNRFFNDYFFIKKSGLIPSYISDIDRMLRKLRHSELYDRMIQEYRKIENTDEIQAKEKIDRLFNELDSFINLEYEQEMSYIDRKINNYYNLYSTRMMMVLSENTNLEHELNRILLFLKNLNEENRAEALSKLSETHRLMSMGYIGRKSFERRKKRNPNQKNAGLVCEELSEEEKQRLTDELLTETPDRYSMDNVEKHFDEIMRGRDQISVEECGVHTRDDATMIAASMIYSGTSGFPYEVEFRKGMVETEAARISNISIKRKKT

SEQ ID NO: 30979 - protein, 213 aa, Clostridium sp. M62/1
MSDISLRITIKEESGHLFKRCIRKLLESTFILRDKDEKLYQFASRESNRQDISEYLRMIGFDMIVEEKTGVCMLAASEEDADTVGLKRANVVTFSTLQYHLLLVLWKVYLENLGYSEGNFVTRGDLIDKIKSYDVQLTRTEFSAALRLFKKYSLINFNDDEEGEDMKIQLYPSLQFGWDLPQFQTVAREYLKEEPEEEGPEEIVPDEFEEEEE

SEQ ID NO: 30980 - protein, 1105 aa, Clostridium sp. M62/1
MILLKKVRLINWYGFSNVTAPIGFFTLIAGKNGNGKSVMLDAIKYAAYGDTVFNKSSESKGSRTLSSYTRGLLDATAGTYMRPADRVPNVYSHIVLEYFDDVEDKSFLLGTVIETSASNNCQTYRYVMDRRVMEQVEHTYEENGVTMPCSASFLQKRYRLTLMNREQGLPKFLQMTGLKLNLGQLPIYLRKLRGIMSYDPNARIDRFIRESVLEERNVDFGKLIQAKENIERLNENFEIIQQEINELDGILGEYDAWESEKNRLLADDIRIIYKKRKDLNREIERQTAEQELAQRRKEDLERELEILDGRKKEIDAQLVQARVSLEQLDSTRMIAEERRKLEELEAEKRTLMALCRKLEHFQAVVSELMNQFFEKEKRMEGQNVLASLCGRGHTAAEKAAAVSRFKQKINECYDGLVMRAADTERDLAELNRSLDVQHRIIEDCKKHRNTFAQIPEYVGLRDEINREFEKRNIRSKAQFACEYVIGLTDEKWRDAIEAFLGPRRYTILVDPQYYDIADDVLNRSEHRYAHLFNTKLLMKKKVHVEEDSAVFKLEIKNPVAKQYFDYQLGRMHAVERNAVKEYENAISREGRVSVAMDSYFLRFDRLRSYYLGQKTFELNRLRAEKEISRLNEERKAKLAEKKELEDQKNRMAQNREMFQEYDYDAHRKYQAASENARASEAQLERLKKAQENNQEYLELNELAGRLSDEQKAVQNEYNAKLQEKSGQDTTISRCGEKIEAKSGELAEQEKRYREYQTGYYTIVQRTVEAYEKYLKNGKKGPGGLLAEDTRRRIGNSITQHERDLTQKQADYNAKHAGRMLPRGTEGRERYAGRRERIWMDNLQEIRQKLEEQTRRYEDIFKNEFVLTILKSCERAREDLRQINGELAKLSFAAKYQFDVHYVKDGSEYAKVIEYARYLDEREQLGGNADGQIAFDMLTSVSDEEGERLETEMKQIINRIIEKNSEETIARFADYRNYMNYEILISNQILDRAKLSRQTGFNSGAEVQIPYLLILSSALLLIYNQRTNSTRLVFIDEPFAKMDPGNVKLMLKFMREQRLQVIFCSPDKTESIGNECEVILPALRVRADSMQLGIVQFHEEKAYSSR

SEQ ID NO: 30981 - protein, 416 aa, Clostridium sp. M62/1
MKKRRTAAGEGTDMVNYEEKLLAALADKYRKSKKDRGTNVITRRTKLNPSQLYKNYSRNDGDMTQIEAVNQAIFRCSQEGFVTYETEGFSSEIQSIYLVDEKIGEIEDYLETKYGYEPKSAKRKYVEGLIAGYSGRSPAAEQECIKLRQALEKNRIPPRYHQTEDLLKALVFIENNEKELYLREASLLIYGDSKYLEENVLGSVCRALRDCLGRPCGPAELEDEILEEYHITREKQKLCLKGDMTVRILGKELEIGAFPNGIEFFADELYKIEQITVKTAVFTTVENYTSWLRCDSSKTALFYLGGYATRYQRDFLKKIFSDNPTLVYRHFGDIDAGGLYIHEHLCRVTGIPFQMYRMSRAELEDVRFQSCLHPLTEQDRVRLKSLEKQEMYRELAEYMLERGVKLEQEIVSYYEL

SEQ ID NO: 30982 - protein, 489 aa, Corynebacterium accolens ATCC 49725
MPVEARALSLRRLLHDSAAVRLLAADNAPVILALIAEYFPRGTRARPAAEVYELMVTDFEVLASEFSMPRTPQSYCNDWVKAGWLVRKSGKSSRGETLEPSEEALSALEAVERWETPVTTVTASRVESIGSALQRLARDTNEDISSRVASLEAERDRIDREIEKAHLGQFERLTAAETEERVQDVLNMAMAVPSDFARVRHELEALNHRLRRQLLDPEGYRGEVLEEIFSGVDHIAESDAGRSFRGFYSYLMDRERSAWLDQWINQVLESEVGQELAAENRRQLRNLFRDMEETSFEVNQTMTGLARSLRNYVSSEQFAEDRRMIELLREARGMAIDAAQASELKAFHRMETPLQRIGMSIHSVSRIHLANPGREVVEEAPEAFQPGQENAEALYELVRESEIDFEELHGAIRGAVGKAGPCTIGQVLQACPPTQGLASVVGLVHIADQHPLPALHDDHEKVTWTEEDGTIRAAYIPTMYFDSTTVEEL

SEQ ID NO: 30983 - protein, 216 aa, Corynebacterium accolens ATCC 49725
MSATDNHRVDSAHEPPLWESDKGSLTYNSRRALVQLLKGPLVRAHKEPVLWSAIISDEDNLRARLHEVFLELVVDEGEGFAFTRMVEEETLPIPQVLRTDKLKHIDTAILLNLRQELGLALPGERVIVDVEDLREGIGYVRAVDNRDEAGFNNRFNAAIKRIRNEYSLLSATETEGRYEVSPVLRQLFDAATVTAIRDEYARLAESEGDQEEASDD

SEQ ID NO: 30984 - protein, 1123 aa, Corynebacterium accolens ATCC 49725
MTNLYPGQFRISRIQLINWGTFHGYFSIPVARKGFLITGGSGSGKSTLLDAMSAVLVPQKDLKFNAASQQDLGRHNGRNLVSYIRGAWRQQENAHTGEIAPEYLREGATNSVVALTYDNGAGTQHTLIAIFRLNGGENSVSQIKRLYGVVQGDEDIDKLSPLLTRNLDTRKIKAMYKGLGASFTPTYNTFADRFRKRLGIKSEQGQILLHRTQSAKSLSSLDQLFRDYMLDTPSTFERAEESVEQFEDLRQAYLRVEDVKAQIETLAPLPQLHSRRTTAEADKHKAEAMNEVLPAVRARLVAEELDYRIRALTAQQAEAHSAAEALEAEVTHLDDAERRAAVAVSQLSAGELAALEAKIETAEKEIEHRSKEFHHLAAAADQWTDHFELNPHGFAELQANARLRIADFEADSAQLTEQQQEAGVAARDAATASASLESELHSFSSRRTNIDKALVELRTQLARDTGYAESELPFAGELLDIAPQQAEWEPVIQKLLHGFAATLLVPETAREAINQWVNSRNVGTRLEYRTIPEFAPTPAPARSPQQLIHKLEFQDHPMAQWVRHHISSRFNYECVNSVAALEQVTKTPAVTRDGLESRPKDKDGSTRFIKDDRTRFKGTRWYRVGSTNTAKIELLRSQLTEAKANARAMAKQVHELNRKMDILRTQRDKAQRVLETKFQDIDTASAEARKRDLQEQYDSLASSPEAQALATAHEQAKEKLTAARGQLNEAQKHLGNVEGELNRSTQRRQSIGTVPTVADQGIAKAVEEALHKGRRKLTIDDIDARRDEVQASLQETARRAARRIEETNAKIVSVLHKYLSQWPAEAADLEPQASFAGEGMEKLKFLRADRLADFRAHFLELLNGTTVQNLSHLASSLRHARSDIEQRMEFINKSLERTPFNGDRTLRIDVKDARGQLVQDFQRDLDAATSHSLAEISADDPEAAVARYHALDKILSRLGSSEPEDIRWRNLVLDTRKHVSFIGRECYPDGTTANTYQDSASLSGGQAQKLVFFCLAAALRFRLAEPDQDVPTYGSIILDEAFDRADPAFTRTAMSVFASFGFHMILATPFKLIQTLSPYVDGTIVVNYDEPIIQGRPQARTGYSLIDATSYPQESQESPNADA

SEQ ID NO: 30985 - protein, 377 aa, Corynebacterium accolens ATCC 49725
MRMPSDLHTHAEKYLRNHFAEALAAPDSLSIDWPLHPPTAATAARDVPATQEFIRAWQRWPHQEEIHYEQRNWSRTGLGTNSVPTRAVLTGAPRIAAATGLSGEYSRAQQRARDIAAFFPDSPAFTDTVHRTYPQWKDLTAYDLRCLKPCLTWLRAHPNSGEWERAVPVEGVDGKWIGTHRRLLLALLSPFGITDLGLRRTDARLRLRYLNHAPALSDIEVPLSQAAQLFPTAPPRVLIVENKQTFLALPLLSDAAPPTIAILGAGNAARQLHALDWLHDVEITYWGDLDAAGFSILNGVRAHFPHTESLLMDTATVTAFRHLAVPDPGDGSAMLSHLTTEEQRASRLLFTEGKLRIEQERIPFAHATDAIQSTFQR

SEQ ID NO: 30986 - protein, 490 aa, Corynebacterium striatum ATCC 6940
MSVEARALSLRRLMHGSAAIRLLAADNAPVILALIAEYFPRGTRARPAAEVYELMVTDFEVIASEFPMPRTPQNYCNDWVKAGWLVRKSGRSSRGETLEPSEEALSALEAIERWEQPVTTVTASRVESISSALQRLARDTNEDIASRVASLEAERARIDREIEKAQLGQFERLTAAETEERVQDVLNMAMAVPSDFARVRHDLEALNHQLRRQLLDPEGYRGDVLEEIFNGVDHIAESDAGRSFQGFYSLLMDRERSAWLDQWIEQVLDSEAGQDVAPERKRQLRRLFRDMEETSFEVNQTMTGLARSLRHYVSSEQFAEDRRMIELLREARGMAIDAAQGSELKAFHRMDTPLQRIGMSIHSVSRIRLANPGREVVEEAPVAYQPGEDDAHALYELVRESEIDFEELHEAIRQTVSDSGPCTIAQVLQAHPPTQGLASVVGLVHIADQHPLPAGRESQEKITWTEEDGAVRAAQIPTMYFDHTTVEELQ

SEQ ID NO: 30987 - protein, 216 aa, Corynebacterium striatum ATCC 6940
MTTANSPRVDSTHEPPLWEHDKGTLTYHSRRALVQLLQGPLIRAQKEPVLWSAIISDEENLRARLHEVFLELVIDETEGFAFTRLVEEDSLSIPQVLRTDKLKHIDTAILLNLRQELGLALPGERVIVDVEDLRESIGYVRAVDNRDEAGFTKRFNAAIKRIQNDYSLLSTTETEGRLEVSPVLRQLFDASTVTAIRDEYARLARAEDTEEDTSDE

SEQ ID NO: 30988 - protein, 1122 aa, Corynebacterium striatum ATCC 6940
MNKHTDLYPGQYRISRIQLINWGTFHGYFSIPVARKGFLITGGSGSGKSTLLDAMSAVLVPQNHVKFNAASQQDLGRHNGRNLVSYVRGAWRQQENTQTGEITPEYLREGATNSVVALTYDNGQGKQHTLIAIFRLNGGENSVGQIKKLYGLVPGDEDIDKLSPLLTRSLDSRKIRALYKGPGASFTPTYATFADRFRKRLGIKNVEGQLLLHRTQSAKSLSSLDQLFRDYMLDVPDTFTRADEAVAQFEDLRQAYLRVEDVKAQIDTLGPLPQLHSRRSSAEADKEKAEAMSEALPAVRARLVAEELDFRIRALTAQLSEAQSQSETLNAEVAHLDDAERLAAVAVTQLSAGELDALSAKIETADKEIEHRTKEFQRLAAAAGAWTDDYEFSPHGFAELQATAKLRIEDFKVDFANLINEQQEAGVAARDAATACAALDSELRSFSSRRTNIDKALVELRAQLARDTGYAESELPFAGELIDISPQQAEWEPVIQKLLHGFAATLLVPEAARDTINQWVNSRNVGTRLEYRTIPEFASPQASARSPRQLIHKLEFQDHAMAHWVRQHISRRFNYECVDSVAELDHVTTTPAVTRDGLESRPKDKDGSTRFIKDDRKRFSGTTWYRVGSTNTAKIELLRAQLTQAKATARATAKQVQNLNRKMDVLRSQRDKAQQVLETSFQDIDTASAEARRQDLQEQYDSLASSPEAQALAAAHEQAKAKLKAARARLNAAQKNLGNVEGELERSTERRRSIGIVPDIKDQDIAKAVEDALHKGKRKLTIDDIDARRDEVQASLQNTARTATRRIEDANAKIVSVLHTYLAQWPAEAADLEPQASFAGEGIEKLKFLRADRLADFRARFLELLNGSTVRNLSHLTTDLRRARSDIERRMEFINKSLERSPFNGERTLRIDVKDARGQVVQDFQRDLDAATSHSLGEFSSDDTEAALARYHALDKILSRLGSSQPEDLRWRNVVLDTRRHVSFIGRELYPDGTTANTYQDSASLSGGQAQKLVFFCLAAALRFRLAEPDQDVPTYGSIILDEAFDRADPTFTRTAMSVFTSFGFHMILATPFKLIQTLSPYVDGTIVVKYDEPTINGRPRARTGYSLIDASTYQDPDYAQP

SEQ ID NO: 30989 - protein, 378 aa, Corynebacterium striatum ATCC 6940
MRSPKDLQAHASKYLRNHFAEALADPDSVRVDWPLHPPTATAAARDIDATQGFIRAWQRWPHQEDVIYESRNWSRAGLGTNNIPARITINGAERIATAAGLNLEYARARERAHSIAAVFPDSPDFAHTVRRSYTQWKDLSAYDLECLGPCLTWLRANPDSGEWERAVPVEGVDGKWIGTHRRLLLTLLAPFDITDLDLRRSDTRVRLRYLNHAPALSDIEIPLAHAATLFPHTPPRVLIVENKQTFLALPTLSDTSPPTVALLGAGTAAHQLHALDWLNRVDITYWGDLDAAGFAILNAVRAHFPHTTSLLMDTATVTEFQHLAVPDPGDGSATLTHLTTEEQRAYRLLFTAGRLRIEQERIPFAHVNAVIHATLAAA

SEQ ID NO: 30990 - protein, 490 aa, Corynebacterium lipophiloflavum DSM 44291
MNRTTAVADTLTMIRLADSVPAWVMLRAKNAPAVLSVLSAVFQSDNRQVAGTELTLAVDSLLVDIREQTDMELPKSAVAYINDWVKAGYLIRRSPQGTRDEFYELTTDAHVAIDYVRQLVNPQRSVTKSRLDTLFTGLHSLAAETDPDEATAIRRLEQQRDQLQARIDQIRMNGVGIISDAEAVEKAREILALASDLPTDFSRVREEIEEVDRGLRESIVDGQLNAGAVLDNVFRGVDLITESEAGKAFNGFYEVFLDPERSKQFDATISSVLSRDFVDKLDPLERTELAQLADTLDTSSGQVHDSMTGLSRSLRRFVQSREAESQQALTRAINTAQQLALQLAQRGIKPYESIEFDLELTTRQPTSLSSWELYDPMEYRIKPNMEVDESGEIDFEAVRARIRESEIDWEELRRAINDVVDRSGRASISDVLSAHPATQGLASVVGLIKLAHDHGERADGTEFLHWQRPGGKNFRARYERFEFGEKIGHV

SEQ ID NO: 30991 - protein, 195 aa, Corynebacterium lipophiloflavum DSM 44291
MDNKLHEADTGTLTGLQRRALAELIRGPYVSSIKAPEVFQTVSGSRELLAQQLDNLFLTLIVDDNAGVAYTKAWDVEVPEKRALLRKQSLTFMDTVVILHLRRELVTTNPNERTIVDEDEVFEATLPYQGHGGTDKTNQRKRFTASWNKMKTYSIIVSTPTEGRFEVSPVLRIIFSGEEIAAVTESFCALLEDEQ

SEQ ID NO: 30992 - protein, 1116 aa, Corynebacterium lipophiloflavum DSM 44291
MTAIIPGQFRLSQIQVYNWGTFDNLHTVNVSREGFLITGPSGSGKSTLIDALSTILVPPSKVRFNAAADSHSQSGRNLVTYCRGAWRREHSVEADELTQSYLRQGATWSGVALRYDNGTEGVVTACRLMFLPANAYSRQEMVDLYLLLPREASLTEFEPLALKNLPVTEAKKQYASALHVSRSHPQFIAALRRAVGITDEGALDLLHRTQSAKTLGDLNHLMRTFMLPEPETFAIAEQAAGNFTDLHTAYSSVVDAREQIEHLLPVRVAAEKRSDVATELLTVDEEREHLELFINTWKQQFAQKQRAQLTSELAAIDGTITAENARREENAAEQDRLRTLIHGAQDSSLVAAEARRDALREQLKRVEKAEADFKERLKILDAAMPGTVDEFSNFRLQLEGERDDLRQQQDDNETKLEQAQGRVYELVTIKNSRIKELETLRSSGSAMDSRLIGARALIAQVAGIREKDLPFVADLMSMRQGEDAWQGAAERVMGGFARTLVVPEELYAQVSSAINATHLGAKVSYTRFSPQLENQRPPSFVQGSLGQKIEVAEGRFHAWIQTQLSKSFDHLCCETMDEFRAARRAVTLQGSVKHNPHDHVKDDRSRVEDKSRWVLWGNLDDKIDELQAAVRAATEKLGAATRSRDLIKGALQAQRTQVSTIERLLETSDFADINVAATTAQLGDAQQLVDELTDGNAELAAMKKQLSAARASRQKIEKNLEDLLEARGGLRTELQQTEAILEKARLQVGEREVPAEVNARLEERCHAIDRSIRADNIDRLSHRLTRDIEDRLAALKDRASRYDSQLRDAMNRYLLRWPQRQGDLSADPAWEKDFLKELERLESDDLPRFEQRFREMLRDQTHKHLGRLRRLIRDAAAKTRNSIQMINNSLAEVEFYPGTHLTIEVREAQPAITRDFVQLLDAAMEGMINDADQEESENRFHKLRAVIDAVTVSDNTSPRERQLRLDTREHVKFLGVEYSPDGVRGAVYDSAEGLSGGQAQKLSSFCLAAALRYRLTGTGMSASQARNSTVQLDGEIYPRFGTIVLDEAFDRADTEFTRAAMGAFRQFGFHMILATPEKLLQTVQDYIGGVLMVECPDRKRSRTSSLTIEEDPIENP

SEQ ID NO: 30993 - protein, 358 aa, Corynebacterium lipophiloflavum DSM 44291
MRARAATFYARNHRAWLGGDFSGLTINLQPPTGRAAERDDGLSVRSWIDEWTRSAIPAEWEDKKLGYLGTYSLPARVVLSDAAVAAEAAGRSSHWRRVNELLSLFCHELGEEVRAGLAAKLAYWEGWDNVVAAQFIDVVRWLRTHHVAKHYARELPIFGIDSKWIETRRAVISAVVGEISFREAPSMVELRILDPTDNFCGMRHWSCPVSALSDVPGARVLIVENRQTFLALPNLPNTIAVYGGGLRAHSLVRDIPWLATKELLYWGDLDSHGFYILELVRRHVSPVQSVLMDLDTARRHLDLAVEEPQPSRFVPHLLTPSETMALEFLRSHSTSGCMRIEQERIVFDHVEKRLREIG

SEQ ID NO: 30994 - protein, 476 aa, Hungatella hathewayi DSM 13479
MNLFDILNPNFFSPLTGVNKHRYADIIGLIWDRCSQNPLYSTEKSTLLDEVESYFTGLEQIGEGNIPLDEEEISGEDKPEDTGSTTPRFWASHYLRRLKNTGWLEEKDGGYDDEARYAVNHRIIPIIQAFIDVISPKMVTYQGKLYKIYTLLSGIGTQANPYETVLKEVEEDMEDLNISLRQLASSIEEHMDQLTQGKTPVEILELFNAYEEKVVVGAYHRFKTSENLFYYRAELFEMLERCEDEYKERLELDYAQIMGVPVDEAGLQIRRLLYKLRDEIKEMGNIIRIIDESHVLYRSRAVQRAQFLLLSDGSIKSKISTILQYYAASMESKEEMLEYDEGLASQIFQIYIQGYFCPESLQKPVTRRKPTEIEDMEALEPLDEEVLKREQERLLKIAREALTEENVNQYANQLLQGHEAVEASSLTEGEDEQMIKLIGLYTYSQSRERTYDIEVKNRVIKKGRTRFTDFTIEKKR

SEQ ID NO: 30995 - protein, 192 aa, Hungatella hathewayi DSM 13479
MAVDLREETANYLLNNCFLIGTLENMREKYFDVINHENDYRELFRPLGYTLVIHKALRVVQVISRYLSGRVELKKYESILLLILRLLYVQKRESLSTNENQVLVTVEEIKDEYDKLSFPRKLDQQLLTDGLRTLKRYNLAAAIDKLGDLTARIQVYPSVMLAMPETHIKEAAEKTREYLLLYTKAVEEGDQE

SEQ ID NO: 30996 - protein, 1103 aa, Hungatella hathewayi DSM 13479
MIRMTRVRLVNWHNFTDSILDIKMITYLIGVNAVGKTTIMDAVRYCLTTNKNFNTAGNRRSERTLQGSVHGKQRAVKVYTRPGHTVSYIGVEFYDEIKQKPFVITVRVESENPAQELRHVSQDWYLTKPGYNLEQLPYIIKNRPASREQFRLSGKGLEMAPNQTEARRRISRILGIGEADSPLGKKFHEVFHMGTSLEDINNIREFIYTYILPEPEMNLETLQGDMRELERLSEVLMEAQQREKSLQEIIDCLDEGRRLDGRVRVVELLIEYARWQEAVEKDRYCELEITRNQRISVTAGEELKVLEERKSALTRKRDEAIRNLGQNPENQALTYLQEKEEELKKQCRELRTAKDKLDRSVSMLKQLDEQLKIQDFVLGISDEITNIDISLEERKEQIHTLAAGLKQLEPEIKERGHQIWASIETAEQELKGIGKRLLQLKSGKMVYPRDAEKLKQVINSELQKRGMPEEARIFCELLYMTDESWQDTVESYLGSLRFHVLVPPRYYQVAKEVFVRMGREVGHAGLVDTIGLERDYHKAEFPEGDFLVGKIESKNPYARMYIKFLLKDTVCCEHESDLEQYRRSVTKDLLRYQNYCLIRMDKREHYIGLNARKQQIDVLEKRQNTLLTEKRHSENSKVELERLEQLYYPFVQGNAMEDLYQHLDAPERLEETEQQRLNVRKEIEEYENNPILRAMFNQIDCLKNELEDLDKECVNKQASQQTADQTILKMRQEQEKNRDYIQETRQQYESLLHQYSEYQEDALARYEEYAKTRSPAEIVKNQINSNALAQLQSRRDNYINAILIPKQNDYNSHYACDYAPGLAGDGAFRMAHVSLVNIDLEKYKEDLRQAQIRCEARFRKDVLFRLKDDITTAKQQIKSLNRVMENLAYGEEQYRFYVDGCKEGELKAFYNIIMAEKNEEYSEDSQLSLFTETRDEAYETQVHDFMERIMVDAKEIAQARAEGKKVAFKPLSQYVDYRTYLDYDMYVKNLSTGYEVPLSEVSGDGSGGENQAPFYVAICASFLQIYEQSENSIRLILLDEAFNKMTSDRIAPMMKMFRDLKMQVLLISTVEKCSSIYPYCDLTYSILKVGNRNSIGLFDREQI

SEQ ID NO: 30997 - protein, 247 aa, Hungatella hathewayi DSM 13479
MVVDYTQKLIQEGISIYERRRYFVHEPEVKQRAINISINKLFPKYQDNHDHHEYRNVNAVVEQLVRDGILEAKTDQRGYYKIVRFRLEAVSYCYQFLKRKSVPEICRDLEHIIDIYDSPEQEILHLFCQNQRTLLTEYRKLPYGIGFEEEKLEGILIALRGIERLQKETYIRNFSTAVYHDSKKFARFRNCVQSILFDYSERVVEKELILERFHLVDNPTYAMFKGDAKLFGEGLSIELGKLPGGIA

SEQ ID NO: 30998 - protein, 458 aa, Hungatella hathewayi DSM 13479
MKQNKKLMEEIPDRFWGLFRSVNRSIYIEALLRINEEYEYSNYFLSREVCIQILSEYFAKKRYVIWQDELEDELDTLEPPATRVLSWLLKTGWLRKVDDYASMTVYIVIPDYAAVMTEAFLRLDSEDEDETQIYIQNVYAILFSLKNDPRASISLLNTALVNTKRLNKTLQDMLHNMDKFFASLLEQKTYEDLLKDHLEGYVEEIVKKKYHILKTSDNFYLYKTDIKRWIAAMRDDTEWIEQMSRRSGGKVSAADITEKLDQIERGFDSIEHRIANMDREHSRYIRATVTRLNYLLNQDDNMKGMVIQLLNHLSEGDKQEERIRQVGERMNLSQMTILSEKSLYKRRRPKADFTGNLEPEEEAEELSREEILNLNKLKNRYSKKEIESFIEENMEDGRMEVTGDMIRSGEDFEKLILAYDYSTRRKSLYRVEDADGEPEMIESGGYRYPKLTFTRRKS

SEQ ID NO: 30999 - protein, 216 aa, Hungatella hathewayi DSM 13479
MGYEEQATGTMGIPYYDSLLPEEQQEVTEAVKLLLRQTFVLEWKYEKRSGRFTNNREFRICNKHLEFLRKYFAVSGVSVVENSQMGVIYIQGETLVGDKLPKLATLYLLILKLIYDEQMATVSTSVNIYTSLGEIHEKLGNYRLFKKQPSPTDIRRAVTLLKKYQVVEPLDLLEDLNGDSRLIIYPCINVVLFGDDVRVLLESFGEGEDNDDESEI

SEQ ID NO: 31000 - protein, 1123 aa, Hungatella hathewayi DSM 13479
MTNQRFEALSRICLNNWHYINRKTLSFNREINFFTGHSGSGKSTVIDAMQIVLYANTDGRGFFNKAAADDSDRNLIEYLRGMVNIGENNEFAYLRNQNFSSTIVLELQRTDTEEYQCVGIVFDVDTSTNEISRRFFWHRGPLLENGYRTARRTMSTLELEGWLQSHYGKEEYFATSHNERFRRQLYDVYLGGLDSEKFPLLFKRAIPFRMNIRLEDFVKEYICMEQDIHIDDMQESVMQYGRMRKKIEDTYTEISILKEMQEKYGLVLEKEETIQKNGYFTGKLEILELMERAGELTDKAALSRDDLQNQERLKDGLDEQIADLTTQGEELLKRISSTGYEDLKTRLESLNELMEHLSKSEVKWHQTAERLNAWIDQETTSNQTIWDIEEFEKNTIDGEKLERLKKSLAEMRKEAEDLKSEASAVLRDLKRQERQLKEELAQLKAGSKAYPKVLEHARSYIQRRLLEETGKAVEVHVMADLLDIRNEEWRNAVEGYLGGNKLALVVPPAYAEDALRIYSELDKNEYFRVAVLDTEKAGKDTPTVLEGALCEELDVRESYLKPYLERLLGQVVKCRSIDELRGCRIGVTPDCMVYHTFRLQQMNPEQYTKSAYIGKDSVRQRIRLLEKSLAEMENKRAPEEKTVRECEAVLSLEGLNEETGLYLEWQKDMGDLKERQKEKKKLEQKLLKLKEENVDQWEKERSALLALADGKRRERDAVSRRIYELHTKISQMTQAVTAVEQELLAKEREFKQDDILEAEFTEYMAGKEQPRYEKLRDYFTGRLNAVAEARDQAFQTLMDARGEYARKYPNRNFSITAKDNREYEKLMEILECDHLEEYRQIAAEQARSAVEHFKDDFMFKIRSAIREALQRKDELNRIISRLDFGKDKYQFVIGKNKGADGRFYDMFMDDSLEVNPNDLNDTVDNQMNLFTMEHESQYGELIEELIHVFIPPDNASPEQMEEAKRNMDKYADYRTYLSFDMQQLIQNEDEVIKIRLSKMIKKNSGGEGQNPLYVALLASFAQAYRISMPESIRRNPTIRLVVLDEAFSKMDAEKVASCIELIRGLGFQAIISATNDKIQNYVENVDKTFVFANPNKKSISIQEFERESFPQLMKELDEGEDDD

SEQ ID NO: 31001 - protein, 313 aa, Oribacterium sp. oral taxon 078 str. F0262
MDELKSLFNGIKRYYQRLAGQQDINILLREHLDQYKEKLFDQIYYPLKTIDSVPRFKGEILRILNAWSMDREVMDRIVGQGIRRRLFSSEEQGREESYAMLNAVINTYENIEELIAGVDAKHNEYVNASIDRIRYIVNADRSARGNLVDLLKNAGREDILNEMRGKFLLSRHSFLDSQSLYRRIKGERREGEKAKPLERRVESPAAVDGFLTELRRQYSDAKIDRYILSIMGERGELYSEEASIRSPEDFILFLLGTLRGGERRAPFSVEFFQGNVERNDCSLPRLCFREKGRKRADRGEGEGEGEGNAGGAV

SEQ ID NO: 31002 - protein, 223 aa, Oribacterium sp. oral taxon 078 str. F0262
MLEEQFEKLNMTEKEQFRRMVNKLLSHSYLLSRSYDFTDHIARTNPEYLFVERNFELFQEYFSYSAFHLERDNNYGVISLQSEYDENRLRLDKQSTLILYTLRLIYEEEREKISLSREIFVSVADLVHKMISVGAIRKKPSNLALSSSLRILSHFRLLEKAGGRWEDADTRLLILPTILFVVSNEQITGMHRLLEEGDGDLAGEEGESYSEGGEELSAEDEGK

SEQ ID NO: 31003 - protein, 131 aa, Oribacterium sp. oral taxon 078 str. F0262
MKKLTRMLMIRWYSYEKELIDFDMINFLTGKTAAGKSTIIDALQLVILGDSSGSYFNKAANQKSVRSLKGYLYGETGDDGDAGYEYLRTGPFTSYVALEFYDTEKGKYFTVGFAADCGRELSVNYRWFLIP

SEQ ID NO: 31004 - protein, 486 aa, Cardiobacterium hominis ATCC 15826
MMLDETNSAITQLTARSPSLFKRLPERIFAPLASANRGQYWHLLCALYDKRFGPDAPLPPGSGFLMREITHDIAEEMQHQEWVLEEFEATPSTPLANRANAVFNRLRDSGWLRVERLGVRDMVTMPPAVAHFMNRLIEFAHTGPEFVSGKIRSIEANLKLLLHENADGASLQEAARQSRALLEHIRIASTNVRDLMREIGDIEATSEFVRRFFDDYVERIFIADYKELRTREHPLARRQEILRLLGYIRQTALRERLLRWYQEKQAAGNAARAEALFERDLQKIEELQRIDEYLNRLDDEIRRANRQALAYLDYRLRATQPLGQMIHDAVAAVIKHGEKAAACTPFACGNAISGERLARPRQQNYQAPPGKLRTQTISPERAAYARLVLQARNRRVMTFPKLAAFVRMQLAGRDAMTSAELPTDSIEAVRALQMLCTLATEHAGRPRPLPGGFIIRRDGKDEQPSPTISHIPFSLIRLRASKEDKT

SEQ ID NO: 31005 - protein, 117 aa, Cardiobacterium hominis ATCC 15826
MSFWENAVASADGMTEDDFEQAASRLITEQVLYAADYRSKVAYALIRDFEREFRRALEPLGYRLHINGQLRYACAIPRHSRNAVASVKQTLLALVLRQSHTAKRAAMRTVGSPRYQP

SEQ ID NO: 31006 - protein, 186 aa, Cardiobacterium hominis ATCC 15826
MNEKTATGMGAAQNALDDYREFYHYDIEILREDRASGETRRVEWLSKRIDSGSGGERRAPLYVIAGAALASACRLTRGDNSGQRLLVIDEAFIKMDPGNIVATMRYFEALGLQVLMASTGDALGILTAFLDRYYDILRDAEKNGIVLDGHDVTAETREQLRADLPEFHPELLAAEISRQAGEGSAP

SEQ ID NO: 31007 - protein, 391 aa, Cardiobacterium hominis ATCC 15826
MTSPAEELAHQALRRLLRAADKYAAGTTTRRAALSGKALADYHQLPRLQDKETYDAVMAHAQAEGAITLTRPRHEPQSFISRIELADAAKLAAILGQETRAAQIRHATETLAACLADYPVLHDVLAAWAKLKNVRQTAPEDAGRWHDACQTINWCREQEQRGITESAVRDASALLFKDSKRIENLHPCLDVLLTGNLAGEARPETEILQELGLYREPQPVRLAGNVLLRRTRGDFPPDFPYSALPPSAIHGLAAQPAQILTIENLTTFHVWARQHGDSNTLCLYTAGMPSPAWRALYGRLLAGLPPDVPVYHWGDIDEGGFRIAALISRCAAASGHTLRPWKMRPAEIPATQHRPASAHTLAQMVKYARDAGWEDIVRELEDAGIVAEQEG

SEQ ID NO: 31008 - protein, 488 aa, Corynebacterium efficiens YS-314
MSSIAQALSFQRILTDSPAVRLLAAKNAPFVMATVSVHFGGAPAPRPASEVYELMAADLTVLRQRGMDLPKTPAEYCTDWVRSGWLVRRAGSQRTGELLEPAEDALSALQAVQRWEKPRSAVTASRLESISEALRGLARDTDPDISSRLQRLQIERDRLDREIERVSQGDFELPSVERVSERLEDILTSASSVPADFARVRHEFEVLNRTLRRQLLDPDATRGDVLDDIFTGVDVISDSEAGRSFNGFYSIITDPERSAYIDAWIDQILASEPARHLDQDSRMSLRSLIRDMEEAGAEVNSVMTGLARSLRHYVASEQFAEDRKMIELIRETRALAADAVEESELNAIHAMETPLQRIGMSIQSVSSIELANPGEEVVEGETIVNAAQPLDVGELLATVRQSEIDLEELIDSVRDTVTAEAGRATISQVLARHPATQGLGSIVGLLHLGLQHGLPGGHTGHVTWDEDGITRHAIIDQYAFDTTSLEEM

SEQ ID NO: 31009 - protein, 206 aa, Corynebacterium efficiens YS-314; identical to SEQ ID NO: 30440

SEQ ID NO: 31010 - protein, 1120 aa, Corynebacterium efficiens YS-314; identical to SEQ ID NO: 30441

SEQ ID NO: 31011 - protein, 370 aa, Corynebacterium efficiens YS-314; identical to SEQ ID NO: 30442

SEQ ID NO: 31012 - protein, 468 aa, Bacillus cereus Rock3-42
MVLKKEVEMRKLFECIPENYFNLFTGKNRGFYAEVAFLLYEQFHINRAGILYSLMKDEIQELIETKEELGECIDVEDEMEERVQDSAERANVVLRRLKKLKWIDVEVRDQFEEFIVLPVYSSRILAVLKEICENRTIEYQRYCFTTYQLLTGVEAEERPASAILESEKYSEQLYDELTILLHNMKNHMETIAAKDDIQQVLEHHFGEYKKDIIDKSYHRLRTSDHVSRYRNKILERIQTWFLDDEFMKRAAKDAVESGYSTSQEEVMDVLSKKMYRVEEIYSNLDEICNQIDARHYQYLRAVLDRSRYLSTYNDSTDYKISYILEHIRQTDENIFDSSPFRLVQFRQLQEASLLSPRKKKGVYEPEQHEVTEISEEMREELKAENLRRIEKVINRKKIRKFVLEAMKGRQEIEMSELDLQNEEDALYLIYVYLYGYSRDAGYTLSEESPDFITQRGYTFSNRTIKREN

SEQ ID NO: 31013 - protein, 197 aa, Bacillus cereus Rock3-42
MQNILDREREEMEVVINYLFSHNFLLKEFEREKYQLAVRNKDIIKRYLKVIGWDFIVDEKHGCIVIASPHYEHRLKLKKDETIWLLVLRLIYEEKRSSLSISQYPFTTLQEIKGKYETFRLTFVSKTKLRELVQMGKQNQLLRPIDNDIELDDCRFQLFHSCIHVLQQGDLNVLYEKIKSYSEGGDHIEMDEETTIN

SEQ ID NO: 31014 - protein, 400 aa, Bacillus cereus Rock3-42
MRGKIGTEEKPFVREGYFTTYIVAEFYDEKVEESFVIGISIDVFKDDEKIKEYFIIPKSEMNMISFFNIKNEKRYVETQADFSKKLRAQFPKAIIEKSSIQYQKALLHRFGGLHERFIKTFAKALSFKPIDNMRDFVYKNILDEKELKIDVMRSIFQTHEELQRELEELKERKEELERIDNIYMECVKLEADISIQEYVLRGLDYLLIQEEMSMCQKHIEQKEKELKKCELDQMKTAEQKEYARKKEIDYEIKIKDSAEQKRQKQLQEQIAQAKKECDDLERAKNVYVHSLEREEKDVSSLFNYQGNKYFSLSKDEKHLLEIGRDCLAFLSHNDGTGGNREEQTLNKLGESLKRISGRFYKSTAELEHRSVELKTEEKKLLSDIENLKRKKRSYPMSVES

SEQ ID NO: 31015 - protein, 477 aa, Faecalibacterium prausnitzii A2-165
MQLFELVSPRLFRPLAGPNRAFYAELLLLLWEECRHTADYSISRAEAVSRAEDYFAALAKPLALDADDAGDEAEQPTRDPHTLALGFLLRLRRTGWLEEQPGSYEEEPALAFVPEVAPLLEALEEILNPRVVTYTGKLYKAWQLLQNIGEEKSPYENVLREVASDLEALNKSLRALNASIGHYIDRLTRNRTPQEVLELFDQYEEKVVAAAYHRFKTSDNLFNYRAYLEEELDDCEAEHLPRLALDYARVERCAPGEAAPAVRALIQKLRDSLEEMSTLMCQIDQSHIRYRKRAVQRAQFLLLSDRSSQGSVTALLRRYAEEIKTPDQLFAPDDGPVAKHLHLYPAAVFGAKPLYPPAAPRSETPLAPVRQAGLDEEQLRKEQQLLLDYARMAVTEENVGLLAKQALAARSAVAASTLAEEYPRDFARIIGLHTYSQSPRRAYDITLTGNWVERGGFRFEEFILTPRREDADHGRTE

SEQ ID NO: 31016 - protein, 201 aa, Faecalibacterium prausnitzii A2-165
MAEPNKMLEETANYLLNHCFVLGGVEDQRAKYLYVQDHLPEVRAVFAPLGYAVTLYPAPLQAAALVNEHEGSQARLLKYESILLLVLRLLYLQKRESLAASADQVLVTVEEVQTELQKMNLPRRLDQRTLEELMRTLRRYNLARPVGRLTGLDSRIEVFPTVLLALPDADLADAAAESSRTREELALYERPDGDASGEEEE

SEQ ID NO: 31017 - protein, 1112 aa, Faecalibacterium prausnitzii A2-165
MIELKRLKLINWHNFENVTFDCARLTYMIGVNAVGKTTILDAIRYCLTTNRNFNALGNKKSGRTLQGSVHAKQRGENAYRRPGRTVAYIGAEFWDTVKRTNFVIAVRVESEGPMQELHPGDQTWYISEDGITLEKLPFLDPRTGAPSAKEDFKPAVGRLSYTRSPSEARDRICRALGIGRASSPLGKKFNEVFQMGTSMDEIPNFREFLYQYILPQPELDLEALQGDRVELENLHAVLAEAQTRAAALEQIVAYGREAAAKETDALVNRGAALLARAEADAGEDASWQSHLDAGRRQLADLNAKYEAAKNAEAEARRAYLAAHGAAGDSGVGRALDALTEELARKKSALDAAARTRNSLEATADTITGLLTQLNRSGFAVEKELWPQRLTAEHLPALTEALACIEKPLEEQYFAARQASADLAKEQEGLRAELNAVSGGKWVYPHGDAATKVRDAVNAELKSRGMTADAKIFCELLTVADESWQDCVEACLGDRRFDILVPPAHYAAAKSAFVALGDRVGPISLLDTPGIRKADRHAETAPADSLAAQVTSENPLAAQYADTILRRIVCCDTPDTLEHFPDSATRDLLRHHPFRLERLRRPQRYIGLDARRERAEALEAQLAAQADRCREAAQTEKTLKSAYDQYQNVLRGHALEQLAELWASRAALDAARADYAAQEQKLADCRENPMLQQLYREEEAREAAWETARKAVEQVGGDIRVCEKQIASCEAEQGKAVETAAQSRAAAEAFFAQHPLLEPLAQERKKGLMTGGRTARAAAQTAEKAQTRLDDALRAYLTSTLEPAQRDYNEHYVCDYPLGLAGVEQYRAQHDSLVRIDLERYAARLEQAQRDCKDRFRKDILFRMKDDIFNARRQFRELNKVMEQLTYGEEVYRFELEPSRDPQLAAFYQVIVDKGNQQMTDGDSLDNLAATADPVYERQVDALMEKIMADVDENTRARQEGRTTSGATLSDYVDYRTYLDYDIKVTNTVSGQQAYLSRVSRDSSGGENQAPFYVAICASLLQIYQKSENSIRLVLLDEAFSKMTSDRIRPMMELFRRLQLQVLLISTVEKSTAIQPYCDITYSIVRHGDANAIAPFYRAGIRADAPEKETEYE

SEQ ID NO: 31018 - protein, 466 aa, Faecalibacterium prausnitzii A2-165
MKFFEAVPSELFSPLASPNRILYADALDVLYAAYQENLKIREDVLYSMLRGRLEQELADATFEDEDIDEEELRDISGRARFLIRKLCSKGWFEKERGDDFEEYITIPNYSSRLLELFHQLCDDSPARGYSYVFGTFSVLKTADDSNNAYDKMTALYSAYDNTTALISLLQMVYHNVKHYFQTQIDMQDVNQVLAAHFNDFGQKVVEAYIRPLKIKDSVPKYRVPIQSVLRRWEEDDTLLMAMANEALRDKRGKTLEDCRADLLRKIFWIEERYDNLEKDYLEEIDTQVRRYTRAATQKIENLTNRDQSVRGNLNVLLTTLSRNRRAAELVDQIQPAFQLYEQSFLSEKSLWYRKRPEKRTKTASVLIQDDQAPNTEEQVRAAQLLQSKYGRAAVNAYVQGWLGDADIRCSEELSLEEDKDYIMSLLAILGSKDASAGYVVQELDGIFCKNGYSIPQMQIRRKEKKP

SEQ ID NO: 31019 - protein, 215 aa, Faecalibacterium prausnitzii A2-165
MNFDFVTNATAKELEQFKSVCNQLLSRTYIVRTIYQPGKGRVDNPDYLFLSRHYEAVQEYLSLLDWDLRRDELNGYFYVLNTDEANRCNLNKKETAILLALRLIYEENMERLGLEQDAVCTVRDVLEKVVTDYPVFPAKPNMEEVKRAFTVLENHSVIQRLEGKFNQGSCRIAILPTILSAVSSEKLNLVVSVLKKEETDEEAEENPADQLALFQ

SEQ ID NO: 31020 - protein, 1127 aa, Faecalibacterium prausnitzii A2-165
MKKLKKILLINWLYFSKELIEVGDINFLTGKNGAGKSTVIDALQIVLLGETNSRNFNQAANEKSQRTLEGYLRADMDDNSPYSRRGKDFSTYIVCEFQDEMEGSSFVTGVTFDCRSDGSYRDTFFIYTGTLPENCFIEQGEAMEISALRRFLKQNYARTEFYDTQKEYRRNMLAKWNVHNEQVLRMMKKAVSFRPIVDIQKFITENICDIPDKPNIELMQQNIRDYKRHELLAQRQQEKLDALQQISRLYQEMNQAIDRCQIQKFLVRWAEKEAAQTEIDQRELERTECKENLANVNEQREELERQIEQKETRRSELELACRQSNVFQEEERLLNMEKALRDEQKKLEQGLQNLEVEIKREARRLQRFCGEIQELEPEELLIPVQEAANTAQKAYAVFTGDEKGLFARPVELFEMGQQAAAELSDAVRSAAHKTEDRIAELKKQADQKSAVLANLRRNIKDYPHGLLLFKDRLEKDLADKTGHAVPVYILADVLEMADERWRGAVEGYLNNQKYYLLVEPGRYQDALNIYDRLKQEAEYRAFGLVDIGKLREKETLRPLPGSLAEKVETENKLARSYVDYLLGRVICCDTAEQLRCYKTAITEEGMLYQGYVARALRKGWMEDAFIGRRAVQLRIDHLEKELACLQEELRHWQPLQKQLTGLQEPLFTQRFVRIDVAQKQEDYQRVQMIIKEIAEVKNQLSQLNLFWLDEQRRIIEQLKEEILAFNKEKDAKNVQKGKLEGRIHQLEYEILPEKYQQYEAIEDVLNEGFTKEYRETIGVPRYRQELVRLKKADVIRKNFGDSLAQSTKAMDGAQKKLFAARREYAERFKPCAFQIEVMDNTEYEEERRTLQESELPRYKEKIRAARESAMEQFQNDFLAKLKSSIDQVQDQVHNLNKALRQAQFGTDKYQFRVGPNPDYLDYYNMITADELMEGESGLFALPFQQKYGPLIEKLFSQITMADDTQLNARKQSELQENIVRYTDFRTYLKFDLETTDQNGSKQLLSQTLNMKSGGETQTPFYIAVLASFAQLYRVNDATRFGNTVRLVVFDEAFNKMDSDRITESVLLLRKMGLQAIICTPPDKVSDIMPIADRTLLVDKSGYRMHIIPFGKEMQNEGSTGDPESSAG

SEQ ID NO: 31021 - protein, 412 aa, Faecalibacterium prausnitzii A2-165
MKEAQVILNRLLDKFENSKHLSEPNTSRRRVMLRIDKRELPEYQYEDAVVRDAYNIAARELEQQALVRLEWARKQSVLSCIVLDLERVAQCYECADRVHPQKKAEEVANIIMQKLADNPVPWIAAWSDAVCAQVRNSMKVPTYCRENDGLLQELLLTFQRYAELSGSVTMRAFSSQCFHDTKYFERNVRELFLTIARKYNTQLAAACTEAKLGERDQLAFLGIYARPELYELSGDCAICLKKGELRLSVAEPYGLALPSTLVSEIVDIELKNICCITFIENKTNDDEYLLAEKQPQELVVYHGGFLSPRKKKLFEKLAAAAGETMQIRFWADIDLGGFCMFENLQTVFPQLEPMRMEGRFVEQYHKNGLKRPEQYLKKLKEERNAGRHTLFVDAIDKILQYGVTIEQETFLE

SEQ ID NO: 31022 - protein, 498 aa, Klebsiella sp. 1_1_55
MEENTRQRTENYISAKNQHPAWILLASRRAPLVLSCLKTLFEKAHDGIPLEDAIQSLSGILIEHVSQEQYDINQDNPSLQASRELREWIKRRLIVERDGRIFATDALEVAITFVESLDNRFMTSTASRLSTVQREIENLETRLNPNPANRVATLRRRIAELERELQEAEAGHIEVLETHQAVEHIREVFNLASSLRADFRRVEDSWREADRALRQSIIGEQYHRGDIVERLLNDQDALLNTPEGRVFDSFQQQLRQSVELTAMSERLRVILSHPSASNALNRLQRHDLRWLVKRLVDESQTVLQARARSERDVRGFMKTGLAAEHHRVGHLLNEFLNLALKLDWQRQMIRKQEVPLPAVGVAVTGVPAIERLRFKEVDDEAEQTLDLSNHATDLTQIGDDFWDAFNGLDREALIQQTLQLLAKENRPVGLAELAALLPPAHDLETFAVWIGMAREAGIEVIDSQREFAELSDGEGRRWRFNLPTTGLESQALMDIDWE

SEQ ID NO: 31023 - protein, 249 aa, Klebsiella sp. 1_1_55
MAGFFDKLINRSVAANAGSEPETSDEEITDELVEDSAASGETRTLKKIREAIQELLKYGLLEEASKPNLYRVVLTHPEEVTRILEPLDLDIGIDEIRGLLYVKVRLDETPEQDEWSHPLVRRQRLNLEQSLLVAILRQHFVAWEQESGTGASQAQIAIDDLLPQLQIYLGDPGSESKERTRLLTLVDQLKGHGLVTSPDAHERIVIRPIIAHLADPMNLQALLAWLWEQITQQTSPDDSSAKESSEEDV

SEQ ID NO: 31024 - protein, 1096 aa, Klebsiella sp. 1_1_55
MNQIARLAEKESFILTRIELFNWGGFHGLHQAAIHQEGTAVIGPTGSGKTTLVDALMTLLCANPRYNLASTGGHESDRDLISYVRGVSGPGDGGEGQSHIARPGKTVTGIAATLEREGQQVRLGALLWFDSTSSSAADLKKLWMFSDNPTQTLDHWLNIWHDGGARSLKQMEKETTGIWIWLNNKKQYLARLRDFFEVGENAFTLLNRAAGLKQLNSIDEIFRELVLDDHSAFDRATEVANSFDGLTEIHQELETARKQQQSLQPVALSWDKYQKQEQQLADRKALESLLPIWFAQQASQLWREKVSHIEVELGESQTREEQIQSQLELQKKVVTDCLQRYLQVGGANIDELNERIKDWQKTLGSREILAHQYQQLTRNLGLPPDLSQPQLEANQHEAEARCEQFADDIKLKQEDVYQKGVLSHRMTEELRERETERAEIARRPDSNLPAHYQAFRSELAEALNVDESELPFVAELIQVKPEEAQWRGAIERAVGSNRLRILVAPESAQEALRWVNQRNNRLHVRLLEVKLPHSPARFFDDGFTRKLLWKDHPWREAVKALLAENDRHCVDSPEQLRDTPHAMTVQGLMSGKQRFYDKHDQKRLDEDWLTGFDNRDRLNFLAKEIAALQEQVKTANAAFEFAKGEVGVLQNQAISFQKIQQIDYDSIDVPGAKSQLDALRERLENLIRPDSDASVAKAKLDEAQTVESELDKQLRAANKVTNGLDTELTSARAAERKAQQTAQKGMQDEERELCASHFPVVALVQLPDIRDLERQHERGIQQEIEGIKGELHRLNIELTKRMSEAKRVDTGELVEAGADLDDIPVYLQRLQELTEEALPEKLNRFLDYLNRSSDDGVTQLLSHIDHEVLVIEARLSELNETMFRVDFQPDRYLRLDTKKVVHESLRTLEKAQRQLNAARFVDDNGESHYKALQVLVAQLRDACERNRTLGAKALLDPRFRLEFAVSVMDRQSGNVIESRTGSQGGSGGEKEIIASYVLTASLSYALCPAGSRYPLFGTIVLDEAFSRSSHAVAGRIIAALREFGLHAVFITPNKEMRLLRDHTRSAIVVHRRGQDSNMASLSWEELEQHSRRRENA

SEQ ID NO: 31025 - protein, 382 aa, Klebsiella sp. 1_1_55
MYSPDELREKLARQWDNAKLRAERLLPPGNWPLCLTIGKPSAKIFAEQPQRVLQHVQLWRQVAVGRVEWEEVSYRASDGPVSMPLRWIMNGPSDWINAAADATVSREFRLLEGIIEQVDPIFHPLLISHRSLWRNKGSQDIISAARLASRLEPGCAKGLPLRLLSGQGVDTKFIENNISLLTRLLDMRFSGEASEQGLTTFLDAFDESSHWVLVVPLSPGLLPFKKCRVTTAELAETTLPASRVLMIENEQCLHQLPELSDTIAVLGCGLDVQWLSSVVLDKKRVAYWGDMDSWGLLMLARARRCRPTLDVLLMNRELFEQYASQSAVPEPVKAQEAIPDGLLNEEGDFYRYLTCLPRGRLEQEFLPAGVVGEELVRWRKES

SEQ ID NO: 31026 - protein, 506 aa, Bifidobacterium bifidum S17
MGDIRREMERLRPVYETGVLRLLLRQNSMMYVALLRAAFDPLTGELPRETLEESFSQSLSRLVDSGEYQLREDQTIADASRRILADLTREGDDDYAWLANSHDAASHRFLYRLTARAHRAIEALSRLEDDSRTLSGAQANSIIMEIEHARMQLTADPGERVALLNREIKARKHEIRQIRHGQRQAALTESQVEDVIAVIHNTLRGVPIDLRELVLTERDNGDALRRRMQAGDMSVDDILTSYHDEYRRSFSESDSGRRFEDAFQVIITDEGRQQIDAALRDIAHTPYLAGESGALLDQVRAELSRIYDGIEAVRRQMRVSDEAISRLVRQQTDTRYRTMLGKLNRLYAHVNADAKAHQGDDARPYRTDTAAGRFPPLPSRPARPMVRTTTPGLSVPQTPGDATAPDLRSMIDNGGPRLRRMAALILESPVYADDGNGAIDIVASFNGLPKAERKESELVGFLGELGCGDGAGVAWHCISADGSPRDWITGPVLAQEDELHDIVKED

SEQ ID NO: 31027 - protein, 345 aa, Bifidobacterium bifidum S17
MSDLTNDAAQPDADMDMIGDDMTGTGSADTDSADTDSASTGADDMGAADVEYDGADAEGAVNPYALFEGDTGDMTADARMVAIMLKRERYISGRFYDLALDNRAAVIRSLNNDLLDLVVNEHYRVMYATAVSGPDMTLRALKTRASLKREEAALLAFLRIRVLEYENAHVAPDEWLVSFEEIRAALATGAGYLASRNDEEGVLRQVGAIVSVMCTYGYLRQLDDDETMYRITPLVPVVLDRQLADSWLAVADRDDDGEPAGDMAPAGSRSAAGDTSNADASGADDDGDSDDAGPDAELFEAPLFDDDADADAAEDIRGADDANGANDSDIDDETASDGGTAREGE

SEQ ID NO: 31028 - protein, 1194 aa, Bifidobacterium bifidum S17
MSGKDMQMIADRWMMESRRLVNWGSYEGYHEFRPSTDSQLPVTLLAGASESGKSTLVDAQISLLYPTGTPFNKASNSGRSERSDYTYLRGMIGVGGSDGVDEPMYLRGRDESGAPRSIWGAIVDTYRNFTTGQILSCGKFLYLMPGDGRGDVRRLYLAWDKPIDPRRMDVFRESSFTPTQLKSTYPGCVTFPNAEAFHTHIWDVMGLSAEACRLLARIQSADAPSRLDDIFKQGVLGVPEALDLARATVEDYERYDANFRSMEEKTRRMGKLRAITASYGDYESARDAVHSFDAVNPATKSGSATIRAWAIRRMIGEVSERQPLDRRLRDERRSEARAAGKRIESLRTRIDAVRERMRGLDGGDLTRLDAEMRQAERALADITAGRQRIGRMFEAAGEEFPKDEHAWDERRIEAVTFMRSYEQRKGLLDDMRNQTYAAHASVKQTLQRLNDDYERQKSQRTRISRQMDETRAMLCRATGLGPSELPYVAELMDVREDQEHWRLAMNAAYGSMAQTILVDKRHERGFAAKVSAIDPHAMARRTWQFVDTERGGAGNGPGGANTGATGGTDGEVWLSSKLRYREDSPFAGWLREQTSSERLDALCVDGIDDSDHAVRQVQADGQIKSGKRGQHGIKDRQQVIGFVNESYLAQLRTRIQDAQRQCDETAQSYASAKEQADRLQRERELADQLAYTAWEKIDENSAKAAIADIERTIASVRNNPKLAELDTLQESLSKELDRSQRQRIDIERQAELADQAVNAAQAWLDEHAAQPQPQTRPLDGEAADVSPKAVTNGRTLLTDEVEEALAESYEQRLSGLGDATTRAHMIIGAGAPQRMAQGDTFADRVIAGIGKDLEARVSMLEGRAASARTAVEARMGAYIEMYAGGDDTIAASVDDYRYYQDELESLSKLATVEATAVEYHNCLDKLLMSFLTIKRAIDTDAGDIHDQLERINAMLDGQQFGPRHGSLSLHADVRRPERAFWSALTRVIGTLNDRKAAQTDDDLDGARCAFASCAAMIDMLRREIGQIRDVNGVKSYGARNLDPRCRSSFYALVRHSDGQVERITSTGGRSGGALQELTSFVYGAALIYLLGGGMDNKLKPSYTTLFLDEALIKADGRYTRRALSVLPRLGFQVIVSAPESKTGEILEVSTKAYVTRKDPDTGYTTLHEARLDGIDETEGADEPEGTVESDDAAE

SEQ ID NO: 31029 - protein, 474 aa, Erysipelotrichaceae bacterium 3_1_53
MSLFEKMDPSFFTILVSKNRDIYVDLLLQIHTCIYRNQTMSMERALLQDLLEDYVQDRKYEIDFREEAEYSDIEKELRQEKDVYGRDIQFLLRLFEKHTWIHIDLHMDTMKKMVSLPYHSRVFISFVNDIIKEREQIGYLIRIHASLKDMEDPVKIEDSYQHIRNAYADFKELILTLEQTNARIRDYYAIQVKKASTRIYHDFFDIYYGDIVEGYVFPTLVEDSLKRFKNPVATILEALLQEEALKEKIVDSAVSHYRVSSRDTARKHIEDMLYAMYNDLYIVETLTTQLVDSDAGYRRLAKQKIMYLCNSDQGLKGKLVELLHHMKEEPQKMCDLVSETINVQQTRYMERDEVYTFHRRTRRDEREVMTFAFEEGTQNQEELEKRIGFDRYSRFTRESISAYYAEKLKGEAYGKLKDIGVRDMDDYIRSILVYVYGRDRKMDVHATLLPNHEEGITEGNFQYPNLLIKRKETK

SEQ ID NO: 31030 - protein, 222 aa, Erysipelotrichaceae bacterium 3_1_53
MKVEQLDLKDREEFARIVNILLAENCIYQYAKIKQFEKKERNADYVFINDHWDCFEEYLRFAGWLLYKERSSYMGMIYLVNEREDCACRYRLTKLETQLLLILRNYYEEKMLELDASLTIRISVNELLRLLVDVFAMVNARPPMQQVHAALQSLQKLNIIQKYAQGEEDLIWVLPYITCVLTPKRVEEILMKIRNEEGEEDDEAEADAADQLAVLRENDSEL

SEQ ID NO: 31031 - protein, 1095 aa, Erysipelotrichaceae bacterium 3_1_53
MRKERKTMKLKRMLLINWLYYEKTILSFEDIVFLSGKTGEGKSALIDAMQLVILGRTDNSIFNKSANDKTTRDLMGYLKGKYKDGTFKRDKGMFSSHLCMEFEDEKQNVYCFGIVFDVSGPTRGELEHRYYMMNQPIPEHCFMDGGTVFDIRRMRKLLDSFQDRSCRMFTTHLDYKNYFRQRMLIKDQRFFDVFKMAVAYTPMMNISEFIVKNVCQEEEDLNLEEMQEEIKDYRQMKEQLETVRQKKEQLSLIHEQYTDICREQERLDTLRVEQEAAKYHGMVLEHKEAAAQYEAYTRGYQKLMQQSKETEEQRKLVEKDMEELRDARKDNEADILEQKIQHYVEQQNLLKTDTAAVQQQLIRKGEVLEEQLEQLEEIEDYEALQLEAFDLSAKKLAVRKSIHAAQQLSAFDLEAYLELQTQMQEIEEQIASVRGSLHNTLQEKREELAALRASRQELEAGRKTYPQKLLLLKQELTKRLAQQVGRPVEVCILADLFRIEDESWRNAIEGYIHNQKLNLVVEAEYFMDAYRIYRAIKEEKNIHTYSIVDIAKAKPGKRPDAKTLYDCVHVERKDVAPYVEYLLGRVVCCEEEDTLRSYPVSITSDCMLYSGYAVSHMNPALYQVPFIGSDSIEKQLQETILQIQKSAASCKKLEAITQILQAVHLQQIISDDFIRQLKDGLHKAKDVEALEHKIKELRAAQTPESLQELLVLDQKIEEAKKKKNELYMLQVEQGSRRHRLEDDMKLCNSRIQELQQRLQEAKKPENGIPDSIAAVTAVDAIRRKQKQLEDVLRELNNHMELSKVELITKKTHYNDTFRIALNPNFMCDDYEREYEKHSENVVEAYIDKCALAEQKAYECFQNNFFSAINSKIENVRTQIDRLNRSIRKHKFGRSSYEFVCTCNEDYREYYNLITNKELNGHNLLNTKVYEENEELIHELFDKISSLSSMEDPKKYQELQKEVQMLSRFTTYLKFDILDNGNSLRATIGSSSGGETQTPFYVAVLVSLFSVYDAGNDGLQLAIFDEAFDKMDNERIEECIYLLKSLGFQAIIVTPTDKISNLSKVADATLIATTDEKNGQRVSSVQRWSQKETIAA

SEQ ID NO: 31032 - protein, 506 aa, Bifidobacterium bifidum PRL2010
MGDIRREMERLRPVYETGVLRLLLRQNSMMYVALLRAAFDPLTGELPRETLEESFSQSLSRLVDSGEYQLREDQTIADASRRILADLTREGDDDYAWLANSHDAASHRFLYRLTARAHRAIEALSRLEDDSRTLSGAQANSIIMEIEHARMQLTADPGERVALLNREIKARKHEIRQIRHGQRQAALTESQVEDVIAVIHNTLRGVPIDLRELVLNERDNGDALRRRMQAGDMSVDDILTSYHDEYRRSFSESDSGRRFEDAFQVIITDEGRQQIDAALRDIAHTPYLAGESGVLLDQVRAELSRIYDGIEAVRCQMRVSDEAISRLVRQQTDTRYRTMLGKLNRLYAHVNADAKAHQGDDARPYRTDTAAGRFPPLPSRPARPMVRTTTPGLSVPQTPGDATAPDLRSMIDNGGPRLRRMAALILESPVYADDGNGAIDIVASFNGLPKAERKESELVGFLGELGCGDGAGVAWHCISADGSPRDWITGPVLAQEDELHDIVKED

SEQ ID NO: 31033 - protein, 347 aa, Bifidobacterium bifidum PRL2010 [sequence omitted]

SEQ ID NO: 31034 - protein, 1196 aa, Bifidobacterium bifidum PRL2010
MSGKDMQMIADRWMMESRRLVNWGSYEGYHEFRPSTDSQLPVTLLAGASESGKSTLVDAQISLLYPTGTPFNKASNSGRSERSDYTYLRGMIGVGGSGGVDEPMYLRGRDESGAPRSIWGAIVDTYRNFTTGQILSCGKFLYLMPGDGRGDVRRLYLAWDKPIDPRRMDVFRESSFTPTQLKSTYPGCVTFPNAEAFHTHIWDVMGLSAEACRLLARIQSADAPSRLDDIFKQGVLGVPEALDLARATVEDYERYDANFRSMEEKTRRMGKLRAITASYGDYESARDAVHSFDAVNPATKSGSATIRAWAIRRMIGEVSERQPLDRRLRDERRSEARAAGKRIESLRTRIDAVRERMRGLDGGDLTRLDAEMRQAERALADITAGRQRIGRMFEAAGEEFPKDEHAWDERRIEAVTFMRSYEQRKGLLDDMRNQTYAAHASVKQTLQRLNDDYERQKSQRTRISRQMDETRAMLCRATGLGPSELPYVAELMDVREDQEHWRLAMNAAYGSMAQTILVDKRHERGFAAKVSAIDPHAMARRTWQFVDTERGGAGNGPGGANTGATGGTDGEVWLSSKLRYREDSPFAGWLREQTSSERLDALCVDGIDDSDHAVRQVQADGQIKSGKRGQHGIKDRQQVIGFVNESYLAQLRTRIQDAQRQCDETAQSYASAKEQADRLQRERELADQLAYTAWEKIDENSAKAAIADIERTIASVRNNPKLAELDTLQESLSKELDRSQRQRIDIERQAELADQAVNAAQAWLDEHAAQPQPQPQTRPLDGEAADVSPKAVTNGRTLLTDEVEAALAESYEQRLSGLGDATTRAHMIIGAGAPQRMAQGDTFADRVIAGIGKDLEARVSMLEGRAASARTAVEARMGAYIEMYAGGDDTIAASVDDYRYYQDELESLSKLATVEATAVEYHNCLDKLLMSFLTIKRAIDTDAGDIHDQLERINAMLDGQQFGPRHGSLSLHADVRRPERAFWSALTRVIGTLNDRKAAQTDDDLDGARCAFASCAAMIDMLRREIGQIRDVNGVKSYGARNLDPRCRSSFYALVRHSDGQVERITSTGGRSGGALQELTSFVYGAALIYLLGGGMDNKLKPSYTTLFLDEALIKADGRYTRRALSVLPRLGFQVIVSAPESKTGEILEVSTKAYVTRKDPDTGYTTLHEARLDGIDEMDGADEPEGTVESDDAAE

SEQ ID NO: 31035 - protein, 475 aa, Faecalibacterium cf. prausnitzii KLE1255
MQLFELVSPRLFRPLAGPNRAFYAELLLLLWEECRHTADYSISRAEAVWRAEDYFAALAKPLALDADGAGDEEEQPTRDPHTLAVGFLLRLRRTGWLEEQPGSYEGEASLAFVPEVTPLLEALEEILNPRVVTYTGKLYKAWQLLGSIGQEKSPYENVLREVDADLDALNRSLRALNASIGHYIDRLTRNRTPQEVLELFDQYEEKVVAAAYHRFKTSDNLFNYRAYLEEELDDCEENYLPQLAFDYARVERCAPNEATPAVRALIQKQRDALEEMSLLMREIDASHIRYRKRAVQRAQFLLLSDRSSQGSVTALLRRYAEDIRTPEQLFEPDDGPVAKRLHLYPAAVFGEKFLYPPAAQRTAEPLAPVRTEGFDPEQLKKEQQLLLDYARLAVTEENVALLARQALAARPQVNAALLADEYPNDFARIIGLHTYSQSPHRDYDIQLTGNWVERGGFRFEDFVLTRRREEENGNH

SEQ ID NO: 31036 - protein, 198 aa, Faecalibacterium cf. prausnitzii KLE1255
MATINMLEETANYLLNHCFVLGGVEDQRAKYLYVQDHLDEVRAVFAPLGYSVLLYPAPLQAAALVNGHEGSQARLLKYESILLLVLRLLYLQKRESLAANADEVLVTVEEVQTELQKMNLPRRLDQKTLENLMRTLRRYNLARPVGRLSGLDSRIEVFPTVLLALPDADLADAAAESARTRTELGLYERPEEAGEGEE

SEQ ID NO: 31037 - protein, 1097 aa, Faecalibacterium cf. prausnitzii KLE1255
MIELKRLKLINWHNFENVTFDCARLTYMIGVNAVGKTTILDAIRYCLTTNRNFNALGNKKSGRTLQGSVHAKQRGENAYRRPGHTVAYIGAEFWDSVKRTPFVIAVRVESEGPMQELHPGDQTWYLSEDGCTLEQLPFIDPKTGAPSAKEDFKPATGRLSYTRSPSEARDRICRALGIGRASSPLGKKFNEVFQMGTSMDEIPNFREFLYQYILPQPELDLDALQGDRLELENLHAVLAEAQTRANALEEIVNFGREAAEKQTQTLVNRGAALLARAAADGSEQTVWQEHLDAGRRQLEQLNARYAEAKNAEAEARRAYLSAHGAASASGEGRALDALTEELSRRKTALDTAARKAEKAESALARTQSLLAVLRRSGFAAGIKAEELTADTLPQLTAWLSAQEKPLEEAYFAARQNTAALQKEQAGKRAELDAVSGGKWVYPHGDAATRVRDAVNAELKSRGMQPDAKIFCELLNVEDESWQDCVEACLGDRRFDILVPPAHYEAAKSAFVALKDKVGPISLLDTPGIRKANRRADKYGPDSLAAQVSSENPLAAQYAQTILGRIVCCDTPDTLEQHPDSATRDLLRHHPFRLERLRTPQRYIGLDARRARAGALAAELEALGESARAAAQTEQNLKAAYNQYQTLLRGTALDELAALWDARAALTAAQNAVTEQEAKLTECRENPLLQQLYKEEEAREAAWEAARAAVEQAGGDIRVCQKQIASCEAEQKKAGETAQQSADAARSFFAAHPLVEPLARTRMLALAPADKPRAAAQAAEKAQAKLDDALAVYLTGTLEPAQKAYNEHYVCDYPLGLAGLDQYRAQHESLVRIDLERYAARLEQAQRDCKDRFRKDILFRMKDDIFNARRQFRELNKVMEQLTYGEEVYRFELEPSRDPQLAAFYQVIVDKGNQQMTEGDSLDNLAATADPAYERQVDELMEKIMADVDENTRARQEGRTGGVTLSDYVDYRTYLDYDIKVTNRVTGQQAYLSRVSRDSSGGENQAPFYVAICASLLQIYEKSENSIRLVLLDEAFSKMTSDRIRPMMELFRRLQLQVLLISTVEKSTAIQPYCDITYSIVRHGDTNAIAPFIRLAAE

SEQ ID NO: 31038 - protein, 466 aa, Faecalibacterium cf. prausnitzii KLE1255
MKFFEAVPSELFSPLASPNRILYADALDVLYAAYQENLKIREDVLYSMLRGRLEQELADATFEDEDIDEEELRDISGRARFLIRKLCSKGWFEKERGDDFEEYITIPNYSSRLLELFHQLCDDSPARGYSYVFGTFSVLRTADDSNNAYDKMTALYSAYDNTTALISLLQMVYHNVKHYFQTQIDMQDVNQVLAAHFNDFGQKVVEAYIRPLKIKDSVPKYRVPIQSVLRRWEEDDTLLMAMANEALRDKRGKTLEDCRADLLRKIFWIEERYDNLEKDYLEEIDTQVRRYTRAATQKIENLTNRDQSVRGNLNVLLTALSRNRRASELVDQIQPVFQLYEQSFLSEKSLWYRKRPEKRTKTASVLIQDDQAPNTEEQVRAAQLLQSKYGRAAVNAYVQGWLGDADIRCSEELSLEEDKDYIMSLLAILGSKDASAGYVVQELDGIFCKNGYSIPQMQIRRKEKKP

SEQ ID NO: 31039 - protein, 215 aa, Faecalibacterium cf. prausnitzii KLE1255; identical to SEQ ID NO: 30900

SEQ ID NO: 31040 - protein, 1127 aa, Faecalibacterium cf. prausnitzii KLE1255
MKKLKKILLINWLYFSKELIEVGDINFLTGKNGAGKSTVIDALQIVLLGETNARNFNQAANEKSQRTLEGYLRADMDDNSPYSRRGKDFSTYIVCEFQDEMEGSSFVTGVTFDCRSDGSYRDTFFIYTGTLPKNCFIEQGEAMETSALRRFLKQNYARAEFYDTQKEYRHNMLAKWNVHNEQVLRMMKKAVSFRPIVDIQKFITENICDIPDKPNIELMQQNIRDYKRHELLAQRQQEKLDALQQISRLYQEMNQAIDRCQIQKFLVRWAEKEAAQTEIDQRELERTECKENLANVNEQREELERQIEQKETRRSELELACRQSNVFQEEERLLNTEKALRDEQKKLEQGLQNLEVEIKREARHLQRFCGEIQELEPEELLIPVQEAANTAQKAYAVFTGDEKELFAWPAELFETGQQAAAELSDAVRSAAHKTEDRIAELKKQADQKSAVLANLRRNIKDYPHGLLLFKDRLEKDLAGKTGHAVPVYILADVLEMADERWRGAVEGYLNNQKYYLLVEPGHYQEALNIYDRLKKEAEYRAFGLVDIGKLREKETLRPLPGSLAEKVETENKLARSYVDYLLGRVICCDTAEQLRCYRTAITAEGMLYQGYVARALRKDRMEDAFIGRRAVQLRIDHLEKELACLQEEQRHWQPLQKQLACLQDPLFTQRFVRIDVAQKQEDYQRVQTITKEIAEVKNQLSQLNLFWLDEQRQIIEHLKEEILALNKEKDAKNVQRGNLESRIHQLEYEILPEKYQRYEAIEDGLKEGFTEEYRETIGVPRYRQELVRLKKADVIRKNFGDSLAQSTKAMDGAQKKLFAARREYAERFKPCAFQIEVMDNTEYEEERRTLQESELPRYKEKIRAARESAMEQFQNDFLAKLKSSIDQVQEQVHNLNKALRQAQFGTDKYQFRVGPNPDYLDYYNMITSDELMEGESGLFALPFQQKYGPLIEKLFSQITMADDTQLNTRKQSELQENIVRYTDFRTYLKFDLETTDQNGSKQLLSQTLNMKSGGETQTPFYIAVLASFAQLYRVNDATRFGNTVRLVVFDEAFNKMDSDRITESVRLLRKMGLQAIICTPPDKVSDIMPIADRTLLVDKTGYRMHIIPFGKEMQNEGSASDPEPAAG

SEQ ID NO: 31041 - protein, 412 aa, Faecalibacterium cf. prausnitzii KLE1255
MKEAQVILNRLLDKFENSKHLSEPNVSRRRVMLRIDKRELPEYQYEDAVVRDAYNAAARELEQQALVRLEWARKQSVLSCIVLDLERVAQCYECADRVHPQKRAEEVERLITQKLEGNPVSWIAAWRDAVCTQARNSMRVPTFCRENDHLLQDLLLTFQRYAELSGSVTMRAFSSQCFHDTKYFERNVRELFLGIARKYNIQLAAACTEAELGERDQLSFLGIYARPELYELSGDCTILLQKGELRLSAAEPYGVALPSTLMSEIVDIDLKNNCCITFIENKTNYDEYLLVEKQPEELVVYHGGFLSPQKKKLFEKLAAVAGKTMQIRFWADIDLGGFCMFENLQMVFPQLEPMRMEGLFVEQYHKNGLNRPEQYLQKLQEERNAGRHPLFADAIDKILQYGVTIEQEIFLE

SEQ ID NO: 31042 - protein, 543 aa, Bifidobacterium longum subsp. longum BBMN68
MADVMRELERLRPVYETGVLRLLLRQNAMLYVSLLRSTFDPLTGELPRETVEERFAQSLNALADAGEYAPREDQTFAEAAHQILADLTREGEGDYAWLANSHDAASHRFLYRLTARAHRAIEALSRLEDESRALSGAQANSIIMEIEHARMQLTADPGERIKLLNREIKERKHEIKRIQQGKQHATLSEAQVEDVIAVIHNTLRGVPIDLRELVLDERDNGDALRRRMQAGDISVDENLTRYHDEYRRSFSESDSGRRFEDAFQVIITDEGRQQIDEALRAIAKTPYLAGESGVLLGQIRDELARIYDGIEAVRRQMRVSDEAISRLVRQQTDTRYRTMLTRLNRLYARLNADAKTHMGDASRPYDTATSDALFAPLPMRPAKSMTRATAPGLSDLAAEAPQSTPVADLRDMVNSGGPRLLRMVSLIRRNPVTVDRSDDRPGATLVDIAASFNRLPESERRESEIVGFLGGLGAVSGNAIADEPSTDGVGVGVDSDIATEPAPAQRGDTATWHCVSIDGEPRNWITRPVLADMDELSIIVEEG

SEQ ID NO: 31043 - protein, 224 aa, Bifidobacterium longum subsp. longum BBMN68
MTVAEEHEEHEEHMDNANPYALFEGDTGDMPAEARMAAIALKRDRYISGPTYDTVLDNRDAVVRSLNNDLLDLVINERYRIMYATPVAGDDVTLRSLKTRVSLKREEAALLAFLRIRVLEYENVHADPADWLVSFEEIRAALATGAGYLAARNDEEGVAKQIGAIVSAMITYGYLVRLDDEAMYQITPLVPVVLDRELADTWLDVAEHGDGDTEDDDDDEKGAE

SEQ ID NO: 31044 - protein, 1182 aa, Bifidobacterium longum subsp. longum BBMN68
MMQATDVQMIADRWMLESRRLINWGSYEGYHEFRPSTDHKLPVTLLAGASESGKSTLVDAQISLLYPTGTPFNKASNSGRSERSDYTYLRGMVGVGSTETGDEPLYLRGRDENGAPQPVWGAIVDTYRNQTTGQVLSCAKFLYLMPGDGRGDVRRQYVVWGKPVDPRRMDQYRDAPFTPAQLKATYPDCLTFPSAEAFHTHIWSAMGLSEAACRLLHKIQSADAPSRLDDIFKQGVLGVPEALDLARTTVEDYERYDENFHAMDEKTRRMDTLRGIQQAYGEYAAARGKARAFEPVKPAVDGTVPAVLRDWALARMRGEVAVQLPADRAEQQNSEAEAKLLRRRTEDLRTRLDMIRGQMQGLDGGDLTRLELELDQARRTLEDVQANRTRIKQTFASIGETLPGDEQAWNERRINAVNFKREYNKRDGECEEALTAAINARAGARGDLERLQRDFDRQRSQRTRISQQMDETRAMLCRATGLTPAELPYVAELMDVNEHEEDWRLAMNVAYAPIAQTILVDKRHEQGFAAKVSTIDPRTMPRRTWQFVDTARHYDDTGAHANILTGEQDGDWLSGKLRYRDDSPFADWLRSQTQDERFDALCVTAIDDTDRTNRQVQADGQIKSGARGQHGTKDRAQVIGFVNETYLNALAAQVDAARNALSQADTDYTAAKTQSDNLHRELELANQLAYTSWERIDIAGAQRTITDTQDAIASIKNDPKLAELAKQRDELNAELDRVERQRIESDQAAARAGSAVEAALIWLRDHADTGTTDAAGATADNDDDAASGPLPDEVTAALAESYDNRFAGLADAAMRAHMIIGAGAAGTQAPGESFPERTIAGIGKDMASRINLLNGQADAARTGVESKMSTYIALYAADDDSLTASVEDYRYYLDELASLTQLAAVAATDAEYRRCLEQLLRSFLTIKRAIDTDASDIHDQLDRINAMLKGQQFGPKHGSLSLHADVRRPERTFWAQLIRVIGTLNDWKSADVNDSDASRKAFAACAPMVGLLRAELAQVKDANGVKSYGARNLDPRCRSSFYAIVHHADGPDERITSTGGRSGGALQELTSFVYGAALIYLLGGGLTSEPSYTTLFLDEALIKADGRYTQRALTVLPRLGFQVIVSAPESKTGEILEVSTKAYVTYKDPDTGLTSLREAVLHQNDMDDESSSDILKDDGVAE

SEQ ID NO: 31045 - protein, 394 aa, Bifidobacterium longum subsp. longum BBMN68; identical to SEQ ID NO: 30423

SEQ ID NO: 31046 - protein, 494 aa, Xylella fastidiosa Dixon
MDHATLTTLRERHPAWRLLTSPHAPLVTSFLHRMFVATNARLLSETKITQALEDTLYALREHEGPEAYPKGALDYLNDWAAPDKGWLRKFYTSGTDEAQFDLTPATEKAILWLLSLTEHTFVGTESRLLTLFALLEQMSTGTETDPIKRLDELRKKRDALDIEITRVLEGHTPLLDDTAIKDRFQQFQQLARELLSDFRQVQDNFRQLDRKVREKIALWEGTKGTLLDEIMGERDAISDSDQGRSFRAFWNFLLSSRRREELSERLGQVLALPAVAALHPEPRTRRIHDDWIEAGEQTLRTISQLSQQLRHFVESRAFLENRRIMDLLHGIERKALGLRDMTPSGTVMYLDAIGADIQLPLERPLFTPRAKPRLADLVLAAGTDDIDTTPLFNQIVMDKARLRLAIQRALRTQSQISLRTLLQTEPLQQGLAELVAYLELAHTSNSSDPDGLRGIVDETVEEPIRWQANNTVGETVTREARLPRIIFTRRASSH

SEQ ID NO: 31047 - protein, 234 aa, Xylella fastidiosa Dixon; identical to SEQ ID NO: 30608

SEQ ID NO: 31048 - protein, 1166 aa, Xylella fastidiosa Dixon
MPCHRTIKTNLTPRLKQKGSQAMRETSTLGLNFVADDKRVGFRLQHLEVVNWGTFNTRVWCYTLGGRSGLLTGDIGSGKSTLIDAITTLLVPAQRVAYNKAAGADARERSLRSYVLGYYKSERNDATGTAKPVALRGTSDYSVILGVFHNVGYDKVITLAQVFWLKDSQSQPARLFVVAERALGIATDFNNLGGDIKTLRKKLRGAGCELFDSFPPYGAWFRRRFGIQHEQALELFHQTVSMKSVGNLTDFVCSHMLEPCDVGSRIEALICHFDDLDRAHQAVLTAKQQVKLLLPLVDDGQKHQTQLANIQTLEAGRDTLRPYFAQLKGELLKHRLDALAAEADQLAVEIQQLKEQRKTADSKVTQLQQDLRDNGSDRLETLAAEIQQLEQTKAQRQKKSDRYQTLLTKIDETAPADAIGFFTQQQRFAQHTEELNAAIATLHNDKSEKDFALRNARKDHNTLLAEINSLQQRQSNISAIQIRIRHDLCAALSIDAEELPFAGELIQVREDARDWEGAAERLLHSFGLTLLVPDAHYKAVVTWVNHKQLDGRLVYFHMRPRNTTQDAALHAQSLVHKLIIKPESPHYTWLQQELQRRCNVVCCDTIEQFHREVRAITQAGQIKDPSGRHEKDDRHRIDDRSRYVLGWSNADKLHTLYEQRQHLEDSIRMLGEDLGTIQQECQKQQERLDALNKLGEYPDFADIDWMSLVRQIAGLKEEQAQLQATSNILQILQQQLTEAQTQVKLLHGKWENALREQGEVNSKQKTAQQMWNQARNVWDDAPLSQAQIALLACWRQQALGEHLLSVESCDNHEQQVRQWLQKRIDAENAHLRQLNDRITGAMHRFKDQFKAETVEMDADLAALPEYERMLNGLQEDDLPRFEARFKELLNVNTINEIASFNAQLNRERETITERIKDINQSLHGIDYNQDHYINQSLHGIDYKRGRYITLLAQPSPDAEIRDFQQDLRACTEGTLTGSDDEQYSDAKFLQVKRIIDRFRGREGLSDADRRWTAKVTDVRNWFVFSASERWRADESEYEHYADSGGKSGGQKEKLAYTVLAASLAYQFGLKWDEVRSESFRFVIIDEAFGRGSDESAEYGLRLFEKLNLQLLIVTPLQKIHIIEPFVSSVGFVHNKGGCDSQLRCLSIEEYQAEKTNGSGPGGGTAP

SEQ ID NO: 31049 - protein, 405 aa, Xylella fastidiosa Dixon
MSWTTPASLYAQVERLWKQGDLLRALVTDTHAMTWPHLLKLRAPNAADLSNRFQAVRDWVQAIAGTPQIRIQWREWKHRVQGTQQVPEAVYLDTLQAALAFIGKTHQAQQFEAVWQQTAAAQPVLLAWLLQRPTQALEVADRWERLLAVVAWLQAHPRPGVYLRQVDVPGVDSKFIEAHKSVLTTLLDLALPPESIETAASGVLQFTRRFGFLDKPVLIRFRLLDAALPSLPGCAGLPDISLDAAHFAALTLPITRVFITENEINFLTFPKVAGAIVIFGAGYGWEPLARAAWLHACQLHYWGDIDTHGFAILNRLRGYFGHVTSVLMDQDTLLAHRLYWDEESKPTRQALEHLTAEEAAVYDDLRYDRHQPRLRLEQERIGFRWVCDRLACLLSAAHVAPPQDA

SEQ ID NO: 31050 - protein, 490 aa, Xanthomonas oryzae pv. oryzicola BLS256
MKHRARIARYRALREQPLWKLLAADQSPEVIGLLQTLLLDSERGLPAAVLHERLQRMLDDLNVDQLSRELPRTAQAYVAHWLAQGWLERRLPEGAQQEQYELSTQAIQAIRFADGLEQARGAATESRLALVMQQLSQLAALTETNPDARLSALRDERDRIDAEIARVAAGKVASLDGKRALERARQVIALADELTEDFRRVRDDFEQLNRQFRERIIDDEGERGEVLTRLFEGVDVIGDSEAGRSFQAFWALLNDAEQSAQLDAALETVLARAFARKLDRRERSFLRGLTGTMLERGGQVHDVMQHFARSLRGFVQSRGYLEQRRLNQLLKQAQAEALGLREHLRAQRSVGHDLNLTTSRLRSLSQWRLHDPRQTQVDGSIQRNDAAAISLDSVGDLVAQSEIDFRSLRRDLYELLGEHAQLSIAQVLAQRQAEQGLGSVIGYLSLGTRHGQVDAQRSEIARWRGGDGQWRGARIPLVWFSQEKRNELAG

SEQ ID NO: 31051 - protein, 232 aa, Xanthomonas oryzae pv. oryzicola BLS256
MNWQADNAETDAHAPSAHVDAAAPEADAATGLFPGDSGALPVDARRVLCQLLAGPSVDVQRHSKLWPALLRHEAAVRSRLADLFLELVLDRDAGVAFTRQADTGELEAPVLLRSLPLTFIDSVLLLHLRQQLAEADARGVRAVVEDAPLSEALAVYEKNLSTDRAGFMRRVGNAIQKMKDNHVLTRLRGEDNRYEVSPTLKLLFSAEDVSALAQIYRQLREQPGTVGDAERA

SEQ ID NO: 31052 - protein, 1142 aa, Xanthomonas oryzae pv. oryzicola BLS256
MKSSSSSLFADDLPDPRVQQFRMRRLQVHNWGTFNGLTDVPIAAKGFLFVGRSGSGKSTLLDAMSALLTPPNLVDFNAAAREAERTGRDRNLVSYVRGAWADQQDSASGEIATQYLRKGSTWTALVLEYRNGEGRVISLIRLFWIAGSGAAAADVRKHYMVAERSFDIASELVGFDLDLRKLKARLGDDIAHFDNFSGYAERLRHQLGIANEMALRLLHKTQSAKNLGDLNVFLRGFMLEAPKTFDASERLVGDFAELDGAHRAVVTARRQVETLLPARAHYEDLQSVQRQRGRLQELKLGLDPYREQRRLALLDARLHALDVNDQGLAGEEGQRRAAVDNHQQRLSDLEAQRRSQGGERIDALEREQLQVQGELARRSDKRAKAEQACHQLDQTLADNAHGFAEQSAQARAALEDGQRLAAEQDEAIVERIAGKREDSQRFAQVRAEIEALTRNPSNIAAPMQALRARLSEETGIPEAALPFVGELIQVREEDAAWRGAIERVLHGFAQSLLVDERHYAELAEWVNRTHLGSRLVYYRVRNNEQAFAGREPGSASLLHKLQLREHPFAGWLRRELGKRFDYDCLESAKALRTAERAITREGQVKHPGERYEKDDRHAVGDRRRWLLGFDNRDKLALYEREAIELAQRIAACDADVAELRARRERDASRRLAQHTLANLAWEEIDVAAQLQRRDDIANALRQLREGDANLRALGEAIERTRGDLEQAKRTFDGVREERIALGVERTRLEKQRLHCADADARVVTPLQREGLEERLANLGALSLDNLEAHFRQIGNAIAEQTSASDSEHNRLEQLLLGCFRRYSQQWPEDSGDFIISLAGAEDFLARLLRLERDGLPQHEARFFELLQSQSKNNLLALQRHTAEARKSIAQRLDEVNASLEQVPFNHGTLLTIELSDRRLPEVIDFHQRLRDVLGHHQTEQRDVAEQQFAVLRELVRKLGSADGEDKRWRELVLDVRLHVEFVGVELDAATRQQVEIYRSGAGKSGGQRQKLATTCLAAALRYQLGGEDGELPRYAAVVLDEAFDKADNEFTALAMNIFENFGFQMVVATPLKSVMTLEPFIGGACFVEISGRHDSGVLLIEYDEQARRLKLPERSRSAAAAGAARATEPSAAVGGASVDELH

SEQ ID NO: 31053 - protein, 387 aa, Xanthomonas oryzae pv. oryzicola BLS256
MMLPAAALLALRGQWQRARGQWLIGEGAPQAIGLRVPTQAQAIARFDAFGAWLQEWSRTGLPGRVEYRAVSWTQLGPQRLPQTWVLDDAGQAAGALGEGERWARARQRSAALQARWPQAVALAARLRRQFDLLADWPEAEFARLVAVVEWLHQHRDSGLFLRQLPIAGIDSKWIEPHRGVIADWLAGLRGIAEPRSFASLSGLRNAPDRVRLRLLDPALRHHLGGLEDITAPIAQIAALRLPARRVLIVENRETGLACESLPGTLVLMARGYAIEYVSNIAWLRELPLYYWGDIDTHGLAILHRLRTHAPHTTAVLMNEATLQATPRALWGHERRPHRAQRLAALSIQEQRLYADLRGGRFGPSPRLEQERIAWDYAWPRIQAALAD

SEQ ID NO: 31054 - protein, 511 aa, Dorea formicigenerans ATCC 27755
MLLGAKFGILIGANPVCLWVKEERMNLISRIPKDFYKVFGSKYMEFYMQFLVAVYEESSQSYSLLGLTEGECQAIMNEQLARMTLDWSEERFDEEGELLTRSNMAMISLRHFEDWGWLRRDYDETLNSYVVSFPEYSQLYVELFRNLYSDEDSKERESVLAVYSHLYTYSSDREKNNDILKSALHTSRSLLQMLANMQEGMRGYFDELSSQRSFLGIQEVLVKEINNSDSQKYAILTTTDSFYRYKEAVKELIEKNLGENETRREGFVEKLRDIQVQLAREEQEKSEERNVQNKLSIQRYRLERAVKLCDEANEMLYRISREFDAIERRYNMLIEQKTVFASRAAARIRYILMEGAVEEDQTIAFVNLLTQSEKCDEILDKLSQKMKLTEPYRVMNEKSLYQRRDRKKEAFVPQAVTEVTEQADSEEMNEYVLKPLYTQKEIREFRKQNEQDGNFIVTKDTVKSMEDLEKLFLVWQDATEVAEGTEEIEVGEELENENGLRFSKLVIKKSQ

SEQ ID NO: 31055 - protein, 229 aa, Dorea formicigenerans ATCC 27755
MPQHHNKKDKDKGKHMVNYMEELSVTEAENLKKTISALFRQTCILQVKYDPVTLTPRDNLHYEICVRHRKFIEDYLSVLGCELVHDPQEHIFRLTGEGVAVERLNVTATKIILLIKIIYRDKILGEGLNATVTNLAEIREYGKNTNLINEKLTMAEWKDALYVMSKHQIIEVPGAIQNVEDQTKIYIYSTINLYCSGVDIQALMKEYVDEEGGAEVEAGEEDIYKNADE

SEQ ID NO: 31056 - protein, 1110 aa, Dorea formicigenerans ATCC 27755
MLMNNWGGVSHKVMEFHEYVNLFSGKSGSGKSTVMDAIQVVLYGSISATFLNKAADDAKNRRSVLSYLRGAQKDGSYNRDGQDFCSQIVLEIFDTGTKVSTCIGVAFEVGKNDTDIRKYTFFSHSGKIPEDEYLTEKDVPYTIAGLRKLVEKRVESSDNRGRGDVNRLYPSKEAYLKTVYDVIFGYVEPGRMMTMEKSAIALRMTNGTGQFIRDYMFPKSKEDTVSTISDQLGAYREIKERVEDLENRIHLLDEISRQNLALQTTRADKIHVEQVLKYIDIESFKTKIEARSQDLMDINEKIRAREKQQNENNEKKTQLTNALVEVEAELKSSDYGQKEKELKSLKETIKLLARNSEQWREVVKGLARWEEDEEISAYVSNPALQRIDEIKSGNVSKEAIEKLKKQLSDALESINEEVDEIGTRISQNRKDLKEKKEMVEDLKNDRKPYRKELKQARQELQNRLSTQYGRTIHVNIFADLFDITDEKWKNAIEGRMGRVKHSLVTAPEYALDAAKVFRKLQYLGGIDEVDLLDTAAIVKSEPKVHDNSIYEAVHAEEPYVDQCLRRYLGRIAKCETEEELRASGNGVTADCYSYNNYIFRHLKKNDYEKYACIGTKVSKAKLREMEDEVLKLSEEILQDQQMQQSLKAAQGFERLNQSTDQILHLAGAGEELQTFYEKQDQLEKELRELREGSRTAELNQQKTELEVKIREIEKISEQLQKEVLGFAKTQGQAEQDIVNFQNRMDFLMQGFVLNEELQTEVQEALKIQSEQTYRRKKSKESEDLMKQEEEVRDLLTRARNQFNQAYPSYGLTGVEHENVSYDRILNQCRQDFEPKYKDEFQKQYDLIYHTLRENVIATIHGEIKAAYRHRKEINRMLAKIKFSDSIYQIDILPAENENGQFYEMLMAPELDSKVLDDDGFDGQITLGEDTFYQKYEQQILRLTEKFMPPKDEDAKSLSQHRQQMEQYVDYRNYLTFSMYERVEDEDGNVKKNAVDDMAGRDSGGEGQNPKYVALLAGFAMLYMQQTNRDSKIRLVLLDEAFSKMDKERSEVCLHYARELELQLIVCVPDERLQSLIRNVDSVYGFRRYQNQVSMMHIDKGEYLDMIEGKI

SEQ ID NO: 31057 - protein, 466 aa, Ruminococcus gnavus ATCC 29149
MTDTNQRDTEKIMQLRYEIPDTFWSLFRSVNREIYMESLLVINEEYQYSNYFLTKEICVQVLSDMNAQKQVLLQREENETDFDMLETTASRILRWLLKTGWLKKIEDYSTMTTNIVIPDYAAVFIEAFERLTSEELEETELYIQNVYATLFSFQNNSRVNLNMLRTALINTRKLNKALQDMLHNMDKFFERLLDQESYGELLREHLDGYVEEIVKKKYHILKTSDNFYIYKMDIKECLRDMRENEEWIESIRQKAKAAGDTKEDVLDLLDLIERGFDDIEHRISNMDREHSKYVRATVSRMNYLLSGETDTKGLVVQLLNKISAQEEPERLLTEAGKRMNLSLFEMISEKSLYKRRKQRTDFISQMGQDEEYEDLNREDVLKLNRIQMRYSRQEIEDFIEEHMENEVMDAGTLHITEETAFEKLILAYDYSTRKNSKYRVLNEEETVIQSGQYQYPALKFVRRRPQ

SEQ ID NO: 31058 - protein, 214 aa, Ruminococcus gnavus ATCC 29149
MIEYYEQLSEEEQDDIKHVIQTLYRQTFLLERKFEKRTGRMVPVREYRVCSKHREFLEKYFAVAGITLQENLHMGVMYIQGETLWGEKLSRLATIYILVLKLIYDEQMAAVSSSSHIVTTLGAVNGKAGEFHVLSGLPSPTEMRRTVAFLKKYQIVEPVDVMEELDENSRLVIYPCINTVLLGDDIRELLETFSEEEDSGDKTGVQSALENLPE

SEQ ID NO: 31059 - protein, 1118 aa, Ruminococcus gnavus ATCC 29149
METKQAFKALSKICLNNWHYIDRKVLTLNQGINFFTGHSGSGKSTVIDAMQIVLYANTDGRGFFNKAAADDSDRSLIEYLRGMVNIGENNESQYLRNQNFSSTIVLELEQTDTKEKQCVGVVFDVETATNEINRLFFWHKSGLLENQYRADKRCLTTFEVKEYLQRTFSKEEYYCGPSNERFRRQMYDIYLGGLDIEKFPRLFKRAIPFRMNIKLEDFVKEYICMEQDMHIEELQESVMQYGRMRGKIEETMEEIGYLQEIRGSYRQYEEKQEETASCTYQISRLEILHLQSKIQELNDRMKETQTEIAGQEAKRVNLEKEQAELQKEYEAIILKIADSGYAAMEKDLESLNEALERLQNSKARWKKTADGLKEWKEKDVTPNQTLWDIDRFVSGKITEGELERLQISLTQIREELEEERQETDARLRAVKKEEKAAREELKELKQGRKAYPKELEEARYELRNRLHEKCGKFVNVQILADLLDVRDERWHNAIEGYLGNNKLLLVVEPKYAKTAMEIYQDMDKKKFFRAAVLDTEKVQETEWEVKEGALAQELIAKEPYVQAYINFFLGNVIKCESIEELRQNRIGITADCVLYHSFRLQHINPENYTRRAYIGETSMRQRIRRLEEKCESLQEERIPLQEMLEEIRRISQLEGLTQPLEDYRQWLSDLQKIPAKEAEKARLLDTMQKLREESVLVWEQQKQEIQQKQEAKKAEIEAVQKTIWNHQENGKRFQNMQVDFNEQLVQKENEFRQQDREKYEPEFQEYLEGRQSRNYEYLMRERIKKKQPLEDAQEKAYEKLVEARSAYLRKYPNRTYSATIRDNDVYEKQLSNLECDNLEKYREEAQEQARAAVEHFKVDFVSKIRYAIKEAYQKKDELNRIISRLDFGKDKYQFVITKNKGPDGRFYRMFMDDALDINPSQLSDHMENQMNLFTMEHEEEYGDLMNELIEIFIPPENATREELEEARKNMDKYADYRTYLSFDMQQIVQGEKDMRIGLSKMIKKNSGGEGQNPLYIALLASFAQIYRINLSPKIKRPPTLRLVVLDEAFSKMDAEKVASCISLIRGLGFQAIISATNDKIQNYLENVDKTFVYANPNKRHISIQEFERMEFEQLQGEE

SEQ ID NO: 31060 - protein, 419 aa, Ruminococcus gnavus ATCC 29149
MMTWILGKIVELLESGETNWRTEKCGRKTLNNSAKSASEIPPLYQGCSREKAIQEAIDLQEKGLVKINWLIRGSDIKSLVFHLEDRDQFYQLYRENVKPRFIPKQQRLWKYQEFLRKEMSVVQKPWIRSYYVDLLEKSEKNNGNWEPDERLKQVRQYAKCFRELDKLQKLTYAKVFASNSLEGSKNFTKEMKQYVIRQARKTNPDRTKLLDDIEVLEEIVLIRDCYQSMYIKGELLLYFVDDRGRTAAVNTKIWKYGTILEGESLLHAELEPEQPQIQKVIIFENKMNFVMAPYEEGTLYLFVGGYPGPKVCRILHKLNKISKKRQRHIDVYHSGDLDYGGIRIFQYERNQVFPDLKPLQMDADTYLQHQQYSYPIREETKRKLKKLEDGNEQIKQLLELIIQEGRGIEQESFIEVDLC

SEQ ID NO: 31061 - protein, 645 aa, Burkholderia pseudomallei 305
MRRPICWRHACVASEKTAGDMGARSSRKSSTVAPTPGVLAFWMRCKYSSGALPANFGLNASVPVIGACGVTRVTTSPNSLINADSNRLAWTAWMPKTSRTRALSSWPSQRNKISISRRRCSAGVSGVRMNVILCDNLSCKIIPQNCTEALPEGITLNSSSLSPAPRAGASNTPVFFDAERQRFFRPLNSSRRELVAACLRALYDRLHGPAADYAHHLTRDVLRELLLPVVRQYQTTLADDGSDDEFSAVDASDPQLLVAMVIRALVADGWLEQFADRTGLVAAFRFSRPGKLFSEALWALDRPSRSRQRNMRGCRNALEAALSERGDAHDLVDAYEYAEKVIEDLADGIDYFQELVRHLMQAASAHTQWNEFVDFLDRFQRDYSKQLTADNATLNRQAIRQKLEKLRAVPEAKFNRMDAQLRDIAHWMAKEYTGSSLYDWLLGRIEDIVDAACESKQPGFLKAMETYLKRVNGLALQSMMLRSGQTRHAYLAAVQKVAESPKLEQDRLLKLVGQFLAPAEVRVLDPASFKLKTATQRRRAVTVSIRPRPTREERLAAAMARAEAEVFSIPNEDVAQGLRADLRLFQHPIRVSAMPTASARDVIRAMQAVEAARSAIGGDLIVKKLPTRLENEFYGANDYEIDLKK

SEQ ID NO: 31062 - protein, 223 aa, Burkholderia pseudomallei 305; identical to SEQ ID NO: 30855

SEQ ID NO: 31063 - protein, 1210 aa, Burkholderia pseudomallei 305
MKLDRIVLVNWGQLRPGDYDLGNMTLLTGPTGAGKSTMLDGLQTIMTAAYQGIVAYNPGQEEVQQGQRSGKSKRTLESFVVGAEYSRFSRPHGAHGYMAAVFRPGPDEDSAKTFTALVAASAQVDGIGERRVPKLERLELVIVDDAALTVDDFLKDAEQSEWVAVEEIVKRLKARYSKVVTYDGHKRDYLCALYGRFRGRISITWDEAQNAAKAWCQSIAYKKIGSVHDLVRDDILEYDGKQLQESITRISDLMRQVTNLKQEGQRLEATVGRLRGLKTAIAQTTSAFEEQVQYDLLLAKMLVAADDERIAQEQKRINDDSALVTRCEQKVKAEERLKAGVDRSRIDIAAKLSGIAANAEKERLDQQLELANSAARHKLAELNTGLQEAAQIVNAATGLLRKPIPEQFPKLKASVDAVGRVTASTDVARLDGLLGAVLDASSDAQLNVEKLFRLTPAFAGVEEGLAALHSYLVGTEDSVLMAVASETSELTQRVEATRKARKELADRKELLASGASDYNRDTRMALPRIRECLPEAGVQVLCDLVEPVSDEWQEAIEGYLDNARFNLIVKPEWEARTIDLLHSWGSRCKVIQGKRCLQRADAGRVPSDSIIHELRTDHPIARAYLIEQYGAVVKVRDSEQLRDTARGLTKDGKGSGSRTMFVGERRDLVLGRKAREQALRATIEKLDAADRGIREFEQLQDTLSSVKRLLGNLREPVFDAMPLGQAAGEIDSTRRSLVQLDLTEVEQLRAERAKLELLIAGHDAEITAVNKEITLASQRITDAQGAIERINGGRDARFREREDQIRRLGQMCETNSEKTYTVIAEEVEGLLKSRRFDVHSVQVRLNTLRAQPDKLLGDVREMLAEYNANARQEERFQSALPHLHDATMFDPYYGPLIALGRAVGALHSELEGIGLYNNRAKVEEAERSFHDVFTKQFCVEIKSKVDDGVRLLRQLNMELERLKFGTDRFSIDWSKWEPEFQEYYSFFSAVTDLADSVETVDLFGETELTPKHVEVRDRLVKLLLDSDQERAGRELLRIADYRNYRRYEIWNDSDSGGRIALSTWGTGSGGQLETPAYIVRAAVVTNRLKFFEKGPSLKMLVSDESFSTMDEPRARAVLQYLRESLDIQVISAMPTRGAGGLRPEFDREYSYSRVPVDANGELDFILEYDERIFKKDKMRELWEKQRAAARAQAELAFGAAEAAQQAEALK

SEQ ID NO: 31064 - protein, 510 aa, Bifidobacterium dentium ATCC 27678
MEGESPLADVRREMERLRPVYETGVLRLLLRGNSMLYVALLRSSFDPLTGELPRDVLEERISRSLSRLAETGDYTVKDDQTVRQAAHAILLELSREGDDDYAWLANSLDVASHRYLYRLTARAHRAIEALHRLEDTTQALSGAQANSIIMEIEHARMQLTADPRERIKLLRKDIEERQKEIDELERNETIERLTSEQVGDIINVIHNTLRGVPIDLRELALAERDNGDALRRRMQSGAMSVEDILTAYHDEYRKSFRESDSGRRFEDAFQVIVTDEGRQEIDDAVRDIAKNPYLDGEPGALLGQVRAELERIYSGIEDVRRQTRASDEAISRLVRQQTDTRYRTMLATLNQLFAKTNAEAKASPNATDRPYHTDTGLSQIAVLPTKPAKTMVRNATAALNDSAPTVGLPDLKAMIEVCGPRLRHMVDLIHRNPVMSHDGTRVDFAASFNRLPASERRESEIIGFLSALRTENDMACATWNCVSLDGTPRTWRTRPILATAQTLDDIIREG

SEQ ID NO: 31065 - protein, 235 aa, Bifidobacterium dentium ATCC 27678; identical to SEQ ID NO: 30735

SEQ ID NO: 31066 - protein, 1169 aa, Bifidobacterium dentium ATCC 27678; identical to SEQ ID NO: 30736

SEQ ID NO: 31067 - protein, 524 aa, Bifidobacterium animalis subsp. lactis HN019; identical to SEQ ID NO: 30666

SEQ ID NO: 31068 - protein, 269 aa, Bifidobacterium animalis subsp. lactis HN019; identical to SEQ ID NO: 30689

SEQ ID NO: 31069 - protein, 1165 aa, Bifidobacterium animalis subsp. lactis HN019; identical to SEQ ID NO: 30668

SEQ ID NO: 31070 - protein, 406 aa, Bifidobacterium animalis subsp. lactis HN019; identical to SEQ ID NO: 30669

SEQ ID NO: 31071 - protein, 503 aa, Dethiosulfovibrio peptidovorans DSM 11002
MQLECSYIHSLTYRNFWKGILMDLDYRTLEYLRQNHPAWRLLRAQNAPLIASFLYRVFVAPNIRVISQSDLAEMLEDDLFVLRQNAGTDRFPGTALGYLNDWSDNDKGWLRKFYPSGTDEPHFDLTPATEKALVWLESLIERVFVGTESRLLTLFELLRQMSEGTEADPDIRVAELRKRRDEIDDEIGRVLSGEVSLLDDTALKDRFQQFVQIARALLSDFREVEHNFRSLDRRVRERIALWDGSKGALLEEIMGERDAISSSDQGRSFQAFWDFLMSQSRQEELTSYLDHVLSLDPIAEMEPEPRLRRVHYDWLEAGEHAQRTVARLSEQLRRFLDDQAWLENRRIMDILHSVESHAVALRDEHPSGGFTYMDETSPTVDLPMEKPLYKAPFKPLLDQVILEEGHSDLDMDELYSQVIIDRDALSRNIRRELQTRGQISLGEVIALNPLRQGLTELVAYLDLSSLWPYVVVDEEEKEKVCWRNEDGAFRSAIMPRIILARSR

SEQ ID NO: 31072 - protein, 194 aa, Dethiosulfovibrio peptidovorans DSM 11002
MNCAETESLSSVVIPLLKGVVYRDEKPKIWEDLLRLQGFVRDYVKVLGLELNLDESEGYAFLGSVEEEEGADRPRLVARRQLSYPVSLVLALLRKKLAEFDAGGGDVRLILSRDDVVEMVRIFFPEGSDDVRLIDKMDSTLNRIADMGFIRRLKGEEEMIEVRRIIKAFVDAQWLSEFDRRLDEYRQRLVEDDE

SEQ ID NO: 31073 - protein, 1122 aa, Dethiosulfovibrio peptidovorans DSM 11002
MSEPLNLEFMADDSLAGFRLQRFEAFNWGTFDGKVWTLRLDGKNCLLTGGNGSGKSTLVDGVTTLLVPSHRVAYNKAAGGDARERTLRSYVRGYFKSERQESLGSVKPVALRDDKSYSVILGVFRNSGYEKTVTLAQVFWTKDPSAQPARLYVACEEDLSILGDFSGFGKDISDLKKRLRRAGVTTFDSFPNYGGWFKRRFGIKDDQALDLFHQTVSLKSVGNLTDFVRSHMIEPFDVVSRIDALIGHFESLNSAHEAVLKAKRQLDQLEPLVDDWKRHGKLADSVRELRECREALQPWFASLKVDLLERRLATLRSELNRHGAAVVDLEERRRFQKKQEIELRRSIAENGGDRLERIGQEIARDREEMERRKIRESRYRELIEVLEESPATDMEAFVRQRQGLSELREEYDRTDVETQNELNEFGVALSRERDEFRRLTSEIDGLKARRSNIDERQIAIRKTICDALSLSEEDMPFVGELVQVREDQRDWEGAAERLLRNFGLSLLVPDRHYASVEEFVDRTSLKGRLVYFHVRDGGSSGVTSLKPDSLVHKLQVKPDSPFYDWLEREFSRRFNLICCTSSERFRREISAITRSGQIKTPGGRHEKDDRFDLNDRSRYVLGWSNREKIAALEDKARARSRRMSEFSAEMKVLSDRREVLKVRLQALSGLFEYRDFREIDWRSVSLSISKLEDERKVLEASSDRLRVLSSQLVTLEAEISKIEDLLKDKYDKKSRTEERITSVGESLEAVHQIMEQADEDLVRRFPSLERMRDDAIGNKPITLDSCIAREQEMRAWLQAKIDGEDGKIARLREKIVKAMTEYRREWPLDTKDVDADVGSGGDFSSMLDSLRSDDLPRFEERFKELLNENTIREVANFQSQLSMQRETIKERIDLINGSLFQIDYDQGRYIRLEAQMTQDADIRDFQGELRACTEGALTGSEESQYSESKFLQVKRIIERFQGRENYSDMDRRWTSKVTDVRNWFVFAASERWRQDDSEYEHYADSGGKSGGQKEKLAYTVLAASLAYQFGLEWGAVRSKSFRFVVIDEAFGRGSDESARFGLELFKKLNLQLLVVTPLQKIHVIEPFVSAVGFVHCEDGKRSVLRNLSIQEYHDGLDDSGRA

SEQ ID NO: 31074 - protein, 393 aa, Dethiosulfovibrio peptidovorans DSM 11002
MAWTTPEELRSYVQRLWDRGVILGATVVGESLFPRRLPLKKPTSGELSGSFDSVRRWISLLSEGEGDYRVEWRTVNHRILGENRVPFCVWVDSLEDALSMIGKKRAFRDFSRLVDSTEERCPQLISWIARRPLQALALYKDWSLLLDLVEWMIDHPRPSIYVRQVDLPGVHSKFIEGHRSVLSELFDLVLSRGVIDQTATGASGFCHRYGFREKPRMVRFRVLDSALSLPYAGPDQDVTLTKEAFARLDLDVSKVFITENEVNFLAFPRVPGGMVIFGAGYGFDNLSSAVWLRNRQVFYWGDLDTHGFAILNQFRSVFPRASSFLMDQETLLRHRAFWGLETRPEICDLPRLTEEENALYRRLVENEWGDRIRLEQEHIGFGFLIDGLRRLGS

SEQ ID NO: 31075 - protein, 472 aa, Chthoniobacter flavus Ellin428
MLGSRLFTELNARFFRILTGPNARLYIDALDAVEREMPSRGDALEYAETLAIIDGVLENRQLEPEEDPEPADPAQPSSIIYRRLLAAGWLEEEKHSDYRRLVFLDPAAQTLLEAFRTIISQSVASFTGRLRLVCDRLAELRAPHSRMELIWEELKACLAQTRSGLRELRLIRKQVERYAQRQLKAVTISEALDLIYNEFSQLITQRCYRELIHARLPERLREAMAGLAELEQDDLALQRLREDFVRTQPDVDAGRAMTEIVNTIEALSFALGDVEPTADRVDTSTADFARRSRSRIRYIQDVGSARRQQVKTIFDYVREHLPTTRLADLEEKIALPALAIADTGLLGVASLRARREVAPRVRRRPVVAELTEADREESLREMQSNLRNALRLDRANHFVERHDLASGQRIRSSEMKIQSEDDILDVISCLVFAPAGSTNYRLTTDRQADPSAPVAFDAKAGFEIERFEIERK

SEQ ID NO: 31076 - protein, 208 aa, Chthoniobacter flavus Ellin428
MIEELPSAPLLGKFLPELSDSDREQLRATVSELFSRQAILRDLPGDRELYDWGRTHFTWVREVCSLIGFDVVLNEDDQMLYALPCERTTLRRLRAEWTLVLLSLWYDFDVQLRAEGAPVIFTVETFNESLKTKLGDRQPTISALREILAFFASRKLVRMEYADEFHRSRIEVLPTIRFVLPFGEIEKVATMLSELMHGPTEEAEAEHG

SEQ ID NO: 31077 - protein, 1116 aa, Chthoniobacter flavus Ellin428
MASRCIRLTRAHAIQWFGYCDTFDVHGNILIAGRTGAGKSVLMDLLQLVIIGDQRARYNAASDGRGQTSGRDKKSYCLCDTQEDVNGVPQFAREGGITYIALEFTWPDGETCETWGMRIEYADTETQTPEEEFFRIPARLERSDFVTADGFALELDGFRLLLKKHDGETYRNVTEYRKRLADHLNFHRETVDFLMPSAMSFAFLPKFDEFCRRYILQAEDIKTEPVRQSYASYLSITADLAKLRDKRDRLERVVSTQQELEDATRDSDVYRFLEAEFRREAARAENTELEKKLAEIDRRQARQREEYDSVIETFATKTQDLESLKNLFRDEGGTLLLELADRIRAATAKIEQLQRIGKTVEEEKARRLRLATAFQKEAAAFLAERNSGKTAELEHALTILREARPDDLKSALHQLALAIRGVAERLRTSIKGESETYQKTKGELQGLQEQLRNLDFNRIVPSPLLDELNKRLPRRGRENPARQLRELCEVNDEDWRPAVELAFARKFAIVVHRDDYGEALRIYKDFPQDSERESLVDPERALARQSTARENSLARKLECADPVARAVVDELFGNVICVDGLDDLRKHPDAIMRDGFRLRGLFAERPRRYDQRPCIGSKGLDRLKAHLSARADECSARLRHIEPLLAREAKLESSISEHRLDSENIEADLAAAKQLGELETERARLIQRNTDATTPALEERMETITRLDNELKVLDRRRLDLHGRLQSSERGDAETKLEDARGTRDRAEKTYDAVVGEVGEKLVIARCDELRTQLRNDCGADSIAAARAGQRRSELDARLPGIADRLVLLRQGLVDQHPELRAEPDFDPQTKWNPSYQNLLERIRVKDMEEREQQAREEEQRWQDLFRTTVAARLASAIRDVRKTIGDLNLQLRKPIGDSQYHIKVDDNPAREFQEYRRVLDACALTLDGESIFASLEADTRNAVEHVFRALVNEPEGKLAQAFLDYRSYFRYDMEVSDPRRPELPPKSLNRHADKFSGGEKQTPFYISILACYLRAYKRHLPQRYTEPSLGLVPIDEAFSKMSGERITDAIKALRDVDLQGILSMSSGNWPYAISECDQVLAVHQRESFANGRKQIRNIAALLNRQQALERSKDWT

SEQ ID NO: 31078 - protein, 407 aa, Chthoniobacter flavus Ellin428
MSPAVRLVARFYRERRIGRRASAVRDLILHFNNLLRDAGCLHGPLRTEAEQEFRDLERRGLVKLECASRDFSAILHVRVPPASEASFFAHVGEVAPNAERHQLADLFEKAAESPVPEELAEGWRVFCQECAQIARSGEGLAPCFDRRSLEQTAQILDALPRLLAWKSESFLRFASAALFGNSKTLEEKLQSKIEACLHRISAGRLQTLADLGIRENPRGVILHGPLQITLPDRTLDLGGLRLPVQISAADLQAANLRTTATRCVTVENAAMLHELAKFQSGILLASSGSKGGFAHSAILDFLRALPGTLEFFHFGDSDPAGFDILRHLRERTQLSITALHMSYRPSAVPVLLSKEDVKILLRALDSPYLGEDEKNTLREMERLNDKGAFEQESLGLPVSRWPFYVRG

SEQ ID NO: 31079 - protein, 502 aa, Bifidobacterium gallicum DSM 20093 = LMG 11596
MADAVNEWERLAPTYNEGVLTLLRRDQSQMYIALLRYAFQPLGAELYKERLIMLFNEGLRQLTQANLIDQDTRDNPASPLHNGETLLVELSKEERGRYLWIASILDQHTQRYKYTITPRCRRAMDALEQLEDSTTMLSGAQTNSIIDVVERVRRKLTTDPAERIQLLENDITQRQHQIDLLKAGLDTETLTPRQVGDEIGVILRMLRGIPRELAELAMTEQHNASDIRLRQQDHNLDVDDILNLYHRDYRMAFEESEQGQRFHEAFQILFDEGGATQLADSIAAIRASNLVTDDNARLLNTVSMELERVESGILNVQDKRRQSDIAVQQLVNQVSNTVYRTMSTALTTLFTTAGHVTGPASASPFITQSAEGSYLPVPERALATVVNVDVPELGVSGDVEPFDVGDMIRRGGPQVRRIATLILEQPVLQDDGMIDLAASFNTLGAQDRRACEIVGLLTLDGRQEPGTSLWRCVGDDGTPVIWRTPSWIISADHLMAIVKDMT

SEQ ID NO: 31080 - protein, 262 aa, Bifidobacterium gallicum DSM 20093 = LMG 11596
MNDTIDTSFDENDTNPEDIANPNALFPEDCSVMSLDARRAAIALKTERYITGELVSMVNDHYEEVVTSLNNDLLELHYSDTYDVMYATPVSQQEGLPRSVKKRSRLNAPMMQLLCIARDRVAECEAQRIIPEEWWISRSLIKTALTTGAGYLASRIDEAGIDAEVDSLIRSAINYGYFQSLEDDPDTYLVQRIVPAIMTLDQVRQWAAQANQPPMDTAPDISTVAPRATMNDVITDEPTTPGMEVTAVTTQYTMDDLFEEGQ

SEQ ID NO: 31081 - protein, 1155 aa, Bifidobacterium gallicum DSM 20093 = LMG 11596
MRDDTTAIIANRWMLHQRQLVNWGSYDGYHTFEPSCDPTMPVTLLTGASESGKSTLLDAQTSLFYPTGIPFNKASNSGRSERSDYTYIRGLIAKGADGNATYLRGTGSTGMPMPVWSAIVDTYINHTDGSTISCAKFMTLAAGADSSSIHKWFLVSDEPIDPRLMDRYRNEPFNKSQLRATYPNAQIYTTQQSFQEVMWRRLGVNEHACRMLYRMQSAQTPNQLDDIFKQGVLDVPQALQYAKDAVEDYERYTEIFNELKSKQQRLNQVQAILSQYETYEVSRQRTRQYLPIDPQTSEGESVILAWINTSLAHHVRQSIPQLVTEREHNNRILASVQEDAAKTEERIKEIQAQLDKHGGTQLPRLEEQRRHAVSDERRARSHVNELRPLLEPLDLTMPDNQEAWETLHDEASDFLNHEHERRMELDDATMNATLSVRETQQVRDQIKAKITQTQQQGVRIAADNERVAARDALAQAAGLSAQDLPYVAELMDVRKDEEQWRDAMNVVYAPLSQIILIDRRHEQGFAKAVSEHLDAHAIMRRNWRFVDLDQHYDDAPNESMLSEKLRFNDTSPFAAWVRHAVQQPQYDAVCVEHIDDSITTRQIQTDGQFKEGTRGAYGSKNIADLIGFVDPEYLAQLDTQYRAAQLRYNEAEKARSAAKEALKTFENQHDLYRDVTKLTWNEVDVRSAVRTIKDLEERITRITSDPDIQQLTEQLERCQQDKRDIDQRVAELTNQSNHQQRLIELEQHWLKNVPESAVGKTHVTPTAQRELAVLDPHAIELMRQTIDNQFGAANTTDSERAAIIVGSTKTGDTKVPDDDDIARFRDMILGKISQAAMAKLKECRTLTDEQATVVEQSMSAYVANHADVVGPLEPSVNDIEGYRNERRQLQTQIAPTALDEQYRLCLGRIQDSLTQINAALRSDTRKITDTLDNINTMFEKLPYGPKSGRMRIQVTIKPPSHTFKNALNDAIDLMRDWSLQGAHTRSQDEATFQELQPIITMLTTLLGKVRNQPGVEQYGAFDLDPRCRTAFAVDVDNPDGTKEHLNTTGGKSGGALQELTSFVYGAALIYLLGGDVDGHPGYTTIFLDEALIKADGNYTVRALKVLPMLGFQIIVSAPESKTSEIMRLATKAVVAVKDPKQERTTLRRAERENMP

SEQ ID NO: 31082 - protein, 388 aa, Bifidobacterium gallicum DSM 20093 = LMG 11596
MRSEVTKRIGGRSVSLTGAIIIPDQEAALRVADVAIRKQYAQGMTRIRQLHDQLAVSDQTARRVIHLMRTESDIDFLLLIQATQCVSNVLKEMGYRLDSGFLDIGCEDCASTTTVPRCAPHVQCVTDEQGKTSRVIHLPWSARELPLAGFSAKWLGSQSSVRRRALTALLGLDGIQFVERPGELRLRYLANEYELLISKPWTPDTDHQVDMVIIVENKDTYQHMPNMPQFGRGVVVFGQGRVAQKLVSQLLPWITQVPVVYWGDMDADGLEILDGLRGSGVCAYSVLMDENAYAEYADFATALDAASRPIVLHAPKQTPSLTPDERDLYVALSEGGSHSEAPRIEQERIPLDVACRAIAAIMRNMQKENGMRPDEDADCCVDDQTGDR

SEQ ID NO: 31083 - protein, 498 aa, Bifidobacterium pseudocatenulatum
  DSM 20438 = JCM 1200 = LMG 10505
MERLRPVYETGVLRLLLRNNSMLYVALLRSTFDPLTGELPREIVEERFARSLNRLIETGDYTLKDGQTAREAAHSVLLDLAREGEGDYAWLANSMDVASHRYLYRLTARAHRAIEALDRLEDTTKALSGAQANSIIMEIEHARMQLTADPRERIRLLKRDIEERQKEIDELEHSEALEKLTSEQVGDIIGVIHNTLRGVPIDLRELALSERDNGDALRRRMQAGAMSVESILTAYHDEYRRAFRESDSGRRFEDAFQVIVTDEGRREIDDAVRDIARNPYLDGEPSVLLNQVRSELKRIYEGIEDVRRQIRTSDEAVSRLVRQQTDTSYRTMLAKLNQLFAKTSAEAKAHPNDQSRPYHTDAGQAKFPTLPSRPARSMARAASSSLNDAPAATIEAPDLKNMVEICGPRLTRMIRLIRSNPVTTSDGMFVDLAASFNQLPKAERRESELVGFLSALRTQDDSSYVTWRCISIDGSERVWRTKPILITETTLDDIIEER

SEQ ID NO: 31084 - protein, 260 aa, Bifidobacterium pseudocatenulatum
  DSM 20438 = JCM 1200 = LMG 10505
MTDYIEANIEETILTEGEPVLEEAGSQQASTALFNGDTGDMPVEARMAAIALKRERYIDGSLYDLACENREVVERSLNNDMLRLVDNTKYRIMYASPVTDSETCIRSLKTRMSLTREEAATLAALRIKALEYENQNAEPCDWLISFDDIRALLATGAGFLTASNDEEGTAKKITSIISRMRTYGYLAPIEDDDMYVLTPLVPMVLDRGLADQWLGSETTDENAFADGRTNAGPDDRPMEDIEQDAFDFNTDDNRFDEEEH

SEQ ID NO: 31085 - protein, 1183 aa, Bifidobacterium pseudocatenulatum
  DSM 20438 = JCM 1200 = LMG 10505
MADGMKIVSDKWMLQSRQIVNWGSYGGWHEFRPSMDETMPVTLLAGASESGKSTLVDAQISLLYPSGTPYNKASNSGRSERNDYTYLRGMIGVSDSENGETPIFLRGKDADGTPQNIWGAIVDTYVNKTDGGLLSCGKFLYLNAGDGQDGLRRRYITWNRTIDPRLMDQYRNTPFTRSMFEKTYPECTTHTNAAAFHASIWQDMGLSADACRLLHKIQSADAPSKLDDIFKQGVLDIPESIRLAHETVDDYNRFNENFHSMEDKMARVAILQNIQTRYGEYAKQTTERREYEPINPDSEHGNATLSAWARSRMASEVRAGLPAAQRKVKESQEAIDRAMQRVGELNTRIDAVKERIQGIDGGSLQQLGKDLQRVRQDIDEASRQRHAIAERFEQVEGRLPDSEQTWDAKRAMLAETLDTYEERLKDANARFQQLVGERHDRQRDRDSLRRDYQRKLTHRTRISDDMDDARTLIMRATGLDASELPYVAELMDVNEQDEQWRLAMNVTYAPIAQTILVDKRHEQGFAAKISAIDPKLMTRRTWRFIDTGMQYESSASEGWMSSKLQYREDSPFAGWLKNQTTSPRFDARCVHAIDDMNHDERQVQADGQIKSGDRGFHGSKGLHQVIGFMNEQYLAELKNQLDKAEQALQNADRRSEQMSNAISLLQDEHELARIVADMPWSKIDVNGLREQETRIRRQIERIENDPELGQLQTELKQLNQQATAENRNQYQAEDDLDKAQHAVQAEQAWLDAYGNDDFDDATLSSMVSNLLADAYENCFGASVRAQDRPKLIAGLFDHESETPFHARALRNIARIARTRIQEIDARSNQLRADTERIMDDYLNNHSTDDNTVMASVEDYRYFLDELDELNMLVTRAATDEEYANSVKKLYMSFQQLNRALRTDEENIKEQLNRINSMLKGQQFGPQGGRLSLDVTFSPIDRQFETTLSRILSKTGRLDAQRKRQSHGNTQSIQQLRNIREQTAQRTRQNTRHQRHQSIRRTQPRPTRTQLILRNRAPRQRPRRTHQLHRRKIRRSPPRTHLIRLRRGPHLPPRRRPHRTPHLHHALPRRSTHQSRRPLHQTRARRTTPTRLPNHRLRPGKQNRGNPQRRQQSIRRIQRPIHRQLIPTGTRQRNHHTGRNTAHHRTRETNNGGITHGNGQKHHQQRHPQPTQRIRHRLSHQAHV

SEQ ID NO: 31086 - protein, 373 aa, Bifidobacterium pseudocatenulatum
  DSM 20438 = JCM 1200 = LMG 10505
MYDANTSWPLRKTIRLPKQAELEAHYTHIRAQDEAIRNWAQQHHCETSEKTKIISNGIVRQTSQLIDSVTIPDLNTALNITTPQTRKLYQREHQRAHTITNQFNLDSNTSINIAKILKNHDDTDFNLVIQAAHYFANHNTENMTPRMVPIPGFSAKWLGKTTSNRCKAICKLLKREQLALNDRHGEIRLRLLDTQHHNQPDLIVTQPWTDGAPHDITHIIIVENKDTYQAIPTTEHAICIFGSGHAATRIKTLLPWITTTPHIIYWGDIDADGLEILSELRQTGITCDSILMDSTAYKTYEPYGTKLDTKKQPLKTRDPKPTPGLTQHERNLYEQLCTGKNTTYLRIEQERIPINDAMTILHNQHQWNTTHHK

SEQ ID NO: 31087 - protein, 498 aa, Bifidobacterium catenulatum DSM 16992 = JCM 1194 = LMG 11043
MERLRPVYETGVLRLLLRGNSMLYVALLRSTFDPLTGELPREIVEERFSRSLTRLAETGDYTPKEGQTSAEAAHTILQQLTKEGEGDYAWLANSLDVAAHRYLYRLTARAHRAIEALDRLEDTTKALSGAQANSIIMEIEHARMQLTADPRERIRLLERDIEERQKQIDELKHSDTLDKLTSQQVGDIIGVIHNTLRGVPIDLRELALEERDNGDNLRRSMQSGSISVEQALGTYHDEYHRSFHESDSGRRFEDAFQVIVTDEGRREIDEAVRDIAQNPYLEGEPGILLAQVRAELKRIYEGIEDVRRQIHISDEAVSRLVRQQTDTHYRTMLDKLHRLFVRASDDAKTYPGSDERPYRTDTGTAQFQALPSRPAKSMARAATAGLDDAPSTNVDAPDLKAMVEMCGPRLTHMIGLIRRDPVKTADGRFVDFAASFNRLPREERRESELIGFLSALRTQDGPATVAWHCVSIDGGERVWRTRPIFTTEAALDEIIEEG

SEQ ID NO: 31088 - protein, 281 aa, Bifidobacterium catenulatum DSM 16992 = JCM 1194 = LMG 11043
MSMTDNTDGFDTGIGIEEETGPESGMPSEGPAMTRDRPALFDGDTGDMPLEARMAAIALKRERYIDGSLYDRACQYREAVERSLNNDMLRLVDNTKYRIMYASPVTDAETNIRSLKTRVSLTREEAATLAALRIKVLEYENQKTKPGDWLISFDDIRALLATGAGFLTASNDEEGTAKKITSVISRMRTYGYLAETGDENMYVLTPLVPMVLDQKLADRWLGSDDTDGDGMKDADGDGYDDSSIGADGGDTSDSTGTVSSGVEQDAFDFDSADDAFDGGEH

SEQ ID NO: 31089 - protein, 1152 aa, Bifidobacterium catenulatum DSM 16992 = JCM 1194 = LMG 11043
MEDGMKIVSDRWTLQSRQIVNWGSYGGYHVFRPSMDDAMPVTLLAGASESGKSTLVDAQISLFYPSGTPYNKASNSGRSERNDYTYLRGMIGISDGENGETPIFLRGRDADGTPQNIWGAIVDTYANRSDGGLLSCAKFLYLTAGDGPDGLRRQYVTWNQTIDPRLMDRHRDTSFTRGLMEQTYPGCTTHVNAQAFHASIWQDMGLSAEACRLLHKIQSADAPSKLDDIFKQGVLDVPESIRLARETVDDYNRFSENFHSMEDKMERVAILQDIQARYGEYAKQASERREYTPIDPDREQGETTLAAWTWSRMASEVRAGLPSAQRKAKESQDAIDRSQQRIDELDTQIEAVKERMNGIDGGSLQQLGKDFERARQDADEARRQRHAIAERFERVEGRLPADEQTWNAKRAALALSLDTYDKRLEDARSEYQRMVVERHARQGERDLLRQDYRRKIEHRTRISDDMDHARTLIARATGLDETELPYVAELMDVDEGDEQWRLAMDVTYAPIAQTILVDKRHEQGFAAKVSAIDPTRMTRRAWRFVDTDAQYDSACNEGWISSKLRYKEDSPFVGWLKEQTASQRFDARCVEAIDDMDRAERQVQVDGQIKSGDRGFYGVKGLRQVIGFVNERYLAELERQLDGAERALEDADRRGRQMANAMTLLQDEHELALTVADLPWGKIDVDGLETKAERIRLQIERIESDPELAQLQDELKQLLRQKDDEGKTRYRAEAELENAQHAVQAEQAWLGMHGDSDFDDAALSDMVSNLLADTYETCFDTSRPQERPQRIAGGFDREGTAPFDVRVLRRIGNTVRARLQQIDERAVQLRADTERAMGDYLKHHSTEGDTVMASVEDYPYFLDELKNLNMLVTRAATDEEYANSVEKLYMSFQQLNRAFNTDEENVREQLDRINGMLKGQQFGPRGGRLSLHVDFHPIDRQFKSSLGRIMSKLDDWTRNARSNPMETRKAFAGCETFIGRLQAELGQIRDTNGIKEYGARNLDPRVRSSFYAIVHHNDLPDERISSTGGKSGGALQELTSFVYGAALIYLLGGDLTGKPTYTTLFLDEALIKADGRYTKRALTVLPRLGFQIIVSAPESKTAEILSIADKAYVAYKDPATGNSYLQELDREPATQAETQDATVEQTQPATEA

SEQ ID NO: 31090 - protein, 411 aa, Bifidobacterium catenulatum DSM 16992 = JCM 1194 = LMG 11043
MAAARNTTGETDIRRKLDEYVDAHLTRHMYDTDESWPLRKTIRLPKQAELEQHYNQIRAQNETIRDWARQHHCETSEKTKIVSSGLIQQKSPLIDSVTIPDLDTALRIATKQTRERYLREHDRMSALAKEFGLEPENAMNVAKTLKDHDDTDFHLVIQAAHYFANHDCHTMTPRMAPIPGFSAKWLGAPNSQRRKAICQLTGQDNLTFQERPNELRLRLMDAEHHDQPDLIVTQPWVRSQPTDIEHAIIIENKDTYQAMPTVEHAICILGNGYAATSHITTLLPWLTTIPNIIYWGDMDANGLDILSKLRATGIPCTSILMDTTAYRTYEQYGTQFDAKNKPLTTQTPQPTPGLTTEERKLYETLCTGTDIQYLRIEQERIPIRDATTILHDQHHWPIDIPGNDIPNNNTK

SEQ ID NO: 31091 - protein, 475 aa, Marvinbryantia formatexigens DSM 14469
MPVFENISDKFFNPFCCRNRELYFACIQQLIDKSKEIPVLYETDARNCLIIYLQNSMYAIETENIGEEISSQRSSPENASVILRYFRSCGWITPKEIGRTGDNIASVSSYCRKLVDALHKIFDRDASGAITNHIFSMYEILKSSLEKDSARAIRPYSNICVPLVENECDLKNELLVLKDSIRTIMHAVMEIEDANGFGQFLMKDEMLDRFFNDYFFIKRSGLIPGYIAGIDRMLMRIKKSELYDRMAEEYMELKNVDPVTAREVVDRQFGELDSFINMEYEKEMSYIDKRINTYYNLYSTRMMMVLSNHTNLQQYLNRLLLQMRSMKEEEREKLLNGLSECFKLRSMGYVSRKSFERRRKAKPNTENAAIEREELSQEEKQRLTDELLKETPDRYSMETVRGYLDGLSFPENGLAVSEMAIHTRDDAMMAAASIIYSGSVGFPYEVEFGEGMTETEVARISNIRIKKKERRGQTV

SEQ ID NO: 31092 - protein, 216 aa, Marvinbryantia formatexigens DSM 14469
MSDINLQITVKEDNFILFKRCIRRLLESTFLLKEKEERLYAFLAKESNRQDVSDYLRMIGYDVLVDEKCELAMLTVNEADAETVGLKRANIVTFSGIQYHLLLALWETYLENLGYDESVFITRGDLIDKLKSFGLQLVSAELKAAFKLFKKYNLIDYDEEENGEDAKIRLYPSLQFGWDIPQFKAVADEYLHTEDEEEENENPPEAETENFGEDDE

SEQ ID NO: 31093 - protein, 1115 aa, Marvinbryantia formatexigens DSM 14469
MILLKKVRLINWYAFSNVTAPVGIFTLIAGKNGNGKSVMLDAIKYAAYGDTVFNKSSENRGSRTLSSYTRGLLDATAKTYMRPADKVPNVYSHIVLEYYDDVLEKSFLLGTILETGVSNNIQSYRYVMDRCTLEETEHLYEENKKKKPYDARRFQKKYGVTLLNKEAGIGKFTQMTGLKLTGSQTATYLRKLRGIMSYDPDAKIDQFIRESVLENRPVDFTKLIEAKENIERLNGTFTAIQMEIAELEEILKLLDGYDAQKNLLLIDDIKIVYKSIRELREEMERLRQDVRLSQSRKEEAEKLLETLSGREEEQQKRLREVESSLDQLDCMKLIRQEEEVFRALEKEKKLLMAEKKRLDSFQTQVNGMMHILMEKRTEVKKKHILASLTSGEYTAAEKEEAVLRLKEQITEAYEQAVGELSGLGVLKAEIEKKIQVQIEILEACRKNRNAYSQIPDYVKLKEEINKEFASRKIASEAKFACEYVIGLTDERWRNAVEAFLGRRRYTILVEPEYYDIADEVLNRSKNRYAHLFNTKLLMKKQVTPLDNSAARFLTIKNPVARKYFDYQLGHMRAVAIDEVKNYENAISAEGRVAVAMDGYFLRFDRIQYYYLGQETFKLNQQRAEKETEQLKAQKKELLERQEAQRAVKERLKMNLELFSGYQYDAYQAYQTAADKARGSEENLKKLKDAQKNNREFVEMNQLRGKLQDELGAIRRERTRQLDIKSQMTSQLQILESSLGSREEKLAEDEKQFEEYQITQYSAVQKATQAYDRYLANGEKGAGGLSAPLTRRRVREKIAEYEKDIAVQQGLYNGKRTEESWLPMGLEYRSVYEARKAKIWMDDLQEIRQKLEEQTRRYESIFKNEFVLTILRSCNKAMEDLKAINQELARLQFSAKYQFDVHFVKDMSDYARIIEYAKYLNEREQFGGDGGQMVLGMFSSYSSEEEQELENDMKNIINRIIAKNNVEAIERFADYRNYMTYEILITNQILNHAKLSRQTGYNSGAEVQIPYLLILLSALLMIYNEKVNSTRLIFIDEPFAKMDPGNVKVMLEFMRSQNLQVIFCAPDKTETIGNESEVILPVLRVSADNMQLGIIQFHDDKKYAGLKRHGSGGESI

SEQ ID NO: 31094 - protein, 420 aa, Marvinbryantia formatexigens DSM 14469
MAAAEKAFEDRCGEMMDYEGQLLKLLTEKYRKSKKDAGTNRIKRRTQIKPSQLYTKYCDNDGDFAIIEAIGEAVRACERRGFVTYEMKGFGYEIAAVYLNDDRITEVEQYLNDTCGYETKEAKLAYVRNLIEKYGQCSPAAAMECARMQEDLKQRRLPKNYAQKEDVLKALIFVENNKQELYVREASMLIYGSSKYFEENTMDTVCRLLRNYLKKPCGEGELPDEILEQYHIRKEAQRLCMKGNCTIYRKGQVLEVGALENGIEFAADEVPEIERVETGAQEFLTVENKTSYLRCPAGNMVVFYLGGYATRYQRDFIKKVWRDNPGLSWSHFGDIDAGGFFIHEHLCRITEIPFKMKYMSVGQLQDERFAACLQKLKPSDRRRLKTLQEKEAYKDTVEYMLKENVKLEQEIVSYYLEREN

SEQ ID NO: 31095 - protein, 471 aa, Roseburia inulinivorans DSM 16841
MDDVQAQQTNPLFGIIPKEFFTPLASPNRLVYWDCLCRLFQAMSAQLSFGIEREILVDELQFYFEQNQAAEFEEDDINGMDSRKKANEMLRLLEKYGWLEVETDKSYVQRVNFYDYAVKVMKTLLEISDGRKVEYQGYIYTIYSLVRTNTDHPAVVLQQIRDNTDMLITGLKNLNSNIKHYIDELTKHKTVAEIMNALFNDYITNIVDKAYHRLLTSDNVSKFRPEIIERLEANGHSSRYITKTSEELAAIREIPVGQAEELVYQTLHEIVEAFRNMDDILAEINWKNTQYQRAAVNRAKFLLAGTEDVRGQMKEILLYIGEQMEQSQLDLNGIYEIEYLDNLVRLFGSSFIDEKSFYSPIEGKKEFHPQELIEVMPDVELRQEKLRKMAEKMQRILSPERIERFVEEQLGDRAKIYASELPMETMDDFIRLIYVRLYGSRKKMRYRIEKAEGANKISGEFDFPDFAIIKR

SEQ ID NO: 31096 - protein, 204 aa, Roseburia inulinivorans DSM 16841
MDLLNGMLQKDQDEFRRICNKLINVCFICRQNQATRSDFYFIQKYKEKFEELLGVLGYRLEINEEYGVVQLTNALNTNRQNLKLYESVILLILRILFDEKKRELSVSDEVIVNLGDIQDKFLSLKIRDKMIDKTTMGNALRLFRRYQLIELLDSDLKNEESRVLIYNSILMAVRVEDIKSVYDKVDSYRKGKLKDEETDQTEAD

SEQ ID NO: 31097 - protein, 1082 aa, Roseburia inulinivorans DSM 16841
MKKLTRLKLINWHRFSDVTIDFGDSTLISGENGAGKSTLLDAIQFVVTCSTNHFNKAAHENGKRKLTGYIRCKTGRENHPYERTGEISAHVALEFYEESKEKYFVIGAVIDSATEGQETVVRYLMDNVMLEDEMFKIGNRPRTITEFRSFNNKNIKLFAKTNAEGKKMIKQRFGRIEDKFFQLIPKALAFKPIDDIKDFVYSYVLDEKEVNIDNLRENVRSYQELEKTLEGVKNRIEKLSEIECHHKAVVDCIQSDRMYEYFMAQSDLDLTKEQIGVLQDEIRRESYRLEQLNAKCSSMKKELENKEEVRTLLLAELNANSDFQTLEKQKKYLKELQEKEEIQYQEKKRLLESGKKAGQKVKRLLEIPDVDECMKQYDELLHRLKDTEDVVSAQELIDRAIAYKKHMSTKLQRKNLEIQSRLNEIAADLQETEQRISNLKQHRFSYPSAVELLMSRVEQELLKIGRTAKPRILCEMLEITDETWRNAVEGYLNTQRFYVLVEPEHFDIALGIYEKLRREKKAYGVGLINSGKLEEYDIAPAGSLATVVESKSIYAKRYVNMVLGKVHMCKRVDELKQYPVSITPNCMRYQNHVASAIRPEIYTTPFIGKNAFKVQYEQALQKKEDLNRQKIECKDRMTHMEATLQWLEWDDDTDVKYRITIVSELKRTGLEIEKCETEIRNLQQNTTMIEKQIRADEMRKECEELKSHISKSDRESGACELKISSAKDRLVECEDECIHKNELITDIAQKAENEIVLWKKEYEKQTGDKTLEQFRQNFDRRRKANNTTKENADKKMTSAMYDYKTAFDFGAAATLEAYPEYAAVQERLVNSELLNYEEKVRKAKLSAEEEFREQFLSKLQENMKQAQGEFKELNKALKDITFSNERYEFLYLPSKSYGKYYDMIMDDFNVVQGESIFSGLFHENHKEVIDELFSKLALDQDNGIKALDEFTDYRTYMDYDIKITHEDGSYSLYSKVCEEKSGGETQTPFYVTVAASFVQLYNNNIGGEAIGLVMFDEAFNNMDDERIGAVLEFMNRLPLQIVIAAPPDKIQYIGPKMQETLLVLTDDKVSFVEEYRYASGRK

SEQ ID NO: 31098 - protein, 408 aa, Roseburia inulinivorans DSM 16841
MHPVENKILNDLLDKYENSKLSRGENQRAIHIAFPFNKKTMPKYFDESSLEIETIHAAAEQMEREGLVAIAWKNQKPGYIIEKLVLCEDHVEEAYERLGRKPKREAEARTKQILEQFYQKTQGEITRSFLSRMITRLESEQSVKEYLDIMDHRKTEQLIDTLDKVEQNRKECYIREFSIEHFHDSKVFETLIPKICKIFREENEELTGFENEEILAEYQIYKTPGYVYMKGNVQIYSAGKQAADISAFPEGIAVAVGSEEDTPDICPDQTIDKVFTIENLTSFYRFKQEHSLVIYLGGYHNHSRRNLLMQIYQKLPDAQYYHFGDLDAGGFYILEHLKRKTGIPFQMFQMDIETLKKYEDYAKPLTENDKKRLMQLEKMELPDEERKLITYMLQKGIKLEQECISESQ

SEQ ID NO: 31099 - protein, 471 aa, Roseburia inulinivorans DSM 16841
MILKKKIPNDFYKLFRTKNREAYMQFVTAIYEENNEVYASLGLTQEECALIIENTIEKSKIVWQEEDDMEEGETPDALFPSDSPSGMLNHLIRWGWLKSDFDEKLNTCVISFPEYSQLYVELFKKLQSDDDSRERESMLSIYSALFTYHSDNEKNNDILKSALRTSKSLGQLLSNMQDGMRSYFDELSSQKHFIGIQQVLVEEINNSDSKKYAILTTTDSFYRYKEAVKELISEILNENDEKKAVLLKEKKSLEAGTLLQKRNEYRLQYCEDTSRIVMQLEREFDMIERKYNKLIEQKTVFAKRALARIHYILQEGVSEEDNIIKLINLLDRSEKKDEILVEMRERIRFSSQFKNITDNSFAGRRDRGDGAFAPVMLDEEIDAREQHMTDFVPKPLYTRNELQSFRRKNTVDGVFVATEETVQSVEDLEKLLFLWQEETEERLAEDTVSVDGEIRSEDGLTYSRLVIGQNQ

SEQ ID NO: 31100 - protein, 215 aa, Roseburia inulinivorans DSM 16841
MKEGIGKKMLQYMETVSQGEAENIRKTIQDLFRQTCILQVKCDPATLVQHDNPRYQVCLRHREFIADYLSVLDCELVHDPQEHIFRITGDGVMTERMSLMTTKLVILLKMIYRDKIMGEGLHATTTNLAEIREYGKNTNLITRRLTGQEWNDALVLMKTHQMIELPGAVANLEDFTPIYIYSTVNVFCSAMDINELVRTYQDEVEELLTEEEKEN

SEQ ID NO: 31101 - protein, 322 aa, Roseburia inulinivorans DSM 16841
MCLNNWGGINHKVLEFNEYVNLFSGKSGSGKSTVMDAIQVILYGSFSPSFLNKAADDAKNRRSVLSYLRGEQKDGSANRGNCDFCSVIALEIKDTGTHITTCVGIAFEVRRNDSEIKKFSYFSHSGKMPEPGYITEEGFCYSNQDIKKLVNERAVSKDNRGKGDVNRIYASKEAYLGTLYDVILGYIDPNRFITMEKSAIALKMTNGTGQFIRDYMFPKSTSDTIGTISEQLDAYRQIKEKIEDMRKRIELLTDVKETGQELVTLQTDMIRTESFIRCIDIEDLRAKIEAAEEDKKRLKKSRHSCSNRQTRSPKSAERSNRS

SEQ ID NO: 31102 - protein, 485 aa, Capnocytophaga gingivalis ATCC 33624
MESPTQQLIDILRTSPSVELLKSKNRVPIITFFIETFTEDHKVLAQEVLFQQLSDFIETQHLEEEESEATFEVLFDEKAKHYVRNWLSKGFLTNYQDEQGEVYYELSSHSVKVIDWLWSLKKEEYIGTESKFSSIFHQLKELVEFTNEDRQERLLLLERRRDALQEQIDKLKRGEEVQVYEEYQIVPRFNQLTQQAKELLSDFKEVEDNFKEITKEIYQKHSGEQTKDAILEFTFDALDQLKNSPQGKSFYAFFEFLVSRQLQEEWEVLIRQLYEALQEKDIPIKDYFLRGMRGHLYHLGRRVDKANDKMAEKLSRIIRENNATDNQATKHTIKEIKDFLISLSRKQQIPTVSFEIETDVDIQIPFDRRLTDQKKEQATYQERFENANTTLSDAVQLDKLFSDKIINKELIREHIRKVLQERGQVSLATLINANGGLKKGLTELIAYFAVATEGKYVINNEKMQDIIFDTEHQKRIQFPEIIISL

SEQ ID NO: 31103 - protein, 193 aa, Capnocytophaga gingivalis ATCC 33624
MKKLEEVEQPYSRAIVQLLRGPVDKETGLLWERILTYQTEIQDYIHTIGLELVVRKEEGFAFVRQLEDEQGNTMGLVRRQSIGFETSVVLVVLRQLLEDFDNNPTDFQSFEKIISHSELKEEVGLFFQEGYDKVKFLKDIDRYIGNAKDLGFLKVLNSKEDTRYQIHRIIKQKITLDILEDFKQKLSDYVGTI

SEQ ID NO: 31104 - protein, 1132 aa, Capnocytophaga gingivalis ATCC 33624
MWELFSTNSDTAGFRLQYMEVLNWGTFHKEIVRIAPQGNNSLLTGANASGKSTYIDALLTLLVPIHNKRFYNQSSGVEKRGDRTEESYVLGYYGNILKEGASSTTTQMLRDKRDTYSIILASFSSTTQQTVTLFQLRWFSGQDLKKSYGIAHRPLEIAKDFPKFDSRGDWKKLLEAKYNYDKSKRKQVEFFSGPKDYQSAMRSLFGMRSENAFSLFNQMVGVKVLDDLDDFISTHMLDKWDSEERYEELRTSFFTLTEANDNIEKAKLQVEMLTPICEHITILQQATEQSRELAQLQSESVYGFAQKYVSLATDEIAEQTAILEEVKQHNVALQDQDEALDTKRLDLEQDIRNDAVGKQIETLKKEKKENLLAKEERMRNAEQYNRIVASFELKSDPDEEIFKANKEEAQLLFKKIRSEEFLQEDNCRKLVNENEEVALQMEALRENIEILRRNKNNISGREAAIRDEILSAVGATKEEIPFIGELIKVKESEGAWEYAIEKVLHHTALHLVIPPKFYSKVNAYVNTHNLKGRVRYYKYEQVPPKIFQQPRQEQRLLLDKIEIKPKHPYFLWVEYLIENQHNFVCVEELSEFEQFAEMALTPKGLVKYRKGKHEKDDRETTAKRSNYVLGWDNKEKLSELSKELVCLQEIKKKKDTTLKELQLKREELRSKQIIIGDLNKQFAKFDTINWQVYALKIQELETAIEQLEQTNNRIKALQEQLKKVKEEQAALKITLKEVGKKELVIEQTIAQITEKKQQHQTILATNPEVDIALFVAKYRHLSELSYANIETHRQAFASALFKQIEENKQLISKKEMEITKAIAKFKNPSAAIIEKFKDWTADAYPLPEKIDLVLLTEYQHYLDKLKKDNLPKYEKKFQDYLHETTIHKMGSFATFFDSWAEEIRENIRQLNESLKEINFNTKPETYIQLVHFQRVSADVSEFKDLLRRARVNINEFSNQEEGRRLHFEQHIAPFIKRLENETWRKKVLDVRQWFSYKAEESFRETGIKAKTYERMGQLSGGEKAQLTYTILGSALAYQFGMLKDGMQGNSFRFIAIDEAFKAQDEERAYYLITLCRQLHLQLLVVTPSDNIHIVENDIAFVHFVSRAKNKTSHLINMPIEQFKAEREKYFQL

SEQ ID NO: 31105 - protein, 386 aa, Capnocytophaga gingivalis ATCC 33624
MITPEEIRKKTTQKYLPYLSDIAADTPFAPIEIRGDKTYAKNNFSDFAQQIESLNSQAKDRKGFGYTVDYKRTRTKYLGEQDIPVSIYFETEQDFLRFLSKEKEVAKFRENIALIISIFPQLTPWIQKYPKKVVQNETEWTDILKVCSYFKENPHPNCYIRELPIAVHTKFVEQHKGILQELLNILLADTLEVGATHFEQRFHLKDKEPLVRFRILDQDIADAYFQGIDDMAIPISLFNRLALPVERVWVVENKTSLYTTLAFPAMEKSIAIFGSGYGVAALKEASWLATKKLYYWGDIDAQGFEILSQFRTYFPSVESFLMDEATFEHFYEAYEGTPSSITVELRLTPEEKALYERVKTENLRLEQEKIPQDWLLQTLVLITTYL

SEQ ID NO: 31106 - protein, 489 aa, Xanthomonas fuscans subsp. aurantifolii str. ICPB 11122
MKHQARIAGYRQLREQPVWKLLAADHAPELIGLLQTVLMDGARRLPSAVLHERLQRQLDALRADELSRELPRTAQAYLAHWLAQGWLERRLPEGAAEEEYELSRAATQAIRFIVGLRESSSSATESRLSLVIQQLVQLAGQTEADPELRLAALRDERARIDAEIERVASGRVAALDGKRALERARDLIHLSDELAEDFHRVRDDFEQLNRQFRERIIDDEGARGDVLEQLFDGVDVIADSEAGRTFEAFWSLLNDTQQSSQLDQALDALLARGFARKLDRRERAFLRGLTGTLLERGGEVHTVMQHFARSLRGFVQSRGYLEQRRLNQLLKQAQGEALQLRDSLHATTATGYTQALSSSRLRSLSQWRLHDPRLTQVDGRVQAADAAEISLDSVGDLVAQSEIDVRSLRNDLHELLGQRPRLTIGDALQQRPAVQGLGSVIGYLSLGTRHGMVIEGQMETVQWEGSDGAVRRARIPLVWFTREKRNELV

SEQ ID NO: 31107 - protein, 208 aa, Xanthomonas fuscans subsp. aurantifolii str. ICPB 11122
MTQTSSAEPRGELFLGDTGTLPFDARRALCQLLAGPSIDAQRHGALWPALLRNEVAIRQVLCELFLELVLDREGGVAFTRQADTAELESPTLLRSAPLTFIESVLLLFLRQQLAEADTRGERAVVDEAQLVEALSVYEKNVSTDRAGFARRVMTAIGKMRDNQLLSRLRGSEERYEVSPVLKLLFSAEDVQALVVAYRELREGEVALD

SEQ ID NO: 31108 - protein, 1331 aa, Xanthomonas fuscans subsp. aurantifolii str. ICPB 11122
MNSQSNLSPAQPGASLFAETLAEQRAQQFRMRRLQVHNWGTFNGLTEVPIAEKGFLFVGRSGSGKSTLLDAMSALLTPPSIVDFNAAAREAERSGRDRSLVSYVRGAWADQQDSASGEIATQYLRKGATWTALVLEYANAHGQTVSLIRLFWIAGSGNAAADVRRHYMVAPRRLDVATELDGFDLDLRRLKARLGDDVAHFDGFAGYAERFRHALGIGNEMALRLLHKTQSAKNLGDLNAFLRGFMLDEPRTFEAADRLVEDFAELDGAHHAVVTARRQVETLSPAREHHAALMALRHSVGELRELQLGVDSYREQQRLALLDERLQELDNQDRGLAGEEGQRRESLDNHEQKLLGLEREQRAAGGEQIEELERERARVERERDERLRRRAQIEQACRQLGTALAAGASGFAAQIAHAQTVLDNGKHDASALDEAIAERMGARRDDERRFAEIRAELEALKKAPSSMPAPMQALRARLCEDTGIAEAALPFVGELVQVREDQIAWRGAIERVLHGFAQSLLVDERHYAQVSEWVNRTHIGTRLVYFRVRRNDELHSRRVDPGALPGKLQLREHAFTEWLRNELTRRFDYACVDNAAALRNADRAITREGQVKHPGDRYEKDDRHAVNDRKRWLLGHDNRDKLKVFEREAQTLAQRIASCDADVAALRKQREQDQERQLAAHTLVERDWDEIDVGPKLQRLSDIDEQLVQLREGNSGLRALGQAIDTARTLRDQAKRTYEDVRLERAQLARERVRLEQQQAACAGRAGTATLTPTQLQGLRERLAALTPLSLDNLEAHFRVVERGLAEQLADSQGRDSRLSAQLLECFRKYCQQWPEDSGDFTVSLASADDFLARLDRLESDGLPRHEHRFFDLLQTQSKNNLLALQRHTAEAHKGIKQRMDEVNASLEQVPFNRDTILTIEVGDRRLAEVQEFQQQLRAVLSHQQTEDRALAEAQFSTLRALVARLGAQEPEARRWREQVLDVRLHVEFIGVELDAQTRAQVEIYRSGAGKSGGQRQKLATTCLAAALRYQLGGEDGELPRYCAVVLDEAFDKADNEFTALAMNIFENFGFQMVVATPLKSVMTLEPFIGGACFVEISGRHNSGVLLIEYDEQAQRLKLPERSRGDEPAVADATDAAPSIEAAGEPAGVQGAASADGTATDGVPLHTASPATEETPPAAQETQTGQRKPAVATTNKQNKTAKTASSTRAAAQPQAKRPKKSPSRTPALAGKPASDKRTAGVPAVSSKAASRSNVGKTTRSSKTPGKQIAATSASNATSRKVAAAKPRATAASAGRPARGAGKTTATRAATKPSPAATRGAKAGTAQARGKR

SEQ ID NO: 31109 - protein, 489 aa, Xanthomonas fuscans subsp. aurantifolii str. ICPB 10535; identical to SEQ ID NO: 31106

SEQ ID NO: 31110 - protein, 208 aa, Xanthomonas fuscans subsp. aurantifolii str. ICPB 10535; identical to SEQ ID NO: 31107

SEQ ID NO: 31111 - protein, 1340 aa, Xanthomonas fuscans subsp. aurantifolii str. ICPB 10535
MNSQSNLSPAQPGASLFAETLAEQRAQQFRMRRLQVHNWGTFNGLTEVPIAEKGFLFVGRSGSGKSTLLDAMSALLTPPSIVDFNAAAREAERSGRDRSLVSYVRGAWADQQDSASGEIATQYLRKGATWTALVLEYANAHGQTVSLIRLFWIAGSGNAAADVRRHYMVAPRRLDVATELDGFDLDLRRLKARLGDDVAHFDGFAGYAERFRHALGIGNEMALRLLHKTQSAKNLGDLNAFLRGFMLDEPRTFEAADRLVEDFAELDGAHHAVVTARRQVETLSPAREHHAALMALRHSVGELRELQLGVDSYREQQRLALLDERLQELDNQDRGLAGEEGQRRESLDNHEQKLLGLEREQRAAGGEQIEELERERARVERERDERLRRRAQIEQACRQLGTALAAGASGFAAQIAHAQTVLDNGKHDASALDEAIAERMGARRDDERRFAEIRAELEALKRAPSSMPAPMQALRARLCEDTGIAEAALPFVGELVQVREDQIAWRGAIERVLHGFAQSLLVDERHYAQVSEWVNRTHIGTRLVYFRVRRNDELHSRRVDPGALPGKLQLREHAFTEWLRNELTRRFDYACVDNAAALRNADRAITREGQVKHPGDRYEKDDRHAVNDRKRWLLGHDNRDKLKVFEREAQTLAQRIASCDADVAALRKQREQDQERQLAAHTLVERDWDEIDVGPKLQRLSDIDEQLVQLREGNSGLRALGQAIDTARTLRDQAKRTYEDVRLERAQLARERVRLEQQQAACAGRAGTATLTPTQLQGLRERLAALTPLSLDNLEAHFRVVERGLAEQLADSQGRDSRLSAQLLECFRKYCQQWPEDSGDFTVSLASADDFLARLDRLESDGLPRHEHRFFDLLQTQSKNNLLALQRHTAEAHKGIKQRMDEVNASLEQVPFNRDTILTIEVGDRRLAEVQEFQQQLRAVLSHQQTEDRALAEAQFSTLRALVARLGAQEPEARRWREQVLDVRLHVEFIGVELDAQTRAQVEIYRSGAGKSGGQRQKLATTCLAAALRYQLGGEDGELPRYCAVVLDEAFDKADNEFTALAMNIFENFGFQMVVATPLKSVMTLEPFIGGACFVEISGRHNSGVLLIEYDEQAQRLKLPERSRGDEPAVADATDAAPSIEAASEPAGVQGAASADGTATDGVPLHTASPATEETPPAAQETQTGQRKPAVATTNKQNKTAKTASSTRAAAQPQAKRPKKSPSRIPALAGKPASDKRTAGVPAVSSKAASRSNVGKTTRSSKTPGKPIAATSASNATSRKVAAASAALKTAAAKPRATAASAGRPARGAGKTTATRAATKPSPAATRGAKAGTAQARGKR

SEQ ID NO: 31112 - protein, 478 aa, Actinobacillus minor NM305
MDFHTLSLLRANHPAWRLLCAEHAVFIISFLYKTFILPNLRTLSSHDLIEKLDDELFQLREQFGEKSYPKSALDYLNDWADKDKRWLRKFYKEGTDEVQFDLSPAVEKAIGWLVTLTERQFVGTESRLLTLFDLLKQMNDRTETDPQKRIAELHKQRQEIEAEIARIEQGDLNLLDDTALKDRFLQFTQGARELLSDFREVEHNFRELDRSVREKITLWEGSKGELLTEIMGECDAIADSDQGKSFRAFFDFLLSNQRQQEFSTLLDRVMELEAVRSLNPDSRQRRIHYDWLEAGEHTQRTIAGLSQQLRYFLDNRAWLENRRIMDILKSISKKAIALKNEPIKETAMELDDFKFSIELPLERPLYSPTIKTKLSAQPELADETDIDPSALFNQIVIDKAKLVRNVRQALQHQTQITLQKIIENTPLEQGLAELLAYLQLGQEQGVRLVIDENIQDEIHWCSGEQIRSAQLPRVIFSK

SEQ ID NO: 31113 - protein, 191 aa, Actinobacillus minor NM305
MSHTYSATLIQLTKGIFYRDENETLWVELIEKQAQIRDYFATLYLDLWLDEAEGYAFLKPKASEDESVEIPKLITRRQLSFHVSLMLALLRKQLVEFDSQGGATRLVLSLDELTELMQTFLPAQSNEAKQKDQIETLANKVVELGFLRKLKNTQNQPHFEVQRIIKAFIEADWLANFDNWLTACLESRGEK

SEQ ID NO: 31114 - protein, 1114 aa, Actinobacillus minor NM305
MDVFELDFSNDLQQSGFRLSRLEIFNWGTFDKKIWSLNLNGKNSLLTGDIGSGKSTVVDAITTLLIPAHKIAYNKAAGAEAKERSLRSYVLGFYKSERNVETGTSKPVALRDASQYSVILGIFENEANGKTVSIAQVFAIKENQNQPIRLYVVAEKKLSIQVDFANFGSDFTALRKKLKGKEIEYFDTYPPYAAWFKRRFGIQNEQALELFHQTVSMKSVGNLTDFVRSHMLEPFEETPNRIAHLITHFDDLNRSHQAVETAKKQVTLLTPLAENSQKYTALTAEIAYIRRCRESLHSYFSGLKLDLLARRLADLQADLVKNQAKVALLNNEKSQQEVHIEQLKQHIRENGGNRLEALGLQIKEAQLKANTLKKRANDYRSLLLKLDEQPAENEDEFAIQQYTVGEKLAEWQQRETELQNQLTEIAVELHQLNNETSAIGQEIQSLKQRKSNIPSQQITIRERICAALNLSEENLPFVGELLQVQESEKTWQGAAERLLHNFGLSMLVAEKDYVKVSEWVNNNHLKGRLVYFRVGKVREQAPFVVGSLAAKLAIKPDTPYADWLENELFHRFDHICCTDLDHFRKEAKAITQTGQIKDKSGRHEKDDRHHLEDRSRYILGWSNKEKLQAFEAKLAQLNTKISELRQTGAKLEEEKTACVEKKEAATQLKFFQSFNDIDWQSAVKSLQMLQAEYDELKAASDVLQQLQSKLDESLLVLNAKLAEIAEAVKAQGTLEEKIKHSEKTQAELKKELAENPVDTEVFQALEQQRAEKLEGQRLYVESCDGQERQLRELFQAEIDRKDRQAKTLNDRLIAAMQDFKHQYPSETVEFDANIEACFEYEKLLKKLNDDDLPRFEARFKELLNVNTINEIANLNAQLNRERETIKDRIEQINQSLFEIDYNPNRYIKLEPETSLDAEIRQFQQELRACTEGALTGSEDSQYSEAKFLQVKAIIDRFKGREGSTELDKRWTAKVTDVRNWFLFNAAVRWREDDSEFDRYSDSDGKSGGQKEKLAYTILAASIAYQFGIGSQNARTFRFVMIDEAFGRGSDESAQYGLELFRKMNLQLLIVTPLQKVKVIEPYVNSVGWVENLGGKESRLLNLTIDEYHQREQQQ

SEQ ID NO: 31115 - protein, 335 aa, Actinobacillus minor NM305
MKWTTEADLKSQLQKRWEKGEFLQNFLQNKPLFPLKLTLKRPTSNDITNEFQAVKQWATLLSTLSHYRVEWQTVNHRIQGEQKLPTSIWVDTLENMLDILRKQKEFKQFQQLTEQALNVDPRLQNWLEKRPLKALELAEDWQKLLAVLAWRKTHSQPNCYLRQVSLQGVHSKFIETHRGVLAEWFDLILPEGEIQADKTGANQFNARYGFLDKPEFIRFRLLDSNLTFAGLSKADISLDATSFAQLDLNVSTVFIVENEINYLSFPSMKNALAIWGAGYGFSALCQANWLKTRQLYYWGDIDTHGFAILNQLRADFPKVKSVLMTLAILEKYRIF

SEQ ID NO: 31116 - protein, 480 aa, Acidovorax delafieldii 2AN
MQFFIPPREHFFRPLTHDNRELCALVLRKLHERVHGANADYAEVLNRELVLEVILHVLADPALRTMVFENERVIGAEEERSYASDLLRKLKEHGWLEDYRDPIDLRPTLKLSRAGKAFSETFADLDDSRAKTRQRNMRSARKALAAFIATRDADELLDAHEFASRVVQDLQDDIEYFRHLIQSLTREALAQKVAWNEFNDFIEKRFAREYAVRLVADSAERHRGQINEALEDVRALDGEQRAGLDAHLLQRAPWLEQMAQGRSPMLWLADRIESMVDAACGLKLPMLRSEMNNYVRRFTSLLRQALSLDYGAESPLGRTMAWLKEQPGPAREGLLDVLARRLATAEIRLPGGVLRWTVRDRESEAVAQAPLVVDEASRLNALLRRAEAEAFAFSDQQVLQGLLPHLQGGPITLAALPVDTAEDAVRVLHAVGAARSAEGRRLIQARKMAGQVSTTYFQADDYELRVEPQDEMDVTSSRRH

SEQ ID NO: 31117 - protein, 229 aa, Acidovorax delafieldii 2AN
MLQSLAQYIEQRLATEGAANVKPARFAELAGRLLASGVVWREHSRPEAALYDDAIQCEQLLREWFACIGFVLVHDSDARLLRLYPPGEGGGDDEEDGVRRLRARLSRDFVAAVIALRFLYTEALTGRRSLVDERLAISLEELSQAVVSLLAHKLPNAASERMVLLRELRKHRVLHFVEGDDAGDMQMGLAVLRPVMSFVSDEALEEALRIMGRQTPPAPAVRSATEDRA

SEQ ID NO: 31118 - protein, 1234 aa, Acidovorax delafieldii 2AN
MKIAKLLTWHWGSLEDREWPFADAVLLTGESGSGKSTLLDAIQTVLTAAHQHVVQFNIGQDESTQSRRGGKEPRTLAAYALGQQADGVFLRTRSTSYAGIVFEASEQAGEQAEPFTALVGVEAFVDGRRAVLQGTPQFFIVRRALSLDYLARRAGEVLTASPLPLKELYVQLQHRLQAHAGKAAAVVQRFPDKGGYLQHLYGALMGKTAVGEHDATRAAKSLVKAMAYKELGNVNDLVRDEILEPHDFSKDLDKMRELMRSIASLKLEAERLALNLERLDTAQSSADQVIDEARRFVTTTIAHALRTRSEARDELTSVQRQIATQDRKQAQLQEKLDSLEAQEKQLRGQLSLVEQKLAGSDVAQRKAALDDEVRQQADQFRLHWGRVQEAARGIGAMAAQLKQLLALDLSAVPDLASAVAALQPAAWRVLQPWPAMADTYARHAALDVVLPAFELEAFDAQLASLRQGIHDGDASVQGAVLQALTDVGVQLKELGEESEQRDAELRRLQAGRAQGPKDAHDAVALIERELPSAHPHLLAQLVEPRPGTRWQNAIEGYMGGDRFAIIVEAGMEARCTRLVKQHYRVRSPKVVQGRKAMEDTEGRQLEARAVLHELVCQHPVAHAFLLAQYGRVRKVESEEELARTSQGLMEQGLGSRGYGMFACYEPDEKLSFGEAARQRRRQWCEQELVRLVKETRAMEALRRSLQTITRLFNGPVFTPLTPLVLAVLESQAQHAHAEQALKALDLSAIDTLLAEQKDLIGRIDGVRAQHSDEKEQMGAMKLALGGLHRREADLEVRLPDLDIACTNATVWASRFAGAVPTLATEPQLLGEAQALAAEPETSLDALRHRVQSLREGLPRTLRELAQAVGTYLSGARDDSERFAWIDPPRNVDRLEELLPLVERTRAAIAGQAQRQRAIGLADNARALREAEGQFNHVFTSSFCFKVRDDVKQGALTLQRLNRHLQDIRFGSDTFRLEWDWVPRLQKVQDFFEAVESAVEGLEHDRGSIFTSPRLTDEQRATAEEIRRLLLANDQGASERALRELADYRNYRRYDILRTSLVGTTRLSTWGTGSGGELETPFYVVRSAVLAHALGHFGRDRREAPALRLMLSDEAFSKMDETRSRNVLQFLSQTLGLQLIVAMPTSKSGAVKPEFDKEFTFSKVMARRDGQELFISEAQEKTLNRPALARLWGAHAERAREAARAQWIEQQGQEQIPAPTAEDARASLDECRPSP

SEQ ID NO: 31119 - protein, 423 aa, Acidovorax delafieldii 2AN
MQALALIMVTPESSSLPDPPSPHPFLLRLARLLLAKAERSTAQGPVRLPLDRKAAPDLHDAMDADQIQLLRMQLDDLCATGWVALLLEAPRAFASFSDRKPRLELCDFDALAAWAGYTPQAQRWRQQWRAHLAAHWAANPLEAPADPAAVLDHLARSPLVPVEGLPVEEATRSLATLTNLCRSGRTMALREASARVFQGRSKVLDHREELLKLLGATSGQFFEAPIQLLLAPPSPGLACGDGRFPAFKDVLFIENLVTFENMADARASAWASSLLVYAAGFRGSARRLRSRIGCRLYLRDPACTEMLPAICSWLFDLPGDCRENSQTVPVYFFGDLDHSGMQILASLRGVFPQAGAWRPGYAQLAGLLASGQGHSPEMAAKAQQADPERTGCSYADGDLLPLLRRLGRFVDQEAFDCAEDLDS

SEQ ID NO: 31120 - protein, 485 aa, Corynebacterium matruchotii ATCC 14266; identical to SEQ ID NO: 30972

SEQ ID NO: 31121 - protein, 717 aa, Corynebacterium matruchotii ATCC 14266
MTNNTPINHNDQNEEGEGKHRNSGEHNSFPFIAPREIESPAPTRHRAELAYTDRYFGGRNATGRNDAGIVKADIVEAEIIDAEVLDVQFDDDTDAPQTTHGSRRALHYSAHSPADADVDTADTADAAGNVVDDAEVETTAESEPGRTVTAPESPAGRRFTGAGATEASEPQLEVSPEETSDDAAAADKPWDRAAQPDAHRTTSEVDAHTDTDDDLDQEAAATDPEGSPATLPTTDAGENTAPTTGLRNPGYAGFAGAGLENRTTDEYAVDGDTDDAGELTDNDDPHGESDHGDLGVDTTIPVREARHTPLEIQEEARKLVNSINAAASYEDFDAYPTQGDNPQEEFLDDDAADLSDEDIVDEVLTSADATAPTTEPEAAEVAEDVTEAEESQASEPASAAVSAVAETLAEANDEPEDLTHTNLAEESEESEEEEAETAEAPTETPVEVDDKPEPGQPTPEQPATLVTPPAQPAAPTAAHATASAVTTNAAPVETEDTFDWMEDDYVHTSIGGDNLWDSDAGTLSFDSRRALVQLLQGPLVRAEQHPPIWKAILSDETALRQRLADMFLDLVVDEDAGIAFTRIANSGNPIRVGKEHYVDMPHVLRVKTLTIIDTIVLLDLRTRLGLAVPGERVIVDQEELRENASQFRALDDRDEATFNRRFDASLDRMRRDYSLLGDTETEGRYEVSPALKHIFDAQTVAGIKAEFEELLAREESK

SEQ ID NO: 31122 - protein, 1121 aa, Corynebacterium matruchotii ATCC 14266
MITQPTYDREIVHADQWRLSRIQLVNWGTFDGIVDIPVSRRGFLVTGGSGSGKSTLIDAISAVLVPSDRLRFNAAAQHEARRGKGRDLVSYIRGAWRTTEDPDLGMVVAQYLRPKATFSIIVLTYSNGMGLCRSLTGLFYLKSGDNNPANVVRLFGVFPEQVVEAQAFIPFLAKGLDKRGIKKEFSSASFFEDHAPFAEMFRPLLGISSMEAQLLLQRTQSAKSLDNLDHLFREFMLVEPDTFAYARTAVEQFADLESAYERVQDVKAQVEALSPLEQLHKQVLTAQAEIASTTSLQRALPSVANQLKIAELEDAQVAAEITLEQAQVANTKATEKYRYALEEFSQANQAMNSADGGRVENLQMLVGHHKQQLAERRKAYANLQKRIESHGGVMPTTVSEFNDLINSAKVSIAEHPANMERLNRDLAQSFVSLDQATNEVSTLQQELEVVAANNSNIDARFLARREAICDEFNIKESELPFAGELIDIVPSESEWEPVIQRLLADFAHELLVPVRYYPAVQNYINRTHWGVRLRFSSIDSSHSYPNPRVHPQSLVRKVDVVDHEFSAWVSHELATRYSYVCVNNPGDLDRLDPHEKGVTRSGLVRQAFRRSDPTSRLQKNDVHALGDRVYYRLGSNNQAKVELLRKHLSDAQTTLKARQNENQLIHSRIAQENAQVQFALSIVDEEWENLDTAIIDEHIESLNQQLEQLTENPDVKTLTENAQQAEQKLQDAQEQMQLCNRNVGAAQHTLDGIQASLAEANAEATIDVDDATFTTVHKLFLRHTRRVTSKNVDKLMTILTNEFSANLKKNNETLNTANNKITIRLTSYIERWPAERADLEATPDFITEALAKLQQLKGERLAEFTNQFRALINDMSTRNLADISHRLRQAQNEIRERIAPVNHSLASSEFSEGRFLRIDVRDARGEVVTTFQRQLDEAVSGGMNEQNDAEAEQRYHNIATLIKRLGSKEAGDVRWQKAVLDTRRHVSFVGVEVDEDGTVLNTYVDSSVLSGGQAQKLVFFCLAAALRYQLAKPDAQYPSYATVVLDEAFDRADPTYTQRAMNVFDAFGFHMILATPLKLIQTLSQYVGNTVVVSYDESPNELGQVRGRSSISRIDFGKATG

SEQ ID NO: 31123 - protein, 484 aa, Acidithiobacillus caldus ATCC 51756
MTLDYATLDALRTHHPAWRLLRSDHAPLVAAFLHRIFVVPNVRMMAAADLSEALEDELYALRLQLGEAAFPKPALDYLNDWASPDKGWLRKFYKPGTDEAQFDLTPATEKAIAWLAQLSERQFVGTESRLLTLFDLLKQMSEGSEADPAKRIAELHKKRDDIDAEIARVLSGDVPLLDDTALKDRFLQFIQGARELLTDFREVEHNFRQLDRRVRERIALWEGGKGDLLDDIMGERDAIANSDQGKSFRAFWDFLLSSRRQEELTKLLDRVLALPAVADLNPDTRTRRVHYDWLEAGEHTQRTVAALSQQLRRFLDDQAWLENRRIMDILHGIESKALALREAPPTGTVMEVAEACADIALAMERPLFTPAIKPVIASLTLLAGDEDIDPSALFEQVVVDKARLTRYIRHTLQDRAQITLRELVTSQPLRQGLAELVAYLQLGSDAFNTVVDEDTPEAIHWQAEDDRGETVHRTARLPRVIFTR

SEQ ID NO: 31124 - protein, 172 aa, Acidithiobacillus caldus ATCC 51756
MRDYVAVLNLELVLDEAEGYAFLKSRPEPAEDDPSPRLPRLVARRPLSFPVSLLLALLRKKLAEFDAGGGDTRLVLSRDEIVELVRVFLPDGPNEAKLIDQIETTINKVVELGFLHKLKPASGSLAGQANFEVRRILKAFVDAQWLAELDARLAAYQSALSGAASSKEARDE

SEQ ID NO: 31125 - protein, 1130 aa, Acidithiobacillus caldus ATCC 51756
MSEAQSLGLDFVADDALSGFRLMRLSVFNWGTFDGRVWTLQLDGKNGLLTGDIGSGKSTLVDAITTLLVPAHRIAYNKAAGADSRERTLRSYVLGHYKSERNEVTGVAKPVSLRDEHSYSVILGVFYNAGYDQMVSLAQVFWMKEAQGQPARFFLGAERSLSIAEDFANFGTDIAALRRRLRGTGADLFDSFPPYAAWFRRRFGIENDQALELFHQTVSMKSVGNLTDFVRNHMLEPFEVASRIQALIGHFDDLNRAHQAVLKAQQQVELLTPLVADCKRHSELVKEVNHLRQCRDGLRAHFASLKLGLLDKRLDLLDEEWNKIDGQVRRLDGMREEQGRQVDELKQAINDNGGDRLERLAAEIHRKEQLRDARKAKDARYRELVAVLGESVPRDDAGFTAQRAQFKAWREDIQNRDADLQNTLTEHGVSLRQGKLEHERLTAEIESLKRRRSNIDDQQIQIRAALCAALGLEVDDMPFAGELIQVRDEERDWEGAAERLLRGFGLALLVPDAHYKAVAEWVDSSHLRGRLVYFHVRPRKTSDLPELHHDSLVRKLVIKPDSPHYDWLERELAHRFDVACCATQEQFRRETRAITRAGQIKDPTGRHEKDDRHAISDRSRYVLGWSNSAKIAALEAKRRQLESHLGELGSQIGKIDGERKELLSKLDALTRLEEFTSFEEIDWASVATDIAALEDERQKLAQASDVLSQLNERLQELQQALKGTEEELQSVRDRRAKVEQRRSDAQELRQQTALLVQDAAIDATLSTTLEAMRAEALGEHQLTVESCDNREQDVRAWLQARIDAEDRKLRHLTEKIIKTMVSFKEAFKLETAEMDASLEAAFEYENLLIQLNRDDLPRFVARFKELLNVNTINEIANFNAQLARERETIKERIAHINKSLGEIDYNPGRYIVLESQASPDAEIRDFQQDLRSCTEGAMTGSDDTQYSEAKFLQVKAIIDRFRGRDGLSEQDRRWTAKVTDVRNWFVFAASERWREDNSEHEHYSDSGGKSGGQKEKLAYTILAASLAYQFGLEWGAVRSRSFRFVVIDEAFGRGSDESAQYGLKLFRQLNLQLLIVTPLQKIHIIEPFVSSVGFVHNEGGRASKLRNLSIEAYRAQKASMPSKSQQAPTP

SEQ ID NO: 31126 - protein, 397 aa, Acidithiobacillus caldus ATCC 51756
MTWTGPKELKAQLVRLWERGELLRDTVTGQTRFPLRMSLRSPTSADITNRFDEVRQWAAELDATNAVRVEWQERKHRVQGAQKLPTCVWVETIEDALTWLGKRKDWERFSALISATRQTHPVLLPWLEKHPLQALALSEEWSRLLAVVTWLAEHPRPGIYLRQVDLPGIHSKFIETHRGVLTELLDLALPVAAVETSKSGLRQFPARYGFLEKPIRIRFRVLDPSIHVVPGSASPDITLDADSFSRLALDVQRVFITENETNFLAFPQVANAIVIFGAGYGWDALARSHWLKSSAMYYWGDIDTHGFGILDQLRGHFDHVVSFLMDRATLHAHAVFWGSEDKPLRVDLHRLTIEERALYDDLRNNRIRPGLRLEQEHIGFHWLAHRLHVPDSTCTSN

SEQ ID NO: 31127 - protein, 468 aa, Vibrio alginolyticus 40B
MNVSSLNTHLFRPIAGDNGLHMLALLVELDAFLDPAQLIDEPTPSQVRGFIRDYIANHNLRIEIESGESSESKSAPEQYTYSRLRDTGWLREERESGYRYVVWMSQDGRRLLNFLQSMSAEHPSLGIVCLSVRSNLAEVVKDPTSGSLIRKAADDMESFLNRMRALVGNIREIHHQLNHGSSQVHGRFEFYFNEYLGELFLPNIEKLALKGNPKLHGNKILKLANIIRFDSDLLEECVKAYKRSDIANSSKELVENDLDRLSKAFEGIEPLFAKTQDYARRITRRIHEQIKYTVHTPSDIGQQIQFLLEKIGQDDSVNTLPSLSIGEELISCSRFAKPKSKSIEPSESSRRQQKPLWEKRAYNQLKQEHIDFQKCNLQRVDKYLEDSLRGRTQVTTDELTINSPDEMMAALHLRLLAQGVPKTHVLHPLQEKYHVSFDDGEAWTTLEAMAGRRLIIRIKDMEITSYGK

SEQ ID NO: 31128 - protein, 216 aa, Vibrio alginolyticus 40B
MASEIILRELKDIEVKTSADYTDNLRKTSAYLIRNQWVWKEKRGHKEHFKRCEDNQTYFHKLFDSLDMTWHFDRNFGYAGVLPRGVGKRLDVTTTIFLLILRKMYDTEASMGRTELGRVKPPATELINQYELIKGSRPQVTETSHALENLKRKGVIELGEKDLDTKLFEITVLPNITRVVSATYLGLLDEFMDSFSSDELKDGSAECDEAVEVSYD

SEQ ID NO: 31129 - protein, 325 aa, Vibrio alginolyticus 40B
MTSDKQSMNSHRLSNIILAQWYLFELETFDVAQAGATLFSGDNGAGKTTIFDAIQFVLMGGDQRITRYNAAADGRTSERTARSYALGEFQDNDSTSLLRDNANSYIFLNFYDELKRPYSFGLTFYASKQSPSVEKIRGHIIKGYHVTESDLLSDEGNFLPWVDFVEHMKRTAKGLNGAMRYETVDGARIIREKIAELMSRNQTRTGKIESNLLVKTLSSALQLKMDSPIDVFIRDFILPPMPIETEQLREDLIAHQRIEEEIKRANSHKAERAALLEECEKITNLRIAAHHAQWVFQEAKTSHLNEECDAKEDENERQQRSLGES

SEQ ID NO: 31130 - protein, 546 aa, Escherichia coli M605
MVRKWLFGIRTISWTLRKRKMFTEEEKIHNGEFIIVCVLQFAFWRLCYMEGNTRQRTANYISAKNQHPAWILLATRRAPLVLSCLNTLFEKTHDGIPLEEAIQSLSGILIEHVSQEQYDINQDNPSLQASRELREWIKRRLIVERDGRIFATDALEVAITFVESLDNRFMTSTASRLSTVQREIENLETRLNPNPANRVATLRRRIAELERELQEAEAGHIEVLKTHQAVEHIREVYNLASSLRADFRRVEDSWREADRALRQSIIGEQYHRGDIVERLLNDQDALLNTPEGRVFDSFQQQLRQSAELSAMSERLRVILSHPSASDALNRLQRHELRWLVKRLVDESQTVLQARARSERDVRGFMKTGLAAEHHRVGHLLNEFLNLALKLDWQRQMIRKQEVQLPAVGVAVTGIPAIERLRFKEVDDEAEQTLDLSNHAADLTQIGDDFWDAFNGLDREVLIQQTLQLLAKENRPVGLAELSALLPPAHDLETFAVWIGMAREAGIEVIDSQREFAELSDGEGRRWRFNLPTTGLESQALMDIDWE

SEQ ID NO: 31131 - protein, 249 aa, Escherichia coli M605
MTGFFDRLINRSVTANAGCEPEPSDEEVTDESVEESLASSETRTLKKIREATQELLKYGLLEEASKPNLYRIVLSHPEEVTRILEPLDLDIGIDEIRGLLYVKVRFDETPAQDEWAHPLVRRQRLNLEQSLLVAILRQHFVAWEQESGTGASQAQIAIDDLLPQLQIYLGDPGSESKERTRLLTLLDQLKGHGLVTSPDAHERIVIRPIIAHLADPINLQALLAWLREQIDQQTSPDGAPDKDSSEEEV

SEQ ID NO: 31132 - protein, 1095 aa, Escherichia coli M605
MNQVSGLAGKESFILTRIELFNWGGVHGLHQAAIHQEGTAVIGPTGSGKTTLVDALMTLLCANPRYNLASTGGHESDRDLISYVRGVSGPGDGGEGQSHIARPGKTVTGIAATLEREGKQVRLGALLWFDSTSSSVTDMKRLWLFSDNSGQTLEHWLNVYHEGGTRLLRQMEKEAIGLWTYPNKKQYLARLRDFFEVGENAFTLLNRAAGLKQLNSIDEIFRELVLDDHSAFDRAAEVANSFDGLTEIHQELETARKQQQSLQPVALSWEKYQKQERQLADWQTLESLLPLWFAQQASHLWREKIDLLNARLAEAQTSEEQLQSQLDLQKKVVSDCMQRYLQVGGANIDELNERIKDWQKTLGSREALARQYQQLTRNLGLPPDLSQPQLEANQHEAEVRCEQIAVDIKLKQEEAYQKGALSHHITEELRERENERAEIARRPDSNLPAHYQAFRSELAKALNVDESELPFVAELIQVKPEEVQWRGAIERAVGSNRLRILVAPESAQEALRWVNQRNNRLHVRLLEVKLPHSPARFFDDGFTRKLLWKEHPWREAVKALLAESDRHCVDSPEQLRDTPHAMTVQGLMSGKQRFYDKHDQKRLDEDWLTGFDNRDRLNFLAKEIATLQEQVKTANVAFEFAKGEVGLLQNQAASFQKIEQIDFDSIDVPGAKSQLDALRERLENLTRPDSDASVAKAKLDEAQTVESELDKQLRAANKLTNVLDTELTSARAAERKARQTAQQGMKEEERELCASHFPVVTLEQLPDIRDLERQHERGIQHEIERVKAELHRLNIELTKRMSEAKRVDSGALVEAGADLDDIPVYLQRLQELTEEALPEKLSRFLDYLNRSSDDGVTQLLSHIEHEVLVIEERLNELNETMFRVDFQPDRYLRLDTKKVVHESLRTLEKAQRQLNAARFVDDNGESHYKALQVLVAQLRDACERNRTLGAKALLDPRFRLEFAVSVMDRQSGNVIESRTGSQGGSGGEKEIIASYVLTASLSYALCPAGSRYPLFGTIILDEAFSRSSHAVAGRIIAALREFGLHAVFITPNKEMRLLRDHTRSAIVVHRRGQNSNMASLSWEELERHYQRRGNA

SEQ ID NO: 31133 - protein, 382 aa, Escherichia coli M605
MYTPDELREKLARQWDSAKLRAERLLPPGNWPLCLPIGKPSTKIFAEQTQRVLQHVQRWRQVAVGHVEWEAVSYRASDTPVLMPSRWILNSPSEWINAAADPVVSREFRLLEGIIEQVNPIFHLLLVKHRSLWRHKDPQDVISAATLACRLEPGCAKGLPLRLLSGQGVDTKFIENNISLLTRLLDMRFSGEASEQGLTTFLDAFDESSHWVLVVPLSPGLLPFKKCRVTTAELAETTLPASQVLVVENEQCLHHLPALSDTIAILGCGLDVQWLSSSVLDEKRVAYWGDMDSWGLLMLARARRCRPMLDALLMNRELFEQYASHSAVPESVIAKEAVPDGLLNEEADFYRYLTRLPRGRLEQEFLPVGIAEEALLRWGKES

SEQ ID NO: 31134 - protein, 459 aa, Bacteroides vulgatus PC510
MDFFLSFVIEAFEGQAAIMQERLHMLLENRLDEQENTLVEDDSEMTRLVESNEQKAKRLIKDWTDKGFLTNYQNEEGEVIYEISSHTSKLIDWVVSLKKEDYIGTESKFKTLFSQLKELVEYSNEDREKRLELLRTKKMEIEHQIQRLEMGEEVEVYEDYQIEPRYNSLNKLAKELLSDFKEVDDNFKGIIKEIYERQTENAEKKALLNYIFDAYGELKQSQQGKSFYAFWEFLLSADLQKEWDELTGALYKTLENRGIDAHDMFLKEMKKHLFDAGEKVAKTNDRMSEKLSRIIRQNGHMNAEATKQVINDIKKLLIEASRRKEKPDASLEYETIDINLPLERPLTLTPVKETVYKDKPDIAGLSLADLESIGKLYNPYHIDRKVLRDRINEVLNDRQQTTLAEVIERNEGVEKGLSEVFGYIGVLKEYKTVVSEERQQHIIFTENKTISIPEIIITR

SEQ ID NO: 31135 - protein, 194 aa, Bacteroides vulgatus PC510; identical to SEQ ID NO: 30463

SEQ ID NO: 31136 - protein, 1133 aa, Bacteroides vulgatus PC510; identical to SEQ ID NO: 30464

SEQ ID NO: 31137 - protein, 346 aa, Bacteroides vulgatus PC510
MDEYQRELTDIRSQSKEVKGFGYTIEWKTVKTKALGEQDLPERVLFESASDIERFLQKCGEVSQFRKDVAMLLDEFPQLRSWVERYPLKVVENASFWSDLLKVLRYFVANPCPRLYIRELPIEVHTKFIERNKGVLRELLDIVIVEHVCSDEKVFEKRFGLRYDESWVRIRVLEASIANEYFSGVDDLTMPQSQFCALSLPVQKVFVVENKINFLTFPKLAGSLLIWGHGFTIGILKSVPFMRHASLYYWGDIDAQGFEILSQFRSYFPQTQSLLMDRTTFDTYFEGDKGTPSNVSKPLHLTPAEAALYDHVKFHNLRLEQEKIPQKCINNIFNSLLKNGQVISEV

SEQ ID NO: 31138 - protein, 487 aa, Brevibacterium mcbrellneri ATCC 49030
MRVLSSALAFKRLMESDSALGMLRADNLPIMAAILGAHLGKPGAVMPTDELHERIEADLEELRDYFDTGDKRGKAFCDDWRRKGILVRRPATAVRGEIYELSAAGFDAIRILDQLRTPPQTTTQSRLVSLSQAVHNLALETDPDQSRRLGQLEAEKRRIEQQIELIHRGDGDTTMLDNRMARERVSDILQQAAGLPGDFARVRARFEELNHELRVSILESDESQSRVLDEIFRGVDLIASSDEGRTFAAFATLLREPEHAASFDEDISRILDRDFALQLNRDERQALRLLMRHMKTGARDVQQTLSEFTRGLRNYVFSREFQTDRVLLALTREAMSQAASITDVCKPTADIGITLELPSVRMTSVGEIQLHDPDEYIIGDELGVAEATEVDYRALVALARESEIDIVELVGNVNAAVEEGRPVTVAEVLSQFPATQGVASVVGLVSLAVNHGESVPGESDTLEWVGLDDVARSATVARWHFTERIRA

SEQ ID NO: 31139 - protein, 206 aa, Brevibacterium mcbrellneri ATCC 49030
MSEDTVDGGLWNGDEGQLAFDTRRVLLELLKGPYVSGEQKPQLWAALVADEGLIRSRLNDVFVDLVIDHSASFAFTRRVVTNEIQAPVALRAENLKFLDTAMLLVLRQRLLAAQGVRRVIVDQSEIYEQLSVFRTGDETTFQRNLNASWRRMINTVRVLHKASEDRYEISPIVRFLVDEDRVKELTETYERIARENQKSKKQGEAQ

SEQ ID NO: 31140 - protein, 1107 aa, Brevibacterium mcbrellneri ATCC 49030
MSEHAEPRQWRLAQVQLANWGTFDKQISIVNIARKGHLITGPSGSGKSSLLDAIACVLTPDKWLRFNLAAQGSTSRSDQRSLVSYVRGAWTRVTDDDQDRVVSKYLRPSSTWSGIVLRFHDGEGKTLSLARLFFLKGSSVSARDLGDICVLEETELDLIDLQKYAAGGLETKKLKADHPAAIVTSNGTHTKFYARLRRAFGIENESALQLLHRTQSAKSLDNLDRLFRDFMLPVPDTFEIADTAVQQFGDLRDAHAHVVELRKQRDLLLKLRTASEEYDTCWAKHVDLNTLNDLLSPFLKRRELAMLNEQQQHLRRTLAQKRAQLEENRAEEGRAESELDTATRVVRQSGGAEVEVLQATLDGARNDHSATENRRRRFEAQLQSVGIMRMPQTADEFAELHTEIAAETKSQEQSVGASYEDNDRLAKARRDVREIEAQIRTLRQSGSTVPDNLQRVRQAIATRIGIPAESMPFAAELIEVKPHFKEWTGAIERVLRPFALTMLVRSQYLPAVREWVDNNEIRGRLVYEEVADGIERPQPVLHRDSLINRIEIADSAVGAWVSWALSVRYNYVCVETPDDLGDHSRAVTIRGQMKTSATRYEKDDRRGINDRSHWVLGDRAGKLSALADRLKEAQEEFNAAQEVVDAATRQEQERNIRRGRLESILDGSWAEYDTVSSQKKVDSIEQRLRTLTSGDATLSRAVQAEQKAKAAYDAARSATEDTRHEVRMAERDLAVCEEKAGEIKARIAAGELEDVPEDTATRLEERLRREKRAIRLDNIHEVGQRVSTALQKEKDTARDAADRASHQVTQLTTEFKERWEAVASDLMPGVEDRAGFLRILDEILTNGLPTYETRFRKLLQERSQDLVGELLNEIMSAPNEIRDRVVPINSALARKPFDEARFLHLRVKTQRSAVVEDFMGQLRTIVDGSWDDQDMQTAESKYAVLAEIMRRFDSGEHVDKAWRNQCLDTRTHVKFLADEVDEHGTVRATYDSGAAMSGGQQQKLVVFCLAAALRYQLAQRDDDVPLYGTVILDEAFDKADTRYTRMALDIFVEFGFHLVLATPQKLLQTIEPYVGAVTEIDNPTRQLSTVANIDWSGHTAGDSDARS

SEQ ID NO: 31141 - protein, 387 aa, Brevibacterium mcbrellneri ATCC 49030
MRGVEEARSTLRERLQRNMSGWVASPDSFLPIKFALHPPTEKQAIVDQQAAIDWVVQWRHVSDKPEFAGAVTWEERAWSRVGRQSVPVRFVLKDAEVVARFVGGEPASRFRRMKDRATCIREVCGDSATVAGAIRANGQRLVGLNDEDFGRVLEVVTWLGDNPVGQLRPRQLPIRGVDSKWFSTHKTAVTALLKAYGREDAVSVLEPEPRLHVRFLDPQLAPCEALCDVTAPVDELACMEIEPETVFVFENLESVLSMPRCAGAVVIHGGGYSVDLLARLPWLRNARVVYWGDLDSHGFAILAKFRKQVPGAVSILMDVETLVAHRDLWVEEPKPHTGSVAGLTSSEERALARVRAEGNVRLEQERIPWKNALEAIAPRALDQCGRT

SEQ ID NO: 31142 - protein, 495 aa, Corynebacterium variabile DSM 44702
MTNPRAEAAYRHASAAFRNPTLDLLHGRYAPFVIAALSLVFTAERPTVTVADAHVEVGDIAEALRASGEENLPVGTGREICRYWVRVGWLVPHIDDSSGTGTEVYRLSAQAVSALEIAGRAGGRVRVSRSRMRTLLDSIDQLVSDSETDPETRRATLLAERDALDAQLSRLEAGEVEPVDDDQLLEEAENVLHLSRELPADFVRVAESINEMQRDVVADLRRDVRPAGEVLREYLHRGQHVMDATPEGRAFAGALELIGEPEHIDRLTDQLQNLLAQPFARHLPVTQQHDLAAVAHRVEQGVTEVLTAQRRASHVITAQVRTHDPVRDREVDDLLRTVMSGLQSWMPQSSRGDRVDPLRSFPAAKVGALRRNLNDLQPESAPEPLHASEEAPEFEGTEGREWGGPRYEDLENYIGSREDADFDLAEAFAHLVASARRPVDLLGLLEIAHRNGMVETGGVATVEARRPDGTVRRFAFGDVTAGTTGTTTGQENTDD

SEQ ID NO: 31143 - protein, 208 aa, Corynebacterium variabile DSM 44702
MEEDLDGCFAGDRGVLEPAVRRVLVRLLQRRFLSAEKHPADWTVLLDNQQVIESRLHDLFVRLVVDADRGLAYKQQVRADEADETAVSDIPVLLRDEAYTRAETLVLVCLRSVWQRESTAGEPSARVDVEEVEQTVLTYFTESDGDLARRQKAVRRALERLRHEGIVEEETEGRYLISPLIEIVLSAQKLRELADWLSAQTAQAGELQ

SEQ ID NO: 31144 - protein, 1116 aa, Corynebacterium variabile DSM 44702
MTMLDTLFGLIPSGSRGQQWLAGDLQLVNWGGYDGAHRVRFSPSATLLCGGSGSGKSTLMDAYIALMMPHTTPFNGASNGAVSGRARGEDQRNILSYGRGKIDETRTEHGTRVRVLRGDGTDTWTAVAMTWVDASGPMEKRFTAVRAWYIPATARVLDDAVKVRGVIEGDFDLTDLEDAASRRLSDAAVRATGLETMATDREFLARIHAVLGIGAAGAGTKAMNLLARIQAGQQITTVDELYKRMVLEEPDTFATADAVVEHFDELEGTRLRMVTAQRQVRALTPLREARTRIGDAAERLRLIKEIGQFRDDSSPAAMWRTSRRLDLLRAAEEELRSQAVDAESLVATHTAAAEAAEAERDSLIQVLRNSGGDRLETAERELGAARRRCEQITRTREKVEEDLIPLGAVVTDEEAFTALVAQGKSALADPEVKAGVRESYAEARTAASVARDRWNELESEKKATAERTDNIPGELHAARAALAEAAGLSVDELPFVGELVEVRTEFEPWREAFNLALGGFATTLLIDETALPQFRAAINQVRTRIRVPFEGVQTGQARITCDPRQLPGRLDYRDTPFTGWLQDRLDQRFGFVCVDSAEELRAHRSALTVSGQMSQGARGAHGGHGRRNVLGFSSHRRVDELAGEIAAAKAEVEAASSEVAAAEAELDAVDVRLAAYRRIVDLTWEEIDVATVTDEVTRWEEAVEGISEGSPEIAAMQNQIAGLKVKIQGLQEKTGRAKGEHQHLMERWDAVAEEIDEAEVALDEAAEAGRELTGEQDAWLRSRFTVTDGETGDPAARLARLDASLESASRVLEEDRASAQTTLADQRAAVRRTMESFLDAWPNPNLRADPDASLKDFERILDDLETSGLHRLEGEWKESLLRLSGNDLTNLDSTLGRALREIRERIEPVNRIMADLPFYDDDHRLQITLRENQSEVRRRFRKELREVRALIGDASTDEERAEVYPRMARLIDRIRRGAPDYASLVDVRNHVRVSAEKITAVSGEHVALYDHIGEKSGGESQELIAFIVGAALRYQLGDADAERPRYAPVFLDEALIKADAHFTARAIGAWRGLGFQLVIGAPIDKYSAIEPHIDVEYDILKDTSGRSWAKPKVGVA

SEQ ID NO: 31145 - protein, 474 aa, Clostridium sp. HGF2
MSLFEKMDPSFFTILVSKNRDIYVDLLLQIHDCIYRNQTMSMERALLQDLLEDYVQDKKYEIDFQEEAEYSDIENELRSEKDVYDRDIQFLLRLFEKHTWINVDLHMDTMKKMVSLPYHSRVFISFVNDIIKEREQIGYLIRIHASLKDMDDPVKIEDSYQHIRNAYADFKELILTLEQTNARIRDYYAIQVKKASTKIYHDFFDVYYGDIVEGYVFPTLVEDSLKRFKNPVAGILETLLQEEAVKEKIVDSAVSHYRVASRDTAKKHIEEMLYAMYNDLNIVETLTAQLVDSDAGYRRLAKQKIMYLCNSDQGLKGKLVELIHHMKEEPQRVCEQISESINIQQTRYMERDEVYTFERRRRRDEREVMTFTFEESTQNQEELEKRIGFDRYARFTRESISAYYAEKLHGEAVGKLKDIGVKDMDDYIRSILVYVYGRDRKMDVQATLIPNQTEGITEGDFHYPNLLIKRKVTK

SEQ ID NO: 31146 - protein, 222 aa, Clostridium sp. HGF2
MKVEQLDLKDREEFGRIVNILLAENCIYQYAKIRQFEKKERNADYVFIHDHWDCFEEYLRYAGWLLCRERSSYMGMIYLVNEREDCSCRYRLTKLETQLLLILRNYYEEKMLELDASLTIRISVNELLQLLVDVHAMVSVRPSMQYIHAALQSLQRLNILQKYTQGDEELIWVLPYITCVLTPKRVEEILMKLRNEEGEEDDEAEENAAGQLAVLREDDPEL

SEQ ID NO: 31147 - protein, 1105 aa, Clostridium sp. HGF2
MRKERKTMKLKKMLLVNWLYYEKTILSFEDIVFLSGKTGEGKSALIDAMQLVILGRTDNSIFNKSANDKTTRDLMGYLKGKYKDGTFKRDKGMFSSHLCMEFEDEQHRIYCFGIVFDVNGPTRGDTEHCYYMMNQPIPGHCFTDEGTVFNIRRMKKLLASFQDRSCRSFTTHMDYKNYFRQRMLIKDQRFFDVFKMAVAYTPMMNISEFIVKNICQEEEDLNLEEMQEEIQDYRQMKEQLETVQQKKAQLSLIHEQYTDICGEQERVANLRVEQKAAVYHGMLVEHDEAAAQYEVYTKSYQKLTKESRETEEQRALLEQNMEALRDARRDNAADILERKIQAHLEQRNTLQRDTTAVQQQLVTKGEFLKEQIEQLEEIEDYDGLQLEDFDLSGVKLSIQRSVHAAQRLAAFDLDAYRDIQRQMRDIENTLSTVRQTMQSSLQTCREEQEVLAANRRALEAGKKTYPKKLLVLKQELEERLYQQVGKPVEVCILADLFSIQEEAWTNAIEGYIHNQKLNLVVEAEYFMDAYRIYRSIKEEKKIHTYSIVDIAKAKPGKRPDAKTLYDCVQVEREDVRPYVEYLLGRVVCCEAEETLRSYPVSITSDCMLYSGYAVSHMNPELYKVPFIGADSIEKQLQELIIRQQKLTSTCRKLETVTRTLQAVQLQTVISDDFIRQLEDGLCKAKEVEQLEQKIKELRDAQTPESLQELLLLDQKLDEAKKKKNELYMLQVEQESRRRQLEEDMKLCNARIQELQQQVKEAKKPEQGIPDTIGAITTADGIRRKQKQLEEALRELNSRVEISKLELITKKTHYNDTFRIALNPNFLCDDYEREYEKHSDNIVEDYIDKCRLAQQKAYECFQNNFFSALNSKIENVRMQIDRLNRSIRRHKFGRSSYEFVCTCNEDYREYYNLITNKELNGHNLLNTKVYEENEELIHELFDKISSLSSMQDPKKYQELQKEVQLLSRFTTYLKFDILENGNSLRATIGSSSGGETQTPFYVAVLVSLFSVYDAGNDGLQLAIFDEAFDKMDNERIEECIYLLKSLGFQAIIVTPTDKISNLSKVADATLIATTDEKNGQRVSTVQKWSQKENIAIPDSEMRQEEV

SEQ ID NO: 31148 - protein, 478 aa, Mycobacterium gilvum Spyr1
MDDNATLSAADLLERNRELQSSRAIRLLAATNLSLYATLMERHCADGVVPETELVVRLERDLDDLGDPQSGIALIKSWAAQGWLHRIVDPRSDQNVCYLTQDARRALDFLRGMRRQDTLATGGSINGIASRLKQVAIRVGNDPARIRKSIEAEIAALHEELDELDNGARPEPDVTDAYDEARAIAMQMERLITDIGQYGSMIEQATAALDEPIDSNVAYRDRQRQMYADYQAAWDSQGRDSHRAFLRMINDPDQRAEFEADVAAVADALPALDPALRKVMAGFFELVGHQIDEVERIQQRCAQRVKRFTAFGTLEQSRGVARQLNEAIGAARNLLKSSLIDSRLDLELPLARHAISSVGALSFKIGDLSNPKPAKPAEGDVDLASFAALTTQVDAPAMSDMLNSAVARGAVSLPEAVAMVHNAYLGHVIVLWSWALKQPNEASPGSATVRFRSLDGKDREMAVPRLMFTEPISVGVTQ

SEQ ID NO: 31149 - protein, 229 aa, Mycobacterium gilvum Spyr1
MTTESEADFAAFSALPEVDQTARPPHQRRPRFDGDVSELPDRACWALQHLLTRRYISAESDADIYAWVLEYRSQLSTRLSELDLILRVVDGTDVAFVEQARYESAKGIKLLRREPLGTYDSILALHLAQMMRAAGGQSVLISREEMHGLFSGVLNDTDRDAVTFAGRIDAAIARLAGLEILRKSRDDEDSYTISPVITAVMTASVISELQQQFELLINGATAEAETDLD

SEQ ID NO: 31150 - protein, 1130 aa, Mycobacterium gilvum Spyr1
MTEQFHLSRLQVINWGVFDGYHDIPFSDGGALIAGASGSGKSSLLDAISLGFLPFNRRNFNASGDNTAAGSSAGRRTVDKYVRGAWGQRSDGGTSRVMYLRGDGTAWSAVAVTYSSDSGRTVTGLVLKWLTGESRNDSSSRFVLGDGDLDIEDVCNRWAAGRFDTAVFKDSRGERSDGRSHGWRFTTKVESQYLAQLYATIGIRASDAAQQLLGKAKSLKSVGGLEQFVREFMLDEPESVTRLPEALKQIDPLVEARELLAVAQKKRKILGDIEKIQQRYASESTDLGIIDLVDLPMVRAYTDHVRLAQCPAQVSQLDTTIDQLDNEHEDITRSLNLAKAEADSLNAQISGSSASIGPLQSQVTAAETEAEQVSRRRNAYEDMLAAQGLDAPETADAFWNLREELLSQATDLLAKVERNREASTDAEYAQKSARLARDEAAKELKRVEHVGSALPEFALTMRDQICAAVGVDATDLPYIAELMDLKADQTRWRTAVEKVLRGVGLRLMVPDQHWTEVLRFVNETNMRGRLQLHHVRAKFLGATPADPEPNTLAGKLFAVDPEHPCAAEAVDVVTAAGDHICVDTPEVFARFRRAVTDTGLYKDSDRLAIKDDSRPLKQSEYLYQGDVSAKINALTVDLAAAEEAYQKARRVADDIAAQRQQWRDRAAACKAICEQYPQWSQIDTETADGHADRLREQYELLLAEHPDIEALNARADECWSQIQKLMTRRGAVQTRRDALDDRRTRLLELAERLQPAFVSEPLTELLHRYAGQLPVSLELLEPEPHRDALFTAIKKEREQLRESRRRSYDELARILNTFDTSFPDAIPNDSDNFDERVHDYVALCRHIDECELPEAYERMMRLVTEQAPDAILTLHRVAEQEARRISDQIDRVNTGLGAVEFNRNTRLTLRATPRSLTAVSELTEIVRAISRRIAEVGLGDKQAILDQYADILRLRNRLASTAPEDKAWTRDALDVRNRFTFDCAEWDVASEELIRTHSNAGDNSGGEQEKLMAFCLAGALSFNLAAPESSDNRPVFAQLMLDEAFSKSDPQFAQQALQAFRKFGFQLVIVATVQNATTIQPYIDSVVMVSKTEATGRNARPVATVSTRTISEFTDLRHAMRAEAKVPAGV

SEQ ID NO: 31151 - protein, 468 aa, Lachnoanaerobaculum saburreum DSM 3986
MNIFDEVDDNLFRPLTGINKRKYVDILALIWEKCKRMPMYAIEKSTVFDMAEEYLLGLGENVELDIEEQSEISGNITDMRVVAGTLIRRLRDTGWLLEKPGEYEDDDKLAVQYKVVPILKSFREIVSPTIVTYKGKLFKIYSMFEHICEQGSPYEGVLKEASEDFDNLNQALRTLSASIEDHINELTLGKSPQEILDFFEKYEEKIVVGSYHRFKTNDNLFYYRSSLYESLDKCEDSLFDALVLDYIDTERVEKDEASIKIKELITKVRMDIEEMEEVMRAIDDRHILYRTRAVQRAQFLLLSDGSSKSKINNILRFYASEIQSKGDGNKDDDTVASEIFRIFGQNFFDSASLATPVKKRKPTPIELMNIIEELDIELVEEKNKKMMEYIRNALTSENVNRFAKDILNGNHAVRVSSVFEKEPDTFIKIIGLYTYSKTAERGYDIKLKDNVVEVNGVRFKDFIVEERR

SEQ ID NO: 31152 - protein, 191 aa, Lachnoanaerobaculum saburreum DSM 3986
MSVDIKEEIANYLLNNCFLMGNVDTTREKYYYVINHEESFRQIFLPIGYTLVIHRNLRVVQLINNHGTGRVVLKKYESIILLIFRLLYVEKRESLSTSEDRVFVTVEEIKNEYEKLSLPRKFDKVFLEESVRNIKKYNLIQVVDRLLEMDAKIQIYPSVMLAMPDTNISKAYEETAKLLAQYENSEEGDEG

SEQ ID NO: 31153 - protein, 1109 aa, Lachnoanaerobaculum saburreum DSM 3986
MIRMKRLHLINWHNFQDDIIDFKNITYLLGVNAVGKTTIMDAVRYCLTTNKDFNTAGNKKSGRTLLGSVHQKQRAQESYLRPGHTVSYIGIEFLDEAIKKNFVIIARIESETPKQDLRGVYQDWYITKPGYSLEDIPFFTKKKDGKSPTSRDAFKLENKGMDRASNQADARRRICRMLGIGEADSPIGKKFNEVFHMGTSLEDIRDIREFIYTYILPEPEVNIEFLQKDMIELERLQEILQEACDREELLKEINDKIKAAKELLGKVKVNESLVAYANLQGNIEDTDEKKYLIEEWSTSLKIIDKKLLDLFESENKASTLLYEAQRAAEENAENKEMLSLESENKNNKLENDKLILEVSIFEDVLQKLFSLKDSLNKIGFAVKVADCIRDENAAVDERIREIKNSAKLFADIEEEIKNHDAKIRTDITSLSDKSDILSKKIKSLEAGVMCYPDEAIFVRDKINDFLSEQSKRADAKLLCELLYMTDSSWQDAVESYLNTQRFNIIVEPDNYLSAKKVFVSLGDKVKGIGLIDTRKIRDVEYKTSDESYLGDKIESENIYAKTYARFVMKNVICCESSDDLENFTKSVTRDRLRFQNFCLQRMAKKEHFIGVDAIAKQLKSAKTEFTGVKKELTKLEEAKKNFDSIYNGYTKFRAGDNFGKLENYCESKSKSKALSAKIEDIAKKIEEFKKNPILLAMYDRVRECKKNLSVIRDEITDNKAKKQNLNSNINQAKAAVDELEKNLAQMQAVYESSIEEYPEFINDVEKKYQNERKSKKASAIAYNFSNRAVQDNITLNNYLNQELIPLQQRYTATYTCDYAAGLGGADRYRQEYLTLQNIELERHKSELADAQIRCKDRFRKEVLFRMKDDILRAKQQFKQINRVMENLEYGEESYRFGIDKSKDKELGMFYDIIMDKDNQQIDRENDMLMLMNEASKSEVFESQIDDFMSRIMIDVEEHAKQNLSGQKSNAKSMGMYVDYRTYLDYDIIVKNAVTGNEVELSKVSGEGSGGENQAPFYVAICASLLQIYEQSKEGSIRLILLDEAFNNMTSDRIEPMMNMFKKLNLQLVLIATAEKATAILPYCDITYSIVKSGNRNAIGVFERIEDGLH

SEQ ID NO: 31154 - protein, 408 aa, Lachnoanaerobaculum saburreum DSM 3986
MDYTKDILNRLIDIYERREGYKKEPSSLRVIQIDIKKTYPAYVDRYNHNVYKEINVAIEKLINENLVNSNIDVSGKYEKVKLNVENISVCYKKVKRVTIIEQCKKMEAVLNLFKDKNLPVLDNILSDWRKLISEYKKIPYDIKYDAIRLMNILKILEAILRLSNESYIRNFSTAIFQDSKRFQREFKSGIESILFDYTNEAVERDKILEYYNLYENPTYTYIKGDAVIKFEDSVIYVKELPDGIALSNVSLEAIREVKVFAKSVITVENLTTYHDEDEREAVYIYLGGYHNKSKQVILKKIYDENKNCEFMHEGDIDVYGFLILENLKEKTGIPFKPLNMDVDTLKRFFEANIYKELTFSDINMIEKNKEKLRDYKEVLEFMLLHNCKVEQESIKAVEILEPVGRRIF

SEQ ID NO: 31155 - protein, 452 aa, Lachnospiraceae bacterium 5_1_63FAA
MKFAYDIPDSFWSLFRSMNRELYMEALLKINEEYEYNNYYLSKEVCLQVLEDWNESQRIWLSPEEFESENDASQTPPNRILNWLIKTGWLKRIEDFSTLTTNIIIPDYAAVFLTAFEELVNPSTDDTEIYIQNVYATLFSFWHDKKMNLAMLKTALVNTKKLNKALQDMLHNMDHFFSRLLKQKSYEEVLAEHLEGYVEEIVEKKYHILKTNDNFYLYKNDIKRCLREMREDIPWMEQVQKKADKEKGEDVLSIINAIERGFDDIEHRISNMDKEHSKYIRATVTRMNYMLNGESDTRGLMIQLLKTIGDSKDSEEKIEKVGQSMNLSHFEVLSEKSLYKKRKRRDFASQVEEEKQQEELSREDVLRLNKIHTRYQQAEIEDFIEAYMHDDHMEVKDIDIRDEESFEKLILAYDYSTRRNSKYKVIERDDKLIDNGSYRYPALTFVRRKPKS

SEQ ID NO: 31156 - protein, 218 aa, Lachnospiraceae bacterium 5_1_63FAA
MIPYYEELNDEEKNAVTKVIRTLLKQTFVLERKYDKKSGRLVYNKEFRTIDLHQEFLREYFKISGIELRENLHLGVFYIEGETLIGEKISRLSTIYLLILKLLYDEHMAEASSNTSVYTSLGEIHEKINDFHLMRTLPSITEMRRSIALLKKYQIIEPLDVLEELNDETRMMIYPCVNVVLLGDDIRRLIESFSKEEVDSEFDEDEAAISGIIEDMPE

SEQ ID NO: 31157 - protein, 640 aa, Lachnospiraceae bacterium 5_1_63FAA
MTKTKQPFLALSKICLNNWHYIDQKILSFNDGINFFTGHSGSGKSTVIDAMQIVLYANTDGRGFFNKAAADDSDRNLIEYLRGMVAVGEKDEVTYLRNKNFSTTIVLEFTQTESDEKECLGVVFDVDTARNDTSRLFFWHKGGILENAYRTEEHAMTISELRKYMQKNFKKEDFYFGTSNERFRKQMYDIYLGGLDMEKFPRLFKRAIPFKMNIKLEDFVKEYICMEQDIHIEDMQESVMQYGRMRQRIEDTLKEAKSLEEIKESFVKFKTKKEEQDYCQYRMNKLDVLKLKTDIHLLQQKIEDGEKDLKTQEENETVLEKKLEKLAKEYDALVAQIAGSGYDQIATRKKDVQELLGQLNHSVQRWEQTSKDLKKWCDLDITPNQAIWDIEKFEQGDITEDDLNRLKHTLDILRKETEEERQDNASALRTLKKQEKSISDELKELKKGNKAYPKEVLDARYELQMKLSEKCGDFVKVNVLADLLDMKDERWHKAVEGYLGSNKLTLIVEPKYVKDAMEIYRDMDQKKYWRISIADTQKIDKQDMKVEENALSEEVLAEQSYVKKLIESLIGRVIKCETIDELRNCRTGITPDGMLYKNFQLKRLDPKQYTRNSYIGDNSLRHRIKELEKEKDKIFDKKIH

SEQ ID NO: 31158 - protein, 483 aa, Lachnospiraceae bacterium 8_1_57FAA
MERIPKDFYKLFSSKYTDYYMLFLTAIYEEMSLSYSVLGLTEKECRAVMNEKIAAAALLWDEENYDEEGEFLTRSNMASVCLKHFQEWGWLKQDYDEALNSYVVTFPEYSQMYVELFRSLLDEQESEERESVMTIYSHLYTYSSDKEKNNEILKSALRVSKKLVQMLVNMQDGMRGYFDELSRQKDFRGIQDVLVKEINNSDSRKYAILTTTDSFYRYKEAVKELLDRNLQENDMSRLKLLRELEEVRQKKMKDEENAGKVKDPKKTDEAEKIKELRLERAAAMCEEAADTLIRIERQFDAIERRYNKLIEQKTIFASRAAARIRYVLQEGAEEDRTVALVDLLNKSRRKEEISEKLAERIRLSRPHRALTDESLYKRKEKGREAFVPATVSEGGQAEENLESFVLKPLYTRKELQEFKERNSVGNVFRTTRQTVRSAEDLEKLFFIWQEATENAFGSGEITVGEEEETEQGMRFSTLEIRED

SEQ ID NO: 31159 - protein, 212 aa, Lachnospiraceae bacterium 8_1_57FAA; identical to SEQ ID NO: 30881

SEQ ID NO: 31160 - protein, 1121 aa, Lachnospiraceae bacterium 8_1_57FAA
MKQPKKIFTRMLINNWGGISHKMLEFHEYVNLFSGKSGSGKSTVMDAIQVVLYGSVSANFLNKAADDSKNKRSVLSYLRGAQKDGTANRGDVDFCSQIVLEIEDTATHIVTCVGAAFEVAKGDTDLKKYTYFSHSGRIPKDEYLENNVPYSIAQIRKLTEERSRSADNRGRGEVNKVYPSKEAYLYTLYGEIFGQVEQGRMITMEKSAIALKMTSGTGQFIRDYMFPKTKEDTVATISEQLGAYREIKERVEDLEKRIEMLDKIQVYDRELTNVRAEKVRTETVLKCIEIEENIIRLKGRESELESVEKEADEAKKEQKILQDELQTIRDERARVQAELNNSDYGKKEQELKDLEYRIALLADNSAQWRQIVKGLKRWEEEDVVTDYVSNRALQLIQEIRGGALTEKLCKELRTHLDLALDNITNELSELRISIHETEKDIKEKQDAVEDLQNDRKPYPLELKKARQELQRALSDRYGRKIEVHIFADLFDITDEKWKNAIEGRLGRIKKSMITEPAYALDAAKIFRRMQQFEEVDLINSEAVQKDSPEADENSLYEAVHAESGYVDRCLKRYLGRIQKCETVEELSTVKDGVTPDCYSYSGYMFRHLRRKDYTKNACIGTKVSKAKLRELQEEIIDLQSSLIADRQTEESLKEARQFERFGQEPEHLMRLAGAADELADHYRRQDRLKEEIKELKNGTLAAELQAKTKELTSRIEEKEQAAGRLREKEIETGKKKGKLEEKIKALKERLDFLMKGYVPNDEIFAEVRSALETKSEAAYKKEMTVMAERLFEKETKLQDERIKSRNAFNNTYPAYGFSGVEHDNEVYDKVLERCRKDFEPKYKEEFEKQYELVYHSLRDNVIATIHGEIKSAYRHRRQINKMLSQIRFSDSIYQIDISPAKNENGQFYEMLMAEELDSKVIDHSGFDGQMSLMEDEFFRKYERKIGLLTEKFMPSREEDGAGREKHKNEMERFADYRNYLDFNMYEQSIDENGIEKKNYVDDMAGVDSGGEGQNPKYVALLAGFAMLYMQQSNRDSKIRLVLLDEAFSKMDKERSEVCLKYARELELQLIVCVPDERLQSLIRNVDSVYGFRRFRNQVTMMHIDKGNYLDMIAGESRSEEV

SEQ ID NO: 31161 - protein, 410 aa, Lachnospiraceae bacterium 8_1_57FAA
MSGNLLAKWIIGKAEKSEAYRAGTLTGMKHPKPDREMIKAAGGLPELIRQADELEKSGYIRTEKSNLGADMKKIYYSIGVIPKLCEKEGIEDPRKQQLRYIKQIEQLRAEVQGSFLEGYYDEIIRRLELGEIVKSPDMEDVDFFRCLNAVVNLKKSLWMRVFSAAVLNDSKRFKKDYEKKVVKVLVRSPLYEEGMTDDEILSVHGILSYAQVMEWKGPLLYKLKGGQEYIEDKAREKEYEIDTSQNQYGTVINSQTLERAFPVSIKGVQRIVTIENKANYEEMKYREDTLYLFCHGFYSPKERIFLKRLMEVAEGEIQYFHWGDMDMGGIRIFRFNKKNIFPKLKPYKMDREAFQEALERGAGIPLEEKKKEKLEKLNAGELEELKKCILEKGVEIEQEILLAENAIAEN

SEQ ID NO: 31162 - protein, 539 aa, Bifidobacterium sp. 12_1_47BFAA
MRELERLRPVYETGVLRLLLRQNAMLYVSLLRSTFDPLTGELPRETVEERFAQSLSSLADAGEYAPREDQTFAEAAHQILADLTREGEGDYAWLANSHDAASHRFLYRLTARAHRAIEALSRLEDESRALSGAQANSIIMEIEHARMQLTADPGERIKLLNREIKERKHEIKRIQQGKQHATLSGAQVEDVIAVIHNTLRGVPIDLRELVLDERDNGDALRRRMQAGDISVDENLTRYHDEYRRSFRESDSGRRFEDAFQVIITDEGRQQIDEALRAIAKTPYLAGESGVLLGQIRDELARIYDGIEAVRRQMRVSDEAISRLVRQQTDTRYRTMLTRLNRLYARLNADAKTHMGDASRPYDTATSDALFAPLPMRPAKSMTRATAPGLSDLAAEAPQSTPVADLRDMVNSGGPRLLRMVSLIRRNPVTVDRSDDRPGATLVDIAASFNRLPESERRESEIVGFLGGLGAVSGNAIADEPSTDGVGVGVDSDIATEPAPAQRGDTATWHCVSIDGEPRNWITRPVLADMDELSIIVEEG

SEQ ID NO: 31163 - protein, 224 aa, Bifidobacterium sp. 12_1_47BFAA; identical to SEQ ID NO: 31043

SEQ ID NO: 31164 - protein, 1182 aa, Bifidobacterium sp. 12_1_47BFAA
MMQATDVQMIADRWMLESRRLINWGSYEGYHEFRPSTDHKLPVTLLAGASESGKSTLVDAQISLLYPTGTPFNKASNSGRSERSDYTYLRGMVGVGSTETGDEPLYLRGRDENGAPQPVWGAIVDTYRNQTTGQVLSCAKFLYLMPGDGRGDVRRQYVVWGKPVDPRRMDQYRDAPFTPAQLKATYPDCLTFPSAEAFHTHIWSAMGLSEAACRLLHKIQSADAPSRLDDIFKQGVLGVPEALDLARTTVEDYERYDENFHAMDEKTRRMDTLRGIQQAYGEYAAARGKARAFEPVKPAVDGTVPAVLRDWALARMRGEVAVQLPADRAEQQNSEAEAKLLRRRTEDLRTRLDMIRGQMQGLDGGDLTRLELELDQARRTLEDVQANRTRIEQTFASIGETLPGDEQAWNERRINAVNFKREYNKRDGECEEALTAAINARAGARGDLERLQRDFDRQRSQRTRISQQMDETRAMLCRATGLTPAELPYVAELMDVNEHEEDWRLAMNVAYAPIAQTILVDKRHEQGFAAKVSTIDPRTMPRRTWQFVDTARHYDDTGAHANILTGEQDGDWLSGKLRYRDDSPFADWLRSQTQDERFDALCVTAIDDTDRTNRQVQADGQIKSGARGQHGTKDRAQVIGFVNETYLNALAAQVDAARNALSQADTDYTAAKTQSDNLHRELELANQLAYTSWERIDIAGAQRTITDTQDAIASIKNDPKLAELAKQRDELNAELDRVERQRIESDQAAARAGSAVEAALIWLRDHADTGTTDAAGATADNDDDAASGPLPDEVTAALAESYDNRFAGLADAAMRAHMIIGAGAAGTQAPGESFPERTIAGIGKDMASRINLLNGQADAARTGVESKMSTYIALYAADDDSLTASVEDYRYYLDELASLTQLAAVAATDAEYRRCLEQLLRSFLTIKRAIDTDASDIHDQLDRINAMLKGQQFGPKHGSLSLHADVRRPERTFWAQLIRVIGTLNDWKSADVNDSDASRKAFAACAPMVGLLRAELAQVKDANGVKSYGARNLDPRCRSSFYAIVHHADGPDERITSTGGRSGGALQELTSFVYGAALIYLLGGGLTSEPSYTTLFLDEALIKADGRYTQRALTVLPRLGFQVIVSAPESKTGEILEVSTKAYVTYKDPDTGLTSLREAVLHQNDMDDESSSDILKDDGVAE

SEQ ID NO: 31165 - protein, 394 aa, Bifidobacterium sp. 12_1_47BFAA; identical to SEQ ID NO: 30423

SEQ ID NO: 31166 - protein, 111 aa, Anaerostipes sp. 3_2_56FAA
METASASSYVYTSLGEINEKIGDFALLKNLSSATEMRKTISLLKKYQIIEPMDVLEDLNEESRMVVYPCINAVLLGADVQKLIETFTEEDERGEEDGEQTGIQSTIEDLSE

SEQ ID NO: 31167 - protein, 1127 aa, Anaerostipes sp. 3_2_56FAA
MEKKTESKQAFKALSKICLNNWHYIERKVLSFSEGINFFTGHSGSGKSTVIDALQIVLYANTDGRGFFNKAAADDSDRSLIEYLRGMISVGDNNEGKYIRNRNFSTTIVLELEQTVTGAKECVGVVFDVETATNEISRLFFWHKGGILENRYRKEDRAMATTEVRDYIKEHFPKEEFYFGSSNERFRRQLYDIYLGGLDAEKFPRLFKRAIPFKMNIKLEDFVREYICMEQDIQIEDMQESVLQYGRMRRKIEDTLKEIGSLKQIGTGYDRFSRAEQEVRVCQYRMEKLVMLQLKEQIRDLHEKIEKAGEDKKTQEKNRKELSGQLADLAEEYDRLVKQIANSGYENLKTELQGVNELLEQLQKSKAAWQQTSAGLNQWAELDVTPNQTIWDIESFSKGDISLGELRRLRHSLKEIREEVENDRQDAASELRRIKKREKEIDGELKKLKRGNKAYPRELENARYELQTRLSSKFQAAVKVHILSDLLDMKSETWHKAVEGYLGSNKLSLVVEPDYAKAAMEIYREMDEKQFFRASILDTEKILKEKPSVMDHALAEEVVAKEPYVRNFMDLLLGRVIKCHSIEELRNQRTGVTPDCLLYKNFQLKRLNPADYTKRSYIGESSVKQRIRDLKEELKQLSAKKEPFANMLAEAEDILRLEALGRSEEEYIEQQEALKKIKEKTVLKKDLQDQMLKMKEESIGELEERQRENKRLQAQKQELLNEVSRAVWNREKQIEDWQRLYVSANSELTEQERSFCRSEELEKAFDDYMQGRMPSNLESLKNGTFRKIKQAENSREEAYRSLVELRSEYLREYPNRTFSPAIETNEPYEELLQKLECDHLADYQERAREQARSAAEHFKDDFISKIRYAILEAYQRRDELNRIISRLDFGKDKYQFRITKNKGPDGVYYPMFMDESLQIDPSTLDASMDHQMNLFSMEHENRYGEVMSDLIDIFIPPENASPEELEEAKRNMEKYADYRTYLSFDMEQIVEGEEKLTIGLGRMIKKNSGGEGQNPLYVALLASFAQAYRINLSPKLRRSPTIRLVVLDEAFSKMDAEKVASCIELIRGLGFQAIISATNDKIQNYLENVDKTFVYANPNKKSISIQEFEKREFDHLMEEAEDEEGTA

SEQ ID NO: 31168 - protein, 403 aa, Anaerostipes sp. 3_2_56FAA
MKKELLKMIIEKTEKSASDWKKGAEGNRSFLVHQELYDQIGKTEFINAARELECQGLLKIEWEAVGVDIRRIRYSLKDLALIYEMSGIRPKFQVMEENMADVENFLHSVKGLWIKDYLRDCMKRLEQGKIPSEFSKREELFRCLKGIDGLKEPLYKRVFSKYCLGDSKLFEKKLESTVLSIARKYHTDIEEGMDHTQVLSQLFIEEYSQELALKGPLRISVDGQEINLGQFRYGAVLNSQMLVHAKPQSGQNIKRILTIENKANYMAAPYDEEAVIIYSHGFFTPKEREFLINLRESLCAETECFHSGDLDYGGILIYRYIKQKIFPDLMPCQMDEEIYHKYEKYAVEMEPGTLKKLKKLRMDEIPELMEMKELLVREGKGLEQESFLLASGEPQENAELRCR

SEQ ID NO: 31169 - protein, 497 aa, Pseudoxanthomonas suwonensis 11-1
MSSTAFPSLFAHVPSAAFGPLASPNRERYWRLLCRLFDEYFGPDAPLPPSHGFARREIVAALERYLLAEEIWEDEGDAPLHGGLAARATAVYERLRQAGWLRQDKLGAREMVLMPPSLAQLLATLVEFADRGPTFVSAKIRSIELQLQQVVEGRAGGEALDEAAEQARRLLSSLAAMSLQVRDLMPELVRSETTAQFARQWFERYVAQFFIRDYADLHRADHPLARRAQILLMVQEIENGPLHEAIAAWYREHVAEGDDARAGQLLQRSLMRLRELERIDEYLARLDEDMRQANRRALAFLDYRLRAPDRLDVLLHRAARGALAADENALRMPVGPGGLMDETQLRAPRRRPQPIPRSANSNAQPSAEQIARLGLLRRMKRVRLVTAEDMAAYVGRQLPPGGSIDSETLDVASIQDLRAYQTLLTLALRGSRPGGLRRDDPLGRLLRGFRVELVDGGEPGDNGWLRAPRFVVHHAAGRGPSASNAARTTAQAEPDPA

SEQ ID NO: 31170 - protein, 220 aa, Pseudoxanthomonas suwonensis 11-1
MKRSWNTLSQQSNGMYAVADFERAAYRLVTEQVLYASDARSRSAYHLVEAYLEDFASALDPLGIRLERNAHHRYVVALPRHGEGTPVRLDETLLLLVLRQRYDEGMKQGLVEELGEVVVELPDLQEAWPALTGRPMPEVGALRALAATARRWGVCRLVEGEPDDLQPFHLVVRPAIVDIVGEQWLHRLDQHNLGGGGPDAEGDPDGDADTLDAEDDHAAA

SEQ ID NO: 31171 - protein, 1142 aa, Pseudoxanthomonas suwonensis 11-1
MQLLERMHLVQYFLFEAKTLQLDRTSAIIAPNGAGKSALLDALQLVLLGGDRRHIHFNAQAGGKARARSIRDYCLGVYRSGEDGRKRRTATTYVTLVFRDEETGTPLTAGISLGASVDEPEHRQHGLFLLPGVALELEEHLERVDGRELPLEWSRFRELAAKRCRKAGTTPEFHASGERFVKDLLHRLRPGSGAGVDFNAYRKAFQNALNLQRVEDVDLFVRTLVAEDRPTDIARFKALLDSFRQIKERIEQLERRIAEAEAVDAQYGKVAAQAVRAASYRALAAEYARDLLGEQVEQAQSDCDAGREELAAAGLALEQARAERRSLQEEYERVREQLQGSSAYGEQASFRELATRDREQLQRLQSDLQRRLEQLREPLQELAGLRLPGVDEAGLGKALAPLEELHAEVAASAEGDGEGPAPDAFHARLKQALAAAAPVQSTVAAWARQSHEAWQLARARRDALRGNQQRLDAGQANLRDEVMRLVNHLREAGIEAQPVCDLVRVTDKRWQPAIEAYLRSHVEALLVPAGREEDAVRVYRSLQGARAVYGVKLALPSQARSHRQERLAEDSVAALIEGDNADAVAYLRRQLGDLRCVETEAEVVRTRQGLTRDGLVAKGGGIERRRLPSSGELKIGVAQDGERLRLLRAELENAERELRQCEPEARRAEGLRQKLARLEGDDVARSLHELLLQYRQVLARYQAMERSHADAVDPDLLRLGERATALKAQVQKAESTIESLVRAEALAQGELERRQALLRALQAQEEIVARNAVEAFRDPHVDPNRVEQLREELEAKGTGLEEARNLCERRAQDNDRQLAALLPEAWSQLQRYAGSHGLDLDFAADAWKPARALMQRELVQLRETELVNYRAEADRAYETAVETFRSNVANTLHDNFVRLKAQIDALNRTLRNSPAFSNNERYRFHYEVVAEYRDLHRFIQKVADVGAEDTLFGSAGEVPEAFRQLIEDSAAAKLAASPLDDYRRFFHFGVEIRQDDRVIGTLSERMRSGSGGEHRAPLYVIAGAALAAAYGKSEAHPGGIGVILLDEFGDKIDAQNARATTNYLRSLGLQLVLAAPDTAQGTLSGVLDSYIELFRDGDLLQAERIEVKEAARELLLSDQFDLHPELLAGELERLARETGATT

SEQ ID NO: 31172 - protein, 498 aa, Dietzia cinnamea P4
MRLVSALARFLQLSRLNGESSALSLLRAQLWPLIVAVLAEVFEGSSRRVPSSEFYEFLDRTLTAVRDSGADVPGTAQAYVRQWVDAGWMLRRPGTAATGETLEPTQSALVVMDFLDGLQTPRRGLTVSRVETLTRQLEDLARDTDPSVQGRLAALHRERDRIDAAIARVEAGDLELADPEQVGEKVSEILRGADDIPADFARVRAEFESLNQDLRRRLLDQDGARGDVLDAVFGGVDLIGDSEAGRSFSSFYSVLLDPERSASVDTWIDDILSRPQVADLPPSARRGLRELFDEMETAGAEVNGVLTSLSRSLRHFVTSDAYVEHRQMLALIRSARAAAAEASGARAVKPTSQMSVPLRRVGMSVRSVSALRLRNPGEERVAAEVAHHEEGHADLEALTALVRASEIDEAELRAHVRDVVSRLGPSSIGAILREHPATQGVASIVGLLNLAITTQAEAPPDDPRSVETVTWTSGSGPTLSARIPTLVFTADRVLEEDL

SEQ ID NO: 31173 - protein, 239 aa, Dietzia cinnamea P4
MTTPATADPDGPDGAGDDGLWPGDTGTLSFASRRALARLLTGPLVQAHRQPEIWAAVVSDEPAMRSRLADVFLDLVLDHDAGIAFTRQVDTGGRVEVPAVLRTETLSHMDTVLLLHLRSELSVAQPGERVIVDREDVAERVDVYRSVVDSDRSRYARKFDASWNRLKSYSLLSDTETEGRAEVSPVLRHLFDADVVAGIRDEYRALIEARGGADGEHDGEPAGGRDDALFDDDEVVDDD

SEQ ID NO: 31174 - protein, 1071 aa, Dietzia cinnamea P4
MEVPRKGFLITGGSGSGKSTLIDAVSAVLVPPAHLRFNAAAQEEAGRGSGRTLVSYIRGAWRRGADAESGDLASVYLRPKATFSAIALTYSNGRGTSVTLLLLLYLRSGDNSAAGVKRLHGVREHSSDEPTDLPGLFGYLRSGIDKRALKREIPDVRFHDSYSAFAAAFRRRLGIASESAQLLLHRTLSAKSLSSLDQLFRDFMLEEPGTFAVADRAVAQFSELREAHRSVVDVRKQIAHLTPLADLRASRNRVLALADELDAESQAFPAVQAAVTIELVEEELRTARGALVAAESTIASARDRLDVRRTAADDIRARLRGSAGAGRDEFARELDRALEHAADVSARRARAETEVERLGGALPTSAEDFAALLATLEREDAEQEAERARDRETLRAVAGSLNEEQRSLEEVTAQLQALLRHRSNIDSRLLAARDLVSEAAGLSARELPFAGELLDVPTEHARWRPAIERVLSGFARTMLVPDHLRDRVAAAVDSTHLGVRLVYEVVDHGDDSAARRTGPHSLVRKVRPAAGPFLQWLNRRLAAEFDVACVETAAELAQHDKAVTLHGLIRRGARFEKDDRRRIDDPAAFQLGSMDDSKVEALTTLRNEIRARIDTHERQWAGLDDLDAQRRARQRAAATLLGLRWEELDADTAEDRARAARDRLDQWREQHPEVAEMERDLRAAEEAQSRAQAEYDSANRAGAVAASVVEGLERRLADLTGHERRDVDEGAAARIRERLAAATRRLTAENVQEVCQRAERSIAAEQVSTATERDRIHRRITAVLTSYLELWPAKKADLKSDPEFVGEAVEWLVQLRRDRLAEFEDRFLGLIGDMQTRNLGELARHIRRARSEIEAGIRPVNDSLRRSEFQSGRWLQIEVRDRRTETVTDFLSDLEKAVSGALDKRTVDTAEAGFAVMSRLLDRLGSADSADRRWRWTVLDTRRHVGFIGVEIDEDGTPTNYHDSSSGLSGGQAQKLVFFCLAAALRFQLADIDADVPRYGTVVLDEAFDRADPDYTRRAMDVFTDFGFHMVLATPLKLLQTLEPYIGGLVVVGIEDGSRSRIERVTWEAAS

SEQ ID NO: 31175 - protein, 401 aa, Dietzia cinnamea P4
MAGPTTPRAPDDLAEACATRFARRYREWIADPDSAAAYVLRFSTASPTATRASDDPAGTADWIRRWREFDSAQDALDVQITWVERRLPGFGAVALPQRVEVRGGRAIARIAGRAAHWEAMLARATDLLRLGPDESVLRLAAAATAPTWEKLSDADMERLLAVCRWALAHPTEGLRAREIAVPGVDTKWIESRLRVVEQLVDAARSGRDSATPDGAVTVAGLGLKRSDLRVRMRILDPSIDFPLRDVESPVDQLAALWPGSEGPRTLVVVENLTTFLALPDLPGAVGLFGRGFAVDAVAALPWAMTARIVYWGDLDSHGFAILDRLRHHAPHAVSVLMNVETLDAWGEFTVPEPTPARTMPTRLTASEVAALEALTGRGDLRLEQERIPWDWALPRLRSALD

SEQ ID NO: 31176 - protein, 234 aa, Dietzia cinnamea P4
QGRSFQAFYDLLLSTSGQEELSMLLDRMTGIEEVGADRRLRTVHHSWAEAAERTQHTVRSISEQLRRFTDDQVWLENRRVLDLVREVETTALHLRDGELPGFGLELEETSIDVALPTDRPLFTVRPASEVNSDLEPVEAEEVDTSVLANQVVVDPARLATRIRALIPVHGTARLEDIISLYPLQHGAAEIVGYLALDEDDLEVTTHEHEETVIEYHEAGRHMRATMPRVEVTRR

SEQ ID NO: 31177 - protein, 231 aa, Dietzia cinnamea P4
MTASGSSTSDGAVGDRVAAGRVTPERAVAISAIRLMQGVVYQESDAWDDLVRHQGAVRDHFAVVGLEVVVDDDEGYAYLRTADTPEGENALPRVIRRRTLTYADSLLLVLLRKRLAEFESAGDPGQLVLTHDEIVEMIQLFLHRSTDEAREQHQIDASINRLVGMGFLRQLKDRKGEWEVRRILKAYVDAETLSDFSAKLAEYAEAGAADEGVGHARAADESTADHPSEDI

SEQ ID NO: 31178 - protein, 1134 aa, Dietzia cinnamea P4
MTSGLFSSVELGSGERPGFRLARLEVLNWGTFDSRVWNLEPAGETLLLTGDIGSGKSTLVDAVSTLMLPSHRIDYNKAAGASRKERTLRSYVEGHHKTERNEATGSVRSVGLRDGHSYSVILGVFRNEGYGEEVTLAQVFQQQEATGQPWRRFITADRALSIDPDFTGFGSDLGALITRLRDSGAVVDKDFPTYGRAMRRLLGIRSEQAMELFHQTISMKSVGDLNEFVRTHMLEPVDASARIEGILRHFEDLTRAHDAVTRARTQLAALEPLVEQIHTYDAALERRERLREERLALRPYFAELRMALRQAEIDTLTTEVASANTEVVRLREKARELATEREALVTARAESGGNRIGDLERDAAAAREQLDERRRRRDRFTDAVTRAGLDPVTDEAAFTRLPEAIAAREAELDSHGVDLATRHNALVMDHGERKRQLREVQQELAGLTGRTSNLPTEQLQVRAQLCAELGLDAAELPFAGELMDIAAEHAQWRGAAERVLRGFALSLLVPQEHYADVAEWVDSRRLTSRRADGREVGVRLVYERVPERHVPLQRPQTDGLLLADTVEIADSPLRGYLAKELYARADHLCAQTMEEFRHADRAVTVQGQIRSRNRHVKDDRSSTTDARHWVLGWRNEDKVDALRARCARLEAEVAELATRLDAATAEQNDAGQARTALVRLAEYPSWRDLDWAEAQQRADSAEAERLRLVRGSDELSEIDQRIADLDARAATVADDERELSDHRSRWQSSIDHEQRQMLRDQRVIDELDEALLESAREVYPRLRERLGYGEDPGAELAQTADEAHSAEAALSDAIDADVERAQRELNGLTTRIHQAMAEIRRTWPEQTKEMDAAVAARAEYVRFHARLADDDLPRFVDEFESQLRKNTIRELAGFHNWLLRQADDIGQKIEKTNEALGAIDFNPGRFVRLDCENTVNQEVRQFRADLRGVTDDAFGGDGQYSESRYEQVRAILERLRGREGHSESDRAWRLRVTDVRNWFTFSASERDRETDREFEHYRDSDGKSGGQKEKLAYTILAASLAYQFGLEWGAAKARDFRFAVIDEAFGRGSDASTRYALELFAKLGIQLLIVTPLQKVHVIAPYVRTIGYVDNVEGRYSRLVQMTTEEYQRQNGSQ

SEQ ID NO: 31179 - protein, 280 aa, Lautropia mirabilis ATCC 51599
MNGSASSPLASALGPLASLDALFRLFLAGRHLNRVADPALWAELERHEADYTLLFSSLGYTLRVDHRGFAWFHTPSASAPINRISRQLALLFMVIFDTQANAGQTLQRFADWLVTRELLAETHKQHQDMLEAEGLDTEGLRELFDRAAGLGFAQRDGAGWRLLPAVYRYLDHFQALAADERDTTDAGFGPSDDADGMQAGAGGAASSEADGLSGRISPRRRPSPIDDDNAGGDAPCPSGDAIGNGNEVMTGEDDLSIDDNPASEDAPSSDAPDTDTGEAP

SEQ ID NO: 31180 - protein, 915 aa, Lautropia mirabilis ATCC 51599
MQYGFQRLVLLNSAGYSRAELPLDGSVSLVAPNNTGKTSLINALQYLLIIDRRVMNFGAHDADKSRRFYFPHNSAYILLEVTLPETGTVVLGCVGKGVSFDYEYFAYAGPLNVDEYRLPGGELVAQPQLAAHLATHERRVFSYSGSEFADMIYGGRNRKATSELDLCVFRLEHASDAASFQRVLTHTLKLDRLTSADVKKNLLQIFRRDLPDAGIDFKAEWDRAFADLNGEWSQYRAAVAQKVLLETLEQKHEARLELRGRLLCMKPLIDDALAHWQQHYDTRHQALTRELGQHDTEMKRLRDEDIQLARQQSLAEQEEKQLRQQTDQLQALQRRFALIPERQLLDQQRAALQQDIDAIVVRIGQAQSREPAAIEREIQRLQRELAQLEQEIRTQGNNLYQQLASQLAPEQLTVLNRTLARSVLTLGADDFTLDAAALASILTSQPSGLPGLKLNLDALTAQHEQRSLAELTTLQQELQAQLKQLHEQLDTARTLETVRAQRQALDAQLKQLDEDIRAWAEMQTLQTAEPARQQRLTELQQMLATLTETLAKAAERQQALDRQRQQLQQDLHTLQEQHRRIEQRRNQRQDHQPPFTWLPELPHHPWLAQPDLAMDKLADHLQHYLADCRQLPELDEQIRRLLIDLNTGGLTKYHLSENPETEVSRLITFAHHLPQEFEALEKKSRSAVVNVAASLRELRDGLNAFKGRMREFNRKIGGRRLSDLSVFKIEPEDNTPLVEAIELLISTAATVDSGETFDLFNQQSVLDDDQLDRAKTLLIEEGNARQGLRVADLFELRFWVGKEGQTAEAFNDLDSAASNGTVLMAKLITGLAMLHLMQDQRRPIQGICYLDEALALDARNQRSLIDTAADFGFSLIFASPAPLVTARYIVPIQHHDGHNQISRLSWQIIEPLEEA

SEQ ID NO: 31181 - protein, 383 aa, Lautropia mirabilis ATCC 51599
MSKHENALRAALLRLNGQNPLPVSAFTPAQRRALERFGQQTGAVQFLARGSGGSYRISNPAVFALHLRTLSPLAPIPPVPASPEAAPAPHPRSWVPSPAKGAPPVADSTGTPCAPPDTDTPLTTGTSAAAGAPPIRAHNIGHRRDSKAGRHAHDAGYVLLKAAFPRRNSVMPPSSGQPESGSDSPWGASHIAMTVPDSVPAGQGTSSAPLDWHAPTRNLHLPLAAHTRDFGAACLRITPDDDWHTDAPLWLIENQALFDRTDWLPPGPAVTLLYYNGQLSDLLVRWLAARPRGSRLIHFPDYDGIGLANFARLHAQLGDACHFWLMPGWADSLQRYGSHALWLRTLDPFLRVRPDLPSHLAPLLTQMELNGLALEQEAVWLTA

SEQ ID NO: 31182 - protein, 482 aa, Pseudarthrobacter phenanthrenivorans Sphe3
MPRTARSSADAISARLRDLELLTKGPAWALTRSAPWVIAVLQASFTRTRPQLPLEEFHADVDSFLEELRRQDPGLGGGANGKSFGDEWTRRQFLTRRNQSGQIVYEVTEPAARVLAFLDSLSSERSTLNGSRLGTLLGDVEKLANETNPDQSARLESLEEEIEERQQLIQDISSGEFDGLLDDDEAVEAAGNILDLAASLPADYKKMRDRIEELVGGLRNQIIEESLTKGATMAQVLEADKRLRQSPEGRTFRSFTAFLEDPQQQLRFRSAIGEVLSRQFADDLSPEDRETLKNLVAELRQQHSQIQRIYGKLSESLNTYVQSDDFRQSVRLRQVLREAEQAIRSLPYERERPGLVPGPVLFNAGFESLSMVKLFDPDEFAAPPKLADPIAFSDSDRTRSPRTGKAKPGVVRAAMAGAATLSEAWRQLPPEEQHINSIRALLSEALHAGAGFDEEAFEGLDFEQIDGTTRRAYLPLVKLKKD

SEQ ID NO: 31183 - protein, 251 aa, Pseudarthrobacter phenanthrenivorans Sphe3
MMTEVSNAERPHTGGITPRDTFVDGAALFPGDTGVLSMKVRQALVKLLKGPYVDGGRDEKLWTVLLDHQVILRSRLSELFLNLELDHERKIAVLRPVDPDAIGGSARSSILRQQRALSRVETIVLLRMRLLLDRHVTAQTDPTITREEIADLVAHYQPAGQQDALRDSDVVNRAITKLLARQLLLPTGLDNVYTISNALPLALPFENIGDIPAQIAALAAATTDPTGTEALIELDTEPAAEPADNEAEDAQ

SEQ ID NO: 31184 - protein, 1153 aa, Pseudarthrobacter phenanthrenivorans Sphe3
MLPLGDLTNPGQMRLALVQVVNWGTFHGAHTMHVDRNGTLLTGNSGVGKSTLFDAMLRVFDARPRSNEAAAQRSGGAVEDKRTTFTYMRGKVGDKAVGEGSASAFQRPGATWSAVALTFDNAAGTRVTISALFDLPKNGTESSVGRFYLVDHAPLDLEALEGIADKRFTKAALETIFPDAQVFDVHKAFAERFRRLLGINSDQALPLLRVIQAGKGLGGSVNTFFRDQVLDAPATLAAADDVVEEFSNLMSIRQRLEDIRQQRDQLAPVPGLNREYAQSLLDANRLRDLAGEEFDAYKQQLAVTVHQKTLARFRELAQAKAKELGAERSVRDGLAKELRELEADYNNQGGNAISAIEQSLENARVGLKLRQQVEEAARQALSDAGLRLDWSEEGWEQAHEQAAARSAELKDDSQALQELRFEAFDAHATRKRELAAAEQELVSLKTRKSLLPPSSIENRAAIAAATGIPEDRMPFAGELMDLAEGQEKWRPAAERALRNLATTLLVPGEHFAAVTRYLNDHNVRGALRAVDVSKPLAGGALALEDVHDGDLLTKLDILATGAATEAGEWIRERIALDFAYPCVEDPDELATLDRGLSLGGVVKRNRHTVEKDDRFTSRQDYVLGFDNAAKLELVAGQVEDLRQEVAKAAELAQSREDSHQGMSRQLEALRRIAEDHRPWEQVSAAVAAEELARIEQRLKDALAAQADLEPLRATIEEVRHKHQSSTEAAAVLQSEYKALDRQLTAADSLLEAARQRLTQAPPSDATVTALEPYFADFGDVSEMHELDNLANRVRTALLGELHAAESRGQATAERLTRIFEGFVREWGTAISADHGTTIGAAGEFETRYHAIVSDGLPAQEAEFRQFFNQRTHESFSTLLHLLDEERRSITSRILPLNGILSQVNFHEGSFLELDIKQTLPPTAKQFKDAIQNALKARHTRPARADASRAEGGGERDDDAELTARYKSLETLVKRLGSQAPEDRRWRAEVLDVRGHLFIQCKEHREVAGPASGTKGGAKKSEVFMHADTGSMSGGERQRFTAFIMAAALSYQLGIAEQGFTTYGTVMMDEAFVLASEEFAGAGIKALHEFGFQLLLAAPENVIDLSRHLGSVTEILRDKRTNRSGVLTAPVIKPRPGEEGAWRSEANPVDIILR

SEQ ID NO: 31185 - protein, 472 aa, Clostridium symbiosum WAL-14163
MRLMNEIPDRFWSLFRSVNRPVYIEALLKINEEYEYSNYFLSREACIRILGEHFARKKYVIWQDELEDELDTLEPPATRVLGWLLRAGWLRKVDDYASMTANIVIPDYAAVMLEAFRRLHSDEEDETQIYIQNIYAILFSLKNDRRAGLSLLGTALVNTKKLNKTLQDMLHNMDKFFAGLLQQKNYANLLKDHLEGYVEEIVRKKYHILKTSDNFYLYKTDIKYWIGEMRDDEQWLEALVRKSAADSYGRLSAGRTAEEEQKAAETRMMEDILEKLSQIERGFDDIEHRISNMDKEHSRYVRATVTRLNYLLNQEDNTKGLIIRLLNRLADDGEQENMLTETGKRMNLSRMNILSEASLYKRRKVKADFSKNLEPDEEDKELTTEEILNLNRVKNRYSRSEIENFITQRAVSGKMEADADTVSCDEEFEKLILAYDYSTRQKSRYLVEEEEAEMIDNGRYRYPKLVFVRRNE

SEQ ID NO: 31186 - protein, 229 aa, Clostridium symbiosum WAL-14163
MTDIPYFDGLMGEEQREITDSIRLLLRQTFILERKYDRRTGRFQYNREFRICNKHLEFIRTYFSISGISVYENSQLGVIYIQGETLVGDKLPRLATLYLLILKLIYDEQMESVSTSVNVYTTLGEMHEKLGSYRLFKKQPSPTDIRRAVTLLKKYQVIEPLELLDDLNGNSRLIVYPCINVVLLGDDVRELLESFREDEALQAGTPQREINSALEPEIEEDDDDTTDED

SEQ ID NO: 31187 - protein, 1123 aa, Clostridium symbiosum WAL-14163
MIQQTKTDRERFVALSRICLNNWHYISRKTLSFSEEINFFTGHSGSGKSTVIDAMQIVLYANTDGRGFFNKAAADDSDRSLIEYLRGMVNIGENNEFAYLRNRNFSTTIVLELKQTDTEECQCVGIVFDVETASNEISRKFFWHKGPLWENNYRTEGRAMTIAEVEEELLRSYGKEECFYTSHNERFRRLLYDVYLGGLDQEKFPLLFKRAIPFRMNIKLEDFVKEYICMEQDIHIEDMQESVMQYGRMRQKIEDTCREIEELKELAAQYREVQAQEELIRANTYFMNKMEIMNLRLQVSEISDRIGQAASDLDKQEVLEKQVVSQAAQLKLRSDELLRQIASTGYDELKDKLLNLNELLEHLSKSADKWQRTAEGLKAWVDEDVTSNQTIWDIEEFEARTIGREALIRLKASVEEMREDVGRQKQEAGSILRELSKREKQACEELSQLKAGNKAYPKNLENARAYIKRRLLEECKRSVEVHVLSDLLDIRNDEWRNAVEGYLAGSKLSLVVAPAYAKTAMEIYGELDRREYWNVAVLDTEKASKAAPPIFENALSKEVEVRENYLRPFIDMLLGKVIKCRGIEELRKNRTGITPDCMLYRNYRLQYINPDHYTKWAYIGKASVKKRIRLLEEEIEQCRAQKKPQEELQKECIRLLGLEKLESSADTYLEWLLDIRQVKEKTREKKRLEDKLLKLREQNIDEWEKEREAVEALRFAKEEEIRETGRQIDRSRDELERYKKEAVWQQGELSDRERSFTKVQELEDRLDEFLSKRENPRLDKLGDYFKGRAAAAAEARDRAFEQLLGRRLEYLKRYPNRSFSPSAKDNAAYDKLLDTLSCDNLEHYREAAAEQAKTAVEHFKDDFMYKIRSAIREAVQRKDELNRIISSLNFGKDKYQFVIGRNRGADGRFYDMFMDEALEVNPSKLSQTFENQMNFFTMEHENQYGEQINELINIFIPPENASAEEMEEARRNMDKYADYRTYLSFDMQQIIKNDDGIMKLQLSKMIKKNSGGEGQNPLYVALLASFAQAYRIGLPPKLRRSPTIRLVVLDEAFSKMDAEKVASCIQLIRDLGFQAIISATNDKIQNYVENVNKTFVFANPNKKAISIREFEREEMPQLMKGLV

SEQ ID NO: 31188 - protein, 472 aa, Clostridium symbiosum WAL-14673
MRLMNEIPDRFWSLFRSVNRPVYIEALLKINEEYEYSNYFLSREACIRILGEHFARKKYVIWQDELEDELDTLEPPATRVLGWLLRAGWLRKVDDYASMTANIVIPDYAAVMLEAFRRLHSDEEDETQIYIQNIYAILFSLKNDRRAGLSLLGTALVNTKKLNKTLQDMLHNMDKFFAGLLQQKNYANLLKDHLEGYVEEIVRKKYHILKTSDNFYLYKTDIKHWIGEMRDDEQWLEALVRKSAADSYGRLSAGRTAEEEQKAAETRMMEDILEKLSQIERGFDDIEHRISNMDKEHSRYVRATVTRLNYLLNQEDNTKGLIIRLLNRLADDGEQENMLTETGKRMNLSQMNILSEASLYKRRKVKADFSKNLEPDEEDKELTTEEILNLNRVKNRYSRSEIENFITQRAVSGKMEADADTVSCDEEFEKLILAYDYSTRQKSRYLVEEEEAEMIDNGRYRYPKLVFVRRNE

SEQ ID NO: 31189 - protein, 229 aa, Clostridium symbiosum WAL-14673; identical to SEQ ID NO: 31186

SEQ ID NO: 31190 - protein, 1123 aa, Clostridium symbiosum WAL-14673
MIQQTKTDRERFVALSRICLNNWHYISRKTLSFSEEINFFTGHSGSGKSTVIDAMQIVLYANTDGRGFFNKAAADDSDRSLIEYLRGMVNIGENNEFAYLRNRNFSTTIVLELKQTDTEECQCVGIVFDVETASNEISRKFFWHKGPLWENNYRTEGRAMTIAEVEEELLRSYGKEECFYTSHNERFRRLLYDVYLGGLDQEKFPLLFKRAIPFRMNIKLEDFVKEYICMEQDIHIEDMQESVMQYGRMRQKIEDTCREIEELKELAAQYREVQAQEEQIRANTYFMNKMEIMNLRLQVSEISDRIGQAASDLDKQEVLEKQVVSQAAQLKLRSDELLRQIASTGYDELKDKLLNLNELLEHLSKSADKWQRTAEGLKAWVDEDVTSNQTIWDIEEFEARTIGREALIRLKASVEEMREDVGRQKQEAGSILRELSKREKQACEELSQLKAGNKAYPKNLENARAYIKRRLLEECRRSVEVHVLSDLLDIRNDEWRNAVEGYLAGSKLSLVVAPAYAKTAMEIYGELDRREYWNVAVLDTEKASKAAPPIFENALSKEVEVRENYLRPFIDMLLGKVIKCRGIEELRKNRTGITPDCMLYRNYRLQYINPDHYTKWAYIGKASVKKRIRLLEEEIEQCRAQKKPQEELQKECIRLLGLEKLESSADTYLEWLLDIRQVKEKTREKKRLEDKLLKLREQNIDEWEKEREAVEALRFAKEEEIRETGRQIDRSRDELERYKKEAVWQQGELSDRERSFTKVQELEDRLDEFLSKRENPRLDKLGDYFKGRAAAAAEARDRAFEQLLGRRLEYLKRYPNRSFSPSAKDNAAYDKLLDTLSCDNLEHYREAAAEQAKTAVEHFKDDFMYKIRSAIREAVQRKDELNRIISSLNFGKDKYQFVIGRNRGADGRFYDMFMDEALEVNPSKLSQTFENQMNFFTMEHENQYGEQINELINIFIPPENASAEEMEEARRNMDKYADYRTYLSFDMQQIIKNDDGIMKLQLSKMIKKNSGGEGQNPLYVALLASFAQAYRIGLPPKLRRSPTIRLVVLDEAFSKMDAEKVASCIQLIRDLGFQAIISATNDKIQNYVENVNKTFVFANPNKKAISIREFEREEMPQLMKGLV

SEQ ID NO: 31191 - protein, 452 aa, Clostridium sp. D5
MQMRFEVPDTFWSLFRSVNRDAYIEALLYINEEYQYNNYFLTREACIQVLSDMNAKKRFELQREEDETEFDMLETPSSRILNWLLRTGWLKKIEDYNTLATNIVIPDYSAIFIDAFERLTSEDMEETEIYIQNVYATLFSFQNDSRVNLNMLRTALINTRRLNKALQDMLHNMDRFFARLLDQKTYGELLKEHLEGYVEEIVQKKYHILKTSDNFYIYKMDIKKVLRDMREDEEWIETVRERSRAVGDTKEDVLDLLDMIERGFDDIEHRIANMDKEHTKYVRATVTRLNYLLSGETDTKGLVIQLLNRMAQGDDYGEILQSTGRRMNLSLLEMISEKSLYKRRKGRQDFISQMAPEEVAEDLERDDVLKLNRIQARYSRKQIEEFIEAHMENEVLDASELEITGDGDFEKLILAYDLSTRKNSRYMVLEEDAEMVEQNGYRYPGLRFVRRR

SEQ ID NO: 31192 - protein, 214 aa, Clostridium sp. D5
MIEYYEQLMQEEQEALTEVIQLLYRQTFLLERKYDRRAGRLSYVKEYRTCSKHLEFLKAYFQVAGIALQENAHMGLIYIQGESLWGDKLPRLATIYLLVLKLLYDEQMAEVSSSSHIVTTMGALNGKAGDFRVLKGIPSPTEMRRTISLLKKYQIIEPLDVLEELNEHTRLIIYPCINAVLMGDDIRELLNTFNEEDNIGDEAAVQGTFQDMPE

SEQ ID NO: 31193 - protein, 1071 aa, Clostridium sp. D5
MIDALQIVLYANTDGRGFFNKAAADDSDRSLIEYLRGMVNISENNESQYLRNHNFSSTIVLELEQTNTHEKQCVGVVFDVETATNEISRLFFWHTGGLLENSYRADKRCLTTMEMREYMQRTFSPEQHYCGPSNERFRRQLYDIYLGGLDMEKFPRLFKRAIPFRMNIKLEDFVKEYICMEQDIHIEDLQESVMQYGRMRNKIEETMEEIRRLKEIQESYGQYLERRREAEACTYQIDKLEMLQLRAKIQELSDKIEGRQEEISRQETMQRRMEKEAAQIQREYEEVLLRISNSGYSGLETELMSVNEALERLGSSKAKWEQTAKRLKDWANCDAAPNQVLWDVEKFSDGSISEGELTRLKESLAKLREELEEERRETDSRMRKIKKEEHEAREELKELKQGKKAYPKELEEARYELRNRLHERCGKFVNVQILADLLDIRDERWHNAVEGYLGNNKLLLVVEPQYAKAAMDIYQEMDKKRFFRAAVLDTEKVLEEEHPVRPGALAEEVAARETHVRAYIDYFLGNVMKCESMEELRRCRVGVTPDCVLYHSYRLQHMNPENYTRRAYIGETSMRQRIRQLDEKCRALQEERMPLQEMLEQFRKIGQYEGLLQPVSDYMEWLDDVGKIAGKERRKKQLTEKMRTLREESVSAWETEKLELMRRQEEKKMRIQRVQEEIWKNKDFISKCKSDSLEMNTQLADRERYFKEDAEYEALFGQFMEGRRSVNYDYLRRQRLGDRGPLEEKKERAYQELVDIRSSYTQRYPNRTFSASIKENSPYDRLLESLECDDLEGYKEAAREQARSAVEHFKDDFIFKIRSAIREAYQRKDELNRIISRLDFGKDKYQFVITKNKGPDGKYYRMFMDDSLKINPSQLTNAMENQLNMFTMEHEDQYGDMMNELINIFIPPDNATREELEEAKKNMDKYADYRTYLSFDMQQIVQGEKDMTIGLSKMIKKNSGGEGQNPLYVALLASFAQVYRINLSSKIHRNPTIRLVVLDEAFSKMDAEKVASCISLIRGLGFQAIISATNDKIQNYLENVDKTFVYANPNKKHISIQEFERGEFGELVEED

SEQ ID NO: 31194 - protein, 395 aa, Clostridium sp. D5
MYLVERIIEKCENSQNDWRQGASGGRSLRIDQLEYDACGKSELVAEAEELERTGLIRIKWLTRGSDIERIYYRLEDLEQFYSILEETLPGRLPKQKQIWEYRGLLERELDVLETEWIRRYYRDILEQLEKGNIPKMLGKREVYLPCFRGIDGLKEPVFKRIFSSKYLHNSKTFEEFAEPHIIAKARAYCEDVEAEMDDTEVLSQLCIEEYSQEMSLKGALQIEIVQGEKCAVIDLGEYFYGTVLNSETLKNAVILEQQPEIKRVVTIENKANFVSVPYQEGTLYIFSHGYFSPREKRFLQRLREVLEGRQVEFCHSGDLDYGGVKIFEYIKKHIFPDVQPLMMDVVTYERYLARGEPIGEKTLQKLRKTEIPELQNLIDIMVEKGIAVEQECFLM

SEQ ID NO: 31195 - protein, 486 aa, Bacteroides salanitronis DSM 18170
MASQTEVLSEILHTSPCVELLRLRNRQLIILFLFKTFYHRQTAVPFESLRMQLADYLNAVHLEQDEESGITAFDTFEEKASKYIQRWTDKGFLRNYQEETGEVFYELSLYASKTIDWLLSLKREEFVGTESKFMNLFGQLKELVEFTNEDKEERIRMLEEKKREIECQIQAIQEGGDAEIFEEYQIVPRFKQISQSAKELLSDFKEVEENFKRITKDIYRKHAEGEYSKGDILGFTFDALGNLQQSSQGKSFYAFWDFLLTPSLQHTWDELVEHLYDTLDEKRLEVNDTFLKNMKQYLYAAGKKVYQANDKMAEKLSRIICENGAMPAVLAQQVIGDIQASLLQLAQKGITPDITLEVETLPEIAMPMERKLTLEQSMEVTYSQALEMANSDISEARSAGNLFVQNRVDRRILKQRVQQALRKKKQVSLGAVIEENGGLSQGLSELFGYIGVVRDFHHTVSAERTQTVVFDEEQHKAIVIPEILLF

SEQ ID NO: 31196 - protein, 191 aa, Bacteroides salanitronis DSM 18170
MNLESYITPYARAVVCLLKGAVNASDRCWNDLLHYQSEIQKYVAQIGLELIVKRDEGFAYLKQMTDEGGNTLGLIPRKPLGFECSVLAIVLREMLEEFDSNLDELYAAECYVTDKALKERIELFLPERFNRVKLLNELDTYIARMVQLGFLIEKRQDNAVCYQIHRIIKEKVTLDQLVEFKKKLESYVESV

SEQ ID NO: 31197 - protein, 1131 aa, Bacteroides salanitronis DSM 18170
MLNLFSTSSDTAGFRLQYMEIYNWGTFHERIFRLAPQGNNALLTGANASGKSTIIDALLTLLVPAKKDRFYNQSSGVEKKGNRTEETYVLGHYGNIQKEGERGVTTQALRDKSAYSILLASFASAGERVVTVFQVRWFSGGELRRTFGLAHVPLEIQKDFQPFDGKGIWRRRLEASYKGTRALVEFFEGPTGYAERITQLFGMRSVKALSLFNQIVGVKVLDDLDEFIRTNMLEEHDAESQYLQLKDSFTTLIEAKVNIEKARMQIERLHPIAELAEKIRQADERLRQLSTDKDTAVYWFARQIIRMAEEKLDQALKEKERLEAETAKFRRKEEKLKQEERTLALAIEKDEVGRKLKELENDIELLAKERDERVKRMEEYNGLAGKINFPSLPADEETFQARRTEARAKAEALAEEKETYIRKQIHAEQERKELALQIEELMRTVEVLRQNKNNIPLRETEIREAILKHTGASKEEIPFVGELCRVAEGEEAWEAALEKILHHFALHLIVPDKYYHQVNEYVNATNLKGRILFYRYVPYNSLSDLQAYGNGGEEQQLIDKIEIRSDSEYEEWVRDMIFEKYNYVCAEDLKAFERYKEKAVTREGLVKFPGERHEKDDRPHILRRENFVLGWENKEKIKLLQQELVQLQERDEALSQEAERIGQAAKECEAQAGLHRKLADVFADFEKVNWQAYAAQLQEKQDEKEALEKGNDRLHTLQVQLDKVREEQHRLGNTDIPESTRKVIHAEYRIEQLQKEIEENQRVVSSIKSLLFTDFEKSYAYLCELSYDQLKQERGKFQAKNERDRKKLDAEKRACEDEAKMKITEFKHPEEEILARFKDWRADVDALPDAAHIELIDAYRQMLERLEKENLPKYESQFDGYLQKTLTDKVGEFRMFFINWMHAIKSNIDMLNDSLKGIDYRTRPVTYIQLSALPQISEEAREFKRLMDEAVPDVQKINSLPDGRRMHFYDHVEPFMRRLEDEEWRNRVMDVRFWFTYKAEEYNRQDGRKETTYENMGHLSGGEKAQLTYTILGSAIAYQFGLTKSGMQSDSFRFVAIDEAFKAQDEDKARYLITLCKQLHLQLLVVTPNDNIHIVENDISYVYFVERKEEKTSWLYSMPIEQWKAEAVERG

SEQ ID NO: 31198 - protein, 490 aa, Syntrophobotulus glycolicus DSM 8271
MEQKKNEFSEHMSFEFLELLRRKNPAWRLLASPQAPFAAAFLYQEFIAENRRLVAEQELISRLESFIDRLSQGRSERLFPRTGREYLDDWANDEHGWLRKFYPPGQDEPHFDVTSLAQKAIEWLLSLRQQTFIGTESRLITVFELLHQIVERSETDPGLRLAELERRKAEIEQEITRVQNGQVALLDETQIKERFWQAMTIAREILADFRAVEQNFRDLDRGMRETIATWDRGKGELLEAVFNEQDGISQSEQGKSFAAFWKFLMSSSSQEDFQETLDKVLRLSAVHDLGTGRNIRHIHHDWVNAGAHVQETVAALSQQLRRYVDENFLEEERRINQIVREIEGKAVAVRNNPPRQWEMAIDGVAPEISFPLDRPLFTPPRRPEIQDDAIDAGVEDVPAEALFSQIYVDKEKLKDRIGCLLQTQDRITLSRIIEHYPLELGLSELVIYLVIAGESPQAVFQPEEVEEVSWTDETGKRRVAKLARIIFQRA

SEQ ID NO: 31199 - protein, 202 aa, Syntrophobotulus glycolicus DSM 8271
MNISDDLACSRALVALLKNVVFKETDPEHWEVILARRYQIEDYVSKIGLTLMVDEMDGYGYLKQRSYGEGEEEIPRLVPRHALSYPVSLLLVLLRKQLLEFDSSTGDQRLIVTRRQIAERMRLFLKDTTNEAKMVADIDRHIDRIEKMGFLRRLRGSEESFEVQRILRGFVNGQWLQHLNERLDLYRVYAGGAETGEGEEQE

SEQ ID NO: 31200 - protein, 1134 aa, Syntrophobotulus glycolicus DSM 8271
MSLFNLEREEPGMLFGATPGFRLAKLEVFNWGTFDGKVWTFSPGGETALLTGDVGSGKSTLVDALTTLLVSPRKVAYNKAADASAKERSVTSYVRGYFGQKRSAEGTRQPDSLRDIHHYSVLLATFQDPGLSQSVTLAQFFWYQDAQKPPARFYAVADQEMSISRDFSKFEKDVRVLKKRLKNSGVRIFEDYTRYAEVFRGKFGIEQERALDLFQQTISMKKVEALTEFVRVNMLQIPHTEQEVEKLKNHFQDLNSAHEAVLKAKRQIELLSPVVEQGERCGQLAGRQSLLEKALRALSPWFAEKAEALLSAEITGLEQELRLAVGEREQAEAKQKEIEKNIEEIRRAIYANGGEALEALKTEINSLREILQHTRKDRAVYMVHAEKLNLPAADTPGIFLDNRAQLPGLKSAEESLQGRLHEDFRTAAAEEDRAGKEARKVADELESLRSRKTSIPREYVEKRKQLCRNLGIKEEELPFAGELLEVREEEAAWEGAIERLLHNFGLSLLVSEEHYPAVQQWVDRTSLGMRLVYYRVRPEARPSVSGRPHPSAVSEKLKIKPSTPFGLWLTRELRQRFAHVCCASREQFSRETLAVTQAGQIKSNGNRHEKDDRYAIDDRRRYILGFSNRKKIEALAANERELQEEIRFYRDEIEEIKQKQAESQRRLNAVAGLEGITAFADIDTRSREEEIRAKEERRRKLEEGSDVLQGLQRRLAELEEIKNTQKAVYDGAFTREITLQTGLARFSRDRERAAATAGEAGPAMREAEYPFLEKHRGSALKNKKPTLENLTTLERDYRDWIEEERGTLARELNQLRGRIIKAMSEYNNQYPEETRETDPSMESLPDYARMLAQLESDGLPRFAKRFKQLLHENTINQIALFQAKLKQEQDTIKSRIEQINGSLSAIDYNEGRYIRLEYDETYDNEIKDFRVQLKACTEGALTGSGDEQYAETKFLQVKALIERFRGRPGETESDARWTKKVIDVRNWFLFAASERWRETGEEYEHYTDSGGKSGGQKEKLAYTILAAGLVYHFGLEGQDARPQSFRFVVIDEAFLKSSDESARFGLELFKKLDLQLLIVTPLLKIPTIAQFIAHVGFVHHDDIQHRSMLRNISIEEYERERKAREAARYVHQVV

SEQ ID NO: 31201 - protein, 392 aa, Syntrophobotulus glycolicus DSM 8271
MCTRWSEPQWIREELRRRWDSGRILRALLTADDLFPLRLPLKRPKSNEVNANFAEISHWIKRLRDQSRQGIGFGYELIEKEMAHRQSGRNLLPTHAVIPTVRDALRLLKKEREADKFLEIAGTVAADWPPLREWAGRYPHKVLASGDDWNGILAVLRWFFAHPRCGLYLRQLDIPGVDTKFIEHRKGILTELLTIILPEETIDSSALSFEQRFGLRAKPVQVRMRLLDQAQYLQGLSDLTIPVEQLKNWSPAAERVFITENEINGLCFPDTGTSLVIFGLGYSVDILKEVAWLKEKNIYYWGDLDTHGFAMLDQVRSFLPQTCSMLMDESTLFRQRQLWSVEDQPFGGQLTRLTPEEHRLLCSLQDNTWGKGVRLEQERISFQQVKQFLSAL

SEQ ID NO: 31202 - protein, 489 aa, Xanthomonas perforans 91-118
MKHQARIAGYRQLREQPVWKLLAADHAPELVGLLQTVLMDGERRLPSAVLHERLQRQLDALRADELSRELPRTAQAYLAHWLAQGWLERRLPEGAAEEEYELSRAATQAIRFIAGLRESSSSATESRLSLVIQQLVQLAGQTEADPELRLAALRDERARIDAEIERVASGRVAALDGKRALERARDLIHLSDELAEDFHRVRDDFEQLNRQFRERIIDDEGARGDVLEQLFNGVDVIADSEAGRTFEAFWSLLNDTQQSSQLDQALDALLARGFARKLDRRERAFLRGLTGTLLERGGEVHTVMQHFARSLRGFVQSRGYLEQRRLNQLLKQAQGEALQLRDSLHATTATGYTQALSSSRLRSLSQWRLHDPRLTQVDGRVQAADAAEISLDSVGDLVAQSEIDVRSLRNDLHELLGQRPRLTIGDALQQRPAVQGLGSVIGYLSLGTRHGMVIEGQMETVQWEGSDGAVRRARIPLVWFTREKRNELV

SEQ ID NO: 31203 - protein, 233 aa, Xanthomonas perforans 91-118; identical to SEQ ID NO: 30425

SEQ ID NO: 31204 - protein, 1338 aa, Xanthomonas perforans 91-118
MFAETLAEQRAQQFRMRRLQVHNWGTFNGLTEVPIAEKGFLFVGRSGSGKSTLLDAMSALLTPPSIVDFNAAAREAERSGRDRSLVSYVRGAWADQQDSASGEIATQYLRKGATWTALVLEYANAHGEAVSLIRLFWIAGSGNAAADVRRHYMVAPRRFDVATELDGFDLDLRKLKARLGEDVAHFDGFAGYAERFRHALGIGNEMALRLLHKTQSAKNLGDLNAFLRGFMLDEPRTFEAADRLVEDFAELDGAHHAVVTARRQVETLTPAREHHAALMALRHSVGELRELQLGVDSYREQQRLALLEERLQELDNQDRGLAGEEGQRRESLDNHEQKLVGLEREQRAAGGEQIEELERERARVERERDERLRRRAQIEQACRQLGTALAAGASGFAAQIAHAQTVLDNGKHDASALDEAIAERMGARRDDERRFAEIRAELEALKRAPSSMPAPMQALRARLCEDTGIAEAALPFVGELVQVREDQTAWRGAIERVLHGFAQSLLVDERHYAQVSEWVNRTHIGTRLVYFRVRRNDELHSRRVDPGALPGKLQLREHAFTEWLRNELTRRFDYACVDNAGALRNADRAITREGQVKHPGDRYEKDDRHAVNDRKRWLLGHDNRDKLKVFEREAQALAQRIASCDADVAALRKQREQDQERQLAAHTLVERDWDEIDVGPKLQRLSDIDEQLVQLREGNSGLRALGQAIDTARTLRDQAKRTYEDVRLERAQLARERVRLEQQHAACAGRAGSATLTPTQLQGLRERLAALTPLSLDNLEAHLRVVERGLAEQLADSQGRDSRLSAQLLECFRKYCQQWPEDSGDFTVSLASADDFLARLDRLESDGLPRHEHRFFDLLQTQSKNNLLALQRYTAEAHKGIKQRMDEVNASLEQVPFNRDTVLTIEVGDRRLAEVQEFQQQLRAVLSHQQTEDRALAEAQFSTLRALVARLGAQEPEARRWREQVLDVRLHVEFIGVELDAQTRAQVEIYRSGAGKSGGQRQKLATTCLAAALRYQLGGEDGELPRYCAVVLDEAFDKADNEFTALAMNIFENFGFQMVVATPLKSVMTLEPFIGGACFVEISGRHNSGVLLIEYDEQAQRLKLPERSRGDEAAVADATDAASAIEAASEPVGVQGAANADGITADGLPLHIALPVPGDTSPAAQNTHSSKRKPAAATATATANKQNKNKQNKNAKTTSPTRAAAQPHAKQPKKSPSRTPAVAGKPVADKRTSGAQQAPAVSSGAASRSNVGKTTRSSKAQGKPIVAANASNATSSKVAAASAPVKNTAAAKPRATAASTGQPARGAGKTTSARAVAEPSPATTRVARAGAPKARGKR

SEQ ID NO: 31205 - protein, 508 aa, Xanthomonas gardneri ATCC 19865
MEGRDDLSKEGRMHRSSVDRTQSYILARHQHPAWQLLAGRRAPLVLGCLQALFEAGQDGVDDDDAQQALATLLREHAGRSEFEIEGDVEALARKELRTWIRCALIVEREGRVYATDALELALRFVDGLENRVMTSTASRLAIVQREIERLEARLNPDPKSRVEHLRAQIAGLQRELEDAEDGRVETADAHEAAEGARELYALATSLRADFRRVEDSWRNADLRLRHAIVSERQHRGAIVDALLNGHDELLETPEGRVFQAFHQQLQQEVELEAMKHRLQAILRHPQALSALSALQQADMRWLVTRLVKEAGAVIRARSRSERDVRSFLRTNLAAEHHRVGQLLSEALAQAQRIDWQAAVRRGPSPFPPVAAPCGGLPLVDRLRFKSADHEALRELDLKRQSGNIEAIADDFWSSLDGLDRDALVRDTVAILQTSDRHLSLAALAERIPLTHDLESLALWVGMAREVGAPVGDDFEHLNLTTRDEKNLRFTVPKIELDPAAFAAFDWEP

SEQ ID NO: 31206 - protein, 234 aa, Xanthomonas gardneri ATCC 19865
MNEENEPLDATVSDIDTAESAQLPETTDVALDTASSSVRATLLELMKYGLLEAVSKPNLYRTALLQRAEVSDILRWMDLRLRVDEIRGLAFLLVVAPEEGEDEWAHPLVRRQRLTLEQSLLVAILRQQFVAHEIEAGIGAAGARMALEDLVPHLQAYLGDLGSDAQERKRLLTLLEQLKGHGLVSDVDQHERVTIRPIIVHLANPENLTQLIHALRAVADGQAESACSVTEIDP

SEQ ID NO: 31207 - protein, 187 aa, Xanthomonas gardneri ATCC 19865
MSTLAAPSLGSLVLTHLDIYDWGAFGGRHSVPIDVAGTAIIGPTGSGKTTLVDALMTLLVAVPRYNLASTGGHDSDRDLVSYVRGVSGAGIGGDTTDNISRPGSVVTAVSARFSDGDAVVRIGGVFWFDGSSSATTDLKRRWIFCLGDSTSLDDWLEAHRENGARALKELERVHAGFKLYESKQTFS

SEQ ID NO: 31208 - protein, 489 aa, Xanthomonas gardneri ATCC 19865
MKVRARIARYRSLREDPLWKLLAADHAPEVIGLLQALLLDGERLLPAAVLHERLQRLLDDINAEQLARDLPRTAQAYVAHWLAQGWLERRLPEGAQQEEYELSTQAAQAIRFVDGLEHSRGAATESRLALVMQQLAQLAALTETNPDARLSALRDERDRIDAEIARVSAGKVASLDGKRALERTRQVIALADELTEDFRRVRDDFEQLNRQFRERIIDDEGERGEVLTRLFEGVDVIGDSEAGRSFQAFWALLNDAEQSAQLDAALETVLARAFARKLDRRERSFLRGLTGTMLERGGQVHDVMQHFARSLRGFVQSRGYLEQRRLNRLLKQAQAEALNLREHIPAQRLIGRSLMLTTSRLRSLAQWRLHDPRQQQVDGSIQRNEAAAISLDSVGDLVAQSEIDFRSLRRDLFELLDTQPQLSIAQVLTQRQATQGLGSVIGYLSLGTRHGVVSGDQFEVAQWRGSDGQWRRARIPLIWFTQEKRHELA

SEQ ID NO: 31209 - protein, 234 aa, Xanthomonas gardneri ATCC 19865
MNWHEHDPDAESELAHDAAEGQTPAVASTGLFAGDTGQLPVEARRALCQLLSGPSVDAQRHSRLWPALLRSEAGIRSALAEVFLELVLDREAGIAFTRQAETGELEAPVLLRSSPLTFIDSVLLLHLRQQLAEADARGVRAVVEEAALGEALAVYEKNLSTDRAGFLRRVATAVQKMKDNHVLTRLRGEDARYEISPALKLLFSAEDVAALGQVYRQLRDGPAGGEDEADPAHA

SEQ ID NO: 31210 - protein, 1130 aa, Xanthomonas gardneri ATCC 19865
MTSSAAPSSLFANDLPDARLQQFRMRRLQVHNWGTFSGLTEVPIAERGFLFVGRSGSGKSTLLDAMSALLTPPSIVDFNAAAREAERSGRDRNLVSYVRGAWADQQDSASGEIATQYLRKGATWTALVLEYRNGEDRVVSLVRLFWIAGNSAATGDVRKHYMVAERAFDVAQDLAGFDLDLRKLKQRLHDVHHFDSFAGYAERFRHQLGIGNEMALRLLHKTQSAKNLGDLNAFLRGFMLEEPKTFDAAERLVGDFAELDGAHHAVVTARRQVETLLPARAHHAELMQLRRQRSELEELKLGIDAYREQRRLALLDARLQELDVQDRGLAGEEGQRRAALDNHTRHLDDLEAQRRAQGGERIDALEREQGQLQAERDRRAAKRAQAEQACRALEQALADSAHGFAEQVAQARAALEDGQRAAAELDEAISERIAGKHDDSKRFAEVRAEIEALTRNPSNIPAPMQSLRARMSADTGVPEAALPFVGELIQVREEASTWRGAIERVLHGFAQSLLVDERHYAEVADWVNRTQLGTRLVYYRVRHNEQALSGREPGSASLLHKLELRDHPFAGWLRRELGKRFDYDCVDSAKALRHAERAITREGQVKHPGERYEKDDRHAVGDRRRWLLGFNNRDKLALFEREGQELAQRIAACDAEVADLRARRERDGQRRLARNTLANLGWDEIDVAAALQRLSQIAETLQQLREGDANLRALGEAIDRTRADIAQATRTYEGVRTERITLGAERTRLEKQHLECADAHARLVTPLQQQGLAERLLSLGELSLDNLQDRFRTLERGLDAQLGVSKDELTRLQQALIGCFRRYFQQWPEDSGDLSPTLEGADDFLARLQRLERDGLPQHEARFFELLQSQSKNNLLALQRHTAEARKSIAQRLDEVNASLEQVPFNHGTLLTIELSDRRLPEVIEFHQRLRDVLGHHQTEQREVAEQQFAVLRELVRKLGSAEGEDKRWRELVLDVRLHVEFVGVELDAATRQQVEIYRSGAGKSGGQRQKLATTCLAAALRYQLGGEDGELPRYCAVVLDEAFDKADNEFTALAMNIFENFGFQMVVATPLKSVMTLEPFIGGACFVEISGRHDSGVLLIEYDEQSRRLKLPERTRSAAANTTAVAEQE

SEQ ID NO: 31211 - protein, 393 aa, Xanthomonas gardneri ATCC 19865
MARADCMLLPAAALQALRGQWQRQRGDWLIGASAPRPIALQPPTQAQASARFDAFGDWLRSWQRVDLPGRVEYRDVLWSQLGPQRLPQTWVVETPADAAAALQEHDRWQRASARCASLQAHWPEAAGLAARLRRQFDLLADSTQADIDRLVAVVDWLHRHRDSGLFLRQLPIAGIDSKWVHTRRGIIADWLGGLRGIAEPRSFDSLAGLRSAPDRVRLRLLDPALRRQLGGLDDLSVPIEQLAALRLPIERVLIVENLDTGLACEALPGTALLMARGYAVDYVRNIEWLRTLPLFYWGDIDTHGLAILHRLRTHAPQTVALLMDQATLLATPRAMWGHEPRQHRAHRLAALTPDEQLFYARLRSGHFGAAPRLEQERIAWSQAWPQIQAALRG

SEQ ID NO: 31212 - protein, 485 aa, Capnocytophaga sp. oral taxon 338 str. F0234
MESPTQQLIDILMTSPSVELLKSKNRVPMLTFFIETFTEDHKVLAQEVLFQQLSDFIETQHLEEEESEVTFEVLFEEKAKNYVRNWLSKGFLTNYQDEQGEVYYELSSHSVKVIDWLSSLKKEEYIGTESKFSSIFHQLKELVEFTNEDRQERLLLLERRRDALQEQIDKLKRGEEVQVYEEYQIVPRFNQLTQQAKELLSDFKEVEDNFKEITKEIYQKHSGEQTKDAILEFTFDALDQLKNSPQGKSFYAFFAFLVSRQLQEEWEFLTKKLYETLQEKDIPIRDYFLKGMRGHLYLLSRRVDKANDKMAEKLSRIIRENDTIDNQATKQTIREIKDYLISLSRRQLKPDVSFEIERDVYIRIPFDRRLTYQKKEQGTYKERFENADTTLSDVTQLGKLFSDKIIDKEILRENICSVLQQRGQVSLTELINAQGGLKKGLTELIAYFSVATEYKHVINEGKMQDIIFDIPNQKRIQFPEIIISL

SEQ ID NO: 31213 - protein, 192 aa, Capnocytophaga sp. oral taxon 338 str. F0234
MKKLEEVRENYSQAIVKLLKGTVDKESEVWEDILFYQTEIQDYIQTIGLELVVRKEEGFAFVKQLEDEQGNTLGLVRRLSMGFENSVVLVVLRQLLEDFDNNPTDFQSFEKIISHSEIKEEVSLFLQEGYNKVKFSKDIDKCIKDIEDWGFLKRVNSKEDTRYQIHRIIKQKITLDILEEFKQKLSGYVGTI

SEQ ID NO: 31214 - protein, 1132 aa, Capnocytophaga sp. oral taxon 338 str. F0234
MWELFSTNSDTAGFRLQYMEVLNWGTFHKEIVRIAPQGNNSLLTGANASGKSTFIDALLTLLVPMHNKRFYNQSSGVERRGDRTEESYVLGYYGNILKEGSSSTTTQMLREKQNTYSIILASFSSTTQQTVTLFQLRWFSGTELKKNYGIAHLQLEIAKDFPKFDSGGDWKKLLDAKYNYDKSKRKQVEFFSGPKDYQSAMCSLFGMRSENAFSLFNQMVGVKVLDDLDDFISTHMLEERNTEETYKELRTSFFTLTEANDNIEKAKLQVEWLTPICQDIEALQQATQQGKELVQLQSESVYGFAKKYVSLATDEIAEQTALLEEVRQRNATLQKEAEALSVRYADLEQDICNDAVGKQIEMLKKEKRENLSAKEERMSNAEQYNKIVASLGLMTDPDEETFKTNRTEAQLLFKGVHTEELLQEDNIRKLTNENEEIAQQMDALRENIDMLRKNKNNISGREATIRDEILLAVGATKEEIPFIGELIRVKEAESAWEYVIEKVLHQTALHLVVPPKFYSKVNAYVNTHNLKGRIRYYKYEQPAPKIFQMPQKEQRLLINKIEIKPKHPYSLWVEYLIENQHNFVCVEELSEFEQFVEMALTPKGLVKYRKGKHEKDDREAMAKRSNYVLGWDNKEKLSELSKELVRLQETKKKNDTTLKTLQLKREELRSRQFIISNLNDKFTKFDTINWQVYALKIQELETAIDQLEQTNNRIKALGEQLRKVKEEQAALKATIKEEEKKEFVIEQAITNITEKKQQHQDILETNPEVDTALFVDKYSHLLELSYANIETYRQAFASELAKQIEQNKQLINKKEMEITRATAKFRNPPAAIIEKFKDWAADVYPLPEKTDPVLLTEYQHYLDKLKKDNLPKYEKKFRDYLHETTIHKMGSFATFFDSWAEEIRENIRQLNESLKEINFNTQPDTYIQLVHFQRESKDVAEFKDLLRRARVNINEFSNQEDGRRLHFEQHIAPFIKRLENETWRKRVLDVRQWFSYKAEESFRETGTKAKTYERMGQLSGGEKAQLTYTILGSALAYQFGMLKDGMQGNSFRFIAIDEAFKAQDEERAYYLITLCRQLHLQLLVVTPSDNIHIVENDIAFVHFVSRAKNKTSHLINMPIEQFKAEREKYFQS

SEQ ID NO: 31215 - protein, 386 aa, Capnocytophaga sp. oral taxon 338 str. F0234
MIIPEEIRKKATQKYLPYLSDIAADIPFTPIEIRGDKTYTKNDFSDFAHQIESLNSQAKSHKGFGYTVDYKRTRTKYLGEQDIPVSIYFGTEEDFLRFLSKEKEVAKFRENIALITSIFPQLTPWIQKNPKKVVQYETEWTDILKVCSYFKENPHPNCYIRELPIAVHTKFVEQHKGILQELLNILLADTLEAGATHFEQRFHLKDKEPLVRFRILDQDIADAYFQGIDDMAIPISHFNRLDIPVERIWIVENKTSLYTTLAFPAMERSIAIFGSGYGVAALKEASWLATKKLYYWGDIDAQGFEILSQFRTYFPSVESFLMDEATFEHFYEAYEGTPSPITVELRLTPEEKALYERVKTENLRLEQEKIPQDWLLQTLVLITTYL

SEQ ID NO: 31216 - protein, 502 aa, Nocardioidaceae bacterium Broad-1
MSDTRVEAAYAGALAAFRNPMLDLLHGRFAPFVVAVLSVTFTSERAAVPVVDAHAEIGDMLDRLRATGHAEGEGGEVMLPVGTARDLCRQWVRAGWLLRQIEGEDEVYRLSAHAVGALEIAGRASGSRARVSESRVRTLLEAVERLAQDADPDVLTRVARLTEEIAERRAEIARLDRTGVVDTVDDDTLLEQAENILHLTRELPADFARVVESIRAMQRDVVTDLRQDVRPAGEVLREYLQRGKDVMASTPEGKAFAGALRMIGDPRRLDDLATNLRTVLRHRFTKEMGPTERAELAAVGRRIETGVAEVLAAQQTASHVITTQVRTHDPARDRQVDDLLRDVMVGFQAWMPTSRPAEAIEPLRRLPLADLGHLRQSVSELRPPEPPAPLAEWGDVESAVEDTKAWGGPGYRAIEAHLDAYVAAAEGPVDLAEVFAAAPEEIRRPVDLLGLLEIAHRRGMAETGEISTIEAVRADGVRRRFAFGGVRLGPMTAEDGEGDDDE

SEQ ID NO: 31217 - protein, 246 aa, Nocardioidaceae bacterium Broad-1
MTDVAYGSEPEGFIEPVSMEDDPTELFVGDRGVLDADVRRVLVQLLRRRFITAERSPRQWRTLLDHQAVIESRLHDLFVRLVVDHDRGIAYKRQVRSEELDVPVLLKDDAYSRAETLVLVHLRTVFQRERGAGQSSARVDADELEQTVLTYFDIASGDAAPRREIRRAVERLAREGLLEEESEDRYRITPLVEIVLSVEKLTELKAWLKDPTGTTRVEVAGEAEEPDDADDLDDPKSGDEAEETER

SEQ ID NO: 31218 - protein, 1120 aa, Nocardioidaceae bacterium Broad-1
MNMIDSLFGLIPERSTGRQWVASELQLVNWGGYDGAHRVRFSPTATLLTGGSGSGKSTLMDAYIALIMPHTTPFNGASNGGVVGRPRGQDQRNILSYARGKIDEAKTAEGTKIRVLRGDGRDTWSAIAMTWADQTGARFTAVRAWYVPASAKNLDDVTKLRAVAEAGFDVRDLEPVAAHRFTRTAVSEVGLTPIDTDRDFTARIHSSLGIGAAGDGEKAVNLLGRIQAGQQITTVDDLYKKMVLEEPETIATADGVVAHFDELSATRDRMVTAQQQVRALTPIRELRVAMEDAASRLEVIDGIGAFGDETTPAGLWRAGKRVDLLSELESDLSSRRNAAEKAVAEKQALIDAAESERDGLAVTVAASGGRRLEEATREIKSAESRADQVRRAREALEAELTILGTSVTTQAEFETLQATARDALVDDDARTTALNAYAAARSAEAEAIKLVGRLEGELADAEKTKNNIPEPLRAARAVLAEAAGLSPAEMPFVGELVEVRTEHEAWREAFNLALGGFATTMLVDAAHVGAFRAAIDSVRQRTRIRYEAVPTGTKDTTILDEGTLPGRLDYRRGVFTGWLKKRLAERHGYVCVQTPALLGQHRMALTVTGQVSQGSRGAHGGQGGGNVLGFTNTRRVAEVTEVLETARRDAEKARTAVGEAERAIKELDLRRTSFKAVSALTWDQVDVTGAEAERDRWAAVIEEVTADNPEIATLQKRLKEARAKVDTLREGIGAAKSAFKELDARWSDVVEQVDRAKDALEEAAASGTEIAPAQADYLEQLFKAAGGEAAGRREDALAELDAVFARAGESLDADRVGAQETIGAARVQLQQTFESFLERWPNPNLHTDPDASYADFDRLLDELQTSGLHELEVEWRDSLLNLSGNDLTNLDSTLSRAVREIRDRIDPINQILAELPFNDDYHRLRIDTQEGQSAVRGRFRKELRAVRDLIERASTNETREQAYTRMSRLIDRMRRTAPDFADLIDVRNHVRVSAEKVTADTGEHVALYDHIGEKSGGESQELVAFIVGAALRYQLGDAGAERPRYAPVFLDEALIKADARFTGRAIGAWRGLGFQLIIGAPNDKHSAIEPHVDVQYTVLKDAEGHSFPKLEVGLEEIPAG

SEQ ID NO: 31219 - protein, 496 aa, Gordonia neofelifaecis NRRL B-59395
MQFDEIVAVRKSNAAWRLLRADNAPLLLSFLGRVFVDDNVREISESALVNLLDDELYSLNKRLGEGTYPRSPKAYLDEWSAPDTGWLRKYYVIESDEPHYDATPAVERAVAWVRSLRDRGFVGTESRLKTVLELLRQIVYGTTTDSERRLADLHRRRAEIDAEIEAAERGEFQVLDETSRRDRYQQFADIARALLSDFREVESNFRTLDREMRERIATWRGTKGELLDEIVGSRNIISDSDQGRSFQAFYDLLLSADRLDELDDLVRHAQSLDDVADSDLRLTNIHHDWLDAGTRAQGTVRRLSEQLRRFLDDQAWLENRRVMDLLRSIESTAYQVRDRRVDDFAHEIDSPTPSVHLPLERPLYRPTTSVEVASDGIEEGEAQGASEALFEQIHVDPAPLIDSVRHVLRRRDQITLAEVVAERPIEQGLAELITYLSLTDESFTKVFDEQAHESVSWVDDAGAQRTARVPRVIYTRPGSPQTTTAAPTPATTDEEN

SEQ ID NO: 31220 - protein, 199 aa, Gordonia neofelifaecis NRRL B-59395
MSRPVPRDELNLPLAVTSLMRGVVYRDTAETTWRHVLGLTAQVSDYVATLGLVVVIDEAEGYAFLRSKSDDELADLGIPRLVARHQLPLHTSLLLALLRKKLAEHDTTDAGNRLVLTSEQLREMIGPFFPASTNEARTADQADAAVRRVTDLGFLRRMPGQDGEYEVRRVIKAYVDAQWLSDLDVHLAEYAEISREERR

SEQ ID NO: 31221 - protein, 1139 aa, Gordonia neofelifaecis NRRL B-59395
MTGLFAPTELENEGSARSGFRLQRFQVLNWGTFDQRVWTLVLDGENGLLTGDIGSGKSTLVDALTTLLLPAHRVAYNKAAGGESRERDLRSYVLGYYKSERNEVTGASRPVALRGMSNYSVILGVFANEGYDETVTLAQVFSMRHDSGQPERFFTVTDRALDIATDFADFGSDLRALRKRLRDGETRIHEHFPEYGRDYRRSLAIRSEQAMELFHQTVSMKAVGNLNDFVRDHMLEPFDSTGWVDTMVSHFEDLTAAHDAVVLARAQLSELEPLLADHDRYRSHTDMAAELKDRRAALRYYFAQQRYDLLESELETHNSDLAATRTALATVDRDLADLRISQRELELRQAGLGGTDIATLEHQIAESGRQREERAAAFDRYARMIDDAGLAPVADRGQFEQRRTEVSDAVAALDAEAAEVENAMTEVRFSKRELDGEGRRVAGEIASLRGRASNIPERNLRIRELICEGVGLPHDELPFVGELIGVREDESRWEGAAERVLRGFGLSLLVAADLYDDVSSWIDANHLGGRVVYFKVSDHVSSKGVQTPPSNALAHKIDIKEGRFEAWLERRLFERARHICAETLGEFRAAEHAVTVNGQVRSGGGRHEKDDSQRVDDRRNFVLGWSNEQKIGALFTTGQRVQEELNRVDAEIDELEDRRRALMARRNALTGLDAYPSFDAIDWMSSASRIAELTERKTELEQSSTELAEVTELIAATREQLGALDATRDGLRDKVSRLEMVRTQGEQARTAAREIVTEAEFADAEPHFAAITTAVDDYRAKVSDGEAQALTVAECSELESSMTERLTDESEQHTGRAGTYETRTVNRMSEFNRNHPVLATEFDADIASADEYRELHRRLAEDDLPRFETEFKTYLNTNAIRDIAIFAAKLNKEVHQIQSKIDTINESLAGIEYNPGRYIRLDVNPTAAQDIREFRAHLRQCSDGSFEADTDDHYAEDKFLLVKELVERFRGREGFTDLDRKWTEQVTDVRNWVTFAASERYIDGDAEYENYTDSDGKSGGQKEKLAYTILAASLAYQFDLKWGATMSRDFRFVVIDEAFGRGSDDSARYALSLFARLGLQLLIVTPLTKIYTIEPFVSAVGYVENRGGSYSQLQCLTIEEYREKRALRDMVQEVGSPAG

SEQ ID NO: 31222 - protein, 463 aa, Marinomonas mediterranea MMB-1
MLFTHLPGEIFQALSGSNKGLIEAVLFDLSDVFYDHAEDPIKEKSAIIESIEDTLHKLDTLAWHDEHKEGFESPKTIHDYALRIYHRLVNTGWLIEEQELYRVSVLMSPQVSMLLRSLVEISRHGKRNYGATVLSILSNLESVVKHPVERGVTLSQTAEASREFSAHLNQILLGIRSLQRELFTRRNPKEIVSGFFELFVEGILIADYKTIKTSNNPFRFRRQILEIANGFLADTTLTSKVAQCYMDQQLISMEAALSLVEKDCRDIIQTFSSIEQRLERIDEYRYRLEKRAADTARYMDSSRPGMANKISGIITDVAKFETLPVLKSVVGSKIVGVESAAQPIKRKDPPPPRVITTREVSESALEFRDRQRRFHEARQVTVAKLEGYLDRQLIENDSKHILDFTIESVEDFVCFDHIRYVGALGVSAKKVEKSYEVIFTDQYVDVHEFVECREFNVVRRSRA

SEQ ID NO: 31223 - protein, 248 aa, Marinomonas mediterranea MMB-1
MLRELKKVVEESAKDPQEFQQTANYLVANQFVSAYKHGQRKHFLLVEMYQDYFSKLFDALGMKLYINENERLAGILPVQREAFVRLKTDETLLLLVLRQIYEEKIENFEVDNGFVTTNTHTILERFVQLVKREIPTETRFKEILTLFSRHGVIIRGKTYDEDSKNMMINITPVVRLIVTEAYLRQLESFNGSDPDDDDLDAGSSSEVNVSDDATSTEQNTTPDSGVISEQDATENNVEHQVIEEDENQ

SEQ ID NO: 31224 - protein, 1146 aa, Marinomonas mediterranea MMB-1
MKKLNRIVLVNWYLLGAEEIDIRGNTAIIGPTGSGKSSLLDAIQTVLTGASKRHLNYNASANDGKASGRSIRSYILGMIDSGQGNPKVVGTEPRQDAICYLGLVFEDSNTGKESTIGLCLSASLASPEEDILGRFILPNYGIRRDDFVEMLGAKSYKAKPWLEVREAMKKACLDPYIKSGSASATQYINRYLEELSPSPDHIITLDSFLKNFKNALKFVPIASPTRFVQDFVLTEAPLQVGAYQKSLAEYKQLESKTQEVAKRIDDLKAIQVECDKKHQQEQTAVNYQWVATEARFDELGSKQDDIQDQYEIHRDREEEIQDELGTRSTLLKQLQGQLVRLEQQYEHSDVGLKLQQLEQSKKLIELQGQQDIKVLLQARQAIMLLGGMAPFNDVLSDTMKAILEQAGNQLDVIDDQGKVQGDLKGLVKFFEGLNQTLDDEKSHVFQQRSQLNRTILNLKDDCKQLEADVSSLKGGSSPLSQNTKRLIGLLKQAHIDATPLSHLAEVTDHKWQDAIEGYLGSQREALIVDPDDAEEAIRIFRAHRRQLMGCRVIDTTQTRLWLNRGDRGSVLQFIRCNNDHAQAYLNRRLGGIKPVETERQLLREDSAMTYDGMLKLSGTISTIRFVPHMMVGINTDGMRQSREKQLGELTQELMDYLKSDQRLEQADSILGRVMASSQFDVEGLSEANKANTHSQHELNDINEQIESLQAHDDTELQEKIESLKERIAATELEQKKLDRERQQISEQYGALTTQKNQLSAALSSLDEDRTKLTANSMFNAEYASERYELLESSMVNGAAIYKEAISRADKASEKARSFDQKVRKEVADHYARYHQANLDDDVQLDYLESKFEEFEHYVNYQIDVLSETELAKYAKRAELARREAEETFRSDYVSKLKDSLDQVAQIIRELNHSLKRRPFNQEVYQFKYYPNGDMKDILDLVERFSAQDQANVGGLFDPEFTGDPDHARALNAIQELISDEEKQKDLADYRKFYNFEVDILDMNGNMKTTLSQRIQTGSGGEHQIPFYLAIAAALSTTYRLHETMEGDIVGGFSLAMFDEAFNKIDMAKTATCMGFMRDIGLQVIAAAPDDKRAVMAANMDTIISVWREGGAVSLDVAYPKMKGQALLNSTEDLQQVKEQEEVTDSL

SEQ ID NO: 31225 - protein, 487 aa, Oxalobacteraceae bacterium IMCC9480
MPLDYATLDLLRLSHPAWRLLRSDHAPLIASFLERVFVTPNLRVIAQSDLAEALDDELFGLRQRYGADTYPKPALDYLNDWANTDKGWLRKFYQHGSDEPHFDLTPSTEKAIAWLGTLAARSFVGTESRLLTLFDLLKQINSGSDADPQTRLAALQQQRDAIDADIARVLAGDIALLDDTALKDRFQQFMALARELLTDFREVEHNFRGLDRRVRERIALWDGAKGALLEQIMGERDAIADSDQGKSFRAFWDFLMSSSRQEELSTLLDRVLALAPVAELKPDARIRRVHYDWLEAGEHTQRTVAQLSQQLRRFLDDQAWLENRRIMDILRGIEVRALALRDTPPAGVIMQIDDIAADLELPMERPLFSPSIKPVITDSALESGADDTSEATMQTLYAQVVIDKPQLVRQVRRALQDRAQVTLREVCVLHPLQHGLAELVAYLQLASDTFTSIVDEDASEPIVWTRTGDDGQPVHKQAILPRVIFLR

SEQ ID NO: 31226 - protein, 209 aa, Oxalobacteraceae bacterium IMCC9480
MMTDETQRDEQHGPDSADLSALIIVLLKGVLYQDGDAGLWNGLLNLQARVRDYVLVLGLELVLDEAEGYAFLRSRTIAEDDDAPKLPRLVARRPLSFPVSLLLALLRKKMAEFDASGGDTRLILEREAIVDLIRLFLPESSNEVRLIDQVDTHINKIVELGFLRKLKAGPPAFEVRRILKAFVDAQWLAEFDTRLAAYQSTLNGVTAHE

SEQ ID NO: 31227 - protein, 1127 aa, Oxalobacteraceae bacterium IMCC9480
MNKPDAQQTLGMDFIADDTLSGFRLQRLEVFNWGTFDGRVWSLDPAGKNALLTGDIGSGKSTLVDAVTTLLVPANKIAYNKAAGADNKERSLRSYVLGHYKSERNDGSGSAKPVALRDHNNYSVILGVFHNAGYDQTITLAQVFWMKDAQGQPARFFVGAEKALTIATDFAQFGADIGALRKKLRAAGAEIFDTFPPYAAWFRRRFGIENDQALELFHQTVSMKSVGNLTDFVRNHMLEPFDVAPRIAALIGHFDDLHRAHEAVLKAKRQVALLVPLVADCARHGELIATSDELRACREALRSYFASLKSELLDKRLASLVDEWTRQDHQVRRLSQLQAERRSEESDLRRSIADNGGDRLERLATEITRKSSERDARERKARRYAELARAVGETPCDNETAFIAQQHRLSELVEAARTQDASMENRLTEHGVSLRQGKLEHDALAAEITSLRARRSNIPAEQVLMRAALCKALALSEDDMPFAGELLQVHDDERAWEGAAERLLRGFGLSLLVPETHYARVAQWVEQTHLRGRLVYFHVRPSARKEPAGLHADSLVRKLAIKPDSPFYDWLERELAQRFDLPCCTTPEQFRREARAITQGGQIKTGGGRHEKDDRHRIDDRSRFVLGWTNAAKIAALETQARTLEEKLGELGNLISRIQVLRKSLTERLTALSQLHEYTDFDELDWPALAREIAQLAAEKEALESASDVLKKLAERLLEVSATLAEVELELEAHKDKRSKIEQKKNDAELALAHVTQVRDEPASATHAARFDQLNSLRSEALGEHQLSVESCDNRERELRDWLQGRIDAEVRKLDRLRDSIIKAMSAYKDEFKLDTAEVDASIDAAFEYRTMLDNLRADDLPRFEARFKDLLNENTIREIANFNSQLARERETIRERISRINESLTRIDYNPARYIVLEAQVTPDADIRDFKGELRACTEGALTGSDDAHYSEAKFLQVKQIIERFRGRDGLSEQDRRWTAKVTDVRNWFVFAGSERWREDDTEHEHYSDSGGKSGGQKEKLAYTVLAASLAYQFGLKFDEVRSRSFRFVVIDEAFGRGSDESAQYGLRLFAQLNLQLLIVTPLQKIHIIEPFVSSVGFVHNEEGRASKVRNLSIEEYRAEKTRLAG

SEQ ID NO: 31228 - protein, 387 aa, Oxalobacteraceae bacterium IMCC9480
MNWTSPSALIAQLHKLWERGELLAGMVSGESLFPRRLVLKSPSSTELSEHFDAARAWIAAINALPHCRIEQREFRHRVFGNNRVPDAVWIDSLDDALALLDKRRDARRFAALLDRTRLRQPALLPWLAGRPLQALALHDDWVRLLDLVDWMQAHPRPGLYLRQVDIAGVHSKFIEAHRAVLSAMFELALPAQAIDLSATGVGGFAQRFGFRDKPQRVRFRLQDPAGLDTDMTLDAASFARLDPAVTQVFITENEINFLAFPLPADSLVVFGAGYGFDMLRDVGWLTRRRLIYWGDIDTHGFAILDQLRSQFPQVASLMMDHATLLAFTAQWGQEDQATLRELPRLHADERALYDLLRDNRLGKNVRLEQERIGFDWVRSALAALSGK

SEQ ID NO: 31229 - protein, 486 aa, Photorhabdus luminescens subsp. laumondii TTO1
MNFQGLQAKYRRLFQESAAWKLLRADNAPVILAFLGELFSEDSEVPFSRARVSLDAELVRCRELGLWETETGAGTYLNKWIREGWLREMDDTLTKTDASEIALRFSQGLDERNSGTTASHLRIVQEAVRDFAIAISPNADERVAFLEDRKSEIQREIDALRAGVVTELTKAEQRERIREIYQLASVLTGDFRRVEDEIRQLDQEIRIQIIEGDSTRGDILLAVLEKEALLAKTDAGSAFESFFDLLCDQNRTMELRDQLRSILSRPVAEHLSTQQRQFLSQLMRELSRESDRVFQIRRRTEESLRAYIESGTAQENRAVDRLLGQLERLAIELKNLGYDLQTATTLSLPVGAASISSPESMLLKSPDEKLDTSDAEEQLNSREPSMQMLDCLDVVQIRLIAERALETLKEFGPMTIASIANYQPINSGLEELVAYLRVAKSVGAALLEEKESVEISDKRGARLRASIPTFLLSADLFPDSLDELVL

SEQ ID NO: 31230 - protein, 297 aa, Photorhabdus luminescens subsp. laumondii TTO1
MVGKKLNKDNGALATLGKSDSNPQEEQKTGFFDQLIKHHTQSEYDPLTDTAGVESDVAFSIVNQSPSCEADDVLVSKHAENSNSDMPPDARRVLVSLLRQGVILSSQKAKLFELLCRYQSAVRKHLSEVYLRLVLDEKAGVAFIAGFQNEEDTESLGIDDEEVVSLISRRTLSLYDTLLLLVLRKHYQDRETSGEQRVIIDIERIESHLTPFLPLTNSTKSDRRKLKGALDKMVTKKILSSVRGSEDRFEITPVIRYVVSAEFLESMLNEYLKMAGEKGIELNKNGSDAVDYQDEEE

SEQ ID NO: 31231 - protein, 1133 aa, Photorhabdus luminescens subsp. laumondii TTO1
MKMTDQTLSANSLFHVGQIRLAELSVYNWGSFNGLHTALIDPMGTLVTGDNGAGKSTFIDGLMALLLPAGKATFNVAAAQGDRSDRTLLSYMRGSFGSAHDGAGTRVRSKREFGVVTGLRALYQGDDGSKITLAALFWITKSTNVLADVTRVYVVAKRDLTLKEMLNAFGNGNARAFKQWLRDDPTITCCDDNFSDYQELYRKLLYMDNKNAPALLSRALGLKKIDDLTGLIRELVLEPSTVKDDAKKVVEEFADLVAIHSQLVDARAQKVHLSRLPELNSIIEKTTKEFAELMAEKNSLPVYFGEIFAQLWSEKITDIEAELEALLLKISQVEGQKVDANKLVERRHEEYLQFGGDKIESLRKEVDHTQTQLNRVVRNSSQYQTHANELALPSVLEEAVFLKNQSTASTRLASIQQEEGEYQDRFATISAKFSELQANIHDISQEIREIEARPDSNIDVKYQQLRDELVNSLELSKEQCVFIGELIDVEDREKSWQGAIERALGGLRTTLAVPHHCYSMVTRWLNARHTGLHVRVQVVNNSTTQGQSVVFKSDGYLRKLVWRTHPYREWLKHHLQRFDLQCVSSTEELDQTPFSMTQQGLMHMDKGRFEKKDQYRIDDRRRWCLGFSNKSRLAILNNDKKELTLQLAETEKKVSQARQDLNSVSDRKILWEKIQGYRWDDINAPYWHEKLSDLQVDLKMLEQSGGDLDKARERWESAKEQLVQIQSVLNQLNSDSGGVKNTLKNAKEEWSKAQAKASKGLPDSARQLLAIRVGVLNTNDLGRMSELVLKVEEDLERLLDISRNSKDKAERLAISIMVSFRSNDKWQVFTVDWQSNIGGLPDYLNHLRQLEEEGLPNLVEQFIERLNKHATQSLARIKTKLESEREDILERIDIINRVLKRTEFRSGTHLKLGSKREKFPHVNEFEQHLRKVLSQVTSDDHEARFRQLAKVVEILGKASAPGSSNTLESLRLLDPRYQMSFYAEELDSNTGEIRDVLESSSGKSGGEKESFAATIVAASLAYVLTPDGYDRPVYCTVFLDEAFSNTAETVSRRVLRVFRELHIHVNLITPYKNLNLARESARSLLIAERDQENHDSHLCEVTWEEIDRRMGEEKEKKLPDEAADLGIEFEKLT

SEQ ID NO: 31232 - protein, 398 aa, Photorhabdus luminescens subsp. laumondii TTO1
MKRGQYEVRWGLLPSQVKSIIRQREWDNLSSLKSRLLGIKAFPIRVGLKPPKGNSAILDIAHFQRFIDEWKSFPHQDLVEWSSKNFRELSEQRIPTFVVIESMQCLIQFLGNDALSRSKVWERNMKPFLRVDKDLYPALVKCIDIVEKLSLRDAELLAKLLPQLKQGLGEGQYLRALPLIGIDTKFLENHQILIEELADIIHKGAVSASGGLIAWLGCSINPKGWLTIRPLCRAATVALGGMPILQIPSELLRRHELPASNILIVENLQSGLALPEMSDTIAVIGGGKNIAWMDAAWLKGKRVGYWGDIDTWGLSILSDARNKFMDIEPLMMDVKTVKAHEDRMVPEPNPVESNPTLLNEDEAKLFNDLISGRFQSSRLEQERLSSDYIRNKLTNWLS

SEQ ID NO: 31233 - protein, 482 aa, Arthrobacter sp. FB24
MSRSAPSSADAISARLRDLELLTKGPAWALTRSAPWVIAVLQASFTRTRPQLPLEEFHADVDAFLEQLRRQDPGLGGMANGKSFGDEWTRKNFLTRRNQSGQIVYEVTEPAARVLAFLDSLSSERSTLNGSRLGTLLGDVEKLANETNPDQSARLESLEDEIEERQQLIEDISSGDFDGLLDDDEAVEAAGNILDLAASLPADYKKMRDRIEELVGELRNQIIEESLSKGATMAQVLEADKRLRQSPEGRTFRSFTAFLEDPQQQLRFRSAIGEVLSRQFADDLSHEDRETLKNLVAELRTQHSQIQRIYGKLSESLNTYVQSDDFRQSVRLRKVLREAEQAIRSLPYERERPGLVPGPVLFNAGFESLSMVKLFDPDEFAAPPKLADPIAFSDSDRVRSPRTGKAKPAAIRAAVAGAATLPEAWEQLPPEERHINSIRALLSQALHDGAGFDRAGWDAIDFEQIDGTTRRAFLPVVTLKKD

SEQ ID NO: 31234 - protein, 311 aa, Arthrobacter sp. FB24
MTDEMTTTADAGVDGETPDVRPAPEHIHGAPFAVTPKDTFVDGAALFPGDTGVLPMKVRQALVKLLKGPYIDGGRDEKLWTTLLDNQLILRSRLSELFLTLQLDHERKVAVLRPVDPEAIGGSTRSSILRQQRALSRVETIVLLRLRLLLDRHVTAQTDPTITKEEIAELVAHYQPSGQQDALRDSDVVNRAITKLLARQLLITTGLEDVYTISNALPLALPFENIGDIPAHIEALVAATADPAGTEPLLELDRENPVRSDDGTEDDDSVTDSSDDAGDMRQHASKRGTSEHAEHVSGGAATGDHEEGNAK

SEQ ID NO: 31235 - protein, 1154 aa, Arthrobacter sp. FB24
MSIATMLPMGELTNPGQMRLALVQVVNWGTFHGAHTMHVDRNGTLLTGNSGVGKSTLFDAMLRVFDARPRSNEAAAQRSGAVEDKRTTFTYMRGKVGDKAVGEGSASAFQRPGATWSAVALTFDNAAGTKVTVSALFDLPKNGTESSVGRYYLIDNKPLDLAAIEGIAEKRFTKAALDTIFPDAQVFDVHKAFAERFRRLLGINSDQALPLLRVIQAGKGLGGSVNTFFRDQVLDAPATLSAADDVVEEFSNLMSIRQRLEDVRQQRDQLAPVPGLNKEYAQSLLDANRLRELAGEEFDAYKQQLAVTVHEKTLVRYKDLARAKAKDLAAERAVRDGLAKDLRQLEADYNNQGGNAISAIEQSLENARVGLKLRQQVEEAARQALADAGLELAWSAEGWEQAHTHAADRSAELQGDSEALKELRFEAFDGHATKKRELAAAQQELVSLKTRKSLLPPSSIENRTAIAAATGVPEEQMPFGGELIDVAEGEEQWRPAAERALRNLATTLLVPGEHFAAVTRYLNNNSVRGALRAVDVSKPLAGGALAVENAADGDLLTKLDILTTGPAADAGQWIRERIAVDFAYPCVEDPDELAALDKGLSLGGVVKRNRHTVEKDDRFASRQDYVLGFDNASKLELVAAQVEDLQQELAKAAELAQSREESHQGMTRQLEALRRIAEDNRPWEQVSAAVAEDELGKIEQRLKDALAAQADLEPLRANIEAARQKHQSSTEAAAVLQSEYKALDHQLTAADSLLEAARTRLRQAPPSDATVAALEQYCADFGGVDDVAEMHELDNLAHQVRTRLLAELHAAESRGQATSERLTRIFEGFVREWGTAISADHGTSIGAAGEFEARYHAIVSDGLPAQEAEFRQFFNQRTHESFSTLLHLLDEERRSITSRILPLNGILSEVNFHEGSFLELDIKQTLPPTAKQFKDAIQNALRTRHTRPSRAAGATAAGAETDDDAELTNRYKSLETLVKRLGSQTPEDRRWRAEVLDVRGHLFIQCKEHREVLGPRGGKRTDVFMHADTGSMSGGERQRFTAFIMAAALSYQLGIAEQGFTTYGTVMMDEAFVLASEEFAGAGIKALHEFGFQLLLAAPENVIDLSKHLGSVTEILRDKRTNRSGVLTAPVIGPRAGAEGQWRSEANPVDIVLR

SEQ ID NO: 31236 - protein, 495 aa, Corynebacterium glutamicum ATCC 13032; identical to SEQ ID NO: 30443

SEQ ID NO: 31237 - protein, 212 aa, Corynebacterium glutamicum ATCC 13032; identical to SEQ ID NO: 30444

SEQ ID NO: 31238 - protein, 1111 aa, Corynebacterium glutamicum ATCC 13032; identical to SEQ ID NO: 30445

SEQ ID NO: 31239 - protein, 368 aa, Corynebacterium glutamicum ATCC 13032
MPLFIDDALHRSKKYFHAHLSELLLGEFAGLSLPLHPPTAAKAAADIDATREFIRQWEGRDDVEYAIRNWSPVGLGKTEVPVRLTLNTTEELVVFAQVEDEWSSLHERFSQLSGFTAEVVAKHVSLWRSLSNDDLSKAVLVVDWFLKHPNSGLLKRAVAVEGVHTKWLENHRVLIETLVADKRGEPGRADLGLGDAEARVRLRFHSVDAPAGLTDIEVPLSNLCELQEPQVILMVENLDSFLALPTWPGVTIAWGAGYRAVDIVRGPYFSNGRLLYWGDLDLDGFKILDGVRSHVPHTESVLMNSETVSRWRYLGVADREFKAESFDNLHDFESDALDLLITDGELRIEQERIRLDVAVEEIEKVIRG

SEQ ID NO: 31240 - protein, 543 aa, Bifidobacterium longum subsp. longum JCM 1217; identical to SEQ ID NO: 31042

SEQ ID NO: 31241 - protein, 224 aa, Bifidobacterium longum subsp. longum JCM 1217; identical to SEQ ID NO: 31043

SEQ ID NO: 31242 - protein, 1182 aa, Bifidobacterium longum subsp. longum JCM 1217
MMQATDVQMIADRWMLESRRLINWGSYEGYHEFRPSTDHKLPVTLLAGASESGKSTLVDAQISLLYPTGTPFNKASNSGRSERSDYTYLRGMVGVGSTETGDEPLYLRGRDENGAPQPVWGAIVDTYRNQTTGQVLSCAKFLYLMPGDGRGDVRRQYVVWGKPVDPRRMDQYRDAPFTPAQLKATYPDCLTFPSAEAFHTHIWSAMGLSEAACRLLHKIQSADAPSRLDDIFKQGVLGVPEALDLARTTVEDYERYDENFHAMDEKTRRMDTLRGIQQAYGEYAAARGKARAFEPVKPAVDGTVPAVLRDWALARMRGEVAVQLPADRAEQQNSEAEAKLLRRRTEDLRTRLDMIRGQMQGLDGGDLTRLELELDQARRTLEDVQANRTRIEQTFASIGETLPGDEQAWNERRINAVNFKREYNKRDGECEEALTAAINARAGARGDLERLQRDFDRQRSQRTRISQQMDETRAMLCRATGLTPAELPYVAELMDVNEHEEDWRLAMNVAYAPIAQTILVDKRHEQGFAAKVSTIDPRTMPRRTWQFVDTARHYDDTGAHANILTGEQDGDWLSGKLRYRDDSPFADWLRSQTQDERFDALCVTAIDDTDRTNRQVQADGQIKSGARGQHGTKDRAQVIGFVNETYLNALAAQVDAARNALSQADTDYTAAKTQSDNLHRELELANQLAYTSWERIDIAGAQRTITDTQDAIASIKNDPKLAELAKQRDELNAELDRVERQRIESDQAAARAGSAVEAALIWLRDHADTGTTDAAGATADNDDDAASGPLPDEVTAALAESYDNRFAGLADAAMRAHMIIGAGAAGTQAPGESFPERTIAGIGKDMASRINLLNGQADAARTGVESKMSTYIALYAADDDSLTASVEDYRYYLDELASLTQLAAVAATDAEYRRCLEQLLRSFLTIKRAIDTDASDIHDQLDRINAMLKGQQFGPKHGSLSLHADVRRPERTFWAQFIRVIGTLNDWKSADVNDSDASRKAFAACAPMVGLLRAELAQVKDANGVKSYGARNLDPRCRSSFYAIVHHADGPDERITSTGGRSGGALQELTSFVYGAALIYLLGGGLTSEPSYTTLFLDEALIKADGRYTQRALTVLPRLGFQVIVSAPESKTGEILEVSTKAYVTYKDPDTGLTSLREAVLHQNDMDDESSSDILKDDGVAE

SEQ ID NO: 31243 - protein, 394 aa, Bifidobacterium longum subsp. longum JCM 1217
MAGMKDIAAITTCVKKHMRSHMYDIEPAWPFPVPVGLPDQAFLETNAIAVHDNNNEIRQWASKNGCEIITKHRTIGTSVELISKVVVPDESIAMRVVGRTLAAECREARRRIACLVAACDVAPETIESAARMTGHEQPDDFDLLVSAVRYFRHHDVTGMTPRQIPLTGFSGKWLNESKTNRRKAICRLLGVETLGLSKRPTELRFRYLDPVRDDAELERIIWCPWEGEALSGIKYAVIVENKDTYQTMPPIAQGICIWGSGRAVSDAVPAVPALRDMRIVYWGDMDADGLEILSTLRESGIECDSILMDCDAYDRYHRFGTDRTERSAKIAMREPKPTPGLQSAERRLYERLCADKTIAYRRIEQERIPMRDAVDELRKLGIPVESIENQDLPI

SEQ ID NO: 31244 - protein, 543 aa, Bifidobacterium longum subsp. infantis 157F; identical to SEQ ID NO: 30420

SEQ ID NO: 31245 - protein, 227 aa, Bifidobacterium longum subsp. infantis 157F
MTVAEEHEEHEEHEEHMDNANPYALFEGDTGDMPAEARMAAIALKRDRYISGPTYDTVLDNRDAVVRSLNNDLLDLVINERYRIMYATPVAGDDVTLRSLKTRVSLKREEAALLAFLRIRVLEYENVHADPADWLVSFEEIRAALATGAGYLAARNDEEGVAKQIGAIVSAMITYGYLVRLDDEAMYQITPLVPVVLDRELADTWLDVAEHGDGDTEDDDDDEKGAE

SEQ ID NO: 31246 - protein, 1182 aa, Bifidobacterium longum subsp. infantis 157F
MMQATDVQMIADRWMLESRRLINWGSYEGYHEFRPSTDHKLPVTLLAGASESGKSTLVDAQISLLYPTGTPFNKASNSGRSERSDYTYLRGMVGVGSTETGDEPLYLRGRDENGAPQPVWGAIVDTYRNQTTGQVLSCAKFLYLMPGDGRGDVRRQYVVWGKPVDPRRMDQYRDAPFTPAQLKATYPDCLTFPSAEAFHTHIWSAMGLSEAACRLLHKIQSADAPSRLDDIFKQGVLGVPEALDLARTTVEDYERYDENFHAMDEKTRRMDTLRGIQQAYGEYAAARGKARAFEPVKPAVDGTVPAVLRDWALARMRGEVAVQLPADRAEQQNSEAEAKLLRRRTEDLRTRLDMIRGQMQGLDGGDLTRLELELDQARRTLEDVQANRTRIKQTFASIGETLPGDEQAWNERRINAVNFKREYNKRDGECEEALTAAINARAGARGDLERLQRDFDRQRSQRTRISQQMDETRAMLCRATGLTPAELPYVAELMDVNEHEEDWRLAMNVAYAPIAQTILVDKRHEQGFAAKVSTIDPRTMPRRTWQFVDTARHYDDTGAHANILTGEQDGDWLSGKLRYRDDSPFADWLRSQTQDERFDALCVTAIDDTDRTNRQVQADGQIKSGARGQHGTKDRAQVIGFVNETYLNALAAQVDAARNALSQADTDYTAAKTQSDNLHRELELANQLAYTSWERIDIAGAQRTITDTQDAIASIKNDPKLAELTKQRDELNAELDRVERQRIESDQAAARAGSAVEAALIWLRDHADTGTTDAAGATADNDDDAASGPLPDEVTAALAESYDNRFAGLADAAMRAHMIIGAGAAGTQAPGESFPERTIAGIGKDMASRINLLNGQADAARTGVESKMSTYIALYAADDDSLTASVEDYRYYLDELASLTQLAAVAATDAEYRRCLEQLLRSFLTIKRAIDTDASDIHDQLDRINAMLKGQQFGPKHGSLSLHADVRRPERTFWTQLIRVIGTLNDWKSADVNDSDASRKAFAACAPMVGLLRAELAQVKDANGVKSYGARNLDPRCRSSFYAIVHHADGPDERITSTGGRSGGALQELTSFVYGAALIYLLGGGLTSEPSYTTLFLDEALIKADGRYTQRALTVLPRLGFQVIVSAPESKTGEILEVSTKAYVTYKDPDTGLTSLREAVLHQNDMDDESSSDILKDDGVAE

SEQ ID NO: 31247 - protein, 394 aa, Bifidobacterium longum subsp. infantis 157F; identical to SEQ ID NO: 31243

SEQ ID NO: 31248 - protein, 486 aa, Glutamicibacter arilaitensis Re117
MQPSHRANSLWLQSQQFKSSAAYRLLTAQPWALAFIRAEFTADRSRVALELFHASLDSFLKQARKSDDQIPSSYSAQDFAETWVKQGILARPLIDGRFIYEPSAQTLRTLRFLADFSTDDSHLNSSRLNTLLSSLESLAHETDPDPEARIRALESQIALRQAQIDQLRSGDDPAVLSRTTALSATRSVLDLASSLPADFRRMRDGVQDMLHSLREGILDASTAKGVAVGQVLEADRQLRSTAEGETFSGFTEFLNSPDAQQRFRAALAEVLERDFVDDLETPERQILTNLLRELRRQAAEVHASYGKLSESLHAFVQSEDYKQAELLRQAVREAELAISKSASLKPRSGLTPMELFAPQFVTLTGLGIYDPSEHVAPPPLAQAPEFSEADIVRNPSTPQADLPLLRESITRNLNCSGSGAIRLDAVFETLDAEHRHLNTIRALVEIGRTNGESLNESELLNIDFQQLDGSMRTAILPALSFTKEPL

SEQ ID NO: 31249 - protein, 228 aa, Glutamicibacter arilaitensis Re117
MTKSDSYAAPITEPLFDGDTGTFTLPLRQLLVRLLRGPYLDGSVDAAAWQLLLDQQQSISDYFAEIFLALSLDMDRKIAMLTPVQIEQVHTSPIAPRRPLKRDETLLALRLRLLLEQHSGSGSDAVISRAGMHEVLAEHRQATDRDDKRFAESCDAAITRLQALRLLTGTELENEFRISPALAMALPITNIQDIPRYIAAIDANDPAFNLSGDDAEGLAEQTPELVQE

SEQ ID NO: 31250 - protein, 1108 aa, Glutamicibacter arilaitensis Re117
MSIEMTLPLGGALNPGQHRLSRVQIVNWGTFHGLHDLAVDRAGTLVTGHPGVGKSTLFDAMGHLFFATPRLNESANDAATREDRRTTFSYMRGRKFKTSAGTVYQRPGATWSAIVLSYDDGMGNTVTAGAVFDLPDAGLEGQVSKHYLLCEGKIDISELENHGPRRFTVTSLSKALAPSEAFDTHKAFIERLRRRLGVESDKAFALLRTLQNGKGLAKGVNQFFRYEVLEEPATLKAAAAAVEDFAHLRGIYRQLDTARAQRDVLAQVPQQDQAYRSLAEQINSVQQLLESEVHTLEAQVRQLVLRNDLDSHESNLAKFKADEASLRQRKDELDDQLQSLEAAHDSAGSASLMLLEREADVARKSLSEKENIIRTLQQQATDAGLAFDFSATGLDELRANAARTLQQLSSITHDAQTVEYEAMASLVNLRKRAETLAEQIRSYQRRASNIDDRSIAARRAIASACALKEDQLPFAGELMDVSAEAGMWRLAAEKALHSLARTLLVPGEFLAQVTHAIDQLDGLGRVRWSDISQKPRDAEAGPADLVTKLDFAPGEAGSWLKAKITADYPLACVENDAAMHVHPKAITPAGTIKTGAGSFERDTRTLPASEYLLGFTNESKIAELQSKATRLDEKIVQAQQAADERSAAKNKIVAKAQLLQALISDERTFAQLDASKALEALRRSEQKLGDALALSGDSSRVRQQIEAAKAEAETLVGELALVRSRISDLELQVQRAQQVLSNSDDLASGWEENIPNALRQHQLLGPVLQQVVSGNCPASEEISEAFAEVKLQLGSQVNSLQSQRQEIGGTLSDTFRRFAREFGTSHAQTHGTTAEAAGHYAQLHDQIVADGLPHHEAQFREYFANRSYERFSDLLQLLDEERRMISERIKPLNQILSEVTFEHGSVLRLEATQSIPVEAGTFRKELKDALQEAYTTKDESTLASSYQALESLVTALSDPAMASWRSTVLDVRQHVMISCNEHKSNGEVETGLEPGTLSGGEGQRFTSFIMGAALAYQLGFASAGFTSYGTVMIDEAFIQANSEYAAAGIRALQEFGFHLVLAAPEDKIDLSRHLGSITDIIKHPGSNISGFVTTGRSPAMATTITLRS

SEQ ID NO: 31251 - protein, 482 aa, Glutamicibacter arilaitensis Re117
MSAVYAALTAQRLLGESPAWALLRADNAPVAFGILGARFSRQRRQVPAPELMEAVDADLDLLRDRGFDLPQSAQNYVRTWLAGGYLVRRPGEAREELYELSDGALTALRFIEDLATPRTSVTESRLATIVQRVRALNVDTDPDISRRVAALTAERDAIDARIQALTAGELTEVDEQRSVDAAADILSLASALPEDFARVRAELEMINRSLRSQLIEEPESRGSVLDDIFRGVDLLSESDAGRSFAAFHALLLDPERTVAVDDDIDQLLARPFARKLRDSQRLSLRDLLPDIQRSSADISDVMTALGRSLRRFVQSEELAEERAVHRQLRGTMAAAVQAAKTLRPFTKLDLELELTGLQIASPSAIKLHNPSESQTAQPLHIHDTGTADLAALREAVRASEIDFAELGENVNAVLAQQGAATIAEVLEKFPATQGIASVVGLLVLAENHGVRAGGEPEPVHWASDGQTRQATVPRFLFQEKIS

SEQ ID NO: 31252 - protein, 226 aa, Glutamicibacter arilaitensis Re117
MTENPAPTDQAVDDSANRDASLWSGDLGELAAGSRRVLVQLVKGPYLSAERHSEAWKILLTDTAALRSRLADLFLDLVLDESLGVAFVRNAPQAAIEAPQVVRTMPLTFMDSALLLFLRRELLRGSGATRVFIGRDEVYDHLNSYRASDTTDEAGFRKRVDSAWTKMLKHSLLVRTDTEDRVEISPILRLVFSTEQIQAVQEEYQRLAGNTRVIAQLEQDEAEETK

SEQ ID NO: 31253 - protein, 382 aa, Glutamicibacter arilaitensis Re117
MITVAEARERLSTLYRRKLAAWSVRPFDATSPVALGLKPPTDKKAAADMSAVAGWLKQWSAVAVDGLQIDWEQRRWPNTGTQSIPVRLSAQSPAALARFLNRGKEWELYRARALRLQSLAPRDSGAREDFDRALARIIGKAAALPHQDFERVFHVLAWLTAHPDSGLYPRQLPVQGIDSKWLERHADIVRTLHVATGGDPGLGLLAPAKLYRVRFLDPRLAPAGMGELMASPDTLSRLDLSARTVLIVENLQTLLSLPELPGVVALHGGGYDVRWCAPIPWVAAANLLYWGDLDLDGLAILASLRSVRPDARSVMMDPSTLQRFAQLAVPHAKGLTRAAPSGLQPKEVEAYKLLRAQGGLRFEQERIPWDHALATLRTELGR

SEQ ID NO: 31254 - protein, 491 aa, Microbacterium testaceum StLB037
MTTTRTEAAYLRSVTAFKNPTLDLLHGRFAPFVVAVLSIVFTPDRPAVAVADAHVEVAEAIDELRAAGYDTDDDRRIPAGSARDICRGWVRVGWLGLQIEDDVEVYRLSAHAVGALEIAGRAGGGRARVSRSRVRTLLDAVDRLARDAESDPVRRREALLEERAALDAEIAALDDGIVEPLDDDHLLEEAENVIHLARELPADFSRVAESIAAMQRDVVAELRRDVRPTGEVLREYLERGRQVMQATPEGRAFQGALRLIGDPENIDDLTDQLHAVLAQPFSRLMTPEQRGELDAIARRVEAGVQEVLTAQRRASHVITAQVRTHDPIRDRQVDDLLRGVMAGLHRWSQTRAPGRVEPVRTLPLADVGHLRQSISDIRPAGAPEPLASGTDDVEFVDADTRAWGGPHYAELEAYVARLGEGFDLAEAFSGADAETRRPVDLVGLLEIVHRSGLTETDEVSVVEAVRPDGTTRRFAFGAVRAGNERESTSDD

SEQ ID NO: 31255 - protein, 232 aa, Microbacterium testaceum StLB037
MTDVDTTGPETSAFISPVAMENDPDALFAGDRGTLDADVRRVLVRILQRRFLLAENSPAEWKLLLEHQQMIESRLNDLFVRLVVDHARGVAYKEQVRSDEVDVPILLKDEAYSRAETLVLVYLRTVFQRETTAGTASARVDVEEVEQTVLTYFAETDGTRASQQRAVRTAIARLDREGIIEEESEGRYRIGPLIEIVLSAETLRELQAWLDEQTAGSSASSSPETPQGDLLS

SEQ ID NO: 31256 - protein, 1117 aa, Microbacterium testaceum StLB037
MTMLETLFGLIPAASRGQQWVAEDLQLINWGGYDGTHRVRFAPTATLLCGGSGSGKSTLMDAYVALMMPHTTPFNGASNGAVVGRPRGQEQRNILSYGRGKLDESRTDEGTKVRVLRGDGVDTWTAIAMTWADHDGARFTAVRAWYIPAAARTLDDAVKVRATVHGAFDLRSLESAAQNHLSDAAVRATGLDTLATDREFSARLHAVLGIGAAGAGTKAMSLLARIQAGQQITTVDDLYKRMVLEEPETLAVADAVVSHFDGLESTRTRMIEARQQVRALQPIRAMKTRIDEAAERLRLIDALGRFGDPESRASLWRAQRRVDLLGAVEDELRERTHATDALVRERQALADAAEAEREGLGDVLRAAGGDRLDAAQRELRGLERRLAGMQRDRERFEAALAVLSVEVSSAKQFDALVADARRTLADTDAKSAVRDAFVAASSRHTDLRQQLAALEAEHRRTQTRDDNIPPRLHEAREALAEAAGLTAAELPFVAELVDVRTEFEPWRGAFTLALGGFATTLLVDAAHLSAFRSAIDGVRLSERLRFEGVSTGLPERTGLDPATLPGRLEYRRSPFTGWLQDRLEQQFAFVCVDSAPELTGHRLALTISGQTSQGARGAHGGSTRQSILGFSSRVRLTELGEQIVTARRDLATAKAAVDEAAAALDAFDERRSAYEKIADLSWDQVDTASVQRELDRWNETIVEITAGNPRIAELQEQIDGTRARAARLREEIGGAKTEQQALAARWAEITDDVDSANERLERAEDAEMVLSADEAAYLDGLFVAPSGEDSSPSQRLARFDAALESASRLLLEEQRSAQETWGDQRDSLRRTLTAFTDRWPSPNLLADPDESLGDFERILADLEASGLHELEAEWRDSLLRLSGNDLTSLDSALTRALREIRERIAPINDIMQDLPFYDDEHRLQIVPRENQSEVRRRFRRELRDVRAAIDAAGSDEEREAVYGRMARLINRIRPTAPDFADLVDVRNHVRVSAERFRADTGEHVALYDHIGEKSGGESQELIAFIVGAALRYQLGDAGAERPRYAPVFLDEALIKADAHFTKRAIGAWRGLGFQLVIGAPNDKYSAIEPHVDVEYDILKDTRGRSWAKAKVGVTPEA

SEQ ID NO: 31257 - protein, 491 aa, Alicycliphilus denitrificans K601
MALDHLTLTTYRDRHPAWRLLASPHAPLVASFLYRVFVAPNVRLTSEADLAEMLEDELFALREQLGVEVYPKTATEYLNDWCALDKGWLRKFYKPGTDEAQFDLTPATEKAIAWLVSLTERPFVGTESRLLTLFALLEQISTGSQADPARRLEELRRKRDEIDAEIGRVLSGDVPLMDDTAIKDRFLQFQQLARELLSDFRQVEHNFRQLDRSVREKIALWDGSKGALLDEVMGERDAIGDSDQGRSFRAFWDFLMSSRRQEELSTRLDQILDLPAVAALKPEPRTRRVHHDWLEAGEHTQRMVAQLSQQLRRFLDDRAFQENRRILELLRSIETKALALRDMPPTGEVMLLDEMGADIALPQERPLFALHAKPRLAELILESGEDDDIDTTRLFDQHVVDKTRLREALRQALRQQSQINLRALLETQPLQQGLAELVTWLELAHAGSRGLDGLRATVDDDVQEIIEWAVQDAPGSTVRRRVRMPRVIFTR

SEQ ID NO: 31258 - protein, 224 aa, Alicycliphilus denitrificans K601
MNDMHQDDPEGGTESRPPVVAELSQLMVHLLKGVLYRQDDERLWASLLSLQARVREQAAVLLLDLVLDEAERYAFFKSQPEPEDVDATPRPPRLIARRPLSYPVSLMLALLRKRLAEADAGGGDTRLVLSREEIAELMRVFLPDGTNEARLVDQVDSTITKVVELGYLRKLKPVAGAAQQAPRYEVRRILKAFVDAQWLADFDARLEGYRTALSGADRDKEAGR

SEQ ID NO: 31259 - protein, 1125 aa, Alicycliphilus denitrificans K601
MSDFSPQELDFVADDSRVGFRLQRLEVLNWGTFNRRVWRYELDGRNGLLTGDIGSGKSTLVDAVTTLLVPAQRIAYNKAAGAETRERSLRSYVLGHYKSERNETTGSARPVALRDTTSYSVILGVFRNEGYGQAVTLAQVFWFREPQGQPARLFMTVERELSITEHFSGFGSDINGLRKKLRAMGCELNDSFPPYGAWFRRRFGIEHEQALELFHQTVSMKSVGNLTDFVRSHMLEPFDVGGRIEALLGHFDDLDRAHHSVLKAKRQIELLTPLVDDGRRHAEIAAEIQALREGRDALRPYFAGLKAALLERRLELLTQDATRWDARIKQLGEQRDNARIEQGKLEGALRENGGDRLQQLSAAIQQQEAEKQQRQEKADAYTTLLTRIGEAAPGDEAAFISQHASIGQRAEDLRAQVVGLENDEREFEFALRKGREEHEVLTSEIDSLARRKSNIDAAQVRIRDALCAALSIAEEDLPFAGELIQVREDERDWEGAAERLLHGFGLSLLVPDRHYKDVADWVERQHLGTRLVYFHVRARKSTQAVSLHPQSLVRKLLIKPDTPHYDWLERELHHRFDLACCDSTEQFRRETRAITRAGQIKDPSGRHEKDDRRRIDDRSRYVLGWSNADKLRTLRDEREGLEQRLGDIGLRIADTQRLRGQCQAQLEALAKLEVFTRYSEIDWQAPAREIARLTDERDRLKAASDTLRELESQLAQVVERLKEIEGDLGEAQGKRGETRSKHETAQAQYAQALDIQAQAALDDVLLQSLEGWRAEILGDHQLSVESCDNREQDVRNGLQARIDAEDKRLSRLTERIINAMRGFKEAFKAETAEIDISLAALPEFERLMKGLQHDDLPRFEARFKELLNVNTINEIANFNAQLARERETIKERVDVINQSLQVIDYNPGRYIRLLAQPSPDAEIRDFLQDLRACTEGALSGSEDEQYSETKFLQVKAIIDRFRGREGLAEIDRRWMQKVTDVRNGFLFSASERWREDDAEHEHYSDSGGKSGGQKEKLAYTVLAASLAYQFGLEWGAVRSRSFRFVVIDEAFGRGSDESAQYGLELFRQLKLQLLIITPLQKIHIIEPYVSSVGFVHNEGGRESRLRNLSIEEYRAQKAAATGAAP

SEQ ID NO: 31260 - protein, 401 aa, Alicycliphilus denitrificans K601
MTWSQPTDLRTQVERLWQRGELLRTVVGGDTLNWPLRLSLKSPSAADLSHRFDAVRGWVREISAMPRVRIEWREWTHRVQGRQRLPDTLWIDTLDDALAMIGKTGDAVRFQALWQQTAEAQPTLLAWLHRSPLQTLALAEHWPRLLAVVAWVQAHPRPGVYLRQVDVPGVDSKFIEAHRGILGQWLDLALPTEAIEPAATGVAGFARRYGFLEKPVRIRLRLLDPQLPQLPGCTGLTDITLDEDSFATLALPAQRVFITENEVNFLAFPPVSSAIVVFGAGYGWGALARANWLYRASLHYWGDIDTHGFAILDSLRKYFPLAASFLMDRSTLMAHALQWGEEPLDKRHTLPLSRLVDEEAALYDDLRNDRIRPQLRLEQERIGYRWLCAALATTVQDDSRP

SEQ ID NO: 31261 - protein, 465 aa, Lachnospiraceae bacterium 2_1_46FAA
MNLINKIPTEFYKLFASKYRAYYQKFLLAIYGETSKSYSLLGLTEEECKCIMNENIADMVLEWSEEQADEEGEFLTRANMASVCLKNLENWGWLHRDYDETLNQYVVSFPEYSRLYVELFEKLFSEEGNRERESVLAVYSHLYTYSSDMEKNNDILKSAWNTSRTLVQMLANMQEGIRGYFDELSKQKSFLGIQEVLVKEINNSDSRKYAILTTTDSFYRYKEAVKELIEKNLGENEKRRQSFMKKRLQFEKDSPQYARNERAIELCEEAMDIIYRIEREFDTIERRYNKLIEQKTIFANRAAARIRYLLMEGVAEEDGTVAFVNLLNQSSKREEILAKLAAGMGMTERYREVTDKSMYRQKNTDKEKFTPATVKEIPVEDEGLEEFILKPLYTQKEIRDFRRKNEKAGEFIVTENTVQSIEDLEKLFFVWQEVTERAESDADVAIEEEVETKGFKFSKLRIKEK

SEQ ID NO: 31262 - protein, 212 aa, Lachnospiraceae bacterium 2_1_46FAA
MFKYMEELSLTETENLRKTISNLFKQTCILQVKYDPVTLTPRDNIYYEMCVRHKKFIEDYLMVLGCELTHDPQEHIFRLTGEGVETERFSLTTTIIILMIKMIYRDKILGEGLEATVTTLEEIREYGKNTNLLNKKLKVAEWHEALYLLSKHQMIELPGAVRDVEDTTPIYLYSTINLYCSSLNINALLEEYREEIVENETVEENLYENVIE

SEQ ID NO: 31263 - protein, 1127 aa, Lachnospiraceae bacterium 2_1_46FAA
MKQSKKIFTKMLLNNWGGISHKELVFHEYVNLFSGKSGSGKSTVMDAIQVILYGSVAASFLNKAADDAKNRRSVLSYLRGEQKDGTANRDGMDFCSQIVLEVEDRSTHIVTCIGVAFEVGKKDLELKRYSFFSHSGRLAEDGYIAEDGSPYTLARLKKLIERRKESEDNRGRGDVNRLYPSKESYLNTLYDVILGYIEPGRFMTMEKSAIALRMTNGTGQFIRDYMFPKSKEGTVSVISEQLGAYREIKERVEDLENRIQLLENIREHNLNLIQFKSDAIRTQAILKVITIESLKAQLQSKKETLESVIDTVEKIGETCRILEEQENKCFEEKVEIEAQIRASDYGQKEKELEEIRYTIEILAGSSAQWRAVLHGLSAWEENEDISAYLSNPALHTIREVTEGNVTEEILTKLKKYLKDTLENIEEELQELQYSIRKTEKELAEKQEIIEDLKNDRKPYKKELKRARARLQNALSDRYGRTIHVGIFADLFDITDEKWKNAIEGRLGRIKYSLVTAPEYALEAATIFRKMREREFEEVNLINTAAIKRDEPKARENTLYEAVKTSETYVDLCLKQYLGRIVKCETIEQLHEVREGVTPDCYSYSNYMFRHLREKDYGDYSCIGTKVSKLKLQELEDEAYLLKKQLKADRQMKDSLKKARTFEQLNNKNAEQLIQMSKASEDLENYYKKEEKLIRELQELNAGTLLPQLKEMKRQLEEKIETLREELQKRNKEHLERIKIQGNAETELKTVESRLEDELQGYVKNEALEQEVLRELETKNEYTYRRQKQKELEKLDKAIEEETEQRLTARDEFNRQYSAYGFTGREPQNDVYDRVLEQCKKDFEPKYKAEFEQQYHLVYHTLRENVIATIHGEIKAAFRHKREINRMLGKIRFSDSIYQIDILPAENENRQFYEMLMAPELDSKVFDNHGYEGQLSLGEDEFYQKYETQILRLTEKFMPPRDEDSGKRAVYKEEMERYADYRNYLNFNMYEQVEDEDGNIRKNAVDDMAGRDSGGEGQNPKYVALLAGFAMLYMNQSNRDSKIRLVLLDEAFSKMDKERSEVCLHYARELELQLIVCVPDERLQSLIRNVDSVYGFRRHQNQISMMHIDKGDYLKMIEGEEHEKIADA

SEQ ID NO: 31264 - protein, 397 aa, Lachnospiraceae bacterium 2_1_46FAA
MKKLLTLSRWIIDKTNVDSYRAGRLQGEKHPCIDQSLLNQLGGMANLLKQAEEMERDAGLNKYIRFDWRDMGKDITKMHYSIDIIPLLCKKEGIEDSLEKQRRYIEKIENLLSEVSRAETNWLYSYYNSLLVRLKQGKNVKEMEDETLFRCLQGMAAIQNPLWKRIFSANVLENSKKFEKEYETKVVGILRMYSDLPDKDDMTDEEILKSYGILSYAQVLEWKGTVIYRLDTGKTVDTSDFYYGTIINSQTLEHSKPIAIPHIRKIMTIENKANYENMVYEKDTLYIYCHGFFSPKEVKFLNELTKLTDENVEFLHWGDMDFGGIRIFLFNKEKIFPKLKPYKMGRECFLEAIGKNAGIDLEERKRRSLEEMKAGELEELKECILKYGVEIEQEMVI

SEQ ID NO: 31265 - protein, 483 aa, Lachnospiraceae bacterium 3_1_46FAA
MERIPKDFYKLFSSKYTDYYMLFLTAIYEEMSLSYSVLGLTEKECRAVMNEKIAAAALLWDEENYDEEGEFLTRSNMASVCLKHFQEWGWLKQDYDEALNSYVVTFPEYSQMYVELFRSLLDEQESEERESVMTIYSHLYTYSSDKEKNNEILKSALRVSKKLVQMLVNMQDGMRGYFDELSRQKDFRGIQDVLVKEINNSDSRKYAILTTTDSFYRYKEAVKELLDRNLQENDMSRLKLLRELEEVRQKKMKDEENAGKVKDPKKTDEAEKIKELRLERAAAMCEEAADTLIRIERQFDAIERRYNKLIEQKTIFASRAAARIRYVLQEGAEEDRTVALVDLLNKSRRKEEISEKLAERIRLSRPHRALTDESLYKRKEKGREAFVPAAVSEGGQAEENLESFVLKPLYTRKELQEFKERNSVGNVFRTTRQTVRSAEDLEKLFFIWQEATENAFGSGEITVGEEEETEQGMRFSTLEIRED

SEQ ID NO: 31266 - protein, 212 aa, Lachnospiraceae bacterium 3_1_46FAA; identical to SEQ ID NO: 30881

SEQ ID NO: 31267 - protein, 1121 aa, Lachnospiraceae bacterium 3_1_46FAA
MKQPKKIFTRMLINNWGGISHKMLEFHEYVNLFSGKSGSGKSTVMDAIQVVLYGSVSANFLNKAADDSKNKRSVLSYLRGAQKDGTANRGDVDFCSQIVLEIEDTATHIVTCVGAAFEVAKGDTDLKKYTYFSHSGRIPKDEYLENNVPYSIAQIRKLTEERSRSADNRGRGEVNKVYPSKEAYLYTLYGEIFGQVEQGRMITMEKSAIALKMTSGTGQFIRDYMFPKTKEDTVATISEQLGAYREIKERVEDLEKRIEMLDKIQVYDRELTNVRAEKVRTETVLKCIDIEENIIRLKGRESELESVEKEADEAKKEQKILQDELQTIRDERARVQAELNNSDYGKKEQELKDLEYRIALLADNSAQWRQIVKGLKRWEEEDVVTDYVSNRALQLIQEIRGGALTEKLCKELRTHLDLALDNITNELSELRISIHETEKDIKEKQDAVEDLQNDRKPYPLELKKARQELQRALSDRYGRKIEVHIFADLFDITDEKWKNAIEGRLGRIKKSMITEPAYALDAAKIFRRMQQFEEVDLINSEAVQKDSPEADENSLYKAVHAESGYVDRCLKRYLGRIQKCETVEELSTVKDGVTPDCYSYSGYMFRHLRRKDYTKNACIGTKVSKAKLRELQEEIIDLQSSLIADRQTEESLKEARQFERFGQEPEHLMRLAGAADELADHYRRQDRLKEEIKELKNGTLAAELQAKTKELTSRIEEKEQVAGRLREKEIETGKKKGKLEEKIKALKERLDFLMKGYVPNDEIFAEVRSALETKSEAAYKKEMTVMAERLFEKETKLQDERIKSRNAFNNTYPAYGFSGVEHDNEVYDKVLERCRKDFEPKYKEEFEKQYELVYHSLRDNVIATIHGEIKSAYRHRRQINKMLSQIRFSDSIYQIDISPAKNENGQFYEMLMAEELDSKVIDHSGFDGQMSLMEDEFFRKYERKIGLLTEKFMPSREEDGAGREKHKNEMERFADYRNYLDFNMYEQSIDENGIEKKNYVDDMAGVDSGGEGQNPKYVALLAGFAMLYMQQSNRDSKIRLVLLDEAFSKMDKERSEVCLKYARELELQLIVCVPDERLQSLIRNVDSVYGFRRFRNQVTMMHIDKGNYLDMIAGESRSEEV

SEQ ID NO: 31268 - protein, 410 aa, Lachnospiraceae bacterium 3_1_46FAA; identical to SEQ ID NO: 30883

SEQ ID NO: 31269 - protein, 461 aa, Butyrivibrio fibrisolvens 16/4
MWFRIIFNYLGSGSNNRIYAECLLIIYGEYENEISYRLSRNQIRDAVAFYLNEIHSDLILDDGEIEKNYSEMASAIIRKFADADVGWLEEDNDEATFEKQIIMTEQGIMLAEFLERLKVPEKEEFSSYIFNIYNILRSHEQWEENPYALCLLSVYKNSRNLSKALKKLATFIRKIIEEMMNENSFESLTENIISYCDGDFIKEYSRLTKRQNIHIYRSSIINSIKEFENNQELFEKILEGCSVENNISKEEAQDKVLDMIQKTKHFLENEYDAIMADIKHKINIYLQIAVGRGRFLRNKGADIRGSVEQTIKYIVEEMDELGLKDDMPEDYMDLFSLQKNEFIDLNSIRYPAKQKAIKKNIKQQYEVLTDEDKLKAMEAQRKSAFNPYSKERMKNFLDEQMENKVVVSAAELPLISKDDMLVSLSAVAYSMDNGYTIITKDGYVESNDLIIKDFEIRRNSK

SEQ ID NO: 31270 - protein, 122 aa, Butyrivibrio fibrisolvens 16/4
MIEEHWDNYTSSEKEQFQRAARRLLKNTFIVRDKDDDSRKIYFFIAKRPDPFSEYFKYIGFDIVVDRENGVVMLQNDRSVSETRRIQANRIQLKNLKALYYAAYGQYMLIEFLRALLSEILL

SEQ ID NO: 31271 - protein, 160 aa, Butyrivibrio fibrisolvens 16/4
MNNNRKSATRLLLINWSRFQYENISLDGSTLFTGVNGSGKSTVLDAMTYLLTGNTQFNTAAKDKDRNVKAYVRGDTKSNESNRFLREGDVVSYIAMEFFSPDENAYMVIGVEIESSSENDASSSWFILRDTKIENIQFCETKEGIRSVYPKNRLLVKNKN

SEQ ID NO: 31272 - protein, 476 aa, Faecalibacterium prausnitzii SL3/3
MQLFELVSPRLFRPLAGPNRAFYAELLLLLWEECRHTADYSISRAEAVSRAEDYFAALAKPLALDADGAGDEDEQPTRDPHTLAVGFLLRLRRTGWLEEQPGSYESEPTLAFMPEVTPLLDALEEILNPRVVTYTGKLYKAWQLLGSIGQEKSPYENVLREVAADLETLNKSLRALNASIGHYIDRLTHNRTPQEVLELFDQYEEKVVAAAYHRFKTSDNLFNYRAYLEEELDDCEQNQLPRLALDYARVERCAPGEAAPRVRALIQQQRDALEEMSTLMKEIDASHIRYRKRAVQRAQFLLLSDRSAQGSVTALLRRYAEEIRSPEQLFEVDDGPVAARLHLYPAAVFGTKPLYPPAAPRTEAPLAPVRTEPLDPERLRQEQQLLLDYARLAVTEENVALLARQALAARGQVNASTLVEEYPNDFTGIIGLHTYSQSPHREYDITLTGNWVERGGFRFQDFVLTRRKEVNTDGNH

SEQ ID NO: 31273 - protein, 202 aa, Faecalibacterium prausnitzii SL3/3
MATIDLLEETANYLLNHCFVLGCVEEQRAKYLYIQDHLNEVRAVFKPLGYAVLLYPAPMQAAALVNEHEGSQARLLKYESILLLVLRLLYLQKRESLAASADEVLVTVEEVQAELQKMNLPRKLDQQTLEKLMRTLRRYNLARPVGRLSGLDSRIEVFPTVLLALPDADLADAAAESARTRTELGLYERPEGADMEAGEGEA

SEQ ID NO: 31274 - protein, 1099 aa, Faecalibacterium prausnitzii SL3/3
MIELKRLKLINWHNFENTTFDCARLTYMIGVNAVGKTTILDAIRYCLTTNRNFNALGNKKSGRTLQGSVHAKQRGENAYRRPGHTVAYIGAEFWDSVKHTSFVIAVRVESEGPMQELHPGDQTWYISEDGITLEQLPFIDPRTGAPSAKEDFKPAEGRLSYTRSPSEARDRICRALGIGRAASPLGKKFNEVFQMGTSMDEIPNFREFLYQYILPQPELDLEALQGDRLELENLHAVLAEAQTRANALDEIVRYGREATEKQTEALVNRGAALLARAAADAGEKAVWQERVEAGRRQQETLRTRYAEAKTAEAEARRAYLTAHSAAGASGEGRALDALSEELAHRQTALDAAARRADTAEKAAEKTGNLLAVLRRSGFAAGQKLADLTPDTLPALTDWLTAQEKPLEEAYFAARQHTAALQRQQTEKRAELDAVSGGKWVYPHGDAATRVRDAVNAELKSRGMEPDARIFCELLNVEDESWQDCVEACLGDRRFDILVPPAHYAAAKSAFVALKEKVGPISLLDTPGLRKANRRADTAPADSLAAQVTSENPLAAQYADTILRRIVCCDTPDTLENYPDSATRDLLRHHPFRLERLRTPQRYIGLEARRARAGALAGEMNALAEEVRAAAQAEQNLKAAYSQYQTLLRGTTLEELAALWDARAALTAARAAVDAQAAKLAECRENPLLQQLYKEEEVREAAWEAARTAVEQTGGDLRVCEKQIASCEAEQQKAVDTAEKSAQAAESFFAAHPLVEPLSRSRQQALTGPDKSPRAAAQAAEKAQAKLDDALTVYLNSTLEPAQREYNRRYVCDYPLGLAGLEQYRAQHESLVRIDLERYAARLEQAQRDCKDRFRKDILFRMKDDIFNARRQFRELNKVMEQLTYGEEVYRFELEPSRDPQLAAFYQVIVDKGNQQMTEGDSLDNLAATADPAYERQVDELMEKIMADVDENTRARQEGRTAAGATLSDYVDYRTYLDYDIKVTNQVTGQQAYLSRVSRDSSGGENQAPFYVAICASLLQIYQKSENSIRLVLLDEAFSKMTSDRIRPMMELFRRLQLQVLLISTVEKSTAIQPYCDITYSIVRHGDANAIAPFVRLAAE

SEQ ID NO: 31275 - protein, 466 aa, Faecalibacterium prausnitzii SL3/3
MKFFEAVPSELFSPLASPNRILYADALDVLYAAYQENLKIREDVLYSMLRGRLEQELADATFEDEDIDEEELRDISGRARFLIRKLCSKGWFEKERGDDFEEYITIPNYSSRLLELFHQLCDDSPARGYSYVFGTFSVLKTADDSNNAYDKMTALYSAYDNTTALISLLQMVYHNVKHYFQTQIDMQDVNQVLAAHFNDFGQKVVEAYIRPLKIKDSVPKYRVPIQSVLRRWEEDDTLLMAMANEALRDKRGKTLEDCRADLLRKIFWIEERYDNLEKDYLEEIDTQVRRYTRAATQKIENLTNRDQSVRGNLNVLLTALSRNRRASELVDQIQPAFQLYEQSFLSEKSLWYRKRPEKRTKTASVLIQDDQAPNTEEQVRAAQLLQSKYGRAAVNAYVQGWLGDADIRCSEELSLEEDKDYIMSLLAILGSKDASAGYVVQELDGIFCKNVYSIPQMQIRRKEKKP

SEQ ID NO: 31276 - protein, 1127 aa, Faecalibacterium prausnitzii SL3/3
MKKLKKILLINWLYFSKELIEVGDINFLTGKNGAGKSTVIDALQIVLLGETNARNFNQAANEKSQRTLEGYLRADMDDNSPYSRRGKDFSTYIVCEFQDEMEGSSFVTGVTFDCRSDGSYRDTFFIYTGTLPENCFIEQGEAMETSALRRFLKQNYARAEFYDTQKEYRRNMLAKWNVHNEQVLRMMKKAVSFRPIVDIQKFITENICDIPDKPNIELMQQNIRDYKRHELLAQRQQEKLDALQQISRLYQEMNQAIDRCQIQKFLVRWAEKEAAQTEIDQRELERTVCKENLANVNEQLEELERQIEQKETRRSELELACRQSNVFQEEERLLNTEKALRDEQKKLEQGLQNLEVEIKREARHLQRFCGEIQELEPEELLIPVQEAANTVQKAYAVFTGDEKGLFARPVELFETGQQAAAELSDAVRSAAHKTEDRIVELKKQADQKSAVLANLRRNIKDYPHGLLLFKDRLEKDLADKTGHAVPVYILADVLEMADERWRGAVEGYLNNQKYYLLVEPGRYQDALNIYDRLKQEAECRAVGLVDIGKLREKETLRPLPGSLAEKVETENKLARSYVDYLLGRVICCDTAEQLRCYKTAITAEGMLYQGYVARALRKGWMEDAFIGRRAVQLRIDHLEKELACLQEELRHWQPLQKQLTGLKEPLFTQRFVRIDVAQKQEDYQRVQTIIKEIAEVKNQLSQLNLFWLDEQRRIIEQLKEEILAFNKEKDAKNVQKGKLEDRIHQLEYEILPEKYQRYEAIEDVLNEEFTKEYRETIGVPRYRQELVRLKKADVIRKNFGDSLAQSTKAMDGAQKKLFAARREYAERFKPCAFQIEVMDNTEYEEERRTLQESELPRYKEKIRAARESAMEQFQNDFLAKLKSSIDQVQEQVHNLNKALRQAQFGTDKYQFRVGPNPDYLDYYNMITADELMEGESGLFALPFQQKYGPLIEKLFSQITMADDTQLNARKQSELQENIVRYTDFRTYLKFDLETTDQNGSKQLLSQTLNMKSGGETQTPFYIAVLASFAQLYRVNDATRFGNTVRLVVFDEAFNKMDSDRITESVLLLRKMGLQAIICTPPDKVSDIMPIADRTLLVDKSGYRMHIIPFGKEMQNEGSTGDPESSAG

SEQ ID NO: 31277 - protein, 412 aa, Faecalibacterium prausnitzii SL3/3
MKEAQVILNRLLDKFENSKHLSEPNTSRRRVMLRIDKRELPEYQYEDAVVRDAYNIAARELEQQALVRLEWARKQSVLSCIVLDLERVAQCYECADRVHPRKKAEEVANIIMQKLADNPVPWIAAWRDAVCAQVRNSMKVPTYCRENDGLLQELLLTFQRYAELSGSVTMRAFSSQCFHDTKYFERNVRELFLTIARKYNTQLAAACTEAELGERDQLAFLGIYARPELYELSGDCAICLKKGELRLSATEPYGLALPSTLVSEIVDIELKNICCITFIENKTNYDEYLLAEKQPEELVVYHGGFLSPRKKKLFEKLAAAAGETMQIRFWADIDLGGFCMFENLQTVFPQLEPMRMEGRFVEQYHKNGLKRPEQYLKKLKEERNAGRHTLFVDAIDKILQYGVTIEQETFLE

SEQ ID NO: 31278 - protein, 470 aa, Ruminococcus torques L2-14
MKLVEKVPKDLYKIFGSKYMEFYMQFLVALYEESSQSYSLLGLTERECQMIMNERLAKMALDWSEARVDEEGELITRANMASVSLKHFEDWGWLRRDYDETLNSYVVSFPEYSQLFVELFQKLYSENDGKERESVLTVYSHLYTYSLDKEKNNEILKSALHTSRALLQMLANMQEGMRGYFDELSKQRSFRGIQEVLVKEINNSDSKKYAILTTTDSFYRYKEAVKELIEENLEKTEARKYSFETELLSEEENTRKSYRLRRMIEICEEATDMLYKISREFDAIERRYNKLIEQKTVFASRAAARIRYIMMEGVMEEDQTVALINLINESGKSEEILDKLSSKLRFSEPYKIMTEKSLYQRRENQKEKFTPQAVTPEKSQEENMTEFVLEPLYTQKEIRDFRKKNEQNGKFTVTKDTVKSIEDLEKLFMVWQHATESADSKAQIEVAQEMENEAGFRFSKLTIEGVESDG

SEQ ID NO: 31279 - protein, 231 aa, Ruminococcus torques L2-14
MVNYMEELSVTEADNLKKTIAALFRQTCILQMKYDPVTLVPRDNLHYEICTRHRKFIEDYLSVLNCELVHDPQEHIYRLHGDGIAIEKINATVTKVILLVKLIYRDKILGEGLKATVTNLAEIREYGKNTNLINYKLTMGEWKEALYVMSKHQIIEVPGAIQNVEDETPIYIYSTINLYCGSMDITALIKEYQEDQYAEEEITEEVFEQEIQEEAEGGVEDERETVEENIY

SEQ ID NO: 31280 - protein, 1122 aa, Ruminococcus torques L2-14
MKEKQSKKIFTRMLMNNWGGISHKVMEFHEYVNLFSGKSGSGKSTVMDAIQVVLYGSISSTFLNKAADDAKNRRSVLSYLRGAQKDGSFNREDQDFCSQIVLEIKDTGKNTHTCIGVSFEVGKADTDIRKYCFFSHSGKIPEDEYLTEEGVPYTIAKLKKLVEARIESADNRGRGDVNRVYPSKEAYLKTVYDAIFGYVEPGRMMTMEKSAIALRMTNGTGQFIKDYMFPKSKEDTVATISDQLGAYREIKERVEDLEQRIKMLDEISQHNLALQKARADKIYVEQILKYIEIENCKAHLQSKEDDLQDILKKIEEKEEKRKSYLAEKDAYTKEQVEVEAELKASDYGQKEKELKEIENTIQLLATNSEQWRDIVKGLSAWEEDDEVSAYVSNQALHRIDDIRDGVVSEDSIEKLKQYLSDALDNINTELGDVRERIRENQKELQEKREMVEDLKNDRKPYRAELKRARQELQNILSTQYGRTIHVNIFADLFDITDEEWKNAIEGRMGRVKHSLVTAPEYTLDAAKAFRKMKQMKGIEDVELMDTAAIVRDKPNADENTLYECVRAEEAYVDTCLKRYLGRIKKCETVEELHETRDGVTKDCYSYSNYIFRHLRKNDYEKYACIGTKVSKAKLLELEEEAAKLKQEVEEDCRVEMALRAAQKFECLNQSTEQILHLSKAAEQLQDYYEKQEKLRLEVEELKRGDRTVELKKKKQELLELLKKNAEILDSIQSEVVQYAKTQGQIESNIKSFSEKINFLTEGFVVNEQLQNEVTDALKVQSEAAYKRDKTKEKDALETLEETEREELQRSRNKFNNAYPAYGFTGIEHENDVYDKVLNQCRKDFEPKYKEEFDKQYNLVYYTLRENVIASIHGEIKAAYRHKKEINRLLAKIKFSDSIYQIDIIPAQNENGQFYEMLTAPELDSKVFDDYGFEGQLSLGEDEFYQKYEEDIKRLTEKFMPPKEEDARSLSQYRQQMEQYVDYRNYLTFSMYEKVEDENGNIRKNAVDDMAGRDSGGEGQNPKYVALLAGFAMLYMQQTNRDSKIRLVLLDEAFSKMDKERSEVCLHYARELELQLIVCVPDERLQSLIRNVDCVYGFRRHQNQVSMMHIDKGDYLDMVEGNE

SEQ ID NO: 31281 - protein, 494 aa, Gordonibacter pamelaeae 7-10-1-b
MIGRRAMAVVSNTLAFKSLQQDDAAWKLLNAQNAAVVIAILDEHLGGETSKRTVTDLVGLVDADLEELRERVPGISMTRSANEYCEQWRRDGYLMRKPMTGSRQETYELSGGALAAISFAKGLSKPHRTATKSRLSTILDRIADLSLATDPDYERRRSVLLSEKQRIDEQLAALDQGELEVMDPAQALEQARDILNMAQEIPRDFVNVSADFEHINKSLYAQIIGYEDGYQETLADVFAGVDHIAQSPSGQSFRGFYDLLRNLEASEKLQDDIDLILDCDFARELDPEERRFLRHFLQTLLDQGREVNETMTGLARGLRRLVQSQSFQQDRVLKRLLDRALGTAGTLTELYRGTHALPLELELTKTPIAPISRLELRSPAAATAPPIEDAVVEEARPITLAELHEQVREEEIDFDELTGNVNACLEARGEGATIAEVLAAHPATQGIASVAGLMMLAADQGMRAGGAETVCWRSKSGQMRKARIEKFLFTKEVR

SEQ ID NO: 31282 - protein, 236 aa, Gordonibacter pamelaeae 7-10-1-b
MTDFAPDPYGIADEDSPDVAFNLAAEAPLDDKRLWPEDTGTLPFDARCALLQLVRGPYLHEKRDAPLWRALLNHRAALASRLADLFLELCVDQEAGVAFAHNVSTDEREVPKAARSNAMTLLDTIMVLTLRKELQMGGANRVFIGQGELFEQLAQYRNLTKQDQSGYQDRLKASWNRLVDYRILIRSDAEDRFEISPVLKLIFGTEEAEAVNEEFERMLELAQPLAEGGDNNAEAE

SEQ ID NO: 31283 - protein, 1135 aa, Gordonibacter pamelaeae 7-10-1-b
MLKPSDLPDVPYPGQWRLARVDMANWGTFSGYQSLPVDRRGLLLTGASGSGKSTILDAVSTVLTPPSHLHLNAAANSGNQRDKERSISNYVRGVWGRRSGAAGELAHAYLRPKQATWSGVMLRYEDGFPYGELEGSERRRHEPVNLLGIFFQKSNTVGREGLKKFYAVVRGDCALHDFAAYGMNEADMSKFNKDFKETGRAWRDHASFEAHLCGVLRISSPKTLILLHKTQAAKDIGSLDDLFRKYMLDTPRTLELADAAVEQFQELSQAHEGVVDQRRQMECLEPLLVHDETHAQALAAEVEARGLLDALNPFADETAVELLEQQLEKRARRADALVQDVASAKAEQSFAKQAHDSAMALLSKRGGVALDTAHMQVDERNRQLLYVQKNRDSLKQDLATSDGVALPATREEFEALKRQLSAKAQEARSWLDGNEDEKVSRFGRVGELRERRTDISEELRHLRRQRSNIPSKLHAIRTSIAHQLGLSLADLPFVGELIDVNPNEAAWQPAIERLLGGRARTMLVERRHAEAINEFLETRHLGERFEYDAVPDRVSVPGVALHEKSLVRKVTVANVPNHESFALWVNKLLRERFNYVCVDTPADMERHPKALTRGGQTKSGEHHVKDDRRNIADRSRWVLGSTNDQKIERFEGDLAECERLLTAARAETNDITAKELRLQAICRLDESLRSKPWDDYDEAQAKGECERAEAFYRELEQSDEFREAEALRAKAEARLEAANEAVQKALVAQQANEEKLKDIEDQIHDLEQRAKRGRDEGSPLSAETKGQLTKLFEETEQGFRSSVSSVYQTANRVQRALDERAGKAVRAQQNARRKAELVLQQYKMKWPAQAADLSGRFEDRIAYLDRYRQIKASGLPEYEHKFLEVLNSFSQDQITVIASEIRNAFREVRERLEPVNRSLLLSEYRSGVHLQIEVKENRGPRVDEFLADLKEITKGSWSEDDLASAERRYERTAAVMKRLGSSETADRTWRMACLNTPDHMKFIAREVTEDGSELKAHDSDGGLSGGQRQKLVFFCLAAALRYQLADEDQPIPSYGTIILDEAFNNSDRFFAEDALAIFGAFGFHMVLATPGKLLQTAEDHIGSIVVVTCEDEKRSRLSPVVFENDALAAEGRESR

SEQ ID NO: 31284 - protein, 355 aa, Gordonibacter pamelaeae 7-10-1-b
MSDVCMITPDEAAAKALKRFERDCRAWAAALFASSCGSAGERPQAYSIPLHPPTEKQAMADRNAARAWARTWHSSPLAGDVQWTSRNWGSIGQQTIPVRLTLESPSDIARAAGAGALWERMSERTLRLAERYSERWSKACPSTDPDALVAAVRAVAGRCCELEERDWEMLLLALDWLVDNQDATYFVRQLPIRGIDTKWMEGHQGLVKPLHRALTGRDPQFARQAGQFRVHVLDERLAPGDLTDLALSVEQLGRWPRLPDCVLICENMVNVLALPPLPGVIAIHGGGFAVGELASVPWLSHVPLLYWGDLDSNGFAILNQLRSHHGHVTSLMMDAPTLDRYRDLCVEEPTPSKAS

SEQ ID NO: 31285 - protein, 470 aa, Clostridium cf. saccharolyticum K10
MSFFETLNEKFFNPFCCRNRVLYFECISQLIEKSKEISVLYETDARNTLILYLQNCTYSIETENIGEEIAGGKTPQENASTILRYFRACGWITPQEIGRSGDNIASVSAYCRKLIDAIHKIFDGDANGAITNHIFSMYEILKFSFSKDNARSIRPYQNILIPLVENECDLKNELLILKDSIREIMRAVMKMADANSFGQFLMKDELLNRFFNDYFFIKKSGLIPSYISDIDRMLRKLRHSELYDRMIQEYRKIENTDEIQAKEKIDRLFNELDSFINLEYEQEMSYIDRKINNYYNLYSTRMMMVLSENTNLEHELNRILLFLKNLNEENRAEALSKLSETHRLMSMGYIGRKSFERRKKRNPNQKNAGLVCEELSEEEKQRLTDELLTETPDRYSMDNVEKHFDEIMRGRDQISVEECGVHTRDDATMIAASMIYSGTSGFPYEVEFRKGMVETEAARISNISIKRKKT

SEQ ID NO: 31286 - protein, 214 aa, Clostridium cf. saccharolyticum K10
MSDISLRITIKEESGHLFKRCIRKLLESTFILRDKDEKLYQFASRESNRQDISEYLRMIGFDMIVEEKTGVCMLAASEEDADTVGLKRANVVTFSTLQYHLLLVLWKVYLENLGYSEGNFVTRGDLIDKIKSYDVQLTRTEFSAALRLFKKYSLLNFNDDEEGEDMKIQLYPSLQFGWDLPQFQTVAREYLKEEPEEEGPEEEIVPDEFEEEEE

SEQ ID NO: 31287 - protein, 1105 aa, Clostridium cf. saccharolyticum K10
MILLKKVRLINWYGFSNVTAPIGFFTLIAGKNGNGKSVMLDAIKYAAYGDTVFNKSSESKGSRTLSSYTRGLLDATAGTYMRPADQVPNVYSHIVLEYFDDVEDKSFLLGTVIETSASNNCQTYRYVMDRMVMEQVEHTYEENGVTMPCSASFLQKRYRLTLMNREQGLPKFLQMTGLKLNLGQLPVYLRKLRGIMSYDPNARIDRFIRESVLEERNVDFGKLIQAKENIERLNENFEIIQQEINELDGILGEYDAWESEKNRLLADDIRIIYKKRKDLNREIERQTAEQELAQRRKEDLERELEILDRRKKEIDAQLVQARVSLEQLDSTRMIAEERRKLEELEAEKRTLMTLCRKLEHFQAVVSELMNQFFEKEKRMEDQNVLASLCGRGHTAAEKAAAVSRFKQKINECYDGLVMRAADTERELAELNRSLDVQHRIIEDCKKHRNTFAQIPEYVGLRDEINREFEKRNIRSKAQFACEYVIGLTDEKWRDAIEAFLGPRRYTILVDPQYYDIADDVLNRSEHRYAHLFNTKLLMKKKVHVEEDSAVFKLEIKNPVAKQYFDYQLGRMHAVERNAVKEYENAISREGRVSVAMDSYFLRFDRLRSYYLGQKTFELNRIRAEKEISRLNEERKAKLAEKKELEDQKNRMAQNREMFQEYDYDAHRKYQAASENARASEAQLERLKKAQENNQEYLELNELAGRLSDEQKAVQNEYNAKLQEKSGQDTTISRCGEKIEAKSGELAEQEKRYREYQTGYYTIVQRTVEAYEKYLKNGKKGPGGLLAEDTRRRIGNSITQHERDLTQKQADYNAKHAGRMLPRGTEGRERYAGRRERIWMDNLQEIRQKLEEQTRRYEDIFKNEFVLTILKSCERAREDLRQINGELAKLSFAAKYQFDVHYVKDGSEYAKVIEYARYLDEREQLGGNADGQIAFDILTSVSDEEGERLETEMKQIINRIIEKNSEETIARFADYRNYMNYEILISNQILDRAKLSRQTGFNSGAEVQIPYLLILSSALLLIYNQRINSTRLVFIDEPFAKMDPGNVKLMLKFMREQRLQVIFCSPDKTESIGNECEVILPALRVRADSMQLGIVQFHEEKAYSSR

SEQ ID NO: 31288 - protein, 416 aa, Clostridium cf. saccharolyticum K10
MKRRPTAAGEGTDMVNYEEKLLAALADKYRKSKKDRGTNVITRRTKLNPSQLYKNYSRNDGDMTQIEAVNQAIFRCSQEGFVTYETEGFSSEIQSIYLVDEKIGEIEDYLETKYGYEPKSAKRKYVEGLIAGYSGRSPAAEQECIKLRQALEKNRIPPRYHQTEDLLKALVFIENNEKDLYLREASLLIYGDSKYLEENVLGSVCRALRDCLGRPCGPAELEDEILEEYHITREKQKLCLKGDMTVCIHGKELELGAFPNGIEFFADELYKIEQITVKTAFFTTVENYTSWLRCDSSKTALFYLGGYATRYQRDFLKKIFSDNPTLVYRHFGDIDAGGLYIHEHLCRVTGIPFQMYRMSRAELEDVRFQSCLHPLTEQDRVRLKSLEKQEMYRELAEYMLERGVKLEQEIVSYYEL

SEQ ID NO: 31289 - protein, 481 aa, Clostridium cf. saccharolyticum K10
MKLLNEIPSSFWGLFRSPNREIYIEALLKINEEYQYSNYFLSRDMCIQVLGDYFSRRQVEIEREQEEAEADTLEPPATRILNWLIRTRWLRRQEDFVNLSVNIVIPDYAAVFIGAFERLIGEEGDEADIYIQNIYANLFSYRNDPRASIALLNTALVNTRRLNKTLQDMLHNMDKFFTSLLDQKFYGELLREHLDGYVEEIVKKKYHILKTSDNFYLYKADIKQWLKLLREEPEYLELTIRRGGKKLELSEAVRLLDDIERGFDDIERRIANMDREHTRYVRVTVSRLYYLLNKEEDTKGLILQLLNRMSREEDPEPLIRKTAARMNLSRRELLSDKSLYRKRKPREAFREKLQPEEAPKELSREELLSLNRVSAKYTREEITDFIRERMEDKAAAITGDSVRSEEDFEKLILAYDYSLKKESPFRTEGEPESIDNGAYVFPALVFREKTKAGEPERRAGEETKGSYHTGKGQIREDDTIF

SEQ ID NO: 31290 - protein, 245 aa, Clostridium cf. saccharolyticum K10
MIPYFNELLQEEREELTQAIRLLERQTYVLERKYDRKTGRYQYSGVYRTLERHMEFLREYLEISGISIYEDIQLGVIYIKGEAVLAEKLPKLATLYLLILKVIYDEQMTEASNSLAVHTTLGELSERLGVFGLTGRTAPTEIRRALSLLKKYQIIEPLDLMDDLDGNMRLILYPTINLILTGNDVRELLSELGEGEGQDRQLTRDTEEAADEEENETDGEENEADREENETDGEENETDGEEDSR

SEQ ID NO: 31291 - protein, 1141 aa, Clostridium cf. saccharolyticum K10
MNDKGFKALTRICLNNWHYISHKVLSLNSGINFFTGHSGSGKSTIIDAMQIVLYANTDGRGFFNKAAADDSDRSLIEYLRGMVNIEENNRFAYLRNQNFSTTIALEFTETEGGEAQCVGVAFDVETASNQVNRLFFWHKGRLPEHFYRTADRTMTISEVRDFLKKNFTKEDSFYGPHNERFRSQLYSTYLGGLDKEKFPLLFKRAIPFKMNIRLEDFVKEYICTEDDIHIEDMQESVMQYGRMKKKIDDTVREMEELSELNQAFLQVREAEEEMEGYHALAKEMEILALKGRVRRLGREAEAAREEAKRQSESKAQLEERIQEKEAGREELLKKIASTGYEDLKEKLKTLKELIEQYEKSEARFQKTAAGLKGWEEADCTANQTLWDIEAFEKREISEEGLHSLKQSIEAMRKEADEERKEAESEIRRLKRAQTEARENLKELKQGRKAYPKELQNARTYIQKRFLEEFQKPVQVDILADLLDIRSERWRNAVEGYLGGNKLSLVVEPRYVRSAMRFYNELDRRAYYRVSVVDTEQAVRDSHPVLDHALSEEVSAQTEYVRSYVDFMLGKVIKCEGIDELRQCRIGITDDCLLYHSCRLQYINPENYTRGAYIGALSMKKRIENLEEELREIGEELKPLEEARQTCDQVLSLEPLSLTVSEYGEMFEDLKNLKKKRAEKKRQEQALLELSEGQISAWEKEREELQKEIEQDRGALKALEENLWKLNRDIQGREKQNIELQGELSQRERELSEMKKEMEEKSGTHALEQFEAKKEEALLSAFKAVPDGYSTAEYALERPAQCERLRETFENLERESGERRESRFERLEKQRIEYLRRHPGRRFSPSDRGNEEYDKLLEELSCDRLSEYREKAAEQARTAVEHFKDDFIFKIRSAIKEAYHRRDELNEIISSLDFGKDKYRFVIEKNRGADGKYYDMFMDEALEINPASLSQNMDNQMNFFTMAHEDRYGAMMNELIDIFIPPDQAAAREQEEARRQMEKYADYRTYLSFDMQQIIEGEETMYIPLSRMIKKNSGGEGQNPFYVALLASFAQAYRINLPARFRRNTTIRLVVLDEAFSKMDAEKVASCIRLIRGLGFQAIISATNDKIQNYLENVDKTFVFANPGKKFISIQEFERKEFGELE

SEQ ID NO: 31292 - protein, 466 aa, Faecalibacterium prausnitzii L2-6
MKFFEAVPSELFSPLASPNRILYADALDVLYAAYQENLKIREDVLYSMLRGRLEQELADATFEDEDIDEEELRDISGRARFLIRKLCSKGWFEKERGDDFEEYITIPNYSSRLLELFHQLRDDSPARGYSYVFGTFSVLKTADDSNNAYDKMTALYSAYDNTTALISLLQMVYHNVKHYFQTQIDMQDVNQVLAAHFNDFGQKVVEAYIRPLKIKDSVPKYRVPIQSILRRWEEDDALLMAMANEALRDKRGKTLEDCRADLLRKIFWIEERYDNLEKDYLEEIDTQVRRYTRAATQKIENLTNRDQSVRGNLNVLLTALSRNRRAAELVDQIQPAFQLYEQSFLSEKSLWYRKRPEKRTKTASVLIQDDQAPNTEEQVRAAQLLQSKYGRAAVNAYVQGWLGDADIRCSEELSLEEDKDYIMSLLAILGSKDAAAGYVVQELDGIFCKNGYSVPQMQIRRKEKKP

SEQ ID NO: 31293 - protein, 1127 aa, Faecalibacterium prausnitzii L2-6
MKKLKKILLINWLYFSKELIEVGNINFLTGKNGAGKSTVIDALQVVLLGETNSRNFNQAANEKSQRTLEGYLRADMDDNSPYSRRSKDFSTYIVCEFQDEMEGSSFVTGVTFDCRSDGSYRDTFFIYTGTLPENCFIERGEAMEISTLRRFLKQNYARAEFYDTQKEYRRNMLAKWNVHNEQVLRMMKKAVSFRPIVDIQKFITENICDIPDKPNIELMQQNIRDYKRHELLAQRQQEKLDALQQISGLYQEMNQAIDRCQIQKFLVRWAEKEAAQTEIDQRELERTECKENLANVNEQREELERQIEQKETRRSELELACRQSNVFQEEERLLNMEKALRDEQKKLEQGLQNLEVEIKREARRLQRFCGEIQELEPEELLIPVQEAANTAQKAYAVFTGDEKGLLARPVELFETGQQAAAELSDAVRSAAHKTEDRIAELKKQADQKSAVLANLRRNIKDYPHGLLLFKDRLEKDLADKTGHAVPVYILADVLEMADERWRGAVEGYLNNQKYYLLVEPGRYQDALNIYDRLKQEAEYRAFGLVDIGKLREKETLRPLPGSLAEKVETENKLARSYVDYLLGRVICCDTAEQLRCYRTAITAEGMLYQGYVARALRKDRMEDAFIGRRAVQLRIDHLEKELACLQEEQRHWQPLQKQLACLPDPLFTQRFVRIDVAQKQEDYQRVQTITKEIAEVKNQLSQLNLFWLDEQRQIIEHLKEEILALNKEKDAKNVQRGNLESRIHQLEYEILPEKYQRYEAIEDGLKEGFTEEYRETIGVPRYRQELVRLKKADVIRKNFGDSLAQSTKAMDGAQKKLFAARREYAERFKPCAFQIEVMDNTEYEEERRTLQESELPRYKEKIRAARESAMEQFQNDFLAKLKSSIDQVQEQVHNLNKALRQAQFGTDKYQFRVGPNPDYLDYYNMITADELMEGESGLFALPFQQKYGPLIEKLFSQITMADDTQLNTRKQSELQENIVRYTDFRTYLKFDLETTDQNGSKQLLSQTLNMKSGGETQTPFYIAVLASFAQLYRVNDATRFGNTVRLVVFDEAFNKMDSDRITESVLLLRKMGLQAIICTPPDKVSDIMPIADRTLLVDKSGYRMHIIPFGKEMQNEGSTGDPESSAG

SEQ ID NO: 31294 - protein, 412 aa, Faecalibacterium prausnitzii L2-6
MKEAQVILNRLLDKFENSKHLSEPNTSRRRVMLRIDKRELPEYQYEDAVVRDAYNIAARELEQQALVRLEWAIKQSVLSCIVLDLERVAQCYECADRVHPQKKAEEVANIIMQKLADNPVPWIAAWRDAVCAQVRNSMKVPTYCRENDGLLQELLLTFQRYAELSGSVTMRAFSSQCFHDTKYFERNVRELFLTIARKYNTQLAAACTEAKLGERDQLAFLGIYARPELYELSGDCAICLKKGELRLSAAEPYGLALPSTLVSEIVGIELKNICCITFIENKTNYDEYLLAEKQPEELVVYHGGFLSPQKKKLFEKLAAAAGETMQIRFWADIDLGGFCMFENLQTVFPQLEPMRMEGRFVEQYHKNGLKRPEQYLKKLKEERNAGRYTLFVDAIDKILQYGVTIEQETFLE

SEQ ID NO: 31295 - protein, 477 aa, Faecalibacterium prausnitzii L2-6
MQLFELVSPRLFRPLAGPNRAFYAELLLLLWEECRHTADYSILRAEAVSRAEDYFAALAKPLALDADDAGDEAEQPTRDPHTLALGFLLRLRRTGWLAEQPGSYEEEPALAFVPEVTPLLEALEEILNPRVITYTGKLYKAWQLLQNVGEEKSPYENVLREVAGDLEALNKSLRALNASIGHYIDRLTRNRTPQEVLELFDQYEEKVVAAAYHRFKTSDNLFNYRAFLEEGLDDCETNYLPQLALDYARVERCAPSEAAPAVRALIQKQRDALEEMSTLIREIDASHVRYRKRAVQRAQFLLLSDRSAQGSVTALLRRYAEDIKTPDQLFEPDDGPLAARLRLWPVQVFGEKPLYPPAAPRTDAPLAPVQAGQLDEEQLRREQKLLLDYARMAVTEENVDILARQALAARPSVSASTLADEYPNDFARIIGLHTYSQSPRRCYDIQLTGEWATRGGFRFEEFTLTPRKEDAEDDRNE

SEQ ID NO: 31296 - protein, 202 aa, Faecalibacterium prausnitzii L2-6
MTETNKMLEECANYLLNHCFVLGGVEDQRAKYLYVQDHLNEVRAVFAPLGCSVVLYPAPLQAAALVNEHEGSQARLLKYESILLLVLRLLYLQKRESLSASADQVLVTVEEVQAELQKMNLPRRLDQPTLEKLLRTLRRYNLARPVGRLSGLDSRIEVFPTVLLALPDSDLADAAAEVTRTRSELSLYERPEDGTAAVEVEE

SEQ ID NO: 31297 - protein, 1104 aa, Faecalibacterium prausnitzii L2-6
MIELKRLKLINWHNFENVTFDCARLTYMIGVNAVGKTTILDAIRYCLTTNRSFNALGNKKSGRTLQGSVHAKQRGENAYRRPGRTVAYIGAEFWDSVKRTHFVIAVRVESEGPMQELHPGDQTWYISEDGCTLEQLPFIDPRTGVPSSKENFKPAVGRLSYTRSPGEARDRICRALGIGRAASPLGKKFNEVFQMGTSMDEIPNFREFLYQYILPQPELDLEALQGDRVELENLHAVLAEAQTRAAALEQIVDYGREAAQKETEALVNRGTALLARAEEAAAGTNTWQEHLAAGKRQHEELTARYAAAKDAEAEARRAYLSAHSAAASGEGRALDALSEELARKRTALDKAGRDASRSEAAAGNVQSLLQSLQRSGFAVEKSLWPASLTAETLPQLQSALAGLEKPLEEQYFAARQSADTLTAEVQEKQAELASVSGGRWVYPHGDAATRVRDAVNAELKSRGMTPDAKIFCELLSVEDESWQDCVEACLGNRRFDILVPPAHYAAAKSAFVALRDKVGPISLLDTPSIRTANRKADAAPADSLAAQVRSENPLAAQYADTILRRIVCCDTPDTLENYPDSATRDLLRHHPFRLERLRTPQRYIGLDARRARAEALTKALDELTARSKEAAQSAAALKAARDGYQDVLHSSVMDELAALWDARAALEAARADCTAQEQKLAECRENPMLQQLYKEDEAREAAWDAARAAVETAGGDIRVCEKQLASCEAEQTKAEETARQAKDAADRFFGQYPLLEPLARERFAALSKDKGPRYAAQSAEKAQARLDDALAVYLTGTLEPAQKEYNTRYVCDHPLGLTGIEQYRAQHESLVRIDLERYAARLEQAQRDCKDRFRKDILFRMKDDIFNARRQFRELNKVMEQLTYGEEVYRFELGPSRDPQLAAFYQVIVDKGNQQMTDGDSLDNLAATADPVYERQVDELMEKIMADVDENTRARQEGRRPENVTLSDYVDYRTYLDYDIKVTNTVSGQQASLSRVSRDSSGGENQAPFYVAICASLLQIYQKSENSIRLVLLDEAFSKMTSDRIRPMMELFRRMQLQVLLISTVEKSTAIQPYCDITYSIVRHGDVNAIAPFYRLNASEEIGS

SEQ ID NO: 31298 - protein, 221 aa, Bifidobacterium longum subsp. longum F8
MTVAEEHEEHMDNANPYALFEGDTGDMPAEARMAAIALKRDRYISGPTYDTVLDNRDAVVRSLNNDLLDLVINERYRIMYATPVAGDDVTLRSLKTRVSLKREEAALLAFLRIRVLEYENVHADPADWLVSFEEIRAALATGAGYLAARNDEEGVAKQIGAIVSAMITYGYLVRLDDEAMYQITPLVPVVLDRELADTWLDVAEHGDGDTEDDDDDEKGAE

SEQ ID NO: 31299 - protein, 1182 aa, Bifidobacterium longum subsp. longum F8
MMQATDVQMIADRWMLESRRLINWGSYEGYHEFRPSTDHKLPVTLLAGASESGKSTLVDAQISLLYPTGTPFNKASNSGRSERSDYTYLRGMVGVGSTETGDEPLYLRGRDENGAPQPVWGAIVDTYRNQTTGQVLSCAKFLYLMPGDGRGDVRRQYVVWGKPVDPRRMDQYRDAPFTPAQLKATYPDCLTFPSAEAFHTHIWSAMGLSEAACRLLHKIQSADAPSRLDDIFKQGVLGVPEALDLARTTVEDYERYDENFHAMDEKTRRMDTLRGIQQAYGEYAAARGKARAFEPVKPAVDGTVPAVLRDWALARMRGEVAVQLPADRAEQQNSEAEAKLLRRRTEDLRTRLDMIRGQMQGLDGGNLTRLELELDQARRTLEDVQANRTRIEQTFASIGETLPGDEQAWNERRINAVNFKREYNKRDGECEEALTAAINARAGARGDLERLQRDFDRQRSQRTRISQQMDETRAMLCRATGLAPAELPYVAELMDVNEHEEDWRLAMNVAYAPIAQTILVDKRHEQGFAAKVSTIDPRTMPRRTWQFVDTARHYDDTGAHANILTGEQDGDWLSGKLRYRDDSPFADWLRSQTQDERFDALCVTAIDDTDRTNRQVQADGQIKSGARGQHGTKDRAQVIGFVNETYLNALAAQVDAARNALSQADTDYTAAKTQSDNLHRELELANQLAYTSWERIDIAGAQRTITDTQDAIASIKNDPKLAELAKQRDELNAELDRVERQRIESDQAAARAGSAVEAALIWLRDHADTGTTDAAGATADNDDDAASGPLPDEVTAALAESYDNRFAGLADAAMRAHMIIGAGAAGTQAPGESFPERTIAGIGKDMTSRINLLNGQADAARTGVESKMSTYIALYAADDDSLTASVEDYRYYLDELASLTQLAAVAATDAEYRRCLEQLLRSFLTIKRAIDTDASDIHDQLDRINAMLKGQQFGPKHGSLSLHADVRRPERAFWTQLIRVIGTLNDWKSADVNDSDASRKAFAACAPMVGLLRAELAQVKDTNGVKSYGARNLDPRCRSSFYAIVHHADGPDERITSTGGRSGGALQELTSFVYGAALIYLLGGGLTSEPSYTTLFLDEALIKADGRYTQRALTVLPRLGFQVIVSAPESKTGEILEVSTKAYVTYKDPDTGLTSLREAVLHQNDMDDESSSDILKDDGVAE

SEQ ID NO: 31300 - protein, 394 aa, Bifidobacterium longum subsp. longum F8; identical to SEQ ID NO: 30423

SEQ ID NO: 31301 - protein, 490 aa, Cellulomonas fimi ATCC 484
MITRAEGAYLGALRAFQNPMLDLLHKRHAPLVVALLSSVFTAERPTVPVADAHTEIGDALDQLRAAGYEDGLPVGPARDLCRQWADAGWLVRQVLDDDVEAYRLSAHAVGALEVAGRAGGTGARVSKSRVRTLLEAVDRLAQDADPDVMVRVARLDAQVRELQAELERLERTGTVDEVDEEELLEEAENVLHLVRELPGDFARVAESIKAMQRDVVTALRQDERPTGDVLREYLERGEHVMESTAEGRAFAGALRLIGDPHRLDGLSTQLGLVLRHRFTRRLTPQQRTDLREVGRRIEQGLDQVFTAQREASYVITTQVRNHDPLRDRQVDDLLRDVMTGLQSWMPLARRGQAVEPLRRLPVAEVEHLRQSAGDLRPPEPPAPLAAWDDDDLGADDHEVRAWGGPHYAELHDHLRTFAPDEPVDVAAAFQAAPAPLRRPVDLLGLLEIADQLGMTETGELAYVDAVRPDGTRRRFAFGGVTTRTKDEDDA

SEQ ID NO: 31302 - protein, 274 aa, Cellulomonas fimi ATCC 484
MPETTADVTAADVTADDVTADDVTADDVTADDVTAADDVAADEGERGGFIAPVPMEEDPAELFAGDTGTLDADVRRVLVRLLQRRYLLAERSPAQWRTLLENQQVVESRLHDLFVHLVVDHDRGIAYKRQVRSAELDVPVLLRDDAYSRAETLVLVHLRTVYQRERGAGEASVRVDVEELEQTALTYFDADDTNVAGQQREIRGAVARLAKEGLIEEESEGRYRVTPLVEVVLSNERLVELRGWLREQADRRAAGPDDGPGADHETADAEEVAR

SEQ ID NO: 31303 - protein, 1118 aa, Cellulomonas fimi ATCC 484
MTMVDSLFGLIPAASTGQQWVARDLQLVNWGGYDGHHRVRLASTATLLSGGSGSGKSTLMDAYIALLMPHTTPFNGASNGGVVGRPRGKDQRNVLSYARGKLDESRTEDGTRQRVLRGDGQDTWSAIAMTWTDQSGTELTAVRAWYVPSAARTLEDVTAVRATVDGAFDLRELEHAASQRLARAAVTAAGLTCFDTDRDFTARLHSSLGIGAAGDGNRAVALLGRIQAGQQITTVDALYKAMVLEEPDTFATADAVVEQFDKLTGTREQMITARQQVKALEPIRELRATVEAGHERLRVIDRIGSFADGTSPAALWRHERRLGLLRDVEEDLQHRHQQAQRRTAETAARVSAARAELDGVKEALWSSGGDRLATAQRELAATRVRRDDAARARARLDDVLRPLGVRVGSEADLAALVARSQAALHDADTKAAARQALFDAMQAKKEAGADVAELRAERAAVASRRDNIPGDLHAARAALAQAAGLSTDELPFVAELIEVRTEHEPWRDAFNLALGGFATRILLDVAHLAAFRRAIDAVPLARRIRFEGVPTGIRDDIGLDVRTLPGRLDYRSGPFTGWLRSELSRRFSYVCVDTPGELSQHAKALTRSGQVSEGTQGAHGGQGFANLLGFTNTRRLAHLDEQIARAERRRALAEDRVVDAERDLDRHEEQLAAHRALADVSWDQVDVAAADAELARWEQVVTDLSSGNPEVTRLQDRARELEQTIQRLTEDLGRTKGDAEALAARWSAVTDEVDEAQRALDDAQDAGTTVGAGERTYLDGLLGQDAAVPGAGEPAAALAEFDGVLARAGEVLAAARLAAQQTVATARDALRRTFETFVERWPDPDLGTDPDESYGDFARVLADLETSGLHELEADWRRSLLRLSGNDLTDLHHALSRSVREIKERIQPVNDILADLPFADDDHRLRIDARDTQSTVVARFRKELRDLREVLATDATDAERERRYVRMAKVIDRIRRTSPDFADLVDVRRHVRLSAEKVDLEGNHVALYDHIGEKSGGESQELVAFIVGAALRYQLGDAGAERPRYAPVFLDEALIKADARFTGRAIGAWRGLGFQLVIGAPNDKFSALEPHVDVKYVVLKDASGRSRTKPIAGVAAPS

SEQ ID NO: 31304 - protein, 472 aa, Centipeda periodontii DSM 2778
MELFDVLPERFFGLLAGKCRRIYAEAGLCLYEQYRLAQFGIEQEILRDKFQELIESWADAGVAYEDEDFSGQDAAVEESRAKANHMIRRMKEFGWLDYEQRENFKIFILLPHYSSRLWGLFANLCEGRAVEYQRFAFTTYQVLSGEAAKVQPSMAVLEAERLAEEFVEELRILLNNIKNKMEQVSAQTSLQEVLSHHFVEYRADIVDRSYHRLKTSDHVSRYRIRILQEVQEIRQNKERLRALCEDAVRRQLADSMEAAEYRMNASLHAIEEIYRGLDDMFAQIDRRHNQYVRASYERALYLQQAGSARTESMIAGTLLAISEAREQGQEIEGLPRLFHLQTMNMLLPSSRYVPRKKRVLEPSAGTPVREVDEMMRERVRRESAERVARGISRQKIEAWILDVLGQRSSMEIRELLSRLREEENPDLLQLLYVYLYGHDDLAKYRLGKDKDIEEMDTLRYSNRVVRRREKRK

SEQ ID NO: 31305 - protein, 199 aa, Centipeda periodontii DSM 2778
MKLELLNEQERERIRSVIQSLLACNFLTREHDAELYIAARRYREEIAEYFQVIGWEFRVDERYEIVWLLSAGMAHRRALTLEESIWLLVLRLLYEEKRTGLNLSAFPMTTLAEIRAKYLALHLPDLKKTAIQRLTQLSKQYRLADVLDRDLSEEARIRLFHTLSLAVDGEELSDLHRKLEIYRQRKEEDDEETAENEGN

SEQ ID NO: 31306 - protein, 1106 aa, Centipeda periodontii DSM 2778
MKKLRKMKVINWHYFDEDEISFGSATMLSGHSGAGKSTLLDALQYLFIGSQTQTRFNAAATQEARRTLIHYLRGKIKAEGVQYLRTDEFTSYIALEFYDDAKKNSFIVGYVVDVFRDDSLQEEFFLLDQRTLSDVEFRNADGVLYTREAFHRRYAHGSSVFETGKKQWQRRLMNRLGQLSARFLPAFSRALAFRPIDQVRDFIYEYILLPRDLKLDVLREVFYSYQKFERDLQGLRAQKRQLESLQENYDSYCKWRDTACEQEFVLLSFRHRNDEEKLEAGRQQKEMCHDRLKALQVKLREQEHLSERRNLEQQEAYAAWQGNDTKRRRDALLEKQAACEEKRRALTDAHRRMQKELLRESEGARALSAYPAGTFFALPDGMDAALTELAATLAYVGGDSIAASEIEPIQEKLRAGGAMLAEIAGTWQRSSLLLEQEQSAIAQRQEELRAEIDGLKRRQRKYRPEMMRLKALLEQRLAGRSKVYVLCEELEILDEAWRDTLEGYLNTQRFDLLVEQETFREALHIYETEKKERHFDGVGLVNTEAEKKYLNRRENGSLANLLQAKNPLAQARIDHLLGTVMQAQDEQEMLAYQSAATKTCMSYKGLVARQIPRRFYEIPYIGAGAIERQLEIRQRELMEVQQRLAGLAEEAERMKRIAPILREPLHRYVNFAEKMTVLSELDTCLAEGKRIESELAAMDLSETERLKSVYEESRRQAEEAARACTATTRELARSESALDQAERVLPLLTRAADEAAAAVRAWRETYPGLCASAESRFSSLVQETRDERTTEERLHSYESSKRGNETRRDNMWQQLLVARERYGLEHGDTGHVYDPDHSYYAQILDRLAATDIPSFEEKAKEALAQSEMEFKAHFIFSMREAIESARHEFRELNYSLDQFQFHKDKYSFIITPSAKYKPFYDAVMTADWEMAGGLFAETDTAANEQAMELFDKLVKGTPEEQEEFSDYRRYLDYDIRITDTAGQTYLYSRVLRQTSGGETQTPFYIAILAAFQQIYSDKTIRLTVFDEAFNKMDEERIKSCIELIKRMKMQLIVAVPDEKLAAIAPLMDQSIIVTNAGNHCFTDELGDVATWEKGMTHGSDTAAKAL

SEQ ID NO: 31307 - protein, 408 aa, Centipeda periodontii DSM 2778
MDRTRLQKRYEEKILTILLEKYENSKAAVGEKGRRPQFRLLKSSLAPDYTDELDVDKREALHAAAQELERQGMISIVWERHGTGHMERILLAADVAELYARMRRTLPLARVEEYCAELAALSEAKTLWIQRLCRETGEMLSEKKIPAYLPKEKVLRAHLIRAILALPHAGENSIPKRVFSQRIFGNSKYFEQFVEAPLLVLLRRFTEEPCESDAEYLDMSGIAGHQGKVWIAGSMAFLLHGRRYSLADFSGGMGLTYETITEMLIDTLPHAVLTVENLTNAELLARDGGEDRLLIYTAGFPNRTLQAFLRKIAAMQPVLVQHWGDLDYGGICIFEYLRSHFFPKLAPYRMDTESFRAYLPYAQELKPTQRKRLGSLLEREEFSAWHELIRIMLDEGKWVEQEVMLWAR

SEQ ID NO: 31308 - protein, 463 aa, Marinomonas posidonica IVIA-Po-181
MLFSHLPDEIFQALSGSNKTLIEAVLKDLADVFYDHAEDPIKDKSTIIESIEDTLHKLDTLSWHEDQKESFDSPKTIHDYALRIYHRLVNTGWLVEEQELYRVSVLMTPQISMLLRSLVEISSHGKRNYGATVLSILSNLEAVAKQPKERGVTLRQSAEAAREFSAHLNQILLGIRSLQRELFASRDPKAIVSGFFDLFVEGILIADYKTIKTSNNPFRFRRQILELTQDFLANPTTMGQVAQCYVDQQLITMAEAQAMVEQDCRDILKTFNNIEQRLERIDEYRYRLEKRAADTARYMDSSRPGMATKIAGIISDVAKFDHLPVMKQVVGSRFVGMASAAQPTKRREAPPPRIMTPAEVSADAIKFRDQQRRFHEARQVTVAKMQTYLEKQMASSTQKHILDFTISSVEDFVCFDHLRYIGSLGVSAKKLENVFEIQFTDQFVDVHDFVECREFNVVRRSEA

SEQ ID NO: 31309 - protein, 215 aa, Marinomonas posidonica IVIA-Po-181
MLKELKKVVEESGKDAQEFQQTANYVIANQFASAYKHGQRKHYLLLESYQEYFDRLFDALGMKLYINENERLAGVLPVQREAFVRLKTDETLFLLVLRQIYEEKIENFEVDNGFVATNTHTILDRFVHLVKREIPSETRFKDILSLFSRHGVIIRGKTYEEDSKNQIINITPVVRLIVTEAYLRQLESFNGTDPDEDDIESDDSDVEITSETNQD

SEQ ID NO: 31310 - protein, 1138 aa, Marinomonas posidonica IVIA-Po-181
MKKLNRIVLVNWYLLGAEEINIRGNTAIIGPTGSGKSSLLDAIQTVLTGASKRHLNYNASANDGKASGRSIRSYILGMIDSGQANAKVFGTEPRQDATCYLALVFEDSVTGKESTVGLTLSASLASPEEDVLGRFVLPNFGARKSDFIDAMEGKSYKAKPWIEVRESFKKICLDPFIKSGSASATQYINRYLEELSPSSDQLITIDGFLKNFKNALKFVPIASPTRFVQDFVLTEAPLQVGAYQKSLNEYRQLEAKTLEVSKRIDDLKIIQQDCEKKHQHDQNAINYQWIATEARFDELGSKQDDIQDQYDLQKEREEEIEEELATQSSLLKQLQGQLLRLEQQYEHSDVGLKLQQLEQNKKLIELQGQQDQKAILQLRQMAVLLKALDGFTEVLSKESIELAQELSSLQTVISEDGRIDGNLKPLTQKLSSLNAALDKEKSLLFGQRSELNRSILNLKDECKQLESDVSSLKGGVSPLSQNTKRLIALLKDANITATPLSHLAEVTERKWQDAIEGYLGAQREALIVEPEDAEEAIRIFRAHRRQLMGCRVVDTTQTRLWLSRGDRQSALRFIRCNNDHAQAYLNRRLGGIKPVETERELLREDSAMTADGMLKLSGTISTIRSVPHMMVGINTEGMRESREQQLKTLSAELASLLTSDQRLEQADALLSRVIANNQFDVETLGNASHAVTRLVQELESVNAEITQLQQHDDTDLQERIEELKTRVANVELEQKKLDRERQQIAEQFGALNTQKTQLSSALSALDEERTRLTSNPKYDAEFASERYSLLESSMVHGAAIYKEAISRADKASEKARSFDQKVRKEVADHYAKYHQANLDNDTQLDYLESKFEEFEHYVSYQIDILSETELAKYAKRAEIARREAEETFRSDYVSKLKDSLDQVAHIIRELNHSLKRRPFNQEIYQFRYYPNGDMKDILDLVERFSAQDQANVGGLFDPQMGNDPEHARAIEAIQELISDEEKQQDLADYRKFYNFEVDILDSDGNKKTTLSQRIQTGSGGEHQIPFYLAIAAALSTTYRLHETMDGDIVGGFSLAMFDEAFNKIDMVKTSTCMGFMKDIGLQVIAAAPDDKRAVMAANMDTIISVWREGGAVSIDVAYPKEKGQVLLNGQTESLLTSA

SEQ ID NO: 31311 - protein, 487 aa, Methylomicrobium album BG8
MSFHELNARFRRLHKEHPAWRLLRADHAPVILAFIADLFEDDNEVAFGRARAALDMELERLREQGSLDSKENAPGYLRQWIQSGWLRELDDRLSKTDACEVALRFCRQLDQRESGATASHLRIVQDAVRDLSVALSPDPGERTAILEARKAEIQRELDDLQAGIVRELSDSEQRERIVEIYQLASVLTGDFRRVEDDIRRLDQSLRIEMIESGGGRGAVILKLLEQERLLADSDAGRAFDGFFQLLCDPNRSTELREQLKTILIRPAAKHLNDTQARFLGKLMRELNKESDRVFRVRRRTEEKLRQFVESGAASEMRAVDRLLGRLERLAVGFKDAAIPLRHDTGLALASGTVKISSPASLRLKMPEEQLHTRGIEAEQNASTPSAAMLEQLHAVQVMQIAEGMRNIVRGSRIPLSVADVLERRPIEAGLEELVACLRVARAVGAAELSGRQTVSIADRQGRRFKAEIPHYLLSAEQFPERLEELQL

SEQ ID NO: 31312 - protein, 253 aa, Methylomicrobium album BG8
MTREYRQTHFFDMLLNPAEAEEVPPPPVPESEPETEPEEEAMLPLAPLAVEDQQQGRLPQEARRALIALMRHGVVMAENKRLLFEALCRYRAGIQEHLADMNLRLLLDEKAGIAMLLVQGGDDGGDEDEEGASLINRRTLSLYDTLLLLVLRKHYQEREAAGEQRVIIDTERIETALRPFLPLTNSSRSDLRQLNGALNTMKDRRILAAVRGEDDRYEITPVIRYVVNAAFLEQMLGEYARLAERSGSETNDE

SEQ ID NO: 31313 - protein, 1117 aa, Methylomicrobium album BG8
MNEITQIADLYDCGAIRLRQLSVYNWGSFHGLHTAAIDPDGTLITGDNGAGKSTLVDALMALLQPAGKAAFNVAAAQGDRSDRSLMSYVRGSFGSAHDGSQTRVRSKREGAVVTGLCANYVAEDGAEMALAALFWIIHAGGGLGDLKRVYLVARRKLALKELLDAFGDGDPRALKNFLKDDPAITNCDDRFSEYLESYRRLLRMDNPNAPALLARALGLKKIDDLTALIRELVLEPSSVREDARKAVGEFADLVGIHERLLDARRQRDALAELPAIEKDLFRAESELKQLDAELQGLPVWFGEQCAALWAERVERIEDRLRAAKQVLAKLEQEVKDAESNAEQRHADYLQAGGERIEAIKKDLSVAEDKLRDTTRRAADYQQIAGALQLDKTLQEAVFARNRQQAANAIEQIEQEKTQAQDAFAEQAAKFSNAQQQQRDLQEEIRAIEARPDSNIDSKFQQLRDEMAEALGLAREQLVFFGELLDVKDEERAWQGAIERALGGLRTTLAVPEGEYPLVTRWLNQRHTGLHVRAQVVRASNDKATFKTNGYLRKLAWREHPYRDWLKQHLAHFDLDCVASTEALDRTPFSLTQQGLMHLEKGRFEKKDQQRIDDRRAWQLGFSNKNRLDALKQEAKALAEQLGVLDKAAAEARTRLDEVGKRSRQWEKLGEFRWAEIDAPYWQGRTGQLQNDIRQLEQAGGDLAKAKARWDEAKQALQQLQTKQGQQIAEVAGIGKDRQSAAARQEQAQRLAAAGLGDDLRAALRGKTGALKDEQLDDAAKIEERHRRGLEQQRDAVRGRKDRAGRSAIGIMTGFRAKWEALTAEWGADLASLSEYLHHLGQLEKDGLPALVEEFQKRLNKHTTQSLAAIRQRIDSEREEIYERIETINRVLARTEFKAGSFLRLGIQNDQYEHVLHFNRLLRQVMEQLTGDDHEARFAVLQQVIEILDKASSSASAYTLESLRLLDPRHQLSFYAEEIGLEDGAIRDVLKSSSGKSGGEKESFAGTIVAASLAYVLTPDGYDRPVYSTVFLDEAFSNTAEAVSRRVLRIFKELHIHVNLITPYKNLNLARESARSLIIAERDGATHESRLCEVTWEEIDRRLQRQAGELDIVLAPET

SEQ ID NO: 31314 - protein, 400 aa, Methylomicrobium album BG8
MKPWGLPPAEAVAEIKRREWDHARNLRGRLCGERPFPLRMLLKAPTEDQALADLEHFRQFIAGWKAWRFPEQLEWQRKKFPHLGEHDVPVALQIGSMPELVALLGPEAQVRSRLWEERMLPLLAIDTRLSNALLKHLDVIEDMAADDAVLLAKCLPQLRPGMGQGAFLRALPLEHVDTKFVENYAVLLGDLLDCLYDGTATQPDGLLGWLDCRENPRGWLQVRPLCRQSRERLAGLPLLQLDTQTLRCHPLPASFILVVENVQSGYALPELDDTIAVFGGGGNTAWMDADWLGARQIGYWGDIDSAGLMFLSDARRRQPHVQALMMDEATLLRYRERMVDEESPCRRTPACLTAAELGLFERLRDGFYGRTRLEQERIAPDHALRQLLDWLETGRKRILS

SEQ ID NO: 31315 - protein, 499 aa, Treponema azotonutricium ZAS-9
MPLGTGVFATLPENFFSPLARVNREHYANLLLIYYRLFQENARGIEREQVVRSFTDYLGLHRNTLADESPDAGDNTDSPDEAVLPEAELLTPELDFENREENKESTEHPAKSPFLNDRALASRFLRKLINAGWLDEEILADYTKVINITPHGRPFLEALAKVDEGLKNEYESHVVAIYSLLCTDAITDNGHYAVRNAYVHTQALIDSLKVLSQSIKGYYDRISTDAAQFGISGILRLQYDEYAPQILDAAYKRLKTSDNLSRYRPKILEQVGDLLRNNAWLDTSARKLAVMKAQTQFECKRQLEDMLNEIRDTLNAVDPLLREIDHRNSLYSRSSTERIKVLLEPDSTIAGKIAALVKEIHVGNKGLYHRLAHRLHRIRAFAPESLYKRQKKEAPDFMQAVAPADRAALERDKELFMNRLLNQLGIKRISAWLDEHGGQERLLSSKDLVYDEASFVRFIYSVLYADSRQTFDYGIEDKPEYESIDAAGYGVPDLLLRKK

SEQ ID NO: 31316 - protein, 202 aa, Treponema azotonutricium ZAS-9
MLQDLQGLSLITELTASDFDLFKTAVRTLLAKTFIIRGIEKERELYDFAIRNASLFDAWFSCMDASLVRDESLGVVSFRGGGDTRLRLGREETCAFLVARLLYEEKRAELFLTAFPTVRIGDFVDRYNAMADEKLKKTRQKEIFRRLQSYKVIAFDASDFADPEGTMILYPSLAMGLDRDGIDELMAQIAQVTAAKKEDNPS

SEQ ID NO: 31317 - protein, 1070 aa, Treponema azotonutricium ZAS-9
MITLERVRLVNWHNFDDTLIAIGNRCLFAGDNGSGKTTILDAIQYAMAADLRKARFNAAAGERKSGRDLLGYVRCKVGSDTTDYMRGDTVAHVMLEFSRTGGEVLSAGVCVEAYTDGNCNEHFWMGSLPIASLKVRTGQEQPLNFRQLKDSWAGAAAHANKKMETFESKKLYLREFTAAIGVWRRNIDYSPYLEAFTRSVSFTPMISVDRFVCDYILEEKPVEIQDMKNNLESYKEAEREAKGAVQRIEVLKKISAKAAEWRMYEGLILKQEYLMLRIHRDEELQKNQKEERKLSAAEEKLKSLEQKIAGLNESRFEWENELRKTDASLAANDAHILYMQIEDRINRLKKDLEIEEPKAERYHTLKTQCEAMLGRKLSENPAEDSSKIESEENQARSEKDAARIQKEEAALALREASAELAELERGLLRYPEAPASLKAALEKEGIAAAILADIADITNPDWVDAVEGWLSTRRFAILVDPKDFQKALEIYDRLPRHISGAFLPNLEKMRDAVERNPAQKNSLASLVETGSIYARHYIDFVLGNVICADIRSLKNFGSAVTRECMRYSGFTASRIDQNIYSRHYLGKAAQRERKEFLIAEKLRLQKVHEESTAKEQEAAQKEEGFRRVGRTLIDLSYLLPSVAATLKMRNDLSVAENELSAIDTRSFKELQEKRDSLAERIRVSGEGLQSCYKEQGSENQIIIDCRASMENIKTAIGDREHAIGLFAENHPFEISECEDYAEKQLSKENIYDLSSKYESNLKGYQTSVKNRRAEYADLVHNYDRDFHTYLPIDPGENDEAEKLLKRLETSELPEYREKIEKAKRDAEKEFKEHFISNLNENIEIARESFKEINEILRSLSFGRDQYRFALEEKSDRKGQIEIIKRTAAIPTMDDGLFSQINDPEEYKAVEMLFEKILTTDLDSPEMRSICDYRTYFQYDIKIRATDTIDQITGKPMDSSLSKVIREKSGGETQTPYYVAIAASFYRFFKDRPEETIRLVMFDEAFNRMDDERIIKILNFYKDLNIQLISAVPPEKIEAIAPQVDRTNLVVRHGYSARVWDFHGEAGKAKA

SEQ ID NO: 31318 - protein, 408 aa, Treponema azotonutricium ZAS-9
MTTWEDHILNAFIERYPFSVSAKVNSADFPAANHRLRIPAAKIFPGFDNAPPDEKESFLDAVESLETQGFVSLVWARHRKGELLSAIVCLDMEKLYQLRKRLSPKAAAEEAREAAEQIVSPNDTLGAFFAFLANGITALDAAKGINAESVHDLAKLFTAISKPINLTLRALSVSLYNDSKRLEALINSFKTIFARAEKQGISIPEFSFLDRSFPETSIAGKIIINIEDSRPLANENGVILILPLITIQKIRSITGYCSVPAAGKSPSVLMIENKETFFTLAASSHKYTCLLYIGGHPNRAVRALAKVLAKSGFAFFHAGDLDPEGILILQELQDIAGQTVTPVCMDASTFDGYLQHGRKLEPSMLKRISLIKDETRALPGIRELIQRIETSGKGIEQEIIEYKPWTLD

SEQ ID NO: 31319 - protein, 471 aa, Methylomonas methanica MC09
MNLFDRLPSSLFNPLTGQNNRRAWDLLTQLSERFFGPDCVPDFPEGYLHERITKEIERFLLDRGWEVEGEEESSTPVNVQANQLLSRFVETGWFIEDRVGARVFVNMRPVVARFFELLESFTMEGPQLVGGNIQLIHNQLKHVVTDPKGQAAGFQSAALLCSRLINALNATTLRVRDLIHDLTQEEATPIFVKRFFAEHIEEIYVRDFRQMRTENHPLMLRFEIIELVDQAAHSKPSRSLLLDGYRELPGDRQTTAEDALARDIARFHRLLDVEKFLERMDRVIDSATQRALAYLGYRLKASERMESVLKNAVSSICRAADVGIPIESSLLSPSAVIADYRLRMPNLPPAKPVRRSMKKREMTPRERAELILRKAMIRHRDTTPAAIHRYVESRIPVGSQLDASSLPIESVEDAVAVLVLMRMASILRANPRAIRENPLFRGLKFDVQMKEGTRAETPLFEMADFIVIRRS

SEQ ID NO: 31320 - protein, 212 aa, Methylomonas methanica MC09
MPRDWSAIAEASNGSYEIQDFKRALYQLVVQQCLYLRHQGQAVAYRLVSSYRRDFAEALDLMGLRLGFNDRFEYCYVTQDVGTLGAMDLQETLFLLTLRHVYHLRASAGDLTADGEAMVSIPEFEESFKLLCQRSLDTKTESLKSMLRMANRHGLAKSFPAPEGDPQPFVILILPGVTDVLSEHAVSRFGAHISANLLDVEDGVNRQAEVEP

SEQ ID NO: 31321 - protein, 1126 aa, Methylomonas methanica MC09
MKTLVNAHIVQFSLWDYETFQISAGGTAIIGPNGAGKTSLIDAVQIAMVGGHGQHIHFNAQSVHKDARSIRSYALGTMRSGDGENGVITRKRDEALSYISLVFQGKDERDVLSAGICIHATVTDSRTLGLYVFPGVALKLEHHLEEVGDNSKAPIDWELFCHHGRNLSRSAGREPTITSQPESYVRELLHNIQQSVDARRFLRAFGHSINLKAVSSVGDFLRGYLIEATPIDKRGTLQHIKTLRALSQQIEQIKEQIVQLEAIEKSYARVGDLRRKAAVAEAVKLQFASESAGEVAANLEKELTELSQSVEDARRDLPYLEELQTSLQNAYEALLQEFSADPDAQQPAQLLSLRQARSSNVLQTLKEVNRISLQVRMVLQEISDNCDGETSPWIKEVKQNLDIWDGWAKSDHIASVSQMEQVLDLLRRVNPLLQENLESARKIASLAKKASRSSEGKLKALSQGNRITDGNVAQAVLLFANAGITCVPVAELVQVLDIRWQGPIETFLGPHRLALLVQEGSEDEAVELIRREKINDVTIIQPEHLKSEIDRTVASDTVAALLQGENKVALAYLRRILGRMKRVETAAELRREDRALTTDYMLSANGGTKRIRPLPEGRWILGIKLTNEDRSAILEENRQVLLMAREAEQREGKLASASNNLQSTIQQVTKTAYEVAFTLHRTALTELNATPDPDTIPVPDRVAVLQLNLKTAKSEADKSKKDYETRNAEFTKLSTNFDNLKPQLESRREEYQKLQQQLAEAVADTDWDRELANAEYSRISAMDNEELGDALEDLYSKRQTWLKNISSIEQVARDDFIDFINDHSIELFDERNDWRLAHKWVTSHIGKLKDSTLADYENEAQSAREAAEESFQSDVKFKMREAILRVRQEIRDLNKILETCPAFTNGEKYQFVADISPAHKSLYELIVNNSGDSEIDLFSQPETQVNIMALLEASESGQDKGNNPLEDYRLLFNFDLQIRQDGKVVDLLSKRMGVASNGEHRVPFYVIAGAALATAYRIRPGAERSGAGLMILDEAFYGMDAQNSFVTAEFLKSLGLQLLMAGPDSDVGKLAPLLDNYYDLVRYGADVFVEQVRVKEPARRLLSSDIPLLHQELLDAQEAQLIANVQ

SEQ ID NO: 31322 - protein, 404 aa, Methylomonas methanica MC09
MREGVVLSGEEAANSILGKLLKRAENALAKDASRAISLRLSDKSVPEYWRLQRHKDKLECNAVLRVAEKQGGIKIEWDKRADENSQVERVLLLNENLLASYLGVVPRWVLIEQASREFALYLALYPILEQVLEKWRHGSQVRNSKPGDFEVWISAIRVIDYCRNKVGDDIPIRRLSASIFSNSKRLETLVPYIDSLIQNDLSAAIREAEEVFSELGLVKFPPTLLLAGDLAVLYGQQETRVLRPYIGLAPKEIKAIKKEVSFSYLLTVENLTTFHELVSQRPQGAIVFYTGGMPSPSWKRVYKLLLQELPRNASIYHWGDIDGGGFRIANHLAMCCLEVGFDLRLHCMTASLLSSDTVIARDLSLAERTQIQNICERWSWKNEKDGLGPVAIEQEALPIVWPAT

SEQ ID NO: 31323 - protein, 490 aa, Desulfotomaculum kuznetsovii DSM 6115
MPNHIQLKNFPGRGLEVNLFAVIPERFFSVLASPLKQDYAAILFRIYDQYQLTTFGMERDVVIDLIVDYIEQKDGFFEQALADEIWEESLDTPAGPRERAAFILRKLEATGWVVSEVYSNYVQYISLPDYAIKILDVLDKIRRHRQVEYQGYVYATYTLLHSEEADRQGNLALEKAYEQTEQLINGLKSLNHNIKRYIERVLAEKEPREILKIHFQDYMEEIIDRSYHRLKTSDNVSRYRPKIIARLNQWYNDAAWVDRTAGLEVQRERFPDLPTARQEIYRRIDYIRQAYIGLDDLLDEIDRRNARYANASFQQLKYILNSSKDVEGQLMEILKFLAGLRAQEGMRPDDLLPEELGRLFSLFTQGFLDRESLYTGREAARQHQPREVQELEEIDPERRRERLRSFRQQLERRMTREKINAWVMEKLAGRKEICARELGIEDVEEFIKLIYATAYGRSRQVGYRVHRDGRPRVSAAGGRFEFRDLRFERK

SEQ ID NO: 31324 - protein, 208 aa, Desulfotomaculum kuznetsovii DSM 6115
MELLEQWNRLLPAEREEFTRVVNRLLSCTFITRKNEENRRDYYFIERHEDLLRAYLKLGGWSLEGDRAYGVYRVFSDFAYNRLRLKLEESIIILILRLCYEEKRRQINVTENIMITVREIQDKYAALKIRNRPIDKKTLRETMGLLKRFNILRVLDGEVTDPDCRLEVFPTILFALRVEDIRQVYEKLDTYRQAGAEEGREEENGNMQ

SEQ ID NO: 31325 - protein, 1123 aa, Desulfotomaculum kuznetsovii DSM 6115
MKELTGIRLINWHYFTNETIRIRGSTLITGDNGSGKSTILDAIQYVLVADLRRVKFNISAFDETRRDLLGYVRCKTGRDSESGRKYERQGDITSYVVLEFYDTSRKNYFLLGAVIDSYADDVTYESRFFKIEDCRLDDSLFLAGKHPRNIREFRAAVRERKATIYPTVEKYQADLLHKLGSLGDRFFTLFVKAISFKPITDIRQFVYSYVLEEKQINIDIMRENLQRYKEYSDLAAQTREKIAALESIREKYQEIQRDRERALIQDYVILRANRDGVAASLQANLEQARALEEELARLSQALDGARERLKRCREEERSYRDALAANTTWQLVERLKGEIRALKERVKELSRACSQVAETAREECRVLAQLLDEAGEDLLLPAERSILAELVDGLQGLAAGGDGQPLPPGDGEALDALGRLIDRGRETLGKVRERVQEQAWEIRRKLKELDQEEQTLQQELASLRNKKHIYDRKVTDLRDLIREKFRAVKGIDVEPRVLCELLEVPDEKWQDAVEGWLNTRRFDLIVEPEHFDYALSVYEKHKKERRISGVGLVNTGRVLKYLNRIEPNSLACEVRSQNRYALAYVHQLMGDLIKCENEQELKNYRRAITPTCMTYSNHTARQIKFEVYETPFIGERAYARQIARKEARLQEIAAARKELLPRLERLERLSQTTSGRDEHYIFLKERRGTWLELAALRQDLSARERELAGVDTSGIDALQQKLDQLELEMDALNGRIEKYNQRQGELLTTLEQKRTERVTLEDEHARLEEEFRQFCSLNPRVVPEGERRYAREIRRHSPQEVAANFAHNRKSVETLILNKEKALELLKAEYNNKYQFGGRIEADENDEWVQEYKKLVESELPAYEEKINQAKKEAEEEFKEHFIYKLRENIQNARNEFDFLNEALKDISFGGDKYRFLVYPSERHRKFYQMLEDTEMVEGGVSLFDSVFQQRHREALDELFDKIINLPPRYLPESIAEYTDYRSFLDYDIKITHASGETSTFSKVCREKSGGETQTPYYVAIVASFAQLYRAKTNRDSIRLMLFDEAFNRMDIDRMENSLRFINEMGMQAIIAAPTDKCEFISPHVPTTLLVMRDGKNSWIEDYKQFKEAVGESRIEAAERAAG

SEQ ID NO: 31326 - protein, 432 aa, Desulfotomaculum kuznetsovii DSM 6115
MAMDYERYILETLLDKYERSALARGKGGNRRIWLHFNQRTMPRYFDDTTARYKEEINGAALALERRGLIEIRWVKFEENNLIEKVALNTGRLDEAYARLKRRPRAEQFQELARLARHYARGAAPWAQEFFHTVARRLEEGESQPYLNPADREHAEQLFMVIREISLLQEEIPRRVFSLRVLGNSKAFNNLAPTVVRIVRDFHPDWGKDGGGKETALTAAEVNQVLAEVGVVDNPQHIFISGGLEFAVEGRTLRVGDFSPDLGLPAEMVDRLTVKNVAADYIITIENLTPFYRFVKTCRDQFLAIYLGGYHNAVRRRFLSKLREYLAGTGRAVPFYHWGDIDYGGFSIFVHLQKRCLPGLKPLYMDVPTLEQYRRFASPFTPAYGRRLRSLLEDPDYRLFHPVIQKMLQEGLRLEQECVEPPSSLGEPGERKV

SEQ ID NO: 31327 - protein, 504 aa, Isoptericola variabilis 225
MSVASSTVWAVTALATALTARRLLEDSSAWSLLRADNAPVVIGILGQHLSGEVRRLPAPELFEAVEAELDELRAHAFDLPKTAAQYCRDWLTAGYLVRRPGEGREEVYELSEGALTAIRFVEQLATPRASATESRLATIIERIHRLAVETDPDTSRRIAALEAERERIDTQIAALGSGSADVLSDERAVERAVDILALTAEVPEDFARVRAALEQLNRDVRAQLVEEPESRGAVLDDVFRGVDLLAESDAGRSFAAFYALVLDAERTAALEAQVDDLVDRPFAHSLSPDQRRLLQRLLPTMQDAGAEIHQVMTSFSRSLRRFVQSQELAEDRAVHRLVRETLAEANALVGQVQPYRQLGLELDLTAVTVAQVAGMRLHNPADSETTEPVVTSHAATADIANLRAAVRASEIDMAELTANVNDVLGMRGPSTIAEVLADRPATQGVASVVGLLVLAEQHATPAGDGRAEHVTWRPVVSSDTASDGAADALRGATVPQFLFEEALP

SEQ ID NO: 31328 - protein, 221 aa, Isoptericola variabilis 225
MTDVDTASEAAAEPLWEGDPGTLREPSRRALAALVKGPYVSAERHGEIWRALAADTAVIRSRLADMFLELVVDQALGIAFVRGAQTADGTAPQVVRTLPLTFIDTVLLLHLRGELVRAGGTGRVIVGKDEVYDQLHVYRAAASTDEQGFTRRINASWTKFEKQNLVIPTSTEGRYEVCPVLRLVFGPEEIAAVRDEYRRLLGRAPADEVATDEAPAQEDDA

SEQ ID NO: 31329 - protein, 1130 aa, Isoptericola variabilis 225
MTSTDLHPGQWRLERVELVNWGTFHGHHVVDVARKGFLLTGSSGSGKSSLVDAISAVLTPRGKTRFNAAAADGTTRSGDRTVLSYVRGAWRRATDSDTGEIATEYLRPGATWSGILLRYADGTRRTDGSANTLTLVKLFHVKRGASSPADVHDVHIVSPVPLGLLDLEEFARSGLDVRALKRHLPDAHVDPEHSRFVARFSRALGITGDRAILLLHKTQSAKNLGSLDDLFRTFMLDEPSTFATCERAVEQFTDLSRAHRAVVEAREQIEALTPLVDTARAYDDAGAAEREAERLAAGLEDFTQAWKLDLARQARDTAADTVARAEAENDRARAATTQALQRVREAQGLVDERGGAELSALDARIETHELRLRLVTGERDRVARDLASVQVARPDTPEDLLELQRVARAELAQATDDDAAHARQATDLWTERTEARTALESVQHELAAMRRTRSNIGSGLLEARHRIARATGISPSSLPFAAELLDVRADHAEWRGAIERVLRPLATVMLVPAAHQTAVSAAVDAAHLGTLLRYESVPPAVDPPRRPASHDSLVYRVDVAAGPMQAWLHHELARRFDYACVETVGELADVEQGVTRAGQVKRGRRSFEKDDRFAVDDRSRWVLGSDNAAKVDHYLELLRAARERVEAADRALGDLERARTSAEARRRVLAAVVELDWASVDVAACERELADARRARAGLLAAQGDLRSAQHLLDLAETEATQARATERETAAELATARAELNQLQATITDLERQAPPAVDPSVHARLKAEFYAHQTTRRVTHATIDAVSRHVAKALADRGKRAGREREAAQLAIVELTGGFVRRWPALSVDLTPGVEDRQGFLDVLATLRADRLPDFEHRFFEMLREQSQQNLGLLAQEIRHAPAEIKRRVEPINGSLMRSEFAPGSHLQIRVEDAKPAAVQEFLKDLNTITTGALAADEDREEAERRFAVLSRVMQRLGSSESADRAWQSLCLDTRRHVRFTGTQVDRERTVVDVYDSGEGRSGGQKQKLVVFCLAAALRYQLTRERDAVPAYGSVVMDEAFDKADAAFTRMALDIFREFGFHMILATPLKLLQTLEEYVGGIALVTCADSKDSHVAPVPFDGAGPRAEEATPAEQQDRAVRELELDLS

SEQ ID NO: 31330 - protein, 390 aa, Isoptericola variabilis 225
MTVDAARASILRTYERGYAAWAALGPSEETVVDVPLHPPSERTVLGDPRAVADWIAAWRAADPGAPGTAHVVWETRRWASMGTQVVPARLRLTAAEHVASFVRRRGHWDAARTRAAALLELLGPDNAPVREAVRRALRAVVELDEPELGRLLGVLRWLLANSASGMFVRQLPVRGVDTKWLERHRGVVDPLWTAATGTADLGLAARPGLVRVRFLDPASAPGGLGDVSAPVADLAGLAISPPTVLVVENLETLLALRPHAGVVAVHGQGYAARHLHQLPWVRPADVLYWGDLDTHGLNILSIVRARLPQTRSFLMDRATLEAYPDLWVPEPKPHRTVPEHLTASEADAFAALSEHGDVRLEQERVPWASAVEALDALLETCRSTRITLPD

SEQ ID NO: 31331 - protein, 517 aa, Isoptericola variabilis 225
MVVEGARGPALRRALAEVERAFAAPTLGLLHKAEAPLVVAVLRSVFTPDRRAVATEQLHVEVDDLLAELRAAAGRGEAPVQVPVPDEPARVLCTRWVRERWLVRSLDDDGGERYQVSSYAAEALDVVARTQGTRALVSESRIRTLLVALEDLARDARPDREARMRELRAQIDEAEAELARLEAGGDVEPVAPERLAERYDNLLWLVRELPTDVARVAESISALQREIVARLRQDERATGVVVAEYLDASENLLERTAEGRAFAGAMELLGDARMLDALDERVQAVLSHPFAADLPAERRAALRALRARLVSAIEVVLAAQARASRTVTAQIRHHNPLRDRELDTALREATAAMAEWFPASGRAARVEPLRWFERARLGRLRDSLHDLRPETPPAELEDWAASDDADGPALDDLRAMGGPQHAQIQAHLAALSSGADAEGLTVGEAFSRAPVELRRPVELLGYLELAGAGGLPEDEATSGDVPAHALERVRAVRADGTEREFVLPRTPLSTHQDQEDR

SEQ ID NO: 31332 - protein, 240 aa, Isoptericola variabilis 225
MTDTVDAPVEAPEGFVEARPMEDDDPGLFAGDTGTLPFEARRVLALVLQRRYLAAADHPAEWKALLAHQQVLESRCHDMFVELVVDRDYEIAYKRQVRSEGLAIPVLLKDEPYKRVETLLMLFVRNRFRQERGAGETAAFVDAEEMVDYALGFLAHDETNLAARRREIDNAIATLAREHVIAEVATGRYRILPVVEVLLPVDRLRELTAWLRSGGAPTAPGDEAVPEASAESSPESEDDE

SEQ ID NO: 31333 - protein, 1126 aa, Isoptericola variabilis 225
MSITAPRMSESLFGLIPTASDGRQWTARSMQLVNWGGYHGHHEVRFATTATLLSGASGSGKSTLLDAYIALMMSHTTPFNGASNGATAGRARGREQRNVLSYARGKLDESREDGQTTSRDRVLRGDGVDTWSAIAMTWADQTGETLTALRAWYVPRGAQRNEDCVVVRATHDGPFDLRRLEPLAAGRFARAGLAEAGLALFDTDVAFATRLHAALGIGAAGDGHKAMQLLGRIQAGQQITTVDALYKAMVLEEPETLEVADRAVEHFDELSAVRTEMLTASRQVEVLRPMVALRRQIDEAAASAALLDTLGVRADDADRVGAAPTPFTAWRDGRRLALVRAEEEANRSAHRAAEERRAAAASRIAQAEAELEEVREDQRRQGGDAVEAAERDVRRRAERLEEVRTARAALDAQLAVVEHDVASRADFERLQRDARAFVEARAEQAAALEEEVWAARQAVSDAERRLASLEREQASLAQRRGNVGAEDHAARCALAEAAGLDVDELPFVGELLEVRGEYEPWRDAIGLALGGFATTLLVDADRLAAFRAAIDGVPLRRRLRFEGVETGLPLDVDADPRTLPGRLEVKAGPFGGWLARRLAERFAYVCVDDPAELHRHPRALTRTGQTSDGARGAHGGTGRASVLGFSNARRLERLADDVTAARAALRDAGAALEGARLRQAAHTDRFVAYSQVLRFAWDDVDVAGAEAALAERRARLETLRDGSDVLRALADDEKGLRSRLTELYRERADAENRVRELGEQWAAITELVDHVTDAVERAAREGVAPSDAQRERLEAALAAVAPGPVEELGLAGLTAATTAVVRELARDREAAAEAERTARAALRSVFERFCDAWPNPNLGTDPDASYDDFLRIYTEIEDQRLYQLQERWSRTIGRLSGNDLTLLGNVMNRAVAEIRERMEPVNAILATLPFRDDRHRLRITATVTEAQDVASFRRQLRELAQAPPADQTPAERQRRYERMARLIDRIRPDSPERRRLVDVRDHVRISAECVDLEGNHVSVYDHIAGKSGGESQELVAFIVGAALRYQLGDAGAERPRYAPVFLDEAFIKADARFAGRAVGAWRGLGFQLVVGAPLDKVSALEPHVDVVIQAVKDETGRSRLVTLVGE

SEQ ID NO: 31334 - protein, 236 aa, Escherichia coli 9.0111
MSERLRVILSHPSASDALNRLQRHDLRWLVKRLVDESQTVLQARARSERDVRGFMKTGLAAEHHRVGHLLNEFLNLALKLDWQRQMIRKQEVPLPAVGVAVTGIPAIERLRFKEVDDEAEQTLDLSNHAADLTQIGDDFWDAFNGLDREVLIQQTLQLLAKENRPVGLAELAALLPPAHDLETFAVWVGMAREAGIEVIDSQREFAELSDGEGRRWRFNLPTTGLESQALMDIDWE

SEQ ID NO: 31335 - protein, 249 aa, Escherichia coli 9.0111
MTGFFDRLINRSVTANAGCEPEPSDEEVTDESVEESLASSETRTLKKIREATQELLKYGLLEEASKPNLYRIVLSHPEEVTRILEPLDLDIGIDEIRGLLYVKVRLDETPAQDEWAHPLVRRQRLNLEQSLLVAILRQHFVAWEQESGTGASQAQIAIDDLLPQLQIYLGDPGSESKERTRLLTLLDQLKGHGLVTSPDAHERIVIRPIIAHLADPINLQALLAWLREQIAQQTSPNDAREKDSSEEDV

SEQ ID NO: 31336 - protein, 1095 aa, Escherichia coli 9.0111
MNQVSGLAGKESFILTRIELFNWGGFHGLHQAAIHQDGTAVIGPTGSGKTTLVDALMTLLCANPRYNLASTGGHESDRDLISYVRGVSGPGDGGEGQSHIARPGKTVTGIAATLEREGKQVRLGALLWFDSTSSSVTDMKRLWLFSDNPGQTLEHWLNVYHEGGTRLLRQMEKEAIGLWTYPNKKQYLARLRDFFEVGENAFTLLNRAAGLKQLNSIDEIFRELVLDDHSAFDRAAEVANSFDGLTEIHQELETARKQQQSLQPVALSWEKYQKQERQLADWQTLESLLPLWFAQQANHLWREKINLLNARLAEAQTSEEQLQSQLDLQKKVVSDCMQRYLQVGGANIDELNERIKDWQKTLGSREALARQYQQLTRNLGLPSDLIQPQLEANQHEAAALCEQIAVDIKLKQEEAYQKGALSHHITEELRERENERAEIARRPDSNLPAHYQAFRSELAKALNVDESELPFVAELIQVKPEEAQWRGAIERAVGSNRLRILVAPESAQEALRWVNQRNNRLHVRLLEVKLPHSPARFFDDGFTRKLLWKDHPWREAVKALLAESDRHCVDSPEQLRDTPHAMTVQGLMSGKQRFYDKHDQKRLDEDWLTGFDNRDRLNFLAKEITTLQEQVKTANAAFEFAKGEVGLLQNQAASFQKIEQIDFDSIDVPGAKSQLDALRERLENLTRPDSDASVAKAKLDEAQTVESELDKQLRAANKVTNVLDTELTSARAAERKAQQTAQQGMKEEERELCASHFPVVTLEQLPDIRDLERQHERGIQHEIERVKAELHRLNIELTKRMSEAKRVDTGALVEAGADLDDITVYLQRLQELTEEALPEKLNRFLDYLNRSSDDGVTQLLSHIEHEVLVIEERLNELNETMFRVDFQPYRYLRLDTKKVVHESLRTLEKAQRQLNAARFVDDNGESHYKALQILVAQLRDACERNRTLGAKALLDPRFRLEFAVSVMDRQSGNVIESRTGSQGGSGGEKEIIASYVLTASLSYALCPAGSRYPLFGTIILDEAFSRSSHAVAGRIIAALREFGLHAVFITPNKEMRLLRDHTRSAIVVHRRGQNSNMASLSWEELERHYQRRGNA

SEQ ID NO: 31337 - protein, 316 aa, Escherichia coli 9.0111
MEWEAVSYRASDTPVLMPLRWILNSPSEWINAAADPVVSREFRLLEGIIEQVNPIFHPLLVKHRSLWRHKDPQGVISAATLACRLEPGCAKGLPLRLLSGQGVDTKFIENNISLLTRLLDVRFSGEASEQGLTTFLDAFDESSHWVLVVPLSPGLLPFKKCRVTTAELAETTLPASQVLVVENEQCLHHLPALSDTIAILGCGLDVQWLSSSVLDEKRVAYWGDMDSWGLLMLARARRCRPTLDALLMNRELFEQYASHSAVPEPVIAKEAVPDGLLNEEADFYRYLTRLPCGRLEQEFLPVGIAEEVLLRWGKES

SEQ ID NO: 31338 - protein, 475 aa, Haloplasma contractile SSD-17B
MELTKNPKVFEVIPNNFFNVLAGENKDVYLDCIFIIHDYLQGKTSFGCDRDELIPVLKEYFDTLETKVKEDTQDPGIRTRDPREKAFSVLRRLRECGWISLEITNNYKHYINFQGYAITIIDALRSLSKKDNSKVQGLVYSIYSYLHNLDTSTAMVALEQVYAGTDYLLTELKKLNSNIKEYIQKIYHDDVENDLEALLKMHFIDYNSNDIYGIYHRLKTTDNVCKFRPYIIDKLEEIKKNRMLLETICNDLIKLNKYTIYDEAEKYTLMSINRVIESFNSIDQVIDDIDEKHSKYVSSSIAKVQFNLTNNGDIPSKINTILKYMVASSKDKKKKSIDQVSDEEMMEGLFELYTQHMINNNSLYKPPRKSGEFLPKEINKPEEVNEETKSLKLERLTKKNIYSKQSIDTIVKTYLQEKDSIKASMIQVESIDDLKVIVYIVLYSRSSNVSYRIKRKDSKIITDHYSFKDFEIWGK

SEQ ID NO: 31339 - protein, 195 aa, Haloplasma contractile SSD-17B
MNLSSISDLFNEKYKKLSSSNRRNFIRIGNKLLSVCFITAKKDADFEDYYFVEENYKLFQHYFQLIGWKVELDQNLLVVTLFNQYEYNRLKLKLKESIILLILRLFYEEKATLGDVVITINELNKKFLSLNLQDRPITKTDLRSILSLFRRYNLVEYMDRDLTKGNSRLIIYPTILYAVKAYNIHEVYKKVEVYK

SEQ ID NO: 31340 - protein, 1076 aa, Haloplasma contractile SSD-17B
MKRLMKIKLINWHGFVNETVEVNGNCVITGENGAGKSTLLDAVQYVITGGKVKFNSAANMKARRDLEGYVRCKIGTDKKTYLREGDVTSHVALEFYDDLSERSVVLGVAIDVSSNQTRPKEQFYCIDDKRITEAWYIKDRVPVKINDFKKIIRNFSSTLPMTKGESRLLMLNKLDINDVKYVELLPKALAFKPIDNVKDFVYNFLLDDKPINIDKLRETTKAYHHFGTLLCDVKTKLDDLQTIVDTYKQLEQKKKQQNLYKNIVTFSERDLFLHKIGDRTKTIESLQEQINERKDRINGVEVEQKKLDVKKKELIKQMSSLGQNNEKEEIKNKILVKEEELKGLKQQYDYVLNQLKTVITQLEGITEQLTSKANHDLLYELKQFELNQNHIDKFRHILQKIIDTYDDLKEKNREKLMFLKQKEKELNQEVRDKRETLTNLEQKEVPYRREISELRQTIQEEIRKQGYPDFKVHVFCECLEINDDLWRDAIEGYLNSQRFDLIVSPQFFDKALTIYEQVKFKKKIYGVGLVNTGKISIYKGTHPGSLSSKVDTNNIHARLYANMLLNRVVCCEQVNELKNHRTAITPTCMVYNNYTARQIHANVYKTPFIGRDAIKKQVTKYRDDLNELTAKKYEIEQEISKVNGIIEQLGTKKLYEILSNTHYIRTYYKELSDLNDLKEAAEHVELDDHYLTLERNLDTLDETSRGLNKQINELYTEIGSLKKQKSELSNELNDTENKMAKLDEEIDDLIERNHNHYTESKEAYNEMLKEIEFIDVIDQCKKQLDENQKTITSLYSQLKVLKNEYNYKYQSSFDENEKTIKPYIETFEKIKNSTLLDYEEKVQELREKTELEFKEHFIAKLQENIKKSHKEIRVLNEALEGKQFGKDAYQFVFTPSRGKEKYYKLIMDDSILENFSLYSDVMDPKSSAILHELLEKITEDDKESESLINDFTDYRKYMDYDIKILHDNGDTSSFSKVCREKSGGETQTPYYVIIAASFVKLFNQDSAGIVLYDEAFNNMDESRIQTMMEFYQSLNMQMMIAVPPQRMETLMPYMSTVLVVIKEKDYTYIEPFNHHF

SEQ ID NO: 31341 - protein, 468 aa, Haloplasma contractile SSD-17B
MKLKLFDVVPENFFSVLSSQNKHIYADCIFLIYKSTNELSSYGIERELLIDVLVDYLDQLGEESISIFDEDEENTGRSSRDRANGLIRKFAECGWIDIEENSNYVETINLVDYAIAFIETMDKLMKNDRLEYQGYVYTIYTLLFSHESVQPSVMLEQVYENTKKLISGLKTLNSNIKKYTDQITKLKSAEDILSLQFNDYETNIIDKGYHRLKTSDNVSKFRPKIIEKLEELNRDADLIKQVSEQLVEMEKAESIEQAYNSVRNSLNDTIYAINHIDEIIKEIDRKNSQYLKASLTRVKYVLNSSKDLEGQLTEILKYIATTYKDKNLDLNNDYLDEIIGIIGVYPQSFIDEQSLYVSNEGRRSFKPQSLAAKTISVKERKERLDRFKEKNRQRLSKTTINKYVLGLLGGRQVMNASQIPIDTFEDFIKVIYIRVYAKSNLVQYKVKKLGTEVKINDFKFNDFEIWKQ

SEQ ID NO: 31342 - protein, 207 aa, Haloplasma contractile SSD-17B
MNFIELYDRLNQTQKTEFSRIANKLLAITLLTKKKEDNKKDYYFITTHKDLFIEYFEYMNWEVEINEAYGVIHLNNIQNTNRKNFNLNESIILLVLRKIYQSKLEELSLAENVTIRIEEIKTEYDGLKIRNKQLDKTTLRNAVRLFKRYNIVDPLDSDYALGDTRLIIYPTILMAIKVDDIMKLNDKLRSYDRGGDDDEEVDEDQTD

SEQ ID NO: 31343 - protein, 1084 aa, Haloplasma contractile SSD-17B
MMKKLMKIKLINWHYLANETIPVEGNCLITGENGAGKSTILDAIQYVLTAGKQYFNSAANDKAKRDLMGYVRCKTGRDSNQYERTGDVSSHIALEFLDEKKKKSFIIGAVIDSSGNLSTPKVNFYRIEDQKMNESLFLQENHVPRTISNFKATIKGKQAKVLTTQNEARKDFRHRFGSLNDRFFELLPKALAFKPINKIKDFVYSYLLDEKDVDIEYLKDNIHTLREYEKYLKIIKQKLTDLESIDRSYQEYLNIEETIKIQDYIIKRASKELNEQNINNKKHKLSTIETKLDLVGSKLNQTEKEIEERSEEKANLDRSLANDDTYQAIRELEKTIRSLNIDLDTYRKKEQKLDYIFHEAFTTVKEMNALDVNLASMVPFYEYKNETISEANMNDLINKTKSLSSEIDGFKDQMFNKKATLDFKRSQEQEGLAVIEQDIKSLSSKKLVYPRYVTDLQQAIHQGLKRELGKDIEPKILCELLNVKDDKWQNAIEGYLNTQRFNLIIEPEYFDHALEIYERVKYKRNIHTTGLVNTKRLKQYEESDENSLSYMVTSKNKHASNYVNMLLNKVVRCETVDELKNHRIAITPTCMVYKNKTARQIKEDVYKIPFIGQDAYKKQLEQKRELRAEKLAILSDYRDKINHCIHCLDLCKRLNLNYIIENSEIKINVQNTVNKISENEKKLNKIDRASMLDLQIHIEQVNKELKEIKQKEKQLIKDLQDLQVEERILNNKLDELNGKSSSLTPALNQVIDQIISVLNKAESRYQDATEKYNHLEKLIDVYTSQRSGQFTRRTNVLNELQSKQRDYNRDYDFGAAPGVEGMDTYYEESKRLKDSKVIEYEEKIRQSKKKAEEQFKDEFISKLQEHILMAQNEFKKLNNALEGIFFGEDEYKFDWKPSKQYRKFYDMITDDSNLGGNTLFGGSFRERHKEALDDLFDRISLNDEQSQKALEEYTDYRTYMDYDIKIMHRSGSTSSFSKVCREKSGGETQTPYYVAIAASFIQLYHTNHLGGDSIGIILFDEAFDKMDENRIESMMEFLNKLDLQVILAAPPQKIETISPFVKTNLVIYRDEHGSYVEPFLHEKL

SEQ ID NO: 31344 - protein, 399 aa, Haloplasma contractile SSD-17B
MKNYRTFLLNKLIDRYENSKLFRGDNQVTVHIDFKFTKRHLGDYFNETRYELKDEIGEVCKNLESEELIHILWKKFEYGNIIDKIRLNTEQVDEVYRILNRVNKKELEQNMLNVLGDYVNHGSWISEFATSLVERLREGKSIQRYFDLNDTDYAKEVLTTLEEILKPKDEVSKRMFSINLFNNSKHFEELESKLIMIMKEFGPYNEDVDILSEENILNNPGYIYLKGTGVFKCNQETINLDGLQGEIGLSTLLLKELEILELDVGRVLTIENLASFHMYNPKKELVIYLGGYHNTIRREFLKQIHLFNQVSAFDHWGDIDLGGFRILNHLRTKTGIPFNPYRMDLDTLKRYETYAMTFNTAYEKKLKELLAQEAYKKFHGVIEYMIEKGIRLEQEIVKG

SEQ ID NO: 31345 - protein, 478 aa, Salinisphaera shabanensis E1L3A
MDYDFLTTLRRQHPGWRLLAADHGPLVAAFLHRYFIEPNQRTFAEAELASRLEDFLFHLRERLGDDAFPKPARQYLNDWAADERGWLRKYYPRDSDEPHYDLAPATEKAVQWLVSLQGQRFIGAESRLLTVFELLREITEGTETDPKARIEELTRRKEAIEREIEEIQEGRLRMMDDTRLRERFLQMSDTARGLLADFRQVEQNFRDLDRQVRETVAAWDGSKGDMLAQVFGEHDAITDTDQGRTFRAFWDFLMSPSRQEELSTLLERVMALDPVRELEPDPRLQRVHYDWLEAGEATLRTVARLSEQLRRYLDDQAWLENRRIMQLVHKVERHALAVREAPAQAPGMTVDELAPSVTLPLERPLYRPPLKPRIEQNELATGDADLDAGALFDQFYVDRAALRSRLQQALQNRDQISLAALLEHSPLERGLAELVTWLALAADDPSALIDEAGECEVSWRDDHGMVRRATVPDVLFSR

SEQ ID NO: 31346 - protein, 196 aa, Salinisphaera shabanensis E1L3A
MSESDIDTASDLSPLLIRLLKGVLYRDQQEALWQSLLTLQGRVRDYVTVLGLELVLDEAEGYAYLRQTARGDDEQGPPRLVPRRQLSYPVSLLLALLRKKLAEHDASGGDPRLILTQAQIVELVRLFLPDTANEAKLVDRVQGDINKVIELGFLRRLRGQNDRYEVRRILQSFVDAQWLGEFEQRLQEYREHADAQ

SEQ ID NO: 31347 - protein, 1127 aa, Salinisphaera shabanensis E1L3A
MHNETLGLDFADSNEQAGFRLQRLEVFNWGTFDRQVWALDPRGDNSLLTGDIGSGKSTLVDAVTTLLVPAQRITYNKAAGAESKERSLRSYVLGYYKAERGEAGLSAKAVALRDHNSYSVILGHFHNAGYDQDVTLAQVFWIKDSAGQPERFYMVADRALTLAGDFADFGSDIADLKKRLRKQTGVEVFDAFPAYGAAFRRRFGIDNEQAMELFNQTVSMKSVDNITRFVRDHMLEPFPVGERIEALIRHFDDLNRAHEAVLKARLRIEMLEPLVADLDRHDERERQVADLRQSREALRPWYASLKMDLLDKRLENLAVEAQRLAQRRSALDGQRRDQQARRDELRQSIADNGGDRLQRLKTEIQDCQRQKQHRQHKAQQYRELTRALSLPDADTLDIFVDNRRQREKRQEALQEQRAQLQNHINEAGAKLHALNGQHGELETELASLRQRRSNIPGRVLAIREALCAALQLDEDDVPFVGELLQVPAEERDWEGAIERLLHNFGLSLLVPDALYERVADWVDRTHLRGRLVYFRVRDSRGAVSSAAPESLVHKLRIQPDSAFYPWLERELVRRFDYVCCEDMTRFRREQRAITRTGQIKAPGGRHEKDDRHRIDDASRYVLGWDNQAKIRALEAEAESLARRGRELAKHIQGWENERKGLEDALGMLGQLAMFGDFEELDWKPLARQLEQLENERLALEAANDLLRELESQLKTLEGSLNETEEARSALGQDEGANRTKTETATAQREESAALLAEADEAQRACFETLAGYREEALAGRTLTVESCDNQQSELRDWLQKQIDQHDKQLKALSERIVSAMQRHQHAFPLESREVDATLAAGGEYRAMLDALQRDDLPRFERRFKELLNENTIREVAAFQGQLHKERQAIRERIAIINRSLKGIDYNPGRYITLLAEPTGDQEVRDFQQELRACTEGALSGNEEEQYTEQKFLQVKRIIERFRGREGTGELDKRWTQKVTDVRNWFVFSASERWREDDREYEHYSDSGGKSGGQKEKLAYTVLAASLAYQFGLEWGEQRSRSFRFVVIDEAFGRGSDESARYGLELFKRLNLQLLIVTPLQKIHIIEPYVHSVGFVHNREGRESLLRNLSIEEYQAEKTARERIRMQP

SEQ ID NO: 31348 - protein, 401 aa, Salinisphaera shabanensis E1L3A
MNWTSPADLKQQLDKYWRRGDILRARLDGDALFPVTLRLRKPSARDLTERFADVADWVRTLREGAKDSKGFGYTVHWRQRRHRVQGANDLPDVITVDTEDDALRWLGHRDDAARFTRLAERTLTPFPALRDWLRQRPLRALEHAPHWDDLLAVLAWFQAHPRPGVYLRELDIPGIHTKFIETHRGLLAELLDAVLPAGAIDTGATGVRGFNRRYGLRDKPPRLRLRLLDERLAIQGLTDLALPVAQLARLDVGANTVFITENEINGLAFPAFPNALVIFGLGYRVEALRRLPWLADKRLYYWGDIDTHGFAILNRFRRAFPHARSLLMDQATLEAHRPVWGQEAADKRFTGLLDHLTEDEAALFQALRDDHRAPALRLEQEHIAQRWLLEALAHIDDLYER

SEQ ID NO: 31349 - protein, 480 aa, Leptospira noguchii str. 2006001870
MQRLFRSSSIRLLKKDNAPFIIYFLEKYFRGSARIFVPFEELKILLHHELENFRELEETFLSRTAEVYIGEWVSENFLSRRIRSLEGSEEIILEPSSELEKVFSWMDDLRSLENKESIGTETRFFSVLNKLKEIVEESVSDPKEKIRQLESKKDELDDQIKKLTEGKEIITFASERIRGQYLYARKEAIGLLSDFRQVEGNFTEITKFIHKKYLEVVQKGEILQFALDGDEELLQSEQGKSFQAFWDFLRSEQSQENFESILDSLYSLKDILVLDDRKFFRNFKRNLREAGSRINAVVSRMSEQLKKSLVERTLRDNRRSKAIISEIKHLVLERKFDLSEENFYSMEEIFVHLPMDRPLWKGDSADTPRSIQISGPDDEMISLDFLDSIRGINFEIYEQRIQTLLRSFPEVSLEKVLEEFPENIGFESIVAYVFIASKGEYHSLDDSESFLFYPAFNFTQKETQSVYRVPKATYRVGKDG

SEQ ID NO: 31350 - protein, 187 aa, Leptospira noguchii str. 2006001870
MDKLLSYSISILRLLKGSIGIDSDPKVWENLVTYEKQVREYFEKIGIFLHLDREDGYAFLRQTSDEDDVEFDIKLPVLTRKLPLTKEETLFLILLREFIIEMEEKDLSGSIILRKEELFDRIHPFFPDSFDEVDTQKKFERLLRKSEDLGFIKYIDSETLRIEKILKAKITVSDLERLRIKFKPENV

SEQ ID NO: 31351 - protein, 1118 aa, Leptospira noguchii str. 2006001870
MTDLFSSGEITANTGYRLKYLEILNWGTFNGKIWKLNSQGETFLLTGANGSGKSTLVDAILTLLVPSTKRNYNLASGLESKKRDRSEKSYVEGHYGRASSGSEGILKIRGKQEECYSVLSAVFNAKGKFPIIRIAQIFWFESSDLKRIYLISDDSLDFEKDLVLRNRTIKELRSDLKNSGARLYDNFKAYGVDFRKMVGLGSEKAIDLFNQIVAIKSLGVLNEFVREHMLEAKDKRFRIEELDRNFFDLNETYETILSAREQLRLLEPIEKKAFEYRDWNSKVEGVQELILFAPEYFTQKKYELCKKKEQDYTLDLFRVQDHLKELNSLTESLKKEERELYYSLENNDTRKRISDLKRKFEEIQTNLNKRRSERKKYSEYLLKLDLENVLIEDSFYSNFRKAGEKLQKSDSTRDSIRDRLTDLTVKRKESKVEFDSVYSELEHLKKSRDNLPRIVSSMREKISQGLGVSEKKFPFVCELIRVKDSEKEWTGALERLLHNFGLRMLVDEEDYKALSSYVNSSHLGGKIVFSRMLTQGGPILQPKDKDEVFYKLEIKPSLSKFQKEWLETQILKEFGHICGDLQRLQKEEKALTKEGLIKSGKIRHEKDDRKNINDARDYILGWNNREKISALESEFMRLGKVIDKIESEIKKVEEEQKQNDLFRDDLKSFLRFEQFSQIDDQSLEEPLEQTRKEIQDLEVLSEEYGKLKEQYESAKVRLSEAEGKEKETTKELTLLEERFSNLKKEMETLNSRIKEFDPNRRTRLEPILNERLGQVIFNLDSILEKERKFLEVLIKERDDFIEKRDSIGEELNKGMDRYVKKFREEADREELSVSILNAEAFAELTERIRKDRLPEFQDKFRNMMSDKVAKQILEFKAELEDDVSEIKDRIDELNESLRYLDYSKGKSYIQIRYFETKDREIIGSTGFKELLRNSIPDMGDSSNNEENFSRIRELLGKLKGENGSDRWSRLVTDSRNWLDFQAAEFQRDTDTIIQVYDSSAGKSGGQTVKLAYTILASAIAYQFKIRELNSFRFVVIDEMFNNLDNENSRYAMDLFRQLGLQLLVVTPMDKITVVEPYVQSVHFVKNNSDGNDSRVYLITKEKLNSEKIENTDRKVGNL

SEQ ID NO: 31352 - protein, 389 aa, Leptospira noguchii str. 2006001870
MISLEEIRKKCLLYYHKVLNRAVLGEKSFPWEISTGKIDPEEIIHNPSLLEKIKKESKEKKGFGFLLVSFQKETRKFGTQTLPSKIRFEDEIDFLRFLHKEQEFSFYKSDCDMILFKIPALMEWILKNPFLVIQESGNWEDLLSVCSYFLKNPRPGLYIRELPISVPTKFIEENKKVLRNLLDFLVPENIDYEGKDFESRFGLKKPEALVRFRILDPIIAEKSSGGLFDISVPVDEFRNLHLFGCKRIFILENKINFSNIDHFLTFPKLSGSIAIFGQGYGLGILKDCVWLNKMEILYWGDIDVQGFEILSLLREQYPQTKSFLMDKETFLKFQNFAVDGKYSKFSKLDYLTESEKETWEYLRSLGSKNRLEQERIPQEYIEKTLHSQF

SEQ ID NO: 31353 - protein, 483 aa, Leptospira santarosai str. 2000027870
MDYKLLQRLFRSSAIRLLRKDNAPFIIYFLEKYFRSSARTFVPFEELKILLRYELENLNDQEEISLQRSADVYLGEWIGENFLTRRIRSAEGIEEIILEPSVELEKVFSWMEDIRSLEDKDVIGTESRFFSVLNKLKEIVEESVSDPEEKIRQLEFKRDELDLQIRKLKAGEQVSKFPSERIRSQYVYARKEALGLLSDFRQVEGNFMEITKMIHKKYLEVVQKGEILRFALDGNDELLRSEQGRSFQTFWDFLRSERSQEQFESILDSLYSLEDVLELDSRKFFRNFRRNLREAGSRVNGVVTRMSEQLKKSLVERTLRENRRSKELIAEIKNLVLENPLDFSQTDFYSLEEMDVRFPMERPLWRGDPEETFRTVRIENADEDGNVFDILESIRGIDLEMYEQRIQTLLRISPEVSLEKVLREYPDDVCFESLVAYVWIAGNGEFHSLDDSETFVYSVSIMNHPSEKLAYRIPKGTYRVGHL

SEQ ID NO: 31354 - protein, 187 aa, Leptospira santarosai str. 2000027870
MNKPYDYAPSILRLLKGSINSESDAKIWKNLLDNEKSVREHFEKLGIFLHLDREDGYAFLRQTSDDESAESDEKLPVITRKLPLTKEETLFLILLRECIIEIEEKDPSGSILFRKEELSDKVSPFFSDLSDEIDRQKRFEKLLRKSEELGFVKQIEPETIRIERLLKAKLTVSELEGLRGKFRLGTE

SEQ ID NO: 31355 - protein, 1118 aa, Leptospira santarosai str. 2000027870
MTDLFSPGEIAANTGYRLEFLEILNWGTFHGRIWKLRPEGENFLLTGANGSGKSTLVDAILTLLVPAAKRNYNLASGLESKKRDRSERSYVEGHYGRSSSGSEGILKIRGKQEECYSVLSAVFEANGRFPRIRIAQIFWFESGELKKIYLFSDKELDFEKDLVLGKRTVKELKADLKNSGARLYDQFKAYNVDFRKAVGLESEKAIDLFNQIVAIKSLGVLNEFVREHMLESKDKRSRIEELNRNFSDLSETYEAIVNAKEQLKLLEPIEKKAAEYREWNRKAADLQALIVYVPYYFAEKNYELRQIREQDYLFELSRLKDRSNELSTEIESLNQEERKLFNALENNDTQRRIADLVRKREDILSDLKTRGIERKKYSSYLSKIGLEEAFSEETFYTNLRIAGGMLTETDSIWEEIRDRLGKLTLQKMELQKNFDSVCSELEYLKKKRDNLPRTQSEIRAKIASGIGLSEKRFPFICELIRVKESEKEWTGALERLLRNFGLRMLVAEEDYEAVSAYVNSSYLGGKLVFSRMVPLSGPILQPKDKEEVFYKLELKSELSNVKKEWLEAQILREFGHICGDLNRLRKEEKALTKEGLIKSGRIRHEKDDRKSISDARDYILGWNNTEKIAALESEFALLGQNIDRLNAAIDLIREEENKNKNKRDDLLLFLRFEQFSQIDDESLKGPLQDTERQIRELELRSEEYGKLKEQYELAKARLTDVQGRQRETAKEFNVLEDRLFTLRKDMEDLQQRVRKVDRETSISLEPILNERLRETILTLESIAETERNFSDRLVVERDQYLEKRDSIGEELNKGMDRYVKRFREEADREELSVSVSNAEGFAKLTERIRQDRLPEFQEKFRTMMSDKVAKQILDFKAELDDDVSEIKERIDELNDSLKDLDYSKGKSYIQIRYFDTKDREIVGDSGFKEMLRGSIPDLGDSSHNEEKFAKIRELLKKLKGEGGSDRWSRLVTDPRNWLDFQAAEFLRDNNQILQVYDSSAGKSGGQTVKLAYTILASAIAYQFKIRERNSFRFVVIDEMFNNLDGENSRYALNLFRQLGLQLLVVTPMDKITIVEPYVRSVHFVKNNSEGNDSRVYPISKENVSSGKDENSERKVGNL

SEQ ID NO: 31356 - protein, 392 aa, Leptospira santarosai str. 2000027870
MISPEILRKRSLAYYHNELLRSIVLGGVLFPWEISIGKVLPEEILKNPSLLRELRAESKENKGFGFRIVFRSKETRKYGIQTIPTKIVFDTEDDFLRFTKKKDEFLSYSTDCTLILSVLPELKDWILKNTLSVIEESGKWESILSVCSYFLEYRNPGLYIRELPIRIPTKFIEENKKVLRSLLDFLLPEIADAKDFETRYGLKKAEPLVRFRILDLEIAKSSTGGLTDLSIPVRDFRKLELSGCGRVFILENKTNFANLFNFLSFPQLKGTISIFGQGFGLNVLKDCNWLEKMEIFYWGDLDVQGFEILSQLREQYPQSRSFLMDLKTFVRFRDFAVDGISSSKSSEPKFLTPSERETWKYLSSLDSKNRLEQEKIPHEYVQEVLSGLGGSQ

SEQ ID NO: 31357 - protein, 483 aa, Leptospira santarosai str. 2000030832
MDYKLLQRLLRSSAIRLLRKDNAPFIIYFLEKYFRSSARTFVPFEELKILLRYELENLNDQEEISLQRSADVYLGEWIGENFLTRRIRSAEGIEEIILEPSVELEKVFSWMEDIRSLEDKDVIGTESRFFSVLNKLKEIVEESVSDPEEKIRQLEFKRDELDLQIRKLKAGEQVSKFPSERIRSQYVYARKEALGLLSDFRQVEGNFMEITKMIHKKYLEVVQKGEILRFALDGNDELLRSEQGRSFQTFWDFLRSERSQEQFESILDSLYSLEDVLELDSRKFFRNFRRNLREAGSRVNGVVTRMSEQLKKSLVERTLRENRRSKELIAEIKNLVLENPLDFSQTDFYSLEEMDVRFPMERPLWRGDPEETFRTVRIENTDEDGNVFDILESIRGIDLEMYEQRIQTLLRISPEVSLEKVLREYPDDVCFESLVAYVWIAGNGEFHSLDDSETFVYSVSIMDHPSEKLAYRIPKGTYRVGHL

SEQ ID NO: 31358 - protein, 187 aa, Leptospira santarosai str. 2000030832
MNKPYDYAPSILRLLKGSINSESDAKIWKNLLDNEKPVREHFEKLGIFLHLDREDGYAFLRQTSDDESAESDEKLPVITRKLPLTKEETLFLILLRECIIEIEEKDPSGSILFRKEELSDKVSPFFSDLSDEIDRQKRFEKLLRKSEELGFVKQIEPETIRIERLLKAKLTVSELEGLRGKFRLGTE

SEQ ID NO: 31359 - protein, 1118 aa, Leptospira santarosai str. 2000030832
MTDLFSPGEIAANTGYRLEFLEILNWGTFHGRIWKLRPEGENFLLTGANGSGKSTLVDAILTLLVPAAKRNYNLASGLESKKRDRSERSYVEGHYGRSSSGSEGILKIRGKQEECYSVLSAVFEANGRFPRIRIAQIFWFESGELKKIYLFSDKELDFEKDLVLGKRTVKELKADLKNSGARLYDQFKAYNVDFRKAVGLESEKAIDLFNQIVAIKSLGVLNEFVREHMLESKDKRSRIEELNRNFSDLSETYEAIVNAKEQLKLLEPIEKKAAEYREWNRKAADLQALIVYVPYYFAEKNYELRQIREQDYLFELSRLKDRSDELSTEIESLNQEERKLFNALENNDTQRRIADLVRKREGILSDLKTRGIERKKYSSYLSKIGLEEAFSEETFYTNLRIAGGMLTETDSIWEEIRDRSGKLTLQKMELQKNFDSVRSELEYLKKKRDNLPRTQSEIRAKIASGIGLSEKRFPFICELIRVKESEKEWTGALERLLRNFGLRMLVAEEDYEAVSAYVNSSYLGGKLVFSRMVPLSGPILQPKDKEEVFYKLELKSELSNVKKEWLEAQILREFGHICGDLNRLRKEEKALTKEGLIKSGRIRHEKDDRKNISDARDYILGWNNTEKIAALESEFALLGQNIYRLNAAIDLVREEENKNKNKRDDLLLFLRFEQFSQIDDESLKGPLQDTERQIRELELRSEEYGKLKEQYELAKVRLTDVQGRQRETAKEFNVLEDRLFTLRKEMEDLRQRIRKVDRETSISLEPILKERLRETILTLESIAETERNFSDRLVVERDQYLEKRDSIGEELNKGMDRYVKRFREEADREELSVSVSNAEGFAKLTERIRQDRLPEFQEKFRTMMSDKVAKQILDFKAELDDDVSEIKERIDELNDSLKDLDYSKGKSYIQIRYFDTKDREIVGDSGFKEMLRGSIPDLGDSSHNEEKFAKIRELLKKLKGEGGSDRWSRLVTDPRNWLDFQAAEFLRDNNQILQVYDSSAGKSGGQTVKLAYTILASAIAYQFKIRERNSFRFVVIDEMFNNLDGENSRYALNLFRQLGLQLLVVTPMDKITIVEPYVRSVHFVKNNSEGNDSRVYPISKENVSSGKDENSERKVGNL

SEQ ID NO: 31360 - protein, 392 aa, Leptospira santarosai str. 2000030832
MISPEILRKRSLAYYHNELLRSIVLGGVLFPWEISIGKVLPEEILKNPSLLRELRAESKENKGFGFRIVFRSKETRKYGIQTIPTKIVFDTEDDFLRFTKKKDEFLSYSTDCTLILSVLPELKDWILKNTLSVIEESGKWESILSVCSYFLEYRNPGLYIRELPIRIPTKFIEENKKVLRSLLDFLLPEIADAKDFETRYGLKKAEPLVRFRILDLEIAKSSTGGLTDLSIPVRDFRRLELSGCGRVFILENKTNFANLFNFLSFPQLKGTISIFGQGFGLNVLKDCSWLEKMEIFYWGDLDVQGFEILSQLREQYPQSRSFLMDLKTFVRFRDFAVDGISSSKSSEPKFLTPSERETWKYLSSLDSKNRLEQEKIPHEYVQEVLSGLDGSQ

SEQ ID NO: 31361 - protein, 484 aa, Bacteroides sp. 2_1_56FAA; identical to SEQ ID NO: 30949

SEQ ID NO: 31362 - protein, 194 aa, Bacteroides sp. 2_1_56FAA; identical to SEQ ID NO: 30950

SEQ ID NO: 31363 - protein, 1131 aa, Bacteroides sp. 2_1_56FAA
MMQQMNLFNTSPEVAGFKLDYLEVWNWGTFDQKVYCMNTQGNNSLLTGANASGKSTLVDALLTLLVPLKRQRFYNQSSGVEKKGNRTEESYFFGNYGNQQQEGAASTTTLRLRDKGARSVLLASFCNVDKRVVTLFQVRYYTGEELKVLFGIAREPLTIKRDFSEFDLHGDWRKRLTKKYNTNDTRRKIEFFDGPVAYGEKMIALFGMRSDKALTLFNQIVGVKVLDDLDSFIRTNMLEEVPAEEKYQELKDNFQNLMEAKTNIDKVKEQIAQLEPINTLAKELMAIDTRIAELEQEKSVVAYWFAARTVDLCNEELARCKSNLRKLEDELKALKVKKSELEQEQTRLSVAIEKDEVGQQIREIEKEINQKVKMRDNRKAKAEEYDKLAKTVELTQSPDAEVFDANRATAKHEKDALQVKIDRQLMEEKRQAQNRQDEINCTISERVDTIRYLQQHKNNISGRVAEIRDEILEAVGATAEEIPFIGELIRVKDIECDWEYAIERILHNFALRLVVPEKYYKQVNEYVNGHNLRGRIVYQRYEGTEPLREFEDRTLKVDSLLRKVEYKSKCLYLDWLEDRLFAEFNYSCVDSLADFNYLQEKAVTKEGLIKARGGKHEKDDRPETRGKEHYVLGWDNKEKIAMLQAEVRQLQQDEKEVATKVRRIEADTKNAQEKRETYSKLFDKYDKFDDIDWWSCALVIQQKEEQKRQLEETNDKVKMLQGQLERVRKELGALEEKFNEAIGNKALLENRENILKKQSNDCALALAQIGVVDTDAFESQHTDLLNVALVGLDKMRDTLQSDINSALRKQRETKGSKSGDLKNLIYRFKNPTEEITAKYRDWRSDVNRLPEAVEFVGEYQTYYQRLLDEDLPGFESRFNKYLQENIINKVSAFNMFFQNWRQSITKTIDQLNSYLVGIDFKDAPKTYIQLVAAKRLNVDLKEFQDLLSSAIPNIHEMNSTIDGSRIHFEQHIEPLMSRLQDESWRKLVMDVRGWYTYKAEEFYQDDDQKRNTYEAMGQLSGGEKAQLTYTILGSAIAYQFGLTKNGLDSSFRFIAIDEAFRAQDEDKARYLISLCKQLHLQLLVVTPSDNIHIVENDISYVHYVERKGDRSVLYNMPISEFKAERERSMEV

SEQ ID NO: 31364 - protein, 384 aa, Bacteroides sp. 2_1_56FAA; identical to SEQ ID NO: 30952

SEQ ID NO: 31365 - protein, 451 aa, Lachnospiraceae bacterium 1_4_56FAA
MQLRFEIPDSFWSLFRSVNREVYIDALLCINEEYQYSNYFLTREICIQALSDLYVKQQIELRREEDETEIDLLETPASRILNWLLRTGWLKKVEDYNTLVTNIVIPDYAAVMIDAFERLTSEDMEETEIYIQNVYATLFSFRHDTRVNLNMLRTALVNTRRLNKALQDMLHNMDKFFARLLEQKTYGELLQEHLEGYVETIVRKKYHILKTSDNFYLYKTDIKRVLQEMREDEAWIENVRAQSKAMGDTGEDVLELLDLIERGFDDIEHRISNMDKEHTKYVRATVSRLNYLLSAETDTKGLVVQLLNRIAEDLETRIRKTGEKMNLSQLEILSERSLYKRRKARKDFISRMAVEEAAEDLDREDVLRLNRIQVRYSRQQIEEFIRSHMVDDVMDVSTLPLEDDETFEKLILAYDYSTRRSSKYRIAEEDALMIENGSYRYPALKFVRRGV

SEQ ID NO: 31366 - protein, 228 aa, Lachnospiraceae bacterium 1_4_56FAA
MIDYFEQLIPEEQEGITEVIQTLFRQTFLLERKFDRRLGRMQYTHEYRVCSKHFEFLKLYFAAAGITLNENVQMGLIYIQGETLWGEKLPRLATIYLLILKLIYDEQMASVSSSNHIVTTLGAINGRAGEFGVLRTLPSPTEIRRTVALLKRYQVIEPLDVLEELNESTRLVIYPSIHAVLSGDDIRALLQTFGEADERQERLETEDDMKEITGGTTIGEDTGVSGTL

SEQ ID NO: 31367 - protein, 1125 aa, Lachnospiraceae bacterium 1_4_56FAA
MEKTQAFQALSKICLNNWHYIDKKVLTLNEGINFFTGHSGSGKSTVLDALQIVLYADTDGRRFFNKAAADDSDRSLIEYLRGMVNISENNESQYLRNQNFSSTIVLELERTDTREKQCVGVVFDVETATNEISRLFFWHTGGLLENQYRADRRCLTTVEVREYLQRTFAADQFYYGPSNERFRRQLYDIYLGGLDAEKFPRLFKRAIPFKMNIRLEDFVKEYICMEQDIHIEDLQESVMQYGRMRSKIEDTLEEIQKLTEIGEVYQTFDEKQQKAVSCAYQIARLEMLYLEQKIQEYHDRVNGRKEEIGQQKIRQAKLEEEQGHLQKDYEDVLVRIANSGYSGLEKELETLNETLERLAGSKARWQQTSERLKEWKDQDVTPNQTIWDIDRFLKGTISEQEMERLQNSFKEMRQELEEGRQENASRLKAVKKEEKEAREELKELKQGRKAYPRELEEARYELRNRLQEYCGKFVNVQILADLLDIKDERWHNAVEGYLGNNKLLLVVEPRYAREALEIYKEMDKRKYCRAAVLDTERVMENEHAVRPGALAEEVTAKTDYAAAYIRFFLGNVMKCESVEELRECRIGITPDCVLYHSYRLQHINPDLYTRRAYIGETSMRKRIRQLELKCEELQNERLPLQEAEVKIRRLLELEMLPQPTDDYMQWIKDTEMISDKEKRKKHLQEQMEQLREESVAVLEAQKNELMERMEEKKASVDLVKREIWKNEKDIDGYQRAIIDQEEALAVKTKEVQAMSGKEVHDLETEFQEFLAAKKSVNYDYLRRQKVSEQQPLLEQAEREYQKLVDVRSAYLRTYPNRTFSASARDNTAYEKLLEELQCGDLERYRESAKEQAKSAVEHFKDDFIFKIRAAIRDAYQRKDELNRIISKLDFGKDKYQFVITKNKGADGKYYKMFMDDALQIDPMQLSHTMDNQLNMFTMEHEEEYGEMMNELINIFIPPENATREELDEAKKNMEKYADYRTYLSFDMQQIVSGKTSGEETDMHIGLSRMIRKNSGGEGQNPLYVALLASFAQIYRINQTSRIRRNPTLRLVVLDEAFSKMDAEKVASCISLIRGLGFQAIISATNDKIQNYLENVDKTFVYANPNKKHISIQEFERTEFGALEDE

SEQ ID NO: 31368 - protein, 474 aa, Lachnospiraceae bacterium 3_1_57FAA_CT1
MKFLYDIPASFWGLFRSVNREIYMEALLTIDDEYQYNNFFLSREACVQILGEMCAQQKLLMEQEETETEEEAQEAVPKRILNWLLRAKWLRKVEDYTTMTTNIVIPDYAAVFISAFDQLVNQPLEDTDIYIQNVYATLFSFKNDSRMNITMLKTALVNTKKLNKALQDMLHNMDKFFERLLSKQSYGELLEEHLEGYVEEVVNKKYHILKTSDNFYIYKMDIKRCLKEMREDDAWIGRIRAKQELSREKKGKEPEGFYRRRQDEDVLDLIDQIERGFDDIEHRIANMDREHSKYVRATVSRLNYLLSDESDRHGLIIQLLNHLGEPEEEKEQADRLRLVAQKMNLSAYEILNDNPLYKRRRRRNFTEELVPDEENKELSREEVLQMNKIHHRFTRQQIESFIEERMTDGILETGSLQLTCQEDFEKLILAYDISMRKNSRFQVVTSGEQVEGERYTYPAMMFVERKRSGSARSD

SEQ ID NO: 31369 - protein, 277 aa, Lachnospiraceae bacterium 3_1_57FAA_CT1
MLPYINELSQEEQEKLQEMIRRLFRQTFLLERKYDKKAGRMVADKDFYFADRHMDFLKDYFAAAGICLEQNTELGTIYLTGETTMGERIPKLATIYLLLLKLIYDEQMAAVSSSVNIVTTFGELNGKVGEFRLSRSLSSLTEIKRAFAFLKRYQMVELMDALDELGENTRIIIYPCINLVLMREDVLKLLQSFGEDGDEEGNAEEEGIIGEEDSIDEETDAEDESGMGGEVNGDEEDTLEGDKADGNTADDDSTAFGTAGGGAAGGNASAGEQPPVL

SEQ ID NO: 31370 - protein, 1122 aa, Lachnospiraceae bacterium 3_1_57FAA_CT1
MPQLESSRQSFKAITRIALNNWHYIDSKILTLNKSINFFTGHSGSGKSTVIDAIQIVLYANTDGRGFFNKAAADDSDRSLLEYLRGMINIGENNQAEYKRNHNFSTTIALELEQTGSGEKECVGVVFDVDTSTNEIGRLFFWHKGGIPENGYRTAGRAMAIGELKNYLQKNLTREEWFLTSNNERFRRNLYDVYLGGLDMEKFPRLFKRAIPFRMNIRLEEFVKEYICMEQDIHIEDMQESVVLYGRMRRKIEETQTEIGELIGIRDQFNRFVEGRQRTRSLRYRLDKLTILQLTEVIRELQTRAGEGKKDLLAQKESLENLLSVRADYASQHEEINRQLISSGYAELEAKQRSLEENLTLLERSERKWKTLSDNLERWEEEENISNQTIWDMDKFRKGTISGEELERLKKSLKEVETDLEKQHQEAAAEGKALQKEADLIQKDLMEIMLGRKAYPRELEDARSQIQRQLYEKTGKNIPVRILADLLDIKDEKWRNAIEGYLAWNKLALIVEPAYVKEAMEIYESLDAKKYWRISLVDTEKLAAQEYQVRENALAEEIDCRESYVKAFIHFLLGNVIKCEDVQQLRRCKIGITADCLLYQNFQLRRLNPDNYTRRAFIGEKSMRRRQKELQARLEELNKSLEEYSAAAAQAKRLLSYEYLQDPVESYVELFQDIEEKKKKEAQLKKLEKRMEELSAGSVELLKEMLQEIAEKEKVLEAHIDSLKIQIHDRENKIKADDAAYIEKNEELLEKQRQLVSSPAWEEDWERFFSQVKNPRYDTLIRQALAAITEAEEDLEVQRNRLVDIRSEYLKRHPNRDFSASGEKNEDYQALLDELSFDRIKDFEEKAMEQARIAVDHFKEDFIYKIRSAIKEAYIRRDELNRIIRRLNFGKDRYQFKITKNKGLDGEYYDMFMDESLEIDPSTLSGSVEHQINMFSMDHEDKYGTLMNDLIRIFIPPDTANAQEQEEAKKNMEKYADYRTYLSFEMEQIVEGEERLVIGLSKMIKKNSGGEGQNPLYVALLASFAQAYHINLSPKLSRRPTIRLVVLDEAFSKMDAEKVASCIELIRGLGFQAIISATNDKIQNYLENVDKTFVYANPNKKSISIQEFEKKDFAQLIREEEM

SEQ ID NO: 31371 - protein, 454 aa, Lachnospiraceae bacterium 5_1_57FAA
MQLRNEIPDTFWSLFRSVNREIYIDALLYINEEYQYNNYFLTKEACIQVLGDMNARKRYELQWEESESEFDMLETPSSRILNWLLRTGWLKRIEDYNTLVTNIVIPDYSAIFIDAFERLSSEDMEETDIYIQNVYATLFSFQNDARANLGMLRTALVNTRRLNKALQDMLHNMDKFFARLLDQKSYGDLLREHLDGYVEEIVRKKYHILKTSDNFYIYKMDIKKCLRDMREDEAWIEQVRERSRAMGDTGEDVLELLDLIERGFDDIEHRIANMDKEHTKYVRATVTRLNYLLSGESDTKGLVVKLLNRMSESADYDEVLAKTGEKMNLSLLEILSEKSLYKRRKGRRYFISQMEPDEEIADLDKEDVLKLNRIQVRYTKEQIEAFIESHMDQNDIMDAAQVDITDEESFEKLILAYDYSTRGSSKYMVLEEEPKMIEKGPYKYPALKFVRRRL

SEQ ID NO: 31372 - protein, 214 aa, Lachnospiraceae bacterium 5_1_57FAA
MIDYFEQLSQEEQEDITEVIQILYRQTFLLERKYDKRSGRMQYVREYRICSKHLEFLRAYYKVAGITLKENAHMGLIYIQGEALWGEKLPRLATIYLLVLKLIYDEQMASVSSSSHIVTTLGAVNGKAGDFRVLHGLPSPTEMRRTIALLKKYQIIEPLDVLEELNEHTRLIIYPCIHAVLMGDDIKELLETFGEEENIGDEAAIQSTFEDMPE

SEQ ID NO: 31373 - protein, 1114 aa, Lachnospiraceae bacterium 5_1_57FAA
METKQPFKALSRICLNNWHYIDKKILTLSEGINFFTGHSGSGKSTVIDAIQIVLYANTDGRGFFNKAAADDSDRSLIEYLRGMVNISENNESQYLRNKNFSSTIVLELEQTNTREKQCVGVVFDVETATNEISRLFFWHTGELLNNHYRTEKRCLTTIEMREYLQRTFPPEGFYCGPSNERFRRQLYDIYLGGLDMDKFPRLFKRAIPFRMNIKLEDFVKEYICMEQDIQIEDLQESVMQYGRMQNKIEETQEEIRRLNLIREQYEEFCKEHREVEACTYQIDRLEELWLEAKIQECRDKSLGRQGEIGKQEAVKEQLESQARILQKEYEDIILRIADSGYANLESELAGLNETLERLGASKARWGQTADRLKEWKQQDVTPNQSIWDIDKFADGSISEGELERLKESLLDIQEELEEQRREADSDLRKIKKEEKDAREELKELKQGKKAYPRELEEARYELRNRLHERCGKFVNVQILADLLDIKDERWHNAIEGYLGSNKLLLVVEPGYAREAMDIYQGMDRKKYYRAAVLDTEKVMEDGHQAKEGSLAEEIVAKEPYVRAYIDFFLGNVMKCESIEELREHRIGITPDCVLYHSYRLQHINPDNYTRRAYIGETSMRKRIRQLEEKCQHLQEERLPLQEMLEEIRKTMQLEMLMQPISDYLGWLSDIEQIPAKERRKKQIVEKMQRLKEESVDTWNRQKEEIQRQQEDKKAQIDQVQKDIWNNQKDIERFREELIQSESALVQQKQKTVENPEYEQEFQEYLAGKKSSNYEYLKRQRIAERYPKQEREEQAYQKLVDIRGEYLRNYPNRTYSAAIKNNEAYDKLLNTLQCDDLESYRESAKEQARQAVEHFKDDFIFKIRSAIREAYQRRDELNRIISRLDFGKDKYQFVITKNKGADGKYYKMFMDDSLQINPSQLTNTIDNQLNMFTMEHEDQYGDLMNELINIFIPPENATKEELDEAKKNMDKYADYRTYLSFDMQQIVKGDKDMTIGLSKMIKKNSGGEGQNPLYVALLASFAQVYRINLSPKIHRSPTIRLVVLDEAFSKMDAEKVASCISLIRGLGFQAIISATNDKIQNYLENVDKTFVYANPNKRHISIQEFERKDFGELKD

SEQ ID NO: 31374 - protein, 412 aa, Lachnospiraceae bacterium 5_1_57FAA
MYIVDKIINKCEKSSRDWRSGASGRRTIQIMQSDYDRCGKSVLISEVKELEFRGLIEIEKWVTRGSDVDIIAFRVEKLDRFYELAKSEGRMVWPKQERVDYYRGMLEAELGKGIEKNWIREYYRYLISRLDKGNFPKDVEKLELYTCCLRGIDELEEPVYKRIFSKKYLNNSKKFENEVQGHLISVAKKYWDEIEEDMDDKTVLSQLLLEEYAQELEMKGPLRLIIESGGKMQSEEGTEIEGETPPDQEIDISAFIYGVTLNSAMLKYSRIAPKQPDIRRIITIENKANFVSVPYDPHTLYIFSHGYFSPKEREFLKKLAYILNEEDVGYYHSGDLDYGGIKIYEYIKKRIFPELRPYLMDVETYDRYLEYGEEAPESVLKKIKTVELPEFQGLIGRMLETGLMIEQESFLI

SEQ ID NO: 31375 - protein, 483 aa, Lachnospiraceae bacterium 1_1_57FAA; identical to SEQ ID NO: 31158

SEQ ID NO: 31376 - protein, 212 aa, Lachnospiraceae bacterium 1_1_57FAA; identical to SEQ ID NO: 30881

SEQ ID NO: 31377 - protein, 1121 aa, Lachnospiraceae bacterium 1_1_57FAA; identical to SEQ ID NO: 31160

SEQ ID NO: 31378 - protein, 410 aa, Lachnospiraceae bacterium 1_1_57FAA; identical to SEQ ID NO: 31161

SEQ ID NO: 31379 - protein, 481 aa, Lachnospiraceae bacterium 2_1_58FAA
MLQNYLYLKPTSCYNMTDTNQRDTEKIMQLRYEIPDTFWSLFRSVNREIYMESLLVINEEYQYSNYFLTKEICVQVLSDMNAQKQVLLQREENETDFDMLETTASRILRWLLKTGWLKKIEDYSTMTTNIVIPDYAAVFIEAFERLTSEELEETELYIQNVYATLFSFQNNSRVNLNMLRTALINTRKLNKALQDMLHNMDKFFERLLDQESYGELLREHLDGYVEEIVKKKYHILKTSDNFYIYKMDIKKCLRDMRENEEWIESIRQKAKAAGDTKEDVLDLLDLIERGFDDIEHRISNMDREHSKYVRATVSRMNYLLSGETDTKGLVVQLLNKISAQEEPEKLLTEAGKRMNLSLFEMISEKSLYKRRKQRTDFISQMGQDEEYEDLNREDVLKLNRIQMRYSRQEIEDFIEEHMENEVMDAGTLHITEETAFEKLILAYDYSTRKNSKYRVLNEEETVIQSGQYQYPALKFVRRRPQ

SEQ ID NO: 31380 - protein, 214 aa, Lachnospiraceae bacterium 2_1_58FAA; identical to SEQ ID NO: 31058

SEQ ID NO: 31381 - protein, 1118 aa, Lachnospiraceae bacterium 2_1_58FAA
METKQAFKALSKICLNNWHYIDRKVLTLNQGINFFTGHSGSGKSTVIDAMQIVLYANTDGRGFFNKAAADDSDRSLIEYLRGMVNIGENNESQYLRNQNFSSTIVLELEQTDTKEKQCVGVVFDVETATNEINRLFFWHKSGLLENQYRADKRCLTTFEVKEYLQRTFLKEEYYCGPSNERFRRQMYDIYLGGLDIEKFPRLFKRAIPFRMNIKLEDFVKEYICMEQDMHIEELQESVMQYGRMRGKIEETMEEIGYLQEIRGSYRQYEEKQEETASCTYQISRLEILHLQSKIQELNDRMKETQTEIAGQEAKRVNLEKEQAELQKEYEAIILKIADSGYAAMEKDLESLNEALERLQNSKARWKKTADGLKEWKEKDVTPNQTLWDIDRFVSGKITEGELERLQTSLTQIREELEEERQETDARLRAVKKEEKAAREELKELKQGRKAYPKELEEARYELRNRLHEKCGKFVNVQILADLLDVRDERWHNAIEGYLGNNKLLLVVEPKYAKIAMEIYQDMDKKKFFRAAVLDTEKVQETEWEVKEGALAKELIAKEPYVQAYINFFLGNVIKCESIEELRQNRIGITADCVLYHSFRLQHINPENYTRRAYIGETSMRQRIRRLEEKCESLQEERIPLQEMLEEIRRISQLEGLTQPLEDYRQWLSDLQKIPAKEAEKARLLDTMQKLREESVLVWEQQKQEIQQKQEAKKAEIEAVQKTIWNHQENGKRFQNMQVDFNEQLVQKENEFRQQDREKYEPEFQEYLEGRQSRNYEYLMRERIKKKQPLEDAQEKAYEKLVEARSAYLRKYPNRTYSATIRDNDVYEKQLSNLECDNLEKYREEAQEQARAAVEHFKVDFVSKIRYAIKEAYQKKDELNRIISRLDFGKDKYQFVITKNKGPDGRFYRMFMDDALDINPSQLSDHMENQMNLFTMEHEEEYGNLMNELIEIFIPPENATREELEEARKNMDKYADYRTYLSFDMQQIVQGEKDMRIGLSKMIKKNSGGEGQNPLYIALLASFAQIYRINLSPKIKRPPTLRLVVLDEAFSKMDAEKVASCISLIRGLGFQAIISATNDKIQNYLENVDKTFVYANPNKKHISIQEFERMEFEQLQGEE

SEQ ID NO: 31382 - protein, 296 aa, Lachnospiraceae bacterium 2_1_58FAA
MWIRAYYQDLLERSENKRKKDLLELLADEKKYAPCFEGLDQLTESVFKRIFSKKYLGNTKTFEQEMQSHVISTAKKFCPDVEKEMDDTTVLQQLWIEEYAQELSLKGKLHFCLKEENGSTQEINTECYRFGTTLNSQTLEHAEIKEVQNIQKIVIFENKANYISAPYKDGILYLFSHGYFSPKECRFLKQLHQVLKNQTSCEVQYFHSGDLDYGGIKIFQYIRKTIFPELEPLQMDVETYEAYQEFTEVIDPETLEKLKRVQDENPKLQELIKRLIETGKGIEQECFLIEKRGNHI

SEQ ID NO: 31383 - protein, 491 aa, Cellulomonas gilvus ATCC 13127
MITRAEAAYLGAVRAFQNPMLDLLHKRHAPLVVSLLSVLFTAERPTVPVADAHTEVGDALDQLRAAGHQDGLPVGSARDLCRQWADAGWLVRQVLDDDVEVYRLSAHAVGALEVAGRAGGARARVSQSRVRTVLDAVGRLAHDADPDVLVRMARLDAEIRRLQDELARLQRTGTVEPVDDEELLEQAENVVHLVRELPADFARVAESIKAMQRDVVSALRQDERPTGEILREYLARGEHVMESTVEGRAFSGALRLIGDPQRLDEIADQLDVVLRHRFAQRLPAAQRTELSEVVRRIEQGLDQVFTAQREASYVITGQVRHHDPLRDRQVDELLREVMTGLQTWLPDARRGQAVDPLRRLPVAEVEHLRQTAGDLRPPQAPAALPDWADDEPDVSTDEARAWGGPHYAELDAHLAAHADESGTADVARAFNAAPDALRRPVDLLGLLEIAHQRGMTETDELAFVDAVRPDGSRRRFAFGAVTTTTKDPAHE

SEQ ID NO: 31384 - protein, 218 aa, Cellulomonas gilvus ATCC 13127
MSETTVEEGFIAPVPMEEDPSELFAGDSGTLDADVRRVLVRLLQRRFLTADRNRAQWRTLLENQQVIESRLHDLFVHLVVDHERGIAYKKQVRSAELDVPVLLRDEAYTRAETLVLVHLRTVFQREQGAGETSVRVDVEELEQTALTYFDPDDTNVAGHQREIRAAVARLAKEGLIEEESQGRYRVTPLVEVVLSNERLTELRAWLRTQQPAGTEAGR

SEQ ID NO: 31385 - protein, 1125 aa, Cellulomonas gilvus ATCC 13127
MTMVDTLFGLVPAASTGQQWIARDLQLVNWGGYDGHHRIRLASTATLLSGGSGSGKSTLMDAYIALLMPHTTPFNGASNGGVVGRPRGKDQRNILSYARGKLDESRTQDGTRQRVLRGDGRDTWSAIAMTWVDQAGTELTGVRAWYVPSAARLLDDVVPVRATCDSAFDLRELEAAAGQRFSRPAVAAAGLTPFDTDRDFTARLYSTLGIGASGDGSKAVALLGRIQAGQQITTVDALYKAMVLEEPDTFATADAVVEQFDKLTGTREQMITARQQVKALEPIRGFRDAIEQGAERLRVIEAIGSFEDRTSPAALWRHARRLDLLRAVEADLQRRQRHARGLAAETEARISAAKAELDGVRETLWASGGDRLATAQREMRGAQARLDEVARARRRLDETLADALGEAVTTEAELDRLVARARAALDDADAKATARQALFDAMSEKKEAAADLADLRADRDAVARRRDNIPGDLHAARAALAKAAGLTPEELPFVAELVEVRTEHEPWRDAFNLALGGFATRVLLDVAHLGAFRKAIDAVPTARRIRFQGVPTGVRDDVALDARTLPGRLDYRSGPFTGWLRGELASRFAYQCVDTPGELSQHAKALTRSGQVSDGTQGSHGGSGGANVLGFTNTRRLAHLDQQIARAQERLALAEAQVLEAERRIDRHDAAQRAYAALVEVTWEQVDVAAVEAEQERWAQVIDGVTAGSPEITSLQTRATELDVTIQVLAEELGRTKGEARTLAEQWSATTDDVDAAQLALDDAQSAGTLVDPATTAYLDGLLTSGSEHATGAPVGPVDALAAFDAVLARAGEHLRADRQAAQQAVATARDALRRTFETFVERWPDPNLGTDPDASYNDFARILAELETSGLHELEAEWRKSLLRLSGNDLADLHSALARSVREIKERIRPVNDILEDLPFADDEHRLRIDARDTQSTVVARFRKELRDLREVLATDATDAERERRYLRMARVIDRIRRTAPDFADLVDVRRHVRLSAEKVDLEGNHVALYDHIGEKSGGESQELVAFIVGAALRYQLGDAGAPRPRYAPVFLDEALIKADARFTGRAVGAWRGLGFQLVIGAPNDKFGALEPHVDLKYVVLKDTAGRSRTKPVAGVPDDAAGPA

SEQ ID NO: 31386 - protein, 490 aa, Acetonema longum DSM 6540
MVQQKNEFSEHMSFEFLELLRKKNPAWRLLASPQAPLVAAFLYKEFIAENKRLVAEQELISRLEGFIDRLSQGQNERLFPRTGREYLDDWAGDEHGWLRKFYPPGQDEPYFDVTSLAQKAIEWLLSLRQQTFIGTESRLITVFELLHQIVERSETDPKLRLAELERRKAEIEQEIIRVQNGQVALLDETQIKERFWQAMTIAREILADFRAVEQNFRDLDRGMRERIATWDRGKGELLETVFSEQDGIGQSEQGKSFAAFWKFLMSSSYQEDFQDTLDRALQLKAVHEMSTSRNLRHIHHDWVNAGAHVQETVAVLSQQLRRYVDENFLEEERRINQIIREIEGKAVAVRNDPPQEWEMKIDEVAPEISFPLDRPLFTPPQRPEIKDDVIGAGVEDVSAEALFSQVYVDKEKLKDQIGYLLQAQDRITLSRIIEHYPLELGLSELVTYLVIASESPQAAFYPEDVEEVSWTDETGKKKVAKMAKIIFQRT

SEQ ID NO: 31387 - protein, 201 aa, Acetonema longum DSM 6540
MNVLDDLAFSRTLVALFKNVIFKETDPETWEVILAQKYKIEDYVSKVGLILIVDEMDGYGYLKQRLYGEGEEEIPRLVSRHALSYPVSLLLVLLRKQLLEFDSTTGDQRLIVTRQQIAERMQLFLKDTTNEAKMVANIDNHIKKIEDMGFLRRLRGSEDSFEVQRVLRSFVNAEWLRDVNELLDKYRVYAGGETGEGESQE

SEQ ID NO: 31388 - protein, 1133 aa, Acetonema longum DSM 6540
MSLLNLKQEYPGLLFGATPGFRLAKLEVLNWGTFDGQVWTFSPGGETSLLTGDVGSGKSTLVDALTTLLVAPRKVAYNKAADSSAKERSITSYVRGYFGQKKSAEGTGQPDSLRDMQHYSVLLATFQDSGLSQSVTLAQFFWYQDAQKPPARFYVVADKEMWITQDFSKFDKDVRELKKRLKNSGVRVFEDYTRYAEVFRRKFGIEQEQALDLFQQTISMKKVEALTEFVRANMLQVPNTEEEVEKLKNHFQDLNSAHEAVLKAKRQIELLHPIADQGKRCEQMDNRQNLMEKSLRALSPWFAEQTAALLTDEIARIEQDLILAAGAREQAEIKQREIEESIKKTERDIYANGGGALEALKAEIENLRQILDHIRKNWANYANCAGKLKLSMPKTVDDFISNRSKLPEIKSNEETLQGRLNADLQAAAGETARAEKETQTVAEELESLRSRRTSIPREYIEKRKQLCRDLKLEETELPFAGELLEVREEEAGWEGAIERLLHNFGLSMLVPEKHYPAVMRWVDQTMLGIRLVYYRVSETSQPVSGQPHPAAVSEKLNIKPNTSFGIWLTRELRQRFSHVCCEGREQFSRESLAITQAGQIKSKGNRHEKDDRYAIDDRRRYILGFSNQKKIEVLEANEQELKAEIRFYRDEIDNIRKQQKESQERLNAAVTMEGITGFADIDTRSKEKEIDEKEERRKRIEQGSDVLQELQHRLTELEEMKKTQEDVLKKAGKKETTLENRLGSLTQDKERADATAAETAPAMKEEEYPFLEKNKGTALQNKKVTLESRIALERDYRDWLEKERGILAREISQLRGKIIKAMSEYNNQYAEETREVDPSMESLPEYNRMLAQLESDGLPRFEKRFKQLLHENTINQIALFQAKLKQEQDTIKSRIEQINGSLSAIDYDEGRYIRLEHDETYDSDIKAFRVQLKACTEGALTGSSDDQYAETKFLQVKAIIERFRGRPGETESDARWTKKVIDVRNWFLFAASERWRETDEEYEHYTDSGGKSGGQKEKLAYTILAASLVYHFGLEGQDSRPQSFRFVVIDEAFLKSSDESARFGLELFKKLDLQLLIVTPLLKIPTIAHFIAHVGFVHHDDIRHRSMLRNISIEEYEQERKAREVARYVHRVV

SEQ ID NO: 31389 - protein, 392 aa, Acetonema longum DSM 6540
MSTGWSDPQWIREELRKKWDSGKILQALLIEEDLFPLRLPLKRPKSNDVNENFAEISRWIRQLRDHSKQNTGFGYELIEKEMVHRQSGRNLLPTHAVVPTVRDALRLMKKEREADRFLEILGRLSAEWPALLEWAGRHPHKVLAVGDDWTGILAVLKWFSLNPNCQLYMRQLDIPGIDTKFIEQRKGILTELLNIVLPEETINHSATSFEQRFGLRVKPVQIRMRLLDQAQYIQGLSDLTIPVEQLILLKPDVTRVFITENEINGLCFPDAGSSLVIFGLGYSVDVLKAVTWLQEKEIYYWGDIDTHGLAILDQVRSFLPQTCSMLMDENTLLKYRDLWSVEDKPFLGKVTRLTSDENQLLCSLQNNRWGKGVRLEQERVSFQQVKQFLSTL

SEQ ID NO: 31390 - protein, 582 aa, Cupriavidus necator N-1
MGDGPAADAGPGAGGWLDAAERVPVTSRPPSYLGQVQMPYRFRLIRQLPGRQGAAPTGCAGARRNGIPEAGRAAGQCSAGWYRTILFAASMVRRCNARVLRGTSAAMVDSGYPQFFRPLTLKRRGLIAACIRAFYARLYGSHADYRSILGREDLRDLFVQTMQSATLPADPTGEDGEDGFAAGDLADDQKLASAIVRLLVADGWLETAEDRVRLVTAYRFTRAGKIFAQALTLADRPRERTRQRNMRSCKNALSAFIERRDVEDLLDAYEYADRVIADLSEDIELFYDLARKILLDAHVQGNWDGFIEFVERRFRDEFSPRLVYDNAERHRLDIGALIERLNELSAAEMQAIDDDLANHAAWAAQSAPDGAILRWMLDRIDEMVTAACRTKQPELFRAMESYVRRHVVLLSQSLFMGASGSGAALSTLIRRLGDIPERDQRAWLERQGAALAPVSVALYDPAAVQPRKAAERNRAQAVSIVPEITREERLRQFVRQAEERAFSLSHQEVVDYLLGSMRGTGALRLSELPVDDAIQALSLLRAVEAARDQEGLDVERLDAEPLDNAIMSGTDYAIRRRHIGHG

SEQ ID NO: 31391 - protein, 230 aa, Cupriavidus necator N-1
MAMDEITIGQLVEAELKAGGVRPEAFRQILGRLFGLSILHREDSAIERQLYDDAVRIEGLLNAYFDVGGFRLLHERHQSYFRLYPPGARVPGLPAEDDAIAVDAVRAKLSADFVACCLVLRLLYNESLRQGSINERNEALVTVEYLNATLTAQVRRSLPAKTAREKLFADLKRARLIDYRADSEVEDADALVAIRGTILQFVADSSIDALLAETPTPVSAVTSPEPDNEA

SEQ ID NO: 31392 - protein, 1223 aa, Cupriavidus necator N-1
MKLEKLILVNWGFVVSREYPFGHTTLLSGSTGVGKSSFQDAIQLVMTGGKQHINVFNSAQDESGASRAGGKVRRTLASYAVGMRDNLCVRPYGSHTYVVAVFAPDDGESAEPFSAVVAVEAAVSGTREQGRSVDVARKLYFVLPGSRVLEADFIESRKGNSITAVKVEDIYHRLRQRYPRVLPFENSIEDYLCKLYAEFRGGGKTLVGPREAEAAARAFVQSIARKTVGSVDELIREQVLAEPDFSDQIGHIASLMQNVQRLRKIATELLACRERLAVLKAHADAFLAAFEEAMEAELGEALRRQQDVEEEIQRLEACRRIALAEVEKQQALADRHAQALKRATELHGTAKGRLNGNPVAQERERLGREMAMATESRTRIALDVLAALTGLRGVLDELAALAKQPAAHTCAYAPHVERLVVDAAAIDAADGQAAARELAAMLTGAQIDPASLRRDRFARLDAALAPIAQRLQGADGLYGAVVQQQARESDRATALQGEIDDLKRRRQGLEDGHFDLPAHVEAAVRYLEAKMPGAHPRVLCNLVQPREGSRWQNAIEGLLGGNRFVILVTAQYEASAIRALRHELPATRQGREASVVQGELAKRRAENQALTPDAMLQELVIADETARAYLVASYGRYVKVADAQALRGAPQALTVDGMASGGFKMFSSWVEDGELAFGAEARRKRVVRLARQIDEKTRERDAHLASGAELAAWGARLLGLKLVPVAPMLDELGETQRGLSSLGAQLASLDDSDLIVLERRVARAEQLLDGHHRLSNAASRLAGEAAGQARGFEGNIADAEAKLVECRDAVRQVNARVAELIRLNPHFDPVRLDQRARQAATEQTSASFDGRRRQQAGLYRQEREAFERKLEAHNLLSSSFDERVDFQPCHSTQGEYEWQAYGGIPAARRQISAMLERLDQVRILNNTSELGGAEKSFNNTFSTHFALAVRTAVEQGIDPLKRLNEKLKRLAFGEDRFEIEYGQMVKEYKKYFDLFQELNRLAETQTPVDLFSAAEGVLSADSVMALDDIKLLLLDTNRDHALRRLKDIADYRNYRQYDIRKYSEDGREASLARMATFSGGELMTPAYLVRAAVLAQAFRQFEKTPSLKLMMIDEAFDKMDEGRTAAVMRYLNENLGLQLVVAMPSRASGPLLELFSFEHRFSLMKVEGLAGELDKITEVDSSLLKADRLHALWTERREAVRREAAGQFDLQEARKQLVSDMGT

SEQ ID NO: 31393 - protein, 510 aa, Xylella fastidiosa EB92.1; identical to SEQ ID NO: 30618

SEQ ID NO: 31394 - protein, 237 aa, Xylella fastidiosa EB92.1; identical to SEQ ID NO: 30406

SEQ ID NO: 31395 - protein, 1143 aa, Xylella fastidiosa EB92.1; identical to SEQ ID NO: 30407

SEQ ID NO: 31396 - protein, 401 aa, Xylella fastidiosa EB92.1; identical to SEQ ID NO: 30408

SEQ ID NO: 31397 - protein, 543 aa, Bifidobacterium longum subsp. longum KACC 91563; identical to SEQ ID NO: 31042

SEQ ID NO: 31398 - protein, 224 aa, Bifidobacterium longum subsp. longum KACC 91563; identical to SEQ ID NO: 31043

SEQ ID NO: 31399 - protein, 1182 aa, Bifidobacterium longum subsp. longum KACC 91563; identical to SEQ ID NO: 31044

SEQ ID NO: 31400 - protein, 394 aa, Bifidobacterium longum subsp. longum KACC 91563; identical to SEQ ID NO: 31243

SEQ ID NO: 31401 - protein, 450 aa, Pseudomonas stutzeri ATCC 17588 = LMG 11199
MEDALQALSEMLAAYASQELYEIDPDATHLQAGRELREWIKRRLVVEREGRIYATDALESAIQFVDSLDSRIMTSTASRLSVVQREIENLETGLNPSPTGRIASLRRRIQDLQHELAQVEAGHVVVLDEAQAIEGIREIYNLATSLRADFRRVEDSWREADRALRQSIISEQSHRGEIVDRLLDGQDALLNTPEGRVFESFQQQLRQSAELEAMRERLRTILRHPAVPEALNRPQQRELRWLALRLVRESQAVLQARARSERDVRGFMKTGLAAEHHRVGQLLNDFFNLALSVDWQRQSERRKPVCLPPVGVAITGVPAIERLRFKTLDDDDAGELDLSLKPAGLEQIDDDFWDAFDGLDREALIHDTLAVLVEQGRPVTLGELASLLPPAHDLETFALWLAMAREAGIEVLTEERQLMELVDEDEQRWRFNLPYVGLDHEALKDIDWEL

SEQ ID NO: 31402 - protein, 249 aa, Pseudomonas stutzeri ATCC 17588 = LMG 11199
MAGIFDRIAGASGADETELAVEPMALDDGMEDDQPVMSAAVQVDERRTPQRVREAVQEMLKYGLLEESHKPNLYRSALSNIEAVDRILEPLDLAMGVDEVRGLVFVTVRQGEVAEQDDWSHPLVRRQRLNLEQSLLIAILRQHFIAYEQESGTGASQALVAVDELIPQLQVYLGELGSEAKERNRIITLLDQLKGHGLVSALDAHDRVIIRPIITHLANPENLHALVAWLREQVEGAATPAAGDEEDEA

SEQ ID NO: 31403 - protein, 642 aa, Pseudomonas stutzeri ATCC 17588 = LMG 11199
MKQALLWRNSETFILTSIELYNWGGFHGYHRAEIDPSGTAVIGPTGSGKTTLVDALMTLLCANPRYNLASTGGHESDRDLVSYVRGVTGPGDGGVEQSHIARQGKTVTAIAATLERDGTQVRLGAVLWFEGTSSSASDLKKLWLLSDSPEQTLQHWLSQHHAGGMRALRQMEKDGTGIWPYPSKKAFLARLRDYFEVGENAFTLLNRAAGLKQLNSIDEIFREMVLDDRSAFARASEVASSFDDLTDIHRELETARKQQRSLQPVADGWERYRALQEQLQDKQTLEGILPVWFAEQGYRLWLAETSRLQKEYEQAELDQEQCRSQLEIQKGVVDQHRQRYLRVGGAGIDQLRERIADWVRECDKRSLKAEQYQRLAKGLGLADELSAVALEENQQQIAARLEILTQQTTEARKKAFNAGLVQQELNGRLQTLQQERAEVERRPGSNLPGHFHAFRGDLAQALGVDESSLPFVAELVQVKPEELAWRGAIERAIGSHRLRILVPQGSSQAALRWVNQRHNRLHVRLFEVKEPSSRPVFFDDGFTRKLTFKEHPYREALKALLADNDRHCVESTEQLRHTPHAMTAQGLMSGKERFFDKQDQKRLDEDWLTGFDNRDRLAFLAEQIREVNEQLAPAKLGLDCWR

SEQ ID NO: 31404 - protein, 460 aa, Bradyrhizobiaceae bacterium SG-6C
MSFLDVIPHTLFRLLSSPAHIRNVAILEAIFEQFFDDFAFAPKKSEVLQVIRQVLENPDFRGVSDDDEPSSTTETAEYVIYGRLRDDGWIMEVANRKAAEVYMPREAHALLSSLITLKEELKVDISAEASLIDSGIFTAYQDPVGKVINIASARRQAVQLRRSIDGVLTSLHRIEEDLMRSEGLADLLARFMERFVEKILLENYRALKASAYNPMRFQRSILTNTDLFINDEGQIARAAVALADQGMVADIAAAETQIIQDLMRIRAVFAGLGEKLDVIDRFSHRLERRIATTVRYQETARNVREERLRDAIRLAFTHWSAGNDECVTPLVEIPVPYANATLALAKKAREPVEPQTREPKIVDPADVKREQMIDAYVAAMDVTSRAVAERMRKLVPDDGTFFDLDQFEPESARDIAILYEARSGALASNPEFEVRTSAAKATNRFVSGPGVLVRRRQGKA

SEQ ID NO: 31405 - protein, 224 aa, Bradyrhizobiaceae bacterium SG-6C
MTYFSRWATRQAAQDPNFSAEQLTETANRLLHRQFVSRGDFGGAAHFDRIASNLDYFKDLFAGFGFSFVFNDTWGYAGFVSPVAYGNARVPTQETIVLLCLRMLYNEGAEKGYFVDSSAQILVEEEEIQTVFSSMGSRTLKPGELRSILTTFKRKGLVTFDQNHSLQVSADIHIRPTITEVVDGSFLARIEVWAGQPARAAEAVENEDDAADDASDRAPESSPS

SEQ ID NO: 31406 - protein, 1173 aa, Bradyrhizobiaceae bacterium SG-6C
MIPAFVLRNIAAVNFYLYAQDFPISGRGNAVFLGGNGSGKSVLLDAIQIVMTGMNRRYLDLNSRVSEGGRSTRTVREACLGLLDDGEGYQRDACLTYIALGFEAVDGSRRCTAGVCLEAKASLSEENVLGLFILEGEILGFADFVHPKLRGFEEKAWQTFLDEQRRKGREVKTFQRQKNQAFLRELYAIINANARGTQLDPDRARAALRQALSFDIEQITSVTDFVKRFLLDDLPIEIETFQARYNTWRDMQKTIERVEAEIRTVETIRAACERVMDDQFNARMWNYGAQRAEYDRYGAFIAKQRQEIAEMQEKLDSTRSYQQTLVEGIEQIRRRLDAIKDQIDGTPAFEQIKKAQAERNTQDAIRKAGVIEAKPIFDALKSLREATNSPAFPSGLAKIADFASRLTSDLVGVHDAVWPKSPKQIAALVSAVPQLSDVRAVLDERHQTAASIKAGLTKEFDEGDRILKKLRSGGTYMSNDTQDFLADMAKMHVPAQSLSEVADIAPAFAEWRAIIESILGDWADALIIEPRFMDQAYRHFDSHYKATRAKLIQSENVLAQDQSVRSGTLAEAVVTDNSYARAFLNVRLGRIIRARSANDIRKGDLAASADGKYAHGRGIEYRQLKQIPRLGQSVREQQIAQLSEQQRELETKLQTARDNERRSFAVLEAIKRAETALVINRGAATQLLETIESADREGERQAALIRELETELPQGVMEEKREVEQMLVQYKKERDEEREKEDELIDAIGQRKGAMNTNADERKKAAERACEAFPPFDRRHQRHDPAIGLEAFARRARAAYVQERAARGHPAHVRNHFDGLLKDRAPAQRVARLNAAIQDYVQANPDQHPHFEWTQFVATEQTTTLYDWIDSRHRELTQTILRNFKGQIDKAVTALVETMVHDFLSRLSGNIDAVDRIKDDLNRALRGSVFMGEVYQIRQERDQDKETIRYLIDRLDIVAPKATALMQSNPDPNDPDQVKIKELIDMLTIENGDDAQNRRRIRELADYRSYFRFSIDICDPEQGYRRISDLEQRRGKASGGQKFVPFYICLGVAAASAYFNHLGRSREAPPQSALMLMDEAFEKLDPDNIYKIIRFYEQLGLQLIMAAPKTHQALYQETFDTLISIIRVGRAIQAIPQHFHQEAHILLRKENPMHQPRSFFEERVREERRHAAE

SEQ ID NO: 31407 - protein, 415 aa, Bradyrhizobiaceae bacterium SG-6C
MSARSGGMPRNNQYTAETLLNRLLDRFEAPLARTRDITQTIEYTLVGGPAAQDEFHRVLRDAERAGGIALEQDRLGRFTGEFARVRLVDPDKLYRFLVRAPARATAETAHQAILAAIPEILADAFFRDIEQEAIAAWKSNKTFLGLSVGEINTFLTIIRLVHGIANLSGRDIDHRTFSRRIVKDSKALERMEGRVAQLLRRRDPSLAGEEPREVLEASGIVRRAHLLQVKGPLRLSSDALNIHGTGDAFIGLPWLSVRQASLAHGVDYVMTVENPTSFWRYSTEIDGNYLALLTDGFPARDVLSSMVHLVRHALLLAPKTPVYHWGDIDAGGLRIAAHLEDAFGIHVQLHQMELKLARAFGSPLQSQKGLERLALRSGEIGQLALWLRSVEAKMLEQEELDPMPPILAAGRPLSS

SEQ ID NO: 31408 - protein, 196 aa, Treponema caldarium DSM 7334
MGNLEDLADIDRLDREDASLFSRLLRELVSRCFILRSEEERLYNFGIRNFHLLEVYFACMDAQVRKDEGLGVIAWRGTTENRVRLNQEESIAVFILRLFYEEKRNSLRLSEYPIITVLDLTQRFKAMTGAELKKTHLKDLLKRFSRFRLIRAQDGINPDGTIILYPTLAFAIDQETIEKLRENLKSDLSREEEMLP

SEQ ID NO: 31409 - protein, 1071 aa, Treponema caldarium DSM 7334
MITLKKVRLIQWHSFRDVTIPIGERTLFVGENGSGKSTIIDAIQYALVAQLHKIRFNAAANEKRSGRSLDGYVLAKTGYEGEEYQRTEGISHVMLEFEKGEASFSAGICAEITKDTTQVRELPWIAQGVQVKDIPLFLDSTHLLGSQQFKQRMRDLGALVFDSKKEYQKELTHLLGVFRRNVEFNPSLDALVRSIGFVPMDSVNRFVCDYILEERMVDISVMKSNLQSYKDAEAEAELAIKNIAALEDILAIARVWQQHNRTILNQEYLQKRLQMELEQERLEENHKESQRLEAEEQRKAEEIRRLQEELEALRDQVNQLSLSIQTHQVYQLIQDLERRKNQLLKELEQARSNRERYQTLLSQLEALLNRELERDREGNVDMDRSAESLETEKETLYRSLSKSQEERENLRKDLGDLARELEELERGLVRYPEGPAELVSALREEGIQAWIFADLVEVADPAWQNALEGWLNTQRFAVLVEQEQFQRAIAIYDRLPRQIGGVPLPNLERMAQSEVRPHSLAELVVTDSPFARRYADYILGRVIRTDQEHLKDFDQSVTQTCLTYSAHTVNRIREAVYSRWYLGKGARERRKAELLARRKELQEALSRLELSIKLMEQQTELLKRALPALTEMRYLSSSIATIPELERSITEISEQIRRVDTSDLEVLRNELDERKRTLGSREAALSQAQIALGSIQGRAKTLAEARPPLEASAETRRAQFQAFVANREQFLEEWEAYYKERVHSREDRQSILANYEGSLQGTRNKLQKALENYQRAIQKYNLDWNALLSLLPEEASEIEALKKRLEASELPLYKEKISRARAMAEKQFKEHFVTRLNEYIEEARESFREINAILRSLTFGKDQYHFTLEERNDRKAQLEVIRKAAEIHENQGSLFDALISEGEREAVEELFNRILKNELDSFEVRQLCDYRTYFTYDIRVRDTSAMDPKTGKVPELSLSRALKEKSGGESQTPYYVAIAASIYRYYKDDPENTVRLVVFDEAFNKMDERRIGVTLELFQELGMQIITAVPSEKLEIIQPYMDTVNLVLRYGNEGWVRDYRAVTVAATTGSE

SEQ ID NO: 31410 - protein, 414 aa, Treponema caldarium DSM 7334
MKYDELILHVFAASYPRSAMRQGGRPLRLRHWEQLLPEAYASAMEQEGFLQAMEWLEAQGLLRLGWAHRRKRDRLLWAELVDPRRLYANLGQPYPDTVEEVLRETARGLAQRARDAEQGDTEQLFTALASYPSFLDSLVSIRDMEDLYILLTKRKEGAYKGPIRSLSVTLFRDSKRLEALLGILKRLTTLCNTPDLLLGLPRRNFPVVWLAGPFRLSAEGPDTEDHSAGARLLLDLGQRSPLIGVGAPFGLSLELLAGATKLEIAGATGRERDINILTIENKETFFSLWQMENPFTAYVYTNGWPNSAVRRVLELLHRQGYRLYHAGDLDPEGLAICQYLQDHYGSRPFGMDMATFERYRPYGRPLSDPELRSRRFEKYLSRLNPPLQDLARRIQESRIGIEQEVIDYKECEIL

SEQ ID NO: 31411 - protein, 490 aa, Achromobacter insuavis AXX-A
MSTQDTFALYEDLRARKEEPAWRLLATPQSPAICTCLHVLFLSERILPSSAFHERLHRQLEIVRRAGADLPKPAADYASDWIAEGWLRRDFPHGATEEMFELTAPAVDAIRYLMRLSRPRATATESRLASVVQLLQTLAEETDSNPATRLAGLLADRDALNAQIQAVRSGKVTQLPPERAIERAREVLTQSSELLEDFVRVQESLAAINLQLRRELVENDGARANTLERIFDGIDVIKQTEAGRAFDAFWRMLVDPVASTRFEAALTQVITRPFLGSLDAAERRSLTKLKSRMVERAADVHTVQATFASGLQSFVRSREFREQRRLVALLRSATVAAMAAAADTRPTQKVDAFLFRTSAAIRSASQWMLHDPTAHVVDATMTEIESSDARLEDIEELVQRSEIDMRSLKRNLVVVLGLADGPVSIAHVLERFPAEQGLGSVVGYMHLATRHAEPTERRERVRWEGGDGIWRSADAPLFYFSRECIDELRE

SEQ ID NO: 31412 - protein, 189 aa, Achromobacter insuavis AXX-A
MWSVLLRDREVIQIYLHNIFLDLVVDIAQQVAFIRQVPDESETDIPILLRRHQLTLVESALVLFLRQRLTEADSANERAVVSAEEMVEHLSLFDRARNTDLARFDRQCDGAIKKCKALNLIRPIRSSAARFEVSPTLKLLFNAEDIQALTTAYEALKSAPVGTSGMTMDQAIANDIAEGEREADEGDEE

SEQ ID NO: 31413 - protein, 1139 aa, Achromobacter insuavis AXX-A
MIVTTTSQAKLLPDTDPPPTPPDGPEGGRLKREREEQFRLVGVQSYNWGTFHGLLKLDVSEKGMLFIGPSGSGKSTIFDAHAALLTPPRWVHFNVAARESESKQDRSDLTYLRGVWGEQTANTGEIAQQQLRPGPTWSAISEVYRNGLGQVITLVHVYWIKGTSNQRKDVHKRYMVAERLLDLTELLFFPDSGFNARRFKSDLPDVWDTDSFPEYQERMRSRLGIETENALKLLHKTQSAKNLGSLTDFLRDFMLDEPKTQEMADQLVTQFERLENAHNEVVSAARQIATLLPARELNLERQKRLSDKGRLDEARMGIDHVAKEMLQSLRVERRDALEAKLAGEQAQEQALEQALLAARTTVQGLKQRRDGLGGQQLAGLEASKISAERDESERRQRYGKVAEACKALGMTVPAKAEGYAELVNQGRRELPSAASGADDSAQRQNALAVQRHELDKERSTILGELAVLARMPGSKMGANLITMRKLITDGLGYDEGALPFAGELIEVEPSEKGWTGPIERVLRNFSRTMLVPDDLHASVAKFINSTNLRGRLVYLRMMRQSPRAPAPKVNGVYRKTKVSEGPFRDWVETELLQNYDAECVETERELEDVVFGITRAGLLKTGARRHEKDDRSDINNSGNWVLGGDTRSKAQGLQDRERELTKVIDGIEDQLEQLRKKELARLNRSLHWQTLVNFNWNEIDHHGAALRVAQVDTQIRELRAATPDLDILEARIAAAKENEATAEKNHKTQFQAAMAVQIKLDELKQELESISELALTPPTPLQRETFLQKLEGAGRKPTIESMPDDVRFVDREIGKDIGTLESEAAKLLAGIEAKFVDYIRTWEAESEGLDPTMASYDEFDAKLTRLQVDDLPRFEEKFKELLNEQSNQHIALLSDRLEQERRDISDRMDVVNESLRQAEYNEGTHLAIEVEEITPPEAQELKAELRAALSHSLSMDDRVAETRFQNMKRLIKRLASQEPQHMNWKKLALDVRLHVEFVARELDEEGREVQTHRSGAGKSGGQRQKLTATCLAAALRYQLGGPGRVLPTFSTVFLDEAFDKADADFTDAAMKIFKSFGFQLIIATPIKSVMTIEPYVGGAVYIHIKDRMHSRALVLPYDDETQSIDYRQIDGSSANDEKS

SEQ ID NO: 31414 - protein, 345 aa, Achromobacter insuavis AXX-A
MGEQTLPRALVFSSPECVADYCEDGKVWRRIVSRRVTMLARWPALHASGFGPSYTALGEFTDEDFERLLAVLEWLVANPKSGIYLRQLPVPNIDTKWIDLQRRGVVADLFSRIIKPQAALQAAQSFVEGEGTEIDVTGLACSIEEESSNFYDICGLLRPPVKLRILVLCPKLRTQVGGLRDIEATIEDWAQLQLKPRQLLVVENKDTCLAMPDVEGVVAVIKLGNAVALVTRIAWLVGVPVLYWGDIDTYGYSILVQARKKLHDVRSVLMDRRTVETHLDRLVEEGQQTKSIDRSLLTVAELDVYNALLAHEWGASRRLEQERLEWPSVLRIVLSALHQSESKSA

SEQ ID NO: 31415 - protein, 491 aa, Actinomyces sp. oral taxon 448 str. F0400
MGTNGVVADALRLARRVREDAGLALLRADLGPMAAAVLNEHLGGEVRRRPVAELHELVDEDLAALRAAGVDASRTARAYCDQWRRDGVLVRAPAPGARAETYELSASAEAAIRFLMHGDHPRATVTRPRLDTVSTQISRLARDCDPTAAGRLHALRAERAALDEEIARAEAGDFVPVDGPEAAERLTEIVSLAEEVPGDFARVRAEILALSRSLRERVVTLDSSRGEVLDDIFRGVDRIESSEAGRSFLSFHQLLTDPDSCARLDEDLESILDRDFATRLEDADLRFLRCWRPALTRESTAVRRTMTGLSRSLDRFVRSRAFEAHRRLGAELAEAQGLAARLAAQAAPQARLDLDLELTSVPLTSIGAWRLRNPADTAVVEEITVHEPTALDLEEVRRIVRASEIDLVELTDAVGAVLAERGAATVGEILGEHPATQGLASVVGLLLLARRQGQEVAGNETVAWTTSGGAERSARIPRFLFTDRTTKSGDA

SEQ ID NO: 31416 - protein, 257 aa, Actinomyces sp. oral taxon 448 str. F0400
MSAEAAPVQAPAQDGAANPGALWDGDPGTLPRDTRRALVRLLQGPYLTLELHPDLWNALLTDEVAIRRHLGDLFLELVVDREAGLAFTRNAPDPTGAAPSVMRTMPLTLVDSVLLLHLRTLLLRTTTPGERVFVDRDEIDEQLDVYRPHASTDHAGFLRRVSSSVDKLKRASLLRETDVPERYEISPVLALVFTADEVAAVAAEYRRLLGEGDEDDQAAPRADDPSTDQVDGADGASGASSADGAADDETSERENES

SEQ ID NO: 31417 - protein, 1280 aa, Actinomyces sp. oral taxon 448 str. F0400
MSSSATASQTDSQHRLARIQVYNWGTFSGYHDLPVPRDGLLLTGPSGSGKSSLLDALSAVLVPPRNLRFNAAAQDSTTGDHSRSVLSYVRGAYRRSADEITGEVVTDYLRSGATRSGVALTFTRLDPGETITLVKLFHARQGSTSANSVSQTQLLVEGDIALTGLMEYLTNGIDRQALSRDLEGRAARFERYEAFAARFRRRLGLSGEVAQRLLHRTQSAKNLTSLDALLRDFMLDEPDTFAMADAAVEQFAELREAHAAVVEARNQEALLSPLRQLDERITEARQAQERAEGLRAAIDPYLDRLKTSLHEQTVDTARRALDRLADELTAARRAEQDARREREAAHLALAGGLGQDLPALDARLEAAHQATERAAGARRFLDAQLDILGATAPSEGAAFAELQRTAAQEIRRAESVESEQDGARNALRAEQVALAEQQRELRQRADQITRSHSAMSAELLRARDVVARAVGQAPAALPFAGEVLEVVPGQEEWRVAIETVVGPFARTMLVPEHLYRKVAEAVDAEHLGARLGYERMSPGRRSTRALPADALARRVRSRAGSEYGGWLDAEIMRRFDHACVESARDLVAVDRGVTRAGQVKSSRTSHLKDDRQDLTDPGSWTVGVDPAERLEQVVAESRRVAARLEAVDGEITTLDRVRAVGRERRDACRRILETTWEEVDVDGARSREADLTAQRARAATALPGLGELESRAAAAGLAEDKARSTVLRLAGEEQVQRARLEDARAALAELAQRRREREEDRAHPDAGGSDGAGRGDTNDRTGGTDTDRTDRGAGSGASGSRRPAFTRTEREALFGELEQRFRSRRRHAGLAEADATAREVEQEIARDHQRAAQAESRGVGEARAIMVRFSERWPVHGREVRPEAAFLGDYLELLDHLQADGLPRFERRFAELLHSQTEQNIGQLASEVRRAVSQVRGRIGPVNDALRATEYSPGHHLHIEVAERRLPIVHDFLVDLATIAASNLDLAEETAEEAEARFAVLDSVMTRLGSSDPRDETWRRQCLDTRLHVSFTAVERDESGTAVDYYEGAAGLSGGQRQKLVVFCLAAALRYQLTEPGRAVPGYALVVLDEAFDKTDAEFTRAGLDVFRGFGFQLLLATPMKMLQTLEDHVGGAAMVTNTPEGDDSRLAVVIFEERDGGAAPPRAHEAADASGSRARGGAEAVDAPRTVRASGRRAAAAAARPRAADVAPPAPSDAASPADADEPAGTTGIVSTATGVAGAAGARHAAGATAPDGAPDGSETVDAPNDAEAGDAPASAGTP

SEQ ID NO: 31418 - protein, 524 aa, Bifidobacterium animalis subsp. lactis CNCM I-2494; identical to SEQ ID NO: 30666

SEQ ID NO: 31419 - protein, 269 aa, Bifidobacterium animalis subsp. lactis CNCM I-2494; identical to SEQ ID NO: 30689

SEQ ID NO: 31420 - protein, 1165 aa, Bifidobacterium animalis subsp. lactis CNCM I-2494; identical to SEQ ID NO: 30668

SEQ ID NO: 31421 - protein, 406 aa, Bifidobacterium animalis subsp. lactis CNCM I-2494; identical to SEQ ID NO: 30669

SEQ ID NO: 31422 - protein, 484 aa, Acidithiobacillus caldus SM-1; identical to SEQ ID NO: 31123

SEQ ID NO: 31423 - protein, 212 aa, Acidithiobacillus caldus SM-1
MTTAAAEPDLSSLLIGLLKGVQYREQDERQWAALLNLQARVRDYVAVLNLELVLDEAEGYAFLKSRPEPAEDDPSPRLPRLVARRPLSFPVSLLLALLRKKLAEFDAGGGDTRLVLSRDEIVELVRVFLPDGPNEAKLIDQIETTINKVVELGFLHKLKPASGSLAGQANFEVRRILKAFVDAQWLAELDARLAAYQSALSGAASSKEARDE

SEQ ID NO: 31424 - protein, 1130 aa, Acidithiobacillus caldus SM-1; identical to SEQ ID NO: 31125

SEQ ID NO: 31425 - protein, 397 aa, Acidithiobacillus caldus SM-1
MTWTGPKELKAQLVRLWERGELLRDTVTGQTRFPLRMSLRSPTSADITNRFDEVRQWAAELDATNAVRVEWQERKHRVQGAQKLPTCVWVETIEDALTWLGKRKDWERFSALISATRQTHPVLLPWLEKHPLQALALSEEWSRLLAVVTWLAEHPRPGIYLRQVDLPGIHSKFIETHRGVLTELLDLALPVAAVETSKSGLRQFPARYGFFEKPIRIRFRVLDPSIHVVPGSASPDITLDADSFSRLALDVQRVFITENETNFLAFPQVANAIVIFGAGYGWDALARSHWLKSSAMYYWGDIDTHGFGILDQLRGHFDHVVSFLMDRATLHAHAVFWGSEDKPLRVDLHRLTIEERALYDDLRNNRIRPGLRLEQEHIGFHWLAHRLHVPDSTCTSN

SEQ ID NO: 31426 - protein, 489 aa, Xanthomonas campestris pv. raphani 756C
MKHQARIAGYRHLRDQPAWKLLAADHAPELIGLLQTLLMDGERRLPSAVLHARLQRQLDALRGDELSRELPRTAQAYLAHWLAQGWLERRLPEGAAEEEYELSRAATQAIRFIAGLRESGSSATESRLSLVIQQLVQLAGQTEADPDARLAALRAERERIDAEIERVAAGRVGALDGKRALERTRDLIHLSDELAEDFHRVRDDFEQLNRQFRERIIDDEGARGDVLEQLFNGVDVIADSEAGRTFEAFWSLLNDTQQSSQLDQALDALLARGFARKLDRRERAFLRGLTGTLLERGGEVHTVMQHFARSLRGFVQSRGYLEQRRLNQLLKQAQGEALHLRESLHATTATGYTQTLSGSRLRSLSQWRLHDPRLTQVDGRVYAADAAEISLDSVGDLVAQSEIDVRSLRRDLHALLGERPRLTIGDALQQRPAVQGLGSVIGYLSLGTRHGLVIDGHMETVQWEGGDGTLRRARIPLVWFTREKRNELV

SEQ ID NO: 31427 - protein, 235 aa, Xanthomonas campestris pv. raphani 756C
MNWSEQAALDAHDADDADAHSSALRLPASDAASAAQGGALFLGDTGTLPFDARRALCQLLAGPSIDAQRHGALWPALLRNEPAVRQVLCELFLELVLDREGGVAFTRQADTAELESPTLLRSAPLTFIESVLLLFLRQQLAEADTRGERAVVDEAQLVEALSVYEKNVSTDRAGFTRRVMTAIGKMRENQLLSRLRGSEERYEVSPVLKLLFSAEDVQALVEAYRELREGEVAAD

SEQ ID NO: 31428 - protein, 1335 aa, Xanthomonas campestris pv. raphani 756C
MNSQSNLSPASPGASLFAETLAEQRAQQFRMRRLQVHNWGTFNGLTEVPIAEKGFLFVGRSGSGKSTLLDAMSALLTPPSIVDFNAAAREAERSGRDRSLVSYVRGAWADQQDSASGEIATQYLRKGATWTALVLEYRNAQGEAVSLVRLFWIAGSGNAAADVRRHYMVVPRAFDVASELEGFDLDLRKLKARLGEDVAHFDGFAGYAERFRHALGIGNDMALRLLHKTQSAKNLGDLNAFLRGFMLDEPRTFEAADRLVEDFAELDGAHHAVVTARRQVETLSPAREHHAALMALRRSVGELRELQLGVDSYREQQRLALLEARLQEVDSQDRGLAGEEGQRRESLDNHEQKLAGLEREQRAAGGEQIEELERERVRVERERDERLRRRAQIEQACRQLGTALAAGASGFAAQVAHAQGVLDGGKQHASALDEAIAERMGERRDDERRFAEIRAELDALKKAPSSMPAPMQVLRARLCDDTGIAESALPFVGELLQVREDQVAWRGAIERVLHGFAQSLLVDERHYAQVSEWVNRTHIGTRLVYFRVRRNDELHSRRVDPNALPGKLQLREHAFTEWLRNELTRRFDYACVDNAAALRNADRAITREGQVKHPGDRYEKDDRHAVNDRKRWLLGHDNRDKLKVFEREAQALAQRIASCDADVAALRKQREQDQEKQLAAHTLVERDWDEIDVGPKLQRLSDIDEQLQQLREGDSGLRALGQAIDTARTLRDQAKRTYEDVRLERAQLARERVRLEQQQAACAGRAGTAALTPTQMQGLQERLAALAPLSLDNLEAHFRVVERGLAEQLAESQGRDSRLSAQLLECFRRYCQQWPEDSGDFTVSLASADDFLARLDRLESDGLPRHEHRFFDLLQTQSKNNLLALQRHTAEAHKGIKQRMDEVNASLEQVPFNRDTILTIEVSDRRLAEVQEFQQQLRAVLSHQQTEDRALAEAQFATLRTLVARLGAQEPEARRWREQVLDVRLHVEFIGVELDAQSRAQVEIYRSGAGKSGGQRQKLATTCLAAALRYQLGGEDGELPRYCAVVLDEAFDKADNEFTALAMNIFENFGFQMVVATPLKSVMTLEPFIGGACFVEISGRHNSGVLLIEYDEQAQRLKLPERSRGEEVAAPPAEQGGAVALGDRAQRAPVIAVESGHAASVHLAESTAESAQGDAATDGQSRGSKRTRAAATASTAAPGPAPAGKRSTSAAATSATAAPATRTADASNGQRKQAARPATPPKPASTRTASSGKPAAKRTTTAKAAAVPKASKAVPAVAAKRTGKAPKRVSKPASAQKVAKPVSKSKPTAKPATAASATSRAASTRGSAPKARSKR

SEQ ID NO: 31429 - protein, 492 aa, Mycobacterium colombiense CECT 3035
MLDDDTTLSPADLLELNRGLQGSPTVRLLATLNLNLYATLMERQLSGGVVPETDLVVRLERDLAELDQAGEQSGLALIKSWASQGWLHRVADQRSGVERNLCYLTQEARRALDFLRGMRRQDTIATGGSINGIAARLKQVALRVGNDPERIRAGIAAEIAALQTELDALDHDAGPGEHSQDVDLTDAYDEAHAIALQMERLITDIGQYGVMIERATAALDEPIESNVEYRDRQRRMYADYEAAWDSQGRDSHRAFLRMINDPDQRAEFEADVAAVAEALPALDPALRKVMAGFFELVGHQIDEVERIQQRCAQRVKRFTAFGTLEQSRGVARQLNEAIGAARNLLKASLIDSRLDIELPLARHAFSSVGALSFRIGDLSNPKPAEVAEGEVDLTSFASLTTQVDAPAMSEMINTAISSGAPLSLPDAVAMLDSAYLGHVIVLWSWALKQPESAQGSESVTVRFQSLDGRDREMEVPHLMFTEPVSTLLGATA

SEQ ID NO: 31430 - protein, 235 aa, Mycobacterium colombiense CECT 3035
MTVEETVDYSGFSALPQVDQTARVPQQRRPRFDGDVSELPDRACWALQQLLTRRYISAEADRDVYTWVLEYRAQLSVRLSELDLLLRIVEGADVAFVEQARYESARGVKLLRREPLGTYDSILALHLAQMMRASGDQAVVISRDEMHGLFSGVLNDVDRDAVTFTARIDGAIARLTSLEILRKTRDDEDSYTVSPVINAVMTASVITELQQQFEILLRGGVPDERGHDDEEGDDD

SEQ ID NO: 31431 - protein, 1120 aa, Mycobacterium colombiense CECT 3035
MTEQFHLLRLQVINWGVFDGYHSIGFSEGGALIAGASGSGKSSLLDAISLGFLPFNRRNFNASGDNTAAGSSAGRRTVDKYVRGAWGQRSDAGTSKVMYLRGDGTAWSAIAVTYRSNTGRTVTGLVLKWLTGDSRSDSSSRFVLADGDRDIENVCNRWAAGRFDASVFKDDWRFSTKVESQYLAQLYATIGIRASDAAQQLLGKAKSLKSVGGLEQFVREFMLDEPSSLSRLPEALKQIDPLVDARELLAVAQRKRKILGDIEKIQQRYASESSDLGIIDLVDLPMVRAYTDHVRLAQCPAQIESLDATIDQLGNEYEDVTRQLNLAKAEGDSLHAQISGSSTSLGPLQSQVAAAEAQAEQVSRRRTAYESMLTTHGLDIPDTADEFWNLREELSTRATELLAKLDRGREASTDAEYAQKVARIARDDAARELKRVERVGSALPEFALTMREHICAAVGIDPGELPYIAELMDLRPEQSRWRVAVEKVLRGVGLRLLVPDSHYAAVLRFVNETNMGGRLQLHHVRARFVGAEVAEAEPNTLAGKLFVVDPTHACAAEAADVIAAAGDHICVDTPDVFARFRRAVTDTGLYKDSERLAIKDDRRPLKQADYIYQGDVAAKVDALTVDLANAEEAFRRARGVADQIAAERQQWRDRAAAFKAICDQFEQWTHVDTETADGHADRLREQFELLLADNPDIEALTARAEECWEQIQALMTRRGAIQTRRDDLDGRRTQLLELQERLAPAFVSEPLTDLLNRYAVDVPVALDLLNPEPHRDAVFTAIRREREQLRESRRRSYDELARILNTFDTAFPDAIPNDSDVFDERVHDYVALCRHIDERELPEAYERMMRLVTEQAPDAILTLHRVAEQEARRISEQIERVNTGLGAVEFNRGTRLTLRATSRSLTAVAELTEIVRAISRRIAEVGLGDKQAILDQYADILRLRNRLASTAPEDKAWTRDALDVRNRFTFDCAEWDVSTDELIRTHSNAGDNSGGEQEKLMAFCLAGALSFNLANPESADNKPVFAQLMLDEAFSKSDPQFAQQALQAFRKFGFQLVIVATVQNATTIQPYIDSVVMVSKREATGRNARPVATVSTKTITDFTALRHEMRTSAALVPAGV

SEQ ID NO: 31432 - protein, 489 aa, Stenotrophomonas maltophilia JV3
MKHRERISRYRHLREQPQWKLLAADHAPEIIGLLQGLLMDGERTLSSSVLNERLQRALDQLNGDELSRDLPRTAQAYIAHWLAQGWLERRLPEGADQEQYELSTAALQAIRFADGLEQARVAATESRLALVIEQLSQLAAQTESDPDARLSALRDERDRIDAEIARVGAGRVIALDGKRALERARQIIGLADELTEDFRRVRDDFEQLNRDFRERIIDDEGERGDVLSQLFEGVDVIGESDAGRSFQAFWRLLNDAEQSAQLDAALEAVLARGFARRLDRNERNFLRGFTSTMLERGGQVHDVLQNFARSLRGFVQSRGYLEQRRLNQLLKQAQSEALALRDEFPAQRGIGRDLQLTTSRLRSWSQWKLHDPRSAQVDGNVEYNDAAAISLESVGDLVASSEIDFRTLRRDLHDLLDAQPRLSIAQALSQREAPQGLGSVIGYLSLGTRFGNVVAGEQELAQWRGGDGQVRRARIPLVWFTQERRHELA

SEQ ID NO: 31433 - protein, 233 aa, Stenotrophomonas maltophilia JV3
MSWHEDPIEAPLADVAEDAYEAEPVATVAQPRRGNDVYYLGDTGRLPLDARRALCQLLIGPSIDQLRHAKLWPALIRSEAAIRSSLADLFLELVLDRDSGVAFTRQADTEDVDAPVLLRTSPLTFIDSVLLLYLRQQLAEADARGNRAVVADAEMAEALAIYEKNLSTDRAGFNRRVASAVQKMKDNHILTRLSGQEDRHEVSPALKLLFSAEDVSQLSAVYRQLRETPAAEA

SEQ ID NO: 31434 - protein, 1126 aa, Stenotrophomonas maltophilia JV3
MAISKHTPALFNEGLPDPRLQQFRMRRLQVHNWGTFNGLTEVPIAERGFLFVGRSGSGKSTLLDAMSALLTPPAIVDFNAAAREAERSGRDRNLVSYVRGAWADQQDSGTGEIATQYLRKGATWTALVLEYRAGDGRVVSLVRLLWISGNGTSAGDVRKHYMIAERPFDIAKDLGGFDLDLRKLKQKLSDLHHFDTFSGYAERFRDLLGIDNEMALRLLHKTQSAKNLGDLNVFLRDFMLDTPKTFDAAERLVSDFAELDGAHQAVVTARRQVETLLPARAYYNDLKEMHRQRGDDEALKLGVDSFRESRRQALIEARLREMDVRDRGLLGEEAQRRAALDNHTERLAELELQRRQQGGERIEELEREQGRAEAERDRRKAKRDQAQEAAQQLQAELPDDAHGFAELVERAQNELQDRQRASAALDDAISDRLGGKRDDERRFGEVRSELEAMQRTPSNIPAPMQKLRARLAEETGIAEAALPFVGELIQVRSEEQGWQGAIERVLGGFALSLLVDDKHYNDVAEWVNRTHLGMRFTYYRVRRNDDAFAREPSAKSLLHKLELREHVFESWLRRELGKRFDYECVDAKQLRNVDRGITREGQVKHPGDRFEKDDRSAVGDRRRWILGFNNHDKVGAFEREAQELAKRIASCETDIARLRGQRDRDNERRLACHELVSISWNEIDIAAPQQRLTDIEATLRDLREGNADLAKLAKQIDAVRADIEQSRRTYEDVRVERGQLVKERDRLDRARQQSRALVLPSLAQEQEAGLAERLQEQGPLSLETLEAHMRQVSNALNEQLSSSQQDLNRIENQLIGCFRRFIQQWPEESGDFTVSVASAEDFLARLERLERDGLPQHEERFFDLLQNQSKNNLLALQRHSAEARKSIGQRLDEVNASLEQVPFNRGTLLTIELSDRRLPEVGEFHLQLREVLSQQQTEQRELAESQFTVLRQLVNRLGSQEGEDKRWRELVLDVRMHVEFIGVELDAETRQQVEIYRSGAGKSGGQRQKLATTCLAAALRYQLGGADSQLPSYAAVVLDEAFDKADNEFTALAMNIFDNFGFQMVVATPLKSVMTLEPFIGGACFVEISGRHDSGVLLIEYDEEGKRLKLPERSRQQASEPEEAEA

SEQ ID NO: 31435 - protein, 484 aa, Thiocapsa marina 5811
MDFATLDTLRTHHPAWRLLRSDHAPLVASFLNRVFVQPNVRVMAAADLAEALEDELYALRERLGEGSFPKPALDYLNDWAGPEKGWLRKFYARDSDEPQFDLTPSTEKAIAWLDTLSERSFVGTESRLLTLFELLKQMSEGSEADPEKRIAELVKRRDEIDAEIARVLGGDVPLLDDTALKDRFQQFMQLARELLTDFREVEHNFRLLDRRVRERIALWEGAKGALLEEIMGERDAIADSDQGRSFRAFWDFLMSSRRQEELTELLDRVLALPPVAELKPDARTRRVHYDWLEAGEHTQRTVAQLSQQLRRFLDDQAWLENRRIMDILHGIEAKALALREHQPTGEVMRIAESAAAIELPMERPLYTPPLKPVIADLELQAGDADLDADALYAQVVVDRAQLARHIRHALQDRSQVTLRELTELQPLTQGLAELVAYLQLGSGAFKTTLDENAPEVIVWETRTGDGMAVQKAARLPRVIFVRER

SEQ ID NO: 31436 - protein, 216 aa, Thiocapsa marina 5811
MDDDQGQARDAPALAAGAELSALVIGLLKGVIYREGDERLWGTLVDLQARVRDYVSVLGLELVLDEAEGYAFLKSRAETAEDEAAPKLPRLVARRPLSFPVSLLLALLRKKLAEFDAGGAETRLVLSRDEIVELVRVFLPQSSNEARLIDQIETHINKVVELGFLRRLKTAGGSARGPDSYEVRRILKAFVDAQWLADFDARLAVYRAQVDPDKGA

SEQ ID NO: 31437 - protein, 1144 aa, Thiocapsa marina 5811
MQPLESLDLDFIADDRLSGFRLSRLEVFNWGTFNGRVWTLLLDGKNGLLTGDIGSGKSTLVDAVTTLLVPAQRIAYNKAAGADSKERTLRSYVLGHYKSERNEVTGAAKPVSLRDHNNYSVILGVFHNAGYDQTVTLAQVFWMKEAQGQPARFFVCAERDLAIATDFSRFGTDIAQLRKKLRGLGAEIEDAFPKYGAWFRRRLGIDSEQALELFHQTVSMKSVGNLTDFVRGHMLEPFAVEPRIKALIAHFDDLNRAHEAVLKAKRQVEMLTPLVADCERHAGLTREVEDLRGCRDGLRVYFAGLKLALLEKRLAHLQEDRERVDALVKRLEGRREEQGNQVYELKRAVAENGGDRLERLAAEIKKLEALRDARQNKARRYAELTAGLDESPAADETAFLAQRRRLAEMREGLQARDSDLQNAVTEHSVTLRQGQLERDALQAEIESLKRRRSNIDDQQIRIRAALCEALGLTEESMPFAGELLQVRDDERDWEGAAERLMRGFGLSLLVPDTAYKAVAEWVDGAQLRGRLVYFHVRARVRAQLHTGGRGDLPELHRDSLVRKIAVKPDSPFYDWLERELAHRFDVACCITQEQFRRETRAITRAGQIKDPTGRHEKDDRHRIDDRSRYVLGWTNAAKIETLEAKRRRLEAHLAEIAATTGKLLSERQALGDRLNALTRLEEFVDFNELDWASVATEVAALIDERQRLESASDLLKQLNERLGEAVQALAVIEGELEEARSKRAKIEQKQEDAEALQVQTRAILAPSGDAERPAAPAELTERLETMRSEALGEHQLTVESCDNREQDMRAWLQNRINNESGKINTLLNRIITAMVAYKNAFELETRELDANVEAAFEYRQQLDQLGRDDLPRFEERFKELLNVNTINEIANFNAQLARERETIKERIGRINESLTQIDYNPGRYIALESQISPDAEIRDFQSELRACTEGALTGSEDAQYSEAKFLQVKTIIERFRGREGQTDSDRRWTAKVTDVRNWFLFAASERWREDGTEHEHYSDSGGKSGGQKEKLAYTILAASLAYQFGLEWGAVRSRSFRFVVIDEAFGRGSDESAQYGLRLFQQLNLQLLIVTPLQKIHIIEPFVSAVGFVHNEGGRESKLRNLTIEEYREESRARKAEPSASVPA

SEQ ID NO: 31438 - protein, 421 aa, Thiocapsa marina 5811
MSWTTAADLKAQLNRLWERGELLRPLVTDDVASASGFPLRLRLKGPGSADLADRFEAVRAWIAELTTIPRLRIEWRAVNHRVLGPQRLPETLWVDRLDDALALIGRRGDAARFTRCLEMTRSRQPALLEWLGQRPLQAIALADDWERLLAVVDWLSRHPRPGIYIRQVDIPGIHSKFIEAHRGVLSELLDLVLPAEAVAADRVGVGRFAARYGFLDKPNRVRFRLLDDAVRLLPSPARADVTLDAESFARLAIPIRRVFITENEVNFLAFPDATASLVVFGSGYGWDALARAEWLGACTLHYWGDIDTHGFAILDQLRGRFGQVASFLMDRATLMAHETFWGEEPDQVMHDLPRLTASERALFDDLRDNRIRKGLRLEQERIGFGWVETALADALLENSGRAVEGIDSIAAPIRRRSSSRL

SEQ ID NO: 31439 - protein, 524 aa, Bifidobacterium animalis subsp. lactis BLC1; identical to SEQ ID NO: 30666

SEQ ID NO: 31440 - protein, 269 aa, Bifidobacterium animalis subsp. lactis BLC1; identical to SEQ ID NO: 30689

SEQ ID NO: 31441 - protein, 1165 aa, Bifidobacterium animalis subsp. lactis BLC1; identical to SEQ ID NO: 30668

SEQ ID NO: 31442 - protein, 406 aa, Bifidobacterium animalis subsp. lactis BLC1; identical to SEQ ID NO: 30669

SEQ ID NO: 31443 - protein, 479 aa, Ectothiorhodospira sp. PHS-1
MNHDDLQNLRRMHPAWRLLVADNAPMIISFLHGSFVAPNVRVLAATDLENRLEDFLFHLRGQLGEDAYPRAARAYLSDWSADERGWLRRYYPEHSDEPHYDLTPATEQAIQWLKSLEQPHFIGAESRLTLVFDLLQQILQGAESDPEARIRDLEARRDVIDREIQQIRAGHINLMDPTQLRERFLQMAGTARGLLADFRQVEENFRALDRQVREKVATWEGGKGEVLDEVFGEQDRITDSDQGRSFRAFWDLLMSPARQEALSEQLERVLALVEVAELEPDPRLRRIHYDWLAAGEYTQRMVARLSEQLRRYLDDQAWLENRRIMTLIRELEQHALALREHPPELTLSLDEPSPCIELPMERPLFSPPVRPHIRQQQLEAGESHATPDALFEQTWVDRTLLQGRIRQALQTRDQITLATLLDEHPLEHGLAELVAYLSLAAEDHRSVIDEAHPQTVHWQDARGILRRATLPQIIFTRAH

SEQ ID NO: 31444 - protein, 198 aa, Ectothiorhodospira sp. PHS-1
MTDIDTDSTFSAMLITLFKGVLYKDQQPRHWQALQDHQARVRDHVAVLGLELMLDDAEGHACLRQRPTQDDETELPRLVQRRQLSYPVSLLLALLRKKLVEHDAGGGDPRLILSREQMVEMLRVFLPPTANEARLVDRIQTDINKVVELGFLRRLRGQEDQYEVRRIIKTFIDAQWLAEFDQRLTEYRNHAGEADDGA

SEQ ID NO: 31445 - protein, 1121 aa, Ectothiorhodospira sp. PHS-1
MALELEFAASDERTGFRLQHLEVYNWGTFHNRVWSLRPEGDNALLTGDIGSGKSTLVDAITTLLVPAQRITYNKAAGAEAKERSLRSYVLGYYKSERSDAGLSSRAVGLRDHNSYSVILGHFYNEGFDQHVTLAQVFWIKDQQGQPARFFVVADGALRIADHFADFGSDLTRLRKRLRDTPGVELFDNFPPYSGAFRRRFGIENDQALELFNQTVSMKSVGNLTEFVRSHMLEAFPVEDRIQALITHFDDLNRAHESVLKAKAQIAHLEPLVARADTYAERCREAEALRACREALRPWFASLKAGLLDRRLGHLHKDLARLEHRIEQLHRQQREQRARRDELKQAIAENGGDRLARIKIELEQKREIRDQRRQRAERYRDLAQQLSLPDAADLAVFQDNFQALTQALEDAQRERDDLQNRITEAGVALHQQRTHHQELESELTSLRQRRSNIPAAMLGIRDALCQSLDLPVDDLPFVGELLQVHEQETDWEGAIERVLHNFGLSLLVPDTHYARVAEWVDRTHLRGRLVYFRVRETRRSQPQDLHPDSLVRKLSIRPDSVFYGWLEQELARRFDYACCAGMDQFRREQRAITRAGQIKAGGERHEKDDRHRLDDRTRFILGWSNEAKIAALEAQAQTLARQMQALGDRIGGWEQARKTCEARRDLIVELSHFRDFHDIDWRPLSTEMAALEAEYAQLARESDMLRTLETQLRELEQAMEDNDKALGEAQGDCSQTRLRQEQAQAQRDECATLLDATPQEARDAYFPRLETMRDEALGEHTLSVESCDNREREMREWLTRRIDNADRSAAGLRDRIIDAMRGYQNAWPLDSREVDVSIEAVGEYRAMLEALKSDDLPRFEARFRQLLQENAINEVAAFQSRLHGQRQTITERIESINRSLREIDYNPNRYITLLAETAADPEIREFQQNLRACTEGAVTGSQDEQYSEAKFLQVKAIIERFRGREGTTDLDRRWTRKVTDVRNWFVFSASERWREDDREHEHYTDSGGKSGGQKEKLAYTVLAASLAYQFGLEWGETRSRSFRFVVIDEAFGRGSDDSARYGLDLFRRLHLQLLIVTPLQKIHIIEPFVASVGFVHSVEGRESMVRNLTIEQYQAEKAARQA

SEQ ID NO: 31446 - protein, 418 aa, Ectothiorhodospira sp. PHS-1
MSNIRPRRRPGRHELDPPAELRAQLQKRWDSGQILAATLTGEALFPLPLRLRRPGSRELAEDFAGVSDWVRALRADSREQRGHGYEIRWERVNHRVHGANDLPAGVVVPSEADALQWLGKTREAQRFHALAEETLARFPALRDWLIRHPLTPLEQAGDWPRILAVLAWFQAHPRPGIYLRQMDLPGVDTKFVESRRKLLSELLDAVLPPDAVDTRHSGGRGFELRYGLMPKPPLIRFRMLDPGLYLHGLSDLSVPPTQFAALAPAVARVFITENEINGLAFPDTPGSLVIFGLGYGLERLADIPWLTEVEIHYWGDIDTHGFAILDRLRARLPQTRSLLMDRATLEAHRDLWGQEHPQQRFTGTLTRLTPPEQSLFEDLRENRLGECIRLEQERIGYGGLLKAISRPAKVNDRGDLPI

SEQ ID NO: 31447 - protein, 480 aa, Gordonia alkanivorans NBRC 16433
MDFHAFTGLWERHPAWRLLRAHHSPLILTFLGNYFVEGNRGASSANDLAAALDDLLYDLNTAAAAEDGQARFPKEPRAYLEDWAATEAGFLRRFYPPGDDEVHYEVTPAFEKAYSWVVSLQGRAFVGTESRLHTVVELLRQIVHGVESDPGVRLAELRRRRAEIDAEIDAVESGHIAVLDQTGVRDRYQQLSSTARELLSDFREVEDNFRLLDRAAREKIAAWDGPKGELLAELVGSRSEIASSDQGRSFQSFFEFLLSDSRQTELSALLDKVSSLDFVEVDHRIRGIHHDWSEAADRTQRTVRQISEQLRRFLDDQVWLENRRVFDLVRAVESTALELRGDTLDFGLDVDQPGIEIALPFERPLYQQPASATVESHIEHATEDLDAELLFTQTFVDQARLAANIRAILPERSSALLSDVVGMYPIEQGAAEIVGYLALDDDDVSIDIDASDETLLEYPDPNDPDTIRRARLPRVTVRRR

SEQ ID NO: 31448 - protein, 195 aa, Gordonia alkanivorans NBRC 16433
MTDERAVASTIIRLMQGVVYRESDADAWATLERSGAGVRDHFATIGVDVVVDDSEGYAYLRSRPEQEEQEPLPRLVRRRALTYNVSLLLVLLRKRLLEFEITGGEGRLVLSTDQIVEMLRLFQAESTNEARLVDQAESTIKKTVELGFLRQLRGHTDQWEVRRIIKAYIDAQTLSDFAGKLREYAGRPADDGGSR

SEQ ID NO: 31449 - protein, 1132 aa, Gordonia alkanivorans NBRC 16433
MTEGLFSSVELGGPAQGAGFRLQYVEVLNWGTFDRQVWRLTPGTETALLTGDIGSGKSTLVDAVTTLLMPAHKIAYNKAAGAEVKERTLRSYVEGHYKSERQESTGRSRAKGLRQNRNTYSVILGVFGNGGYDETVTLAQVFQQRDTVGQPYRFYVTATKQLTIATDFADFGSDLRDLRKRLRSGGAEVVDEFPKYSTSMRRLLGIRSEQALELLHQTVSMKSVGNLNEFVRGHMLEPSDASERVRDIISHFDDLTKAFDAVKRAREQLEALDPIVATSRKYDAALAERDELDLQRAAVRLFIAEHRSGLLAGEIVTYTAEGESLLRRQDEATARQRDLARERESLIEERARAGGDRVGELERLTAAARDDLQKRRHGRALFDATIADAGFDPVTSAEQFSALRGLIDDERSRLLATKRALDTTIADAIGHEKDAVRRADAIRDELDDLRNRTSNLPPDQVQLRDQLTTDLGLTHTDLPYAGELLDVAAEHGEWRGAAERVLRGFALSLLVPQQHYDSVAEWVNGRRLTFRGAGGRNVGARLVYERVPGRQIPLQRQPSDVPVLAECLEIKDGPFEDYLRAEVFKRADHRRTENIAEFRAATRAVTREGQVRSGGRHEKDDRHRVDDPRRWVLGWANERKIAALRDDLDEFERLQSAAATEITTMSEQRDVVQKRSEALARLEGFHSWTELDVDEARHRVEAHDAERARLESGSSRLQEITVALERNAEHAEALNATINELTGKLATTAAARHQAEQLRAGTDAFIAQHAEADLTTARASYDALAQRLDVMPTTADDCPAAESTLSSVLHQRIERLTRELGGHGQNLAQYMAEVLRRWPDLRADMDADVGSRADFVAFRERVATDDLPRFEAEFKDQLNKNAIQELAGFNNWLNRQAASIDERIARINEALGAVPYNPGRCIRLEREATTNQEVVQFRSDLRNLTNDSLAVDGDQYSEQRFLDVKRIIERFRGRDGHADSDKNWTRRVTDVRNWFVFSASERDVETDIEWEHYSDSDGKSGGQKEKLAYTILAASLAYQFGLEWGVQKSRDFRFAVIDEAFGRGSDVSTRYALDLFAKLGLQLLIVTPLQKVHVIEPYVKAIGFVDNPTGTFSRLQTMTIEEYRSRRDGQLR

SEQ ID NO: 31450 - protein, 398 aa, Gordonia alkanivorans NBRC 16433
MSGRWTSPDDIVARVRRRWIDGTLLRAYASGGPFDPIEVPLRGPTAPQIGDDLGAAREWVSTLDRGRRDDRHYTLLWRSIGGRQVGRNELPVRAVIDSFEQAWSLLGVASDVAQFDEVLRLSAGTPTVRAWVLRHPHRAVDLSSEFPRLIVAYEWLDAQRGSGRYLREITAPGVDTKFAERYRSVLASMLGVSSTAAGFLAGLGLRAKPEFVRLRPSSTLGLPERLTEISVRADELAQVTLRPRRVLVVENEITYLSVDVPEDGMVLWGKGFEVDRIGRLPWLTDVPVWYWGDIDTHGFAILDRLRTWLPQTESILMDRETLFAHRDRWVTEDRPATSALTRLTPAERALYTDLVEDSLGTRVRLEQERVAWEWVLARFSSTSLRCAERAGRASGRFR

SEQ ID NO: 31451 - protein, 506 aa, Gordonia alkanivorans NBRC 16433
MESSAFPAQREAGRPVVPSESVQVTLGDALEANRALQKSAAVKLFAANNSALYVTLMERHLDYGTKMSEVELTMRLERDLAELDLTDDQPTGLELVKLWARQGWLHRVTDTTDPDAPNLCHLTSEARSVLDFMRRQRREDSIATGGSITGIAAELRRVAGQVSNDPETIRLELEAQMSDLDAELADLEAGRRPPVDLRVAEDSARAIGYQMEQIISDIGQYGTMLDRITTALLDDPGDSDLAYRDRQRQLFDDYEALLQSSQSASYQAFSQMIQDPERRARLKVDIDTIIENFPGMDAGLRSVMDNFFGLVTQQMAEVGRTRQRCARRIRRFVASGTLEQSRGLARQLNDALATANDLLKTSLADRRLGYELPLAAPTLNSIGRLAFEIREHVPPAPALPAGGADADLAAFASMTGQVDTVELTETVNNAVAAGPVALTDVIEGLDEAYLAHVIVLWSWAQKQAAAGENVPMTTVRFRSLLGEDHAIEVPDLTFTEPIPTAEVDAE

SEQ ID NO: 31452 - protein, 280 aa, Gordonia alkanivorans NBRC 16433
MTNSSLPETEPSLAETDPSLPEVRAQRATKGPDLPDELAGFDDLPTVANRAASHAPSAPRFDGDVSEMPDRACWALQNLLARRYVSGDRQPQLWSWVSEYQDVLRIRLSELDLRLRLVDELQVAFVEQAGYDSRWGRRILKRETVHTYDAILALHLAKYIRAARDEDALITREEIHELFAGVTNTIDRDLALFDKRIERAIDKMEELEFLRKQRDDADTFTVSPVISAVMTASVITDLQRQFEQFIGSGDTGEEPPEGAAADATDLDAEDAYSDDEGDDW

SEQ ID NO: 31453 - protein, 1114 aa, Gordonia alkanivorans NBRC 16433
MSGQVDQYHLSRLQLINWGVFDGYHSIPFSSNGSLITGSSGSGKSSLLDAISLAFLPDHRRNFNASGDATAAGSSSGKRTVGKYVRGAWGERRDGTNAHREIMYLRGTGPAWAAIAVTYTSTSGTAITGLVLKWLAAGKMTDAHSSYFIYDGDADIVDACNEWAAANYNSAKFRDRGWRGGPGEGKYLSTLYSLIGIRGSDAAQQLLGKAKSLKSVGGLAQFVREFMLDAPTSIVGITDALEQIDPLVEARELLDVARRKRTILGNIEEVHERYAAESATFSVLDTIDSTTIRSYVNNLRIRNAQPEVADLDDQITRMDSDLAALTTQHDQLRQDHSLLLARIATSTGDLAPLREQLGGAQKLSTEVTARRNSYEDKVSALGFSPPTNAEGFWSLREELIEEATKIDGQLEAGRAHYAEALAREVAARSRRDTAQEELGRVEQAGSALPRTEHEMRRVIAHALQIDESELKYVAELVELDPDEERWRLSVEKVLRNAGLRLLVPDKHFRSALRFVNSHDMRGRIQLHQAETRPMPDVEPGTLASKLRPVDPGHPCAAEAMTILARLGNHMCVDNPGEFSQYAKAVTDQGLRKDSAKLAVKDDRQQLRRSQYIFVGDVESKITALRDELAYEERAFEDAREDCAELDRERSAKERRRDAYRRVCEQFTQWNEIDVDSVDDRVDQLTDQYDLLMEEHPDVEALQRKAEDLWEQVRNAISQAALVKDKIARQDERRTQLLDLIDRLKPEDVPAQAEKTLDGFREDLSATLDVLNPEPYRQEIVKAAGRERDRMRSDARRSRDELARILDTYDEEFPDAIPNDSDDFDERIHDYVAVCRRIDERELPSAYERMRRLITEQAPGAILGLHMAADAEERRIVEQIERVNTGLGAVAFNRGTRLRLVPGRKKLAAVEELTEKARQISTRATAVSFGDEQAILEQYSDILLLRERLAGNTPEDRQWTRDALDVRNRFDFYCEEHDAESGETIRTYSNAGDNSGGEQEKLMAFCLAGALSFNLASPHGNDNRPIFAQLMLDEAFSKSDPQFAQQALSAFRKFGFQLIIVATVQNTSTIQPYVDNVVMVSKVEAGSDLRPIATATSTTIKAFSELRRSGSQLSV

SEQ ID NO: 31454 - protein, 474 aa, Erysipelotrichaceae bacterium 2_2_44A; identical to SEQ ID NO: 31145

SEQ ID NO: 31455 - protein, 222 aa, Erysipelotrichaceae bacterium 2_2_44A
MKVEQLDLKDREEFGRIVNILLAENCIYQYAKIRQFEKKERNADYVFIHDHWDCFEEYLRYAGWLLCRERSSYMGMIYLVNEREDCSCRYRLTKLETQLLLILRNYYEEKMLELDASLTIRISVNELLQLLVDVHAMVSVRPSMQYIHAALQSLQRLNILQKYTQGDEELIWVLPYITCVLTPKRVEEILRKLRNEEGEEDDEAEENAAGQLAVLREDDPEL

SEQ ID NO: 31456 - protein, 1093 aa, Erysipelotrichaceae bacterium 2_2_44A
MLLVNWLYYEKTILSFEDIVFLSGKTGEGKSALIDAMQLVILGRTDNSIFNKSANDKTTRDLMGYLKGKYKDGTFKRDKGMFSSHLCMEFEDEQHRIYCFGIVFDVNGPTRGDMEHCYYMMNQPIPEHCFTDEGTVFNIRRMKKLLASFQDRSCRSFTTHMDYKNYFRQRMLIKDQRFFDVFKMAVAYTPMMNISEFIVKNICQEEEDLNLEEMQEEIQDYRQMKEQLETVQQKKAQLSLIHEQYTDICGELERVANLRVEQKAAVYHGMLVEHDEAAAQYEVYTRNYQKLTKESRETEEQRALLEQNMEALRDARRDNAADILERKIQAHLEQRNTLQRDTTAVQQQLVTKGEFLKEQIEQLEEIEDYDGLQLEDFDLSAIKLSIQRSVHAAQRLAAFDLDAYMDIQRQMRDIENTLSTVRQTMQNSLQTCREEQEVLAANRRALEAGKKTYPKKLLVLKQELEERLYQQVGKPVEVCILADLFSIQEEAWTNAIEGYIHNQKLNLVVEAEYFMDAYRIYRSIKEEKKIHTYSIVDIAKAKPGKRPDAKTLYDCVQVEREDVRPYVEYLLGRVVCCEAEETLRSYPVSITSDCMLYSGYAVSHMNPELYKVPFIGADSIEKQLQELIIRQQKLTSTCRKLETVTRTLQAVQLQTVISDDFIRQLEDGLCKAKEVEQLEQKIKELRAAQTPESLQELLLLDQKLDEAKKKKNELYMLQVEQESRRRQLEEDMKLCNARIQELQQQVKEAKKPEQGIPDTIGAITTADGIRRKQKQLEEALRELNSRVEISKQELITKKTHYNDTFRIALNPNFLCDDYEREYEKHSDNIVEDYIDKCRLAQQKAYECFQNNFFSALNSKIENVRMQIDRLNRSIRRHKFGRSSYEFVCTCNEDYREYYNLITNKELNGHNLLNTKVYEENEELIHELFNKISSLSSMQDPKKYQELQKEVQLLSRFTTYLKFDILENGNSLRATIGSSSGGETQTPFYVAVLVSLFSVYDAGNDGLQLAIFDEAFDKMDNERIEECIYLLKSLGFQAIIVTPTDKISNLSKVADATLIATTDEKNGQRVSTVQRWSQKENIAIPDSEMKQEEV

SEQ ID NO: 31457 - protein, 487 aa, Dorea formicigenerans 4_6_53AFAA
MNLISRIPKDFYKVFGSKYMEFYMQFLVAVYEESSQSYSLLGLTEGECQAIMNEQLARMTLDWSEERFDEEGELLTRSNMAMISLRHFEDWGWLRRDYDETLNSYVVSFPEYSQLYVELFRNLYSDEDSKGRESVLAVYSHLYTYSSDREKNNDILKSALHTSRSLLQMLANMQEGMRGYFDELSSQRSFLGIQEVLVKEINNSDSQKYAILTTTDSFYRYKEAVKELIEKNLGENETRREGFVEKLMDIQVQLAREEQEKSEERNVQNKLSIQRYRLERAVKLCDEANEMLYRISREFDAIERRYNMLIEQKTVFASRAAARIRYILMEGAVEEDQTIAFVNLLTQSEKRDEILDKLSQKMKLTEPYRVMNEKSLYQRRDRKKEAFVPQAVTEVTEQADSEEMNEYVLKPLYTQKEIREFRKQNEQDGNFIVTKDTVKSMEDLEKLFLVWQDATEVAEGTEEIEVGEELENEIGLRFSKLVIKKSQ

SEQ ID NO: 31458 - protein, 214 aa, Dorea formicigenerans 4_6_53AFAA
MVNYMEQLSVTETENLKKTISALFRQTCILQVKYDPVTLTPRDNLHYEICVRHRKFIEDYLSVLGCELVHDPQEHIFRLTGEGVAVERLNVTATKIILLIKIIYRDKILGEGLNATVTNLAEIREYGKNTNLINEKLTMAEWKDALYVMSKHQIIEVPGAIQNVEDQTKIYIYSTINLYCSGVDIQALIKEYVDEEGGAEVEAGEEDIYKNADE

SEQ ID NO: 31459 - protein, 1123 aa, Dorea formicigenerans 4_6_53AFAA
MQKLKQAKKIFTRMLMNNWGGVSHKIMEFHEYVNLFSGKSGSGKSTVMDAIQVVLYGSISATFLNKAADDAKNRRSVLSYLRGAQKDGSYNRDGQDFCSQIVLEIFDTGTKVSTCIGVAFEVGKNDTDIRKYTFFSHSGKIPEDEYLTEKGVPYTIAGLRKLVEKRVDSSDNRGRGDVNRLYPSKEAYLKTVYDVIFGYVEPGRMMTMEKSAIALRMTNGTGQFIRDYMFPKSKEDTVSTISDQLGAYREIKERVEDLENRIHLLDEISRQNLALQTTRADKIHVEQVLKYIDIESFKTKIEARSQDLMDINEKIRAREKQQNENNEKKTQLTNALVEVEAELKSSDYGQKEKELKSLKETIKLLARNSEQWREVVKGLARWEEDEEISAYVSNPALQRIDEIKSGNVSKEAIEKLKKQLSDALESINEEVDEIGTRISQNRKDLKEKKEMVEDLKNDRKPYRKELKQARQELQNRLSTQYGRTIHVNIFADLFDITDEKWKNAIEGRMGRVKHSLVTAPEYALDAAKVFRKLQYLGGIDEVDLLDTAAIVKSEPKVHDNSIYEAVHAEEPYVDQCLRRYLGRIAKCETEEELRASGNGVTADCYSYNNYIFRHLKKNDYEKYACIGTKVSKAKLHEMEDEVLKLSEEVLQDQQMQQSLKAAQGFERLNQSTDQILHLAGAGEELQAFYEKQDQLEKELRELREGSRTAELNQQKTELEVKIQEIEKISEQLQKEILGYAKTQGQAEQDIVNFQNRMDFLMQGFVLNEELQTEVQEALKIQSEQTYRRKKSKESEELMKQEEEVRDLLTRARNQFNQAYPSYGLTGVEHENVSYDRILNQCRQDFEPKYKDEFQKQYDLIYHTLRENVIATIHGEIKAAYRHRKEINRMLAKIKFSDSIYQIDILPAENENGQFYEMLMAPELDSKVLDDDGFDGQITLGEDTFYQKYEQQILRLTEKFMPPKDEDAKSLSQHRQQMEQYVDYRNYLTFSMYERVEDEDGNVKKNAVDDMAGRDSGGEGQNPKYVALLAGFAMLYMQQTNRDSKIRLVLLDEAFSKMDKERSEVCLHYARELELQLIVCVPDERLQSLIRNVDSVYGFRRYQNQVSMMHIDKGEYLDMIEGKI

SEQ ID NO: 31460 - protein, 489 aa, Xanthomonas axonopodis pv. citrumelo F1
MKHQALIAGYRQLREQPVWKLLAADHAPELIGLLQTVLMDGERRLPSAVLHERLQRQLDALRADELSRELPRTAQAYLAHWLAQGWLERRLPEGAAEEEYELSRAATQAIRFIAGLRESSSSATESRLSLVIQQLVQLAGQTEADPELRLAALRDERARIDAEIERVASGRVAALDGKRALERARDLIHLSDELAEDFHRVRDDFEQLNRQFRERIIDDEGARGDVLEQLFNGVDVIADSEAGRTFEAFWSLLNDTQQSSQLDQALDALLARGFARKLDRRERAFLRGLTGTLLERGGEVHTVMQHFARSLRGFVQSRGYLEQRRLNQLLKQAQGEALQLRDSLHATTATGYTQALSSSRLRSLSQWRLHDPRLTQVDGRVQAADAAEISLDSVGDLVAQSEIDVRSLRNDLHELLGQRPRLTIGDALQQRPAVQGLGSVIGYLSLGTRHGMVIEGQMETVQWEGSDGAVRRARIPLVWFTREKRNELV

SEQ ID NO: 31461 - protein, 233 aa, Xanthomonas axonopodis pv. citrumelo F1; identical to SEQ ID NO: 30425

SEQ ID NO: 31462 - protein, 1342 aa, Xanthomonas axonopodis pv. citrumelo F1
MNSQSNLSPAQPGASLFAETLAEQRAQQFRMRRLQVHNWGTFNGLTEVPIAEKGFLFVGRSGSGKSTLLDAMSALLTPPSIVDFNAAAREAERSGRDRSLVSYVRGAWADQQDSASGEIATQYLRKGATWSALVLEYANAHGEAVSLIRLFWIAGSGNAAADVRRHYMVAPRRFDVATELDGFDLDLRKLKARLGEDVAHFDGFAGYAERFRHALGIGNEMALRLLHKTQSAKNLGDLNAFLRGFMLDEPRTFEAADRLVEDFAELDGAHHAVVTARRQVETLTPAREHHAALMALRHSVGELRELQLGVDSYREQQRLALLEERLQELDNQDRGLAGEEGQRRESLDNHEQKLVGLEREQRAAGGEQIEELERERARVERERDERLRRRAQIEQACRQLGTALAAGASGFAAQIAHAQTVLDNGKHDASALDEAIAERMGARRDDERRFAEIRAELEALKRAPSSMPAPMQALRARLCEDTGIAEAALPFVGELVQVREDQTAWRGAIERVLHGFAQSLLVDERHYAQVSEWVNRTHIGTRLVYFRVRRNDELHSRRVDPGALPGKLQLREHAFTEWLRNELTRRFDYACVDNAAALRNADRAITREGQVKHPGDRYEKDDRHAVNDRKRWLLGHDNRDKLKVFEREAQALAQRIASCDADVAALRKQREQDQERQLAAHTLVERDWDEIDVGPKLQRLSDIDEQLVQLREGNSGLRVLGQAIETARTLRDQAKRTYEDVRLERAQLARERVRLEQQHAACAGRAGSATLTPTQLQGLRERLAALTPLSLDNLEAHFRVVERGLAEQLADSQGRDSRLSAQLLECFRKYCQQWPEGSGDFTVSLASADDFLARLDRLESDGLPRHEHRFFDLLQTQSKNNLLALQRYTAEAHKGIKQRMDEVNASLEQVPFNRDTVLTIEVGDRRLAEVQEFQQQLRAVLSHQQTEDRALAEAQFSTLRALVARLGAQEPEARRWREQVLDVRLHVEFIGVELDAQTRAQVEIYRSGAGKSGGQRQKLATTCLAAALRYQLGGEDGELPRYCAVVLDEAFDKADNEFTALAMNIFENFGFQMVVATPLKSVMTLEPFIGGACFVEISGRHNSGVLLIEYDEQAQRLKLPERSRGDEPAAADAADAAPSITALSEPAVVQGAASADGMAADGVPLHTASPAAEETSSAAPETQTGQRKPAVATANKQNKTAKNARTASSTRAAAQPRATQTKKPTLRTPAVANTPASGKRTAGASAVSSGARSNVGKTTPSSNTPGKPIAAANASNATSSKVAAASAPVKNTAAAKPRATAASTGQPARGAGKTSSSRAAAKPSRAKKRAAKANAPQARGKR

SEQ ID NO: 31463 - protein, 486 aa, Neisseria shayeganii 871
MSFHAQQAKFKRLFQESAAWRLLRADNAPYILAFVAELFAESSEVPYSRARVLLDSEIERSRDLGVWQTETAALSYLNLWIKNGWLREMDGLLSKTDAMETALRFAHGLDERSTGATASHLRIVQDAVRDFAVSVSRDQPARLAMLQQKQAETQAEIDRVKAGLWDALDENQQRERIREIHQLSMQLTGDFRYFEDEIRRLDKTLRVQMMGHEATRGEVLQQLMAQEDLLAQTEAGSAFNGFFELLGDVNRATEFRAQLRTVLESGAVQYLSHKQQHDLQRLVPTLVTESERVFRIRRRTEQELRSYIESGAAQEEGVIRQLIGRLEQSAMQLLEDGVDLNTATGLSLPTGALYFASPERLRLRHPDDDFQAADTQEHANSRQAGSAVLASLETVRTKQLAHEMRHILQQHGPLTLAGIAEYAPLRMGVEELVARFRVARAVGAAELPDRESLWVRDRHGQLIRARLPVLLLNAKLFPDNIDTLSL

SEQ ID NO: 31464 - protein, 229 aa, Neisseria shayeganii 871
MDADFHSAHPSAPAEAVLADNLPPSALSDEARRALVYLLRHGVILASEKARLFDTVCRYQAPIRAHLADVFLRLVLDDRQGVVFVAAAEAEAGDGEEGADEGGAVSLINRRTLTLYDTLLLLVLRKHYQERENAGEQKIIIDLERISASLSPFLPLTDHAALDKKRLLARIGKMLEHKLLQAVRGEDERYEITPLIRYVINAETLHRLLAEYRRLLQTQLGGTAAEENV

SEQ ID NO: 31465 - protein, 1120 aa, Neisseria shayeganii 871
MKAAPESVSYSPIRLAELSVCNWGSFHGLHTGTIHPDGTLITGDNGSGKSTFIDGLMALLLPAGRAAFNVAAAQGDRSDRSLISYMRGSFGSDHDGSATRTKSKREKAVITGLRALYRAEDGGETTLLALFWTAQAGNALADVKRLYVVARHNLSLKTVLDRFGSGNVRGLKQWLRGQQDVYDCDDNFANYQELYRRFLHLYNPNAPALLSRALGLKKIDDLTRLIRELVLEPADIRSDARSLVAEFADLESIYARLSDARAQVQHLHELPAMAERMRAYGAALAALQAQRSGLAVYFARAHTRLWEARLVDLMDGLKTLLAETGVLRQRQQDAEEDEKRRYRTFYDCGGARIEELKQEIARIRQLEEHMAAVAADYQQDCRLLGLPADLDAALFRSHQQEARRQTGQAEAAVGAQQDRFSQAAAALGQTQSTLAALEEEIRAVEARPDSNIPARQQQWRDELQQALGLAHGEAVFVGEMLDVRPEEHEWRGAIERALGGLRTTLLVPEDDYPRITRWLNSRHLSAHIRVQLAHTQQAAAPAFAPQGLMAKLLWREHPYRNWLQQHLAKRDLTAVASAAELDKTPFSITREGLQHWEHGRFEKKDHNRIDDRRHWYLGFSNRLQLAQLQEEAGVLQAQVRQQQQAVAREREALNRSGRVQQAWHNLQRYRWQDIDVPHQQARLQQCQADLRQLEAADGDLQAAKRQWEAAQAALKAVQQQLAELGRRQGRLEQEQENAEERIRSLRAVAKQDLDDTVAAQLAERTGTVSLADAAQQQAAEQALEREVVQAQQRQKSEENRAINIISSFKGREKWQPLTAEWGVGLDGLGDAIEHVELLEREGLPKLVEQFRERLNKHTTQSLTRLRNRLDNKYDEIRERIAKINRVLAQTEFRPGTYLKLGSRREKFTHVQLFEHKVKAVLGSGIHDEDPEHRFMLLKEVIDILAKASSRDSAYTLESLRLLDPRYQLAFFAEEIDHGDKRVRDVLNSSSGKSGGEKEAFAGMVVAASLAYVLTPDDHDSTVYRTVFLDEAFSNTAETVSRRVLRVFKELNIHVNLITPFKNLNLARESARSLLIAERDADSHESRLCEMTWEEIDAQQAEHLRRQLAQGETLGIEWEGA

SEQ ID NO: 31466 - protein, 395 aa, Neisseria shayeganii 871
MSAPHWGVLPETLAAELYRREWGSAAKRQRLLRGERPFPLSVNLKPPTSKQALQNPQHCQAFVAAWKQVLPQQVVWETRQLQHFGSIALPQRLVLADADSLLALIGEQGTWARWQTLIARVTEVTGCRDAVTAQVEALDRLPEHELAMLLRVWPQLQPGMGQGAYLRALPLAGAHSKFVEQHEPLLLPLLAACYGEAVSAQGLGAWLGCQAPPKDWLLVRPLDAATQAALGGWQVLRLPTEQLRRRPLPGVRVLIVENEQSCLSLPQLPDTVAVAGGGRNTAWLDAPWLADKQVAYWGDIDRHGLSILSRARQRLPTITALLMNEAALAHGRNFCTTDPSSGSLAEPEALNKAERRLWQQLHRSDPPLRLEQEYVTAEDLARELAAWISGSLKNA

SEQ ID NO: 31467 - protein, 484 aa, Rhodanobacter denitrificans
MTLDFATLDALRTRHPAWTLLRSDHAALVASFLHRTFVASNVRVMAAADLAEALEDELYALRQQLGDGSFPKPARDYLNDWAASDKSWLRKFYQPGTDEPQFDLTPGTEKAIAWLGQLAERSFVGTESRLLTLFELLKQMSEGTESDPAKRIAELHRKRDEIDAEIAQVIAGNVPLLDDAAVKDRFQQFMQLARELLTDFREVESNFRQLDRRVRERIALWEGSKGALLQEIMGERDAIGDSDQGRSFRAFWDFLMSSRRQEELTELLERVLSLSPVADLRPDARTRRVHYDWLEAGEHTQRTVALLSQQLRRFLDDQAWLENRRIMDILHGIESKALALRQAPPPGEVMAIAEPAASIDLAMERPLHAPAFKSVIADIALQEDDDDVDPSALYEQIVIDKARLVRHIRQTLQARGQITLRELIEGQALQQGLAELVAYLQLGSEAFKTVVDESVIEPIAWQAVARDGSALRRQARLPRILFVR

SEQ ID NO: 31468 - protein, 218 aa, Rhodanobacter denitrificans
MGDEQCLATDHADSVATTIQFDLSTLAITLLKGVVYREGDERLWGSLLNLQVRVRDYVGVLGLDLVLDEAEGYAFLKSRPAPADDDASPQLPRLVVRRPLSFPVSLLLALLRKKLAEFDAGGGNTRLVLTREEIVELVRVFLPDSSNEARLVDQIDAQITKVVELGFLRRLKPASGPVWEVRRILKAYVDAQWLAEFDARLAAYQAQLSGTTAMDDAK

SEQ ID NO: 31469 - protein, 1136 aa, Rhodanobacter denitrificans
MNEPLSPSLNFVGDDTLSGFRLKRLEVLNWGTFDKRVWTLQLDRRNGLLTGDIGSGKSTLVDAITTLLVPAQRIAYNKAAGADSKERTLRSYVLGHYKSERHETTGTAKPVSLRGNDSYSVILGVFHNAGYDQTVTLAQVFWMKEAQGQPARFFVGAERELSIAEHFAQFGSDMTQLRRKLRKAGAEIEDGFPKYGAWFRRRFGIESDQALELFHQTVSMKSVGNLTDFVRSHMLEPFEVASRIQALITHFDNLNRAHQAVLKAQHQVELLTPLVADGERHATMVVEVTALRACREALRPYFAGIKLGLLDKRITGLTSEWQRQDAQVRRLEAHCSGQRGEQRELERSIADNGGERIARLANDIRRKEAEQATKRGKSTQYEALVLDVGETLPDVEQDFLTLRKRFAALDERSREREATLQNELTEHAVSLRQGREEHAALRTEINSLKARRSNIPEQQVAMRSALCHALELAEEDMPFAGELLQVRDDERDWEGAAERLLRSFGLSLLVPNEHYIQVADWVDRTHLKGRLVYFRIRQAARGALPGLHTDSLARKLAVKSDSPFYDWLDREVAHRFDVACCLTQEQFRRETRAITRAGQIKAPGERHEKDDRHRLDDRSHYVLGWTNAAKIAALETKARVLESSLADVGAQIAGLQTEQDALKKRLATLSKLDLFVDFQEIDWQSTALEVARLMQEKQSLESGSDVLRQLTDQLNALTAALQVVEKELEDRKDRRSRTDQKKTDAQILREQAQTVLNESDAAAHAVHFARLEAMREGALGDHQLTVETCANRESDMRNWLQNSLDAENKKLERLRDKIIDAMRVYCTAFPLDTQEVDVAVEACGEYRTMLDKLKADDLPRFVASFKKLLNENTINEIANFNAQLARERETIKERIARINDSLTQIDYNPGRYIVLESQLSPDAEIRDFQTDLRACTEGAVIGSDDAQYSEAKFVQVKTIIDRFRGREGLSEQDRRWTSKVTDVRNWFLFAASERWREDDTEFDHYSDSGGKSGGQKEKLAYTILAASLAYQFGLEWGAVCSRSFRFVVIDEAFGRGSDESAHYGLRLFQQLNLQLLIVTPLQKIHIIEPFVAHVGFVHNEAGSSSKLRNLTIEEYRAQKVVHAMATAPLETERDAE

SEQ ID NO: 31470 - protein, 400 aa, Rhodanobacter denitrificans
MIWTTPGDLKAQLARLWDRGVLPRLLVTAEPGFPLRLVLKGPASSDLADRFEVVRAWAVELAATPHVRIEWREVRHRVQGAQRLPDQVWVDTMDDALALLGRRRDAAGLSRVVAMTHAAAPLLLPWLARRPLQAIELADSWPHLIAVVQWLVEHPRPGIYLRQVDVAGVHSKFIEAHRTVLSELFDLMLPAQAVALDRTGASAFAARYGFADKPARVRMRVLDEQVRWFPCAARPDITLDAGSFASLALPIQRVFITENETNFLAFPATRGAIVIFGAGYGWDALAGAAWLKRCAIHYWGDIDTHGFAILDQLRSRFDHVSSLLMDRTTLDAHEVHWGEEHEQVLHDLPRLSPDERALFDDLRDNRIRKNLRLEQERIGFHWLTEAILGLPGMPSREVER

SEQ ID NO: 31471 - protein, 463 aa, Clostridium sp. DL-VIII
MKEINIFEIVPENFFVPLSSQGKTLYIKIISLIYKLVQNGLSYGIDKDILVDEIEEYLGLINYDIENEEDEQLNNNREKANYLIRKLINYGWIYPEQTNDYKQIINFHDYAIVILEAFLKIVSKESLEYQGNIISIYSMLYSNEKAGVVIKQVFENTKGIISGLKNLNSNIKKYMDRLTKQKTPEEIMQEFFGNYTKEVIDKAYHRLKTSENVSKYRPQIIEKLNESLISSEFLSEAGEFYRGDEELGSLDEGIEKVKDIVHNIINAFNELDDIMHDIDSKNAKYIRAAVTRAKFLLNNSKDMTGIVKGILEYISNEYKELELGLSSDYLEEVTDLFTLYSYGYIDETSLYIANEGKKSFKPGKILSDTLSKEERQRKIDEFKKKQEKQYSPKKVNEIVDELLGDKKMVLASEIEINSVDDFIKIIYIRLYGNHVLAKYSINRKDIIASNNGFTFKNFEIWRK

SEQ ID NO: 31472 - protein, 201 aa, Clostridium sp. DL-VIII
MIYDSLSIKEKDEFKKVCNKLLSYCLICKQKEDTKKDYYFAEGHKDAINEYFEPLGFELEINKSIKAAQLINKFGNNKISLKLIDSITLLILRILYQEKMQELSLSQVVIVEIEEIQSRFMALGFKDRLMDKTLLKQAIRTLRKFNIIETLDRDITLSDARIIVYPTIQMIVRSENLTSIYEKLETYKRKGVKDDEEVNGD

SEQ ID NO: 31473 - protein, 1084 aa, Clostridium sp. DL-VIII
MMKRLTGIRLVNWHAFKDETIEIKNSTLLSGENGAGKSTILDAIQFVLTCSKNNFNKAANENSKRSLSGYVRFKTGREDNEFERNGDISAHVALEFYEESKKNYFIIGAVIDSASETSEKVLWYRAEKCRFEDVTFIVNNEPTDISNFRTYGKEVNMPFSSTRIVDAKKDFSHRLGRLNEKFFELLPKALAFKPISNVKEFVYTYILEEKSVNIDELRENIRTFKEFEDVLNEVKVKIKKLEEIKAKYSLYESISRTISLHEYIVLKAEEELLKEEIEQKIKEITALNVNIEALNNKNNIIYDEINDKTKIANNIRADLYSNSEYKALETMKNSLEQAEKDYRHEKENKDRFLKQFSEQKSYIKELSRLLLDTDTIGDFYNKMISLDENNIEEYKTTSINTENVIDKTKQNKEKYRAEKEYELKQKEDNRKDIEKQISELEKRNLQYPREVMLLKEEIIKETRKLGREIVPKILCELLEVIDPVWKNAVEGYLNTQRFYLIVDEEDFDSVLKIYERLSKAQGLHSVGIINTRGLEKYDKPLENSLAEVVVSKSLDAKRYINMILGNVIRCTHVSELKEHKTSITPTCMMYKNNVARAINPKTYKTPYIGEDAYKYQLEQAKDNLSILLSEINVLKEDINIVTNIIKTINKLRLENLREKCDVLKRIVDISNKVSILKEEILELEKNNSYMALQIKLNEVQEEIKSLNLSKKKIENELINKKGNLSSINNIIDDKRRILSIKKVQVEENKSKIGSLAKEAEERFIKETESKSFEVIKNNFNVSKEGNKTKLSKTEEDLKNLQGSYNITYDFGAEVGINGINTFLDELDNLVKSKVIEYEEQVKTSRKNAEEEFKEHFLSKIQENINTAKSEFKGLNKGLKDVKFGNEEYEFKIGKSKENKEYYDMIMDNENIGEGFTLFSTSYENKHKELLNELFDKLTFDNESNEAELIKLTDYRNYMSYDIEIKYNDNTTSLFSKVCREKSGGETQTPFYVAMAASFLQLYKGVSSSSESIGIILFDEAFDKMDDARIMSMMEFYDKFNSQLQLLIGAPPQKIEPITPYVNTVLLAIKADKFSIIEDMINEKL

SEQ ID NO: 31474 - protein, 393 aa, Clostridium sp. DL-VIII
MKNYKKLLLDKLIDSYENSVIYKGDALRDTQIYFKFNLKSIKEYFDELNYKYKEEIDVACNQLEIEKLIKVYKGKGYKSHIIEKIQLNLENIEAAYLFLNRKEKKQKEDEVSLLLESYKEREDVLGNFAKYITDKLKSNGSVKKYLDIENSSECKDILKGIDEVLKQKEEIFRRNFSVKVYGDSKRYEAIEGKIIKIIKDFSSDEFLNDYNILKNYTYVYFKGNMSLKLKESYINANDFLGGIAISSKDIENIKEIKVLGNKLVTIENLTSFNNYNGDGGVIYLGGYHNSVRQNLLIKIYSENPYINYYHSGDIDAGGFKILVHLIKKTKIPFKTLNMDSKTLLKNIDYAKPLTVNDVSEITRLLENKEYKEYSDVLLRMIKLDRKLEQEIIF

SEQ ID NO: 31475 - protein, 484 aa, Mycobacterium rhodesiae NBB3
MDNNAALPAADLLESNRDLQGSRAIRLLATTNLSLYATLMERHLSDGQLPETELVIRLERDLHDLNDLQSGLALIKTWAAQGWLHRIVDKRHDQNVCYLSQDARRALDFLRGMRRQDTIATGGSITGIASRLKQVALRVDNDPARIRKHIEAEIAALHEELDQLDAGQRPQPDVTDCYDEARAIALQMERLITDIGQYGTMIEQATAALDEPIDSNTEYRDRQRQMYTDYQAAWDSQGRDSHRAFLRMINDPDQRAEFEADVAAVAEALPALDPALRKVMAGFFELVGHQIDEVERIQQRCAQRVKRFTAFGTMEQSRGVARQLNDAIGAARALLKSSFTDSRLDIDVPLTRHAISSVGALSFKIGDLSNPKPAEHAASDVDLTSFAALTTQVDAPAMSDMLNRALRDGPVELPDAVAMLDTAYLGHVIVLWSWALTQPGTRTDEKDPVSTTVRFRSLDGRDREIAVPRLTFTEPIITLAGAAS

SEQ ID NO: 31476 - protein, 231 aa, Mycobacterium rhodesiae NBB3
MTTIDDADFAALSELPQVDQQTARPVGARRPRFDGDVSELPDRACWALQHLLTRRYISAEADADVYSWVVEYRKELAVRLSELDLILRIVDGTDIAFIEQARYESARGIKVLRREPLGTYDSILALHLAQMMRAAAGQSVLISREEMHGLFSGVLNDTDRDAVTFAARIDGAIARLTGLEILRKSRDDEDSYTISPVITAIMTASVITELQQQFEQLLNGGAPPEEEIDLD

SEQ ID NO: 31477 - protein, 1119 aa, Mycobacterium rhodesiae NBB3
MTEQFHLSRLQVINWGVFDGYHSIPFSSGGALIAGASGSGKSSLLDAISLGFLPFNRRNFNASGDNTAAGSSAGRRTVDKYVRGAWGQRSDGGTSRVMYLRGDGTAWSAVAVTYASNSGRTVTGLVLKWLTGESRNDSSSRFVLGDGDLDIEDVCNRWASGRFDAKVFTEHWRFSTKVESQYLAQLYATIGIRASDAAQQLLGKAKSLKSVGGLEQFVREFMLDEPDSLARLPEALKQIDPLVEARELLAVAQKKRKILGDIENIHHRYTSESSDLGIIDLVDAPMVRAFTDHVRLSQCPEQIATLDSTIDQLENEYEDVTRSLNLAKAEADSLNAQISGSSANLAPLQSQVTAAETEAEQVERRRSAYEDMLTAQDIEHPDTADEFWNLREDLLGQATELLAKVERNREASTDAEYAQKSARIARDDAAKELKRVEHVGSALPEFAIAMRDHICAAVGADATELPYIAELLDLKPDQTRWRTAVEKVLRGAGLRLLVPDQHWEKVLRFVNDTDMRGRLQLHHVRTKMLGAEPVEPEPNTLAGKLFAVDPSHPCAAEALDVIANAGDHICVDTPDVFARFRRAVTDTGLYKDSDRLAIKDDRGKVRQSEYLYQGDVTAKINALTLELATAEDAYQKARRVADDIAAQRQQWRDRATACKAICEQYPQWSQIDTETADGHAERLREQYELLLADNPDLDALNARADECWSQIQRFMTRRGAIQTRRDGLDERRTRLMELAERLSPAFVSEPLTELLNRYAAALPVSLELLDPEPHRDALFSSIKKDRENLRESRRRSYDELARILNTFDTSFPDAIPNDSEDFDERVHDYVALCKHIDERELPEAYERMMRLVTEQAPDAILTLHRVAEQEARRIAEQIDRVNTGLGSVEFNRGTRLTLRATPRQLPAVAELTEIVRSISRRIAEVGLGDKQAILDQYADILRLRNRLASTAPEDKAWTRDALDVRNRFTFDCAEWAGDELIRTHSNAGDNSGGEQEKLMAFCLAGALSFNLASPESADNTPVFAQLMLDEAFSKSDQQFAQQALSAFRKFGFQLVIVATVQNATTIQPYIDSVVMVSKTEATGRNVRPVATVATRTISEFTSIKQEMRKSATQKVPAGV

SEQ ID NO: 31478 - protein, 496 aa, Mycobacterium rhodesiae JS60
MDDDITLSAADLLEINRDIQGSPTIRLLATLNLGGYATLMERHLSEGVIGETELVVRLERDLDDLSRPGGEQSGLGLIKSWASQGWLHRVADQRSGVERNLCYLTQDARRALDFLRGLRRQDTIATGGSINGIAARLKQIALRVGNDPVRIRAGIRAEIDALQAELDALERGEDLGDRSADVDMTDMYDEAHAIALQMERLITDIGQYGTMIERATAALDEPIDSNVEYRDRQRQMYTDYQAAWDSQGRDSHRAFLRMINDPDQRAEFEADVLAVAHALPALDPALRKVMAGFFELVGQQIDEVERIQQRCAQRVKRFTAFGTLEQSRGVARQLGDAIGAARALLKSSLTDSRLDIELPLARHTISSVGALSFRIGDLTPPKPAQASEGELDLSSFAALTTQVDAPAMSEMINTAIDGGGRLSLPDALEMLSAQGHGAYLGHVIVLWSWALKQPDAAASAESVTVRFQSLDGRDREMEVPHLVFTEPISSLLGASA

SEQ ID NO: 31479 - protein, 234 aa, Mycobacterium rhodesiae JS60
MTDISDVDLTAFSALPQVDQTARTPHQRRPRFDGDVSELPDRACWALQQLLTRRYISAEADQDLYSWVLEYRAQLSVRLSELDLMLRIVDGTDIAFIEQARYESARGVKLLRREPLGTYDSILALHLAQMTRAAGGQAVLISRDEIHGLFSGVLNDVDRDTVTFTARIDAAIARLAGLEILRKTRDDEDSYTVSPVINAVMTASVIAELQQQFELLLSGGGAPEREDQENQLDG

SEQ ID NO: 31480 - protein, 1123 aa, Mycobacterium rhodesiae JS60
MAEQFHLSRLQVINWGVFDGYHDIPFSEGGALIAGASGSGKSSLLDAISLGFLPFNRRNFNASGDNTAAGSSAGRRTVDKYVRGAWGQRSDGGTSKVMYLRGEGTAWSAIAVSYTSNTGRTVTGLVLKWLTGESRSDSSSRFVLADGERDIEDVCNRWAAGRFDSSVFKEGEWRFSTKVESQYLAQLYATIGIRASDAAQQLLGKAKSLKSVGGLEQFVREFMLDEPSSLTRLPDALKQIDPLVEARELLAVAQRKRKILGDIEKIQQRYASESSDLGIIDLVDQPMVRAYTDHVRLAQCAPQIASLDTTIDQLGNEYEDVTRQLNLAKAEGDSLNAQISGSSANLGPLQSQVAGAEAQAEQVERRRAAYESMLNAQDIEVPDTADEFWNLREELSTQVTELLAKLDRGREASTDAEYAQKAARIARDDAAKELKRVEQVGSALPEFAITMREHICAAVGIDPGELPYIAELMDLRPDQSRWRVAVEKVLRGVGLRLLVPDEQYAAVLRFVNETNMGGRLQLHHVRASLVGADPVEADPNTLAGKLFLVDPAHPCAAEAADVIATAGDHICVDTPDVFARFRRAVTDAGLYKDSDRLAIKDDRRPLRQSDYIFQGEVAAKIDALTVDLANAEEAYQQARRAADEIAAKRQQWRDRSAACKAICDQFPQWNQVDSETADGHADRLREQYELLLADNPDIEALNARADEVWEDIQTLMTRRGAIQTRRDDLDARRTQLLDLQDRLAPPFVSEPLTELLNRYAADVPVSLEVLNPEPHREAVFNTIRREREQLRESRRRSYDELARILNTFDTAFPDAIPNDSEVFDERVHDYVALCRHIDERELPEAYERMMRLVTEQAPDAILTLHRVAEQEARRISEQIDRVNTGLGAVEFNNGTRLTLRATPRSLTAVAELTEIVRAISRRIAEVGLGDKQAILDQYADILRLRNRLASTAPEDKAWTRDALDVRNRFTFDCAEWDVRTEELIRTHSNAGDNSGGEQEKLMAFCLAGALSFNLANPESSDNKPVFAQLMLDEAFSKSDPQFAQQALQAFRKFGFQLVIVATVQNATTIQPYIDSVIMVSKTEATSRNARPVATVAAKTISDFTSLRAEMRSSAARERVPATV

SEQ ID NO: 31481 - protein, 497 aa, Saccharomonospora azurea NA-128
MATRGIEGAYQGALRAFQNPMLALLHQTHAPFVVTALAMVFTAERPSVAVADAHAEIDDALDQLRAAGYGDEDNQPLPSGNARDLCRQWVQAGWLVRQVSDDDVEVYRLSAYGVGALEVAGRVGGVRTRVSESRVRTLLDAIERLAQDADPDVMARISRLHEEIQQRQKELTRLERGGAVETVEDEKLLEAAENVLHLARELPADFARVAESIKDIQRDVVAELRHDVRPTGEVLREYLERGEQILDATPEGRAFAGALRLIGDPAQIHNLWSQLRTVLRHRFTDLLPERQRRELTDISRRVEQGVQEVLTAQRQASHVITTQVRDHDPMRDRQVDDLLRNVMSGLHTWVPGSRRGEAVEPLRRLPVADVGHLRQRASDLRPPQPPAPLREWDEVEDVASADTRAWGGPRYGALQEHLAAFAGDADDVDVAAAFRAAPEDLRRPVDLLGFLEIAHDAGMTETAEVALVDTVRPDGTRRRFALGGVVAANPADGNGEQ

SEQ ID NO: 31482 - protein, 218 aa, Saccharomonospora azurea NA-128
MSETESWSDTDAGFIDPVPMEDDPTELFPGDAGTLDADVRRVLVQLLRRKFLLAEKNPAQWRTLLENQQIIESRLHDLFVRLVVDHDRGIAYKQQVRSTELDVPILLRDEPYNRAETLVLVHLRTVFQRERGTGETSARVDIEELEQTVLTYFDPRDHNQARSQQEVRGAVQRLSTEGLLVEESAGRYRITPLVEVVLSTAKLAELQQWLRERNEATA

SEQ ID NO: 31483 - protein, 1113 aa, Saccharomonospora azurea NA-128
MSMIDTLFGLIPAASRGQQWVARDLQLVNWGGYDGYHRVRFAPGATLLSGGSGSGKSTLMDSYIALLMPHTTPFNGASNGGVVGRPRGKDQRNILSYARGKLDESRTDGETKSRVLRGDGRDTWSAIAMTWVDHTGAEFTALRAWYVPSSARALDDVVAVRATCDHHYSLRELEGPAAKRLARAEVESTGLTCFETDRDFTARLHHTLGIGAAGDGHKAVALLGRIQAGQQITTVDALYKTMVLEEPSTLATADAVVQQFDELSGTRERMIVARQQVKALTPIREHRRAIDDAVERLHLIEAIGSFTETSSPAALWCHERRLDLLRAAERDLAQRYRRAEQELAETNALVEATEAQCEGAADTLRASGGDRLDTALRERRSVEQRLGDVERTRQQLDRALGTLGVTVSTGAEFTALVETAHRSLADTEARRTAQARFADAMSEKRDADTELAALRAERKAVTARKGNIPTDLHTARATLAEAAGLTPDDLPFVGELIEVRTEFEPWREAFNLALGGFATRMLIDMGRLNAFREAINTVPTARRVHFQGVRTGRHDEVRLNAKTLPGRLDYRPSPFTAWLKSELASRFDFVCVDTPRLLPQYTKALTITGQTSQPGRGAHGGHGRANVLGFTNTRLLAELDQRIDAARHRLDEADAWVSRAEDELNSFEARRAAYRTVTELSWDQVDVESVKAERNRWDRVVEEVRAGNPKIDQLQRQVDELKNQVRELTQRVGERRKTVEELGAQWESTVDEVDRAQSALDAATETGTVVLPEHQEYLETLFADTSADAPATELAEFDAAVKRAAERLHADRQSATETIGRSRKALEDTFSVFLERWPNPNLGTDPDASYRDFDRVLTDLESSGLHELEAEWRDSLLKLSGNDLTGLDSELAAAVREIRDRIDPVNRILAELPFADDEHRLRIDPQESHSTVRARFRKELRDVRALIDRADTDADRERAYHRMAKVIDRIRRTAPDFADLVDVRNHVRISAEKRDLDGKHVAVYDHIGEKSGGESQELVAFIVGAALRYQLGDAGADRPRYAPIFLDEALIKADARLTGRAIGAWRGLGFQLIIGAPNDKHSAIEPHVDAEYLILKNSEGRSYAKPLVGVPDA

SEQ ID NO: 31484 - protein, 408 aa, Saccharomonospora azurea NA-128
MSTLVTPDDALTTVRRKVEQKWADAVCADFGVGDRVTFSVPLRPGVSTGKAVERLGHATWHEWHRLWREFASRLPAGVDLVRTAVSIRGVVGEFPATLRADLDGAVALLADTGVAPPTVDIGRARELASALRSADAALTPATLRAVSRLRPNDVDVLLGAVTWLRKHPDVSPWTLRQLPIPGMHTKWLDSHGTLLRDVSGRDVRAEVRPRPTVVHLTYVDPDHLASGRRRHDAWTTGDVHDIAYPPRVVLVVENRDSRLWFPPVKDTVVVEGGGKAAAALLGGVPWVRAAEHVVYWGDIDADGYAILDRFRATLAEPGPDGTPPKPVTSILMDATDLQRYADHGVDRDKDGRPLRPSPGVLRHLTDAETTAYDTIATAGPTPFRRIEQETIPLADAVTRLLRVVNGQG

SEQ ID NO: 31485 - protein, 486 aa, Mycobacterium abscessus 47J26
MNDLTVEELFAHNDDVQKSRAVRLLAAKNLAPYITLMERHLDRSAKVSEPQLVAKLDRDLSAVGLGEQSGLALIKSWASDGWLHRASDGTGPDAENVCSLTEDARSALAFVRRLRRADTVATGGSIAGIAAGLKRVATQLDGDPSRLRADIEAQIAELQTQLHAIDDGYRPEPDIVDLEDETRAIAYQMEQVITDIVRYGSMQNEITAGLIDAAEDSDSGFRDRARRMFADYDALFDSRERASYSAFTRTIQDPDQRAALRSDIACVADGLPDLDPGLREVMRNFFKLVSQQIAEVSRIEQRCAQRIRRFFAAGTTEQARGRARQLNDALAAGHALLKVSTADSPIDAELPMGRSAAAAIGALSFTIKDTAPPVLAQDAPSGPLDLSGFSALATQVDMAALADTVNSAIAGGPVSLPDMISHVEAPYLGDVIVLWSLALKQDNTADRESVKVKFRSLDGQDRVMEVPQLMFREPVLATLEEEGSTL

SEQ ID NO: 31486 - protein, 249 aa, Mycobacterium abscessus 47J26
MTTQASGTALGNINFDDLPGVEPDASAPRTAKGPRFDGDTSELPDKACWALQNLVARRYLSKDGQPELWASMIEHRKVLAARLSELDLRLRVFDDLEVAYAEPAPLENPSVYGARVLRREPLGTYASIVALHLAKIARTAHDEHVLVSRDDIHELFANVSHDIDRDEAMLRDRVDEAIKRLSKAEILQRTRDDEHSYTISPVINALMSAQMIEALQRQYEQLQRGGAAPEDADGADPTDEEDGETDDDE

SEQ ID NO: 31487 - protein, 1115 aa, Mycobacterium abscessus 47J26
MTTSDAATQQFWLSRLQVINWGVFDGYHSIEFSRRGTLITGSSGSGKSSLLDAISLAFLSSNRRNFNASSDTTAAGSSMGKRTVDKYVRGLWGELKNPGERPKQMFLRGKGGAWSAIAVTYSGTDGRVITGLVLKWLAPGSDSDSSSRYYLIDADADIRDLCNAWASKGYAGSVFEGAGWRGHKSERWYLEQLYAAVGIQGSSAAQQLLGKAKSLKSVGGLEQFVREYMLDEPESMAAISEALGQITPLVDARAALAIAQRQRQTLGDIEQIQQTYASDAAQLATVDVVDHHTVRDYVDQQRLALAGPEIDLLDTEITRLGGECDEIQSRQDILTGERDKLLGRIAAADSNLAPLKSELAHARARAEEVSRRRTAYDSALWDLGHEDDIESAEEFEAMRVESLRAVTRINAELEAGHDAYVMAAGALSTARDQLRAASAEFKRVEHLGTPVPPDEDRMRGEIAAALGLTAKDLPYVCELMDLRPGQERWRKSVEKVLRSTGLCLLVPDQHHRQVLRYVNENPMRGYLQMERVIPSGTPRRAEPGTLADCLRLTNPNHECASAAMNLVAGVGDYVLVDSPDEFSKHRRAVTDQGLRKDGDRRAVKDDRRELRASQYIYQGNAGDKRAALSDDVVEAQQAVSDAEKFIGEMDTKREELRSEVVRWSKLHSQYEYWSQIDTDSAEAAVARLQDQYDAMLEANPDLTGLQQQADSYLDEIKRLSERIGALRKQESEHDSRRTRLLDLLDNLNPREVGGHTRSGIEAYVPQLSSSLDVLEPDAYRLELWRQIEKDQSVLRESVTRSRNELNRILNAYDRDFPDSIPNDSENFDEKIHDYVALCRRIDERDLPAAYERMLRLITEQAPTAVLRLHQLAEEEAHRITDQIDRVNSGLGSVEFNRGTRLTLRAEPKALEAVGELNERARRISGRAVAVSMGDEKAIHDQYQDILQLRNLLAAETPEARQWTRDALDVRNRFVLYCEERDARTGEPIRTYSNAGANSGGEQEKLMAFCLAGALSFNLANPETGDNRPVFAQLMLDEAFSKSDPQFAQQALSAFRKFGFQLVIVATVQNTTTIQPYIDSVVMVSKPDGPGVRPVASTRTVPIGELGDVRKAVSAR

SEQ ID NO: 31488 - protein, 495 aa, Corynebacterium glutamicum ATCC 14067
MTVVSHALGFKRFRQESLELSLLRSDNFPVVLAVVAQYFPQGAIAKPASELYQLLSDDFRVLREEGFELPKSPSDYVSDWVKSRWFVRRPGSSQTGETVEPSEELLAVLDSVQRWDNPHRSISASRIESLTQALQTLALESDPSTAKRLAELERERDRIERQIEAVHAGEFEVLTTVQIGDRVADILDLAASIPADFARVRHELSDLNRKLRRQLLDPEDSRGDVLEEIFRGVDLIGDSDAGRSFNSFFDVLLDRERSSLIDRWIREVLGRDEAIDLDAKLRTGLYRIFRDMEDASFEVNGEMTGLARSLRHYVTTEEFAESRRMIQLLRDTRSAAAKAAEAGEVTSLNHMDTPLVRIGMDVRSIAGLKLKNPGEERVEDLPEPVEEQELDTEVLLEQIRASEIDFEELEEAVGLVLAEQSHATITEVLEHFPATQGLASIVGLLYLAMRDGVSTGHAQVVEWESESVLHRRRITGWQFIRGLNSEDLAESEMNK

SEQ ID NO: 31489 - protein, 212 aa, Corynebacterium glutamicum ATCC 14067
MNDQLWEGDTGTLTFGSRKALVQLLKGPMVNALQHVEVWRAITTDQDALNAVLNNLFLELVLDEDAGVAFTRPANGGQDVLVGNNKTEAMPKVLRTETLSHFDTLIILILRQELTMAPPGERVIVDREEIREQVLLYRVDEERDEAKLAKRFDAAFRRIVDYSLAKKTETPERFEVSPALRQIFDADTVAGVRAEYEKFNEAAHDGNEEEKK

SEQ ID NO: 31490 - protein, 1111 aa, Corynebacterium glutamicum ATCC 14067
MTSEQALDPIHPGQFRLSRIQLINWGTFHGTVDIPVTREGILVTGGSGSGKSTLIDAITAVLLPQGKLRFNSAAQANTPRNKGRSLVTYIRGAWRAQEDPLQDQIVSTYLRPRATYSLVGLTYSNGEGVEHTLVAIFYLKSGHNLTSDISSYYGVFPVDQDINALLDFLKEGIDKRQIRAAFKDATFSEQHSVFSGRFRSRLGISSEEALLLLHRAQSAKDLQSLDDLFRDYMLVEPDTFSIAKTAVEQFQDLEGAYEQVEDIKRQIHTLDPLVQLKNRREKAQQSKDHANALKKALPTVGNRIKKEEQETLVRQFTVEQTQAKSKVESAKIETDRAREMETLAHDNVKQIVGAQHGILSAKREGAVDKLRTISAARAGLDALVKGLGGTAPESAEELLELNNAARLTVDEYPAAREALESAGQRNVEDRTRAVDEFKAADQELSSLSKGSSNIEYRLLQVRENLCQDLGVSPRDMPFAGELIDPNNAEWEPVVQRILGGFAAEMLVPHGLLPRVRDWVNAKHLAALLKFNGVVTTGEYKTSRFPADSLIRKVDVVESPFRDWVNQELGKRFNIRCVRTPEELSALGPRDQGVTILGVRKLAQQTGDPTTRWEKDDRRKLGDRSTYRLGSTNDAKVETLRETVKAGKAVVQAADNRIAANRAELRELERQYQASQEILKVSWAQIDVESADAAIAELDRLLEELNNTPEATELSARHEAAKQTLARVSDLLVAAQSEETVASMNLKRAETELKRLESLPVTEVSEEIAREVEKLFLANTRRVHAANVDEQTIALREDLDKQIDANEAELRRCENQIVGILRSYIETWPANRADLQAEPEFVGEAINRLGELRSDRLAEFTAKFLGLMNEMSTRNLGQISRRLRDARREIEERIEPINASLAQSEFNEGRFLHIDIRDQSGPIVREFQQKLDAATSGDLGTSTEKQAFARYALIAEIISKLASHDSADARWRNTVLDTRRHVRFIGLERDSDGATVNTYVDSASLSGGQAQKLVFFCLAAALRYQLAEPGAHYPTYATVILDEAFDRADPAFTRQTMNVFHSFGFHMVLATPLKLIQTLGDYVGSTIVVSYTEKPNAQGAIQGNSSFSRIEK

SEQ ID NO: 31491 - protein, 368 aa, Corynebacterium glutamicum ATCC 14067
MPLLIDDALHRSKKYFHAHLSELLLGEFAGLSLPLHPPTAAKAAADIDATREFIRQWEGRDDVEYAVRNWSPVGLGKTEVPVRLTLNTIEELVVFAQVEDEWSSLHERFSQLSGFTAEVVAKHVSLWRSLSNEDLSKAVLVVEWFLENPNSGLLKRAVAVEGVHTKWLENHRVLIETLVADKRGEPGRADLGLGDAEARVRLRFHSVDAPAGLTDIEVPLSNLCELQEPQVILMVENLDSFLALLTWPGVTIAWGAGYRAVDIVRGPYFSNGRLLYWGDLDLDGFKILDGVRSHVPHTESVLMNPETVSRWRYLGVADREFKAESFDNLHDFESDALDLLITDGELRIEQERIRLDVAVEEIEKVIRG

SEQ ID NO: 31492 - protein, 462 aa, Clostridium citroniae WAL-17108
MILMNEIPDRFWSLFRSINRSTYIEALLKINEEYEYSNYFLSREMCIQLLSEYFSRKKYVLWQDETEDDWDTLEPPATRVLNWLLRNGWLRKVDDYANMTVNIVIPDYAAVMIEAFARLARDEEDETEIYIQNVYAILFSLKNDPRSSITLLNTALVNTKKLNKSLQDMLHNMDKFFGSLLEQKNYESLLKEHLDRYVEEIVNRKYHILKTSDNFYLYKTDIKRWITAMRQDEEWIGQMCARPAGFFVRKPSNVTEADVMEKLDQLERGFNDIEHRIANMDKEHTRYVRATVTRLNYLLNQEDNMKGLVVQLLNHLSEYDCPQEDVSSIGARMNLSQVSILSERSLYKKRRTKTDFKEQLKDEALSRELSMEEVLNLNKVKNRYSRKEIEGFIETHMENGIMAVDKDTVSNDEEFEKLILAYDYSTRLKSAYEVEDQEPEMIHNGRYTYPGFVFARRKNNAI

SEQ ID NO: 31493 - protein, 265 aa, Clostridium citroniae WAL-17108
MPFDIPYYDGLMQEEQAQVTGSIRLLLHQTFILERKFDRRTGRFQYNQEFRACNKHLEFIRNYFAVSGVEVQENSQLGLIYIQGENLIGDKLPKLATLYLLVLKLIYDEQMESVSTSVNIYTTLREIHEKLGSYRLFKKQPSPTDIRRTVTLLKKYQILEPLDLLEDLNSDSRMIIYPCINVVLMGDDARQLLASFDERQEDEGVQGKADLPLEEPDVTEESELEENELEENEPEENEPEENGPEENGPEEKNIEEKGASDNGID

SEQ ID NO: 31494 - protein, 1140 aa, Clostridium citroniae WAL-17108
MELTEINRTAQEHSPAPQEGTPGKSRFLALSRICLNNWHYISRRTLSFNENINFFTGHSGSGKSTVIDAMQILLYANTDGRGFFNKAAADDSDRSLIEYLRGMVNIGDNNEFSYLRNQNFSSTIVLELKRSDTGECQCVGIVFDVETATNDISRRFFWHKGPVWENEYRTGKRTMSIAEVESYLQSHYNKEECFATSHNERFRRILYDTYLGGLDPEKFPLLFKRAIPFRMNIKLEDFVKEYICMEMDIHIEDMQESVMQYGRMRKKIEDTCVEIRDLEEIRQAFASYEEKENQIKKCTYFVKKLEILDLQTQVRTLADKLNLAKTDLLRQEEARAGVETQIADLTEQSDDLLRRIASTGYEDLKQQAESLNELLERLGKSEARWQQTTQALKCWEEEDITSNQTLWDIEEFENRTIDEHTLCRLKESIGSMCTDTEKQRQEASSVIRDLKNKEKQTKDELEKLRSGSKAYPKYLENARTFLQRRLLEETGKGVDVHVLADLLEVKNAQWRNAVEGYLGSQKLSLVVAPGYARAALKIYGELDKKEYHSVAVLDTEKISGSQHAVLPNALSREVTVRESYIQPYMDLLLGKVIKCQTIEDLRECRIGITPDCMLYHSYRLQYINPDQYSKFAYIGKDSMRRRIRLLEQELESLGVQRKPHEEVVRECQRILTLEQLSLEPGEYMEWLKDIGSWNEKQREKKRILQKLEKLKVQNVDQLEQERKAVVSLCDGKKRERDELLNMIRDKENEISRYQNAAIALNVTLTDQERGWETNHDFESQLAGYLSSKDHPRYDRERESYAARCVKLTESRDTAFQNLMTVRTDYLRRYPNRNFPVNTKDNQAYDHLLKSLSCDHLDEYRKKAAEQARAAVEHFKNDFMYKIRSAIREAMLRKDELNRIISRLDFGKDKYQFVIGRNRGADGRYYDMFMDESLEVNPSELADSFDHQMDLFTAQHENRYGELMGELISIFIPPENANPQQMEEAKRNMDKYADYRTYLSFDMQQLIQNEDEVIKIRLSRMIKKNSGGEGQNPLYVALLASFAQAYRINLSPKMERNPTIRLVVLDEAFSKMDAEKVASCIELIRGLGFQAIISATNDKIQNYVENVDKTFVFANPNKKSISIQEFERERFPELIKDLEEE

SEQ ID NO: 31495 - protein, 472 aa, Clostridium sp. 7_3_54FAA
MRLMNEIPDRFWSLFRSVNRPVYIEALLKINEEYEYSNYFLSREACIRILGEHFARKKYVIWQDELEDELDTLEPPATRVLGWLLRAGWLRKVDDYASMTANIVIPDYAAVMLEAFRRLHSDEEDETQIYIQNIYAILFSLKNDRRAGLSLLGTALVNTKKLNKTLQDMLHNMDKFFAGLLQQKNYANLLKDHLEGYVEEIVRKKYHILKTSDNFYLYKTDIKHWIGEMRDDEQWLEALVRKSAADSYGLLSAGRTAEEEQKAAETRMMEDILEKLSQIERGFDDIEHRISNMDKEHSRYVRATVTRLNYLLNQEDNTKGLIIRLLNRLADDGEQENMLTETGKRMNLSQMNILSEASLYKRRKVKADFSKNLEPDEEDKELTTEEILNLNRVKNRYSRSDIENFITQRAVSGKMEADADTVSCDEEFEKLILAYDYSTRQKSRYLVEEEEAEMIDNGRYRYPKLVFVRRNE

SEQ ID NO: 31496 - protein, 229 aa, Clostridium sp. 7_3_54FAA; identical to SEQ ID NO: 31186

SEQ ID NO: 31497 - protein, 1123 aa, Clostridium sp. 7_3_54FAA
MIQQTKTDRERFVALSRICLNNWHYISRKTLSFSEEINFFTGHSGSGKSTVIDAMQIVLYANTDGRGFFNKAAADDSDRSLIEYLRGMVNIGENNEFAYLRNRNFSTTIVLELKQTDTEECQCVGIVFDVETASNEISRKFFWHKGPLWENNYRTEGRAMTIAEVEEELLRSYGKEECFYTSHNERFRRLLYDVYLGGLDQEKFPLLFKRAIPFRMNIKLEDFVKEYICMEQDIHIEDMQESVMQYGRMRQKIEDTCREIEELKELAAQYREVQAQEEQIRANTYFMNKMEIMNLRLQVSEISDRIGQAASDLDKQEVLENQVVSQAAQLKLRSDELLRQIASTGYDELKDKLLNLNELLEHLSKSADKWQRTAEGLKAWVDEDVTSNQTIWDIEEFEARTIGREALIRLKASVEEMREDVGRQKQEAGSILRELSKREKQACEELSQLKAGNKAYPKNLENARAYIKRRLLEECKRSVEVHVLSDLLDIRNDEWRNAVEGYLAGSKLSLVVAPAYAKTAMEIYGELDRREYWNVAVLDTEKASKAAPPIFENALSKEVEVREDYLRPFIDMLLGKVIKCRGIEELRKNRTGITPDCMLYRNYRLQYINPDHYTKWAYIGKASVKKRIRLLEEEIEQCRAQKKPQEELQKECIRLLGLEKLESSEDTYLEWLLDIRQVKEKTREKKRLEDKLLKLKEQNIDEWEKEREAVEALRFAKEEEIRETGRQIDRSRDELERYKKEAVWQQGELSDRERSFTKVQELEDRLDEFLSKRENPRLDKLGDYFKGRAAAAAEARDRAFEQLLGRRLEYLKRYPNRSFSPSAKDNAAYDKLLDTLSCDNLEHYREAAAEQAKTAVEHFKDDFMYKIRSAIREAVQRKDELNRIISSLNFGKDKYQFVIGRNRGADGRFYDMFMDEALEVNPSKLSQTFENQMNFFTMEHENQYGEQINELINIFIPPENASAEEMEEARRNMDKYADYRTYLSFDMQQIIKNDDGIMKLQLSKMIKKNSGGEGQNPLYVALLASFAQAYRIGLPPKLRRSPTIRLVVLDEAFSKMDAEKVASCIQLIRDLGFQAIISATNDKIQNYVENVNKTFVFANPNKKAISIREFEREEMPQLMKGLV

SEQ ID NO: 31498 - protein, 486 aa, Desulfobacter postgatei 2ac9
MNFTGLQAKYRRIFDDSKAWKLLRADNAPIILSFLASIFAEESEVPFSRARIDLDAELIRLGELGVWETDTSAGVYLNLWIKAGWLREMDDMLSKTEAAEIALRFCKSLDEKANVTTASHLRIVQEAVRELLVAISTNPEERLVLLEEKKAAIQYEIDQLHAGVIVELSAAEQAERIREIYQLASVLPGDFRRVEDEIRMLDQSLRVQIIEADTTRGDVLQSVMEQETVLENTDAGRAFEGFFQLLCEQNRSMEFRDQLRTVLNQPAADHLTPPQKHFLTQLMRELTRESDRVFKIRRRTEEGLRNYIESGWARENLAVDRLLSRLERTAVALRERSLNPRCLTRLSLPVGPVQINSPEKMRLRTPDEKLDTSGIREKKNSDKPSFEMLNILDTVRIRHVAEKARSALARHGPMTIGEIAAIHPLTAGLEELVAFLRVAKAVGAASMDRQEKIELRDKQGHFMRASIPCFLLSAELFPENPDNLNI

SEQ ID NO: 31499 - protein, 288 aa, Desulfobacter postgatei 2ac9
MIGKGTMKKSNPNELIRETPEPQSFLDRMRLENTAPDDSPDSIPPPGEMGGNFSSDAAQDPAADENGRQTHAAMPAEARRALVFLLRQGVILSARKAKLFEAVCRYETRIRQHLSDVYLTLVLDEKSGVAFIAGMQSEHCQLAGDAVEAREDDVNEDEQYSLISRRVLPLYDTLLLLVLRKYYQSRELCGEQKIIVDIEKIESDLTPFLPLTNSARTDRRKLNGALQKMVSSRILSTVRGSLERFEITPIIRYVVSAEFLESMLKEYERLALEAEPSTAAPDPGIEQP

SEQ ID NO: 31500 - protein, 1150 aa, Desulfobacter postgatei 2ac9
MHHGPDSDTGLLFQVKPRQTVEAPLFRAGQIRLAELSVFNWGAFNELHTVRIDPLGTLITGDNGSGKTTLIDGLMALLLPAGRTAFNVAAAQGDKTDRSLLSYMRGSYGSAHDGSGTRVKSMRETAVVSGLRALYRSDDGVMVTLAALFWTTQSTNALSDVKRMYVVCRRNMTLKEILDNFGQGGARTLKQWLKSDPDAICCDDNFSEYQSHYQKLLSMDNKNAPALLSRALGLKKIDDLTRLIRELVLEPSYVKTDARKVVEEFGDLVAIHDRLSDARAQASLLEPLPELDKTIKDACVTFEHLTEEKQGLPVYLGHIFLRLWQQKLLEIKELLHTLSLQITRVEDQKKEAATRAERWREKYLQLGGDKIENIKTELKHARADLDRVVQAAARYQGDAGKLGLSRTLEEKQFIENQSKAESAMAQIKTRTDEAMDQLGTISGKRDRYREEHLLLAEEIREMETRPDSNISVKFQQMRDELAKSLDMDRQELMFIGELIDIKDEERGWQGAVERALGGLRTTLAVPRDISSMVTRWLNTRHTGLHVRVQVLEPQETGTTQKAAAFKSDGYLKKLVWRTHPYREWLKKHLEKFDLSCVSDTAALDQTPFSMTRQGLVHLNPGRFEKKDQYKIDDRRQWCMGFSNKARLAVLKSDKQTLFLELNRMDKELERIKNDMEQVQAEKNLWEKLKNFGWHDIDAPSRRLKCQGLEQELEDLTRAGSDLKQAEARHQEAQIQVEQFQGELDTLHGEKGGIQKELETAQNSHDTCRDAAEQPLADSVKERLAGRVGAVTMDDLKRKSAIRQQNEGKLENELERQRNKKGNAEKKAIGIMSAFRTNEKWQALTVDWGSDIKSLPDYLEHLSQLEKEGLPHLVDQFVLRLNKHATQSLANISAKLASERDEILERIETINEVLRRTEFMAGSYLRLGAARERYPHVIDFENQLRQVLSQVTRNDHEVRYLKLAQVVEILDKASAPGTSGNLESQRLLDPRYQMSFYAEEIDAATREVRDVLRSSSGKSGGEKESFAGTIVAASLAYVLTPDGQDRPVYCTVFLDEAFSNTAEAVSRRVLRVFRELDVHINLITPYKNLNLARESARSLIIVEKDPEHHDSRFCEVTWEEIDRMNEERAQQLAAEAEALGIEIEPLGGEIP

SEQ ID NO: 31501 - protein, 400 aa, Desulfobacter postgatei 2ac9
MTPGWGMLPDHAVQLIKKREWDHWAHLKARLSGEKKFPIRLGLKPPDGKKAVADMAHYLAFVNAWKAFPFQEMVQWEPRNFQTLPGQTIPAALVISSIQDLAELMGKKGEARVGLWENNMRPILEVGSALSPPNPLYPVLVRRLDLIEKLSCADTRMLADLLPQLTPGMGKGFYLRALPVTGVDTKFIETHKLIIEELLDVLHGGAVTATGGLLPWLDCMPRPAGWLMIRPLDKSTRNALGGLSILKLPYMTLLTYELPAEHILVVENIEPGLALRPMEDTIAVIGGGKNVAWMDAVWLKEKHVGYWGDIDTWGLCFLSDARSKVKHLSALMMDKETLLAHESRMSLERQPAPSLPQYLTEDEIALFQDLNSGTFQSNRLEQERICADYIRSALTRWHIS

SEQ ID NO: 31502 - protein, 476 aa, Desulfotomaculum gibsoniae DSM 7213
MQMYGKEFFTQVPDNFFSIFSRNLKEIYVDLIFLIYQEYNKRIYTLSRDHVVDLFSEYLEGLGEQAWQVEEGEAAGETAKSAREQALQYLRRLVDTGWLNLEPEPDYTFRISIPDYTIVMLEAMNKIRTGYRVEFKGRILSIYQNLSGSEGFSYVALQQAYESTQELIDGLKSLNHSIKNYTEKLLEAKDVRAILSQIFDVYQTKILGEQYYRLKTSEHISKYRVGILKRTREWRSNRNELVRQAGIMVREKRVPDAATAENLIYEWIEYIDASLGQEMDRLLSEIDRRNARYARSAADRLRFKLHQGRGAGRHIYTVLAYLGQLAKESGEKTLAPGEITRSIALFPQVAVDNQSLRKPPVARQTHKPQPLQAASVSDEVRQKQLLQFGSRVAEEITVGQLNNYVDSILGERDICPIEQVPLNSRSQWVKLIYIILFSQSPVASYRLEGERSETIAIRDGAIEVPNLVIKRKGSKR

SEQ ID NO: 31503 - protein, 207 aa, Desulfotomaculum gibsoniae DSM 7213
MSWYQEFEDFSNKDKETFSKAANLLLSQNFLVYDREEDRLCYRFVERYLDIFSEYFAYSGWDLHHSKRFSVLQLHNRYGRNRYRFTLQETIVLFILRLLYDEKQQALRLTQEILISGEDIQGKYMALEIKNRLPSRDDLEKALRLFSSFSILDLKRGQWKDPDAVYLLYPTILLVVDVPSLERLADWINAGEAKGDKEDATDRDQAD

SEQ ID NO: 31504 - protein, 1113 aa, Desulfotomaculum gibsoniae DSM 7213
MLLTGIKLINWHYFTNEHIPIAGSALITGNNKAGKSTLIDALQVVLVSNMRKIMFNAAAFDEKTARDLKGYLRGRTGTEGRYTYLRGNDEDFSSYIVLEFTRSSSNEACLIGAVFDYYCDTGEEDHVFFKIENCRLREHLFLQDGYPRNREQFVRYMKSRGLNFRQYRNDLEGYRNDLRQLFGGIKESFFSLFVKGISFKPITNLRTFIYSYILDERPVDVDTMRDYAERYRQMETQLLNTGAEIMALEEECQAYEKAEHLRRREAAGRYMLHRGDYEQKVQELDEAQQQCQKSEERLQWLLTELGTLEAGYKKLTAEKEQLIEKINGIAIVRQENKLKQQIAALMEQIARLEQKQLNLLQQVKADLRDREKLVDILSLLQAPGQLTEALKEDERAWKMFLEAGFFPSDPDKHTRSWNESMKWLIVQAAELKKQWETVQKQAQELAEVIRNLGKNRVLNNASATMKLKKMLEEQLTPREGQSRVPVDILCEAIDIRDRRWHNAIEGYLSTQKFDLLVPPGYFDRALSIYERYKFTHGMENVGLVNTDKLVKEVKPPLAGSLAEEISADKEHIRAYANWLLGGLIKCSSETELKRHKRAITATCMVYQNYTARQIPRKRYEVPYIGAQAVKLQLAVKQEELRKCRQELTLLNEKIKKSDSVLSLNSDKHYLYQQWLTNFEQCKNLDQLEWELVQTKQELLHLDRSELELLEKAKEGKELELQQCEKEIAGLNTEKGQVQAKLELLEQQLRQLAGEKDAAYRKYLAYLDTLADELKETCEAKWERESQQRSPAELAHNYYISIQGLETKIKNNMDQVVNTRHDFNKRFDFLADVTAADNEKYAERLHFLKDIHLPEYSKKAGEARQKAEQALKEHFLSRLHEAIKLAYEEIDELNFALQDLKFGSYSYRFSLSPKPELREFYEMIEGYQLSSTELLFSTVFQELYGDSFNRLFEEITSDSRQDKLQELTDYRSYLDFDIIITDDRGNKTYFSKVSRTESGGGAQIPFYVAILASFYQVYHLYRNKEDTLRLVVFDEAFNRMDADNVEECMRFIRKLGFQVLIVEPTGKIQLVVPFVNTNIIVMREGFNSFVECVTCREIEQWVEHEQQQSMAASS

SEQ ID NO: 31505 - protein, 208 aa, Desulfotomaculum gibsoniae DSM 7213
MEWLKEYEVMAEKEKHFFKECTNTLLAQTYLVAKRKKDLPLYRFCERRFDLIKNYLLLSGWQLNHLKAQGVISVHNQLDNNRHKFVLSDTLFLFIIRLLYDEKVKELNLTQQVIINNRDIYEKYVALNIKQRLPAQDEYTRTLKLFQNHSLVELVSGGWTDYDATIVLYPSLIVAVSNRALDKITEWLQAKADDGGDGYEDFEQTEDD

SEQ ID NO: 31506 - protein, 1114 aa, Desulfotomaculum gibsoniae DSM 7213
MRILNKLKMIDWHYFQDETINFETSTLITGDNGAGKSTIIDALQVLFVANLKQIKFNSSAHDQNTKRTIKTYLRGKTGTEGSQEYLRNTDDFSSYLVLEIMHSVTGKSYLIGVVFDVSVLNNDEEHTFFKIDEEALRDNLFYVEEGLARNREQFFQYLKQQGIKYKQYKNNIGEYLSDLRQLCGGVRDSFSSIIQKGISFTPITNLRKFVYDYILDEEPVDVETMQDYFEKFKELESIIIETEKEIRALEEIEAQYVEIAKTDRNITIGYYMIKRSAWKQQEIKFNSLQEKVEKEKVALGQHEAKKKILKDEFNKLNTAIDSLTTRIAKHDITIKEQDLKKKIEQLNKDLEDIKDKRKNLLFNISVETKERSELLSKLQENGAPYEIIKVVLDGSTVWHYLTETGELEHFPKNYSLHNQQWKAGFNWLQDQQRQWQKQKKEYYEAKYDVEKKIKELKRNQILTSDHPSMKLKQLLKENLVAANGAEVPVHILCEVIDVKNETWKNAVEGYLHTQKFDLLVPTGYFDDALSCYERYKFTHQIERVGLVNTDKIIEEQRRPLFRSLAEEVTTNIDYVQAYVNRLLGALIKCESERELKKYKRSITATCMVYQNHTARQIARERYEVPYIGKEAIQVQLQQKIKELKNIEEDISKISEKINSVDRILKTVPDKRDRYASWFKMWSDISKQGQIEEELLNKKQELLHLDKTEVEKLEEEKGQLIEERDENLATKIEENSSSITSCRINIKDWLEESDVVQEAVNEKKRDYHTYLEQLSDELIKICDEKWLNEIRRKNEQTIFKNYDESTQGLNTKRAKLFTPFVRLRTEFNGHFGFGGDPTSDSNEEYQKRLSFLRESSLIEYKGKAEEARKKAQETFQEHFIAKLKENIERAQANFKRLDQAMKDMQFGTDCYRFRLHGKYDMLHYYRMITDPDLYLGHSLFSHVFKEKHGEVVEDLFLKIAEEQDQFSESLNFYTDYRSYLDFELEIIDEKGRETKFSKVALEKSGGETQVPFYVAILASFYHTYQMYRTTDTLRLVIFDEAFNRMDADRVEESIRFILKMGFQAIIVAPTGKIQLLAPHLPNTLIVMKDNFVSYVERFSRNDVINWIEEEGMGSG

SEQ ID NO: 31507 - protein, 419 aa, Desulfotomaculum gibsoniae DSM 7213
MVSPLQANILDTLVSKYETRKDYGRSEKNGRRTMLHVNKKNFPDYFHVSDSSFKREFNLDAEALADQCFIKIAWERFSEKEVIEKLILLEENLLQIYELLGRTPKQVKYERIDKIVEDFIVTAPKLLLSFYSDLKSRFKEFAELPSIINIDSEIETKDALYGLHELIKNKEEIPRRNWSIKLYQDSKKWEKLQGKIIKVVRDYLLTDESDFLEDNQLLGEYGILNNPQLILMSGNIIMNKNGKTIDFSLFKPDFGVNPRFFDDCDIEIIEADAIITVENLTSYYDYLYHKAKHQVNQIVLYLGGYHNYGRRLILNKLNDFLKRNHYSVPFYHWGDIDLHGFHIWKHLRNKTGIDFRPLFMDESTYINHLSDGKPIKETDLSQIKKLLEQEEYNIFHDVIHQMLKHKRTIEQEAIYLVKN

SEQ ID NO: 31508 - protein, 490 aa, Pseudoxanthomonas spadix BD-a59
MDHATLSTLRDRHPAWRLLASPHAPLVASFLHRVFVVPNVRVMNEADLAEALEDELFALREQLGPEAYPKGALDYLNDWAAPDKGWLRKFYKPGTDQAQFDLTPPTEKAIAWLLSLTERPFVGTESRLLTLFALLEQISAGTEADPIKRVADLRSKRDELDAEIARVLAGDVPLLDDTAVKDRFQQFQQLARELLADFREVEHNFRLLDRKVREKIALWEGAKGALLDQIMGERDAIGDSDQGRSFRGFWDFLMSSRRQEELSERLDQVLALPAVAALKPGPRTRRVHHDWLEAGEHTQRTVAQLSQQLRRFLDDRAFLENRRILDLLHGIESKALALREATPSGTVMQVDAMAAGIELPLERPLFTPSVKPRLADLALVAGEDDIDTARLFDQIVVDKARLRSAVQRALRRQPQITLRELLDAEPLQQGLAELVAYLELAHADAGSDVLDGLRALVDEAVIEPIRWQASNPAGQAVTRQARLPRVIFTR

SEQ ID NO: 31509 - protein, 234 aa, Pseudoxanthomonas spadix BD-a59
MNDVLHDNDSVETPPGALPAVPELSQLMVHLLKGVLYRDDDERLWASLLRLQARVREQAGVLLLDLVLDEAEGHAFLKSRPDPDASEGAPRLPRLVARRPLSYPVSLMLALLRKRMAEFDAGGGDTRLVLSRDEIAELMRVFLPDGTNEARLIDQVDATITRVVDLGFLRRLKPAGGSGQDRGHYEVRRILKAFVDAQWLAEFDARLEVYRTALSAGPAEATDKAVAGKAVADA

SEQ ID NO: 31510 - protein, 1133 aa, Pseudoxanthomonas spadix BD-a59
MLEAATLGLDFVADDSRVGFRLQRLEVLNWGTFDRRVWRYELDGRNGLLTGDIGSGKSTLVDALTTLLVPAHRVAYNKAAGADSRERSLRSYVLGHYKSERNEVTGSARPVALRDASSYSVILGVFRNEGYDQAVTLAQVFWLKDPQGVPARLFVAAERALTITDDFTVNGGDITALRKKLRGAGCELFDSFPPYGAWFRRRFGIEHEQALELFHQTVSMKSVGNLTDFVRSHMLEPLDSGQRIEALIGHFDDLDRAHQAVLKAKRQVGLLTPLVEDGGRHQALVTEIQGWRDARDQLRPYFARLKGELLDRRLDLLAHDAARLDAQIERLDAQRETERIEVGALERALRDNGGDRLEELAAEIRRLEQDKAQRQNKSDRFQELLARIDEVAPADEAGFLARQQSIAQRAEGLRERIAELDNQEREEDFAFRKGREAHTALSEEIESLQRRKSNIDAAQVRIRDALCAALAIAEDQLPFAGELIQVREDERAWEGAAERLLRGFGLALLVPDAHYKAVAEWVDRQHLGARLVYFHVRPRKAAQGAGLHPQSLVRKLLIKPDSPHEEWLEQELRQRFDVACCDSGEQFRRQARAITRAGQIKDPSGRHEKDDRSRIDDRSRYVLGWSNADKLRALRDQRERLEASLATLGQRIGQIRQARKELRGRLETLARLEEFTRFADIDWMSPARQIAALTEERERLEAASNTLQELGRQLKAAQDRLGEIESRRGEALGRRGEVKSKREAAQELRDQADAAWNAAPLDQTQVGRLDGWRAEALGEHQLSVESCDNREQDVRKWLQERIDAEDKRLARLSERIVNAMRGFKEEFKAETAEMDVSLAALPEYERMLTGLKGDDLPRFEARFKELLNVNTINEIANFNAQLARERETIRERVEVINQSLQAIDYNPGRYIKLVAQPSPDAEIRDFQQDLRACTEGAMTGSADEQYSEAKFLQVKAIIDRFRGREGLADADRRWTAKVTDVRNWFLFSASERWRADGAEHEHYSDSGGKSGGQKEKLAYTVLAASLAYQFGLEWGAVRSRSFRFVVIDEAFGRGSDESAQYGLRLFQQLNLQLLIVTPLQKIHIIEPFVASVGFVHNEGGRDSRLRCLSIEEYRAHKAEGVAQARADADRAAP

SEQ ID NO: 31511 - protein, 394 aa, Pseudoxanthomonas spadix BD-a59
MSWTTPADLRAQVQRLWDRGDLLRAAVTDAGPRPLRLNLKAPLASDLSDRFEAVRDWVRAIADTPQVRIEWREWNHRVQGVQRLPAAVWLDTQQDALAFIGKVGQAQRLEVLWQHTAATQPALLAWLFRRPIQALDLADRWERLLAVVAWLQAHPRPGVYLRQVDVPGVDSKFIEAHRGVLTELLDLALPAEAVERGAGGVAQFTRRFGFLDKPVRIRFRLLDPALPSLPGCEGLPDITLDAASFAALALPVERVFVTENQTNFLAFPPAAAAMVVFGAGYGWEALARAAWLHRCRLHYWGDIDTHGFAILDQLRGYFPHAASFLMDRQTLLAHRLHWGQEPDPARHDLSRLTPAEAAVHDDLRFDRHQPRLRLEQERVGFGWVNARLRGLFEP

SEQ ID NO: 31512 - protein, 460 aa, Clostridium clostridioforme 2_1_49FAA
MILMNEIPDRFWSLFRSVNRSTYIEALLKINEEYEYSNYFLSREVCIQLLSEYFSRKKYVIWQDETEDDWDELEPPATRVLNWLLRTGWLRKVDDYASMTVNIVLPDYAAVMIEAFSRLSNDDEDETQVYIQNVYAILFSLKNDPRSSVSLLNTALVNTKKLNKSLQDMLHNMDKFFGSLLEQKNYGTLLKEHLEGYVTEIVNKKYHILKTSDNFYLYKTDIKSWIAAMREDSSWINKMCAKSAASTRGQKKTPLTEYDIVEKLDQLEHGFDDIEHRISNMDKEHTRYVKATVTRLNYLLNQEDNMKGLVIKLLNHMSEYGCPEDELTAVSARMNLSQMTILSEKSLYKRRKTKADFTEQLKDEEESEELSMEEVLNLNKVRNRYSQKEIEAFIEGSMADGKMVVDEQTIHSDQDFEKLILAYDYSTRRTSPYKVEEEDSEMVHSGGYIYPRLVFVRRTK

SEQ ID NO: 31513 - protein, 249 aa, Clostridium clostridioforme 2_1_49FAA
MENMELENSVADIAPAVGYTGNSIPYYDNLMHSEQSEVTEIIRLLWRQTFILEHKYDKRTGRFQYNRDYRVCSKHLEFIKNYFAISGVELRENSQMGVMYIQGENVVGDKLPRLATLYLLVLKLIYDEQMESVSTSVNVYTSLREIHEKLGNYRLFKKQPALTDIRRAVTLLKKYQVIEPLDLLEDLKSESRMIIYPCVNVVLMGDDVRQLLSSFDEDTDDSGVQLKAELEEEDADDMTAEEGEPWNRK

SEQ ID NO: 31514 - protein, 1129 aa, Clostridium clostridioforme 2_1_49FAA
MEQKIANDRFLALSRICLNNWHYITKRTLSFNDEINFFTGHSGSGKSTVIDAMQIVLYANTDGRGFFNKAAADDSDRSLIEYLRGMVNIGDNNEFSYLRNQNFSSTIVLELKRSDTGQCHCVGIVFDVETATNEISRRFFWHKGPMWDNGYRGGKRTMSIVEIEDYLQANYNREEYFLTSHNERFRRILYDSYLGGLDSEKFPLLFKRAIPFRMNIKLEDFVKEYICMEQDIHIEDMQESVMQYGRMRKKIEDTCAEIQSLKQIEDRFQSYADKEQQLKKSSYFVQKLEILQLQSEVRTLAHKAKLAGEDLEKQIQARSSVDEQIGELTRQSDELLRRIASTGYEELKNQLKSLNELLEQLGKSEARWQQATDALKRWEEEDITSNQTLWDIEEFENRTIDLETLERLKKSMASMRSDTEKQHQEASSALRELKKQEKQTRDELEKLRSGSKAYPKYLENARSYIQRRLLEETGKSVDVHVLADLLDVKRDEWRSAVEGYLGNNKLNLVVAPKYARTALEIYGELDKKEYFNVAVLDTEKASQNQPQVQKGALSEEVTVRESYLRPYMDLLLGRVIKCDTIDELRECRIGITSGCMLYHTFRLQHINPDNYTKFAYIGKDSVRRRIRLLEQELAALDEKKKPLEETVREAHRILALPWLSAEPPEYMDWLKDINSYKAKEREKKKLIQKLELLKEQNVDQLERDRQAVITLCDGKKRERDSLNVLIRDKEREIEGYRNKSIDSQSVLTSKERELTQNPDYDNELTAYLSSRDTVRYDREKETYTVRCSKLSEAREAAFQELLTVRTSYIRTYPNRNFPVNARDNAVYDHLLSALKCDNLEEYKQKATEQAKSAVEHFRDDFMYKIRSAIREALIRKDELNRIISRLDFGKDKYQFIIGRNKGPDGRFYDMFMDDSLDINPADLNYSYENQMDLFTIEHEKQYGDLMNELISIFIPPENAAPDQMDEAWRNMDKYSDYRTYLSFDMQQLIQNQDEVIKIRLSKMIKKNSGGEGQNPLYVALLASFAQAYRINLPSKVERNPTIRLVVLDEAFSKMDGEKVASCIELIRGLGFQAIISATNDKIQNYVENVDKTFVFANPNKKSISIQEFERERFVELMQDEEDRNEFADT

SEQ ID NO: 31515 - protein, 392 aa, Clostridium clostridioforme 2_1_49FAA
MNAPLECIIRKCENSTVDWKEGMSGNRSVIFREQDFKETGKQDFMNQLMKLEKEGLLKVKWYQYGTEAEKVWYRLEQMETIYQRLGKTPKFKRVNALKEEVDRQLALIQSQWIRSYYQSFLQSLDKGDVPKALDTPKRELLFTCFKAIDCLREPVYKRIFSKKYLGNSKAFENHLQSKILSAARVYLDTVNDDMDDCQVLDQLLINGYAQELAVKGNLVIELEGNKINLSLFPCGFVFNNQTLRKASIPPEQSVTKVITVENKANYESMPYEEGTLIIYSHGYFSPDERAFLIHLERVLSSIRTSCGTTYLHTGDLDYGGVKIFQYIKKRIFPNLQPYLMDTQTHEQYKAYGEPIETSKLEKLQRTTEPLLQPLIDKICAEKQVIEQESFLF

SEQ ID NO: 31516 - protein, 486 aa, Rhodococcus opacus PD630
MRQDHAAWTLLRADSAPAILALLGRHFEHGTRRLPAPELFARLDSDLQTMRDEGLDFPRTGQAYCTEWVRSGYLLRRAAAGTREETLEPTEGAFAAMAFVASLTSQASSATESRLTTLSTQLQALARDSDPRAETRLAALLTERASIDEQVAAVESGVFPVLDGERAVERSAEILALASEVPADFARVRAELEELNRDLRARILDDDGDRGDTLGDVFRGVDLIGDSDAGRSFTAFYDMILDPARSSQIDEWIDAVLQRPFASQLTHDQKRRFRALLTEMETAGSEVHSTMTSLSRSLRHFVQSRHYEEHRRLQRSLRTAQQSAVAVATRRRPYDLLDLELVRVGMSIESVTALRLHNPADNLVTEPVLTHDAGTVDLDELRKLVRESEIDMDELSDNVAATLRAHGRATIGDVLREYPATQGLASAVGLMVLATHHGHAIDGTEDIHWISGAGVSRRATIRRRLFDPASDEFTARPAFAPTGSST

SEQ ID NO: 31517 - protein, 201 aa, Rhodococcus opacus PD630
MTDEPTTGGHYPGDTGELDLETRRAFVQLLKGPLVTAAKHPEVWRAVIRDERLLRSRLADVFLDLVIDDENELAFTRPPETGNANTPTVLRTERLTFMDTVMLLALRQRLLRAQPGERVMVDLDELREQLELYRTAGDTDPAGYAKRVNASWKKLDKYSLLTKTSTDDRMEVSPVLRQLFDAEQVALVEVEFRRILEEDTP

SEQ ID NO: 31518 - protein, 1095 aa, Rhodococcus opacus PD630
MIHPGQRRLARVQVVNWGTLHGHHDLSVARKGFLITGNSGSGKSTLIDAISAVLVPGNQLRFNAAAQEATNSGRNFVTYIRGAWRREAGADTDGLVASYLRTGATWSGIALTYRAGPDDPPITLVKLMHLGRGQNAAADVTHLHLILEHELDLTDFASFTTRGIDTRAIRKRWPESTVSPAYGPFARSFRSRLGISSEGAQRLLHRTLSAKSLGSLDQLFRDYMLDTPNTFAMAERAVNQFHDLQEAHRVVVDARRQVEMLAPLVDLADTRQRGLQSLRDTDEENAHLGAVHAEMTLSLLRGECTERHALTPLLEAGASEATAAAERARQETLDLTMKLEGIGGGRLATLHAQRDAELKTLARVRIRRQQIAEAVSAWEGTVPETSEEFARLRGQLEDQARQATTAHEERHGARYALAEQRGTAQKERAALITDREIVARRRSNIDPTLLRARESICSAAGVPDDAVPFAGELIAVRDEYSEWTGPIERVLGGLGRTLLVPDDVYPAVAAAVDATHLGARLVYRRVRVGVTPSAVPKTGALSLVRRVEVADGPLAAWIHHHLADRYDYACVDTAAEFTDHARAVTRAGQVKHSAERHEKDDRSRIDDRRRWVLGFDNEAKLEDIRRRIADLDVTIAGATSRLDALDREDQQIAVQNRAAQTVLDAQWVDVDVSGAQAAVDAVDSRLESWQQDNPEHSAVSVALELAKKAENEADAARRQADTALTVHRTAVTELETRIAQAELHADDAAPGAVATRIKARFQKFARRVTSDNIDKALFEVGQGIGKDRADAQNAVSAADASIVRILSQYLARWESRGGELRIDAEYVDDALTILQRLRSDGLPRYEDRFFQLLHDQSHRNIGELARTIRKAPAEIRSRIDPVNHSLHRSAFDTDRWLRIDVRERRSPAAADFLDDLTRITSGGWDIEQRPAAEERFERMAAVLERLASKEPADQRWQRQVLDTRLHVGFIGVEVDGAGEARNYHDSSSGLSGGQAQKLVFFCLAAALRYQLAPDGADLPRYGTVILDEAFDRADSAYTRRALDVFAQFGFHMVLATPLKLLGTLEEYIGGAVTVSIRDRMHTELSLIEFDDVGAT

SEQ ID NO: 31519 - protein, 397 aa, Rhodococcus opacus PD630
MSVRSVLPPAAAAKTLTTYSSRRRRWLADPSLAEQDSLTVALHPPSEHQIAEDPDAAVAWVRSWRAYTGAGHVEWAIRRWPSFGTQDVPVRLTLAGADQIASASGRETEWCALVMRRDALVDRLGPDTPALSAAVAATAAKWLDLDDDDFVRLTTIARWLSDHPNSGYFIRQLPVPGVDTKWLSSHRGMVETLLEGVRGHRELGIRSLPTLRDVALCDPELMSGTPRRFATSLEELTALPLAPARTLILENKEGLHALPRLAETVALHGGGYTVHELAGIPWVVDSEVWYWGDLDSHGFAILDRLRRHLPHVRSLLMDTDTLNRWRTLAVREHKPTFNEVSHLTESEAAALESLREDDLRLEQERIPWPYALKRLLVTFGAGQSSAAADCPTCPDSK

SEQ ID NO: 31520 - protein, 487 aa, Mycobacterium thermoresistibile ATCC 19527
MDDNRGMSAADLLGMNRELQGSRAIRLLATHNLGLYATLMERHLNEGVVAETELVIRLERDLAELDDHPDGQSGLALIKNWASQGWLHRIVDDRTGQNVCYLTQDARRALDFLRGLRRNDTIATGGSINGIAARLKQVAIRVGGDPARIRKDIEAQIAALQAELEALEAGERPEPDVTDCYDEARAIALQMERIITDIGQYGTMIEQATAALDEPIDSNAAYRERQRRLYADYQAAWESSGRDSHRAFLRMVNDPDQRAEFEADVAAVAEALPALDPQLRKVMTGFFELVGHQIDEVERIQQRCAQRIKRFTAFGTLEQSRGIARQLNEAIAAARALLKTSLADSRLDIEVPLTRHAISSVGALSFKISDLSVPKPAEPAGGEVDLSSFAALTTQVDATAMAERLNTELASGPVSLPQAVDLVDGAGQGAYLGHVIVLWSWALKQPGVDGDCPSTWVRFRSPDGRDRAIEVPNLMFTEPITLAGALS

SEQ ID NO: 31521 - protein, 256 aa, Mycobacterium thermoresistibile ATCC 19527
MTTDQEADLAAFSQLPEVNQNPRPPQQRRPRFDGDVSELPDRACWALQHLLTRRYISAETEPDLYSWVLEYRDQLRVRLSELDLLLRIVESPYENGDVAFVEQARYESARGVKLLRREPLGTYDSILALHLAQMMRAAGGQKVVISREEMHALFSGVLNDTDRDAVTFAARIDGAIARLTSLEILRRNRDDEDSYTISPVITAIMTASVISELQQQFEQLQRGGPPESRNGDAPESGNGAPQDLEDRLDEEVEVVD

SEQ ID NO: 31522 - protein, 1129 aa, Mycobacterium thermoresistibile ATCC 19527
MTEQFHLSRLQVINWGVFDGYHSIPFSPGGALIAGASGSGKSSLLDAISLGFLPFNRRNFNASGDQTAAGSSAGRRTVDKYVRGAWGQRSDGGTNRVMYLRGEGTTWSAVAVTYTSDSGRTVTGLVLKWLTGESRSDSSSRFVIGDGDLDIEEVCNRWAARRFDASVFKEGGWRFTTKVESQYLAQLYATIGIRASDAAQQLLGKAKSLKSVGGLEQFVREFMLDEPESLARLPEALKQIDPLVEARELLAVAQRKRKILGDIEQIQQRYAAESSDLGIIDLVDMPTVRAYTDHVRLAQCPEQIAQLDSTIEQLDNEYQDITRQLNLAKAEADSLTAQISGSSASLAPLQSQLTAAEAEAEQVSRRRTAYEDMLTAHGLEIPETAEEFWNLRERLLTEATESLAKAERRREESTDAEYAQKAARLARDEIAAELRRVEKVGSSLPEFALVMREQICAAIGVDPSELPYIAELMDLRPDQTRWRVAVEKVLRGAGLRLLVPDAYWGAVLRFVNETNMRGRLALHHVRARMYGAEPVEPEPNTLAGKLFVVDPNHPCAAEAADVIAAAGDHICVDDPNVFGRFRRAVTDTGLYKESDRLAIKDDRRPVRQSEYLFQGDVSAKINALTVELAAAEEAYQKARRVADEIAAQRQQWRDWAASCRAICEQFPQWSQIDVETADGHADRLREQYELLLAEHPDLDALNARAEDCWAQIQKLMTRRGAVQTRRDELDTRRTRLLELAERLSPPADERSRGEHRFVSEPLTELLQRFAAQVPVGLELLDPEPHREALFAAIKREREQLRESRRRSYDELARILNTFDTTFPDAIPNDSDVFDERVHDYVALCRHIDERELPEAYERMMRLVTEQAPDAILTLHRVAEQEARRIAEQIERVNTGLGAVEFNRGTRLTLRATPRQLTAVAELTEIVRAISRRIAEVGLGDKQAILDQYADILRLRNRLASTTPEDRAWTRDALDVRNRFTFDCAEWDVATGELIRTHSNAGDNSGGEQEKLMAFCLAGALSFNLASPDSRDNRPVFAQLMLDEAFSKSDPQFAQQALEAFRKFGFQLVIVATVQNATTIQPYVDSVVMVSKTEATGRNPRPVASVATRTISEFTALREKMGSSRVPAGV

SEQ ID NO: 31523 - protein, 459 aa, Hungatella hathewayi WAL-18680
MKQLLNEIPDNFWSLFRSKNRPIYIEALLQINEEYQYSNYFLSREICIQTLSDYFSKQKIFLEQDEMEDDFDLLEPMATRILNWLLRAGWLRKVDDYYSMTVNIVIPDYAAVFVDAFTQLCSDEGDATQVYIQNIYAILFSFKNDARANLSLLKTALVNTRKLNKTLQDMLHNMDKFFASLLEKGFYGDLLKEHLDGYVEEIVRRKYHILKTSDNFYLYKTDIKMWLNEMRQNPEWLSEVCERNRRMRGKSVEVRSVLEQIDLIERGFDDIEHRIANMDKEHSKYIRATVTRLNYLLNEEDNMKGLVIQLLNHLSLSDRQDEEIGEIGGMMNLSQFTILSDKSLYRPRRPRQDFTEHLSADEEPEELSKDEILKLNKIRNRYSRKQIEEFVFSHMTDGRMEVTPGTVSSDEDFEKLVLAYDYSTRKDSPYRVREQETEAIDNGRYRYPKLVFEKKRKNG

SEQ ID NO: 31524 - protein, 207 aa, Hungatella hathewayi WAL-18680
MINYYEELSPEEQLKVTQSIQLLYKQTFLLERKYDKKTGRFTGNRDFYVCNKHLEFIREYFRVMGIEVMENSQLGVIYVRGEAVVGDKLPKLATLYLLILKLIYDEQMASVSSSVNVYTTLSDMHERLGNYRLFKKQPSATDIRRAISLLKKYQIIEPLEMMDELEGHSRIIIYPCINVVLFGDDVRGLLESYGEGEDEDDSDETEI

SEQ ID NO: 31525 - protein, 1182 aa, Hungatella hathewayi WAL-18680
MTATKPRFEALSRIVLNNWHYIKHKTLSFSEGVNFFTGHSGSGKSTVIDAMQIVLYANTDGRGFFNKAAADDSDRNLIEYLRGMINIGENNEFAYLRNQNFSSTIVLELRQTDTGECQCVGVVFDVETATNEISRMFFWHKGGVPEHEYRIGNGTRAMSTEEVKEFLLRNYSKEECYYGSHNERFRKQLYDIYLGGLDSEKFPLLFKRAIPFRMNIKLEEFVKEYICMEQDIHIEDMQESVMQYGRMRKKIEDTCREIEQLKGICGQYEKVREARNTIDTYRYYVQKLDILQSRRVAQTTQERIRLTTEELAKRQEEKKGLEREIEELAGKSDELLKQISASGYEELKAQLASLNELVERLGNGKARWETTASALNAWVDQDVTSNRTIWDIEAFSDGSITEEGIVRLKKDIGEMLSDVDKQRQEANGILRDLKRREQQAREELEQLKAGNKAYPKELEQARTMLQNRLYQETGKSVSVEILADLMDIKDDQWRNAVEGYMGGNKLSLIVEPKYARAAMKIYEELDKQKYYRVAVLDTEKVMQDSHVVMEGALAEEVSVRRDYVQAYIDFLLGKVVKCEGVDELRKCKIGITRDCVLYHSYRIQHINPEQYTKFAYIGKSSVRQRVKLLEKTLAEIAEEREPQMEVLRECEGILKLEGMNHDVSVYLEWKADMEALEKKKVEQRKLREKLDGLKARNVEVWEKEREALLELCEARKGVLRENERLIYDGENALKKDRDEAIRLQEELIVKERELEEEWAAELEDGSPGAGRPDVRLAGRVAAGEMAGAGNDEMLTEDKRAGAGSTGAVGMLAVAAAAEESLRAELEKRSNPRYDLMGNEYGAKLQKAIEKKDEEKQKLTDLRGEYLRVYLNRSFSLSSDDNSEYEKLLEKLSCDRLEEYRKSAAEQARSAVEHFKDDFMYKIRSAIREALIRKDELNRVISGLDFGKDKYQFYIGKNKGPDGQYYDMFMADSLEINPAQLDVSMDNQLDFFTMEHENHYGQMVNDLINVFIPPDNATPEELEEAKRNMDKYADYRTYLSFDMQQLVQNEDETIKIRLSKMIKKNSGGEGQNPLYVALLASFAQAYRINLKPKVQRNPTIRLVVLDEAFSKMDAEKVASCIQLIRGLGFQALISATNDKIQNYVETVDKIFVFANPNKKCISIQEFEREEFGELKADLVDGEG

SEQ ID NO: 31526 - protein, 498 aa, Marinobacter manganoxydans MnI7-9
MDEQTHLRTRSYLVARHQHPAWKLLSATRGPLVLSCLQALMETNREEILFEDAQQMLTDILREHANSDDLKLSPDDPAADARKELRSWIRKGLIVERDGRLMATDALQKALAFVEGLDEKIMTSTASRLATVQREIENLETRLNPNAQSRADHIRRKIRDLEHELADVEAGRFKVLEGAEAAEGIREVYNLATSLRADFRRVEDSYRDADRQLRQSIVSEQHHRGEIVDRLLDGHDTLLETAEGKVFHNFSEQLSRSIELDNMKHRLRTILKNPATRHALSRQQQDELRWLVIRLIQESAAVIRARARSEKDVKGFLKTGLAAENHRVGELLNGILNTALNIDWSSHKVRKGDTPLPPIAVAVSSLPLVERLRFKSATEEQAQGLELTDQGVNLDDVDEEFWRAFDGLDREALYQETVELLKVTDRPMSIGDLAAHLPPTHDLETIALWLAMSREAEVEITDDREAVDITDSNGHRLRFHVPQLALTRQDAEAIDWEL

SEQ ID NO: 31527 - protein, 247 aa, Marinobacter manganoxydans MnI7-9
MSDYFDRLTSQADDQQGRDEPQQTSEALAHVDQQTPLTEASHYTPGNVKATAQELLKYGLLEADRKPNLYQVATTQTAAINQILEPFDLRLKVDDVRGLAFLVVSDRLFSEGQENDDEWSHPLVRRQRLTMEQSLLVAILRQHFIAHEQETGLGAGEATVELDELLPQLQLYLGDTGSDTRDQKRLRSLLDNLKSHGIVSDIDANDQVVVRPIITHLANPENLQNLLHHFRQMAGQSAPQDADGEDV

SEQ ID NO: 31528 - protein, 1107 aa, Marinobacter manganoxydans MnI7-9
MSLPQTDLFAADILPPTAYILTHLDLYNWGPFGGRHCAEIDPKGTAIIGPTGSGKTTLVDALMTLLTHQPRYNLASTGGHESDRDLISYIRGVSGAGNNTGDNSHIARAGKTVTAVSARFSNGNNAIRIGALFWIDGSSSAASDLKRLWLFSERDDQSLDNWLAIHHEGGARELKQHAGDNPGLQANDSKKAYLAQVRRFFEVGENAFTLLNRAAGLKQLNSIDEIFRELVLDDHSAFDRAAEVASEFDDLAAIHSELETARKQHQSLLPIAETYEKHQSATRELDQQLLLKDILPIWFAQTGYELWSTRKQDLERQLDKGRETLESLSSNVKQLNSKADTLKDIYLQAGGASIEQLKEQISQQKRWVGERGRHARDYQTLTGKLDLDSTLSSEALARNRQLGESKLAELSELADTQDEFLLDLRFRHGKLNETLTEITEEIDRIKARPGSNIDGRYQEFRSELAQDLNLDESILPFVAELVEVKAEERDWRGAIERAIGGHRLRLLVPPAAMQSALDRVNSRDNRLHVRLLEAQAPQATAQFMKDGFTRKLNFKDHPHREALKQLLAEIDRHCVDSPETLRQTPHGMTQQGLMSGKKGYFEKRDNQRLDKGWMTGFNNRDRLSALNNELSETRKKADALGRQLESARRNLRDTNDQIRLYELLGETEFSTINLPSAQRELDALQSRLEALTAPDSDVEKARGEFEAVRQQLEEGRQQLSNQETALALLKEKRNQATDRCTELLDRLGDGLTDDQQSLATRHFRTPKADQYERLEALERDQREQLDKVIGKLGKQIQSFELSLTQLMEKALTIDTGALIETGSNIQDIPEYLERLRVLEEEALPQKLERFLSYLNQSSDQGVTQLLAHIQNQVAIIEERIADLNATLRRVDFQPGRYLRLEPRRVTHESLRRLERAQRQLRADALKGDQGESHFKALQNMVALLRDAADNKRTVGARALLDPRYRLQFEVSVLERESGSVIETRTGSQGGSGGEKEIIASYILTASLSYALCPDGATQPLFGTIVLDEAFSKSSHAVAGRIISALNEFGLHPLFVTPNKEMRLLRAHTSSAILVHRKDLRATLTSLSWEELEAHAEKMTRKAHEIPG

SEQ ID NO: 31529 - protein, 384 aa, Marinobacter manganoxydans MnI7-9
MKSPAELASRLARQWQNADLREQRLLRPQGWPLTLPIGKPTGATVREKVTQVREHLRQWREVTTGQVQWQLVRFKSTSEAIDIPTHWTLDTPSQWVQAAGSSEVRREYDTLSRLASVLDPRFHSLIIRRRSLVMDKPESDVIRSGKVALQLQPGCAEGKPLRALSIAGTDSKFFERNRQLVTLMLDILFDGQASETGLEAFLGAEDDGHHWLLVADLDGSLLPFTQMRVRAHELQSTPLPGERLILVENERCLHQLPRVSGTVSVLGSGLNLSWLNATWLKDRATAYWGDIDTWGLTMLASARKHLPLLTPLLMDRITFDTFADASGVEEPQPAPSITPPGLTGSEAKLYQRLRQADQGRLEQEFLPVCVVHRAIGDWVDRSAE

SEQ ID NO: 31530 - protein, 508 aa, Sphaerochaeta pleomorpha str. Grapes
MQKPSSLGRKTLLSDSTFVEQLIHYDSGLTLLSRKNAPRIIAFLYHVFKEQNRTSIEQSHLQQLLSGFLQVTEDFAEEDELETLETSIIELDYSDKARNLILAWSNEKNGFLLRYYDAAAIETIELSAGLERIFRFLEEVVDSKRLFVGTESRFSQIMDGFRELDINTIDNPRAKIDELEKQKDQLQRQIDEIKRTGTATTFNEQKVSERLYNLQRTARALLSDFRQLKDNNHAIFSELCHKQIQSTESRGELLAFTLEKSEELETSPQGQSFTSFWNYLCSNPEDNSIRAKADALKARLGNQLFDYPFFAHLEDTLIDAGREILEENRLLSDRLKRAITRYNSKEYRLIKETLDSIKILAIGNPPYKTENLSQIDGSADIFSSLQRYPVLPETQSTVKKTTYEEERAPADIDIQSLFDEARIDENQLLENLEFDRKHTRQLTLGTVLLRHPVKEGLAEIVSYLSLLAKQDWAEFDDTRKETVTYTNAIDGAPVTLTIPKVEINGIDN

SEQ ID NO: 31531 - protein, 202 aa, Sphaerochaeta pleomorpha str. Grapes
MELTTEWGNLCTRLLLAPLFREENPDHFESLVIWQQQVNAYFAVIGLTLQLNIDDGYAFLVENEDEEGNVIGDGLRLLRKFPLTYEQSLLLVILRDELDKFEMSRSTSRALILHEGQIADLMESYYPNSQDKVKYADMVASLLASLTQMEFIKCIHRPTSDNLSSPNDREYEIRTIIRAKVTSAFLSAFKNRLENLKGEDNA

SEQ ID NO: 31532 - protein, 1150 aa, Sphaerochaeta pleomorpha str. Grapes
MLESELDLGLQHSGYRLSHFQIYNWGTFSDHVVTLDFQGENTLLTGANGSGKTTLVDALLTLLVPREYRTYNLSSGQDGKDGRTEESYVLGAYSTTKGESDYAANKEYLRDKNCHSILLGQFDNDNAEFPLTLMQIRYFTLNGTMQKLFVICEGSLSLQDMAERNVAFDATPGWKKRMTAAFTSTCKLYFFDTFKAYSIEFATRFGFRDREKALRIFSQTVGMKDLSNLNEFIRTRMLVEMDMIGEFNSTLANFETLMGTKKLIEKEEEQIRQLKAIETEAQDFLHLDTKLASLGIEKHTLPFWEGLRADQFLQKEIVRLENQKDLVADRLSENKRESEAIRETIEEVHRTLSSDKRVEREEELKRQREWLTSKLALARANRNNYKTVVDMLHLPLSENSADFTENRFQSDHLLEKITNKLMNIEDDQTDQVQQLGACNRERENVQSQLDAIGNRESNIPLEYLLCREQLCKDLQLKESDVPFLGELVQLRQDCLSFETGANAALHTLALTLLVQPYQEQIIATYLWNNALELHLDVMVIEGTKALPVDEDEKHQLKLVDDEEQVFFEDTNAPNRLDLMLEVKPSCTFAPFIKDLLGREVPYYSCDNLSHVLESPASFSERGLFHKETLLCKGATKKGEELHILGWDVSEKRERIRSRLVQLDDLKKETESVLEDLRKQKKHLEAQKAAILRLQEFKEFSEIDTASVETQIDVLDNQLFALRSEMDDLSSLKQQLRQSEVARDRLVSEQEELYRSQGANQQERKDAEREKKTYADQLANLDLAQYMDQIEKISARYKLPATFESLIQIKKTRNELLAKLDSQIEEISAKRDQSKKKTENLMDHFVRPNAKMTQTYPTWIGDVSDLRPDIEALDMFLAMLDKLEREDLPKYKERFANLRSRQMKSDIINFNTALRQWERHIKENIVELNDSLSSIIYQIHPETKIKLTAERVKDSQIRQFNSMLSAAIPDAGSRIQGNEKAEEIANQHFFEAVKTLLETLKTDDQFCKKVLDVRRWFVFAVEEYDSKTEKQVRYYQDSAGISGGQKAKLAYTILAAAIAHQFDVFDISNVSRSFRFVIVDEAFSKSDDENSRYAMDLFKKMDLQLMVVTPKDKVNLVEPYINSVQITVCNDGCHSFVHSLTKEKLREQLGR

SEQ ID NO: 31533 - protein, 388 aa, Sphaerochaeta pleomorpha str. Grapes
MISPAEIKTKVENKKNEYLKAKILGTPFFPLSLRADKGSIHDDFQTRESALATLFAQSKAKKGKGYIVETETKESRTMGRQTAVSNLLVETEDDFLYLLGAENKGSLFSANVAMLKATFPEEEFIPWLLAKKSEVFSRWEGTDGQWFCQITRFLVDNPNCGLFARELPAEAPTKFLETNLALVKSLVGSLRPLVEGDDDLTRLGLRKKESLVKIRSNRPFAVNLGSSSCGQTSTIILTPESLRSFNLAAKRIFIVENETMFFTFPLEAEDLCLYVGGYALLACKGSLLFQTVGIYYFGDLDEHGFAILDKFRTLYPQTKSFCMDIKTLEDHCAYLLKGKSYPGEYRNLTPEEKEALHRVQGPEGPLLLEQERISLGYLKNRLQNLTNG

SEQ ID NO: 31534 - protein, 492 aa, Rhodococcus pyridinivorans AK37
MSTADLYRLTRLRDQHAAWTLLRADHAPAILGMLGRHFDRGTRRLPAPELFARLDADLQDLRDQGFDLPRTAQAYCADWVRAGFLLRRADTGSREETLEPTESAFVALNFVAQLTTDTSSITESRLTTLSSQLQALARDSDPRSETRLATLRTERDALDRQIAAVESGDFPVLDGPRAAERVSEILALAGEIPGDFARVRAELEGLNRELRARILDDEGDRGDTLGEVFRGVDLIGSSDAGRSFTGFYDMIIDPERSAQLDDWIEAVLTRPFARSLSPEQRHRFRSLLTEMEDAGGEVHATMTSLSRSLRHFVQSRHYEEHRRLQRLLRSAQQHALQVAPHRKPYEPLDLDLVRIGMSIESVAALQLHNPADDLVAEPVVSQTPGEVDLDDLRRIVRESEIDMDKLLGSIAATLRVRGSATIGEVLREHPATQGLASAIGLLVLAVEHGHRVEGDEEICWSSPSGVERVATVRRHLFDPTDPAFTTLEQDSL

SEQ ID NO: 31535 - protein, 199 aa, Rhodococcus pyridinivorans AK37
MTDTTTGLYPGDTGELELDTRRALVQLLKGPLITAGKHPEVWRTVIRDERVLRSRLADVFLDLVVDEDEQLAFTRPAETGDHKAPAVLRTERLTFVDTVMLLSLRQLLLRAQPGDRVIVDFDEMAGQLEMYRAATSTDPAGFRRRVNASWEKLKKYSLLASTSTEGRMEVSPVLRQLFDADQVAAVEAEFRHIVAESQP

SEQ ID NO: 31536 - protein, 1102 aa, Rhodococcus pyridinivorans AK37
MTATPPHPSQFRLARVQVVNWGTLHGHHDIPIARKGFLITGASGSGKSTLIDAISTVLMPGGSVRFNAAAQESAAGSGRNFVSYIRGAWRREADVDTDSLTASYLRTGATWSAVALTYRTGDGAAPVTLVKLMHLRRGANANNDVSHLHLIFDFDFDLIDLEPFAGRGIDTRGIRKRWPGATVNPSYTPFARAFRAKLGISSEAAQRLLHRTLSAKSLNSLDQLLRDYMLDEPDTFAMADRATSQFRDLREAHRVVVDARRQVEALDPLVGLAEVRRRGLQQQRELQEENDHLDAVHARMTVDLLREKLDEAYAQIGLLQTAVDKTSVEAERAAERTLDLRVRLETTDGGRLSTLRLQRDAAEADLTRTVQSRSRFDTAVGSWEAEAPTTAEEFAHLRAQLETELRELDATVGTRRNDVYEVVRALGTLRSEHRQLIADRELLARRRSNLDPALLRIRELVCTAAGLSEDMLHFAGELLEVRSEHAEWTGPIERVLGGLARTMLVPDEYYSRVAAVVDAQHLGTRLVYRRVRTRSGRPATPASGDESLVRKLDVRPGPLAAWLQHHLAERFDYACVATVDDLRGVPRGVTRAGQVKHGGERHEKDDRYRVDDRSRWVLGFDNETKLSDLRRRIGEVESEIARLQRRQELLEHAECTVQQRRHAAEIILDTTWADIDVEAAEAAVGAIEHRLEGWLQGNAEYASLTLDLARAETEEKEARAAYTAAGSGLERHRGDVEHTRQRLAEVEAHADSAVPDGIDKRIRARFDAAARRPTSENIDRLLHTVGRTITDEHRAALTRTTDAERRITAILTAYLAEWESRRAEMRSDAEYVDDALAVLTRLRNDGLPAYEDEFFRLLNDQSSRNIGELARAIRRAPGEIRSRIEPVNESLRRSPFDTDRTLRIDVKDRRSPAAADFLAELQRIVSGSFKEEDRVAAEQRFEQMERILERLDSGEPADRRWRQLVLDTRLHVGFIGVEVDGEGVDVNFHDSSSGLSGGQAQKLVFFCLAAALRYQLAASGEELPRYGTVILDEAFDRADPAYTRRALDVFTRFGFHMVLATPLKLLQTLDDYIDGVAAVSIRDKKYSQLALLPIRSAEEPRE

SEQ ID NO: 31537 - protein, 376 aa, Rhodococcus pyridinivorans AK37
MADPIAAESDSLSIALHPPSERQVAEDPDAVVAWVRAWQMHRGIGRVHWETRRWPSFGTQDVPVRVVFAGPGEIAAAAGRMSEWHRLTARRVQLVEILAPGTPALADAIGSTLSRWLELGEADFVRLVGVVRWLADHPASDVFIRQLPVPGVDTKWISRHRGLVEVLLEGAVGNRDLGVRSVPRLCEIAVCDRTLLPTAPRHCAAPLDELAELPLHPERILVLENKEGLHALPDLPGTVAVHGSGYAVHELAALSWLADSDVVYWGDLDTHGFVILDRFRAYLPDVRSFLMDLHTLEAWSALAVEEPSPSSHVPMRLTPAENEVFTRLRVERLRLEQERIPWPHVMEELARAFTGAIGHDRDSTRMDPTALGEGVS

SEQ ID NO: 31538 - protein, 477 aa, Saccharomonospora azurea SZMC 14600
MLALLHQTHAPFVVTALAMVFTAERPSVAVADAHAEIDDALDQLRAAGYGDEDNQPLPSGNARDLCRQWVQAGWLVRQVSDDDVEVYRLSAYGVGALEVAGRVGGVRTRVSESRVRTLLDAIERLAQDADPDVMARISRLHEEIQQRQKELTRLERGGAVETVEDEKLLEAAENVLHLARELPADFARVAESIKDIQRDVVAELRHDVRPTGEVLREYLERGEQILDATPEGRAFAGALRLIGDPAQIHNLWSQLRTVLRHRFTELLPERQRRELTDISRRVEQGVQEVLTAQRQASHVITTQVRDHDPMRDRQVDDLLRNVMSGLHTWVPGSRRGEAVEPLRRLPVADVGHLRQRASDLRPPQPPAPLREWDEVEDVASADTRAWGGPRYGALQEHLAAFAGDADDVDVAAAFRAAPEDLRRPVDLLGFLEIAHDAGMTETAEVALVDTVRPDGTRRRFALGRVVAANPADGNGEQ

SEQ ID NO: 31539 - protein, 218 aa, Saccharomonospora azurea SZMC 14600
MSETESWSDTDAGFIDPVPMEDDPTELFPGDAGTLDADVRRVLVQLLRRKFLLAEKNPAQWRTLLENQQIIESRLHDLFVRLVVDHDRGIAYKQQVRSTELDVPILLRDEPYNRAETLVLVHLRTVFQRERSTGETSARVDIEELEQTVLTYFDPRDHNQARSQQEVRGAVQRLSTEGLLVEESAGRYRITPLVEVVLSTAKLAELQQWLRERNEATA

SEQ ID NO: 31540 - protein, 1113 aa, Saccharomonospora azurea SZMC 14600
MSMIDTLFGLIPAASRGQQWVARDLQLVNWGGYDGYHRVRFAPGATLLSGGSGSGKSTLMDSYIALLMPHTTPFNGASNGGVVGRPRGKDQRNILSYARGKLDESRTDGETKSRVLRGDGRDTWSAIAMTWVDHTGAEFTALRAWYVPSSARALDDVVAVRATCDHHYSLRELERPAAKRLARAEVESTGLTCFETDRDFTARLHHTLGIGAAGDGHKAVALLGRIQAGQQITTVDALYKTMVLEEPSTLATADAVVQQFDELSGTRERMIVARQQVKALTPIREHRRAIDDAVERLDLIEAIGSFTETSSPAALWCHERRLDLLRAAERDLAQRYRRAEQELAETNALVEATEAQCEGAADTLRASGGDRLDTALRERRSVEQRLGDVERTRQQLDRALGTLGVTVSTGAEFTALVETAHRSLADTEARRTAQARFADAMSEKRDADTELAALRAERKAVTARKGNIPTDLHTARAALAEAAGLAPDDLPFVGELIEVRTEFEPWREAFNLALGGFAMRMLIDMGRLNAFREAINTVPTARRVHFQGVRTGRRDEVRLNAKTLPGRLDYRPSPFTAWLKSELASRFDFVCVDTPRLLPQYPKALTITGQTSQHGRGAHGGHGRANVLGFTNTRLLAELDQQIDAARHRLDEADAWVSRAEDELNSFEARRAAYRTVTELSWDQVDVESVKAERDRWDRVVEEVRAGNPKIDQLQRQVDELKKQVRELTQRVGERRKTVEELGAQWESTVDEVDRAQSALDAATETGTVVLPEHQEYLETLFADTSADAPATELAEFDAAVKRAAERLHADRQSATETIGRSRKALEDTFSVFLERWPNPNLGTDPDASYRDFDRVLTDLESSGLHELEAEWRDSLLKLSGNDLTGLDSELAAAVREIRDRIDPVNRILAELPFADDEHRLRIDPQESHSTVRARFRKELRDVRALIDRADTDADRERAYHRMAKVIDRIRRTAPDFADLVDVRNHVRISAEKRDLDGKHVAVYDHIGEKSGGESQELVAFIVGAALRYQLGDAGADRPRYAPIFLDEALIKADARLTGRAIGAWRGLGFQLIIGAPNDKHSAIEPHVDAEYLILKNSEGRSYAKPLVGVAAE

SEQ ID NO: 31541 - protein, 408 aa, Saccharomonospora azurea SZMC 14600
MRALVTPDDALTTVRRKVEQKWADAVCADFGVGDRVTFSVPLRPGVSTGKAVERLGHATWHEWHRLWREFASRLPAGVDLVRTAVSIRGVVGEFPATLRADVDGAVALLADTGVAPPTVDIGRARELASALRSADAALTPATLRAVSRLRPNDVDVLLGAVTWLRKHPDVSPWTLRQLPIPGMHTKWLDSHGTLLRDVSGRDVRAEVRPRPTVVHLTYVDPDHLASGRRRHDAWTTGDVHDIAYPPRVVLVVENRDSRLWFPPVRDTIVVEGGGKAAAALLGGVPWVRAAEHVVYWGDIDADGYAILDRFRATLAEPGPDGTPAKPVTSILMDATDLQRYADHGVDRDKDGRPLRPSPGVLRHLTDAETTAYDTIATAGPTPFRRIEQETIPLADAVTRLLRVVNGQG

SEQ ID NO: 31542 - protein, 468 aa, Desulfitobacterium hafniense DP7
MGLFDVVPNNFFSVLVSGNKEVYVDALMLLHQLFKFELNIRVDDYISSLISLLEDKAFVPEDDDEMPESSLTPSGKARLILNRFVKTGWVDKEFLDGSFVEIITPRNYAISVMKLLSELGDKSLHEYNSLVFATYSSLKQAKNEHESQMYEAVLSAKANTEQLEYELRRLYHGIREFLRSIQEQNDVNLLLQNHFEEYKKMSDRIYHPIKTMDSIHRYMAPIQNILSDILADEKLMRIMRERAMTIKKYDEGAEAEEEILSAIDYVLDAYQSVGSIINEIDRKHSTYTKSSIEKIQYLMTADQTIKGKLVELLKTYADAKSEERNALGDMFEKNIRINRQEFVDGKSLYHKSIRSRRVHTTPLPIDQDNAFSDLAMAGMLEQIKNGYPVARIRAYVDRLFAHGAESVRSEDVPLNSDADFILLILAIVRANDKGMPYRVQMGEGRIERNGYRIPNMIISKKGGKHHVE

SEQ ID NO: 31543 - protein, 215 aa, Desulfitobacterium hafniense DP7
MWSERYEALSSYERGEFRRLANYLLSHTYMVRYQYQPSQQMTLPNADYQMATRLFPVLRDYFTVTGWQLEKDDNYGIMSLINIYDHNRLRIDRFTTLFLYTCRLIYEEQREQASSFHMVKTDTQTVVEKMRMLGLLDKGKTTQKERIEAQRTLGHYNIIQKMESVAWSNDGNELLILPSILSIISNQGINDMMLELEEMRINGSDEAGQEQEDSE

SEQ ID NO: 31544 - protein, 1132 aa, Desulfitobacterium hafniense DP7
MKKMTRLLLIHWHYFAREMVEFEQLNFLTGKNASGKSTIIDALQLILLGDTSGSFFNKAANGRGNRTLTGYLRGELGDDEDSGFNYLRSGRFTSYIAVEFFDEEKKRSFTAGCCFDTFSENDMQKLFFLYDGAIPDNEFVETGSPMVITALRAYLKEHFTGHHSTTDVGRDFRTNLYGKLGGLRERFGQLLKKAVSFNPNVEIQQFISEFVCDTQQTVDVSRMQENIRSYKSLESEADVLKGRIALLDQILTIHQSFTVQRQNEMLYSYLIERSQADIKAIELEAAKDKAKTYDAQLSELTDTINAETTRLSKLQEERDLMQAKLLNNEQAQALQLLETQIAEKEQQISALRGEYDKAVAVLSKCVSSWRMNSSAMLQKIGSIENALLDPLLVSRINDLHSEGQAFLKRMESLPRIDYAVILETGQKGLDEYAVLADSLKVHSIQLASRMGEEQVTLAERRKILQQEKESLESGIYPFPQDVTDLKEVVSSRLRLNTGKDIKVLVVAEAAEIKNDRWRNVIEGYLNTQKYYIIVPQEYFQTALRVFDAIKRQRQIYGTGIIDIEKMKHIKPTADSGSLAEEIATDEQDVRLFLDYTLGRVKKCDRVGDLRRFRTSVTDEGMMYQNFVVRAMDPKRWAKPAIGQGAIQRRLEDVKKEIGVLAQQIAACATIKTGLQFSSTLVALSQAEIEHAISSAKGLSAVEALENDVRSLRESLSTIDKSAVEALKAHIEALANEMKILSERIRKDNIDYGKREAIVTMLRDETIPKLTGELETLETELTRKYNEEWLENTGRLRYQRELSSRGNAEDINRAFPRELSRSTNARESMWDDLLNLRRTYNEKYIMGYNIKAEDNEVYDNAWLELSENKLPEYLARIEDTRQKAFEQFQEDFLSRLQNNINDAKRQIDGLNNALSGSSFGGDTYRFRIVPKPEYRRYYDMIVDPMLLEGGYNLLSEQFNAKYKEEIAELFAIITNEGAPAKVREHDDYEKRVQAFTDYRTYLSFDLEVVNRDGETQRLSKTLGKKSGGETQTPFYIAVLASFAQLYRIGRDKNASTSRLIIFDEAFSKMDGERIIRSIELLRQFNFQVVLSAPPDKIGDIATLVDRNLCVLRDGKRACVRSLDPKRLEEIEYE

SEQ ID NO: 31545 - protein, 417 aa, Desulfitobacterium hafniense DP7
MSDTIQRQLLSALLDKYERSIFFREGIHPTRRIMLKLYDNGQSDFPQYNIEQSEKRILANRAVLAMVEKRLVFYQWMKGEENHIIAQIWLNLENLPMAYEFAGRQPKNEKIDDVCFEILDVLDKVKVLWARQYLQDLYETISRKRDLGNRLPEAEDERKELFRAIQFIDGMGDSEVLERVFSLQCFGDSKQFERTVKSRLLSVLRKYLDTEEDARDEELLRQIGIVKYPEQFEFCGDVKLSFACGTVDFSYLRYGGNVCSADLLRGNLVITSEVERILSIENRANYIDYIYKHKVDNELVIYHGGQYSPSKKKFFHAVAKAMPTNCGWSHWGDIDYGGFSMLARLRREITQDISAYRMNVQELKRYSNLTASVTHAYAEKVKSLELRSELNDCKECLDYMVSNRKKLEQEAMLTDTE

SEQ ID NO: 31546 - protein, 485 aa, Acidovorax sp. NO-1
MDLDYTTLHQMRRQHPAWRLLVAEHAPLVASFLHRVFIAPNVRSMAQANLVEALNDTLYDLRERLGEQAFPRSALDYLNDWAAHDKGWLRKFYPPGTDEPQFDLTPATERALTWLASLTERSFVGTESRLLTLFALLQQMSEGTDTNPETRIAELHKRRDAIDAEIAQVLGGHMPLLDDTALKDRFQQFTSLARELLGDFREVEHNFRQLDRKVRERIALWDGGPTQGRGALLREILGERDAIAESDQGKSFRAFWEFLMSQARQEQLSALLDHVLALDPVAQLAPDARLRRVHYDWLEAGEHAQRTVAQLSQQLRRFLDDQAWLENRRIMELLHGIEARAVALRDAPPPGEVFGVDALHPAVQLPLERPLFRPAAAVALNDAPVQVGDAGVDAAALFTQVRVDKAALAAHVRQALQTRAQVSLGELLHMRPLQQGLGELVAYLQLASVAAQAVVDEAVQETVHWTASDGVQRSATLPRVIFVRT

SEQ ID NO: 31547 - protein, 222 aa, Acidovorax sp. NO-1
MSDDLNDAAPIDAIANPLPQWDLSAVVIPLLRGVVYRDEDAALWDALQALRARAADYVAVLALDLVVDEAEGYAFVRSRVQEEDEAAAKLPRLVRRQPLSFHVSLLLALLRKKLAELDATGGEARLILARDEVVEMVRIFMPASTNDARLIDQIETHLNKVIELGFVRRLKATHAGQAPVYEVRRILKAFVDAQWLADFDERLQAYQQHLSTSQTEADDAQQ

SEQ ID NO: 31548 - protein, 1169 aa, Acidovorax sp. NO-1
MHSSDEGDLFAGDPAAPAAPLAPAGPSGAQERAAAPTVAALSGFRLMRLEVFNWGTFDKRVWSLALDGRNGLLTGDIGSGKSTLVDAVTTLLVPAHRIAYNKAAGADARERSLRSYVLGHFKSERNETSGSAKPVALRDAGSYSVILGVFHNAGFDQTVTLAQVFWLKEAQGQPERLYAVADKALSITDDFAQFGSAITGLRTRLRKGGVALFDSFAQYGAHFRRRFGNLGEQALELFHQTVSMKSVGNLTEFVRHHMLEPFDVAPRIQSLMAHFDDLSRAHAAVLKAQHQVALLTPLVADCDRHAQVQAHIDTQRASRDALRAHFAGLKLALLDERIAQLTDALASDHTKVQVLETDKARQQTQERELRAAIAQSGGDRIAQLEEAMARSQAESTRRKAHAARYDALRQPLGLLQVGNAQELLTQQQACQSMREVEGARSNELRNEEVEQGAALHQGRQEHAALAAEIDSLRGRRSNIDARQIGIRAALCQALGVPEDRMPFAGELIEVRDSERDWEGAIERLMHNFGLSLLVPEALYARVAEWVDQTALRGRLVYYKVHPTRPADVPELPADALLRKLSIKPDSPFYGWLEQALWQRFNVVCCTTQEQFRREPRAITRAGQIKGGERHEKDDRHALADRSRYVLGWSNTAKLAALQAKAKVLEAHLGRVGARIAELQTQQQSVQERLRWLDKLVEFRDYAELDWQTPAREVARLNDELAQLRASSDLLQTLTGRLAEVERALVQLEGRLAEQRDRRTRTEVNLAHARTRRSDTEAALTDEPPTDRAAAEHLNTLLSEVLGGQPLTLPHCDARERELREALQKSIDAEGRRSQQLVEKIIAAMRAFNTAYALETQEIDVAVASASEYRKLLEQLHADDLPRFEADFKRLLNENTINEVAHFNSQLNRERETIQERIALINQSLTQIDYNPERFIVLEAQATGDVEVREFRAELTACLSGAMSGTLPGDGAGQGSQYSEAKFLQVKAIIERLRGRPGLAEPDRRWAAKVTDVRNWYVFSASERWRADGREHEHYSDSGGKSGGQKEKLAYTILAASLAYQFGLAWGETRSRSFRFVVIDEAFGRGSDESAQYGLQLFQRLNLQLLIVTPLQKIHIIEPFVSSVGFVHNAEGRDSQLRTLSIEEYQAEKERLEGLTQQIHIHPEPGHGLD

SEQ ID NO: 31549 - protein, 407 aa, Acidovorax sp. NO-1
MAWTSPDDLRAQVQKRWDRGELLAALVAGHAAVDTPSLVFPCRLRVVAPSSSELAQRFAEARAWASSLRAGAGHYRLEERELRHREVGQHSLPDVAWVDSLDAALALIGKTADARRFAALVATTAGQQPLLLPWLARRPLQALALAAAWPRLLAVVAWLQAHPRPGIYLRQMDLPGVDTKFTEAHRGVLTELLDLVLPPQAVDAAATGVGQFARRYGFADKPLRIRLRWLGAAALAPWGAGITDITITQGAFESLNPRVRRVFITENEVNFLALPPVADSLVVFGAGYGFEVLAGAAWLRHCAVHYWGDIDTHGFAILDQLRATLPQAQSLLMDRATLLAHADHWGHEPQPLTRELPRLHPHESALYDDLRYGRVRAEPPLRLEQERIGFGWVEQALSVLQPTGESE

SEQ ID NO: 31550 - protein, 482 aa, Arthrobacter globiformis NBRC 12137
MPRSATSSADAISARLRDLELLTKGPAWALTRSAPWVIAVLQASFTRTRPQLPLEEFHADVDSFLEQLRRQEPGLGGHANGKSFGDEWTRKQFLTRRNQSGQIVYEVTEAAARVLAFLDSLSSERSTLNGSRLGTLLGDVEKLANETNPDQSARLEALEEEIEERQQLIEDISSGDFDGLLDDDQAVEAAGNILDLAASLPADYKKMRDRIEELVGELRNQIIEESLTKGATMAQVLEADKRLRQSPEGRTFRSFTAFLEDPQQQLRFRSAIGEVLSRQFADDLSPEDRETLKNLVAELRQQHSQIQRIYGKLSESLNTYVQSDDFRQSVRLRKVLREAEQAIRSMPYERERPGLVRGPVLFNAGFESLAMVKLFDPDEFAAPPKLADPIAFSDSDRVRSPRTAKARPEAIRAAAAGASTLAEAWEQLPPEEQHINSIRALLSHALHTGAGFDQLAYEALNFEQIDGTTRKAYLPVVTLKKD

SEQ ID NO: 31551 - protein, 274 aa, Arthrobacter globiformis NBRC 12137
MTEEMTTADADSPVVEPAESAAMPASSMGSGVTPRDTFVDGAALFPGDTGVLPMKVRQALVKLLKGPYVDGGRDEKLWTTLLDNQLILRSRLSELFLTLQLDHERKIAVLRPVDPEAIGGSARSSILRQQRALSRVETIVLLRLRLLLDRHVTAQTDPTITREEIAELVAHYQPAGQQDALRDSDVVNRAITKLLARQLLLTTGLDDVYTISNALPLALPFDNIGDIPAQIEALIAATADPSGTEPLIELDADRSVSDEEADSDETPATGGEAK

SEQ ID NO: 31552 - protein, 1150 aa, Arthrobacter globiformis NBRC 12137
MSIASMLPLGEVVNPGQMRLALVQVVNWGTFHGAHTMHVDRNGTLLTGNSGVGKSTLFDAMLRVFDARPRSNEAAAQRSGAVEDKRTTFTYMRGKVGDKAVGEGSASAFQRPGATWSAVALTFDNAAGTRVTVSALFDLPKNGTESSVGRYYLIDTRPLDLAAIEGIAEKRFTKAALENIFPDAQVFDVHKAFAERFRRLLGINSDQALPLLRVIQAGKGLGGSVNTFFRDQVLDAPATLAAADDVVEEFSNLMSIRQRLEDVRQQRDQLAPVPALNREYAQSLLDANRLRELAGEEFEAYRQQLAVTVHEKTLARFKALAQTKAKELAAERGVRDGLAKELRQLEADYNNQGGNAISSIEQSLENARVGLKLRQQVEEAARQALADAGLDLEWTAEGWEQAHEQAATRSAELKDDSAALQELRFEAFDAHAAKKREHAAAEQELVSLKTRKSLLPPSSIENRAAIAAATGVPEEQMPFGGELIDLAEGQEQWRPAAERALRNLATTLLVPGKHFAAVTRYLNDHTVRGALRAVDVSKPLAGAALAVEDVADGDLLTKLDILTTGTNAEAGMWIRERIALDFAYPCVANPDELAALDKGLSLGGVVKRNRHTVEKDDRFTSRQDYVLGFDNASKLELVAGQAEDLRQELAKAAQLAQSREESHQGLSRQLEALRRVAEDDRPWEQVSAAVAADELSRIEQRLKDALAAQTDLEPLRANIEAARQKHQSSTEAAAVLQSEYKALDQQLTASDSLLEAARTRLNQAPPSDSTTAALAPYFAEFADVTEMHELDNLAGRVRTQLLGDLHGAESRAQATSERLTRIFEGFVRDWGTAISADHGTSIGAVGEFEARYHAIINDGLPAQETEFRQFFNQRTHESFSTLLHLLDEERRSITSRILPLNGILSEVNFHEGSYLELDIKQTLPATAKQFKDAIQNALKTRHTRHGKTENAHAGQNDDAELTARYKSLETLVKRLGSQTPEDRRWRAEVLDVRGHLFIQCKEHREVDAPGKKGGKRTEVFMHADTGSMSGGERQRFTAFIMAAALSYQLGIAEQGFTTYGTVMMDEAFVLASEEFAGAGIKALHEFGFQLLLAAPENVIDLSRHLGSVTEILRDRRTNRSGVLTAPVITPKPGTARQWRSEANPVDIVLR

SEQ ID NO: 31553 - protein, 486 aa, Mycobacterium abscessus subsp. bolletii BD
MNDLTVEELFAHNDDVQKSRAVRLLAAKNLAPYITLMERHLDRSAKVSEPQLVAKLDRDLSAVGLGEQSGLALIKSWASDGWLHRASDGTGPDAENVCSLTEDARSALAFVRRLRRADTVATGGSIAGIAAGLKRVATQLDGDPSRLRADIEAQIAELQTQLHAIDDGYRPEPDIVDLEDETRAIAYQMEQVITDIVRYGSMQNEITAGLIDAAEDSDSGFRDRARRMFADYDALFDSRERASYSAFTRTIQDPDQRAALRSDIACVAEGLPDLDPGLREVMKNFFKLVSQQITEVSRIEQRCAQRIRRFFAAGTTEQARGRARQLNDALAAGHALLKVSTADSPIDAELPIGRSAAAAIGALSFTIKDTAPPVLAQDAPSGPLDLSGFSALATQVDMAALADTVNSAVAGGPVSLPDMISHVEAPYLGDVIVLWSLALKQDNTADRESVKVKFRSLDGQDRVMEVPKLMFREPVLATLEEEGSTL

SEQ ID NO: 31554 - protein, 249 aa, Mycobacterium abscessus subsp. bolletii BD
MTTQVSGTSLGNINFDDLPGVEPDASAPRTAKGPRFDGDTSELPDKACWALQNLVARRYLSKDGQPELWASMMEHRKVLAARLSELDLRLRVFDDLEVAYAEPAPLENPSVYGARVLRREPLGTYASIVALHLAKIARTAHDEHVLVSRDDIHELFANVSHDVDRDEAMLRDRVDEAIKRLSKAEILQRTRDDEHSYTISPVINALMSAQMIEALQRQYEQLQRGGAAPEDADGADPTDEEDGETDDDE

SEQ ID NO: 31555 - protein, 1103 aa, Mycobacterium abscessus subsp. bolletii BD
MSRLQVINWGVFDGYHSIEFSRRGTLITGSSGSGKSSLLDAISLAFLSSNRRNFNASSDTTAAGSSMGKRTVDKYVRGLWGELKNPGERPKQMFLRGKGGAWSAIAVTYSGTDGRVITGLVLKWLAPGSDTDSSSRYYLIDADADIRDLCNAWASKGYAGSVFEGAGWRGHKSERWYLEQLYAAVGIQGSSAAQQLLGKAKSLKSVGGLEQFVREYMLDEPESMAAISEALGQITPLVDARAALAIAQRQRQTLGDIEQIQQTYASDAAQLATVDVVDHHTVRDYVDQQRLALAGPEIDLLDTEITRLGGECDEIQSRQDILTGERDKLLGRIAAADSNLAPLKSELAHARARAEEVSRRRTAYDSALWDLGHEDDIESAEEFEAMRVESLRAVTRINAELEAGHDAYVMAAGALSTARDQLRAASAEFKRVEHLGTPVPPDEDRMRGEIAAALGLTAKDLPYVCELMDLRPGQERWRRSVEKVLRSTGLCLLVPDQHHRQVLRYVNENPMRGYLQIERVIPSGTPRRAEPGTLADCLRLTNPNHECASAAMNLVAGVGDYVLVDSPDEFSKHRRAVTDQGLRKDGDRRAVKDDRRELRASQYIYQGNAGDKRAALSDDVVEAQQAVSDAEKFIGEMDTKREELRSEVVRWSKLHSQYEYWSQIDTDSAEAAVARLQDQYDAMLEANPDLTGLQQQADSYLDEIKKLSERIGALRKQESEHDSRRTRLLDLLDNLNPREVGGHTRSGIEAYVPQLSSSLDVLEPDAYRLELWRQIEKDQSVLRESVTRSRNELNRILNAYDRDFPDSIPNDSENFDEKIHDYVALCRRIDERDLPAAYERMLRLITEQAPTAVLRLHQLAEEEAHRITDQIDRVNSGLGSVEFNRGTRLTLRAEPKALEAVGELNERARRISGRAVAVSMGDEKAIHDQYQDILQLRNLLAAETPEARQWTRDALDVRNRFVLYCEERDAGTGEPIRTYSNAGANSGGEQEKLMAFCLAGALSFNLANPETGDNRPVFAQLMLDEAFSKSDPQFAQQALSAFRKFGFQLVIVATVQNTTTIQPYIDSVVMVSKPDGPGVRPVASTRTVPIGELGDVRKAVSAR

SEQ ID NO: 31556 - protein, 486 aa, Mycobacterium abscessus subsp. bolletii CCUG 48898 = JCM 15300
MNDLTVEELFAHNDDVQKSRAVRLLAAKNLAPYITLMERHLDRSAKVSEPQLVAKLDRDLSAVGLGEQSGLALIKSWASDGWLHRASDGTGPDAENVCSLTEDARSALAFVRRLRRADTVATGGSIAGIAAGLKRVATQLDGDPSRLRADIEAQIAELQTQLHAIDDGYRPEPDIVDLEDETRAIAYQMEQVITDIVRYGSMQNEITAGLIDAAEDSDSGFRDRARRMFADYDALFDSRERASYSAFTRTIQDPDQRAALRSDIACVADGLPDLDPGLREVMRNFFKLVSQQIAEVSRIEQRCAQRIRRFFAAGTTEQARGRARQLNDALAAGHALLKMSTADSPIDAELPIGRSAAAAIGALSFTIKDTAPPVLAQDAPSGPLDLSGFSALATQVDMAALADTVNSAIAGGPVSLPDMISHVEAPYLGDVIVLWSLALKQDNTADRESVKVKFRSLDGQDRVMEVPQLMFREPVLATLEEEGSTL

SEQ ID NO: 31557 - protein, 249 aa, Mycobacterium abscessus subsp. bolletii CCUG 48898 = JCM 15300; identical to SEQ ID NO: 31486

SEQ ID NO: 31558 - protein, 1103 aa, Mycobacterium abscessus subsp. bolletii CCUG 48898 = JCM 15300
MSRLQVINWGVFDGYHSIEFSRRGTLITGSSGSGKSSLLDAISLAFLSSNRRNFNASSDTTAAGSSMGKRTVDKYVRGLWGELKNPGERPKQMFLRGKGGAWSAIAVTYSGTDGRVITGLVLKWLAPGSDSDSSSRYYLIDADADIRDLCNAWASKGYAGSVFEGAGWRGHKSERWYLEQLYAAVGIQGSSAAQQLLGKAKSLKSVGGLEQFVREYMLDEPESMAAISEALGQITPLVDARAALAIAQRQRQTLGDIEQIQQTYASDAAQLATVDVVDHHTVRDYVDQQRLALAGPEIDLLDTEITRLGGECDEIQSRQDILTGERDKLLGRIAAADSNLAPLKSELAHARARAEEVSRRRTAYDSALWDLGHEDDIESAEEFEAMRVESLRAVTRINAELEAGHDAYVMAAGALSTARDQLRAASAEFKRVEHLGTPVPPDEDRMRGEIAAALGLTAKDLPYVCELMDLRPGQERWRKSVEKVLRSTGLCLLVPDQHHRQVLRYVNENPMRGYLQMERVIPSGTPRRAEPGTLADCLRLTNPNHECASAAMNLVAGVGDYVLVDSPDEFSKHRRAVTDQGLRKDGDRRAVKDDRRELRASQYIYQGNAGDKRAALSDDVVEAQQAVSDAEKFIGEMDTKREELRSEVVRWSKLHSQYEYWSQIDTDSAEAAVARLQDQYDAMLEANPDLTGLQQQADSYLDEIKRLSERIGALRKQESEHDSRRTRLLDLLDNLNPREVGGHTRSGIEAYVPQLSSSLDVLEPDAYRLELWRQIEKDQSVLRESVTRSRNELNRILNAYDRDFPDSIPNDSENFDEKIHDYVALCRRIDERDLPAAYERMLRLITEQAPTAVLRLHQLAEEEAHRITDQIDRVNSGLGSVEFNRGTRLTLRAEPKALEAVGELNERARRISGRAVAVSMGDEKAIHDQYQDILQLRNLLAAETPEARQWTRDALDVRNRFVLYCEERDARTGEPIRTYSNAGANSGGEQEKLMAFCLAGALSFNLANPETGDNRPVFAQLMLDEAFSKSDPQFAQQALSAFRKFGFQLVIVATVQNTTTIQPYIDSVVMVSKPDGPGVRPVASTRTVPIGELGDVRKAVSAR

SEQ ID NO: 31559 - protein, 507 aa, Bradyrhizobium sp. STM 3843
MLFRYLHDDAFLAFSREHKHLYAACLLDLYERFFSGAPAFPTPQEVTHAIYDVMRANPTLWNEDDDFGDPLPEVISAGRRRIKRAGSGQTEESDRALEIARQVYARLVGWGWLEEEEYGLRVTVDMSMGPLLVVQRLASLNKDVSQRFGGLIVTVRLNLEAVEKLMPDVTDRKQREVALAVREARNQVDHFTKSLRAILSDLKRIRRAVMDSKTVGDRLEAFFEEFVGQLLLRDFESILTFNHPYRFRDAIVDLARRIAHTPPTMQVLAEEYKASGISPSMAEAARDAEDDLLAIESTFGQIGEMFERIESFRRQLEGRVRNTIKYAERGTQGLVGRAGDIVRRLDHLLALGRHTTATVEWSLEPLRSPWSEYQHAPSREPRKPMEAQALGERPSDPLYEIRKQLRLDYIARIAPGPAQIRSFLERQVPNGGMREARFIALSTIDDFLAFDAARRLALGRDVPAEIARHFELEFAPNTPPHDSEWLRCANFIIRRRAATAMRRIHAQ

SEQ ID NO: 31560 - protein, 212 aa, Bradyrhizobium sp. STM 3843
MLSEFEAIERTYGAERAGDLRKALHFLLRRQFVFAGDPRSATVYNTVMDGRFRAVVDGFFDSCGYRVHRDAEAQWAGITAMGEDVPLPRMKLDETIVILVLAAHWQDEVNVGAVEDRAVVVTTLNTLFDRYKDMVHRNGSSAITPSRFREVLKEASQRGLVDLGDLDAEAQDLEVAIRPMIKLISGADALQRIERYVRSQEVGLAVVEGDDA

SEQ ID NO: 31561 - protein, 1146 aa, Bradyrhizobium sp. STM 3843
MMELRHIAMVNWHLFDIEDVEITGHVGVFGENRSGKSTILDMAQVVLTGGNRNVQRLNAVAGDKGRSRSASKRSVLDYCLGTLGEDQRKRDQARTYICLGFVDSDGQRDPVTIGMAIEARRSESSETVLGRFVVTGKILTSDDFIEKRDGKKFPAEWDAVRNRIIASVGQGNFVNHRDKAIDYVREYMRKLVPHVSVVGEQNANALQKAVVNAMTLDHDQTATEFVRNYVLERNNMRVGELRESIRTYRNINDTIKTMREKLEALLALRAIIAELAGAYERRACEQWIARRGTWLSARAAYQIQMAKFAEEAAKRDAAKAEMDFLDQDIEAIETEVRRLERAIAEHDARTGRNALAQARDAAGQAMQRAVAAFEARLGRLRALEPLCAMTGYGFDDLIRPLSQATKTGRDAAIDRTTTVLVEAEAKLLSQDPALLDKVDESRRRLIRQADDERARAEQLRERLRIHSSGAGAAHLSDVTLHLCRKLRQANMVPRILCELVEVGDESWTAAAEGLLGRDREAVFVDRSDIAQATALFKEGRREFRGASLVSLNKLDPLKVPPLPGTFPSLFKSDDADALAFISRRHGSVRLADTLAQFNDPGRAIMRDGLYDDGLVRSHRAAEPASFKIGKSAQARLANEMRDEVERLTEQCARSEAAARLADKAYGELRRFFDDRSVTFASIIADFAKARQENDEIAERVAALDGEGDGGLRDKRREQRKLREHRIEQKRSQQHAFNTHLLEAGKAEGVIGGGENIPGSRLSVRHAWNLYGKSLLLYDRLAGRATYRNRLDASPKRPEADRHRAIADAATKAAEAAETERNRIERDVRRALGAYFDKFGVVTQVGVESEPLGEVKPWMDLLIEEMETSELRKYESQAREAAEKAATLLRGQFINALTSRIAKMERELTAMNRGLADHPFHNEKYSFHHTRLAEFQPILKIIEIGKTSPEALDMLFRGDEVPEDFPHRDTLREIEVLLEDPEKDFSEFEDYRNFFTFEIIMEDIVSGRRTRWETRRGTGSGAEQQVPIYVSIGASLASVYGSGGRHGGRAPGMALAIFDEAFSKMDGKNQRQMMSFYKKLGLQIIIAAPNEKRVAVLEHIDTVIEVDRIGESARASVAQLKERARAELRAMDPDLLSDDELKKLAAE

SEQ ID NO: 31562 - protein, 387 aa, Bradyrhizobium sp. STM 3843
MGRRFSDAEALLSHLLDRREDGIADPTARPDFSPLDNVSEIDCFVRRLEEAESAGAIRIVKGRGRDSDQIKLVRLQDTVRLYDLLGRRPVAELAAAATERLRDRLDVPQVFDTHIAAIRATWSRGKEWQKLGMADVERLRTALLFAKAILEQKHRGTDYRTFSRKVAGDSKALERLEGAVVRLLVPALELPPGARPRDALRTLGLEKFAPPLLLAGRLDFDSAELSLIRPAYFGIPPQEASRIRLRETPRYVLTIENYASFHRHIAEADRDGTGVTIYVGGYPSLATQDALRALAGLVPDNVPFFHWSDIDPDGAWIFRTIERIIARPLRPHLMTPELAEAFGRAPDDPSRPPRQAENTAIAALITYLSSEGAKWLEQEELDPAMPV

SEQ ID NO: 31563 - protein, 524 aa, Bifidobacterium animalis subsp. lactis BS 01; identical to SEQ ID NO: 30666

SEQ ID NO: 31564 - protein, 269 aa, Bifidobacterium animalis subsp. lactis BS 01; identical to SEQ ID NO: 30689

SEQ ID NO: 31565 - protein, 1165 aa, Bifidobacterium animalis subsp. lactis BS 01; identical to SEQ ID NO: 30668

SEQ ID NO: 31566 - protein, 406 aa, Bifidobacterium animalis subsp. lactis BS 01; identical to SEQ ID NO: 30669

SEQ ID NO: 31567 - protein, 486 aa, Gordonia effusa NBRC 100432
MQNAAQSTLAEAWDANRSIQKSAAVRLFAATNSALYVTLMERHLDFGTRLNETELAIRLERDLVELGAPDQTGGADLVKLWARQGWLHRITDTASSSTQITCYLSTEARSVLDYMRRLRREDSVATGGSINGVAAGLRRVAGQVTSDPQQIRDEIESQIHDLDVELADLEAGVRPEPDLAAAQDEARAIAYQMEQIISDIGQYGAMLDRITTQLLDDPNDSDLAYRDRQRQMFDDYEALLESPQSASYHAFSQMIQDPTQRGRLMSDITTVTRQLSDIDPGLRSVMDNFFALVTEQMSEVGRTRQRCARRIRRFVAAGTLEQSRGVARQLNDALTTANEMLKTSLADRRIGYELPLAKPAINSVGRLAFEIRNPAPPAPALSASANADFSSFASLAGQVDTVALTEFVNTAVATGPIALSEVIERLDEPYLAHVIVLWSWALKQTTPTTAAATHVRFRSMEGADRAIEIPALMFTEPIPTAEADAL

SEQ ID NO: 31568 - protein, 272 aa, Gordonia effusa NBRC 100432
MTTDLDATTTDDGPDDPGTEVPPTPDEFAGYDDLPTVVKGGGTTGPRLPRFDGDVSALPDRACWALQNLLTRRHISGERQPQLWTWVSEYRDELRTRLSELDLRLRIVDELEVAFVEQAGYDSRWGRRILKRETIHTYDAILALHLAKYLRASRNEHVLITREDIHEMFAGVTNTIDRDLAQFDKRIDHAIDKMTELAFLRAHRDDPDMFTVSPVISAVMTASVITDLQRQFEQFIGSGDEGELPPAGLETSEDENSDDDEDDEDELDGGDW

SEQ ID NO: 31569 - protein, 1118 aa, Gordonia effusa NBRC 100432
MNSSVSDVDQYRLSRLQLINWGVFDGYHSIPFSPNGSLITGSSGSGKSSLLDAISLAFLPDHRRNFNASGDATAAGASSGKRTVGKYVRGAWGERRDGTNAQREVMYLRGTGPAWAAISVTYTSTSGTAITGLVLKWLAAGKMTDAHSSYFICDGDADIVEVCNAWAASNYNPSTFREEGWRGGPGEGKYLATLYSLIGIRGSDAAQQLLGKAKSLKSVGGLAQFVREFMLDAPTSIVGIKDALEQIDPLVDARELLDSARRKRAILGNIEAVQERYATEAATFTVLDTIDTATVRSYINNLRLHNAVPEVADLDDQIARLDGDLAALTSQHDQLRSDHSHLLSRIATSTGDLAPLQEQLATAQKTGDEAAARRSTYEDKVTGLGFSAPNDAEDFWSLREHMIGEATRIDGQLAAGKGHFAELLAAEVAARTRRDAAVDELSRVQQAGSALPRAEHEMRRILANALQVDESELRYVAELVELAPDEERWRLAVEKVLRGAGLRLLVPDKHFRAALRYVNSHDMRGRIQIHHAEQRPMPTPEPGTLGATLRAVDPDHPCAAEALTVLTKLGNYMCVDSPADFGAHNKAVTDQGLRKDSAKLAVKDDRQPLRPSQYIFVGNVEAKISALREELSAEQNEYDIAREATAEIDAERTEKQQRRDSYRRVCEQFTQWSAIDTDAADERLDQLTEQYELLMVDNPDVEALQRKAEEIWEQVRTAISQAALVRDKISRHDDRRTQLLDLIDRITPDEILAQAQNTLDGFREESAVPLDVLAPEPYRQELLKVVAKDRDRMRSDARRSRDELARIIDTYDEEFPDAIPNDSDDFDERVHDYVAVSRRIDERELPAAYERMRRLITEQAPGAILGLHMAADAEERRIVEQIERVNTGLAAVAFNRGTRLRLVPGRKHLAAVSELTERAKLISARTTAVSFGDEQAILEQYADILMLRERLAGATPEDRAWTRDALDVRNRFDFYCEEHEASSGEVIRTYSNAGDNSGGEQEKLMAFCLAGALSFNLASPHGDDNRPIFAQLMLDEAFSKSDPQFAQQALSAFRKFGFQLIIVATVQNTSTIQPYIDNVIMVSKTEAAEDSRPMATALSTSIQDFSDLRRTSGARLPV

SEQ ID NO: 31570 - protein, 487 aa, Gordonia polyisoprenivorans NBRC 16320 = JCM 10675
MDSATQPTLMQAWETNRSIQRSAAVRLFAATNSALYVTLMERHLDFGARRSETDLAIRLERDMAELGVGDQPHGMDLLKLWAKNGWLHRMADPVVATQNLCYLTPEARSVLDYMRRLRREDSVATAGSINGIAAGLRRVAGQVSDDPSYIREDLTHQIEELDAELADLDAGRRRRPDLRAAEDEARAIAYQMEQIISDIGQYGSMLDRITTALLDDPNDSDLAYRDRQRQMFDDYEALLESSQSASYHAFTHMIGDPTQRARLVSDIETVTAHLPAIDPGLRSVMDNFFVLVTQQIDEVGRIRRRCARRIRRFVASGTLEQSRGIARQLNDALATANELLTISLADRRLGYELPLATPALTSNGRLAFEIRTPEPPQPAVPATGETDLDSFVSLAGQVDTVELTEVVNNAVVDGPVALSEVIDSLDDPYLAHVIVLWSWALRQSSATGDPVATEFIRFRSLDGEDRLIEIPALHFTEPIPTAEVDVL

SEQ ID NO: 31571 - protein, 285 aa, Gordonia polyisoprenivorans NBRC 16320 = JCM 10675
MTDQSERFPAKGFSAEGFSAKGLSTEEFNGYDDLPAVSRTAIEETKVPRFDGDVSAMPDRACWALQNLLTRRYVSGDRTPQLWSWIVEYQEPLRIRLSELDLRLRLVTELEVAFVEQVGYDSRWGRRLLKRETIQAYDAILALHLAKHMRAAREDQVLITHEEIHELFAGVSNTIDRDLALFDKRIDKAIDKLEELELLRRHRDDPDTFTVSPAITAIMTASVITDLQHQFEQFIGAGEEADAQTLDRSAPESEDDNSGYLAEGDRDTDDGDDTEDDDTDEGDDW

SEQ ID NO: 31572 - protein, 1114 aa, Gordonia polyisoprenivorans NBRC 16320 = JCM 10675
MSDRVDQFHLSRLQLINWGVFDGYHSIPFSANGSLVTGSSGSGKSSLLDAISLAFLPDHRRNFNASGDATAAGSASGRRTVGKYVRGAWGERRDGVNSTREIMYLRGTGPAWAAIAVTYTSTSGVSITGLVLKWLAAGKMTDAHSAYYLADGDADIVDACNEWAANGHNAARLRERGWRGGPGEGKYLASLYSLIGIRGSEAAQQLLGKAKSLKSVGGLAQFVREFMLDEPTSIAGIKDALEQIDPLVEAREFLDVARRKRTILGNIEAVQERYATESAKFSVLDTIDSATIRAYVTNLRIRNAEPEIADLDDQIARLDGDLAALTSQHDQLRQDHSHLLSRISSSTADLAPLQEQLAAAGKAASEVSMRRASFDSKMSALDVEIPESAEDFWETRESLIEEATRLDGQLEAGKGHYAELLAAEVAARSRRDAAADELARVREAGSALPRAEHEMRRVIADALQLDDSELRYVAELVELDPEQERWRPAVEKVLRNAGLRLLVPDRHFNAALRFVNTHDMRGRIQLHHVERRTAVLPDPGTLAATLRPVDPEHPSSAEALTLLTRLGNYVCVDDPAEFADHAKAVTDRGLRKDSAKLAIKDDRQALRPSQYIFVGNVDAKVAALGEELDHEDSIHAAAREATAVLERERADKQRRRDLYRTVCEQFTQWSEIDVESADDRAERLSEQYELLMEEHPDVEALQRKAEEIWEQVRAAISHAALVRDRIATQDERRTQLLDLVDRLKAEDISGPAQAALDTFREDSAATLDVLAPDPYRQELIKAVGRDRDRMRADARRSRDELARILATYDEEFPDEIPNDSSDFDERIYDYVALCRRIDERELPAAYERMRRLITEQAPGAILNLHMAADAEERRIVEQIERVNTGLGAVAFNRGTRLRLQPGRKNLGAAAELTEKARQIAGRSTAVAFGDEQAILEQYADILLLRERLAGATPEDRQWTRDALDVRNRFDFYCEEHDAETGETIRTYSNAGDNSGGEQEKLMAFCLAGALSFNLASPHGDDNRPIFAQLMLDEAFSKSDPQFAQQALSAFRKFGFQLIIVATVQNTSTIQPYIDNVVMVSKSEAAGGRPVATATSTSIGAFSDLRRASGKNRLI

SEQ ID NO: 31573 - protein, 487 aa, Gordonia amarae NBRC 15530
MSDDHATLTQAWQENRSIQKSAAVRLFAATNSALYVTLMERHLDFGARLTEPELAVRLERDMAELEVDDTPTGVDLIKLWARNGWLHRVTDTSDDVAPNLCYLTADARSVLDFMRRRRREDTVATGGSISGIAAGLHRVAGQVAGDPDQIREDIESQLAELDAELADLDSGIRPEPDLQIAADEARAIAYQMEQVISDIGQYGTMLDRITTALLDDPSDSDLAYRDRQRQLFDDYETLLGSSQSASYHAFTRMIQDPDQRARLSADIDTVTRSLPDMEPGLRAVMTDFFPLISEQMAEVGRTRQRCARRIRRFVAAGTLEQSRGIARQLNDALATANDLLKTSLADRRLGYEMPLATPDLTSIGRVAFEIRDPAPPPPALPGDARGDLSSFASLAGQVDTVELTDLVNRAVADGPVALPEVLDRLDEAYLAHVIVLWSLALKQPGAVPGATEIVRFRSLEGDDRIIEIPALTFSEPIPTADIPLDEV

SEQ ID NO: 31574 - protein, 256 aa, Gordonia amarae NBRC 15530
MTDTTTDVPDEFAGYDDLPAVPLTSADHGPKMPRFDGDVSELPDRACWALQNLLTRRHISGERQPQLWSWVSEFADVLRVRLSELDLRLRIVDELQIAFVEQVGYDSRWGRRLLKRETINTYDAILALHLAKYMRASRDENVLVTREDIHEMFAGVSNTIDRDLAAFDKRIDRAVDKMEEMEFLRSQRDDPDTFVLSPVITAVMTASVITDLQRQFEQFISSGTEAPETDSETEADTESRPDPDESRLDTAEGADW

SEQ ID NO: 31575 - protein, 1113 aa, Gordonia amarae NBRC 15530
MTDIDQYHLSRLQLINWGVFDGYHSIPFSTNGSLITGSSGSGKSSLLDAISLAFLPDHRRNFNASGDATAAGSSSGKRTVGKYVRGAWGERRSGSGAAREIMYLRGTGPAWAAIAVTYTSTSGASITGLVLKWLAAGKMTDANSSYFIHDGDTDIVEVCNEWASGGYNTARFRERGWRGGPGEGKYLATLYSLIGIRGSDAAQQLLGKAKSLKSVGGLAQFVREFMLDEPRSIAGIKDALDQIDPLVQARELLEVARRKRTILGNIEEVQERYAGESATFSVLDTIDTEAVRAYLNNLRLRTAEPEVADLDDQIARLDGDLTSLTAQHDQLRADHSNLLSRISTSTGDLAPLQEQLAAAQKFAGEVAIKRTNYEHRVAALGFELPDDGEQFWELRDQLMDDATRIDSQLEAGKAQFAETLAHEVALRGQRDAVAAELNRVEQAGSTLPRAEHEMRRMLANHLQIDESELRYVAELVELRPDAGRWRLAVEKVLRGAGLRLLVPDEHFRAALRYVNSHDMRGRIQLHHAEQHRMPTPEPGTLGATLHAVDPDHPCAAEALTILTRLGNYVCVDDPAEFRNHTKAVTDQGLRKDSAKLAVKDDRQALRPSQYIFVGNVDSKIAALREELDHEQALYDAAHQASAALDRDRTELQQRRDAYRRVCEQFTGWSEIDTDTADDRVDALTDQYELLMDANPDVEALQRKAEEIWEQVRGAISQAALVRDKIATHDRRRTQLLDLMDRLSRENVSDHAAATLDGFREESAAVLDVLAPEPYRQELMKAVNRDRDRMRADARRSRDELARIVASYDEEFPDAIPNDSDDFDERVHDYVSVCRRIDERELPSAYERMRRLITEQAPGAILSLHMAADAEERRIVEQIERVNSGLGSVAFNRGTRLRLQPGRKTLPAVAELNDKARQISARTTAVSFGDEQAILEQYADILLLRQRLAGATPEDRAWTRDALDVRNRFDFYCEERDAGSGEIIRTYSNAGDNSGGEQEKLMAFCLAGALSFNLAAPDSDDNRPLFAQLMLDEAFSKSDPQFAQQALSAFRKFGFQLVIVATVQNTSTIQPYIDNVVMVSKTEGADGRPAASALSTSIQGFTEVRRTNAGRLSL

SEQ ID NO: 31576 - protein, 474 aa, Erysipelotrichaceae bacterium 6_1_45; identical to SEQ ID NO: 31145

SEQ ID NO: 31577 - protein, 222 aa, Erysipelotrichaceae bacterium 6_1_45
MKVEQLDLKDREEFGWIVNILLAENCIYQYAKIRQFEKKERNADYVFIHDHWDCFEEYLRYAGWLLCRERSSYMGMIYLVNEREDCSCRYRLTKLETQLLLILRNYYEEKMLELDASLTIRISVNELLQLLVDVHAMVSVRPSMQYIHAALQSLQRLNILQKYTQGDEELIWVLPYITCVLTPKRVEEILMKLRNEEGEEDDEAEENAAGQLAVLREDDPEL

SEQ ID NO: 31578 - protein, 1082 aa, Erysipelotrichaceae bacterium 6_1_45
MKKKALLKDTLREIRKSFGRFFSIFAIVGIGVAFFAGVRDSVPVMKNTADTYFDDYNFMDLKIMSTIGMTKEDVSAIRQVDGVAGVYGSYSMDVLNTHNNQQRVYKLLSYPMNAKAEDENYINQMRLIKGRLPRKADECVIEYTNIKGADSRIGEMITFASGTDEKLDASLKRSTYKIVGEVTMPYYLSYEKGSSAIGSGSIDNYAVIPDTNFKSSYYTEVYVTVDGAKKPNSYADAYFDIIDPKKTTITALGEERAQERFDDIKKEALAKVEAGRKEYEKNKKKYETEIKNAKDKLENAKDELLVGQATLNAEKSSAERTIQEKEAQLQQSEQTLSQLKSQYSSAKSYLDAQQKKLDDNLPQIQKQIAEAKAKLSSLDEELAKVDTQLQDPNLTELDKQLLQEKKAALETSRQVASPALTMLEAQISTMQEMVTMAASQLHALETQIATAQQQIETGKQQLASARVSAQQESAAAQDKITNGQKEIALGKLELEKQERDGAAKLQEAKEKLDRSEEDINSMETPKWYVLDRHSHYSYMDYGSAADRMGAIAKVFPLFFFLVAALVCLTTMTRMVDEERQEIGTLKALGYSKPDIAMKFVAYAAIASILGGICGAVIGMIVFPTVIFNAWGIMYTLPDVQLQADIGLAALAIGLASVITVAAALAACYKELVETPALLMRPKAPKNGKKILLERIPFIWKRFNFIYKVTARNIFRYKKRFLMTVIGISGCSALLVAGFGIQDSIGEIAVKQYGDIFKFDVTMTYKGEDTLSQKEQELNELQKDSRVKSATAMAVYHGFYADEGEDKGIDLYVPQDVESLHTYISLRQRGSNEAISLNNDGAVITEKIAKDKHLKVGDTFPIDNGDGVKKDVKIAAVTENYVGHIVYMTPSYYKSVYHKTPQSTGMFAIMRDSSEKDEQALGNAFMKKDTIDSVSFYSGIAASFQDTIASLSFIVVVLIISAGLLAFVVLYNLTNVNISERLREIATIKVLGFYDKEVSAYVYRENIFLTLIGALAGLVLGIVLHSLIMSLAELDTVMFGRNIEKLSFLYSVAITMVFAIIVNLVMYRKLKKIPMVESLKSVE

SEQ ID NO: 31579 - protein, 474 aa, Erysipelotrichaceae bacterium 21_3
MSLFEKMDPSFFTILVSKNRDIYVDLLLQIHDCIYRNQTMSMERALLQDLLEDYVQDKKYEIDFQEEAEYSDIENELRSEKDVYDRDIQFLLRLFEKHTWINVDLHMDTMKKMVSLPYHSRVFISFVNDIIKEREQIGYLIRIHASLKDMDDPVKIEDSYQHIRNAYADFKELILTLEQTNARIRDYYAIQVKKASTKIYHDFFDVYYGDIVEGYVFPTLVEDSLKRFKNPVAGILETLLQEEAVKEKIVDSAVSHYRVASRDTAKKHIEEMLYAMYNDLNIVETLTAQLVDSDAGYRRLAKQKIMYLCNSDQGLKGKLVELIHHMKEEPQRVCEQISESINIQQTRYMERDEVYTFERRRRRDEREVMTFTFEESTQNQEELEKRIGFDRYARFTRESISAYYAEKLHGEAVGKLKDIGVKDMDDYIRSILVYVYGRDRKMDVQATQIPNQTEGITEGDFHYPNLLIKRKVTK

SEQ ID NO: 31580 - protein, 222 aa, Erysipelotrichaceae bacterium 21_3; identical to SEQ ID NO: 31146

SEQ ID NO: 31581 - protein, 1093 aa, Erysipelotrichaceae bacterium 21_3
MLLVNWLYYEKTILSFEDIVFLSGKTGEGKSALIDAMQLVILGRTDNSIFNKSANDKTTRDLMGYLKGKYKDGTFKRDKGMFSSHLCMEFEDEQHRIYCFGIVFDVNGPTRGDTEHCYYMMNQPIPGHCFTDEGTVFNIRRMKKLLASFQDRSCRSFTTHMDYKNYFRQRMLIKDQRFFDVFKMAVAYTPMMNISEFIVKNICQEEEDLNLEEMQEEIQDYRQMKEQLETVQQKKAQLSLIHEQYTDICGEQERVANLRVEQKAAVYHGMLVEHDEAAAQYEVYTKSYQKLTKESRETEEQRALLEQNMEALRDARRDNAADILERKIQAHLEQRNTLQRDTTAVQQQLVTKGEFLKEQIEQLEEIEDYDGLQLEDFDLSGIKLAIQRSVHAAQQLAAFDLDAYRDIQRQMRDIENTLSTVRQTMQNSLQTCREEQEVLAANRRALEAGKKTYPKKLLVLKQELEERLYQQVGKPVEVCILADLFSIQEEAWTNAIEGYIHNQKLNLVVEAEYFMDAYRIYRSIKEEKKIHTYSIVDIAKAKPGKRPDAKTLYDCVQVEREDVRPYVEYLLGRVVCCEAEETLRSYPVSITSDCMLYSGYAVSHMNPELYKVPFIGADSIEKQLQELIIRQQKLTSTCRKLETVTRTLQAVQLQTVISDDFIRQLEDGLCKAKEVEQLEQKIKELRDAQTPESLQELLLLDQKLDEAKKKKNELYMLQVEQESRRRQLEEDMKLCNARIQELQQQVKEAKKPEQGIPDTIGAITTADGIRRKQKQLEEALRELNSRVEISKLELITKKTHYNDTFRIALNPNFLCDDYEREYEKHSDNIVEDYIDKCRLAQQKAYECFQNNFFSALNSKIENVRMQIDRLNRSIRRHKFGRSSYEFVCTCNEDYREYYNLITNKELNGHNLLNTKVYEENEELIHELFDKISSLSSMQDPKKYQELQKEVQLLSRFTTYLKFDILENGNSLRATIGSSSGGETQTPFYVAVLVSLFSVYDAGNDGLQLAIFDEAFDKMDNERIEECIYLLKSLGFQAIIVTPTDKISNLSKVADATLIATTDEKNGQRVSTVQKWSQKENIAIPDSEMRQEEV

SEQ ID NO: 31582 - protein, 468 aa, Lachnospiraceae bacterium oral taxon 082 str. F0431
MNIFDEIDENLFRPLTGTNKRKYADILALIWDKCKRMPMYSIEKSTVFDMAEEYLLGLGESVELDIEEQEEVSGNISDMRVVAGTLIRRLRDTGWLLEKPGEYEEEDKLALQYKVVSILKSFKEVVSPTIVTYKGKLFKIYSMFEHISEQGSPYEGVLKEASEDFDNLNQALRTLSASIEDHINELTMGKSPQEILEFFEKYEEKIVVGSYHRFKTNDNLFYYRSSLYESLDKCEDSLFDALVLDCIDTERVEKDIAEVKIRELITKVRMDIEEMEGLMRAIDDRHIIYRMRAVQRAQFLLLSDGSSKSKINNILRFYASTIDSKEDGYKDDDTVGAKIFQIFCQNFFDSASIATPVRKRKPTPIELMSIFEEPDMELVEEKNKKMMEYIKNALTSENVNRFARDILAGNHAVQISSVFEKDPDTFTKIIGLYTYSKTSEREYDIRLKDNVVEINGVRFKDFIVEERR

SEQ ID NO: 31583 - protein, 191 aa, Lachnospiraceae bacterium oral taxon 082 str. F0431
MAVDIKEEIANYLLNNCFLMGTVDTTREKYYYVINHEESFRQIFLPIGYTLVVHRNLRVIQLINNHGSGRVILKKYESIILLILRLLYVEKRESLSTSEDMVFATVEEIKNEYEKLNLPRKFDRVLLEESLRNIKRYNLLKVEDRLSDMDAKIRIYPSVMLAMPDVNINKAYEETAKLLAQYENSEDGDEE

SEQ ID NO: 31584 - protein, 1109 aa, Lachnospiraceae bacterium oral taxon 082 str. F0431
MIRMTRLHLINWHNFQDDIIDFKNITYLLGVNAVGKTTIMDAVRYCLTTNKDFNTAGNKKSGRTLLGSVHQKQRAEDSYLRPGHTVSYIGIEFLDEAIKKNFVIIARIESETPKQDLKGVYQDWYITKPGFVLEDIPFFTKKNDAKRPTSRDAFKLENKGMDRASNQSDAKRRICRVLGIGEANSPIGKKFNEVFHMGTGLDDIKDIREFIYTYILPEPEVNIEFLQKDMLELERLQEILQEASDREELLKEINERIKSAKELLSKVKINESLVAYANLQENIEETNEKKYLIEEWNKSLEMLDKRLLELSESENKASALLYEAQRAAEENVENKEMLSLESENKNNKLENEKLILEAGIFEDVLQKLFFLIDRLNKVGFYVKVDDSIKDENADKDDRIREIKNSAKLFADMEEEIKNHDAKIRNDIAELNDKSDVLSKKIKSLEAGVMCYPDEAIFVRDKINAFLSEQSKRADAKLLCELLYMTDNSWQDAVESYLNTQRFNIIVEPGNYLSAKKVFVSLGDKVKGIGLIDTRKIKEPEYKSLNEAYLGDKIDSENIYAKSYARYVMKNVICCESSDDLENFSKSVTRDRLRFQNFCLQRMAKKEHFIGVDAIAKQLKSAKEEFAGVKKELTRLEEAKKNFDSIYNGYTKFRAGDNFGKLENYCESKAKSKVLSAKIEDIAKKIEEFKKNPILLAMYDRVKECKKNLNVVRDEITDNKAKKQNINADINRAKNLLEELEASLSNLQTIYEKSVEEYPEFINDVEKKYQNERKSKKASAIAYNFSNRVIQDNIALNNYLNQELIPLQHRYMATYTCDYAIGLGGANRYMQEFLTLQNIELERHKSELVNAQIRCKDRFRKEVLFRMKDDILRAKQQFKQINRVMENLEYGEESYRFGIDKSKDRELGMFYDIIMDKDNMQIDRDNEMLMLIAESNKSEVFESQIDDFMQRIMIDVEEHARQNLSGQKSGAKSMGMYVDYRTYLDYDIIVKNCVTGNEVGLSKVNAEGSGGENQAPFYVAICASLLQIYEQSKEGSIRLILLDEAFNNMTSDRIEPMMNMFKKLNLQLVLIATAEKATAILPYCDITYSIVKSGNRNAIGVFERIEDGLH

SEQ ID NO: 31585 - protein, 401 aa, Lachnospiraceae bacterium oral taxon 082 str. F0431
MDYIKDILNRLIDMYERREGFKKEPSYLRVIQADIKKIYPEYADRYNHNVYKDINTAIEKLINENLIESKADETGKYEKVKLNVESIAECYKRVKRIDIPKRCEKIKEVLDLFKDRNMPVLRCIISDWSKLISNYKKLPYDIKYDKERLFNILKILEAILGLGRESYIRNFSTAMFKDSKRFQREFKSTVESILFDYTDEVVEKDKILEYYNLYENPTYVYIKGDIVIKFEDSVIHVREINGGIALSNSALEKIKEIKVIAKSVITVENLTTYHDEDEKDSVYIYLGGYHNRSKRVILKKIYDENKHCEYLHEGDIDVYGFLILENLREKTGIPFKPLNMGVDTVKRFYDAKIYKELTTSDINMIEKKKGKLGEYRQVLEFMLLHNCKVEQESIRAVEILN

SEQ ID NO: 31586 - protein, 494 aa, Solitalea canadensis DSM 3403
MLESFHSILKVRIHIDSAITLKLLRARNLPLIITFLNREFKENEQMMIPYQSLVQKLGDFLEEIEYGDDDDDEFKSVKLILDFDEKAKLYIDRWIDLNYLRNIMDDSSKVLFVLLSKHTEKAFQFFDLLKEREFVGTESKFKDIFHKLRDIVENANPDKVKRLDELEKRKQTIEEEIRKIKIDGFVTTYEDYQVKSRYEDINRLANELIGDFKEVEDNFKDITRRIYERQQNTNLSKGKLLAETFDALYELRATDQGKSFYAFWQFMLDDVSQADFQKLTKEVYQVLEDRGIEVSSRSLRKLKNLLHIAARRVLDKNGILADKLSREIVAKDQLESRKTRELMSAIRTMAIKRINKPFERDVCMELDGDADVYLPLERKLGEKPEVNIFTMNAESASLAIEDIGDLSKLFNADLIEKKLLLDNIYELLLDRSQISLKEIVEIKGITKGLSELLAYITLVNTSSKFFINDTVKETICFDDYLNKYLELPQIIFSN

SEQ ID NO: 31587 - protein, 196 aa, Solitalea canadensis DSM 3403
MEFINPNIAVYAKAAVKLLQGPVFEDQKELWEEINKYHVELTRYFEKIAVNVIIDNRDGYAYLKQIELDDSGLTIGLIRRIPLSYDLTLVCVLLREWLLEFESNDVETTNLYITVKQFRDRLEMFFKEKTNELKFIKELNKHLDACEKMGFLKIVNKQSSNSDDDLYEVKRIIKARITNDELTRFKQLLEDELKSV

SEQ ID NO: 31588 - protein, 1137 aa, Solitalea canadensis DSM 3403
MSLSLFSTKPNESGFRLHAYEIWNWGTFDDKIWTLQPRGETSLLTGANASGKTTLVDGLLTLLVPEKRMRFYNQTAGSKGERTEDSYVMGEYGETENEITNAREIKRLRAEKTKAQSILLAVFQNESQFVTLIQARWFAGGELKRTFIIAYKELSISRDLMPFDSNGDWKKRLKQKYPKQGSKELLMFMDSPGEYGRMMRKVLGMRSEKSHTLFSQTIGLKVLGNLDEFVRFQMLEERDSEIEFQKIKSYFKTLNDAHRAIEKTNKQIELLSPIRDVGVTLTADKVDLVLQEKHQEILPLWFARKSQSLIESFLSSESKIKEKGETEISLLQQEIGDVEDKIVKVSVQIESDEVGRQVGDIEKEIKRLIREKEDKEKVLKQYNRLAEELDFQLNPESASLFEEQRNTAKDSKSKVSIELEKLEEDQYQAKRLKEKLNEQFDNISNELSILQSQKNNITGSTARIRKELLDYTGASELEIPFVAELIKIKGDEKYWEPAIEKVLHNFALRLIVPDKYYQQVNEYINNYDLRGRMIYQRFNKRDVSPRLFQQVDEGELIYKLEFKKTEYTEWVQSEINKKFNFICTDDLESFQLLEKALTSKGLFKNSTRHEKDDRPEVKNQQLYVLGWDNKEKLSVLKGKAAELNLAVSESVKKIEYIKNQQDRQKNIGDNLTRFIEHDDFKKIDWWSLSSKIQENKIRIEALQKSNDRVKTLKDQRDGLVANLQVLKSKLDGLKNTITIIGAEIKQQQQKLRETIEIINRYIILPDQTDILCFENTFITDIDLKLDSIDNFRKRIQSIIYESIETYKDKIRSQESAVETLMRAFINPPRNITDQFEDWSSETHRLRERAEFIDEYIALLDKLEKQELAGYKQQFKKYLNEEMITKMSDFQTWLERQEEDIEDNIETLNKSLEKIDFKSNPPTFIKLHIEKDYAPRVKDFKIRLNDWKPNLIEFERTKDDNILEQSFNKIKGLLDYLTSDETARKEVLDVRNWLKFKAVEHHKEDKTKIFRSYTGTAKLSGGEGAQLTYTILGSAIAYQFGIHQEGLNTNSFRFICVDEAFSKQDDEKARFLMELCKQLHLQVMVVSPAKAEEVAIVEPYIARVHFVQRKDNRHSVVYDMPIKQLVEHREDYLQSELS

SEQ ID NO: 31589 - protein, 380 aa, Solitalea canadensis DSM 3403
MITTTEIKKKADRIYPQVLRSVLTEENVFPFHIRADKSLSKDFVSMSREIAHIMDDSKDRKGFGYTVVAERTKNRLHGVQDIPKAIIFESQIDFLKYVGKQKEFEAFNSDIKKILSLIPELKDWCISNPLLVINNSLKWDDLIKVCLWFMSFHETEKYYIRELPIAIDTKFVESHISILRTLLDELVPHLTKMEESFFHKRFGLKYQEPRIRLRFLDKLLAIEGRFTDISLPLSDFVKSNLTCKKILITENIMNFLTLPDLNDTIAIWGGGYAVTNLKNIKWLYDKQIFYWGDLDIHGFEILSQLRGYYSHVISVMMDETTLREFSIYQVSGSKSNVSNLNHLSKEEKQLYVELRTGNIRLEQERIPQQYVNKWLESSLS

SEQ ID NO: 31590 - protein, 499 aa, Oceanimonas sp. GK1
MDETALQRTQKYVSARRQNPAWVLLASRRAPLILGCLSSLFEQADDGIAEEDALQALSSMLAEYAVQDEYEIEPDNTRLQAGRDLREWIKRGLVIERAQRLYATDALGAAIRFIDSLDNRIMTSTASRLSVVQREIENLEMGLNPNPASRIASLESRIQQLQQELKAAQSGDIPVLSEAEAVERIREVYGLATALRTDFRRVEDSWREADRNLRQSIMSEQLHRGEIVDHLLDGQEALLHTAEGRVFDSFQQQLRQSSELDRMRDRLRLILSHPSANKALEPNQSKNLRWLPSRLVKESQAVLQARARSERDVKGFLKTGLAAEHHRVGQLLNEIMNQALELDWQPRANRREPVPLPPVGVALAKTPLPERLRFKAIENIDQQALDLSRHRADLSDLDAEFWDALNGLDRETLIRETLQLLAEQGKPLTLVEIAQHLPPEHDLETFALWLGMAREAGVEIDLSQPQEFEVLDEDQRRWLFSLPYLTLSSQDVSDIDWEF

SEQ ID NO: 31591 - protein, 241 aa, Oceanimonas sp. GK1
MNGVFDRITQAFADEEPQVTPDVEAAGENELPDQHQESERTPARLREVSQDLLRFGLLEERQKPNFYKVAVRELDELNRILEPLDLFAAVDDVRGLVFLKVLKADENADVEEEWSHPLVRKQRLNLEQSLLLAILRQYFVAHEQEAGTGATQALVAVDELIPQMQVYLGDQGSESQERSRILELLNQLKEHGVVTAPDKDERVMIRPVIAHLANPENLTALLHWLRERAQNECDTHKEREQ

SEQ ID NO: 31592 - protein, 1101 aa, Oceanimonas sp. GK1
MNQAGLWQQDASYKLQTLELFNWGGFGGHHTADIHTEGTAVIGPTGSGKTTLVDALMTLLCTNPRYNLASTGGHESDRDLVSYVRGVSGPGDGSGTQSHIARPGKTVTGIAASLSNGDELVRIGLLLWFDDTSSAVGDMKRLFFFATSPAQTLEHWLTVQHEGGMRALRQLEKTQAGLWSYQTKKDYLVRVRSFFDVRDNAFNLLNRAAGLKQLNSIDEIFRELVLDDTSAFDRAREVADSFDDLSAIHEELEVARRQQISLEPVKTNWLKYQANAEKLTEQQTLSRILPVWFGLQAEHLWQQECQRLAQDCEAAECAKNEAQRQHDQQVELCDGLKEQYLQLGGSDIESLEKLVKATQKELANCERDAGDYQRLAQQLGLSDSLDKTSFTHNQAQLAEQQKMLGAEAESAEQAVYTAGVQHMQACNTLQSLEQELTEARQRPGSNIRSEYQVFRAALAEELDLEPDQLPFVAELVQVKESEQAWRGAIERAIGAHRLRILVPPHAIKQALRWVNARNNRLHVRLLEVKAPDAPIRFFDDGYTRKLEYKNHPYRETVKALLARLDRHCVDAPEQLRHTEHAMTQQGLMSSKARVFDKQDQKRLQDDWQTGFDNRDRLAALEAQITEARQQLGQLQAQLEKAKAEAQQLNTRQQLITQLQTLSFEQIDLGQVQHDLAQHQAKLQRLTSPDSDLAAAKQALDAAQQSLADLAGQVQTLTENYFKLKPQLDAAKREHASAQQRAAQGLNDEQRQIAAARLPTLEASQRNELDEMERRAALAVQQALDAYKEKQSRLVQELVRCMAKAKQEDRGALSDVGTDLDDTRQYLERLQILVEEALPEKRQRFKEYLNRSSDEGVTQLLSHIDNEVAMIEERLEDVNATLRRTDFQAGCYLQLVASKVVHESLRSLNTAQKRLASARFQDDDGESQYKALQAIVEQLRDACERHRTQAARALLDPRFRIEFHVSVIKRATGKTQSTFKGSQSGSGGEKEIIASYVLTASLSYALCPDGASQPLFGTIVLDEAFSRSSHTVAGRIIAALKEFGLHALFITPNKEMRLLRNHTRSAIVVHRRGLASSLITLSWQELDAKKPQRTGATDEVTH

SEQ ID NO: 31593 - protein, 383 aa, Oceanimonas sp. GK1
MKLPTDIAARLVKQWHQTSLRRERLLSAEAWPIEFAIGKPSANMFSEQPGKVRRHLEHWQAVNIGDVEWQPVKYRSAAEPVEMPVRWLLRNPSQWIAAAADKVVEGEFKTLENLVVQVNPLYRELLITERGLWRNKPTDEVIAAAQLADSLAPGCAQGRPLRLMAGLAVDTKFMERHARLVMRLLDMRYAGEASEQGLENFLGASNDKEHWLLVLDLDGKLLPFRRMRLTSRQLASAVLPGSCLLVVENEQCEHLLPPVPDTLAVLGAGLDLDWLANPAFQHKKLAYWGDLDSWGLLMLSNARKCAPHLVPLLMNEEIFNQLAEGSAVVEPVSAQPVTPAALNSEEARLYETLIKAPRGRLEQEYLPAEMVERAVHHWACLFG

SEQ ID NO: 31594 - protein, 498 aa, Cupriavidus basilensis OR16
MDLDWKQRTQQYVQARRQHPAWQLLAARSSPLVLSCLQTLFERSHDGIVCEEAQQALAALLEQHANSDEFGVDADDSAAAARKELRAWIRRALVIEREGRLYATDALEEALRFVAGLEGRLMTSTASRLSIVQREIESLESSLNPDPRSRARYLQRKIAELESELAAVNAGEVKVLSDAEATEGIREIFNLATSLRGDFRRVEDSYREADRRLRQSIVSERNHRGEVVDKLLNSHDGLLETPEGKVFHGFQQQLGRSAELDAMKHRLRSIIRHPATRSALNSQQQGELRWLIIRLVDESAAVIRARARSERDVKGFLKTGLAAEHHRVGELVNDILQQALAVDWGSVAVRRQAGPLPPVAIAVSGLPLVERLRFKASEDDEQQGLELGSRSMDTTLIDEDFWDAFDSLDRQALMERTLALLEESGQAMGIAELARHLPPTHDLESIALWLSMAREADAPVHRQRERVDVLGRDGIALRFQVPQVELGAEHLRGLDMEI

SEQ ID NO: 31595 - protein, 251 aa, Cupriavidus basilensis OR16
MASIFDDLTAADGPAATVDSSSRHSEEEVPLPSAAQAGAERGLAITPRQVKDACQELLKLGLLEAARKPNLYRIATTHAADIDRILEPLDLALKIDDVRGLAFLVVSQPLFAEAEEEWSHPLVRRQRLTLEQSLLVALLRQHYVAHEQEGGIGAGDAQVALEDLLPQLQLYLGNLGSDAREQQRLRTLLEKLKPHGIVSEVDPHDQVAIRPIIVHLANPENLQSLLQALRLAAHAGADDDSGASSDSEDAV

SEQ ID NO: 31596 - protein, 1001 aa, Cupriavidus basilensis OR16
MLPSAAYVLTHLDVYNWGPFGGRHHAEIDIEGTAIIGQTGSGKTTLVDALMTLIAAQPRYNLASTGGHESDRDLVSYVRGVSGVGRGGDTDHIARPGKTVSAIAASFGNGNVRLTIAGIFTLEGSSRRADLDRIWLISRQEQQGLDEWLEVHHAGALLPVEKGWQSRGEYRQQQAVQLDLIAMLPVCYALRAHQLWHGRADDLARQIGFCTQRVDALSTEIGEQEVQEQALRDRYLQTGGSNVELLEEQIERQRKHCETLQRYARDYQQLTKSLALDGTLTTEAFGEGQRQAGQQKVQYEGSLAGQEGEAFAHGAKVEVSKVVASEVMESLRQVQARPGSNIPGPFQQFRSELAAHLGQPEDALPFVAEMVEVHANQAQWRGAIERAIGGHRLRLMVPPQVMKAALSWVNGRDNRLHVRLLEVKEPAQAPGSFEDGFTRKLNFKDHAYGEALRQFLTEIDRHCVASPEMLKSTPHGLTAQGLMSGKTGFFEKQDKTPLHQGWMTGFDNKDSLAELEEQLRQATAALKRHEELFELGKAAVGESRVRLGLLERLLGLQFQDIDLPAAEGDLADLQRRLIDLTDPESDTARAQQRWQDAKTLLRQRSEAWQKARMVQVTLQKDLEVAIAQRERAYRRSGEGLKAGQLALAHQHFDLSGVQQVDALEDHETEAEGRLRGHLQKLANELVRCERDLIRAMGHAKGEDTGTLSDVGTELEDVPQYLARLKILNEEALPEKLQRFQLQRFLNYLNQSSDQGVTQLLGSIENEVAIIEERIEDLNNTMRRVDFQPGRYLRLDPRRVVHESLKTLQQAQRALRSAALQDDQGESHFRALAHVVTLLREASERRTTVGARALLDPRYRLQFAVSVIERGTGAVVETRTGSQGGSGGEKEIIASYILTASLSYALCPDGGSKPLFGTIVLDEAFSKSSQAVAGRIISALREFGLHPLFVTPNKEMRLLRAHTRSAILIHRRGQQATMTSLSWEELDVLARSRQNSQDEVTG

SEQ ID NO: 31597 - protein, 384 aa, Cupriavidus basilensis OR16
MKSPDELAAKLARHWQSAQVRVARLLQADSWPLSLSIGRPSARAFADETGLVRRHVQRWREMQVGTVVWQDVAYRAGNAPVEVPLSWELRTPSEWVLATGDPTIQAEYRALGKLVQAVDPLFHPLILRQRRLAVDRSAGEVAKASEVALALTPGCAGGRPLRALTVCNIDSKFIERNRALLIQMLDVRFDGLPGELGLESFLDAADDSDHWLLLVPLAPRLLPFSQQRVRVSELGLLPESVSHILIVENERCLHQLPALADSVAILGAGLSLGWMRAEWLAHKHVAYWGDMDTWGLTMLARARQAQPDVTVVQMNRACFDQYAVALAVAEPVPAGVEPPEGLTVVEREFYQYLRRQERGRLEQEFLPPDLVAAALIAWHSASPG

SEQ ID NO: 31598 - protein, 489 aa, Niabella soli DSM 19437
MTKENIGTLIQLSPALQMLRLRNAGWVLPFLFEAFKESRKMVLREDELITKLSETLSLIADGTEDLEEARIEFGEDEESRSRKYLVNWVQKRILQDFPDTEGHTNYQLSAYTEKVFQWMQNLQAGQHHVGTESRFKMLFSSLRDMVENTEDDREKKLQQLKDRKAELDKEIKALEMGVAPQRYNNAQVQERLDLFIKLCYELIGDFREVEDNFKQIHRNIVEQHTKAEQNKGAILGFAFESYDALRGSNQGKSFYAFWDFLISRSGQENWRQLTEQLLQLLQDRELEADTDFLRNIKSFLLEQGKAVYEANDKMAEKLSRIISEKEIARHRRLRQQISNIKELIFDLMEDETVTAGIPVTDPVEIKIAMDRKLVLEQKTIAGTLKQPIAGIEKIEDVDRFNRLLNTSFIDKKILWRKVEEVLQKKQTATLKEIIETTSLDNGLAEVISYYSFLREKAKHVQVLADTTELIPIDKAATKFVEVPYLLFSK

SEQ ID NO: 31599 - protein, 196 aa, Niabella soli DSM 19437
MSEKIYAFTPVFVKLLKGPVEYLEKSNWEKLLQYKTELTAFLQQLGLALVLDEQDGYAYIKHNTAEEDTTSVSWVQRRSLTYDESVLLVLLRDMMAEFEVGEATHRELVKKRREIKEYAELFFRENASRVKMLKDIDRLIDRAEENGFLEQAENHDVADEQKFRIRKIIKARVDSEILEDFKNQLTAHAAKRIQHG

SEQ ID NO: 31600 - protein, 1126 aa, Niabella soli DSM 19437
MQLSVFSTDNEKSGFRLQYMEVFNWGTFDDKIHTIHPDGETSLLTGANGSGKTTFVDALLTLIVPEKRYRFYNQSSGSEKKGDRTEETYVLGGYGTINSETGVTRSLYLREKKEEAYSILLVNFTNEDLQEVTLFQVRYFNNGELKRQFGVARKSLHIESDFKPFDLGNAWKKRIDKQYNQGSRKQVDWFDSASKYAQRLVEVLGMQSLQALTLFNQTVGIKVLGNLDDFIRTHMLEPRDMETKFQELKKHLGTLLDAQRNIEKAEEQIRLLQPIQEHYAAFENLKTEQEQLRQSIHTATIWKSFTQAALLQNALEQDNAAIKETEKQVAFVKLEIDRLHESERVTRNQIDQNKAGQRLKQLEQELQNLHARKKTTESNLVLFTNWCATLHFEEKTAPDEEAYKRILKEISRAGMRLSREQRLNEDDEFDAKTQLQKSNEEKTKIETELNILLHSKSNIPAHLIRLRQDLCQALKLDADDLPFAGELVQVKAGEQMWQPALEKLLHSFSLRLLVPDKYYKKVTRYINQTSLGTRLVYYHVKESMAVLAEDQTVFYKLDFHPDHPLSNWLQQQIIQQFAHVCLEDEKTIERYQKAITLNGLIKNRDRHEKDDRPGGSDASRYVMGWNNEHKKEALITRRHALTTIINQSAEIIERAQKKADRLQKQFNALSRLQEHEGFETIDVEQLQRQIHQTESQVKQLSESNDQLKELTRQLEQLLQEKTAMDVKREKLTIEKTTLQNQVDAMLQRQAALEPLLELITPNDKDQLLQFQQQHHATLSAVTLHNIEGVYFNFKEQLEAAATAAQTRLFKEENKLNKAITQIRNPAPAILQRFPGWNGDVQHLPEDAAYAGEFLEWLKKLEIENLPKYRKDFENFINDTITYKIGGLNEEMEKWEREINNSVDKLNQSLGHINFNRLPDTYIQLGKRKVQDSNVHAFRNALLEALPQAANWQQSSFEEKAIHFREKVQPLIDNLDESETYRARVMDVRNWFEFWADEKYRNTNELKKTYRQMGQLSGGEKAQLTYTILCSAIAYQFGITREGKNSRSLRFIAVDESFSNQDEDKATYLMELCKQLHLQLLVVTPSDKIQIVQDYIAHVHLAQRVNNRHSIMYNMTIKELQQQMKKE

SEQ ID NO: 31601 - protein, 382 aa, Niabella soli DSM 19437
MIPAFAKQLNGHYRSYLKNLVAVAPFSPIVLRGEKMKPQTTVELHQAISAFQQFEKKPGVPGWEIEWESWFSRKLGAQQWPSRILINSEEDYLFLLKKETEVAAFKTQLQRLLHWQPAIQQLLLSHPEMVLQFSLVWEQLMATTDYLLNHEVRGLYLRSIAVPAHTKFIGENKSTIIRLLNCIAPDRFPAGDAIEATLQLKTKPALYLMRWLDPDLASQYTPNMEFFAIPIDVLSKNNWNVAEIWLVENETNLYLLPRRKEALAVFSRGYAMEGLKEIPLFRQTRLFYWGDLDEDGFIMLNRMRWHYPKLKSVFMGESTLINHAAEFDRQPANYKTAANSLDLLTPTEKAAFNILKHHNGRLEQERIRQDYIWKKLSRSELG

SEQ ID NO: 31602 - protein, 484 aa, Saccharomonospora glauca K62
MRAFQNPMLALLHQTHAPFVVTALAMVFTAERPSVAVADAHAEIDDALQQLRAAGYGDDDNQPLPSGNARDLCRQWVQAGWLVRHVSDDDVEVYRLSAHGVGALEVAGRVGGVRTRVSESRVRTLLQAIERLAQDADPDVMARISRLHEEIQQRQKELARLERGGKVETVPDEQLLEAAENVLHLARELPADFARVAESIKAVQRDVVAELRHDVRPTGEVLREYLERGQRILDATPEGRAFAGALRLIGDPAQIHNLWSQLRTVLRHKFTDLLSEQQRRELTDISRRVEQGVKEVLAAQRQASHVITTQVRNHDPLRDRQVDELLRNVMSELHKWVPASRRGEPVEPLRRLPVADLGHLRQRTSELRPPQPPAPLREWEEIEDVTTADTRAWGGPRYPELEDHLAAFAGREKRVDVVAAFRAADEDLRRPVDLLGLLEIAHDAGMTETEEVTTVDTIRPDGSRRRFALGGVVAANPADRSGDR

SEQ ID NO: 31603 - protein, 222 aa, Saccharomonospora glauca K62
MSEVEPENGWSTGTAAGFIDPVSMEDDPTELFPGDAGTLEADVRRVLVQLLRRKFLLAEKNPAQWRTLLENQQIIESRMHDLFIRLVVDHERGVAYKQQVRSTELDVPILLRDESYNRAETLVLVQLRTVFQRERGTGEASARVDIEELEQTVLTYFDPEDHNLARSQQEVRSAVQRLVTEGLLVEESAGRYRITPLVEVVLSTEKLAELQQWLRERNEATA

SEQ ID NO: 31604 - protein, 1112 aa, Saccharomonospora glauca K62
MSMIDTLFGLIPAASRGQQWVARDLQLVNWGGYDGYHRVRFAPGATLLSGGSGSGKSTLMDSHIALLMPHTTPFNGASNGGVVGRPRGKDQRNILSYARGKLDESRADGETKMRVLRGDGRDTWSAIAMTWVDHTGAEFTALRAWYVPAAARTLDDVVAVRATCDRHYCLRDLEGPAAKRFARAEVEATGVTCFDTDRDFTARLHSTLGIGAAGDGHKAVALLGRIQAGQQITTVDALYKTMVLEEPSTLATADAVVQQFDELSGTRQRMIVARQQVKALTPIREHRRAIDDAEQRLRLIEAVGSFSAESSPAALWCHERRLDLLRAAERDLSRRYQRAKDELAETEALVKATEAQCEGATETLRASGGDNLKTAFGELRTIEQRLVDVERARKQLDRALDTLGATVSTGDDFAALVETAHRALADTEARRTAQTHFAEAVAEKKQAEAELAELRAEHKAVKSRRGNIPTELHAARAALAEAAGLTPDELPFVGELIEVSTEFEPWREAFNLALGGFATLMLIDSGRLSAFREAVNKVRTTRRVHFQGVRTGLRDEVTLNPKTLPGRLDYRPSPFTAWLKSELARRFDYVCVDTPRQLGQYAKALTISGQTSERGGRGAHGGHGRANVLGFTNGRLLADLEHRIDLAHRRLDEAVAWVARAEDELNSFEARRAAYRTVTELSWKQVDVDSVRAEQDRWNRVVEEVRAGNPRIDQLQKQVEELKQRVRDLTERVGEQKKTVKVLGKQWESTVDEVDRAQSALDAAMQTGTVVLPEHREYLESLFAGDSDSATELAEFDAAVKRAADRLDTDRRSATETIARSRKALEDIFSTFLERWPNPNLGTDADASYRDFDRILTDLETSGLHELEAEWRDSLLKLSGNDLTGLDSELAAAVREIRDRIDPVNRILADLPFADDNHRLRIDPQESHSAVRARFRKELRDVRALIDSATTDAERERAYHRMARVIDRIRRTAPEFSDLVDVRNHVRISAEKRDLDGNHVAVYDHIGEKSGGESQELVAFIVGAALRYQLGDAGATRPRYAPVFLDEALIKADARLTGRAIGAWRGLGFQLIISAPNDKHSAIEPHVDAEYLILKNSEGRSWAKPLVGVPDE

SEQ ID NO: 31605 - protein, 408 aa, Saccharomonospora glauca K62
MSTLVTPEGACAELRRRIDRKWAEAVCTGVHGGETVIFSVPLCPGVTTGKAVERLGYGVWHEWRMRWRDIADRLPHGVRLVPRTLSIRGVVGDFPARLVADLDGGVAFLAEFGAEPPPVDVERARELASALRSVDAVLTPATLRAVHRLQAHDVEVLLRAVDWLRQHPDLSAWTLRQLPIPGMHTKWLGSHGALLRDVSGRDVRAEARPRPAVVHLTYIDPGYLASGRRRHDAWTTGDVHEIAYRPRVVLVVENRDCRLWFPQVRDTIVVEGGGKAAASLLAEVPWLRTAEHVVYWGDIDTDGYAILDRFRAVLAEPASDGAPPKPVHSILMDDTDLHRYADHGVNHDEHGRRLSPSAEVLPHLTEAERLAYDTIATAGPTPFRRIEQEVIPLDHAVTRLLHVTNGRS

SEQ ID NO: 31606 - protein, 474 aa, Geobacter metallireducens RCH3; identical to SEQ ID NO: 30474

SEQ ID NO: 31607 - protein, 206 aa, Geobacter metallireducens RCH3; identical to SEQ ID NO: 30475

SEQ ID NO: 31608 - protein, 1140 aa, Geobacter metallireducens RCH3; identical to SEQ ID NO: 30476

SEQ ID NO: 31609 - protein, 401 aa, Geobacter metallireducens RCH3; identical to SEQ ID NO: 30477

SEQ ID NO: 31610 - protein, 489 aa, Opitutaceae bacterium TAV1
MNFTEARQRLEKSTALRLLKADSAALCLGFLDAVFRIDRAVWRSQTEMVSRLTTVLEEVNESESGERRYPRPAREYLDKWIADGALVSRYNEDNELIYELTPEADQALLIFEGLETQTRRTVGAESKLRIITTTLHRIAERANPDRQERIAALQSEINKLTEEVQRLRAGGELVAAPPEQLVEEYHVAVGVARQLLADFSLIRQRFLGLAKELAERHALAEAHRGAILARALDVHRELNEGSLGQSFNGFLEFLYSPESQQVLFALIDQITRLEGIGEEEKRRGFLRRLPDNLLAEAKSVVDQTRRLSAELRHMLDAESIASRRETRDALAALRGLAYRLADQPPEENPVTLTRTYAEISDTENILRHLWRAPDVVRPVPVASAHRVSDEEKAQALAMMAALPAIEIKRLRHQLAERFEAGDNAFRLTEMLEWYPPVAGNWLLDVVGYLEIARAKGSHHLVHGDSHHPWVYVPSGETEAARLPQIYFYR

SEQ ID NO: 31611 - protein, 244 aa, Opitutaceae bacterium TAV1
MNLPTPPPETDVPEFDLAAFCADPLVRGAAQAKIMILRGPIYAEDAAWASLLRYRGEVVRFLAEVGARLVLNEHDGYAFADQAPEGESGAEWPKLFYRDRFNFDVTCVLLVLREWLLKRESIPSDEHTPLVEDDLVAELRRFSKKTNANAEKEDARWRIAINRAKDYGLLKKIPGDERSYVVRPIVRAKLSLEILQELKTTLERHVTGEQAGGESLASSNDETTTPGETREPGTASNNQETTQP

SEQ ID NO: 31612 - protein, 1129 aa, Opitutaceae bacterium TAV1
MSEAIASPADTPPPASDVNADTEAPAGFRLQAVEICNWGTFHGDQHYEIELDGRSACLTGLNGSGKSTVIDAILTLLVPYEFRHYNVAATGSGAKRERSLRTYILGAYGKEESPESSRGQTRFLRKPGTVSILLAVFRDASFQRSVTLAQLHWVTASGEHQGRYLVKEGEARIPDLGIAGLSVNAYAEHLKKLGWSYDTTFDPYLGKFSGLLRIPTQQALKLFCRTVSVKDVPSVTEFIRSLMLEPFPVAKMLEDVETHFADLDHIHTQLEDTKKEIRLLTPVKTHHATYAAAAGEAGRLADLSRAARVVMARDASVVLDQAIAEQEQTRTGHLATAERLLGDLKKIDDTILSTKLALAQNKTFVALADLRKQEADLSSELGRARTTRTAYETWLRALGREATVGSPEEFARVRSWARGESSEQDSRQQRLLKDSGIKEAEALGVRQRATTLSEEIQSLDGRRDKIPKEHRDMRRQICEQLQIGEAALPFAGELLDVSGHEVEWRPSLEVLLHGFALSVLVPEDHYRRFSAYVDKSEFRRRLVYFQVPKGTGANVTLDSTKAYGKIVIKPDAWCRGWLQARLFDDFPHHCAETMEEFWQVRGPALTRNRHIRGGARHTKETTHGARDFDLLGWSNEAKIAELRSRLTHLQGEARDLDAQAQKLEAQAKSLKGGVELLRKLTEVPEYRAIDVLGIEAELMAATQRREELEKADGALQALNAALAEAELERANVSQQRDQENIAAGKLEEAIKELRRRRGEFVRVVNAAATDDFPWQEHEAEVAAYREQGQLTLRGLEQQTKAVVEKIEEAFGKARREAEAAEKLLLPAMASFLDATKDKGYSADWSPVAGCAPALVAHMNRLVEEKFHDQEQEFNTMMRTVLLKELQVGDQGLKAKIRANQARIEELNQTLRDLPYNEDTIVQIVSRPSKEHTVLTYRAKLEDCTRHVIAMTDAQLLERFNAVKALVTYIREHRSEAEKGANPNHWDTFAIAEIRPEAPEEDPVNWFTDSDGNSGGQKAKLACTILAAAMAFQLNHTRNKHSNAFRLVMVDEIFAKSDDVNSAYALSIFEKFDFQLLLVTPRDGRLKLVQPYVGSFHLVQNPTTMASTITSVTRVELEKAAATTEDDGNP

SEQ ID NO: 31613 - protein, 368 aa, Opitutaceae bacterium TAV1
MRGESIFPLEHTRFGRADRSAATADIDTQVRALLEDAVEVVSPSLTELARPRRGHGYSVDLAVHRLRGHGGEQALPNRVWFETAEDFLMFIGETERWHSLLADVAAISTAGPAFAEWAGKHARELRTRLKAGEGAALGAALGALHAKPHPGCFARELPLPGVSGKFIEENLALLADILREIGSSAWREGGSLHEQLGLRQTSRLLRLMDLNGSQLDYGLPLNRFIDLPPGVERMLIVENLRTFLTLPRLPGTLALFGEGHAVQTLSSHRWFAHVPITYWGDLDPTGFDILGRLRRVHPHVRSAMMDMATLTAHSSLLTKAAPVENPVFETLAPEESVAAARVQTAKQGIEQEKFPTDFIRSVLCPALS

SEQ ID NO: 31614 - protein, 480 aa, Leptospira noguchii str. 1993005606
MQRLFRSSSIRLLKKDNAPFIIYFLEKYFRGSARIFVPFEELKILLHHELENFRELEETFLSRTAEVYIGEWVSENFLSRRIRSLEGSEEIILEPSSELEKVFSWMDDLRSLENKESIGTETRFFSVLNKLKEIVEESVSDPKEKIRQLESKRDELDDQIKKLTEGKEIITFASERIRGQYLYARKEAIGLLSDFRQVEGNFTEITKFIHKKYLEVVQKGEILQFALDGDEELLQSEQGKSFQAFWDFLRSEQSQENFESILDSLYSLKDILVLEDRKFFRNFKRNLREAGSRINTVVSRMSEQLKKSLVERTLRDNRRSKAIISEIKHLVLERKFDLSEENFYSMEEIFVHLPMDRPLWKGDSADTPRPIQISGPDDEMISLDFLDSIRGINFEIYEQRIQTLLRSFPEVSLEKVLEEFPENNGFESIVAYVFIASKGEYHSLDDSESFLFYPAFNFTQKETQSVYRVPKATYRVGKDG

SEQ ID NO: 31615 - protein, 187 aa, Leptospira noguchii str. 1993005606; identical to SEQ ID NO: 31350

SEQ ID NO: 31616 - protein, 1118 aa, Leptospira noguchii str. 1993005606
MTDLFSSSEITANTGYRLKYLEILNWGTFNGKIWKLNSQGETFLLTGANGSGKSTLVDAILTLLVPSTKRNYNLASGLESKKRDRSEKSYVEGHYGRASSGSEGILKIRGKQEECYSVLSAVFNAKGKFPIIRIAQIFWFESSDLKKIYLISDESLDFEKDLVLRNRTIKELRSDLKNSGARLYDNFKAYGVDFRKMVGLGSEKAIDLFNQIVAIKSLGVLNEFVREHMLEAKDKRFRIEELDRNFFDLNETYETILSAREQLRLLEPIEKKAFEYRDWNSKVEGVQELILFAPEYFTQKKYELCKKKEQDYTLDLFRVQDHLKELNSLTESLKKEERELYYSLENNDTRKRISDLKRKFEEIQTNLNKRRSERKKYSEYLLKLDLENVLIEDSFYSNFRKAGEKLQKSDSTRDSIRDRLTDLTVKRKESKVEFDSVYSELEHLKKSKDNLPRIVSSMREKISQGLGVSEKKFPFVCELIRVKDSEKEWTGALERLLHNFGLRMLVDEEDYKVLSSYVNSSHLGGKIVFSRMLTQGGPILQPKDKDEVFYKLEIKPSLSKFQKEWLETQILKEFGHICGDLQRLQKEEKALTKEGLIKSGKIRHEKDDRKNINDARDYILGWNNREKISALESEFMRLGKVIDKIESEIKKVEEEQKQNDLFRDDLKSFLRFEQFSQIDDQSLEEPLEQTRKEIQDLEVLSEEYGKLKEQYESAKVRLSEAEGKEKETTKELTLLEERFSNLKKEMETLNSRIKEFDPNRRTRLEPILNERLGQVIFNLDSILEQERKFLEVLIKERNDFIEKRDSIGEELNKGMDRYVKKFREEADREELSVSILNAEAFAELTERIRKDRLPEFQDKFRNMMSDKVAKQILEFKAELEDDVSEIKDRIDELNESLRYLDYSKGKSYIQIRYFETKDREIIGSTGFKELLRNSIPDMGDSSNNEEKFSRIRELLGKLKGENGSDRWSRLVTDSRNWLDFQAAEFQRDTDTIIQVYDSSAGKSGGQTVKLAYTILASAIAYQFKIRELNSFRFVVIDEMFNNLDNENSRYAMDLFRQLGLQLLVVTPMDKITVVEPYVQSVHFVKNNSDGNDSRVYLITKEKLDSEKIENTDRKVGNL

SEQ ID NO: 31617 - protein, 389 aa, Leptospira noguchii str. 1993005606
MISLEEIRKKCLLYYHKVLNRSVLGEKSFPWEISTGKIDPEEIIHNPSLLEKIKKESKEKKGFGFLLVSFQKETRKFGTQTLPSKIRFEDEIDFLRFLHKEQEFSFYKSDCDMILFKIPTLMEWILKNPFLVIQESGNWEDLLSVCSYFLKNPRPGLYIRELPISVPTKFIEENKKVLRNLLDFLVPENIDYEGKDFESRFGLKKPEALVRFRILDPIIAEKSSGGLFDISVPVDEFRNLHLFGCKRIFILENKINFSNIDHFLTFPKLSGSIAIFGQGYGLGILKDCVWLNKMEILYWGDIDVQGFEILSLLREQYSQTKSFLMDKETFLKFQNFAVDGKYSKFSKLDYLTESEKETWEYLRSLGSKNRLEQERIPQEYIEKTLHSQF

SEQ ID NO: 31618 - protein, 485 aa, Leptospira noguchii str. 2007001578
MDYNLLQRLFRSSSIRLLKKDNAPFIIYFLEKYFRGSARIFVPFEELKILLHHELENFRELEETFLSRTAEVYIGEWVSENFLSRRIRSLEGSEEIILEPSSELEKVFSWMDDLRSLENKESIGTETRFFSVLNKLKEIVEESVSDPKEKIRQLESKRDELDDQIKKLTEGKEIITFASERIRGQYLYARKEAIGLLSDFRQVEGNFTEITKFIHKKYLEVVQKGEILQFALDGDEELLQSEQGKSFQAFWDFLRSEQSQENFESILDSLYSLKDILVLEDRKFFRNFKRNLREAGSRINTVVSRMSEQLKKSLVERTLRDNRRSKAIISEIKHLVLERKFDLSEENFYSMEEIFVHLPMDRPLWKGDSADTPRPIQISGPDDEMISLDFLDSIRGINFEIYEQRIQTLLRSFPEVSLEKVLEEFPENNGFESIVAYVFIASKGEYHSLDDSESFLFYPAFNFTQKETQSVYRVPKATYRVGKDG

SEQ ID NO: 31619 - protein, 187 aa, Leptospira noguchii str. 2007001578; identical to SEQ ID NO: 31350

SEQ ID NO: 31620 - protein, 1118 aa, Leptospira noguchii str. 2007001578; identical to SEQ ID NO: 31616

SEQ ID NO: 31621 - protein, 389 aa, Leptospira noguchii str. 2007001578; identical to SEQ ID NO: 31617

SEQ ID NO: 31622 - protein, 482 aa, Leptospira inadai serovar Lyme str. 10
MDYNLFQRLFRSSSIRILRKDNAPFIIYFLEKYFRGSGRTFVPFEELKILLRHELENLRELQDTSFLRSAEVYINEWVNENFLSRRIRSSEEFEEIIVEPSSELEKVFSWMEDLRSLEDREAVGTESRFFSVMSKLKEIVEESVSDPKEKIRQLESKRKDLDEQIQKLKEGEDVSTFPSERIRGQYLYARKEALTLLSDFRQVEGNFTEITKLIHKKYLEVVQKGEILQFALDGDEELLQSEQGRSFQAFWDFLRSEQSQENFENILNSLYSLKDILALDDGKFFRSFRRNVREAGSRVNGVVSRMSEQLKKSLVERTLRDNRKSKEIISEIKHLVLEAKIDLSEENFYSVEEMSVHLPMDRPLWKGDPVDTLRYIQVSRAEEEQISSDFLDSIRGINFEIYEKRIQTLLRSFPEVSLEKVLAEFSEDIGFESIVAYISIASRGEHHSLHDSETFLCFPSFAEDNQRAYRVPKGVYRVGKHG

SEQ ID NO: 31623 - protein, 187 aa, Leptospira inadai serovar Lyme str. 10
MDKLLPYSIAVLKLLKGSIGIDSDPKVWENLVTYEKQVREYFEKIGIFLHLDREDGYAFLRQTSDEDEIEQEVKLPVLTRKVALTKEETLFLVLLRESIIEMEEKDPSGSIIIRKEELSDRIRPFFPDSSDEVDTQKKFERLLRKSEDLGFMKQLDSETLRVEKILKAKITVSELDRLRIKFKQGSE

SEQ ID NO: 31624 - protein, 1118 aa, Leptospira inadai serovar Lyme str. 10
MADLFSPGEIAFNTGYRLKSLEILNWGTFHGKIWKLNAEGETFLLTGLNGSGKSTLVDAILTLLVPSTKRNYNLASGLESKKRDRSEKSYVEGHYDRSSSGSEGILKIRGKQEECYSVLSAVFDAKGKFPSVRIAQIFWFESGELRRIYLISEASLDFEKDLVLRNRTIKELRSDLKNLGARLYDNFKAYGVDFRKAVGLESEKAIDLFNQIVAIKSLGVLNEFVREHMLEARDKRSRIDELDRNFSDLNETYEAILSAREQLRLLEPIEKKAFEYGDWKNKAEEIQDLISFTPQYFTQKKYELHKIKEQDYIHDLSRVQDRLKELNSLTESLKEEERALYYSLENNDTQKRISDLKRKFEDIQSNLNRRRIERKKYSEYLLKLDLEDVLIEETFYSNVRKAGDKFSNSASAREEIRSRLADLKVQWKESESEFNSVQSELEYLKKNPENLPRYVSSMRERISDAIGIPPKKFPFICELIRVKESEKEWTGALERLLHNFGLRMLVAEEDFEKFSSYVNSSDLNGKLVFSKMVTSTGPILHPKDKDEVFYKLEIKPSLTKFQKEWLEAQILREFGHICGDLQRLKKEEKALTKQGLVKSGKIRHEKDDRKNINDARNYILGWNNQEKIAALESDFARLGQEIYKIEANIEKVKEDETRNDVLRDDLKSFLRFEQFSQIDDQSLEEPLERTRKEIQELEVLSEEYGKLKEQYESAKARFSEAEGREKETTKEFTLLEERLSNLRKEMEDLTFRMKEFDPERSVRLEPVLKERLGDIIFNLESISEKERKFSEDFVKERAYFREKMDFIAEELNKGMDRYVKRFREDADREELSVSISNVAGFAKLTERIRKDRLPEFQEKFRSMMSDKVAKQILEFKAELEDDVTEIKIRIDDLNKSLRYLDYSKGKSYIQIRYFETKDREIIGSTGFKELLRDSIPDMGDNSNNEEKFSRIRELLGKLKGENGSDRWSRFVTDPRNWLDFQAAEFQRDTDEIIRIYDSSAGKSGGQTVKLAYTVLASAIAYQFKIREPNSFRFVVIDEMFNNLDNENSRYAMDLFRQLGLQLLVVTPMDKIAVVEPYVQSVYFVKNNSDGNESKVYPITKEKLHSEEEGMDDRKAGNF

SEQ ID NO: 31625 - protein, 388 aa, Leptospira inadai serovar Lyme str. 10
MISPDEIRKKCLSYYHEVLNHVILGEVSFPWEIPAGKADPEEVIRDSSLLEKLKEESKEKKGFGFLLVSFQRETRKFGTQTLPSKILFEEENDFLRFLRKEEEFSSYRSDCNLILSKIPGLKEWILKNPSLVIEESGNWEDLLTVCRFFIKNPRPELYIRELPIPVSTKFIEENKKVLRNLLDFLIPENIDLEGKDFESRYGLKKTEALVRFRILDPKIAQESSGGLLDISIPISEFRNLHLAGCHRVFILENKTNFSNIDNFLTFPKLSGAIAVFGKGYGLGILKDCIWMDKMEILYWGDIDVQGFEILSLLREQYFQTKSFLMDKETFVRFRNFAVDGVYSKSSKLDYLTESEKELCEYLRSLGSKNRLEQERIPHEYIKEKLFYL

SEQ ID NO: 31626 - protein, 483 aa, Leptospira santarosai serovar Arenal str. MAVJ 401
MDYKLLQRLFRSSAIRLLRKDNAPFIIYFLEKYFRSSARTFVPFEELKILLRYELENLNDQEEISLQRSADVYLGEWIGENFLTRRIRSAEGIEEIILEPSVELEKVFSWMEDIRSLEDKDVIGTESRFFSVLNKLKEIVEESVSDPEEKIRQLEFKRDELDLQIRKLKAGEQVSKFPSERIRSQYVYARKEALGLLSDFRQVEGNFMEITKMIHKKYLEVVQKGEILRFALDGNDELLRSEQGRSFQTFWDFLRSERSQEQFESILDSLYSLEDVLELDSRKFFRNFRRNLREAGSRVNGVVTRMSEQLKKSLVERTLRENRRSKELIAEIKNLVLENPLDFSQTDFYSLEEMDVRFPMERPLWRGDPEETFRTVRIENTDEDGNVFDILESIRGIDLEMYEQRIQTLLRISPEVSLEKVLREYPDDVCFESLVAYVWIAGNGEFHSLDDSETFVYSVSIMDHPSEKLAYRIPKGTYRVGHL

SEQ ID NO: 31627 - protein, 187 aa, Leptospira santarosai serovar Arenal str. MAVJ 401
MNKPHIYAASILRLLKGSINSESDAKIWQNLLDNEKPVREHFEKLGIFLHLDREDGYAFLRQTSDDESAESDEKLPVITRKLPLTKEETLFLILLRECIIEIEEKDPSGSILFRKEELSDKVSPFFSDLSDEIDRQKRFEKLLRKSEELGFVKQIEPETIRIEKLLKAKLTVSELEGLRGKFRLGTE

SEQ ID NO: 31628 - protein, 1118 aa, Leptospira santarosai serovar Arenal str. MAVJ 401
MTDLFSPGEIAANTGYRLEFLEILNWGTFHGRIWKLRPEGENFLLTGANGSGKSTLVDAILTLLVPAAKRNYNLASGLESKKRDRSERSYVEGHYGRSSSGSEGILKIRGKQEECYSVLSAVFEANGRFPRIRIAQIFWFESGELKKIYLFSDKELDFEKDLVLGKRTVKELKADLKNSGARLYDQFKAYNVDFRKAVGLESEKAIDLFNQIVAIKSLGVLNEFVREHMLESKDKRSRIEELNRNFSDLSETYEAIVNAKEQLKLLEPIEKKAAEYREWNRKAADLQALIVYVPYYFAEKNYELRQIRERDYLFELSRLKDRSDELSTEIESLNQEERKLFNALENNDTQRRIADLVRKREGILSDLKTRGIERKKYSSYLSKIGLEEAFSEETFYTNLRIAGGMLTETDSIWEEIRDRLGKLTLQKMELQKNFDSVRSELEYLKKKRDNLPRTQSEIRAKIASGIGLSEKRFPFICELIRVKESEKEWTGALERLLRNFGLRMLVAEEDYEAVSAYVNSSYLGGKLVFSRMVPLSGPILQPKDKEEVFYKLELKSELSNVKKEWLEAQILREFGHICGDLNRLRKEEKALTKEGLIKSGRIRHEKDDRKSISDARDYILGWNNTEKIAALESEFALLGQNIYRLNAAIDLIREEENKNKNKRDDLLLFLRFEQFSQIDDESLKGPLQDTERQIRELELRSEEYGKLKEQYELAKARLTDVQGRQRETAKEFNVLEDRLFTLRKDMEDLQQRIRKVDRETSISLEPILNERLRETILTLESIAETERNFSDRLVVERDQYLEKRDSIGEELNKGMDRYVKRFREEADREELSVSVSNAEGFAKLTERIRQDRLPEFQEKFRTMMSDKVAKQILDFKAELDDDVSEIKERIDELNDSLKDLDYSKGKSYIQIRYFDTKDREIVGDSGFKEMLRGSIPDLGDSSHNEEKFAKIRELLKKLKGEGGSDRWSRLVTDPRNWLDFQAAEFLRDNNQILQVYDSSAGKSGGQTVKLAYTILASAIAYQFKIRERNSFRFVVIDEMFNNLDGENSRYALNLFRQLGLQLLVVTPMDKITIVEPYVRSVHFVKNNSEGNDSRVYPISKENVSSGKDENSERKVGNL

SEQ ID NO: 31629 - protein, 392 aa, Leptospira santarosai serovar Arenal str. MAVJ 401; identical to SEQ ID NO: 31356

SEQ ID NO: 31630 - protein, 483 aa, Leptospira santarosai str. 200702252
MDYKLLQRLLRSSAIRLLRKDNAPFIIYFLEKYFRSSARTFVPFEELKILLRYELENLNDQEEISLQRSADVYLGEWIGENFLTRRIRSAEGIEEIILEPSVELEKVFSWMEDIRSLEDKDVIGTESRFFSVLNKLKEIVEESVSDPEEKIRQLEFKRDELDLQIRKLKAGEQVSKFPSERIRSQYVYARKEALGLLSDFRQVEGNFMEITKMIHKKYLEVVQKGEILRFALDGNDELLRSEQGRSFQTFWDFLRSERSQEQFESILDSLYSLEDVLELDSRKFFRNFRRNLREAGSRVNGVVTRMSEQLKKSLVERTLRENRRSKELIAEIKNLVLENPLDFSQTDFYSLEEMDVRFPMERPLWRGDPEETFRTVRIENTDEDENVFDILESIRGIDLEMYEQRIQTLLRISPEVSLEKVLREYPDDVCFESLVAYVWIAGNGEFHSLDDSETFVYSVSIMDHPSEKLAYRIPKGTYRVGHL

SEQ ID NO: 31631 - protein, 187 aa, Leptospira santarosai str. 200702252; identical to SEQ ID NO: 31627

SEQ ID NO: 31632 - protein, 1118 aa, Leptospira santarosai str. 200702252
MTDLFSPGEIAANTGYRLEFLEILNWGTFHGRIWKLRPEGENFLLTGANGSGKSTLVDAILTLLVPAAKRNYNLASGLESKKRDRSERSYVEGHYGRSSSGSEGILKIRGKQEECYSVLSAVFEANGRFPRIRIAQIFWFESGELKKIYLFSDKELDFEKDLVLGKRTVKELKADLKNSGARLYDQFKAYNVDFRKAVGLESEKAIDLFNQIVAIKSLGVLNEFVREHMLESRDKRSRIEELNRNFSDLSETYEAIVNAKEQLKLLEPIEKKAAEYREWNRKAADLQALIVYVPYYFAEKNYELRQIREQDYLFELSRLKDRSDELSTEIESLNQEERKLFNALENNDTQRRIADLVRKREGILSDLKTRGIERKKYSSYLSKIGLEETFSEETFYTNLRIAGGMLTETDSIWEEIRDRLGKLTLQKMELQKNFDSVRSELEYLKKKRDNLPRTQSEIRAKIASGIGLSEKRFPFICELIRVKESEKEWTGALERLLRNFGLRMLVAEEDYEAVSAYVNSSYLGGKLVFSRMVPLSGPILQPKDKEEVFYKLELKSELSNVKKEWLEAQILREFGHICGDLNRLRKEEKALTKEGLIKSGRIRHEKDDRKNISDARDYILGWNNTEKIAALESEFALLGQNIYRLNAAIDLVREEENKNKNKRDDLLLFLRFEQFSQIDDESLKGPLQDTERQIRELELRSEEYGKLKEQYELAKARLTDVQGRQRETAKEFNVLEDRLFTLRKDMEDLRQRIRKVDRETSISLEPILNERLRETILTLESIAETERNFSDRLVVERDQYLEKRDSIGEELNKGMDRYVKRFREEADREELSVSVSNAEGFAKLTERIRQDRLPEFQEKFRTMMSDKVAKQILDFKAELDDDVSEIKERIDELNDSLKDLDYSKGKSYIQIRYFDTKDREIVGDSGFKEMLRGSIPDLGDSSHNEEKFAKIRELLKKLKGEGGSDRWSRLVTDPRNWLDFQAAEFLRDNNQILQVYDSSAGKSGGQTVKLAYTILASAIAYQFKIRERNSFRFVVIDEMFNNLDGENSRYALNLFRQLGLQLLVVTPMDKITIVEPYVRSVHFVKNNSEGNDSRVYPISKENVSSGKDENSERKVGNL

SEQ ID NO: 31633 - protein, 392 aa, Leptospira santarosai str. 200702252
MISPEILRKRSLAYYHNELLRSIVLGGVLFPWEISIGKVLPEEILKNPSLLRELRAESKENKGFGFRIVFRSKETRKYGIQTIPTKIVFDTEDDFLRFTKKKDEFLSYSTDCTLILSVLPELKDWILKNTLSVIEESGKWESILSVCSYFLEYRNPGLYIRELPIRIPTKFIEENKKVLRSLLDFLLPEIADAKDFETRYGLKKAEPLVRFRILDLEIAKSSTGGLTDLSIPVRDFRKLELSGCGRVFILENKTNFANLFNFLSFPQLKGTISIFGQGFGLNVLKDCSWLEKMEIFYWGDLDVQGFEILSQLREQYPQSRSFLMDLKTFVRFRDFAVDGISSSKSSEPKFLTPSERETWKYLSSLDSKNRLEQEKIPHEYVQEVLSGLDGSQ

SEQ ID NO: 31634 - protein, 483 aa, Leptospira santarosai str. CBC379
MDYKFLQRLLRSSAIRLLRKDNAPFIIYFLEKYFRSSARTFVPFEELKILLRYELENLNDQEEISLQRSADVYLGEWIGENFLTRRIRSAEGIEEIILEPSVELEKVFSWMEDIRSLEDKDVIGTESRFFSVLNKLKEIVEESVSDPEEKIRQLESKRDELDLQIRKLKAGEQVSKFPSERIRSQYVYARKEALGLLSDFRQVEGNFMEITKMIHKKYLEVVQKGEILRFALDGNDELLRSEQGRSFQTFWDFLRSERSQEQFESILDSLYSLEDVLELDSRKFFRNFRRNLREAGSRVNGVVTRMSEQLKKSLVERTLRENRRSKELIAEIKNLVLENPLDFSQTDFYSLEEMDVRFPMERPLWRGDPEETFRTVQIENTDEDGNVFDILESIRGIDLEMYEQRIQTLLRISPEVSLEKVLREYPDDVCFESLVAYVWIAGNGEFHSLDDSETFVYSVSIMDHPSEKLAYRIPKGTYRVGHL

SEQ ID NO: 31635 - protein, 187 aa, Leptospira santarosai str. CBC379
MNKPHIYAASILRLLKGSINSESDAKIWQNLLDNEKPVREHFEKLGIFLHLDREDGYAFLRQTSDDESAESDEKLPVITRKLPLTKEETLFLILLRECIIEIEEKDPSGSILFRKEELSDKVSPFFSDLSDEIDRQKRFEKLLRKSEELGFVKQIEPETIRIERLLKAKLTVSELEGLRGKFRLGTE

SEQ ID NO: 31636 - protein, 1118 aa, Leptospira santarosai str. CBC379
MTDLFSPGEIAANTGYRLEFLEILNWGTFHGRIWKLRPEGENFLLTGANGSGKSTLVDAILTLLVPAAKRNYNLASGLESKKRDRSERSYVEGHYGRSSSGSEGILKIRGKQEECYSVLSAVFEANGRFPRIRIAQIFWFESGELKKIYLFSDKELDFEKDLVLGKRTVKELKADLKNSGARLYDQFKAYNVDFRKAVGLESEKAIDLFNQIVAIKSLGVLNEFVREHMLESKDKRSRIEELNRNFSDLSETYEAIVNAKEQLKLLEPIEKKAAEYREWNRKAADLQALIVYVPYYFAEKNYELRQIREQDYLFELSRLKDRSDELSTEIESLNQEERKLFNALENNDTQRRIADLVRKREGILSDLKTRGIERKKYSSYLSKIGLEETFSEETFYTNLRIAGGMLTETDSIWEEIRDRLGKLTLQKMELQKNFDSVRSELEYLKKKRDNLPRTQSEIRAKIASGIGLSEKRFPFICELIRVKESEKEWTGALERLLRNFGLRMLVAEEDYEAVSAYVNSSYLGGKLVFSRMVPLSGPILQPKDKEEVFYKLELKSELSNVKKEWLEAQILREFGHICGDLNRLRKEEKALTKEGLIKSGRIRHEKDDRKNISDARDYILGWNNTEKIAALESEFALLGQNIYRLNAAIDLIREEENKNKNKRDDLLLFLRFEQFSQIDDESLKGPLQDTERQIRELELRSEEYGKLKEQYELAKARLTDVQGRQRETAKEFNVLEDRLFTLRKDMEDLQQRVRKVDRETSISLEPILNERLRETILTLESIAEAERNFSDRLVVERDQYLEKRDSIGEELNKGMDRYVKRFREEADREELSVSVSNAEAFAKLTERIRQDRLPEFQEKFRTMMSDKVAKQILDFKAELDDDVSEIKERIDELNDSLKDLDYSKGKSYIQIRYFDTKDREIVGDSGFKEMLRGSIPDLGDSSHNEEKFAKIRELLKKLKGEGGSDRWSRLVTDPRNWLDFQAAEFLRDNNQILQVYDSSAGKSGGQTVKLAYTILASAIAYQFKIRERNSFRFVVIDEMFNNLDGENSRYALNLFRQLGLQLLVVTPMDKITIVEPYVRSVHFVKNNSEGNDSRVYPISKENVSSGKDENSERKVGNL

SEQ ID NO: 31637 - protein, 392 aa, Leptospira santarosai str. CBC379
MISPEILRKRSLAYYHNELLRSIVLGGVLFPWEISIGKVLPEEILKNPSLLRELRAESKENKGFGFRIVFRSKETRKYGIQTIPTKIVFDTEDDFLRFTKKKDEFLSYSTDCTLILSVLPELKDWILKNTLSVIEESGKWESILSVCSYFLEYRNPGLYIRELPIRIPTKFIEENKKVLRSLLDFLLPEIADAKDFETRYGLKKAEPLVRFRILDLEIAKSSTGGLTDLSIPVRDFRKLELSGCGRVFILENKTNFANLFNFLSFPQLKGTISIFGQGFGLNVLKDCNWLEKMEIFYWGDLDVQGFEILSQLREQYPQSRSFLMDLKTFVRFRDFAVDGISSSKSSEPKFLTPPERETWKYLSSLDSKNRLEQEKIPHEYVQEVLSGLGGSQ

SEQ ID NO: 31638 - protein, 483 aa, Leptospira santarosai str. CBC523; identical to SEQ ID NO: 31626

SEQ ID NO: 31639 - protein, 187 aa, Leptospira santarosai str. CBC523; identical to SEQ ID NO: 31354

SEQ ID NO: 31640 - protein, 1118 aa, Leptospira santarosai str. CBC523
MTDLFSPGEIAANTGYRLEFLEILNWGTFHGRIWKLRPEGENFLLTGANGSGKSTLVDAILTLLVPAAKRNYNLASGLESKKRDRSERSYVEGHYGRSSSGSEGILKIRGKQEECYSVLSAVFEANGRFPRIRIAQIFWFESGELKKIYLFSDKELDFEKDLVLGKRTVKELKADLKNSGARLYDQFKAYNVDFRKAVGLESEKAIDLFNQIVAIKSLGVLNEFVREHMLESKDKRSRIEELNRNFSDLSETYEAIVNAKEQLKLLEPIEKKAAEYREWNRKAADLQALIVYVPYYFAEKNYELRQIREQDYLFELSRLKDRSDELSTEIESLNQEERKLFNALENNDTQRRIADLVRKREGILSDLKTRGIERKKYSSYLSKIGLEEASSEETFYTNLRIAGGMLTETDSIWEEIRDRLGKLTLQKMELQKNFDSVRSELEYLKKKRDNLPRTQSEIRAKIASGIGLSEKRFPFICELIRVKESEKEWTGALERLLRNFGLRMLVAEEDYEAVSAYVNSSYLGGKLVFSRMVPLSGPILQPKDKEEVFYKLELKSELSNVKKEWLEAQILREFGHICGDLNRLRKEEKALTKEGLIKSGRIRHEKDDRKNISDARDYILGWNNTEKIAALESEFALLGQNIYRLNAAIDLIREEENKNKNKRDDLLLFLRFEQFSQIDDESLKGPLQDTERQIRELELRSEEYGKLKEQYELAKARLTDVQGRQRETAKEFNVLEDRLFTLRKDMEDLQQRVRKVDRETSISLEPILNERLRETILTLESIAETERNFSDRLVVERDQYLEKRDSIGEELNKGMDRYVKRFREEADREELSVSVSNAEAFAKLTERIRQDRLPEFQEKFRTMMSDKVAKQILDFKAELDDDVSEIKERIDELNDSLKDLDYSKGKSYIQIRYFDTKDREIVGDSGFKEMLRGSIPDLGDSSHNEEKFAKIRELLKKLKGEGGSDRWSRLVTDPRNWLDFQAAEFLRDNNQILQVYDSSAGKSGGQTVKLAYTILASAIAYQFKIRERNSFRFVVIDEMFNNLDGENSRYALNLFRQLGLQLLVVTPMDKITIVEPYVRSVHFVKNNSEGNDSRVYPISKENVSSGKDENSERKVGNL

SEQ ID NO: 31641 - protein, 392 aa, Leptospira santarosai str. CBC523
MISPEILRKRSLAYYHNELLRSIVLGGVLFPWEISIGKVLPEEILKNPSLLRELRAESKENKGFGFRIVFRSKETRKYGIQTIPTKIVFDTEDDFLRFTKKKDEFLSYSTDCALILSVLPELKDWILKNTLSVIEESGKWESILSVCSYFLEYRNPGLYIRELPIRIPTKFIEENKKVLRSLLDFLLPEIADAKDFETRYGLKKAEPLVRFRILDLEIAKSSTGGLTDLSIPVRDFRKLELSGCRRVFILENKTNFANLFNFLSFPQLKGTISIFGQGFGLNVLKDCNWLEKMEIFYWGDLDVQGFEILSQLREQYPQSRSFLMDLKTFVRFRDFAVDGISSSKSSEPKFLTPSERETWKYLSSLDSKNRLEQEKIPHEYVQEVLSGLDGSQ

SEQ ID NO: 31642 - protein, 483 aa, Leptospira santarosai str. HAI134; identical to SEQ ID NO: 31626

SEQ ID NO: 31643 - protein, 189 aa, Leptospira santarosai str. HAI134
MNKPHIYAPSILRLLKGSINSESDAKIWKNLLDNEKSVREHFEKLGIFLHLDREDGYAFLRQTSDDESVESDEKLPVITRKLPLTKEETLFLILLRECIIEIEEKDPSGSILFRKEELSDKVSPFFSDLSDEIDRQKRFEKLLRKSEELGFVKQIEPETIRIERLLKAKLTVSELEGLRGKFRLGTEKR

SEQ ID NO: 31644 - protein, 1118 aa, Leptospira santarosai str. HAI134
MTDLFSPGEIAANTGYRLEFLEILNWGTFHGRIWKLRPEGENFLLTGANGSGKSTLVDAILTLLVPAAKRNYNLASGLESKKRDRSERSYVEGHYGRSSSGSEGILKIRGKQEECYSVLSAVFEANGRFPRIRIAQIFWFESGELKKIYLFSDKELDFEKDLVLGKRTVKELKADLKNSGARLYDQFKAYNVDFRKAVGLESEKAIDLFNQIVAIKSLGVLNEFVREHMLESKDKRSRIEELNRNFSDLSETYEAIVNAKEQLKLLEPIEKKAAEYREWNRKAADLQALIVYVPYYFAEKNYELRQIREQDYLFELSRLKDRSNELSTEIESLNQEERKLFNALENNDTQRRISDLVRKREGILSDLKTRGIERKKYSSYLSKIGLEEASSEETFYTNLRIAGGMLTETDSIWEEIRDRLGKLTLQKMELQKNFDSVRSELEYLKKKRDNLPRTQSEIRAKIASGIGLSEKRFPFICELIRVKESEKEWTGALERLLRNFGLRMLVAEEDYEAVSAYVNSSYLGGKLVFSRMVPLSGPILQPKDKEEVFYKLELKSELSNVKKEWLEAQILREFGHICGDLNRLRKEEKALTKEGLIKSGRIRHEKDDRKNISDARDYILGWNNTEKIAALESEFALLGQNIDRLNAAIDLVREEENKNKNKRDDLLLFLRFEQFSQIDDESLKGPLQDTERQIRELELRSEEYGKLKEQYELAKARLTDVQWRQRETAKEFNVLEDRLFTLRKDMEDLQQRVRKVDRETSISLEPILNERLRETILTLESIAETERNFSDRLVVERDQYLEKRDSIGEELNKGMDRYVKRFREEADREELSVSVSNAEGFAKLTERIRQDRLPEFQEKFRTMMSDKVAKQILDFKAELDDDVSEIKERIDELNDSLKDLDYSKGKSYIQIRYFDTKDREIVGDSGFKEMLRGSIPDLGDSSHNEEKFAKIRELLKKLKGEGGSDRWSRLVTDPRNWLDFQAAEFLRDNNQILQVYDSSAGKSGGQTVKLAYTILASAIAYQFKIRERNSFRFVVIDEMFNNLDGENSRYALNLFRQLGLQLLVVTPMDKITIVEPYVRSVHFVKNNSEGNDSRVYPISKENVSSGKDENSERKVGNL

SEQ ID NO: 31645 - protein, 392 aa, Leptospira santarosai str. HAI134
MISPEILRKRSLAYYHNELLRSIVLGGVLFPWEISIGKVLPEEILKNPSLLRELRAESKENKGFGFRIVFRSKETRKYGIQTIPTKIVFDTEDDFLRFTKKKDEFLSYSTDCTLILSVLPELKDWILKNTLSVIEESGKWESILSVCSYFLEYRNPGLYIRELPIRIPTKFIEENKKVLRSLLDFLLPEIADAKDFETRYGLKKAEPLVRFRILDLEIAKSSTGGLTDLSIPVRDFRRLELSGCGRVFILENKTNFANLFNFLSFPQLKGTISIFGQGFGLNVLKDCSWLEKMEIFYWGDLDVQGFEILSQLREQYPQSRSFLMDLKTFVRFRDFAVDGISSSKSSEPKFLTPSERETWKYLSSLDSKNRLEQEKIPHEYVQEVLSGLGGSQ

SEQ ID NO: 31646 - protein, 283 aa, Leptospira interrogans serovar Bataviae str. HAI135
MEGNFTEITKFIHKKYLEVVQKGEILQFALDGDEELLQSEQGKSFQAFWDFLRSEQSQENFESILDSLYSLKDILVLDDRKFFRNFKRNLREAGSRINTVVSRMSEQLKKSLVERTLRDNRRSKAIISEIKHLVLERKFDLSEENFYSMEEIFVHLPMDRPLWKGDSADTPRSIQISGPDDEMISLDFLDSIRGINFEIYEQRIQTLLRSFPEVSLEKVLEEFPENNGFESIVAYVFIASKGEYHSLDDSESFLFYPAFNFTQKETQSVYRVPKATYRVGKDG

SEQ ID NO: 31647 - protein, 187 aa, Leptospira interrogans serovar Bataviae str. HAI135; identical to SEQ ID NO: 31350

SEQ ID NO: 31648 - protein, 282 aa, Leptospira interrogans serovar Bataviae str. HAI135
MTDLFSSGEITANTGYRLKSLEILNWGTFNGKIWKLNSQGETFLLTGANGSGKSTLVDAILTLLVPSTKRNYNLASGLESKKRDRSEKSYVEGHYGRASSGSEGILKIRGKQEECYSVLSAVFNAKGKFPIIRIAQIFWFESSDLKRIYLISDESLDFEKDLVLRNRTIKELRSDLKNSGARLYDNFKAYGVDFRKMVGLGSEKAIDLFNQIVAIKSLGVLNEFVREHMLEAKDKRFRIEELDRNFFDLNETYETILSAREQLRLLEPIEKKHSNTGIGTLK

SEQ ID NO: 31649 - protein, 483 aa, Leptospira santarosai str. HAI821
MDYKLLQRLFRSSAIRLLRKDNAPFIIYFLEKYFRSSARTFVPFEELKILLRYELENLNDQEEISLQRSADVYLGEWIGENFLTRRIRSAEGIEEIILEPSVELEKVFSWMEDIRSLEDKDVIGTESRFFSVLNKLKEIVEESVSDPEEKIRQLEFKRDELDLQIRKLKAGEQVSKFPSERIRSQYVYARKEALGLLSDFRQVEGNFMEITKMIHKKYLEVVQKGEILRFALDGNDELLRSEQGRSFQTFWDFLRSERSQEQFESILDSLYSLEDVLELDSRKFFRNFRRNLREAGSRVNGVVTRMSEQLKKSLVERTLRENRRSKELIAEIKNLVLENPLDFSQTDFYSLEEMDVRFPMERPLWRGDSEETFRTVRIENTDEDGNVFDILESIRGIDLEMYEQRIQTLLRISPEVSLEKVLREYPDDVCFESLVAYVWIAGNGEFHSLDDSETFVYSVSIMDHPSEKLAYRIPKGTYRVGHL

SEQ ID NO: 31650 - protein, 187 aa, Leptospira santarosai str. HAI821; identical to SEQ ID NO: 31354

SEQ ID NO: 31651 - protein, 1118 aa, Leptospira santarosai str. HAI821
MTDLFSPGEIAANTGYRLEFLEILNWGTFHGRIWKLRPEGENFLLTGANGSGKSTLVDAILTLLVPAAKRNYNLASGLESKKRDRSERSYVEGHYGRSSSGSEGILKIRGKQEECYSVLSAVFEANGRFPRIRIAQIFWFESGELKKIYLFSDKELDFEKDLVLGKRTVKELKADLKNSGARLYDQFKAYNVDFRKAVGLESEKAIDLFNQIVAIKSLGVLNEFVREHMLESKDKRSRIEELNRNFSDLSETYEAIVNAKEQLKLLEPIEKKAAEYREWNRKAADLQALIVYVPYYFAEKNYELRQIREQDYLFELSRLKDRSDELSTEIESLNQEERKLFNALENNDTQRRISDLVRKREGILSDLKTRGIERKKYSSYLSKIGLEEASSEETFYTNLRIAGGMLTETDSIWEEIRDRLGKLTLQKMELQKNFDSVRSELEYLKKKRDNLPRTQSEIRAKIASGIGLSEKRFPFICELIRVKESEKEWTGALERLLRNFGLRMLVAEEDYEAVSAYVNSSYLGGKLVFSRMVPLSGPILQPKDKEEVFYKLELKSELSNVKKEWLEAQILREFGHICGDLNRLRKEEKALTKEGLIKSGRIRHEKDDRKNISDARDYILGWNNTEKIAALESEFALLGQNIDRLNAAIDLIREEENKNKNKRDDLLLFLRFEQFSQIDDESLKGPLQDTERQIRELELRSEEYGKLKEQYELAKARLTDVQGRQRETAKEFNVLEDRLSTLRKDMEDLQQRVRKVDRETSISLEPILNERLRETILTLESIAETERNFSDRLVVERDQYLEKRDSIGEELNKGMDRYVKRFREEADREELSVSVSNAEAFAKLTERIRQDRLPEFQEKFRTMMSDKVAKQILDFKAELDDDVSEIKERIDELNDSLKDLDYSKGKSYIQIRYFDTKDREIVGDSGFKEMLRGSIPDLGDSSHNEEKFAKIRELLKKLKGEGGSDRWSRLVTDPRNWLDFQAAEFLRDNNQILQVYDSSAGKSGGQTVKLAYTILASAIAYQFKIRERNSFRFVVIDEMFNNLDGENSRYALNLFRQLGLQLLVVTPMDKITIVEPYVRSVHFVKNNSEGNDSRVYPISKENVSSGKDENSERKVGNL

SEQ ID NO: 31652 - protein, 392 aa, Leptospira santarosai str. HAI821
MISPEILRKRSLAYYHNELLRSIVLGGVLFPWEISIGKVLPEEILKNPSLLRELRAESKENKGFGFRIVFRSKETRKYGIQTIPTKIVFDTEDDFLRFTKKKDEFLSYSTDCTLILSVLPELKDWILKNTLSVIEESGKWESILSVCSYFLEYRNPGLYIRELPIRIPTKFIEENKKVLRSLLDFLLPEIADAKDFETRYGLKKAEPLVRFRILDLEIAKSSTGGLTDLSIPVRDFRRLELSGCGRVFILENKTNFANLFNFLSFPQLKGTISIFGQGFGLNVLKGCSWLEKMEIFYWGDLDVQGFEILSQLREQYPQSRSFLMDLKTFVRFRDFAVDGISSSKSSEPKFLTPSERETWKYLSSLDSKNRLEQEKIPHEYVQEVLSGLDGSQ

SEQ ID NO: 31653 - protein, 483 aa, Leptospira santarosai str. MOR084
MDYKFLQRLLRSSAIRLLRKDNAPFIIYFLEKYFRSSARTFVPFEELKILLRYELENLNDQEEISLQRSADVYLGEWIGENFLTRRIRSAEGIEEIILEPSVELEKVFSWMEDIRSLEDKDVIGTESRFFSVLNKLKEIVEESVSDPEEKIRQLESKRDELDLQIRKLKAGEQVSKFPSERIRSQYVYARKEALGLLSDFRQVEGNFMEITKMIHKKYLEVVQKGEILRFALDGNDELLRSEQGRSFQTFWDFLRSERSQEQFESILDSLYSLEDVLELDSRKFFRNFRRNLREAGSRVNGVVTRMSEQLKKSLVERTLRENRRSKELIAEIKNLVLENPLDFSQTDFYSLEEMDVRFPMERPLWRGDPEETFRTVRIENTDEDGNVFDILESIRGIDLEMYEQRIQTLLRISPEVSLEKVLREYPDDVCFESLVAYVWIAGNGEFHSLDDSETFVYSVSIMDHPSEKLAYRIPKGTYRVGHL

SEQ ID NO: 31654 - protein, 187 aa, Leptospira santarosai str. MOR084; identical to SEQ ID NO: 31627

SEQ ID NO: 31655 - protein, 1118 aa, Leptospira santarosai str. MOR084
MTDLFSPGEIAANTGYRLEFLEILNWGTFHGRIWKLRPEGENFLLTGANGSGKSTLVDAILTLLVPAAKRNYNLASGLESKKRDRSERSYVEGHYGRSSSGSEGILKIRGKQEECYSVLSAVFEANGRFPRIRIAQIFWFESGELKKIYLFSDKELDFEKDLVLGKRTVKELKADLKNSGARLYDQFKAYNVDFRKAVGLESEKAIDLFNQIVAIKSLGVLNEFVREHMLESKDKRSRIEELNRNFSDLSETYEAIVNAKEQLKLLEPIEKKAAEYREWNRKAADLQALIVYVPYYFAEKNYELRQIREQDYLFELSRLKDRSDELSTEIESLNQEERKLFNALENNDTQRRISDLVRKREGILSDLKTRGIERKKYSSYLSKIGLEEASSEETFYTNLRIAGGMLTETDSIWEEIRDRLGKLTLQKMELQKNFDSVRSELEYLKKKRDNLPRTQSEIRAKIASGIGLSEKRFPFICELIRVKESEKEWTGALERLLRNFGLRMLVAEEDYEAVSAYVNSSYLGGKLVFSRMVPLSGPILQPKDKEEVFYKLELKSELSNVKKEWLEAQILREFGHICGDLNRLRKEEKALTKEGLIKSGRIRHEKDDRKNISDARDYILGWNNTEKIAALESEFALLGQNIYRLNAAIDLIREEENKNKNKRDDLLLFLRFEQFSQIDDESLKGPLQDTERQIRELELRSEEYGKLKEQYELAKARLTDVQGRQRETAKEFNVLEDRLFTLRKDMEDLQQRVRKVDRETSISLEPILNERLRETILTLESIAETERNFSDRLVVERDQYLEKRDSIGEELNKGMDRYVKRFREEADREELSVSVSNAEGFAKLTERIRQDRLPEFQEKFRTMMSDKVAKQILDFKAELDDDVSEIKERIDELNDSLKDLDYSKGKSYIQIRYFDTKDREIVGDSGFKEMLRGSIPDLGDSSHNEEKFAKIRELLKKLKGEGGSDRWSRLVTDPRNWLDFQAAEFLRDNNQILQVYDSSAGKSGGQTVKLAYTILASAIAYQFKIRERNSFRFVVIDEMFNNLDGENSRYALNLFRQLGLQLLVVTPMDKITIVEPYVRSVHFVKNNSEGNDSRVYPISKENVSSGKDENSERKVGNL

SEQ ID NO: 31656 - protein, 392 aa, Leptospira santarosai str. MOR084; identical to SEQ ID NO: 31637

SEQ ID NO: 31657 - protein, 480 aa, Leptospira noguchii serovar Autumnalis str. ZUN142
MQRLFRSSSIRLLKKDNAPFIIYFLEKYFRGSARIFVPFEELKILLHHELENFRELEETFLSRTAEVYIGEWVSENFLSRRIRSLEGSEEIILEPSSELEKVFSWMDDLRSLENKESIGTETRFFSVLNKLKEIVEESVSDPKEKIRQLESKRDELDDQIKKLTEGKEIITFASERIRGQYLYARKEAIGLLSDFRQVEGNFTEITKFIHKKYLEVVQKGEILQFALDGDEELLQSEQGKSFQAFWDFLRSEQSQENFESILDSLYSLKDILVLEDRKFFRNFKRNLREAGSRINTVVSRMSEQLKKSLVERTLRDNRRSKAIISEIKHLVLERKFDLSEENFYSMEEIFVHLPMDRPLWKGDSADTPRSIQISGPDDEIISLDFLDSIRGINFEIYEQRIQTLLRSFPEVSLEKVLEEFPENNGFESIVAYVFIASKGEYHSLDDSESFLFYPAFNFTQKETQSVYRVPKATYRVGKDG

SEQ ID NO: 31658 - protein, 187 aa, Leptospira noguchii serovar Autumnalis str. ZUN142
MDKLLSYSISILRLLKGSIGIDSDPKVWENLVTYEKQVREYFEKIGIFLHLDREDGYAFLRQTSDEDDVKFDIKLPVLTRKLPLTKEETLFLILLREFIIEMEEKDLSGSIILRKEELFDRIHPFFPDSFDEVDTQKKFERLLRKSEDLGFIKYIDSETLRIEKILKAKITVSDLERLRIKFKPENV

SEQ ID NO: 31659 - protein, 1118 aa, Leptospira noguchii serovar Autumnalis str. ZUN142
MTDLFSSGEITANTGYRLKYLEILNWGTFNGKIWKLNSQGETFLLTGANGSGKSTLVDAILTLLVPSTKRNYNLASGLESKKRDRSEKSYVEGHYGRASSGSEGILKIRGKQEECYSVLSAVFNAKGKFPIIRIAQIFWFESSDLKRIYLISDDSLDFEKDLVLRNRTIKELRSDLKNSGARLYDNFKAYGVDFRKMVGLGSEKAIDLFNQIVAIKSLGVLNEFVREHMLEAKDKRFRIEELDRNFFDLNETYETILSAREQLRLLEPIEKKAFEYRDWNSKVEGVQELILFAPEYFTQKKYELCKKKEQDYTLDLFRVQDHLKELNSLTESLKKEERELYYSLENNDTRKRISDLKRKFEEIQTNLNKRRSERKKYSEYLLKLDLENVLIEDSFYSNFRKAGEKLQKSDSTRDSIRDRLTDLTVKRKESKVEFDSVYSELEHLKKSRDNLPRIVSSMREKISQGLGVSEKKFPFVCELIRVKDSEKEWTGALERLLHNFGLRMLVDEEDYKALSSYVNSSHLGGKIVFSRMLTQGGPILQPKDKDEVFYKLEIKPSLSKFQKEWLETQILKEFGHICGDLQRLQKEEKALTKEGLIKSGKIRHEKDDRKNINDARDYILGWNNREKISALESEFMRLGKVIDKIESEIKKVEEEQKQNDLFRDDLKSFLRFEQFSQIDDQSLEEPLEQTRKEIQDLEVLSEEYGKLKEQYESAKVRLSEAEGKEKETTKELTLLEERFSNLKKEMETLNSRIKEFDPNRRTRLEPILNERLGQVIFNLDSILEKERKFLEVLIKERDDFIEKRDSIGEELNKGMDRYVKKFREEADREELSVSILNAEAFAELTERIRKDRLPEFQDKFRNMMSDKVAKQILEFKAELEDDVSEIKDRIDELNESLRYLDYSKGKSYIQIRYFETKDREIIGSTGFKELLRNSIPDMGDSSNNEEKFSRIRELLWKLKGENGFDRWSRLVTDSRNWLDFQAAEFQRDTDTIIQVYDSSAGKSGGQTVKLAYTILASAIAYQFKIRELNSFRFVVIDEMFNNLDNENSRYAMDLFRQLGLQLLVVTPMDKITVVEPYVQSVHFVKNNSDGNDSRVYLITKEKLNSEKIENTDRKVGNL

SEQ ID NO: 31660 - protein, 389 aa, Leptospira noguchii serovar Autumnalis str. ZUN142
MISLEEIRKKCLLYYHKVLNRAVLGEKSFPWEISTGKIDPEEIIHNPSLLEKIKKESKEKKGFGFLLVSFQKETRKFGTQTLPSKIRFEDEIDFLRFLHKEQEFSFYKSDCDMILFKIPALMEWILKNPFLVIQESGNWEDLLSVCSYFLKNPRPGLYIRELPISVPTKFIEENKKVLRNLLDFLVPENIDYEGKDFESRFGLKKPEALVRFRILDPIIAEKSSGGLFDISVPVDEFRNLHLFGCKRIFILENKINFSNIDHFLTFPKLSGSIAIFGQGYGLGILKDCVWLNKMEILYWGDIDVQGFEILSLLREQYPQTKSFLMDKETFLKFQNFAVNGKYSKFSKLDYLTESEKETWEYLRSLGSKNRLEQERIPQEYIEKTLHSQF

SEQ ID NO: 31661 - protein, 483 aa, Leptospira santarosai str. ZUN179
MDYKLLQRLFRSSAIRLLRKDNAPFIIYFLEKYFRSSARTFVPFEELKILLRYELENLNDQEEISLQRSADVYLGEWIGENFLTRRIRSAEGIEEIILEPSVELEKVFSWMEDIRSLEDKDVIGTESRFFSVLNKLKEIVEESVSDPEEKIRQLEFKRDELDLQIRKLKAGEQVSKFPSERIRSQYVYARKEALGLLSDFRQVEGNFMEITKMIHKKYLEVVQKGEILRFALDGNDELLRSEQGRSFQTFWDFLRSERSQEQFESILDSLYSLEDVLELDSRKFFRNFRRNLREAGSRVNGVVTRMSEQLKKSLVERTLRENRRSKELIAEIKNLVLENPLDFSQTDFYSLEEMDVRFPMERPLWRGDPEETFRTVRIENTDEDGNVFDILESIRGIDLEMYEQRIQTLLRISPEVSLEKVLREYPDDVCFESLVAYVWIAGNAEFHSLDDSETFVYSVSIMDHPSEKLAYRIPKGTYRVGHL

SEQ ID NO: 31662 - protein, 187 aa, Leptospira santarosai str. ZUN179; identical to SEQ ID NO: 31354

SEQ ID NO: 31663 - protein, 1118 aa, Leptospira santarosai str. ZUN179
MTDLFSPGEIAANTGYRLEFLEILNWGTFHGRIWKLRPEGENFLLTGANGSGKSTLVDAILTLLVPAAKRNYNLASGLESKKRDRSERSYVEGHYGRSSSGSEGILKIRGKQEECYSVLSAVFEANGRFPRIRIAQIFWFESGELKKIYLFSDKELDFEKDLVLGKRTVKELKADLKNSGARLYDQFKAYNVDFRKAVGLESEKAIDLFNQIVAIKSLGVLNEFVREHMLESKDKRSRIEELNRNFSDLSETYEAIVNAKEQLKLLEPIEKKAAEYREWNRKAADLQALIVYVPYYFAEKNYELRQIREQDYLFELSRLKDRSNELSTEIESLNQEERKLFNALENNDTQRRISDLVRKREGILSDLKTRGIERKKYSSYLSKIGLEEASSEETFYTNLRIAGGMLTETDSIWEEIRDRLGKLTLQKMELQKNFDSVRSELEYLKKKRDNLPRTQSEIRAKIASGIGLSEKRFPFICELIRVKESEKEWTGALERLLRNFGLRMLVAEEDYEAVSAYVNSSYLGGKLVFSRMVPLSGPILQPKDKEEVFYKLELKSELSNVKKEWLEAQILREFGHICGDLNRLRKEEKALTKEGLIKSGRIRHEKDDRKNISDARDYILGWNNTEKIAALESEFALLGQNIDRLNAAIDLIREEENKNKNKRDDLLLFLRFEQFSQIDDESLKGPLQDTERQIRELELRSEEYGKLKEQYELAKARLTDVQWRQRETAKEFNVLEDRLFTLRKDMEDLQQRVRKVDRETSISLEPILNERLRETILTLESIAETERNFSDRLVVERDQYLEKRDSIGEELNKGMDRYVKRFREEADREELSVSVSNAEGFAKLTERIRQDRLPEFQEKFRTMMSDKVAKQILDFKAELDDDVSEIKERIDELNDSLKDLDYSKGKSYIQIRYFDTKDREIVGDSGFKEMLRGSIPDLGDSSHNEEKFAKIRELLKKLKGEGGSDRWSRLVTDPRNWLDFQAAEFLRDNNQILQVYDSSAGKSGGQTVKLAYTILASAIAYQFKIRERNSFRFVVIDEMFNNLDGENSRYALNLFRQLGLQLLVVTPMDKITIVEPYVRSVHFVKNNSEGNDSRVYPISKENVSSGKDENSERKVGNL

SEQ ID NO: 31664 - protein, 392 aa, Leptospira santarosai str. ZUN179; identical to SEQ ID NO: 31633

SEQ ID NO: 31665 - protein, 499 aa, Saccharomonospora cyanea NA-134
MATRGIEGAYQGALRAFQNPMLALLHQTHAPFVVTVLAMVFTAERPSVAVADAHAEINDALDQLRAAGYGDEDNQPLPAGNARDLCRQWVQAGWLVRQVSDDDVEVYRLSAYGVGALEVAGRVGGVRTRVSESRVRTLLEAIERLAQDADPDVMARIARLHEEIQQRQKELTRLERGGTVETVADEQLLEAAENVLHLARELPADFARVAESIKAVQRDVVAELRHDVRPTGEVLREYLDRGKRILDATPEGRAFAGALRLIGDPAQIHNLWSQLRTVLRHRFTDLLPEQQRRELTEISRRVEQGVSEVLTAQRQASHVITTQVRNHDPMRDRQVDELLRNVMAGLHEWVPGSRRGEAVEPLRRLPVADVGHLRQRMSDLRPPQPPAPLREWDETEDVTTADTRAWGGPRYAALQAHLVTFAGDAENVDVAAAFRAADEDLQRPVDLLGLLEIAHDSGMTETAEVAMVDTVRPDGTRRRFALGGVVAANPASADESGDR

SEQ ID NO: 31666 - protein, 222 aa, Saccharomonospora cyanea NA-134
MSELDPGDGWSAGSTAGFIDPVPMEDDPTELFPGDAGTLDADVRRVLVQLLRRKFLLAEKNPAQWRTLLENQQIIESRMHDLFVRLVVDHDRGIAYKQQVRSTELDVPILLRDEPYNRAETLVLVHLRTVFQRERGTGETSARVDIEELEQTVLTYFDPNDHNLARTQQEVRSAVQRLVTEGLLVEESAGRYRITPLVEVVLSTAKLAELEQWLRERNEATA

SEQ ID NO: 31667 - protein, 1112 aa, Saccharomonospora cyanea NA-134
MIDTLFGLIPAASRGQQWVARDLQLVNWGGYDGYHTVRFAPGATLLSGGSGSGKSTLMDSYIALLMPHTTPFNGASNGGVVGRPRGKDQRNILSYARGKLDESRADGETKVRVLRGDGRDTWSAIAMTWVDHTGAEFTALRAWYVPSSARTLDDVVAVRATCDHHYSLRALEGPAGKRLARTEVEATGLTCFETDRDFTARLHTTLGIGAAGDGHKAVALLGRIQAGQQITTVDALYKTMVLEEPSTLATADAVVQQFDELSEIRKRMIVARQQVKALTPIREHRRAIDEAEEQLRLIDAVGSFSEASSPAALWRHERRLDLLRAAERDLARRHRRAKEELRETNALVEATEAQCEGAADTLRASGGDRLDTALRELRGVEQRLLDVERARKQLDRALDTLGTTVSTGEDFAALVETAHRSLADTEARRTAQTRFAEAMAEKKQTEAELAELRAEHKAVKSRRGNIPTELHAARAAWAEAAGLTPDDLPFVGELIEVSTEFEPWREAFNLALGGFATRMLIDIGRLNAFREAINKVRTARRVQFEGVRTGLRDEVGLNAKTLPGRLDYRPSPFTAWLKSELARRFDFVCVETPRLLAQYPKALTIDGQMSQGSRGAHGGHGRANVLGFTNSRLLADLDHRIGLARHRLDEAVAWVSRAEDELNSFEARRAAYRTLTELSWDQVDVESVQAERDRWNRVVDEVRAGNPKIDQLQRQVDELKERVRDLTERAGQQKKTVEVLGESWEATVDEVDRAQSALDAAAETGTVVLPEHQEYLEALFDSVPDSATPATELAEFDAAVKLATDRLVADRRSATETIGRSRKALEDTFSTFLERWPNPNLGTDPDASYRDFDRVLTDLETSGLHELEAEWRDSLLKLSGNDLTGLDSELAAAVREIRDRIDPVNRILAELPFADDNHRLRIDPQESHSTVRARFRKELRDVRAFIDRAETDADRERAYHRMAKVIDRIRRTAPDFADLVDVRNHVRISAEKRDLDGRHVAVYDHIGEKSGGESQELVAFIVGAALRYQLGDAGAERPRYAPIFLDEALIKADARLTGRAIGAWRGLGFQLIIGAPNDKHSAIEPHVDAEYLILKNSEGRSWAKPLVGVGDE

SEQ ID NO: 31668 - protein, 410 aa, Saccharomonospora cyanea NA-134
MSALVNPEDALTAVRRKLGQKWAEAVCAGFGVGDRVIFSVPLRPGVSTGKAVEQLGHAAWHEWHRRWREFASRLPAGVEIVRKAVTIRGVAGGFPATLKADLDGAVTLLADTRTGAEPPTVDIRRARELASALRAAGATLTPATLRAAYRLRAIDVEVLLGAVTWLRQHPDAGTWTLRQLPIPGMHTKWLDSHGALLRDVAGRDVREEVRPRLTVTHLTYVDPDHAASGRRRHDAWTTGDVHDIAYRPRVVLVVENRDSRLWFPPVRDTIVVEGGGKAAAALLGGVPWIRAAEHIVYWGDIDADGYAILDRFRGTLAAPAPDGAPAKPVTSILMDATDLHHYAEYGVDHDKNGRPIKPSPELLPHLTEAERTAYDTIATAGPTPFRRIEQEAIPLAHAVTRLLQVVDGQG

SEQ ID NO: 31669 - protein, 488 aa, Niastella koreensis GR20-10
MKQEDLLYLLTANPAIQMLRSRSARWYLPFLYHVYKEENRFVIGEDILIQLLSETLSHQEDGTEDFEEAKIIFGEDEETRSRKYMLNWVQKRILQDLQDAEGNIQYQLSAHTEKVFQWMLTLQARNHVGTESRFKLLFNSLQDIVEKTEDDRPKRLQMLKDRRAEIDKEIKAIELGVAPDNYSNAQVQERLELFTRLCYELISDFREVEDNFKQIHRAIVEQHTKAEQNKGAIVGFAFAAYDALRNSNQGKSFYSFWDFLISRAGQSDWKELTEQLLDLLKDRGIEADVQFLENIKSLLLEQGKTVYDANDKMAEKLSRIISEKEIARHKRLRHQIGNIKELIFDLMDEEEVKAGISLDEGVEVKMLMERRLLFEQKKAVVAVKQPTAASEKIADPERFGRMMNVTYIDKKRLWQKVEYALQKKQTATLKEILEVQPLENGIAEIVSYFGFLRDKASRVQIIHNTSEHIPLNEAATKFVEVPYLLFSK

SEQ ID NO: 31670 - protein, 208 aa, Niastella koreensis GR20-10
MSAQQRILPYTSVFIKLLKGPVEYVEKNTWEKLIQYKVELTSFLLQLGLALVLDEQDGYAYIKHYPFEEDENPVSWIQRRALTYEESVMLVLLREMMAEFEVGEATNRELIKKRREIKEYAELFFKENASRVKFLKEIDRLIDKAEENGFLDKTETSELADEQKFRIKKIIKAKVSSEELDHFYQQLVRHKETKEETEVVTDLSGQEL

SEQ ID NO: 31671 - protein, 1137 aa, Niastella koreensis GR20-10
MQLSVFSTDSQKSGFRLQYMEIFNWGTFDDVVHSIRPMGETSLLTGANGSGKTTFVDALLTLIVPEKRYRFYNQSSGSEKKGDRTEETYVMGGYGSMNSESTGSLKTLYLRENKDEAYSILLAHFANEAEQAVTLFQVRYFSGGDMRRLFGIAHKALRIDEDFKPFDLNGQWKKALDQKYNKGSRKQIEWFDAASKYAQQLVHVLGMQSVQALQLFNQTVGIKVLGNLDEFIRTHMLEPRNMEESFQDLKKHLATLLDARRNIEKAEEQIKLLQPIEQHFTAYNTLKNQIEGSEQMLQTARIWNSFTRNELLQQAIEESNASIQDIQQKQQIVKLTYEQLQEEERVVKNQIDQNKAGQRMQQLEKDAQDLELKKQEAARELSLFASWCEELHLEEKQPADEATYQRIAKEANRKKLELETKQRLNEEDEYSAKRAKEKSDADKKKVEDELNNLLHSKNNMPGNLISVRKQLCDALNLDQNDLPFIGELMQVRSDCSEWQPALEKLLRNFSLRLLVPDKHYKKVNKYINNNHLGMRLVYEHVTDNPMIQNPEKDTVYEKLEFHPDSPLSSWVEQQIIWQFNHVCITDEKTLDRYEKAITLNGLVKNKSRHEKDDRNGKHDPSKYVMGWNNEKKKDFLIKRRNQFADLVVKASETLEKCKSKSDRLQKQFYAITRIREHKGFAELDMAGIQRGIHKLQEQINGLRKANKDLDNLKAQLIDIQQKRDEAESQRGQLLIDETRLKDRIQQYYEQQEALQPLLQHISEGDKDGLLQFQQQQAALISDINLQNIDEVYDGLKAKQTRLNEKQRDELHKEETQLNKCINRIKNPSTELKTKFSPEWDGDVQHLPEDAAYANEYIDWLGKLVHENLPKYKRAFESFINDTITYKIGGLNEEMERWERDINNSVTRLNQSLGGINFNRLPDTYIQLGKRPVPSGTDIKEFRGRLLDALPQAANWQQSSFEEKSKHFTQKVQPLIDELDKNESYRNKVMDVRNWFEFWADEKFRNTDEIKKTYRQMGQLSGGEKAQLTYTILCSAIAYQFGITREGKNSRSLRFIAVDESFSNQDEEKATYLMELCKQLHLQLLVVTPSDKIAIVQNFIAHVHLVQRVQNRHSVLYNMTIKELKEKVEEANPLLLEG

SEQ ID NO: 31672 - protein, 471 aa, Acetobacterium woodii DSM 1030
MFLFEDAQYDRFFNPLCCKNRKLYYECILKIIESSKRVSLLYEQDVRDSLILYLRNSNISVDQEDDIFNNNRTESENASAILRYFRDCSWISEPEIGRNGDNIATVTPYCRKLIDAIERIFKRETRGDLTNHIFSIYDTLKSALERDHGRTIRPYSNILLPLLDSVSDLKSELFSLKDSIRTIMRIIIDISEVNKFGQFFIKDEMLNIFFKDYFFIKRDGLIPGYIAEIEKMLRQVVNIDVYGKMISEYESLKNVDSYQAKVVIDSQFDVIRDFIYHDYAHEMDYIDKKINNYYNLYSTRMLMVLSNNTNIQTYLNDLLMCLKDMDTENRQRALAQISEGYHLLSYQYIGNKSIERRRKRNPNIKRGAIIPSILTAEEKIKMTQDVLENKDRYSVDKVAHYFKNLLQDRNCLTTSEVNIKNKDDVLMMASSIIYSNSNDFPYGVNFLDGMIETDLASISDICVKRKTEENE

SEQ ID NO: 31673 - protein, 222 aa, Acetobacterium woodii DSM 1030
MSDIKLEISIKEDNIDLFKRCVRKLLDSTFIVGEKDERLYKFIARESNRQDISDYLRMAGFDVLVDTNVKIAMLKPYEADLEVTGLKRSNVVTFTTEQYHLLLVLWSVYLENLGYNEENLVMRGDLIDKIKAYAVDIDKRKLSTALALFKKYSLINFDEKDKTEEAIITLYPSLQFGWDIVQFKEISAQYLSDVPSYEDSEGLCDDQDEYIDEEQIEDMEEE

SEQ ID NO: 31674 - protein, 205 aa, Acetobacterium woodii DSM 1030
MIKLKAIRLINWYGFNNVTMPIGDFTLIAGQNGNGKSVLLDAIKYALYGDTVFNKSTENTGSRTLPSYTRGFKDATSGTCIRPADQWPTIITHIVLEMFEEEMERSFVLGTVIETNLTNNTKTNRYIIEEVNLCDLNHTYIENNDLMSYNGKELQKKYSLKLLDATDGTVKFMQRTGVNFHIISDWINHNKSDEKEPNNAKIMAC

SEQ ID NO: 31675 - protein, 478 aa, Gordonia polyisoprenivorans VH2
MQAWETNRSIQRSAAVRLFAATNSALYVTLMERHLDFGARRSETDLAIRLERDMAELGVGDQPHGMDLLKLWAKNGWLHRMADPVVATQNLCYLTPEARSVLDYMRRLRREDSVATAGSINGIAAGLRRVAGQVSDDPSYIREDLTHQIEELDAELADLDAGRRRRPDLRAAEDEARAIAYQMEQIISDIGQYGSMLDRITTALLDDPNDSDLAYRDRQRQMFDDYEALLESSQSASYHAFTHMIGDPTQRARLVSDIETVTAHLPAIDPGLRSVMDNFFVLVTQQIDEVGRIRRRCARRIRRFVASGTLEQSRGIARQLNDALATANELLTISLADRRLGYELPLATPALTSNGRLAFEIRTPEPPQPAVPATGETDLDSFVSLAGQVDTVELTEVVNNAVVDGPVALSEVIHSLDDPYLAHVIVLWSWALRQSSATGDPVATEFIRFRSLDGEDRLIEIPALHFTEPIPTAEVDVL

SEQ ID NO: 31676 - protein, 285 aa, Gordonia polyisoprenivorans VH2
MTDQSERFPAKGFSAEGFSAKGFSTEEFNGYDDLPAVSRTAVEETKVPRFDGDVSAMPDRACWALQNLLTRRYVSGDRTPQLWSWIVEYQESLRIRLSELDLRLRLVTELEVAFVEQVGYDSRWGRRLLKRETIQAYDAILALHLAKHMRAAREDQVLITHEEIHELFAGVSNTIDRDLALFDKRIDKAIDKLEELELLRRHRDDPDTFTVSPAITAIMTASVITDLQHQFEQFIGAGEEADAQTLDRSAPESEDDNSGYLAEGDRDTDDGDDTEDDDTDEGDDW

SEQ ID NO: 31677 - protein, 1114 aa, Gordonia polyisoprenivorans VH2
MSDRVDQFHLSRLQLINWGVFDGYHSIPFSANGSLVTGSSGSGKSSLLDAISLAFLPDHRRNFNASGDATAAGSASGRRTVGKYVRGAWGERRDGVNSTREIMYLRGTGPAWAAIAVTYTSTSGVSITGLVLKWLAAGKMTDAHSAYYLADGDADIVDACNEWAANGHNAARLRERGWRGGPGEGKYLASLYSLIGIRGSEAAQQLLGKAKSLKSVGGLAQFVREFMLDEPTSIAGVKDALEQIDPLVEAREFLDVARRKRTILGNIEAVQERYATESAKFSVLDTIDSATIRAYVTNLRIRNAEPEIADLDDQIARLDGDLAALTSQHDQLRQDHSHLLSRISSSTADLAPLQEQLAAAGKAASEVSMRRASFDSKMSALDVEIPESAEDFWETRESLIEEATRLDGQLEAGKGHYAELLAAEVAARSRRDAAAAELTRVREAGSALPRAEHEMRRVIADALQLDDSELRYVAELVELDPDQERWRPAVEKVLRNAGLRLLVPDRHFNAALRFVNTHDMRGRIQLHHVERRTAVLPDPGTLAATLRPVDPEHPSSAEALTLLARLGNYVCVDDPAEFADHAKAVTDRGLRKDSAKLAIKDDRQALRPSQYIFVGNVDAKVAALGEELDHEDSIHAAAREATAVLERERADKQRRRDLYRTVCEQFTQWSEIDVESADDRAERLSEQYELLMEEHPDVEALQRKAEEIWEQVRAAISQAALVRDRIATQDERRTQLLDLVDRLKAEDISGPAQAALDTFREDSAATLDVLTPDPYRQELIKAVGRDRDRMRADARRSRDELTRILATYDEEFPDEIPNDSSDFDERIYDYVALCRRIDERELPAAYERMRRLITEQAPGAILNLHMAADAEERRIVEQIERVNTGLGAVAFNRGTRLRLQPGRKNLGAAAELTEKARQIAGRSTAVAFGDEQAILEQYADILLLRERLAGATPEDRQWTRDALDVRNRFDFYCEEHDAETRETIRTYSNAGDNSGGEQEKLMAFCLAGALSFNLASPHGDDNRPIFAQLMLDEAFSKSDPQFAQQALSAFRKFGFQLIIVATVQNTSTIQPYIDNVVMVSKSEAAGGRPVATATSTSIGAFSDLRRASGKNRLI

SEQ ID NO: 31678 - protein, 504 aa, Gordonia terrae NBRC 100016
MEFSAFPAPVEAPGTSSGSESAQVTLTDAWESNRSIQKSAVGRLFAATNSALYVTLMERHLDYGAKLSETELTVRLDRDLADLDLTDQATGLELVKLWARQGWLHRVTDTTDPHAPNLCHLTSEARSVLDFMRRQRREDSIATGGSITGIAAELRRVAGQVSNDPDQIRSEIEAQMSDLDAELADLDAGRRPPVDLRVAEDAARTIGYQMEQIISDIGQYGTMLDRITTALLDDPGDSDLAYRDRQRQLFDDYEALLDSPQSASYQAFSHLIQDPERRARLKSDIETIIDSFPGMDAGLRSVMDNFFGLVTQQMAEVGRTRQRCARRIRRFVASGTLEQSRGLARQLNDALATANELLKTSLADRRIGYELPLAAPTVNSIGRLAFEIREHVPPAPALPAAVDADLTSFASLSGQVDTTELTDTVNAAVATGPVALADVIEGLEEPYLAHVIVLWSWASKQQAAGEKVPMTTVRFRSLIGDDHAIEVPDLTFTEPIPTAEVDAE

SEQ ID NO: 31679 - protein, 326 aa, Gordonia terrae NBRC 100016
MTSLPPELDADSSLPEVRADDPLPPEVRAQRATKGDPEVRADDAQSPLPEVRADDPLSPEVRAKRATKGAPTPDEFAGFDDLPTVANRAATHTPNAPRFDGDVSELPDRACWALQNLLTRRYISGDRQPQLWSWVAEYQDVLRGRLSELDLRLRIVDELQVAFVEQAGYDSRWGRKILKRETIHTYDAILALHLAKYVRAARDEPVLITREEIHELFAGVTNTIDRDLALFDKRIERALDKMEELEFLRKQRDDADTFVVSPVISAVMTASVITDLQRQFEQFIGSGDTGEVPPEDLADEPADRDDDAADLDGDNAYGENDEGDDW

SEQ ID NO: 31680 - protein, 1114 aa, Gordonia terrae NBRC 100016
MSGQVDQYHLSRLQLINWGVFDGYHSIPFSPNGSLITGSSGSGKSSLLDAISLAFLPDHRRNFNASGDATAAGSSSGKRTVGKYVRGAWGERRDGTNAHREIMYLRGTGPAWAAISVTYTSSSGEAITGLVLKWLAAGKMTDAHSSYFIYDGDADIVEVCNEWAASNYNSAKFRDRGWRGGPGEGKYLSTLYSLIGIRGSDAAQQLLGKAKSLKSVGGLAQFVREFMLDAPTSIVGIADALDQIDPLVEARELLDVARRKRTILGNIEEVHERYAGEAATFSVLDTIDNTTIRSYVNNLRIHNAQPEVADLDDQITRLDGDLAALTTQHDQLRQDHSLLLSRIATSTGDLAPLREQLGGAQKLSTEVTARRNAYEDKVSALGFTPPTRAEGFWLLREELTEEAAKIDGQLDAGRAHYAEALASEVAARTRRDAAQEELGRVENAGSALPRTEHEMRRVIAHALQIDESELRYVAELVELDPDEERWRLAVEKVLRNVGLRLLVPDKHFRAALRFVNSHDMRGRIQLHQAETRSMPVVEPGTLASKLRPVDASHPCAAEAMTVLSKLGNHMCVDSPGEFSQYAKAVTEHGLRKDSAKLAVKDDRHQLRRSQYIFVGDVASKIAALRDELEYEERAFEDARQDCAELDRERSAKERRRDAYRRVCEQFTQWNEIDVDSVDDRVDQLTDQYDLLIEENPDVEALQRKAEDLWEQVRNAISQAALVKDKIARQDSRRTQLLDLIDRLKPEDVPAQAEKTLDGFREDLSATLDVLNPEPYRQEIVKAASRERDRMRSDARRSRDELARILDTYDEEFPDAIPNDSDDFDERLHDYVAVCRRIDERELPAAYERMRRLITEQAPGAILGLHMAADAEERRIVEQIERVNTGLGAVAFNRGTRLRLRPGRKKLAAVEELTEKARQISNRATAVSFGDEQAILEQYSDILLLRERLAGNTPEDRQWTRDALDVRNRFDFYCEEHDAESGETIRTYSNAGDNSGGEQEKLMAFCLAGALSFNLASPHGNDNRPIFAQLMLDEAFSKSDPQFAQQALSAFRKFGFQLIIVATVQNTSTIQPYVDNVVMVSKTEAGPELRPVATATSTGIKAFSELRRSGSQLPV

SEQ ID NO: 31681 - protein, 516 aa, Gordonia sputi NBRC 100414
MVNSAVDGALTLTDTFEANRSIQRSAAVRLFAASNSAMYVTLMERHLDFGIRHSESELAIRLDRDIAALGTSDQPTGLDLIKSWAKQGWLHRVTDAASPSAPNVCFLSTEARSVIAYMRRLRREDSVATGGSIMGVAAGLHRVATQVTDDPERIREDIESQIDELDAELVELNEGRRRPFDLRGAEDEARAIAYQMEQIITDIGQYGAMLDRITTALLDDPHDSDLAYRDRQRQMFDDYESLLESSQSASYHAFTQMIQDPVQRARLISDIELVVDRLPSIDTGLRAVMENFFPLVSEQMAEVGRIRQRCARRIRRFVASGTLEQSRGVARQLNDALATANELLKDSLADRRLGYELPVATPQVTSIGRLAFEIRNPAPPEQARPADGRTNLASFASLAGQVDTVELADVVNDKLTAGPLSLSDAIAALDEPYLAHVIVLWSWALRQPREAQRQPREAQRQPREMQREPGEGSSFVRFRSLEGEDRAIEVPTLMFSEPIPSQYSDTDSILSTEADA

SEQ ID NO: 31682 - protein, 279 aa, Gordonia sputi NBRC 100414
MTSTDTTDPNTPEASTDAAVSTGTPVDEFAGYDDLPTAATHGRIDGPGAPRFDGDVSAMPDRACWALQNLLTRRHVSGDRNPQLWAWVTEYEDVLRSRLSELDLRLRLVDELQVAFVEQAGYESRWGRKILKRETIQTYDAILALHLAKFLRSSREETAIITREEIHEMFAGVTNTIDRDLALFDKRIERAIDKLEELDFLRRHRDDPDTFTVSPVITAVMTASVITDLQHQFEQFIGAGDTGDDLAVDADSAGAEGNSTPADQSDSTDEYSDDEGDEW

SEQ ID NO: 31683 - protein, 1153 aa, Gordonia sputi NBRC 100414
MVSDLDRLDQRDRLDQRDRLDQRDRLDQRDTLDQRSTPDRGEGDEQYYLSRLQLINWGVFDGYHSIGFSPGGALITGSSGSGKSSLLDAISLAFLPDHRRNFNASGDTTAAGSSGGRRTVGKYVRGAWGERRDATGAHREIMYLRGSGPAWAAIAVTYTSTSGTAITGLVLKWLGAGKLTDAHSAYFIHDGDVDIVDACNEWAANGYSAARFRDRGWQGGPGEGKYLSTLYSLIGIRGSDAAQQLLGKAKSLKSVGGLAQFVREFMLDEPTSIAGISDALEQIDPLVEARELLDVSRRKRTILDNVEAMQERYAAESATFTVLDTIEPEVVRSYVTNLRLHNAEPEIADLDDQIARLDSDLAALNSQHDQLRRDHSHLLGRIATSTGDLAPLQEQLSTAQKASNEASIRRATYEHKISALGFDIPEDGEAFWELREHLMEEATRLDGQLEAGKPHFAETLATEVAARSQRDAARDELERVRHAGSALPRAEHEMRRIIANALQLDESELRYVAELVELEPSAERWRLAVEKVLRNAGLRLLVPDNHFAAALKFVNEHDMRGRIQLHHAETRPAPMVEPGTLGATLRAAEPDHPCTNEALTILAKLGNYVCVDSTADFVEHTKAVTDRGLRKDSAKLAIKDDRQQLRPSQYIFVGNVSAKIAALQEELESENELYEQARARSAELDRERTAKEQRRDAYRRVCEQFAAWNEIDLDTADDRVDALTEQYELLMEENPDTEALQRKAEDIWEQVRAAISQAALVRDKIATHDKRRTQLLDLVDRLKIEPVSAHAEATLDRFREESAAVLDVLAPDPFRQDLLKAVGRERDRTRADTRRSRDELGRVLDAYDKEFPDAIPNDSDDFDERVHDYVALCRRIDERELPAAYERMRRLITEQAPGAILSLHMAAEAEERRIVEQIERVNSGLGSVAFNRGTRLRLCPGRKTLAAVAELTDKARQISSRTAAVGFGDEEAILEQYADILLLRERLAGATPEDRQWTRDALDVRNRFDFYCEERDAETGETIRTYSNAGDNSGGEQEKLMAFCLAGALSFNLASPHGKGNRPIFAQLMLDEAFSKSDPQFAQQALAAFRKFGFQLIIVATVQNTSTIQPYIDNVVMVSKTEDVNSRPIATAISTSIQTFSDLRRTSTSRLPV

SEQ ID NO: 31684 - protein, 558 aa, Gordonia otitidis NBRC 100426
MANSTVDDSATAVPADRATEPMRPVRARPTDPVPSTTTLVGTWEANRAIQRSAGVRLFAASNSALYVTLMERHLDFGTRHTESDLAIRLDRDLAELDASDQPSGLDLIKSWAKQGWLLRVTDATSPSAPNVCFLTTEARSVIAYMRRLRREDSVATGGSITGVAAGLHRVATRVADDPDRIREDIAHQIDELDAELVELNEGRRRPLDLRGAEDEARAIAYQMEQIIGDIGQYGAMLDRITTALLDDPHDSDLAYRDRQRQMFDDYELLLESSQSASYHAFTQMIQDPQQRARLIADIELVVDRLPSIDTGLRAVMENFFPLVSEQMAEVGRIRQRCARRIRRFVASGTLEQSRGVARQLNDALATANELLKDSLADRRLGYELPVATPLVTSIGRLAFEIRNPAPPEQARPADGRTNLASFASLAGQVDTVELADVVNEKLASGPVSLSEAIDALDEPYLAHVIVLWSWALRQPRNTLRQPREIQRQPRNTQRQPGDTRSVDAFANTAGDGGASSFVRFRSLEGEDRAIEVPVLMFSEPIPSQYSDSDSILSTEADA

SEQ ID NO: 31685 - protein, 284 aa, Gordonia otitidis NBRC 100426
MTSTDTTGPHNSTADTTEGGVTGSPAVPADEYAGYDDLPSAATRGRVDEPRAPRFDGDVSAMPDRACWALQNLLTRRHVSGDRNPQLWAWVTEYQELLRSRLSELDLRLRLVDELQVAFVEQAGYESRWGRRILKRETIQTYDAILALHLAKFLRSSREETAIITREEIHELFAGVTNTIDRDLALFDKRIERAIDKMEELDFLRRHRDDPDTFTVSPVITAVMTASVITDLQRQFEQFVGAGDTGDDLAATTDQTDSDAWDGTDGPSSADDTDAYADEEGDEW

SEQ ID NO: 31686 - protein, 1130 aa, Gordonia otitidis NBRC 100426
MSSFHRPDQRGSSAALRDSDEQYYLSRLQLINWGVFDGYHSIDFSPGGALITGSSGSGKSSLLDAISLAFLPDHRRNFNASGDTTAAGSSGGRRTVGKYVRGAWGERRDATGAHREIMYLRGSGPAWAAISVTYTSTSGTAITGLVLKWLAAGKLTDAHSAYFIHDGDVDIVDACNDWAANNYSAARFRDRGWQGGPGEGKYLTTLYSLIGIRASDAAQQLLGKAKSLKSVGGLAQFVREFMLDEPTSIAGISDALEQIDPLVEARELLDVSRRKRTILDNVEALQERYAAESATFTVLDTIEPEVVRSYVTNLRIRNAEPEIGDLDDQIARLDADLAALTAQHDQLRQDHSHLLGRIATSTGDLAPLQEQLSTAQKASNEASIRRATYEHKIAALGFDVPEDGEAFWELREHLMEEATRLDGQLEAGKPHFAETLATEVAARAQRDAAREELERVRHAGSALPRAEHEMRRIIASALQVDETELRYVAELVELAPSAERWRVAVEKVLRNAGLRLLVPDKHFAAALKFVNDHDMRGRIQLHHAEARPAPLVEPGTLGATLRAAEPDHPCTNEALTILAKLGNYVCVESTADFVEHSKAVTDRGLRKDSAKLAIKDDRGQLRPSQYIFVGNVTAKIAALQEELDLENQLYEQARARSAELDRERTLSEQRRDAYRRVCEQFTQWSEIDLDTADDRVDTLTEQYELLMEEHPDTEALQRKAEDIWEQVRAAISQAALVRDKIATHDNRRTRLLDLVDRLKLEPISTHAETTLDRFREESPAVLDVLAPDPFRQELLKAVGRERDRMRADTRRSRDELGRILDSYDKEFPDAIPNDSDDFDERVHDYVALCRRIDERELPAAYERMRRLITEQAPGAILSLHMAAEAEERRIVEQIERVNSGLGSVAFNRGTRLRLCPGRKTLAAVAELTDKARQGSSARTAAVGFGDEEAILEQYADILLLRERLGGATPEDRQWTRDALDVRNRFDFYCEERDADTGETIRTYSNAGDNSGGEQEKLMAFCLAGALSFNLASPTGNGNRPIFAQLMLDEAFSKSDPQFAQQALAAFRKFGFQLIIVATVQNTSTIQPYIDNVVMVSKSEDVNARPVATAISTSIQAFSDLRRTSGSRLPV

SEQ ID NO: 31687 - protein, 610 aa, Sutterella parvirubra YIT 11816
MWRLLASQQGPLVIGILQALLYEEERTLPGSVFLERLAPLWAEATLEAVSPEDARALAARFVREGYLVTRLPAGALEEQYELTAGALEAIRILSRALTRRSGPSESRLEMLAHAVVKLAQDADPDPARRIEQLEAEKRRIDEEIAAVKAGARTVLGKDAAQARTGDILELFAELLNDFRSVREEFDRLNLDLRERIMTSEGSRGDVLERFFAGYDEIAQSEAGLAFTGFYRLLTNESASAEMEAALERITQQPFYGELSLRERRTLAQLRSELLSRSMDTHDVMRRLAQSLRQFVESREYVEERRMGQLLREARAAAAAAREDAHQRKTFLELVLPNADIHSPTQYELDDPSVDVENYDVSVAPPPEIDREALAQRIRFAEINYGELRLAVVEALGLAKMEGRGKVSVSEVWSHVPNHQGLGSIVGLLTLAARYGEAAEAAESVDAAEAPESAASDAVLSAAAEALEAVTEAQLTGQDVKAPKTPKAPKRRSKRISALAAAMDEGHLSGGVELSAEGIQAFRADPSAAANDYRGLPMPDVWPSGTDLHGETAPGSLLAPQHETISWTDRAGGDVSAEIPKLVFTTTGVARMMRSARQSAQARGLADPFAR

SEQ ID NO: 31688 - protein, 314 aa, Sutterella parvirubra YIT 11816
MKIEKDDRMTEEKDDQLPDDLLAYADALEIEAAEVEEAEQEAEFDFGEAEAEEADAEDGDQDDAADEADDDADEDDDDASGLWPGDTGELPFNVRRVLVALLRGPCLRRDRHPKLWRVLLTNEAVIRSRVSDLILDLLLDEEAGVAMLRRAETGDLKAPSLLHTQRLNFLDSCALLELREKMMRNAGAADERTVVTPEEIAEALKLYDRTAFKDEQAFRRHVSGVVSRLTARRLLLPLRGTSALEVSPTLPRLFTADDVAKLTAAYKDKANRVGRAELDAEGAVSVDEAAETAEPADVTDTSDNKNLFTTEAAR

SEQ ID NO: 31689 - protein, 343 aa, Sutterella parvirubra YIT 11816
MSVRDTETTIAPELEAFDDGSQIDAMEAGTTPAGYESAGEKPTGGRSGQEDLLAGLNQFRATRLQILNWGTFTGYHDVPIARKGFLFVGASGSGKSTLLDAMVTLLFPAPDYNAAAREGDKRRGDRSLMSYLRGAFGTQTETDERGTRTTTQYSRTGSTFSAIALTLEDLTGEAVTLMMVAYVKGDSTEESKVNRMYYVLRSPWTFNLQAFRGFAQFASFDFKWLRRSLPNPEVYQTFSAYGERFRELFRIRDKSAMKLLAKAQSAKNLGDLNTFLRDFMLEEPRTFETAANLAREFDELDEAHRAVVRAREQEECLAAARDAIKTRGDQEARWRAGVAQRDA

SEQ ID NO: 31690 - protein, 506 aa, Microbacterium laevaniformans OR221
MTQPELSAAAASTDVGVFLQNGRVPAVAQVLELAQLAERDAAWKLLRADSAPVVAGLLGTHLGGDERRVDAEELYERIDADLERLRAQGLILPLTAKGYCGEWRSAGFLVRRPSSEARGETLELSPDAIAGIRFLQGRAAPRSSVTESRLASLAAQVRRLAIDTDPDVSARIALLEEEIESIERRIESLRSGDESAIDEDRALERVRDVLAQAADVPDDFARVRAEFETLNASLRAKIVESDVSQASVVDEVFRGIDHISDSDAGRSFAAFSQLVLDPALGAAFEADIRRILDRRFARDLTSDERRALRAFLATLKGRSAEIHDVITLFARALRRYVQSQDYQRDRVLRTLLREAQHAGVQAAAHTRPWHPTFLTLDLSAVALSSVGAIDLHDPAEFAATEEIVTQTTSLASLEELRAIARETEIDFDELTRNVNDLLAEVSSCTVADVLARYPATQGVGSVIGLLSIAAEQGTVDDEPEVLAWQGADGVPRAAIVAAHRFTGAVA

SEQ ID NO: 31691 - protein, 219 aa, Microbacterium laevaniformans OR221
MTESTTADVAPDEDGGLWRGDAGELPDRTRRVLLRLVRGPYLSGAREAQLWAVLLTDEAVLRSRLADLFLELVIDRDNEFAFVRNAPSEDAPKAVRSEALTFLDTAMLLVLRQTLLSEEGRGRVIVGQAEVFEQLAVFRTPDRDEKDFASRVNSSWNKMQNKLRVLHAVGDDRAEISPVLRLLVDADQIRAITSEYHRIAREGGGESAAPSTDAEDDTE

SEQ ID NO: 31692 - protein, 1117 aa, Microbacterium laevaniformans OR221
MTMLSFPTDEPEVDPTRPGQWRLAQIELVNWGTFAGHVSVDVARAGHLFTGASGSGKSSLLDAIAAVLTPDRWLRLNAAAQDGASRQSDRTLMSYVRGAWSKEADETADRATTTYLRSKATWSGILLRYENLRDEPVVLLRVFHAPGTRTEPTALKDARIFTRGHVKLLDVKPHVEGGIDARRMSKAFPDALITTGGRHGRFHERIIRQFGFRGDATLQLLHKTQSAKNLGTLDALFRGFMLDQPGTFARAETAVEQFTELDAAHKHVVDLRKQADALRKVDEAITAFDLAGAEMAAISDLHEGVEPFTAGLKLRLAKEAAGPARAALARAESDLSDTAREQRLAAEALETAKARVRDEGGARVELLQERIDSAQRAEDVTRQYRAQLTAELMRIGAPMPEDPEQFAELLAAAVTEVARDIPAVSYEVRDAASQARKALDEVTRQIQALRDHRSNLDEKLLSARRFLADAVGVPASTFPFAGELISVAEQHSAWRGAAERVLAPFASTLLVRDEHLVAARRAADSRTLGVRLVIEAVPHAVDEPRRPKDARSLVHRLAVSDGPFASYVRKRMASEFDYACVSHPDELDDVERGVTIGGLVKRNSRRYEKDDRHEVGDATRWVLGGDTHARLEALLERRRDAMAAMEEASARDAEADSFRQDAVSRRDVFTRVSTFSWDQVDLATAMAVTAAQRDDLRVLTSESGTLREAQEAAERATRRLDETNAKHARALGAHAVARSHVESIAAHVAELEATPYAPVEERIADALEGRFRAERRSVSLETVDEVARKVQSALSKEKDASASRAADAEASFAGRAAEFRLGWPAASAELTADIRDRYGYRELREGIIARGLPEKESEFRKLLRERSQDVVAHLLSDLRDAPGLIRERILPVNASLGRSPFEGADRFLEIDVKTTRTPEVDEFLTDLRRIVEGNWADESAAGAEQRFAVLQRVIGRLGSKDRVDIDWRNRVLDTRLHVSFLAREKDVAGRVVRVYDSAEGLSGGQRQKLVIFCLAAALRYQLTEEEDEVPRFGSIVLDEAFDKADSRYTRNAMEVFREFGFHMILATPQKLLQTLEPYVGAITSVSNPDRKLSRLANVVFSVGGPEAPHPPHAEQHA

SEQ ID NO: 31693 - protein, 372 aa, Microbacterium laevaniformans OR221
MTTSVTPADVRARAKKLFDREARTWAADQQTDAVLDVSLHPPTEREALRDLEQVRRWVDSWRGLSADPSVEIEWAVRKWPRIGSQEVPVRAVLRGSDAIARIAGERDVWQVLVSRLDALRGLAGSGADSVLRTHARAIADLDGGDFERLVDVLEWLRENPESGRLVRELPIRGIHTKWIESRIGLVEALHRAGTGATGLGLREPSPLVRLRVLDPSLSFHGLTDVSAPVDDLGASQIRPERVFVFENLATVLAMPDVSGAVAVHGGGHRVDLVARLPWAQTVTYWGDLDSHGFAILNQLRARGVDATSALMEMATLFDHRDLWGVDPDPNVGVFDRLTRDERATLQSLSAEGNIRLEQERIPWDYALARLEI

SEQ ID NO: 31694 - protein, 486 aa, Mycobacterium abscessus M93
MNDLTVEELFAHNDDVQKSRAVRLLAAKNLAPYITLMERHLDRSAKVSEPQLVAKLDRDLSAVGLGEQSGLALIKSWASDGWLHRASDGTGPDAENVCSLTEDARSALAFVRRLRRADTVATGGSIAGIAAGLKRVATQLDGDPSRLRADIEAQIAELQTQLHAIDDGYRPEPDIVDLEDETRAIAYQMEQVITDIVRYGSMQNEITAGLIDAAEDSDSGFRDRARRMFADYDALFDSRERASYSAFTRTIQDPDQRAALRSDIACVAEGLPDLDPGLREVMRNFFKLVSQQIAEVSRIEQRCAQRIRRFFAAGTTEQARGRARQLNDALAAGHALLKVSTADSPIDAELPIGRSAAAAIGALSFTIKDTAPPVLAQDAPSGPLDLSGFSALATQVDMAALADTVNSAIAGGPVSLPDMISHVEAPYLGDVIVLWSLALKQDNTADRESVKVKFRSLDGQDRVMEVPQLMFREPVLATLEEEGSTL

SEQ ID NO: 31695 - protein, 249 aa, Mycobacterium abscessus M93; identical to SEQ ID NO: 31486

SEQ ID NO: 31696 - protein, 1115 aa, Mycobacterium abscessus M93; identical to SEQ ID NO: 30763

SEQ ID NO: 31697 - protein, 486 aa, Mycobacterium abscessus M94; identical to SEQ ID NO: 31694

SEQ ID NO: 31698 - protein, 249 aa, Mycobacterium abscessus M94; identical to SEQ ID NO: 31486

SEQ ID NO: 31699 - protein, 1115 aa, Mycobacterium abscessus M94; identical to SEQ ID NO: 30763

SEQ ID NO: 31700 - protein, 326 aa, Lachnoanaerobaculum saburreum F0468
MFEHICEQGSPYEGVLKEASEDFDNLNQALRTLSASIEDHINELTLGKSPQEILDFFEKYEEKIVVGSYHRFKTNDNLFYYRSSLYESLDKCEDSLFDALVLDYIDTERVEKDEASIKIKELITKVRMDIEEMEEVMRAIDDRHILYRTRAVQRAQFLLLSDGSSKSKINSILRFYANEIQSKGDGNKDDDTVASEIFRIFGQNFFDSASLATPVKKRKPTPIELMNIIEELDIELVEEKNKKMMEYIRNALTSENVNRFAKDILNGNHAVRISSVFEKEPDTFIKIIGLYTYSKTAERGYDIKLKDNVVEVNGVRFKDFIVEERR

SEQ ID NO: 31701 - protein, 191 aa, Lachnoanaerobaculum saburreum F0468; identical to SEQ ID NO: 31152

SEQ ID NO: 31702 - protein, 1109 aa, Lachnoanaerobaculum saburreum F0468
MIRMKRLHLINWHNFQDDIIDFKNITYLLGVNAVGKTTIMDAVRYCLTTNKDFNTAGNKKSGRTLLGSVHQKQRAQESYLRPGHTVSYIGIEFLDEAIKKNFVIIARIESETPKQDLRGVYQDWYITKPGYSLEDIPFFTKKKDGKSPTSRDAFKLENKGMDRASNQADARRRICRMLGIGEADSPIGKKFNEVFHMGTSLEDIRDIREFIYTYILPEPEVNIEFLQKDMIELERLQEILQEACDREELLKEINDKIKAAKELLGKVKVNESLVAYANLQGNIEETDEKKYLIEEWSTSLKIIDKKLLDLFESENKASALLYEAQRAAEENAENKEMLSLESENKNNKLENDKLILEVSIFEDVLQKLFSLKDSLNKIGFAVKVADCIRDENAAVDERIREIKNSAKLFADIEEEIKNHDAKIRTDITSLSDKSDILSKKIKSLEAGVMCYPDEAIFVRDKINDFLSEQSKRADAKLLCELLYMTDSSWQDAVESYLNTQRFNIIVEPDNYLSAKKVFVSLGDKVKGIGLIDTGKIRDVEYKTSDESYLGDKIESENIYAKTYARFVMKNVICCESSDDLENFTKSVTRDRLRFQNFCLQRMAKKEHFIGVDAIAKQLKSAKTEFTGVKKELTKLEEAKKNFDSIYNGYTKFRAGDNFGKLENYCESKSKSKALSVKIADIAKKIEEFKKNPILLAMYDRVKECKKNLSVIRDEITDNKAKKQNLNSNINQAKADVDELEKNLAQMQAVYESSIEEYPEFINDVEKKYQNERKSKKASAIAYNFSNRAVQDNITLNNYLNQELIPLQQRYTATYTCDYAAGLGGADRYRQEYLTLQNIELERHKSELLDAQIRCKDRFRKEVLFRMKDDILRAKQQFKQINRVMENLEYGEESYRFGIDKSKDKELGMFYDIIMDKDNQQIDRENDMLMLMTEASKSEVFESQIDDFMSRIMIDVEEHAKQNLSGQKSNAKSMGMYVDYRTYLDYDIIVKNAVTGNEVELSKVSGEGSGGENQVPFYVAICASLLQIYEQSKEGSIRLILLDEAFNNMTSDRIEPMMNMFKKLNLQLVLIATAEKATAILPYCDITYSIVKSGNRNAIGVFERIEDGLH

SEQ ID NO: 31703 - protein, 408 aa, Lachnoanaerobaculum saburreum F0468
MDYTKDILNRLIDIYERREGYKKDPSSLRVIQVDIKKVYPAYVDRYNHNVYKEINVAIEKLINENLVNSNIDVSGKYEKVKLNVENISVCYKKVKRVTVIEQCKKTEAVLNLFKDKNLPVLDNILSDWRKLISEYKKLPYDIKYDAIRLMNILKILEAILRLSNESYIRNFSTAIFKDSKRFQREFKSGVESILFDYTDEAVERDKILEYYNLYENPTYTYIKGDAVIKFEDSVIYVKELSDGIALSNVSLEAIREVKVFAKSVITVENLTTYHDEDEKEAVYIYLGGYHNKSKQVILKKIYDENKNCEFMHEGDIDVYGFLILENLKEKTGIPFKPLNMDVDTLKRFFEANIYKELTFSDINMIEKNKEKLRDYKEVLEFMLLHNCKVEQESIKAVEILEPAGRRIF

SEQ ID NO: 31704 - protein, 487 aa, Mycobacterium phlei RIVM601174
MDGTADNTELSAADLLELNRELQGSPTTRLLAATNLGLYATLMERHLLDGVTPETELVVRLERDLDDLGSLEGQSGLSLIKSWASQGWLHRIVDPRTDQNVCYLTQEARRALDFLRGMRRQDTIATGGSMQGIAARLKQVAVRVDRDPVRIRKHIEAEIAALQAELDELEAGQRPEPDVTDAYDEARAIALQMERLITDIGQYGTMIEQATAALDEPIDSNEAYRDRQRQMYEDYQAAWDSKGRESHRAFLRMVNDPDQRAEFEADVAAVAEALPMLDPALRKVMSGFFELVGQQIDEVERIQQRCAQRVKRFTAFGTLEQSRGIARQLNDAIGAARALLKTSLIDSRLDIEVPLAKHAITSIGALSFKIGDLSTPKPAVHAEGEVDLSSFAALTTQVDAPAMSEMLNRAVSSGPVSLPEAVAMVDNAYLGHVIVLWSWALKQPNDAAAHKKSIPVRFRSLDGPDRVIEVPELLFTEPITSTAGVAQ

SEQ ID NO: 31705 - protein, 228 aa, Mycobacterium phlei RIVM601174
MTTEPEVDFSSLPEVDQNARTPHQRRPRFDGDVSELPDRACWALQHLLTRRYISADSDADIYSWVLEYRDQLAVRLSELDLILRVVDGIEVAFVEQARYESARGIKLLRREPLGTYDSILALHLAQMMRAAGGQSVLISREEIHGLFAGVLNETDRDAVTFAARIDGAIARLAGLEILRRTRDDEDSYTISPVITAIMTASVIEELQQQFEQLLNGGAAADEEDTPDD

SEQ ID NO: 31706 - protein, 1118 aa, Mycobacterium phlei RIVM601174
MTEQFHLSRLQVINWGVFDGYHSIPFSPGGALIAGASGSGKSSLLDAISLGFLPFNRRNFNASGDNTAAGSSAGRRTVDKYVRGAWGQRSDGNTSKVMYLRGEGTTWSAVAVTYSSDSGRTVTGLVLKWLTGESRNDSSSRFVIGDGDLDIEDVCNRWAAGRFDTGVFKDGGWRFTTKVESQYLAQLYATIGIRASDAAQQLLGKAKSLKSVGGLEQFVREFMLDEPESLARLPEALKQIDPLVEARELLAVAQKKRKILGDIEKIQQRYASESTDLGIIDLVDMPMVRAYTDHVRLAQCPAQIEVLDTTIEQLDNEYEDVTRSLNLAKAEADSLNAQISGQNASLAPLQSQVTAAEAEAEQVTRRRSAYEDLLIAHDIRVPETAEEFWNLREELLAEATELLARVERNREASTDAEYAQKAARIARDDAARELKRVEHVGSALPEFALAMREQICTALDLDVNELPYIAELLDLKPDQTRWRVAVEKVLRGAGLRLLVPDQHWEKVLRFVNETDMRGRLQLHHVRTRMLGAEPEEPDPNTLAGKLFPVDPKHPCAAEAVDVVAAAGDHVCVDTPDVFARYRRAVTDTGLYKDSDRLAIKDDRRPLRQSDYLYQGDVTAKINALTMDLAAAEEAYQKARRVADDIAAERQRWRDRAAACKAICEQFPQWSQIDTETADRHADRLREQYELLMAEHPDLEALNARADECWSQIQALMTRRGAIQTRRDDLDARRTAILELSERLSPAFVSEPLTELLNRYSATLPVTLELLDPEPFRDALFNTIKKEREQLRESRRRSYDELARILNTFDTAFPDAIPNDSDNFDERVHDYVALCRHIDERELPEAYERMMRLVTEQAPDAILTLHRVAEQEARRIAEQIERVNTGLGAVEFNRGTRLTLRATPRSLTAVAELTEIVRSISRRIAEVGLGDKQAILDQYADILRLRNRLASTNPEDKAWTRDALDVRNRFTFDCAEWDIETGDLIRTHSNAGDNSGGEQEKLMAFCLAGALSFNLAAPNSDDNKPVFAQLMLDEAFSKSDPQFAQQALQAFRKFGFQLIIVATVQNATTIQPYIDSVVMVSKTEATGRNARPVASVATRTISEFTALRKEMREKVPAGV

SEQ ID NO: 31707 - protein, 489 aa, Pseudomonas geniculata N1
MKHRERIARYRHLREQPQWKLLAADHAPEIIGLLQGLLMDGERTLPSSVLNERLQRALDQLAGDELSRELPRTAQAYIAHWLAQGWLERRLPEGADQEQYELSTAALQAIRFADGLEQARVAATESRLALVIEQLSALAAQTEADPDARLSALHDERDRIDAEIARVGTGRVVALDGKRALERTRQIIGLADELTEDFRRVRDDFEQLNRDFRERIIDDEGERGDVLSQLFEGVDVIGESDAGRSFQAFWRLLNDAEQSAQLDAALEAVLARGFARRLDRNERNFLRSFTSTMLERGGQVHDVLQNFARSLRGFVQSRGYLEQRRLNQLLKQAQSEALALRDEFPAQRGIGRDLQLTTSRLRSWSQWRLHDPRSAQVDGNVEYNDAAAISLESVGDLVASSEIDFRTLRRDLHDLLDAQPRLSIAQALSQREAPQGLGSVIGYLSLGTRFGNVVAGEQELAQWRGGDGQIRRARIPLVWFTQERRHELA

SEQ ID NO: 31708 - protein, 233 aa, Pseudomonas geniculata N1
MSWHEDPIDAPQADVAEDAYEAEPVAAVAQPRRGNDVYYLGDTGRLPLDARRALCQLLIGPSIDQLRHAKLWPALIRSEAAIRSSLADLFLELVLDRDSGVAFTRQADTEDVDAPVLLRTSPLTFIDSVLLLYLRQQLAEADARGNRAVVADAEMAEALAIYEKNLSTDRAGFNRRVASAVQKMKDNHILTRLSGQEDRHEVSPALKLLFSAEDVSQLSAVYRQLRETPAAEA

SEQ ID NO: 31709 - protein, 1126 aa, Pseudomonas geniculata N1
MAISKHTPALFNEGLPDPRLQQFRMRRLQVHNWGTFNGLTEVPIAERGFLFVGRSGSGKSTLLDAMSALLTPPAIVDFNAAAREAERSGRDRNLVSYVRGAWADQQDSGTGEIATQYLRKGATWTALVLEYRAGDGRVVSLVRLLWISGNGTSAGDVRKHYMIAERPFDIAKDLGGFDLDLRKLKQKLSDLHHFDTFSGYAERFRDLLGIDNEMALRLLHKTQSAKNLGDLNVFLRDFMLDTPKTFDAAERLVSDFAELDGAHQAVVTARRQVETLLPARAYYNDLKEMHRRRGDDEALKLGVDSFRESRRQALIEARLREMDVRDRGLLGEEAQRRAALDNHTERLAELELQRRQQGGERIEELEREQGRAEAERDRRQAKREQARQAAQQLQAELPDDAHGFAELVERAQNELQDRQRASSALDDAISDRLGGKRDDERRFGEVRAELEAMQRTPSNIPAPMQKLRARLAEETGIAEAALPFVGELIQVRSEEQGWQGAIERVLGGFALSLLVDDKHYNDVAEWVNRTHLGMRFTYYRVRRNDDAFAREPSAKSLLHKLELREHVFESWLRRELGKRFDYECVDAKQLRNVDRGITREGQVKHPGDRFEKDDRSAVGDRRRWILGFNNHDKVGAFEREAQELAKRIAGCETDIARLRGQRDRDNERRLACHELVSISWNEIDIAAPQQRLSDIEATLRDLREGNADLAKLAKQIDAVRADIEQSRRTYEDVRVERGQLVKERDRLDRARQQSRALVLPSLAQEQEAGLAERLQEQGPLSLETLEAHMRQVSNALNEQLSSSQQDLNRIENQLIGCFRRFIQQWPEESGDFTVSVASAEDFLARLERLERDGLPQHEERFFDLLQNQSKNNLLALQRHSAEARKSIGQRLDEVNASLEQVPFNRGTLLTIELNDRRLPEVGEFHLQLREVLSQQQTEQRELAESQFTVLRQLVNRLGSQEGEDKRWRELVLDVRMHVEFIGVELDAETRQQVEIYRSGAGKSGGQRQKLATTCLAAALRYQLGGADSQLPSYAAVVLDEAFDKADNEFTALAMNIFDNFGFQMVVATPLKSVMTLEPFIGGACFVEISGRHDSGVLLIEYDEEGKRLKLPERSRQQANEPEEAEA

SEQ ID NO: 31710 - protein, 211 aa, gamma proteobacterium BDW918
MLREFEKIVDTNSNGIDAAELKAVAARLRERQFIFKESRALGRTYDILVSQQDYFEDLFAAFGDEFFVDNHFGYCGIIPKANRPGLNQLETIFLLILAKMHDMECRKARSENGRSQPSEAILLDEYCLATGREKPKPRDTKSALDRLRKAGVIELGKVNELSEMQEITILPSIMRVVSANYLTTLSAFTDSPASDDDQDEDESETEAEDSQ

SEQ ID NO: 31711 - protein, 1154 aa, gamma proteobacterium BDW918
MKIITHRLMRISLVNWYLFESDDLDINGESIMLTGSNGAGKSTILDAIQTILAGADENKLMYNAASSDGRGSGRSIRSYALGEVTEDSGSNEKCEPRQVANTYISLCFQKPNGAYYSFGCAFYARQDRSSIDKYLFLIDGYALSASDFLQDQSVLPFKDFQQRLASMPGKATVSATSTEFRDQACVMMSAMGAHAAISPDVLFRTISQGLRFQPQKNVTEFIRNHILPSKNIDVVRIENDYRQYKDILKDIQNAKDRLVRFNAIIKHFDAYKSHSIKSVACEWASREAQVCKADLRLESLEEQRDTTVTEQRHEDTQCAELEDKLTKLASTRDQALTDKNDSDLAAKIALYRERLDRVNTDIKPLTTILNECRRSLSAIEAIPLSNGIDAANRTELQTVINDIQACTAFAKEDVFNTWPQSKATLKHTFAAVEKLATPLTSLTQRVSDLDRKNSEYQSTIQYLTDVHKTLKAGQASLKPQTQAVIQLLKAHDIQASPVCDMAEISYGEWQEGVERFLGVWNREALLIVNPDGEPVDTPTLERALAIYRREKNTNPRLRAVKLLNPGKIRAPKNTPKSGTAAALIESDNVVVRNYLQGLLYDVELVNTEGELRQCHRGITKDGMTAANGTISGGNTIEFILFGQAARQSQAEKLHQDLVNTLQEHTKVKDLLGPLKDISNELSRHKTELLKQQDQTIASFSTLQQLKKDAQHFQDLIKELEADDSFAALERRFIAADKACTECRSAMATAQQRRGELRMQLQEIERSIPPLKDEIGKAATARATIESQPFFDQQASSAMFEQLAEKYNEDFDTIQNDAFAKARNQERKATEAKENANLELSELVHRHDLEDKTELVALPPLDALSRCREYADAIEKSEIAVHEHIAAETREMMIQHFRSEIASKLKDNMTGLQGTFDTLNSALTHLHFNNTRFKFTSQLVEIDTLKDVYAYVTLPDESHIPGGLFDDAQDHPGLTIIEEVITDGRLHEIADYRNFFSFDIQTIDTETGAKRRFSDLLKTGSGGEQQSPFYVALGASFMNAYKLRKQGDSGVIGGASLAIFDEAMSKMDSVNTAAALQFFQSLGLQIILAAPPEASVKIAPHIDRTITVIRANSQVFLDNHRHTDAAKLLLESDNPIIHPELANTFMAAVEQEFGR

SEQ ID NO: 31712 - protein, 408 aa, gamma proteobacterium BDW918
MDANPLAHSLLLQCLKRLNKTSALVCEGKINITPRSHNDYLTASTPDRLAAHDYLNALARQVPQLQICYHAEGFDEIPILKSIVIGNTRAVLKALNIDVLAEVIEADIQLLQTQLQTAPSWLQDAFRELADTWRNSKSIHRFSNNRKDALLLGIRFASWLAAQDNLNIDFRTASVKAFGDSKTLENNLPAITDVLILSGRHDLSIAYSHAEILAEWGVSKFSPLLRIRGKCRLELRNSAISTLGATPYIAMPLEQLTAISLASPSPYILLIENLSSFERYCREIDDDGVIIYTSGFPPRQWIAPVQRLIAAVQCPVYHWGDIDLGGYQILAHLDRQLDGKVIPFRMFNEPASNENRIDLKALTDTIAAASNSHISHLHKLISEALKQNKVVCSVEQESLDPVSPLHFA

SEQ ID NO: 31713 - protein, 496 aa, gamma proteobacterium BDW918
MKADKNIATYRRMRNQPLWRLLASGNGPTVIALLQSHLYEKERSLPASILFERLTRDLEELRAQGDDFPQTAQAYVANWLSDGYLERRFPPGASEEEYELSTATVEAIRFVSAIAEPHAAATESRLSLVIQALAGLAEDTDADKHRRIDRLMAEQARIGMEIDAIQKGQLRVLPCDTALERTREIISLADDLTGDFRRVRDQFEQLNRDLRERIMDSDGNRGEVLDSLFTGIDLIAESEAGRTFSAFWRLLTDPEQAAMLEESLDSVMSREFVAGLDMRERRFLLRLTRNLLEQGGAVHEVLQTFARSLKYFVQSREYLEQRRVNQLLKEAQRAALAIKDGVKTTESLTYSLELTSSRLHSLSQWALYDPALQAEPEAMREGEPAPIDLESVSELVAQSEIDFRTLKEHVCSLLEQRDQASIGDILDHFPAEQGLGSVIGLLALGSRHGIKGSDKGGDASVDDSIETVAWIGEDDQRRCARIRGPRDFASKYCKNR

SEQ ID NO: 31714 - protein, 222 aa, gamma proteobacterium BDW918
MLNAEDTEQEPDQALYPGDSGELSLDTRRVLVQLLAGPSLDGQRHSKLWPILIRDEAAIRCRLSELFLQLVIDRDLQVAFTRQAETGDLEAPRLLRRAKLTFLDSILLLHLRQRLTQAEAHGDRAVVSTDEIIEFLGVYQQAGNTDRALFEKRIHASIEKIKKHSILRKIRASENRFEISPTLKLLFSAEEIQALTRIYHDMRAPEASSEQDDEMPSGEGKG

SEQ ID NO: 31715 - protein, 1121 aa, gamma proteobacterium BDW918
MSEQSTLFAPEQFRMSRLQVYNWGTFSDVHDIPITEQGFLFVGRSGAGKSTLLDAFSALLVPPRWVDFNAAAREAEKTGRDRNLVSYIRGAWAEQKDDASGEIATRYLRPGTTWSALALSYRNALGRHVVLVQLLWLRGSANGPGDVKRHFMIFERPVELNELEVFGQSNLDVRKLKQTLDDAFHRSEFSAYAERFRRLLGIDSEMALRLLHKTQSAKNLGDLNTFLRDFMLDRPATFEVADRLLSEFDELNAAHQAVVTARRQLETLVPAREKHQQRELLLNERGGLNELLAGIDSYGGRRRMELLQDQIERLNIQADGLQGEISRKQAALNQHSDSLRELERRHREVGGDHVEAWQAEKSTLELQREQCLRKQGQAKEACRQLDWTFPNSPQGFAELVGDARQELERWESGSSEIREQRDLLVIEKKEAETAFTHTAGEVKALERQPSNIPAHMLDLRQAIATAIGVSESALPFIGELIEVKSDEAEWQGAIERVLHGFALSLLVDERHYSALSNHINSRHLGQRLVYYRTGQLDRKPARTVSTDSLVLKLTIKECNQSEWLSTELRRRFDYACVDSIQSFRRAERALTREGQVKHSKTRHEKDDRRDVSDRRFWVLGFDNREKLALYRKQAQELAGKISDLDERIKALIEQEGARAKRAMHCQTLASLQWQEVDVAPLLTGIDKLERRIRDALEGNSELKNVADQIERQKKVVRDADETLRKTTIAYEKVVGKVDEHEETLKNLQDDPTIVPLTSRQQQGLDERFNTLAELVRLENLDKLIRSVERSIRDEMDVLTRDVAKCDRFIEKQFDEFIFEWPAEAEGLDATLAAASDFFSKLTRLETDGLPAHEQRFFELLESQSHQNLAALATYLSDARKEILERMDLVNDSLAQVPFNQSTHQTTYLQIDPSDRQLPGVREFKQEIQQALSHAWSEDRELAESRFLALRRLVERLSSQEPEDKRWRQSVLDVRQHMEFIGRETDESGVEVEVYRSGSGKSGGQRQKLATTCLAAALRYQLGGNEHGVPLYAPVVLDEAFDKADNEFTALAMNIFKNFGFQMIVATPLKSVMTLEPFIGGACFIDISDRRVSGVLIIEYDSEQQRLQLPAHAHQEASVEVS

SEQ ID NO: 31716 - protein, 395 aa, gamma proteobacterium BDW918
MKFPDDVQKVLLRRFRNRHREWLEASGDQEKPEAKVWPLKVALGIPTENQALKQVEDVRSWVAAWQSWRGAGSLSWSERRWRKLGTQPVPEKLLLSGPDEVAQWIGEADRWDLAQQRYRDLIGHWPQLGNKLPRYFAMLADYSEVDYQRLVDIVAWIEKNPGSNLYPRQLPVSGLDSKWLEIRKGLLADLVDAVRGGSTTEGNFFQCCGLQAPPQLIRLRILDDRLRQRVGGLSDLSTPWKQLAELDLPVSNVFIVENLQTGLAFDDLPGSVVIMHLGYGVDVLGRLPWVARAHCVYWGDLDTHGFAILNRARSYLPKLTSVLMDEVTLRSHQDLWVEEKDQHAADTLPLLTGSEQAVYQAIKRNAWGQNVRLEQERIAWTVAWNTVQQTLLSVC

SEQ ID NO: 31717 - protein, 524 aa, Bifidobacterium animalis subsp. animalis ATCC 25527
MADVRSELAQLRPVYETGVLRMLLHKYSDIYIAMLRACFDPLTAEVPQERLLARMREAIGELAADGTYTPREGEDDMMAARRILKELKAEDAGDYAWVADSIDRRQHRLMCRLTQRAHRAIEALATLQQRTVSLSGAQVNSIIMEIESARKQLTVNVEERIELLEREIDERQHQIDNLKAHGIGRRPTREQVSDIINVVYNTLRGVPVDLRELVITERDNGDALRRRIDDGSMSSNDMLTFYHEEYERTYRLSDEGRRFNDAFQVMYAPQSREELNEALQDISNSEWLHGEADDLMSVVNREFEDIYDGIDDVRHQIRVTDESVKLLVRQQTDMQFRTMSRQLAKLFTQLGESVHAKGRYDIGTATTSLLTLPTRARETPVKTAAPKLQMQVDDGIAQVDLNGIVAAGGPRIHHMIELVAAHPVLIDDAGGALADSVVDIAASFNELAADERRESEIVGFLSYLGSASPTDAAGNSDGGQIPVPRESLWHCVTTDGWTRVWRTCALFVPGQVLKDFLDDTMVED

SEQ ID NO: 31718 - protein, 269 aa, Bifidobacterium animalis subsp. animalis ATCC 25527
MAMDDSTGQGIAGDANLGMVSKVLSDEYEEGVADEAGMADLANVHALFDGDIGDMPAPAREAAIALKRNRSISGDMYHQALDYMDHVRRSLNNDMLVPVIDTYYEVMYAEPIAADEYGIRSLKTRVSLSAREAVMLASLRRKVLDYENVGAAAADWLISKEEIVNTMSTGAGPLAGRNSEEAVQAQVDRLIGSAKNNGFLAPVEDDEGMYVITKLVPVVLNPERIAAWLGADDASTAQPEPDGTGDDSDGSGHTDQDEYPEDDDMEALF

SEQ ID NO: 31719 - protein, 1165 aa, Bifidobacterium animalis subsp. animalis ATCC 25527
MSETSDIYASIELMPPHWALASRQLVNWGSYDGYHVFEPSTAGDDTVTLLTGQSESGKSTLVDAQVSLLYPANAVFNKASNAGRSDRSDYSYLLGLRGIRSNNGHDEPVYLRGRSGKGEPYAVWGAIVDHYVDTANSGALWIAKFMYLPAEGTSESMVKLYVVSSYAIDPRLMDAHREERFSVPLIKQVYPGVTVYNYAKQFHEDIWKRFGLTESACRLLHRMQASDAPSQLDDIFRKGVLNEPRAVEFGKLAIDDYEQFAENFSSMERTRKRVRQLEAIASEFAEYESAERGVRELSAIAPQQGDSARIRTQWLDDRIHADITEVLPEYEQYATECSASAQAAKERAEQMREQVDSLNRQLQGMGGDEIGRLEDRIRDAQRRQREVLGRRELLASRFSASGEALPESRGQWDALVAEYTQLESEYQQRKTELHGLQYPLIDAQKKAEQRIKALEKDLERKRQSKTRISSDMDEARNMIARATGLSPQELPYAAELMDVGEENEEWRTAMNVAYRSLATVILVDSRHENGFAAKVSQISQEALPRRNWRFVDTSVHVEAEEREGWLSSKLTFNVESPFVDWLRARVTEARYDAWCVEAIDDTNETTRQVQRDGQIKEGRKGSHGTKNMPAVIGFVTDAYLRDLEADIAEAHKTRDAATRDLEQYDVQLNALEQRHSLAQTLQDHAWNDIDAYGVEEEIASLQQRVDELEQNPELAQLNATLKVQQQEMAKANSACYAAEDKLKRANAAVRSTRQWLEAYDRRTQSVERRHLNEACGRLLEQGYLAYFGESTQSANERMGRILGLDGQSGTSLGGHVRENEACAKHVRELLGTLAQTVGRQVKELATQRDNRKQSCEASMRSYLDQYASGDERVSADVENERYFRKDLEELKPGVIGDEATNVEYMNSLDKMLQDLVQLQTMLKLDQQRITEQIGKINHLLERYPFGARGGRLSIVVQVHRPDAKFTTALTGQIGRINAFKANDEHDVERCRKLFAGLAGLIEMLRGSFDEYAGNGRGNANLDPRKRSRFFGSVTNPDGVVESINSTGGGSGGYLQELTSFAYGAALMYLLANDNATEPSYATVFLDEALIKADGQYTRRALSVLPGLGFQVIVSAPESKTGEIMGSASKVIVAHKDQASGRTTLMQGDLLGDADGDESSMGERSE

SEQ ID NO: 31720 - protein, 406 aa, Bifidobacterium animalis subsp. animalis ATCC 25527
MTDTATLKTPADVRGDVARIVQRELFADESPWPRTIRIPWPKETQLVADVAGVHAANNALKEFAARFGCRTDFISRKMGTAVPLVAYIHVPDEATALAIAGPTLRRPREQALARAAQLEQRCHVDHALAMDVVRRLNNESDVDFGLFVEAAQWFGRHWAEVPGLTAREIPLPGFSAKWLAGSRSHRRAAICTVLGVHRMPLRERPGEVRYRYMDQRFAAEPDRVATSVQCVPERPVSLAVIVENKDTYQAMGPIDGAVCVFGAGFAVNRVPELLPWLANDAVRVVYWGDIDAAGFEILSGLRASGVACESILMDRMTYAEYERFGTTRDAMSHEIRCGEPKHGLHLSSEEYSLYRDLCTGELAVPRIEQERIPIAEFMRLISAGRSDGSDGARADQCHNQSPRTPK

SEQ ID NO: 31721 - protein, 498 aa, Rhodococcus imtechensis RKJ300 = JCM 13270
MSITADVHRLLRLRQDHAAWTLLRADTAPAILALLGRHFDHGTRRLPAPELFARLDSDLQTMRDEGLDFPRTGQAYCTEWVRSGYLLRRAAAGTREETLEPTEGAFAAMAFVANFTSQASSATESRLTTLSTQLQALARDSDPRAETRLAALLAERSSIDQQIAAVESGVFPVLDGERAVERSAEILALASEVPADFARVRAELEELNRDLRARILDDDGDRGDTLGDVFRGVDLIGDSDAGRSFSAFYDMILDPARSSQIDEWIDAVLQRPFASQLTNDQKRRFRALLTEMETAGSEVHSTMTSLSRSLRHFVQSRHYEEHRRLQRLLRSAQQSAVAVATRRRPYDLLDLDLVRVGMSIESVAALRLHNPADNLVTEPVRTHDPGTVDLDELRKLVRESEIDMDELSDNVAATLRAHGRATIGDVLREYPATQGLASAVGLMVLATHHGHAIDGTEDIHWISGAGVSRRATIRRHLFDPAADEFTARPAFAPTGSST

SEQ ID NO: 31722 - protein, 201 aa, Rhodococcus imtechensis RKJ300 = JCM 13270
MTHEPMAGGQYPGDAGELDLETRRAFVQLLKGPLVTAAKHPEVWRAVIRDERLLRSRLADVFLDLVIDDENELAFTRPAETGNANTPTVLRTERLTFMDTVMLLALRQRLLRAQAGERVMVDLDELREQLELYRTAGDTDPAGYAKRINASWKKLDKYSLLTKTSTDDRMEISPVLRQLFDAEQVALVEVEFRRILEEDTP

SEQ ID NO: 31723 - protein, 1095 aa, Rhodococcus imtechensis RKJ300 = JCM 13270
MIHPGQRRLARVQVVNWGTLHGHHDLSLARKGFLITGNSGSGKSTLIDAISAVLVPGNQLRFNAAAQEATNSGRNFVTYIRGAWRREAGADTDGLVASYLRTGATWSGIALTYRAGTDDPPITLVKLMHLGRGQNAAADVTHLHLILEHELDLTDFTSFTTRGIDTRAIRKRWPESTVSPAYGPFARSFRSRLGISSEGAQRLLHRTLSAKSLGSLDQLFRDYMLDTPNTFAMAERAVNQFHDLQEAHRVVVDARRQVEMLAPLVDLADTRQRGLQSLRDTDEENAHLGAVHAEMTLSLLRGECTERHALTSLLVAGASEATAAAERARQETLDLTMKLEGIGGGRLATLHAQRDAELKTLARVRIRRQQIAEAVSAWEGTVPETAEEFTRLRGQLEDQLRQATTAHEDRLGDRYTLAEQRGTAQKERAELITDREIVARRRSNIDPGLLRARESICSAAGISDDAVPFAGELIAVRDEHSEWTGPIERVLGGLGRTLLVPDDVYPTVAAAVDATHLGARLVYRRVRVGVTPSAVPKTGALSLVRRVEVADGPLAAWIHHHLADRYDYACVDTAAEFTDHSRAVTRAGQVKHSAERHEKDDRSRIDDRRRWVLGFDNEAKLEDIRRRIADLDVTIAGATSRLDALDREDQQIAVQNRAAQTVLDAQWVDVDVSGAQAAVDAVDSRLESWQQDNPEHSAVSVALELAKKAENEADAARRQADTALTVHRTAVTELETRIAQAELDGKDAAPAAVAARIKARFQKFARRVTSDNIDKALFEVGQGIGKDRADAQNAVSAADASIVRILSQYLARWESRGGELRIDAEYVDDALKILQRLRSDGLPRFEDRFFQLLHDQSHRNIGELARTIRKAPAEIRSRIDPVNDSLHRSAFDTDRWLRIDVRERRSPAAADFLDDLTRITSGGWNVEQRPAAEERFERMAVVLERLASKEPADQRWQRQVLDTRVHVGFIGVEVDGAGEARNYHDSSSGLSGGQAQKLVFFCLAAALRYQLAPDGADLPRYGTVILDEAFDRADSAYTRRALDVFAQFGFHMVLATPLKLLGTLEEYIGGAVTVSIRDRMHTELSLIEFDDVGAT

SEQ ID NO: 31724 - protein, 383 aa, Rhodococcus imtechensis RKJ300 = JCM 13270
MSVRCVLPPASAAKALTTYRSRRSRWLADPSLAEQDSLTVALHPPSEQQIAEDPDTVVAWVRSWRVYTGAGHVEWAMRRWPSFGTQEVPVRLTLAGAGQIASAGGRETEWRALMIRRDVLVDRLGPGTETLSAAVAATAANWLDLDDDDFVRLTTIARWLSDHPNSGYFIRQLPVPGVDTKWLSRHHGMVETLVEGVRGNRDLGIRRLPGLRDVALCDPDLLIGTPRRFATSLEELTALPLTPARTLILENKEGLYALPRLAGTVALHGGGYAVHELAGIPWVVNSEVWYWGDLDSHGFAILDRLRRHLPHVRSLLMDMDTLDRWRTLAVREHKPTFNEVSHLTESEAAALQSLREDDLRLEQERIPWPYALERLLAAVGPGQ

SEQ ID NO: 31725 - protein, 543 aa, Bifidobacterium longum subsp. longum 2-2B
MADVMRELERLRPVYETGVLRLLLRQNAMLYVSLLRSTFDPLTGELPRETVEERFAQSLSSLADAGEYAPREDQTFAEAAHQILADLTREGEGDYAWLANSHDAASHRFLYRLTARAHRAIEALSRLEDESRALSGAQANSIIMEIEHARMQLTADPGERIKLLNREIKERKHEIKRIQQGKQHATLSEAQVEDVIAVIHNTLRGVPIDLRELVLDERDNGDALRRRMQAGDISVDENLTRYHDEYRRSFRESDSGRRFEDAFQVIITDEGRQQIDEALRAIAKTPYLAGESGVLLGQIRDELARIYDGIEAVCRQMRVSDEAISRLVRQQTDTRYRTMLTRLNRLYARLNADAKTHMGDASRPYDTATSDALFAPLPMRPAKSMTRATAPGLSDLAAEAPQSTPVADLRDMVNSGGPRLLRMVSLIRRNPVTVDRSDDRPGATLVDIAASFNRLPESERRESEIVGFLGGLGAVSGNAIADEPSTDGVGVGVDSDIATEPAPAQRGDTATWHCVSIDGEPRNWITRPVLADMDELSIIVEEG

SEQ ID NO: 31726 - protein, 224 aa, Bifidobacterium longum subsp. longum 2-2B; identical to SEQ ID NO: 30393

SEQ ID NO: 31727 - protein, 1182 aa, Bifidobacterium longum subsp. longum 2-2B
MMQATDVQMIADRWMLESRRLINWGSYEGYHEFRPSTDHKLPVTLLAGASESGKSTLVDAQISLLYPTGTPFNKASNSGRSERSDYTYLRGMVGVGSTETGDEPLYLRGRDENGAPQPVWGAIVDTYRNQTTGQVLSCAKFLYLMPGDGRGDVRRQYVVWGKPVDPRRMDQYRDAPFTPAQLKATYPDCLTFPSAEAFHTHIWSAMGLSEAACRLLHKIQSADAPSRLDDIFKQGVLGVPEALDLARTTVEDYERYDENFHAMDEKTRRMDTLRGIQQAYGEYAAARGKARAFEPVKPAVDGTVPAVLRDWALARMRGEVAVQLPADRAEQQNSEAEAKLLRRRTEDLRTRLDMIRGQMQGLDGGNLTRLELELDQARRTLEDVQANRTRIEQTFASIGETLPGDEQAWNERRINAVNFKREYNKRDGECEEALTAAINARAGARGDLERLQRDFDRQRSQRTRISQQMDETRAMLCRATGLAPAELPYVAELMDVNEHEEDWRLAMNVAYAPIAQTILVDKRHEQGFAAKVSTIDPRTMPRRTWQFVDTARHYDDTGAHANILTGEQDGDWLSGKLRYRDDSPFADWLRSQTQDERFDALCVTAIDDTDRTNRQVQADGQIKSGARGQHGTKDRAQVIGFVNETYLNALAAQVDAARNALSQADTDYTAAKTQSDNLHRELELANQLAYTSWERIDIAGAQRTITDTQDAIASIKNDPKLAELAKQRDELNAELDRVERQRIESDQAAARAGSAVEAALIWLRDHADTGTTDAAGATADNDDDAASGPLPDEVTAALAESYDNRFAGLADAAMRAHMIIGAGAAGTQAPGESFPERTIAGIGKDMTSRINLLNGQADAARTGVESKMSTYIALYAADDDSLTASVEDYRYYLDELASLTQLAAVAATDAEYRRCLEQLLRSFLTIKRAIDTDASDIHDQLDRINAMLKGQQFGPKHGSLSLHADVRRPERAFWTQLIRVIGTLNDWKSADVNDSDASRKAFAACAPMVGLLRAELAQVKDTNGVKSYGARNLDPRCRSSFYAIVHHADGPDERITSTGGRSGGALQELTSFVYGAALIYLLGGGLTSEPSYTTLFLDEALIKADGRYTQRALTVLPRLGFQVIVSAPESKTGEILEVSTKAYVTYKDPDTGLTSLREAVLYQNDMDDESSSDILKDDGVAE

SEQ ID NO: 31728 - protein, 394 aa, Bifidobacterium longum subsp. longum 2-2B
MAGMKDIAAITTCVKKHMRSHMYDIEPAWPFPVPVGLPDQAFLETNAIAVHDNNNEIRQWASKNGCEIITKHRTIGTSVELISKVVVPDESIAMRVVGRTLAAEYREAHRRIACLVAACDVAPETIESAARMTGHEQPDDFDLLVSAVRYFRHHDVTGMTPRQIPLTGFSGKWLNESKTNRRKAICRLLGVETLGLSKRPTELRFRYLDPVRDDAELERIIWCPWEGEALSGIKYAVIVENKDTYQTMPPIAQGICIWGSGRAVSDAVPAVPALRDMRIVYWGDMDADGLEILSTLRESGIECDSILMDCDAYDRYHRFGTDRTERSAKIAMREPKPAPGLQSAERRLYERLCADKTIAYRRIEQERIPMRDAVDELRKLGIPVESIENQDLPI

SEQ ID NO: 31729 - protein, 543 aa, Bifidobacterium longum subsp. longum 35B; identical to SEQ ID NO: 31725

SEQ ID NO: 31730 - protein, 224 aa, Bifidobacterium longum subsp. longum 35B; identical to SEQ ID NO: 30393

SEQ ID NO: 31731 - protein, 1182 aa, Bifidobacterium longum subsp. longum 35B; identical to SEQ ID NO: 31727

SEQ ID NO: 31732 - protein, 394 aa, Bifidobacterium longum subsp. longum 35B; identical to SEQ ID NO: 31728

SEQ ID NO: 31733 - protein, 543 aa, Bifidobacterium longum subsp. longum 1-6B; identical to SEQ ID NO: 31725

SEQ ID NO: 31734 - protein, 224 aa, Bifidobacterium longum subsp. longum 1-6B; identical to SEQ ID NO: 30393

SEQ ID NO: 31735 - protein, 1182 aa, Bifidobacterium longum subsp. longum 1-6B; identical to SEQ ID NO: 31727

SEQ ID NO: 31736 - protein, 394 aa, Bifidobacterium longum subsp. longum 1-6B; identical to SEQ ID NO: 31728

SEQ ID NO: 31737 - protein, 543 aa, Bifidobacterium longum subsp. longum 44B; identical to SEQ ID NO: 31725

SEQ ID NO: 31738 - protein, 224 aa, Bifidobacterium longum subsp. longum 44B; identical to SEQ ID NO: 30393

SEQ ID NO: 31739 - protein, 1182 aa, Bifidobacterium longum subsp. longum 44B; identical to SEQ ID NO: 31727

SEQ ID NO: 31740 - protein, 394 aa, Bifidobacterium longum subsp. longum 44B; identical to SEQ ID NO: 31728

SEQ ID NO: 31741 - protein, 489 aa, Xanthomonas citri pv. mangiferaeindicae LMG 941
MKHQARIAGYRQLREQPAWKLLAADHAPELIGLLQTVLMDGERRLPSAVLHARLQRQLDALRADELSRELPRTAQAYLAHWLAQGWLERRLPEGAAEEEYELSRAATQAIRFIVGLRESSSSATESRLSLVIQQLVQLAGQTEADPELRLAALRDERARIDAEIERVASGRVAALDGKRALERARDLIHLSDELAEDFHRVRDDFEQLNRQFRERIIDDEGARGDVLEQLFDGVDVIADSEAGRTFEAFWSLLNDTQQSSQLDQALDALLARGFARKLERRERAFLRGLTGTLLERGGEVHTVMQHFARSLRGFVQSRGYLEQRRLNQLLKQAQGEALQLRDSLHATTATGYTQPLSSSRLRSLSQWRLHDPRLTQVDGRVQAADAAEISLDSVGDLVAQSEIDVRSLRNDLHELLGQRPRLTIGDALQQRPAVQGLGSVIGYLSLGTRHGMVIEGQMETVQWEGSDGAVRRARIPLVWFTREKRNELV

SEQ ID NO: 31742 - protein, 208 aa, Xanthomonas citri pv. mangiferaeindicae LMG 941
MAQTSSAEPRGELFLGDTGTLPFDARRALCQLLAGPSIDAQRHGALWPALLRNEVAIRQVLCELFLELVLDREGGVAFTRQADTAELESPTLLRSAPLTFIESVLLLFLRQQLAEADTRGERAVVDEAQLVEALSVYEKNVSTDRAGFARRVMTAIGKMRDNQLLSRLRGSEERYEVSPVLKLLFSAEDVQALVVAYRELREGEVALD

SEQ ID NO: 31743 - protein, 1340 aa, Xanthomonas citri pv. mangiferaeindicae LMG 941
MNSQSNLSPAQPGASLFAETLAEQRAQQFRMRRLQVHNWGTFNGLTEVPIAQKGFLFVGRSGSGKSTLLDAMSALLTPPSIVDFNAAAREAERSGRDRSLVSYVRGAWADQQDSASGEIATQYLRKGATWTALVLEYANAHGQTVSLIRLFWIAGSGNAAADVRRHYMVAPRRFDVATELDGFDLDLRKLKARLGDEVAHFDGFAGYAERFRHALGIGNEMALRLLHKTQSAKNLGDLNAFLRGFMLDEPRTFEAADRLVEDFAELDGAHHAVVTARRQVETLTPAREHHAALMALRHSVGELRELQLGVDSYREQQRLALLEERLQELDNQDRGLAGEEGQRRESLDNHEQKLVGLEREQRAAGGEQVEELERERARVERERDERLRRRAQIEQACRQLGTALAAGASGFAAQIAHAQTVLDNGKHDASALDEAIAERMGARRDDERRFAEIRAELEALKRAPSSMPAPMQALRARLCEDTGIAEAALPFVGELVQVREDQTAWRGAIERVLHGFAQSLLVDERHYAQVSEWVNRTHIGTRLVYFRVRRNDELHSRRVDPGALPGKLQLREHAFTEWLRNELTRRFDYACVDNAAALRNADRAITREGQVKHPGDRYEKDDRHAVNDRKRWLLGHDNRDKLKVFEREAQTLAQRIASCDADVAALRKQREQDQERQLAAHTLVERDWDEIDVGPKLQRLSDIDEQLVQLREGNSGLRALGQAIDTARTLREQAKRTYEDVRLERAQLARERVRLEQQQAACAGRAGSATLTPTQLQGLRERLAALTPLSLDNLEAHFRVVERGLAEQLADSQGRDSRLSAQLLECFRKYCQQWPEDSGDFTVSLASADDFLARLDRLESDGLPRHEHRFFDLLQTQSKNNLLALQRHTAEAHKGIKQRMDEVNASLEQVPFNRDTVLTIEVGDRRLAEVQEFQQQLRAVLSHQQTEDRALAEAQFSTLRALVARLGAQEPEARRWREQVLDVRLHVEFIGVELDAQTRAQVEIYRSGAGKSGGQRQKLATTCLAAALRYQLGGEDGELPRYCAVVLDEAFDKADNEFTALAMNIFENFGFQMVVATPLKSVMTLEPFIGGACFVEISGRHNSGVLLIEYDEQAQRLKLPERSRGDEPAVADATDAAPSIEAAAESAGVQGAASADGMATNGVPMHTASPATEETPPAAQETQTGQRKPAVATTSKQNKTAKTASSTRAAAQPQAKRPKKSPSRTPALAGKPASNKRPAGVPAVSSGVASRSNVGKTTRSSKTPGKPIAATSASNVTSRKVAAASAALKTAAAKPRATAASTGQPARGAGKTTSTRAVAKPSPATTRGTRADAPRSRGKR

SEQ ID NO: 31744 - protein, 505 aa, Cellvibrio sp. BR
MFFSDSRLHFFNPLTGKYRALAAECLRLLYQRLYTDLRDYGHAINREQLVDIFKEAIARAPILDIDLDVDTEGEDTSEGRFKTQRDLASFIINRLIENGWLEKQVDETSLQSSYGFSRMGRLFTQPFADNDANQFRTRNRNTRNTRNSLQAFYDQGEINDLLDAYEYSERIISDFTDVIAELEERKRQLVREVESRQLIQQASDEFFDFMETVFKPDLEVRLSADSVEKYRDQISDIITKIRRKRKYGLGDEETAAKDWRAVMEIRLRKALPQKVVTGVSLLETLLQTIDSRLKNACDIMLPALRRALNTFTQRADIIIRQLSYINSRGQDDLMDIYRSLGNLSPEQQDEVLVVQGEAIASIQMGYIDPAQIQLRAPRNIQVVRSMLDEDKALDAEAQKSLFIQQALDKAFILQSSSVRDYVHRALLEKGEIRSSELQANSMQELLNLSHAIEVGAADNLSSRYRFCVQQNSEWLHQQPLVANSAYFKQRDEFVISLTDEGKPNE

SEQ ID NO: 31745 - protein, 252 aa, Cellvibrio sp. BR
MSNALSSLLQEQLDKHNLSLENWRELVQRLLDYGVLCRDDSQVEAELYDRFLRIHELLNDYLSLMGIRFQHDSHFRFVRILPPGARLPGMDDETDEPFNAGLRSRLNQHEVALVLVLRAEYDKALREGSIDEQGCATLSLEAIAMAMKSLLRRSLPENIGERRQAFKRLRQLRLINFFAESDIDSSESWIKIRPLIINLVNNEWLEQIRNHLAENLLLVDEDAEEPSTASDARPSPVKPTPHFNRSLFAAEE

SEQ ID NO: 31746 - protein, 1218 aa, Cellvibrio sp. BR
MYLKKFIYVNWGNVPNTEFEFGPINLFSGGNGSGKTTAADAIQTIMTAAHDNLFHFNPGQDESSQRGRGGKLVRTLASYVLGCDDGAYSRPQGCDGYLAAIFHPTQGENSEPFTALIGMRAFLETAGQGAGLQKVARLDDTQFYILSDVELGLNDLLKEEKTHKYVVPLDKLYAGLRRKYGQSQVEKYDKKKSYLCRLYGVLRGKKDAISEREAMNAARAFSRFMAYKPIKGIDEFVANEILEYRDLGEAIRTVSTMLKRIHTMESDARTLRQGIERMAQGRQWSDNFIANWLEQQVLQYSVAKRRYTDSQSLYLDAKHKQQLLRESSAGHQQSLSACEAQRDEINQLILAATARRLGVPALRDKDQLEQEKVAQEKLIQTQVPELRKQHQQLLVNLEAAQQFSLALRQTSIAVDLPALKDSNLTALVKNLCSDSEALDIHQLLNRDLIELSPLEPQLEKVVELQKHHNAFFASLFTQDSNAGVARINLRDQIAQERDKRKTQAERLQKNTEVKRREIQTLESRQVSYPGFVRVALDAIATQCPKADARVLCDYVDITDREWQAAIEGYIGAARFGIIVEPEYEAEAIAIVRNMAGQGNRARIIQGDKARKDIDKSGEPTSNSIIQVMNFSHATAEAYIKASYGNVQRVENAKELKNTRRGITKDAMGSGNYAMFRCDMADSELVFGQGARERALDAKRNEFHTLVSEWQAATAYAEEAQELLLALDKLKPLSYAETLQAMLAAQTKIQAIDSKLQQLDLSDTTALEAELNELQLRLQEQNQHYARLNNAQVDCRAELKLADNLCHKLDAEQDKTLAQVDSCETNLQAIAAFWPDFDADARLQLADEEIGQHSVQYFETQLAGVNAELKTILHRLQQAAMVHNQFCATSDAILFDIDYNDDLGSANFRAICDMRRQFDALYNRDKNHILAQRHQEIESLRESFNNAFVTNLCHSIYQAINDGKKTLEDLNKELEHHRFGADRERFRFDWEWVPEFKEYWQFFKAVIDSPSLGEGETLFNMKLDEKHQRVRERLMAMLLDEDEQKALRELTRIADYRNYRCYEIYKEPEGKAPIALSQYGTGSGGQLETPAYIIRSAAITSAFRFNEGNSHLRMVLVDEAFSKMDEHRSREVINYLTESLGLQLNFIMPSSKSGPFMDLISNQFVFSKCPTSEPVGELKTRVMLDRQVCDQEKIKKLMANHRRAIRQQAALDFMLEVEG

SEQ ID NO: 31747 - protein, 481 aa, Rhodanobacter sp. 115
MSTSVPPLFSVVPGGLFGPLASANRERYWELLCRLFDEFFGPDAPLPPSIGFQRREITGAVERYLLTDDPWVDEDGGEGGAPGASLLERANAIYERFRSTGWLRQERVGAREMVSMMPVVSQLLSTLVEFAEHGPTFVSAKVRSIELQLQQVVDGKAFGDALDEAADQARRLLVSLSSMSLKVRDLMPELSRSETTAQFARQWFERYVSSFFVGDYADLHKADHPLARRSAILSMAQQVEDASLHEAMLGWYREHLTGGDTERAELRLQRSLRRLHELERIDEYLGRLDEDIRQANRRALAFLDYRLRAPAKLDVLLRRACRGVLQAPEDALRLPVAPGALMDDAQLRPPRRKPQPIPRSANAMQQPTPEQLARLSLLRRMKRARLVNAEDMARYLGRHLPPEGGIDSTQLSIGSIEDLRAYQTLLTLALRSRRIGGLRREDPLGRLQRGFRVELLDAGEAGDNGYLRAPRFAVHRLRKTA

SEQ ID NO: 31748 - protein, 219 aa, Rhodanobacter sp. 115
MKRSWNTLSQISNGVYAVQDFERAAYRLVTEQVLYASDRNARTAYHLIEDHFDDYLAVLEPLGIRLERNAHYRYVVALPTHGEGTPVTLDETLLLLVLRQRYDEAMRQGQIEDQGEVVVELPDLQEAYPALAGRAMPEVGTLRTLVRTLKRWGVCRLVDTEGDDPQPFHLRVRPAIVEIVGEQWLQRLDQHNRDDDIPDEARDDADTDTDVTEDDDAAA

SEQ ID NO: 31749 - protein, 1143 aa, Rhodanobacter sp. 115
MQLLERVHLVQFFLFEAQTLTLDATSAIIAPNGAGKSALLDALQIVLLGGDRSRIRFNAQAGGSARARSIRDYCLGVFRSGEEGRKRRTATTYISLVFRDQDSGVPLTAGIALGASADEPDHRLYGQYLLPGVALELDDHLERSKGRELPLEWAAFRELAVRRCRDANGKLELHPTSERFVKDLLFRLRAAPTAHPDVAAYRKAFQNALNLQRVEDVDLFVRTLVAEDRPTDIARFRGLLESFRQLKEKIAQVVERIDAAEGVEQQYAKIATQATRAASYRALAAEYARDLLAEQVDQAEQASEQATDKLAATRRALQESTLEQQSAEDAHQQASARLQGSQGYGEQAQIDELAARDRNELARLKKELLREISFVREQFLALGKLGLPNVDAAMLEHAQAAWHGWYDTLVALPADAELPWDAASLHAQAHQALAVAGPLIAAADGHARQLHATFEDAQARLAAARQNQKRLAAGQAELNPDAVRLMSYLHDEGIDARPVCDLVRVTDAAWQPVIEAYLRSNVEALLIPATDEERATKLYRSLQGGRSVYGVKLALSSQARNSRGNDRPASDSVAALLDGDNADALAFLRRQLGELRCVETEAELIRSRQGLTRDGLLAKGGSIERLRLPAAGDLKIGATDNRARQRVLREDIEAAERDVRQLEPELRRAEACQRGLARLSNPDEPAQSLHDRVLEHRQVAQRYRAALENRESTLNPDLLRLAEQVRELHERMAEWRKQSNRLIGEEALAARAVEEAQRLFDGLRAQEAMVAQRAVEAFRDADVDNARVERQREELDAKFPSLEERGKRCTERAGESDARLRSLLPEAWSGLAQYAKDHGLGMEFAPDQWRPAQALLQKELHHLRDTELANYQGQADEAYATAVETFRSNVASTLYDNFSKLRYQITTLNRTLRGSPAFSNNERYQFHYEVAPEYRELHRFIQRAADVGGEDNLFGSAGEVPAAFRELIEDNATTRGSTSPLDDYRRFFRFEVQIRQDERVVGTLSERMRSGSGGEHRAPLYVIAGAALAAAYGKSEAWPGGIGLILLDEFGDKIDAQNARAVVDYLRSLGLQLVLAAPDTAQGTLSGVLESYIELFRDGDLLQAERIEVKQAARDLLLSDQFDLHPALLAEEAARIARESSSA

SEQ ID NO: 31750 - protein, 400 aa, Rhodanobacter sp. 115
MSAARSVLERLLRRAESARLRGADEHVSLPMGSTREYTDLRSLAELERFHAEVALAERDGAVSVQREARSGDGSRLLRLGVADLPALARHLDVPLLDDRVTEAASRLAAWVERFPVIADVLDAWRSGRKLRSCGPEAARDLSDAAIAVAARADDAGHERILRRESVRLFGDSKRLEKLTTWLELLVTGELAASGLSKEEVWSAIGLRREPQPLLISGCGRVVLTDASAPLVRPYLGLPVESVQSVAVTADYVLSIENLASFHDAALSPDAAAGLLLYTGGMPSPAWRTAYARILESLPSTCPVYHWGDIDEGGFRIAAVLAGAARGAGRVLQPWLMSPTDLEASLLRIADVPSTPVLAAMCHWASRAGWEPLAQTLMQQPIRLEQERLDPVMPTPESSTR

SEQ ID NO: 31751 - protein, 484 aa, Rhodanobacter denitrificans; identical to SEQ ID NO: 31467

SEQ ID NO: 31752 - protein, 218 aa, Rhodanobacter denitrificans; identical to SEQ ID NO: 31468

SEQ ID NO: 31753 - protein, 1136 aa, Rhodanobacter denitrificans; identical to SEQ ID NO: 31469

SEQ ID NO: 31754 - protein, 400 aa, Rhodanobacter denitrificans; identical to SEQ ID NO: 31470

SEQ ID NO: 31755 - protein, 487 aa, Rhodanobacter thiooxydans LCS2
MKTRARIATWQRLRQQPTWKLLAADNAPLIGALLQALLLDGERQLPASLLHERLARELDELRTHGHAAPRAAQAYVAEWLAAGWLERRFPAGASEEQYELTAPAIAALRFLGSLDASRSVATESRLALVIQQLVQLARQTDADPHSRLGELLAERERIDAQIAAVSEGRVDVLDDTRALERAREVIALADELAEDFRHVRDDFQQLDREFRERIIDDERQRGEMLEALFAGVDVIAESESGRSFDAFWRLLTDAEQSGQLEAAVDAVTSRPFARALDRRERSFLLHLTRTLLDRGGHVHDVLQHFARSLKGFVQSRAYLEQRRLHQLLKQAQAEALKLRDRVRSNQGIDYTLTLSSARLHSLSRWRLNDPRTGQVDGSIVRADGAAISLDSVGELVAQSEIDFRSLKQRVRALLAERAQCSVGAVLEHYPAEQGLGSVVGYVALGSRHGMLVADRHESVSWRGEDGRERRARIPLLYFLKEKRDELV

SEQ ID NO: 31756 - protein, 229 aa, Rhodanobacter thiooxydans LCS2
MNWSEDRDEPTPENPLPESVGDPALFPGDSGSLPFGARRVLCQLLAGPSVDAERHALLWPVLLREETAIRARLSDLFLELVLDRDLRVAFVRQADTGELETPTLLRSSPLTFIDSVLLLALRQRLAEAEAHGQRAVVEEDELHAQLAVYEPPQGTDRAGFVRKLNAAIEKMKKNNVLQPIRGSEGRHEVSPTLKLLFSAEDVQALGAVYREHLAGRHGGADVESEEDEE

SEQ ID NO: 31757 - protein, 1124 aa, Rhodanobacter thiooxydans LCS2
MKKSDGAPTLFLSDLPTPREEQFRMRRLQVLNWGTFSGLHEVPIAERGFLFVGRSGSGKSTLLDAMSALLVPPALVDFNAAAREAERSGRDRSLVSYVRGAWADRHDDDSGEVATQYLRRGATWSALALEYRNALGRCVTLVRLLWIRGNSSSAADVQKYFIIAERPFDLATELAGFDLDIRRLKQRISDVHYHETFSAYAERFRRLLGIGNDTALRLLHKTQSAKNLGDLNHFLRDFMLERPETFTVAERLVAEFAELDEAHKAVVTAREQIETLRPARTAHDRLMDVRRERSELDELLAGMDGYRERRRLRLLDARLAELDTLDRGLEGEEGRRQQTWEQHQRELGDLQARHREQGGDRIEQLQRDHDSVSRERDACLRHRGVAESACRQLDWQLAASPQGFAEQLAEARRLLDAGQDAAASADQRMLELGMQKKQAELDFARARAEISALEKHPSNVPEYMQTLRSRLCAAVGLAETALPFAGELIQVRADEAAWSGAIERLLHGFALSLLVDERHYAKVAAWVDATHLGGKLVYHRIGAADGLNVSAPPPRSLLYKLELAPHAHQEWLHAELLRRYDYACVDSVQALQRSDRAITAQGQIKHGRSRHEKDDRHAVDDRRQWVLGFDNRDKLALYKAEAGALAQQIADADHAIAAIHVERRQRASHAAAAQSLANLRWSDIDVAPLLTRLDAIAIELGELSEANVTLRDLGERIATKEKQVTSAQRLLNDVRVERDGHRREHERLDKERARCVDDVAAKPLTPLQQQGLDARCEAGAAFTLGNLAERTLVMERALNQGIGTLETEAGAQSHRIVSGFEAFRRRWPQDAGDVQADLQSAADFFARLERLERDGLPAHEARFFDMLRTQSGQNLVALQTHIAQAHKAIRARMEDVNASLEKVPFNRGSVLQIRPEDRRLPEVIEFRQQLRDVLAHQRTDDRERAEAQFEGLRKLVARLASTDPEHKRWREQVLDVRLHVEFIGEERDAVSGEQLEVYRSGAGKSGGQRQKLATTCLAAALRYQLGDEDGGVPQYAAVVLDEAFDKADNEFTAMAMRIFENFGFQMIVATPLKSVMTLEPFIGGACFVEINGRHDSAVLMIEYDAASQRLDLPRSVPGGDDAQP

SEQ ID NO: 31758 - protein, 384 aa, Rhodanobacter thiooxydans LCS2
MRSPEQAVALLRGQWPRQAGDWLGGSGEWPLRVLLAVPGEKQASAHWVAFEAWRSAWKSWPGGEVIWIERRWPLLGRQVVPEALLLPDANALAALLGETVRWQRACARFATWTQRWPSLATGLRRQYLLLADTGETEFIRLGDMLAWLQAHRASNLFARQLPVAGLDSKWLETRTGLLGDWLRTLADLPRDTDFWRASGLRREPDRLRLRVLDPALRARAGGLGDIHAPFDQLAALALPARRVFIVENKQTGLAFDDLPGAVVLMARGYAVDRLHELPWLRAADAVHYWGDLDTHGLAILGHLRGHLPQVRSLLMDETTLLAHRALWVTEPQPHRADAIEYLDTPEQALYRDLRGDRWGVRVRLEQERIGWDVAWANIRSMASG

SEQ ID NO: 31759 - protein, 498 aa, Rhodococcus opacus M213
MSITADVHRLLRLRQDHAAWTLLRADTAPAILALLGRHFDHGTRRLPAPELFARLDSDLQTMRDEGLDFPRTGQAYCTEWVRSGYLLRRAAAGTREETLEPTEGAFAAMAFVAGFTSQASSATESRLTTLSTQLQSLARDSDPRAETRLAALLAERSSIDHQIAAVESGVFPVLDGERAVERSAEILALASEVPADFARVRAELEELNRDLRARILDDDGDRGDTLGDVFRGVDLIGDSDAGRSFSAFYDMILDPARSSQIDEWIDAVLQRPFASQLTNDQKRRFRALLTEMETAGSEVHSTMTSLSRSLRHFVQSRHYEEHRRLQRLLRSAQQSAVAVATRRRPYDLLDLDLVRVGMSIESVAALRLHNPADNLVTEPVRTHDPGTVDLDELRKLVRESEIDMDELSDNVAATLRAHGRATIGDVLREYPATQGLASAVGLMVLATHHGHAIDGTEDIHWISGAGVSRRATIRRHLFDPAADEFTARPAFAPTGSST

SEQ ID NO: 31760 - protein, 201 aa, Rhodococcus opacus M213
MTHEPMAGGHYPGDTGELDLETRRAFVQLLKGPLVTAAKHPEVWRAVIRDERLLRSRLADVFLDLVIDDENELAFTRPAETGNANTPTVLRTERLTFMDTVMLLALRQRLLRAQAGERVMVDLDELREQLELYRTAGDTDPAGYAKRVNASWKKLDKYSLLTKTSTDDRMEISPVLRQLFDAEQVALVEVEFRRILEEDTP

SEQ ID NO: 31761 - protein, 1095 aa, Rhodococcus opacus M213
MIHPGQRRLARVQVVNWGTLHGHHDLSVARKGFLITGNSGSGKSTLIDAISAVLVPGNQLRFNAAAQEATNSGRNFVTYIRGAWRREAGADTDGLVASYLRTGATWSGIALTYRAGTDDPPITLVKLMHLGRGQNAAADVTHLHLILEHELDLTDFTSFTTRGIDTRAIRKRWPESTVSPAYGPFARSFRSRLGISSEGAQRLLHRTLSAKSLGSLDQLFRDYMLDTPNTFAMAERAVNQFHDLQEAHRVVVDARRQVEMLAPLVDLADTRQRGLQSLRDTDEENAHLGAVHAEMTLFLLRGECTERHALTPLLEAGASEATAAAERARQETLDLTMKLEGIGGGRLATLHAQRDAELKMSARVRIRRQQIAEAVSAWEGTVPETSEEFARLRGQLEDQARQATTAHEERHGARYALAEQRGTAQKERAALITDREIVARRRSNIDPTLLRARESICSAAGVPDDAVPFAGELIAVRDEYSEWTGPIERVLGGLGRTLLVPDDVYPAVAAAVDATHLGARLVYRRVRVGVTPSAVPKTGALSLVRRVEVADGPLAAWIHHHLADCYDYACVDTAAEFTDHARAVTRAGQVKHSAERHEKDDRSRIDDRRRWVLGFDNEAKLEDIRRRIADLDVTIAGATSRLDALDREDQQIAVQNRAAQTVLDAQWVDVDVSGAQAAVDAVDNRLESWQQDNPEHSAVSVALELAKKAENEADAARRQADTALTVHRTAVTELETRIARAELDADDAAPDAVAARIRARFQKFARRVTSDNIDKALFEVGQGIGKDRADAQSAVSAADASIVRILSQYLARWESRGGELRIDAEYVDDALTILQRLRSDGLPRYEDRFFQLLHDQSHRNIGELARTIRKAPAEIRSRIDPVNDSLHRSAFDTDRWLRIDVRERRSPAAADFLDDLTRITSGGWDIEQRPAAEERFERMAAVLERLASKEPADQRWQRQVLDTRLHVGFIGVEVDGAGEARNYHDSSSGLSGGQAQKLVFFCLAAALRYQLAPDGADLPRYGTVILDEAFDRADSAYTRRALDVFAQFGFHMVLATPLKLLGTLEEYIGGAVTVSIRDRMHTELSLIEFDDVGTT

SEQ ID NO: 31762 - protein, 383 aa, Rhodococcus opacus M213
MSVRCVLPPAAAAKALTTYSSRRRRWLADSALADQDSLTVALHPPSEHQIAEDPDAVVAWVRSWRAYTGAGHVEWAMRRWPSFGTQEVPVRLTLSGAGQIASAGGRETEWRALMIRRDVLVDRLGPGTETLSAAVAATAANWLDLDDDDFVRLTTIARWLSDHPNSGYFIRQLPVPGVDTKWLSRHRGMVETLLEGVRGHRELGIRSLPGMRDVALCDPDLLIGTPRRFATSVEELTALPLAPARTVILENKEGLYALPRLAETVALHGGGYTVHELAGIPWVVNSEVWYWGDLDSHGFAILDRLRRHLPHVRSLLMDTDTLDRWRTLAVREHKPTFNEVSHLTESEAAALQSLREDDLRLEQERIPWPYALERLLAAVGPGQ

SEQ ID NO: 31763 - protein, 506 aa, Bifidobacterium bifidum BGN4
MGDIRREMERLRPVYETGVLRLLLRQNSMMYVALLRAAFDPLTGELPRETLEESFSQSLSRLVDSGEYQLREDQTIADASRRILADLTREGDDDYAWLANSHDAASHRFLYRLTARAHRAIEALSRLEDDSRTLSGAQANSIIMEIEHARMQLTADPGERVALLNREIKARKHEIRQIRHGQRQAALTESQVEDVIAVIHNTLRGVPIDLRELVLTERDNGDALRRRMQAGDMSVDDILTSYHDEYRRSFSESDSGRRFEDAFQVIITDEGRQQIDAALRDIAHTPYLAGESGVLLDQVRAELSRIYDGIEAVRRQMRVSDEAISRLVRQQTDTRYRTMLGKLNRLYAHVNADAKAHQSDDARPYRTDTAAGRFPPLPSRPARPMVRTTTPGLSVPQTPGDAPAPDLRSMIDNGGPRLRRMAALILESPVYADDGNGAIDIVASFNGLPKAERKESELVGFLGELGCGDGAGVAWHCISADGSPRDWITGPVLAQEDELHDIVKED

SEQ ID NO: 31764 - protein, 342 aa, Bifidobacterium bifidum BGN4
MSDLTNDTAQPDADMDMDMIGDDMTGTGSADTDSASTGADDMGAADVEYDGADAEGAVNPYALFEGDTGDMTADARMVAIMLKRERYISGRFYDLALDNRAAVIRSLNNDLLDLVVNEHYRVMYATAVSGPDMTLRALKTRASLKREEAALLAFLRIRVLEYENAHVAPDEWLVSFEEIRAALATGAGYLASRNDEEGVLRQVSAIVSVMCTYGYLRQLDDDETMYRITPLVPVVLDRQLADSWLAVADRDDDGEPAGDMAPAGSRSAAGDTSNADASGADDDGDSDDAGPDAELFEAPLFDDDADADAAENIKGADDANGANDSDIDDETASDGGTAREGE

SEQ ID NO: 31765 - protein, 1196 aa, Bifidobacterium bifidum BGN4
MSGKDMQMIADRWMMESRRLVNWGSYEGYHEFRPSTDSQLPVTLLAGASESGKSTLVDAQISLLYPTGTPFNKASNSGRSERSDYTYLRGMIGVGGSDGVDEPMYLRGRDESGAPRSIWGAIVDTYRNFTTGQILSCGKFLYLMPGDGRGDVRRLYLAWDKPIDPRRMDVFRESSFTPTQLKSTYPGCVTFPNAEAFHTHIWDVMGLSAEACRLLARIQSADAPSRLDDIFKQGVLGVPEALDLARATVEDYERYDANFRSMEEKTRRMGKLRAITASYGDYESARDAVHSFDAVNPATKSGSATIRAWAIRRMIGEVSERQPLDRRLRDERRSEARAAGKRIESLRTRIDAVRERMRGLDGGDLTRLDAEMRQAERALADITAGRQRIGRMFEAAGEEFPKDEHAWDERRIEAVTFMRSYEQRKGLLDDMRNQTYAAHASVKQTLQRLNDDYERQKSQRTRISRQMDETRAMLCRATGLGPSELPYVAELMDVREDQEHWRLAMNAAYGSMAQTILVDKRHERGFAAKVSAIDPHAMARRTWQFVDTERGGAGNGPGGANTGATGGTDGEVWLSSKLRYREDSPFAGWLREQTSSERLDALCVDGIDDSDHAVRQVQADGQIKSGKRGQHGIKDRQQVIGFVNESYLAQLRTRIQDAQRQCDETAQSYASAKEQADLLQRERELADQLAYTAWEKIDENSAKAAIADIERTIASVRNNPKLAELDTLQESLSKELDRSQRQRIDIERQAELADQAVNAAQAWLDEHAAQPQPQPQTRPLDGEAADVSPKAVTNGRTLLTDEVEEALAESYEQRLSGLGDATTRAHMIIGAGAPQRMAQGDTFADRVIAGIGKDLEARVSMLEGRAASARTAVEARMGAYIEMYAGGDDTIAASVDDYRYYQDELESLSKLATVEATAVEYHNCLDKLLMSFLTIKRAIDTDAGDIHDQLERINAMLDGQQFGPRHGSLSLHADVRRPERAFWSALTRVIGTLNDRKAAQTDDDLDGARCAFASCAAMIDMLRREIGQIRDVNGVKSYGARNLDPRCRSSFYALVRHSDGQVERITSTGGRSGGALQELTSFVYGAALIYLLGGGMDNKLKPSYTTLFLDEALIKADGRYTRRALSVLPRLGFQVIVSAPESKTGEILEVSTKAYVTRKDPDTGYTTLHEARLDGIDETEGADEPEGTVESDDAAE

SEQ ID NO: 31766 - protein, 478 aa, Mycobacterium chubuense NBB4
MDDHGGLSAADLLDLNRDLQSSPTVRLLAATNLGLYSTLMDRHLSGGVMAETELVVRLERDLHDLDDDQSGLALIKTWASQGWLHRVVETRAERLDQNVCYLTQDARRALDFLRGMRRQDTIATGGSINGIAGRLKQVAIRVGNDPARIRKSIEAEIASLHQELDELDAGDRPAPDVTDAYDEARAIALQMERLITDIGQYGTMIEQATAALDEPIDSNVTYRDRQRRMYADYQAAWDSQGRDSHRAFLRMINDPDQRAEFEADVAAVADALPHLDPALRTVMAGFFELVGHQIDEVERIQQRCAQRVKRFTAFGTLEQSRGVARQLNEAIGAARTLLKTSLIDSRIDLELPLARHAISSVGALSFKIGDLSNPKPAAAAEGDVDLSSFAALTTQVDAPAMAEMINSALPVSLPQAVAKLDNAYLGHVIVLWSWALKQPNDAAAKSTTVRFRSLDGRDREIAVPDLAFTEPITAGVAQ

SEQ ID NO: 31767 - protein, 229 aa, Mycobacterium chubuense NBB4
MTTEPDIDFSSLPQVDQNARPPHQRRPRFDGDVSQLPDRACWALQHLLTRRYISAETDSDVYAWVLEYRSQLSTRLSELDLLLRVVDGTDVAFVEQARYESAKGIKLLRREPLGTYDSILALHLAQMMRASGGQSVLISREEMHGLFSGVLNDVDRDAVTFAARIDGAIARLTGLEILRRSRDDEDSYTISPVITAVMTASVITELQQQFELLVNGGGAAVAQEEEVDD

SEQ ID NO: 31768 - protein, 1139 aa, Mycobacterium chubuense NBB4
MTEQFHLSRLQVINWGVFDGYHSIPFSEGGALIAGASGSGKSSLLDAISLGFLPFNRRNFNASGDNTAAGSSAGRRTVDKYVRGAWGQRSDGGTSRVMYLRGDGTAWSAVAVTYAGDSGRTVTGLVLKWLTGESRNDSSSRFVLGDGDLDIEDVCNRWAAGRFDTGVFKEDRGERSDGKSQGWRFTTKVESQYLAQLYATIGIRASDAAQQLLGKAKSLKSVGGLEQFVREFMLDEPDSLARLPEALKQIDPLVEARELLAVAQRKRKILGDIEKIQQRYASESTDLGIIDLVDLPMVRAYTDHVRLAQCPTQIEQLDTTIDQLDNEYEDVTRSLNLAKAEADSLNAQISGNSASIGPLQSQVTAAETEAEQVSRRRGAYEDMLAAQDLDVPDTADEFWNLREELLTQATELLAKVERHREASTDAEYAQKAARIARDEAAKELKRVEHVGSALPEFALTMRDQICAAAGLDATELPYIAELMDLRPDQTRWRTAVEKVLRGVGLRLMVPDQHWTKVLQFVNETNMRGRLQLHHVRAKFLGATPVDPEPNTLAAKLFPVDPTHPCAAEAVDVITTAGDHVCVDTPDVFARFRRAVTDTGLYKDSDRLAIKDDRRPLKQSEYLYQGDVSAKINALTVDLAAAEEAYQTARRTADDIAAQRQRWRDRAAACKAICEQFPQWSHIDTETADGHADRLREQYELLLADNPDIEALNARADECWSQIQKLMTRRGAIQTRRDDLDSRRTRLLELSERLQPVFVSEPLTELLHRYAGQVPVGLELLQPEPHRDALFAAIKKEREQLRESRRRSYDELARILNTFDTAFPDAVPNNSENFDERVHDYVALCRHIDERELPEAYERMMRLVTEQAPDAILTLHRVAEQEARRIAEQIERVNTGLGAVEFNRGTRLTLRATPRSLTAVSELTEIVRAISRRIAEVGLGDKQAILDQYADILRLRNRLASTAPEGKAWTRDALDVRNRFTFDCAEWDVASEELIRTHSNAGDNSGGEQEKLMAFCLAGALSFNLASPAHDSFSATAEMPDNRPVFAQLMLDEAFSKSDPQFAQQALQAFRKFGFQLVIVATVQNATTIQPYIDSVVMVSKTEATGRNARPVATVATRTISEFTALRQEMRSSAKVPAPV

SEQ ID NO: 31769 - protein, 447 aa, Burkholderia thailandensis MSMB43
MVPNVRVMSAADLAEVLEDELYALRDRLGTDAYPKRALDYLNDWASPEKGWLRKFYRQGSDEPHFDLTPATEKAIVWLDALTERSFVGTESRLLTLFELLRQMSEGSESDPQKRMVELYRRRDEIDAEIARVNSGDLPLLDDTALKDRFQQFMQLARDLLTDFREVEQNFRMLDRRVRERIALWEGSKGALLEEIMGERDAIGDSDQGKSFRAFWDFLMSSTRQEELTERLTRVLALPVVANLKPDARTARVHYDWLEAGEHTQRTVAQLSQQLRRFLDDQAWLENRRIMDILRGIEARALAVRDTPPVGEIMNLAESSSDVELPMERPLHTPVQKPVITDVALEMGDVDLDDTALYSQVVVDRAQLAGHIRQALQDRSQVTLRELIESYPLQQGLAELVAYLQLGSAAFKTVVDEDTHEVIAWQTTGRDETPKARRARLPRVIFVR

SEQ ID NO: 31770 - protein, 214 aa, Burkholderia thailandensis MSMB43
MEDERQEVAGNADLSTLAITLLKGVIYREGDERLWGALLDLQARVRDYVSVLGLELVLDEAEGYAFLRSRPEPAEDGAAPKLPRLIARRPVSFPVSLLLALLRKKLAEFDAGGGDTRLVLSRDDIVELVRVFLPDSSNEAKLIDQIETHINKIVELGFLRRLKVASGSAASFEVRRILKAFVDAQWLSDFDTRLAAYQAQLTGTTAGPGGDVDE

SEQ ID NO: 31771 - protein, 1127 aa, Burkholderia thailandensis MSMB43
MSMNEPNEAIPQLLELDFLADDTLSGFRLTRLEVFNWGTFDGRVWTLQLDGKNGLLTGDIGSGKSTLVDAITTLMVPSQRIAYNKAAGADSKERTLRSYVLGHYKSERNEVTGAARPVSLRDRNSYSVILGVFHNAGYDQTISLAQVFWMKEAQSQPERFYVGTERNLSIATDFVHFGSDIAQLRKKLRGLGAQIEDTFPKYGAWFRRRFGIDNEQALELFHQTVSMKSVGNLTDFVRSHMLEPFDVAPRIAALISHFDDLNRAHEAVLKAKRQVELLKPLVVDCDQHGALAVELEASRVCRDALKPYFAELKLGLLDRRLQLLAEDHARLSTQRERRIEQCDQDRTQADRLKRAIAEQGGDRLEQLAVAIRDEERERNRRQQRAERHAQLLAAIGEAAVANEPDFIAQRQQVTDLRESVSQREADLQNQITEWGVSLREGKREHDVLGDEVASLKARRSNIPKEQVAMRAALCAALGFDEDSMPFAGELIQVREEAREWEGVIERVLHNFGLSLLVPDAHYSDVAAWVDRTHLAGRLVYFRVRAARDQDIAELHRDSLVRNVAIKPDSPFYGWLERALAQRFDYACCATQEQFRRESRALTRTGQVKAPGERHEKDDRHRLEDRSRYVLGWSNDAKIAALEGQLRALEMRLGGIASQIAEAQGDQTTLRRQLEVLAALNEFNDFRELDWQSCSATIARLRDEKARLEAACNALLELAAQLESVQAALKESERALSDVNRELGGIDARREAAEALREQTAAWLAGIAPDTRERLDVLRAQILGEHQLSVESCDNRERELRDALQAHMDAEAKRLDRLTERIIKSMSTFKETYKLDTADFDASLEATFEYRELLARLNTDDLPRFEARFKELLNINTINEIANFNGQLARERETIKERIARINESLAQIDYDPGRYIVLESQASPDADIRDFQAELRACTEGTLTGSDDTQYSEAKFLQVKAIIDRFRGREGLSDQDRRWTAKVTDVRNWFLFAASERWREDDTEYEHYSDSGGKSGGQKEKLAYTILAASLAYQFGLEWGAVRSRSFRFVVIDEAFGRGSDESAQYGLKLFRQLNLQLLIVTPLQKIHIIEPFVSSVGFVHNDEGRASKLRNLTIEEHLARKAEGST

SEQ ID NO: 31772 - protein, 393 aa, Burkholderia thailandensis MSMB43
MRSMVSDDADAVPNTVLAARGELKAGLRSGCAFPLRLVLKGPASAELTERFQAVREWIAELVTVAQIRIEWREFNHRVLGVQRVPQAVWIDDLDSALAMIGKRGDAAHFGRLLTLVGSRQPALLVWFRRRPLQALELADECERLLAVVGWIVRHPRPGIYLRQVDIADVHSKFIEKWRGVLSEWLDLVLPLEAVAVERNGGAHFAARYGFLEKPDRIRFRVLDAQLPMLPGPALPDITVDADSFAALAVPIRRVFITENETNFLAFPPLADAIVVFGAGYGWDALSKAAWLSRCSIHYWGDIDTHGFAILDQLRSRFDHVKSFLMDRATLIAHEAQWGKEHDQVLRDLPRLDDGEQALFNDLRDNRIRKNLRLEQERIGFQWVETALATTARQ

SEQ ID NO: 31773 - protein, 541 aa, Bifidobacterium longum; identical to SEQ ID NO: 30638
  subsp. infantis ATCC 15697 = JCM 1222 = DSM 20088

SEQ ID NO: 31774 - protein, 220 aa, Bifidobacterium longum; identical to SEQ ID NO: 30639
  subsp. infantis ATCC 15697 = JCM 1222 = DSM 20088

SEQ ID NO: 31775 - protein, 1184 aa, Bifidobacterium longum; identical to SEQ ID NO: 30640
  subsp. infantis ATCC 15697 = JCM 1222 = DSM 20088

SEQ ID NO: 31776 - protein, 486 aa, Mycobacterium abscessus 3A-0930-R; identical to SEQ ID NO: 30761

SEQ ID NO: 31777 - protein, 249 aa, Mycobacterium abscessus 3A-0930-R; identical to SEQ ID NO: 30762

SEQ ID NO: 31778 - protein, 1115 aa, Mycobacterium abscessus 3A-0930-R; identical to SEQ ID NO: 30763

SEQ ID NO: 31779 - protein, 486 aa, Mycobacterium abscessus 3A-0122-S; identical to SEQ ID NO: 30761

SEQ ID NO: 31780 - protein, 249 aa, Mycobacterium abscessus 3A-0122-S; identical to SEQ ID NO: 30762

SEQ ID NO: 31781 - protein, 1103 aa, Mycobacterium abscessus 3A-0122-S
MSRLQVINWGVFDGYHSIEFSRRGTLITGSSGSGKSSLLDAISLAFLSSNRRNFNASSDTTAAGSSMGKRTVDKYVRGLWGELKNPGERPKQMFLRGKGGAWSAIAVTYSGTDGRVITGLVLKWLAPGSDSDSSSRYYLIDADADIRDLCNAWASKGYAGSVFEGAGWRGHKSERWYLEQLYAAVGIQGSSAAQQLLGKAKSLKSVGGLEQFVREYMLDEPESMAAISEALGQITPLVDARAALAIAQRQRQTLGDIEQIQQTYASDAAQLATVDVVDHHTVRDYVDQQRLALAGPEIDLLDTEITRLGGECDEIQSRQDILTGERDKLLGRIAAADSNLAPLKSELAHARARAEEVSRRRTAYDSALWDLGHEDDIESAEEFEAMRVESLRAVTRINAELEAGHDAYVMAAGALSTARDQLRAASAEFKRVEHLGTPVPPDEDRMRGEIAAALGLTAKDLPYVCELMDLRPGQERWRKSVEKVLRSTGLCLLVPDQHHRQVLRYVNENPMRGYLQMERVIPSGTPRRAEPGTLADCLRLTNPNHECASAAMNLVAGVGDYVLVDSPDEFSKHRRAVTDQGLRKDGDRRAVKDDRRELRASQYIYQGNAGDKRAALSDDVVEAQQAVSDAEKFIGEMDTKREELRSEVVRWSKLHSQYEYWSQIDTDSAEAAVARLQDQYDAMLEANPDLTGLQQQADSYLDEIKRLSERIGALRKQESEHDSRRTRLLDLLDNLSPREVGGHTRSGIEAYVPQLSSSLDVLEPDAYRLELWRQIEKDQSVLRESVTRSRNELNRILNAYDRDFPDSIPNDSENFDEKIHDYVALCRRIDERDLPAAYERMLRLITEQAPTAVLRLHQLAEEEAHRITDQIDRVNSGLGSVEFNRGTRLTLRAEPKALEAVGELNERARRISGRAVAVSMGDEKAIHDQYQDILQLRNLLAAETPEARQWTRDALDVRNRFVLYCEERDARTGEPIRTYSNAGANSGGEQEKLMAFCLAGALSFNLANPETGDNRPVFAQLMLDEAFSKSDPQFAQQALSAFRKFGFQLVIVATVQNTTTIQPYIDSVVMVSKPDGPGVRPVASTRTVPIGELGDVRKAVSAR

SEQ ID NO: 31782 - protein, 486 aa, Mycobacterium abscessus 6G-0728-R; identical to SEQ ID NO: 30761

SEQ ID NO: 31783 - protein, 249 aa, Mycobacterium abscessus 6G-0728-R; identical to SEQ ID NO: 30762

SEQ ID NO: 31784 - protein, 1115 aa, Mycobacterium abscessus 6G-0728-R; identical to SEQ ID NO: 30763

SEQ ID NO: 31785 - protein, 486 aa, Mycobacterium abscessus 4S-0116-S; identical to SEQ ID NO: 30761

SEQ ID NO: 31786 - protein, 249 aa, Mycobacterium abscessus 4S-0116-S; identical to SEQ ID NO: 30762

SEQ ID NO: 31787 - protein, 1115 aa, Mycobacterium abscessus 4S-0116-S; identical to SEQ ID NO: 30763

SEQ ID NO: 31788 - protein, 486 aa, Mycobacterium abscessus 6G-0212; identical to SEQ ID NO: 30761

SEQ ID NO: 31789 - protein, 249 aa, Mycobacterium abscessus 6G-0212; identical to SEQ ID NO: 30762

SEQ ID NO: 31790 - protein, 1115 aa, Mycobacterium abscessus 6G-0212; identical to SEQ ID NO: 30763

SEQ ID NO: 31791 - protein, 486 aa, Mycobacterium abscessus subsp. bolletii CCUG 48898 = JCM 15300; identical to SEQ ID NO: 31556

SEQ ID NO: 31792 - protein, 249 aa, Mycobacterium abscessus subsp. bolletii CCUG 48898 = JCM 15300; identical to SEQ ID NO: 31486

SEQ ID NO: 31793 - protein, 1115 aa, Mycobacterium abscessus subsp. bolletii CCUG 48898 = JCM 15300; identical to SEQ ID NO: 31487

SEQ ID NO: 31794 - protein, 486 aa, Mycobacterium abscessus 4S-0116-R; identical to SEQ ID NO: 30761

SEQ ID NO: 31795 - protein, 249 aa, Mycobacterium abscessus 4S-0116-R; identical to SEQ ID NO: 30762

SEQ ID NO: 31796 - protein, 1115 aa, Mycobacterium abscessus 4S-0116-R; identical to SEQ ID NO: 30763

SEQ ID NO: 31797 - protein, 486 aa, Mycobacterium abscessus 3A-0731; identical to SEQ ID NO: 30761

SEQ ID NO: 31798 - protein, 249 aa, Mycobacterium abscessus 3A-0731; identical to SEQ ID NO: 30762

SEQ ID NO: 31799 - protein, 1115 aa, Mycobacterium abscessus 3A-0731; identical to SEQ ID NO: 30763

SEQ ID NO: 31800 - protein, 486 aa, Mycobacterium abscessus 3A-0930-S; identical to SEQ ID NO: 30761

SEQ ID NO: 31801 - protein, 249 aa, Mycobacterium abscessus 3A-0930-S; identical to SEQ ID NO: 30762

SEQ ID NO: 31802 - protein, 1115 aa, Mycobacterium abscessus 3A-0930-S; identical to SEQ ID NO: 30763

SEQ ID NO: 31803 - protein, 486 aa, Mycobacterium abscessus 4S-0206; identical to SEQ ID NO: 30761

SEQ ID NO: 31804 - protein, 249 aa, Mycobacterium abscessus 4S-0206; identical to SEQ ID NO: 30762

SEQ ID NO: 31805 - protein, 1115 aa, Mycobacterium abscessus 4S-0206; identical to SEQ ID NO: 30763

SEQ ID NO: 31806 - protein, 486 aa, Mycobacterium abscessus subsp. bolletii 2B-0307; identical to SEQ ID NO: 31485

SEQ ID NO: 31807 - protein, 249 aa, Mycobacterium abscessus subsp. bolletii 2B-0307; identical to SEQ ID NO: 31486

SEQ ID NO: 31808 - protein, 1115 aa, Mycobacterium abscessus subsp. bolletii 2B-0307; identical to SEQ ID NO: 31487

SEQ ID NO: 31809 - protein, 486 aa, Mycobacterium abscessus subsp. bolletii 2B-0912-S; identical to SEQ ID NO: 31485

SEQ ID NO: 31810 - protein, 249 aa, Mycobacterium abscessus subsp. bolletii 2B-0912-S; identical to SEQ ID NO: 31486

SEQ ID NO: 31811 - protein, 1115 aa, Mycobacterium abscessus subsp. bolletii 2B-0912-S; identical to SEQ ID NO: 31487

SEQ ID NO: 31812 - protein, 486 aa, Mycobacterium abscessus subsp. bolletii 2B-0912-R; identical to SEQ ID NO: 31485

SEQ ID NO: 31813 - protein, 249 aa, Mycobacterium abscessus subsp. bolletii 2B-0912-R; identical to SEQ ID NO: 31486

SEQ ID NO: 31814 - protein, 1115 aa, Mycobacterium abscessus subsp. bolletii 2B-0912-R; identical to SEQ ID NO: 31487

SEQ ID NO: 31815 - protein, 486 aa, Mycobacterium abscessus 3A-0119-R; identical to SEQ ID NO: 30761

SEQ ID NO: 31816 - protein, 249 aa, Mycobacterium abscessus 3A-0119-R; identical to SEQ ID NO: 30762

SEQ ID NO: 31817 - protein, 1115 aa, Mycobacterium abscessus 3A-0119-R; identical to SEQ ID NO: 30763

SEQ ID NO: 31818 - protein, 486 aa, Mycobacterium abscessus 3A-0122-R; identical to SEQ ID NO: 30761

SEQ ID NO: 31819 - protein, 249 aa, Mycobacterium abscessus 3A-0122-R; identical to SEQ ID NO: 30762

SEQ ID NO: 31820 - protein, 1115 aa, Mycobacterium abscessus 3A-0122-R; identical to SEQ ID NO: 30763

SEQ ID NO: 31821 - protein, 486 aa, Mycobacterium abscessus 6G-0125-S; identical to SEQ ID NO: 30761

SEQ ID NO: 31822 - protein, 249 aa, Mycobacterium abscessus 6G-0125-S; identical to SEQ ID NO: 30762

SEQ ID NO: 31823 - protein, 1115 aa, Mycobacterium abscessus 6G-0125-S; identical to SEQ ID NO: 30763

SEQ ID NO: 31824 - protein, 486 aa, Mycobacterium abscessus subsp. bolletii 1S-153-0915; identical to SEQ ID NO: 31485

SEQ ID NO: 31825 - protein, 249 aa, Mycobacterium abscessus subsp. bolletii 1S-153-0915; identical to SEQ ID NO: 31486

SEQ ID NO: 31826 - protein, 1115 aa, Mycobacterium abscessus subsp. bolletii 1S-153-0915; identical to SEQ ID NO: 31487

SEQ ID NO: 31827 - protein, 486 aa, Mycobacterium abscessus subsp. bolletii 2B-0626; identical to SEQ ID NO: 31485

SEQ ID NO: 31828 - protein, 249 aa, Mycobacterium abscessus subsp. bolletii 2B-0626; identical to SEQ ID NO: 31486

SEQ ID NO: 31829 - protein, 1115 aa, Mycobacterium abscessus subsp. bolletii 2B-0626; identical to SEQ ID NO: 31487

SEQ ID NO: 31830 - protein, 486 aa, Mycobacterium abscessus subsp. bolletii 2B-1231; identical to SEQ ID NO: 31485

SEQ ID NO: 31831 - protein, 249 aa, Mycobacterium abscessus subsp. bolletii 2B-1231; identical to SEQ ID NO: 31486

SEQ ID NO: 31832 - protein, 1115 aa, Mycobacterium abscessus subsp. bolletii 2B-1231; identical to SEQ ID NO: 31487

SEQ ID NO: 31833 - protein, 486 aa, Mycobacterium abscessus subsp. bolletii 2B-0107; identical to SEQ ID NO: 31485

SEQ ID NO: 31834 - protein, 249 aa, Mycobacterium abscessus subsp. bolletii 2B-0107; identical to SEQ ID NO: 31486

SEQ ID NO: 31835 - protein, 1115 aa, Mycobacterium abscessus subsp. bolletii 2B-0107; identical to SEQ ID NO: 31487

SEQ ID NO: 31836 - protein, 486 aa, Mycobacterium abscessus 5S-0921; identical to SEQ ID NO: 31556

SEQ ID NO: 31837 - protein, 249 aa, Mycobacterium abscessus 5S-0921; identical to SEQ ID NO: 31486

SEQ ID NO: 31838 - protein, 1115 aa, Mycobacterium abscessus 5S-0921
MMTSDAATQQFWLSRLQVINWGVFDGYHSIEFSRRGTLITGSSGSGKSSLLDAISLAFLSSNRRNFNASSDTTAAGSSMGKRTVDKYVRGLWGELKNPGERPKQMFLRGKGGAWSAIAVTYSGTDGRVITGLVLKWLAPGSDSDSSSRYYLIDADADIRDLCNAWASKGYAGSVFEGAGWRGHKSERWYLEQLYAAVGIQGSSAAQQLLGKAKSLKSVGGLEQFVREYMLDEPESMAAISEALGQITPLVDARAALAIAQRQRQTLGDIEQIQQTYASDAAQLATVDVVDHHTVRDYVDQQRLALAGPEIDLLDTEITRLGGECDEIQSRQDILTGERDKLLGRIAAADSNLAPLKSELAHARARAEEVSRRRTAYDSALWDLGHEDDIESAEEFEAMRVESLRAVTRINAELEAGHDAYVMAAGALSTARDQLRAASAEFKRVEHLGTPVPPDEDRMRGEIAAALGLTAKDLPYVCELMDLRPGQERWRKSVEKVLRSTGLCLLVPDQHHRQVLRYVNENPMRGYLQMERVIPSGTPRRAEPGTLADCLRLTNPNHECASAAMNLVAGVGDYVLVDSPDEFSKHRRAVTDQGLRKDGDRRAVKDDRRELRASQYIYQGNAGDKRAALSDDVVEAQQAVSDAEKFIGEMDTKREELRSEVVRWSKLHSQYEYWSQIDTDSAEAAVARLQDQYDAMLEANPDLTGLQQQADSYLDEIKRLSERIGALRKQESEHDSRRTRLLDLLDNLNPREVGGHTRSGIEAYVPQLSSSLDVLEPDAYRLELWRQIEKDQSVLRESVTRSRNELNRILNAYDRDFPDSIPNDSENFDEKIHDYVALCRRIDERDLPAAYERMLRLITEQAPTAVLRLHQLAEEEAHRITDQIDRVNSGLGSVEFNRGTRLTLRAEPKALEAVGELNERARRISGRAVAVSMGDEKAIHDQYQDILQLRNLLAAETPEARQWTRDALDVRNRFVLYCEERDARTGEPIRTYSNAGANSGGEQEKLMAFCLAGALSFNLANPETGDNRPVFAQLMLDEAFSKSDPQFAQQALSAFRKFGFQLVIVATVQNTTTIQPYIDSVVMVSKPDGPGVRPVASTRTVPIGELGDVRKAVSAR

SEQ ID NO: 31839 - protein, 486 aa, Mycobacterium abscessus 6G-0125-R; identical to SEQ ID NO: 30761

SEQ ID NO: 31840 - protein, 249 aa, Mycobacterium abscessus 6G-0125-R; identical to SEQ ID NO: 30762

SEQ ID NO: 31841 - protein, 1115 aa, Mycobacterium abscessus 6G-0125-R; identical to SEQ ID NO: 30763

SEQ ID NO: 31842 - protein, 486 aa, Mycobacterium abscessus 5S-0817; identical to SEQ ID NO: 31556

SEQ ID NO: 31843 - protein, 249 aa, Mycobacterium abscessus 5S-0817; identical to SEQ ID NO: 31486

SEQ ID NO: 31844 - protein, 1115 aa, Mycobacterium abscessus 5S-0817; identical to SEQ ID NO: 31838

SEQ ID NO: 31845 - protein, 486 aa, Mycobacterium abscessus 5S-1212; identical to SEQ ID NO: 31556

SEQ ID NO: 31846 - protein, 249 aa, Mycobacterium abscessus 5S-1212; identical to SEQ ID NO: 31486

SEQ ID NO: 31847 - protein, 1115 aa, Mycobacterium abscessus 5S-1212; identical to SEQ ID NO: 31838

SEQ ID NO: 31848 - protein, 486 aa, Mycobacterium abscessus 5S-1215; identical to SEQ ID NO: 31556

SEQ ID NO: 31849 - protein, 249 aa, Mycobacterium abscessus 5S-1215; identical to SEQ ID NO: 31486

SEQ ID NO: 31850 - protein, 1115 aa, Mycobacterium abscessus 5S-1215; identical to SEQ ID NO: 31838

SEQ ID NO: 31851 - protein, 486 aa, Mycobacterium abscessus 5S-0422; identical to SEQ ID NO: 31556

SEQ ID NO: 31852 - protein, 249 aa, Mycobacterium abscessus 5S-0422; identical to SEQ ID NO: 31486

SEQ ID NO: 31853 - protein, 1115 aa, Mycobacterium abscessus 5S-0422; identical to SEQ ID NO: 31838

SEQ ID NO: 31854 - protein, 486 aa, Mycobacterium abscessus 5S-0708; identical to SEQ ID NO: 31556

SEQ ID NO: 31855 - protein, 249 aa, Mycobacterium abscessus 5S-0708; identical to SEQ ID NO: 31486

SEQ ID NO: 31856 - protein, 1115 aa, Mycobacterium abscessus 5S-0708; identical to SEQ ID NO: 31838

SEQ ID NO: 31857 - protein, 486 aa, Mycobacterium abscessus 3A-0810-R; identical to SEQ ID NO: 30761

SEQ ID NO: 31858 - protein, 249 aa, Mycobacterium abscessus 3A-0810-R; identical to SEQ ID NO: 30762

SEQ ID NO: 31859 - protein, 1115 aa, Mycobacterium abscessus 3A-0810-R; identical to SEQ ID NO: 30763

SEQ ID NO: 31860 - protein, 486 aa, Mycobacterium abscessus 4S-0303; identical to SEQ ID NO: 30761

SEQ ID NO: 31861 - protein, 249 aa, Mycobacterium abscessus 4S-0303; identical to SEQ ID NO: 30762

SEQ ID NO: 31862 - protein, 1115 aa, Mycobacterium abscessus 4S-0303; identical to SEQ ID NO: 30763

SEQ ID NO: 31863 - protein, 486 aa, Mycobacterium abscessus 6G-1108; identical to SEQ ID NO: 30761

SEQ ID NO: 31864 - protein, 249 aa, Mycobacterium abscessus 6G-1108; identical to SEQ ID NO: 30762

SEQ ID NO: 31865 - protein, 1115 aa, Mycobacterium abscessus 6G-1108; identical to SEQ ID NO: 30763

SEQ ID NO: 31866 - protein, 486 aa, Mycobacterium abscessus subsp. bolletii 1S-151-0930; identical to SEQ ID NO: 31485

SEQ ID NO: 31867 - protein, 249 aa, Mycobacterium abscessus subsp. bolletii 1S-151-0930; identical to SEQ ID NO: 31486

SEQ ID NO: 31868 - protein, 1115 aa, Mycobacterium abscessus subsp. bolletii 1S-151-0930; identical to SEQ ID NO: 31487

SEQ ID NO: 31869 - protein, 486 aa, Mycobacterium abscessus 6G-0728-S; identical to SEQ ID NO: 30761

SEQ ID NO: 31870 - protein, 249 aa, Mycobacterium abscessus 6G-0728-S; identical to SEQ ID NO: 30762

SEQ ID NO: 31871 - protein, 1037 aa, Mycobacterium abscessus 6G-0728-S
MGKRTVDKYVRGLWGELKNPGERPKQMFLRGKGGAWSAIAVTYSGTDGRVITGLVLKWLAPGSDSDSSSRYYLIDADADIRDLCNAWASKGYAGSVFEGAGWRGHKSERWYLEQLYAAVGIQGSSAAQQLLGKAKSLKSVGGLEQFVREYMLDEPESMAAISEALGQITPLVDARAALAIAQRQRQTLGDIEQIQQTYASDAAQLATVDVVDHHTVRDYVDQQRLALAGPEIDLLDTEITRLGGECDEIQSRQDILTGERDKLLGRIAAADSNLAPLKSELAHARARAEEVSRRRTAYDSALWDLGHEDDIESAEEFEAMRVESLRAVTRINAELEAGHDAYVMAAGALSTARDQLRAASAEFKRVEHLGTPVPPDEDRMRGEIAAALGLTAKDLPYVCELMDLRPGQERWRKSVEKVLRSTGLCLLVPDQHHRQVLRYVNENPMRGYLQMERVIPSGTPRRAEPGTLADCLRLTNPNHECASAAMNLVAGVGDYVLVDSPDEFSKHRRAVTDQGLRKDGDRRAVKDDRRELRASQYIYQGNAGDKRAALSDDVVEAQQAVSDAEKFIGEMDTKREELRSEVVRWSKLHSQYEYWSQIDTDSAEAAVARLQDQYDAMLEANPDLTGLQQQADSYLDEIKRLSERIGALRKQESEHDSRRTRLLDLLDNLSPREVGGHTRSGIEAYVPQLSSSLDVLEPDAYRLELWRQIEKDQSVLRESVTRSRNELNRILNAYDRDFPDSIPNDSENFDEKIHDYVALCRRIDERDLPAAYERMLRLITEQAPTAVLRLHQLAEEEAHRITDQIDRVNSGLGSVEFNRGTRLTLRAEPKALEAVGELNERARRISGRAVAVSMGDEKAIHDQYQDILQLRNLLAAETPEARQWTRDALDVRNRFVLYCEERDARTGEPIRTYSNAGANSGGEQEKLMAFCLAGALSFNLANPETGDNRPVFAQLMLDEAFSKSDPQFAQQALSAFRKFGFQLVIVATVQNTTTIQPYIDSVVMVSKPDGPGVRPVASTRTVPIGELGDVRKAVSAR

SEQ ID NO: 31872 - protein, 486 aa, Mycobacterium abscessus 5S-0304; identical to SEQ ID NO: 31556

SEQ ID NO: 31873 - protein, 249 aa, Mycobacterium abscessus 5S-0304; identical to SEQ ID NO: 31486

SEQ ID NO: 31874 - protein, 1115 aa, Mycobacterium abscessus 5S-0304; identical to SEQ ID NO: 31838

SEQ ID NO: 31875 - protein, 486 aa, Mycobacterium abscessus 5S-0421; identical to SEQ ID NO: 31556

SEQ ID NO: 31876 - protein, 249 aa, Mycobacterium abscessus 5S-0421; identical to SEQ ID NO: 31486

SEQ ID NO: 31877 - protein, 1115 aa, Mycobacterium abscessus 5S-0421; identical to SEQ ID NO: 31838

SEQ ID NO: 31878 - protein, 486 aa, Mycobacterium abscessus 4S-0726-RA; identical to SEQ ID NO: 30761

SEQ ID NO: 31879 - protein, 249 aa, Mycobacterium abscessus 4S-0726-RA; identical to SEQ ID NO: 30762

SEQ ID NO: 31880 - protein, 1037 aa, Mycobacterium abscessus 4S-0726-RA; identical to SEQ ID NO: 31871

SEQ ID NO: 31881 - protein, 486 aa, Mycobacterium abscessus 4S-0726-RB; identical to SEQ ID NO: 30761

SEQ ID NO: 31882 - protein, 249 aa, Mycobacterium abscessus 4S-0726-RB; identical to SEQ ID NO: 30762

SEQ ID NO: 31883 - protein, 1115 aa, Mycobacterium abscessus 4S-0726-RB; identical to SEQ ID NO: 30763

SEQ ID NO: 31884 - protein, 486 aa, Mycobacterium abscessus subsp. bolletii 1S-152-0914; identical to SEQ ID NO: 31485

SEQ ID NO: 31885 - protein, 249 aa, Mycobacterium abscessus subsp. bolletii 1S-152-0914; identical to SEQ ID NO: 31486

SEQ ID NO: 31886 - protein, 1115 aa, Mycobacterium abscessus subsp. bolletii 1S-152-0914; identical to SEQ ID NO: 31487

SEQ ID NO: 31887 - protein, 456 aa, Methylobacterium sp. GXF4
MLFAQLPDELFKPLASPSRGFNAALLLHLHRRVLGAEPVRKAELLAEIGDFAAGWSDPEILGDEPISADPAERRNALYRRLLDTGWLIERRERYVPVVEFDPEARLLLEELSRLERGETRSYGGAVLEVLGGLESAVSDPANRSEALSNAARASAAFLAHVRGLAAGMRKVEERILREPDRAKTFRLFFEDFVERHLISDYRTLHTRFNPFRFRASVVREAGRALRDALTVRALAEGLIREGRSPDLDTAQRAVRADLAQILSVFEGLDNHLDAVDAVVARLERRIGAALHAMDRPDPTGIERTAAMLRAVGAAEVAPDVPPVVSLLRPPIGQAHLQTPRARRSAIDVEPLPDVDYDPAVDAFAVAKAEFRRRTTVTPESMTAFVEARLGKAVSLRGSQITIEGVDDFVVFQRLREIDVLFDARLRDRYAVVRLPERLANGWLDCPDFVVERRVGA

SEQ ID NO: 31888 - protein, 208 aa, Methylobacterium sp. GXF4
MLEGFRAIIDGDEPPPPGARAPDAEELCRALQVMLKGQVIYADTPGIGRSYELARHYAPFFTDYFACLGYALTVSHRDQMVSLSPAADAPRHDIASERLRKDETLVLLALRLLYEEGLRDNRAGTDGIVECTTDEIVEKIRAVARNEPPEEGRLADILRLYARRGGLRMGERDRVERVTPLSLLPGLAVLASDAWLERLRAWSEAGEL

SEQ ID NO: 31889 - protein, 1145 aa, Methylobacterium sp. GXF4
MYVLTDIAISNWYLIRREQIRLRGAAALVGPTGAGKSTIFDAVGTVLAGNNASRLALNASASGRSARTVRDYCLGWISDPAEGGRPTRESCETVLALVFENPASGRTVTVGLALAARAVEPRETVLSRFIAVGHRFEIADYARTAPGGSYTAPWSEIAADLRARAASFTEYRTSGERFTADILATLREGAPSPEPRHFLRSFANAVAFKPIFDTSAFVRAFVLDPEPLDVERVRLSIANWRRLLETIGELESRLARLRRLRDRYDAWSEAVLAAAAHEFRAACAELRRRSLDLTAVRLRLREGADTLRIARERVAASRGHVREIDGEIAEKKALLAGSAAEGRLAASTLGLSMLERDRKELVARVSDLVGLVGQMGKLQPVAPILRQACPPAARLAESCARAGLRRESSPEEILRPDGPLAELIDGLARLPEFDEALERAAEDAALKARAQESEAERTAPRTGGGSAARLSSDTVAFRGELERRGIEALPICELAEIVDPTWGPALEGLLGRAREALVVSPDRLSEALGVLQSGRDRFHRCILVKTTDTAKQRSRRYDDGPLTVIETSDPHAEAFLGVRLGGYDLARDDAELARLSRAVAPSGRTTAGMAYSVTRNVDLLMTRGHRGPTVDSRRAHEAAVAEARRLRGEAAVLREAARTAAAVRARIARGLDDIDALRGELDGLEGRRRTLQTEREGIEKRDNAGLTAEIAALTTERVGYLRELSEELEPKLDRLLADEAALRARLGPVREAARAALAARRSALRQVMGGDAARVRLARSEPFSVGVIAEARGALAGLDAKAAGTRAATERGLAREAAEAARSHGRIAERELTEACSAWRVENPLNAGDAPAIDGYAWVRREYEAVEGHELRRYRAQAERAEVEMRRLMTEDLLTRLADRFERVHARLAALNERLSARSFTGQTYAFEAAVDRRYAAVHALATETARSPEAAQALLAGETEGPMAAALEEITALIAGQEDAARLADYRNYFVYEIGMKDAAGNRTTMSARALRGSGGEAQAPFYVAIAASLASAYYPGDRPGDENPGLGLCLLDEAFSKLDVRNSQALVDLYRAWGLQLLIAAPEDKRTTLTEVMDTIVTVYKSPDLTSVRIEAEHPLEAARRALHAINPEQVGIEGFRRSDAAE

SEQ ID NO: 31890 - protein, 484 aa, Bacteroides dorei CL03T12C01; identical to SEQ ID NO: 30949

SEQ ID NO: 31891 - protein, 194 aa, Bacteroides dorei CL03T12C01; identical to SEQ ID NO: 30950

SEQ ID NO: 31892 - protein, 1130 aa, Bacteroides dorei CL03T12C01; identical to SEQ ID NO: 30951

SEQ ID NO: 31893 - protein, 384 aa, Bacteroides dorei CL03T12C01; identical to SEQ ID NO: 30952

SEQ ID NO: 31894 - protein, 482 aa, Bacteroides nordii CL02T12C05
MQVEEITQILRESPSVRLIKSRSVDFFLSFVIEAFEGQSAIMQERLHMLLENRLDEQENALVEDNLEMTRLGESNEQKAKRLIKDWTDKGFLTNYQNEEGEVIYEISSHTSKLMDWVVSLKKEDYIGTESKFKTLFAQLKELVEYSNEDREKRLELLRAKKMEIEHQIQRLEMGEEVEVYEDYQIEPRYNSLNKLAKELLSDFKEVDDNFKGIIKEIYERQTDNAEKKVLLNYIFDAYGELKQSQQGKSFYAFWEFLLSADLQKEWDELTGALYETLENRGIDAHDMFLREMKKHLFDAGEKVAKTNDRMSEKLSRIIRQNGQMNAEVTKQVINDIKKLLIEATKQKEKPEASLEYETIDINLPVERPLTLTPIKETVYKDKPDMAELSLDDLERIGKLYNPYHIDRKVLRDRINKVLYDRQQTTLAEVIERNEGVEKGLSEVFGYIGVLKEYKTVVNEERQQYIVFAENKTISIPEIIITR

SEQ ID NO: 31895 - protein, 194 aa, Bacteroides nordii CL02T12C05
MNATNIQPYSRAVVKLLKGIVEKDDVVWNDVLDYQSEILDYISVMGLELIVKKDEGFAFVKQLKLDDDKTLNMVSRRLYGFEVSVILIVLRQILEDFDSNPTESQASYKYVTATEIKEEAELFLPTTFNRAKFEKDLDRYIDSIVSFGFLVEAKHAEGEKRYKIHRIIKEKVTLDDLLEFKNKLNDYDAADESL

SEQ ID NO: 31896 - protein, 1131 aa, Bacteroides nordii CL02T12C05
MMQQMNLFNTSPEVAGFKLDYLEVWNWGTFDQKVYCMNTQGNNSLLTGANASGKSTLIDALLTLLVPLKRQRFYNQSSGVEKKGNRTEESYFFGNYGNQQQEGAASTTTLRLRDKGARSVLLASFCNVDKRVVTLFQVRYYTGEELKVLFGIAREPLTIKRDFSEFDLHGDWRKRLTKKYNTNDTRRKIEFFDGPVAYGEKMIALFGMRSDKALTLFNQIVGVKVLDDLDSFIRMNMLEEVPAEEKYQELKDNFQNLMEAKTNIDKVKEQIAQLEPINTLAKELMAIDTRIAELEQEKSVVAYWFAARTVDLCNEELARCKSNLRKLEDELKMLKVKKSELEQEQTRLSVAIEKDEVGQQIREIEKEINQKVKMRDNRKVKAEEYDKLAKTVELTQSPDAEVFEANRATAKHEKDALQVKIDRQLMEEKRQAQNRQDEINCTISERVDTIRYLQQHKNNISGRVAEIRDEILEAVGATAEEIPFIGELIRVKDIECDWEYSIERILHNFALRLVVPEKYYKQVNEYVNGHNLRGRIVYQRYEGTEALREFEDRTLKADSLLRKVEYKPKCLYLDWLEDRLFAEFNYSCVDSLADFNYLQEKAVTKEGLIKARGGKHEKDDRPETRGKEHYVLGWDNKEKIAMLQAEVRQLQQDEKEVATKVRHIEADTKNAQEKRETYSKLFDKYDKFDDIDWWSCALAIQQKEEQKRQLEETNDRVKMLQGQLEGVRKELGALEEKFNEAIGNKALLENRENMLKKQNNDCALALAQIGVVDTDAFESQHTDLLNVALVGLDKMRDTLQSDINSALRKQRETKGSKSGDLKNLIYRFKNPAEEITAKYRDWRSDVNRLPEAVEFVGEYQTYYQRLLDEDLPGFESRFNKYLQENIINKVSAFNMFFQNWRQSITKTIDQLNSYLVGIDFKDAPKTYIQLVAAKRLNVDLKEFQDLLNSAIPNIHEMNSTIDGSRIHFEQHIEPLMSRLQDESWRKLVMDVRGWYTYKAEEFYQDDDQKRNTYEAMGQLSGGEKAQLTYTILGSAIAYQFGLTKNGLDSSFRFIAIDEAFRAQDEDKARYLISLCKQLHLQLLVVTPSDNIHIVENDISYVHYVERKGDRSVLYNMPISEFKAERERSMEV

SEQ ID NO: 31897 - protein, 384 aa, Bacteroides nordii CL02T12C05
MITAAEIRKKTERKYVDYLRSVVAGSGFEPIVIPCDKKASASMDEYQRELTDIRSQSKEVKGFGYTIEWKTVKTKALGEQDLPERVLFGSASDVERFLLKGGEVSQFRKDVAMLLNEFPQLRPWVERYPLKVIENASSWPDLLKVLRYFVANPCPELYIRELPIEVHTKFIERNKGVLRELLDIVIVEYVCSDEKEFEKRFGLRYDEPWVRIRVLEASIASEYFSGVDDLTMPQSQFCALSLPVQKVFVVENKVNFLTFPKLARSLLIWGHGFTVGILKSVPFMRHASLYYWGDIDAQGFEILSQFRSYFPQTQSLLMDRATFDTYFEGDKGTPSDVSKPLHLTPAEATLYNHIKSHNLRLEQEKIPQKCIDNIFNSSLKIRQG

SEQ ID NO: 31898 - protein, 524 aa, Bifidobacterium animalis subsp. lactis B420; identical to SEQ ID NO: 30666

SEQ ID NO: 31899 - protein, 269 aa, Bifidobacterium animalis subsp. lactis B420; identical to SEQ ID NO: 30689

SEQ ID NO: 31900 - protein, 1165 aa, Bifidobacterium animalis subsp. lactis B420; identical to SEQ ID NO: 30668

SEQ ID NO: 31901 - protein, 406 aa, Bifidobacterium animalis subsp. lactis B420; identical to SEQ ID NO: 30669

SEQ ID NO: 31902 - protein, 524 aa, Bifidobacterium animalis subsp. lactis Bi-07; identical to SEQ ID NO: 30666

SEQ ID NO: 31903 - protein, 269 aa, Bifidobacterium animalis subsp. lactis Bi-07; identical to SEQ ID NO: 30689

SEQ ID NO: 31904 - protein, 1165 aa, Bifidobacterium animalis subsp. lactis Bi-07; identical to SEQ ID NO: 30668

SEQ ID NO: 31905 - protein, 406 aa, Bifidobacterium animalis subsp. lactis Bi-07; identical to SEQ ID NO: 30669

SEQ ID NO: 31906 - protein, 486 aa, Mycobacterium abscessus subsp. bolletii str. GO 06; identical to SEQ ID NO: 31485

SEQ ID NO: 31907 - protein, 249 aa, Mycobacterium abscessus subsp. bolletii str. GO 06; identical to SEQ ID NO: 31486

SEQ ID NO: 31908 - protein, 1115 aa, Mycobacterium abscessus subsp. bolletii str. GO 06; identical to SEQ ID NO: 31487

SEQ ID NO: 31909 - protein, 490 aa, Xanthomonas campestris pv. musacearum NCPPB 2005
MKHRARIARYRALREQPLWKLLAADQSPEVIGLLQTLLLDSERGLPAAVLHERLQRMLDDLNVDQLSRELPRTAQDYVAHWLAQGWLERRLPEGAQQEQYELSTQAMQAIRFADGLEQARGAATESRLALVMQQLSQLAALTETNPDARLSALRDERDRIDAEIARVAAGKVASLDGKRALERARQVIALADELTEDFRRVRDDFEQLNRQFRERIIDDEGERGEVLTRLFEGVDVIGDSEAGRSFQAFWALLNDAEQSAQLDAALETVLARAFARKLDRRERSFLRGLTGTMLERGGQVHDVMQHFARSLRGFVQSRGYLEQRRLNQLLKQAQAEALGLREHLRAQRSVGHDLNLTTSRLRSLSQWRLHDPRQTQVDSSIQRNDAAAISLDSVGDLVAQSEIDFRSLRRDLYELLGEHAQLSIAQVLAQRQAEQGLGSVIGYLSLGTRHGQVDVQRSEIARWLGGDGQWRGARIPLVWFSQEKRNELAG

SEQ ID NO: 31910 - protein, 232 aa, Xanthomonas campestris pv. musacearum NCPPB 2005
MNWQADNVETDEPAPSAHADAAAPEADAATGLFPGDSGALPVDARRVLCQLLAGPSVDVQRHSKLWPALLRHEAAVRSRLAELFLELVLDRDAGVAFTRQADTGELEAPVLLRSLPLTFIDSVLLLHLRQQLAEADARGVRAVVEDAPLSEALAVYEKNLSTDRAGFMRRIGNAIQKMKDNHVLTRLRGDDNRYEVSPTLKLLFSAEDVSALAQIYRQLREQPGTVGDAEHA

SEQ ID NO: 31911 - protein, 1128 aa, Xanthomonas campestris pv. musacearum NCPPB 2005
MKSSSSSLFADDLPDPRVQQFRMRRLQVHNWGTFNGLTDVPIAAKGFLFVGRSGSGKSTLLDAMSALLTPPNLVDFNAAAREAERSGRDRNLVSYVRGAWADQQDSASGEIATQYLRKGSTWTALVLEYRNGEGRVISLIRLFWIAGSGAAAADVRKHYMVAERSFDIASELVGFDLDLRKLKARLGDDIAHFDNFSGYAERFRHQLGIANEMALRLLHKTQSAKNLGDLNVFLRGFMLEAPKTFDASERLVGDFAELDGAHRAVVTARRQVETLLPARAHYDDLQSVQRQRGRLQELKLGLDPYREQRRLALLDARLHALDVNDQGLAGEEGQRRAAVDNHQQRLSDLEAQRRSQGGERIDALEREQLQVQGELARRSDKRVRAEQACRQLDQSLADNAHGFAEQSAQARAALEDGQRLAAEQDEVIGERIAGKREDSQRFAQVRAEIEALTRNPSNIAAPMQALRARLSEETGIPEAALPFVGELIQVREGDVAWRGAIERVLHGFAQSLLVDERHYAELAEWVNRTHLGSRLVYYRVRNNEQAFAGREPGSASLLHKLQLREHPFAGWLRRELGKRFDYDCLESAKALRTAERAITREGQVKHPGERYEKDDRHAVGDRRRWLLGFDNRDKLALYEREAIELAQRIAACDADVAALRARRERDASRRLAQHTLANLGWEEIDVAAQLQRGDDIASALRKLREGDANLRALGEAIERTRGDLEQAKRTFDGVREERIALGVERTRLEKQRLQCADADTRVVTPLQREGLEERLANLGALSLDNLEAHFRQIGNAIAEQTSASDSEHNRLEQLLLGCFRRYSQQWPEDSGDFIISLAGAEDFLARLQRLERDGLPQHEARFFELLQSQSKNNLLALQRHTAEARKSIAQRLDEVNASLEQVPFNHGTLLTIELSDRRLPEVIDFHQRLRDVLGHHQTEQRDVAEQQFAVLRELVRKLGSADGDDKRWRELVLDVRLHVEFVGVELDAATRQQVEIYRSGAGKSGGQRQKLATTCLAAALRYQLGGEDGELPRYAAVVLDEAFDKADNEFTALAMNIFENFGFQMVVATPLKSVMTLEPFIGGACFVEISGRHDSGVLLIEYDEQARRLKLPERSRSAAAAAGAARAT

SEQ ID NO: 31912 - protein, 490 aa, Xanthomonas campestris pv. musacearum NCPPB 4379; identical to SEQ ID NO: 31909

SEQ ID NO: 31913 - protein, 232 aa, Xanthomonas campestris pv. musacearum NCPPB 4379; identical to SEQ ID NO: 31910

SEQ ID NO: 31914 - protein, 1144 aa, Xanthomonas campestris pv. musacearum NCPPB 4379
MKSSSSSLFADDLPDPRVQQFRMRRLQVHNWGTFNGLTDVPIAAKGFLFVGRSGSGKSTLLDAMSALLTPPNLVDFNAAAREAERSGRDRNLVSYVRGAWADQQDSASGEIATQYLRKGSTWTALVLEYRNGEGRVISLIRLFWIAGSGAAAADVRKHYMVAERSFDIASELVGFDLDLRKLKARLGDDIAHFDNFSGYAERFRHQLGIANEMALRLLHKTQSAKNLGDLNVFLRGFMLEAPKTFDASERLVGDFAELDGAHRAVVTARRQVETLLPARAHYDDLQSVQRQRGRLQELKLGLDPYREQRRLALLDARLHALDVNDQGLAGEEGQRRAAVDNHQQRLSDLEAQRRSQGGERIDALEREQLQVQGELARRSDKRVRAEQACRQLDQSLADNAHGFAEQSAQARAALEDGQRLAAEQDEVIGERIAGKREDSQRFAQVRAEIEALTRNPSNIAAPMQALRARLSEETGIPEAALPFVGELIQVREGDVAWRGAIERVLHGFAQSLLVDERHYAELAEWVNRTHLGSRLVYYRVRNNEQAFAGREPGSASLLHKLQLREHPFAGWLRRELGKRFDYDCLESAKALRTAERAITREGQVKHPGERYEKDDRHAVGDRRRWLLGFDNRDKLALYEREAIELAQRIAACDADVAALRARRERDASRRLAQHTLANLGWEEIDVAAQLQRGDDIASALRKLREGDANLRALGEAIERTRGDLEQAKRTFDGVREERIALGVERTRLEKQRLQCADADTRVVTPLQREGLEERLANLGALSLDNLEAHFRQIGNAIAEQTSASDSEHNRLEQLLLGCFRRYSQQWPEDSGDFIISLAGAEDFLARLQRLERDGLPQHEARFFELLQSQSKNNLLALQRHTAEARKSIAQRLDEVNASLEQVPFNHGTLLTIELSDRRLPEVIDFHQRLRDVLGHHQTEQRDVAEQQFAVLRELVRKLGSADGDDKRWRELVLDVRLHVEFVGVELDAATRQQVEIYRSGAGKSGGQRQKLATTCLAAALRYQLGGEDGELPRYAAVVLDEAFDKADNEFTALAMNIFENFGFQMVVATPLKSVMTLEPFIGGACFVEISGRHDSGVLLIEYDEQARRLKLPERSRSAAAAAGAARATEPSADAIGAASADGLH

SEQ ID NO: 31915 - protein, 393 aa, Xanthomonas campestris pv. musacearum NCPPB 4379
MTAAAPMLLPEAALRALRGQWQRARGQWLIGEGAPQAIGLRAPTQAQAIARFDAFGAWLQQWSRTGLPGRVEYRAVSWTQLGPQRLPQAWMLDDASQAAAALGEGERWARARQRSAALQARWPQAVALAARLRRQFDLLADWPEADFARLVAVVEWLHQHRDSGLFLRQLPIAGIDSKWIEPHRGVIADWLAALRGIAEPRSFASLSGLRSAPDRVRLRLLDPALRHHLGGLEDINAPITQIAALRLPARRVLIVENRETGLACESLPGTLVLMARGYAIEYVSSIEWLRGLPLYYWGDIDTHGLAILHRLRTHAPHTTAVLMDEATLHATPRALWGHERRQHRAQHLDALSIQEQRLYADLRGGRFGPSPRLEQERIAWDYAWPRIQAALAD

SEQ ID NO: 31916 - protein, 490 aa, Xanthomonas campestris pv. musacearum NCPPB 4380; identical to SEQ ID NO: 31909

SEQ ID NO: 31917 - protein, 232 aa, Xanthomonas campestris pv. musacearum NCPPB 4380; identical to SEQ ID NO: 31910

SEQ ID NO: 31918 - protein, 1144 aa, Xanthomonas campestris pv. musacearum NCPPB 4380; identical to SEQ ID NO: 31914

SEQ ID NO: 31919 - protein, 393 aa, Xanthomonas campestris pv. musacearum NCPPB 4380; identical to SEQ ID NO: 31915

SEQ ID NO: 31920 - protein, 490 aa, Xanthomonas campestris pv. musacearum NCPPB 4384; identical to SEQ ID NO: 31909

SEQ ID NO: 31921 - protein, 232 aa, Xanthomonas campestris pv. musacearum NCPPB 4384; identical to SEQ ID NO: 31910

SEQ ID NO: 31922 - protein, 1114 aa, Xanthomonas campestris pv. musacearum NCPPB 4384
MKSSSSSLFADDLPDPRVQQFRMRRLQVHNWGTFNGLTDVPIAAKGFLFVGRSGSGKSTLLDAMSALLTPPNLVDFNAAAREAERSGRDRNLVSYVRGAWADQQDSASGEIATQYLRKGSTWTALVLEYRNGEGRVISLIRLFWIAGSGAAAADVRKHYMVAERSFDIASELVGFDLDLRKLKARLGDDIAHFDNFSGYAERFRHQLGIANEMALRLLHKTQSAKNLGDLNVFLRGFMLEAPKTFDASERLVGDFAELDGAHRAVVTARRQVETLLPARAHYDDLQSVQRQRGRLQELKLGLDPYREQRRLALLDARLHALDVNDQGLAGEEGQRRAAVDNHQQRLSDLEAQRRSQGGERIDALEREQLQVQGELARRSDKRVRAEQACRQLDQSLADNAHGFAEQSAQARAALEDGQRLAAEQDEVIGERIAGKREDSQRFAQVRAEIEALTRNPSNIAAPMQALRARLSEETGIPEAALPFVGELIQVREGDVAWRGAIERVLHGFAQSLLVDERHYAELAEWVNRTHLGSRLVYYRVRNNEQAFAGREPGSASLLHKLQLREHPFAGWLRRELGKRFDYDCLESAKALRTAERAITREGQVKHPGERYEKDDRHAVGDRRRWLLGFDNRDKLALYEREAIELAQRIAACDADVAALRARRERDASRRLAQHTLANLGWEEIDVAAQLQRGDDIASALRKLREGDANLRALGEAIERTRGDLEQAKRTFDGVREERIALGVERTRLEKQRLQCADADTRVVTPLQREGLEERLANLGALSLDNLEAHFRQIGNAIAEQTSASDSEHNRLEQLLLGCFRRYSQQWPEDSGDFIISLAGAEDFLARLQRLERDGLPQHEARFFELLQSQSKNNLLALQRHTAEARKSIAQRLDEVNASLEQVPFNHGTLLTIELSDRRLPEVIDFHQRLRDVLGHHQTEQRDVAEQQFAVLRELVRKLGSADGDDKRWRELVLDVRLHVEFVGVELDAATRQQVEIYRSGAGKSGGQRQKLATTCLAAALRYQLGGEDGELPRYAAVVLDEAFDKADNEFTALAMNIFENFGFQMVVATPLKSVMTLEPFIGGACFVEISGRHDSGVLLIEYDEQARRLKLPER

SEQ ID NO: 31923 - protein, 393 aa, Xanthomonas campestris pv. musacearum NCPPB 4384; identical to SEQ ID NO: 31915

SEQ ID NO: 31924 - protein, 490 aa, Xanthomonas campestris pv. musacearum NCPPB 4392
MKHRARIARYRALREQPLWKLLAADQSPEVIGLLQTLLLDSERGLPAAVLHERLQRMLDDLNVDQLSRELPRTAQDYVAHWLAQGWLERRLPEGAQQEQYELSTQAMQAIRFADGLEQARGAATESRLALVMQQLSQLAALTETNPDARLSALRDERDRIDAEIARVAAGKVASLDGKRALERARQVIALADELTEDFRRVRDDFEQLNRQFRERIIDDEGERGEVLTRLFEGVDVIGDSEAGRSFQAFWALLNDAEQSAQLDAALETVLARAFARKLDRRERSFLRGLTGTMLERGGQVHDVMQHFARSLRGFVQSRGYLEQRRLNQLLKQAQAEALGLREHLRAQRSVGHDLNLTTSRLRSLSQWRLHDPRQTQVDSSIQRNDAAAISLDSVGDLVAQSEIDFRSLRRDLYELLGEHAQLSIAQVLAQRQAEQGLGSVIGHLSLGTRHGQVDVQRSEIARWLGGDGQWRGARIPLVWFSQEKRNELAG

SEQ ID NO: 31925 - protein, 232 aa, Xanthomonas campestris pv. musacearum NCPPB 4392; identical to SEQ ID NO: 31910

SEQ ID NO: 31926 - protein, 1128 aa, Xanthomonas campestris pv. musacearum NCPPB 4392; identical to SEQ ID NO: 31911

SEQ ID NO: 31927 - protein, 490 aa, Xanthomonas campestris pv. musacearum NCPPB 4394; identical to SEQ ID NO: 31909

SEQ ID NO: 31928 - protein, 232 aa, Xanthomonas campestris pv. musacearum NCPPB 4394; identical to SEQ ID NO: 31910

SEQ ID NO: 31929 - protein, 1140 aa, Xanthomonas campestris pv. musacearum NCPPB 4394
MKSSSSSLFADDLPDPRVQQFRMRRLQVHNWGTFNGLTDVPIAAKGFLFVGRSGSGKSTLLDAMSALLTPPNLVDFNAAAREAERSGRDRNLVSYVRGAWADQQDSASGEIATQYLRKGSTWTALVLEYRNGEGRVISLIRLFWIAGSGAAAADVRKHYMVAERSFDIASELVGFDLDLRKLKARLGDDIAHFDNFSGYAERFRHQLGIANEMALRLLHKTQSAKNLGDLNVFLRGFMLEAPKTFDASERLVGDFAELDGAHRAVVTARRQVETLLPARAHYDDLQSVQRQRGRLQELKLGLDPYREQRRLALLDARLHALDVNDQGLAGEEGQRRAAVDNHQQRLSDLEAQRRSQGGERIDALEREQLQVQGELARRSDKRVRAEQACRQLDQSLADNAHGFAEQSAQARAALEDGQRLAAEQDEVIGERIAGKREDSQRFAQVRAEIEALTRNPSNIAAPMQALRARLSEETGIPEAALPFVGELIQVREGDVAWRGAIERVLHGFAQSLLVDERHYAELAEWVNRTHLGSRLVYYRVRNNEQAFAGREPGSASLLHKLQLREHPFAGWLRRELGKRFDYDCLESAKALRTAERAITREGQVKHPGERYEKDDRHAVGDRRRWLLGFDNRDKLALYEREAIELAQRIAACDADVAALRARRERDASRRLAQHTLANLGWEEIDVAAQLQRGDDIASALRKLREGDANLRALGEAIERTRGDLEQAKRTFDGVREERIALGVERTRLEKQRLQCADADTRVVTPLQREGLEERLANLGALSLDNLEAHFRQIGNAIAEQTSASDSEHNRLEQLLLGCFRRYSQQWPEDSGDFIISLAGAEDFLARLQRLERDGLPQHEARFFELLQSQSKNNLLALQRHTAEARKSIAQRLDEVNASLEQVPFNHGTLLTIELSDRRLPEVIDFHQRLRDVLGHHQTEQRDVAEQQFAVLRELVRKLGSADGDDKRWRELVLDVRLHVEFVGVELDAATRQQVEIYRSGAGKSGGQRQKLATTCLAAALRYQLGGEDGELPRYAAVVLDEAFDKADNEFTALAMNIFENFGFQMVVATPLKSVMTLEPFIGGACFVEISGRHDSGVLLIEYDEQARRLKLPERSRSAAAAAGAARATEPSADAIGAASA

SEQ ID NO: 31930 - protein, 393 aa, Xanthomonas campestris pv. musacearum NCPPB 4394; identical to SEQ ID NO: 31915

SEQ ID NO: 31931 - protein, 489 aa, Xanthomonas vasicola pv. vasculorum NCPPB 1326
MKHQARIAGYRQLREQPVWKLLAADHAPELIGLLQTVLMDGERRLPSAVLHARLQRQLDALRADELSRELPRTAQAYLAHWLAQGWLERRLPEGATEEEYELSRAATQAIRFIVGLRESSSSATESRLSLVIQQLVQLAGQTEADPEVRLAALRDERARIDAEIERVASGRVAALDGKRALERARDLIHLSDELAQDFHRVRDDFEQLNRQFRERIIDDEGARGDVLEQLFNGVDVIADSEAGRTFEAFWSLLNDTQQSSQLDQALDALLARGFARKLDRRERAFLRGLTGTLLERGGEVHMVMQHFARSLRGFVQSRGYLEQRRLNQLLKQAQGEALQLRDSLHATTATGYTQALSGSRLRSLSQWRLHDPRLTQVDGRVQAADAAEISLDSVGDLVAQSEIDVRSLRRDLHALLGQRPRLTIGDALQQRPAIQGLGSVIGYLSLGTRHGMVIEGQMETVQWEGSDGAVRRARIPLVWFTREKRNELV

SEQ ID NO: 31932 - protein, 234 aa, Xanthomonas vasicola pv. vasculorum NCPPB 1326
MNWSEQLPSDRYEDDEDAADSTPPLRASDAAGDPPGGALFLGDTGTLPFDARRALCQLLAGPSIDAQRHGTLWPALLRNEVAIRQLLCELFLELVLDREGGVAFTRQADTAELESPTLLRSAPLTFIESVLLLFLRQQLAEADTRGERAVVDEAQLVEALSVYEKNVSTDRAGFARRVMTAIGKMRDNQLLSRLRGSEERYEVSPVLKLLFSAEDVQALVVAYRGLREGDVALE

SEQ ID NO: 31933 - protein, 1338 aa, Xanthomonas vasicola pv. vasculorum NCPPB 1326
MTSQPNLSPVQPGTSLFAETLAEQRAQQFRMRRLQVHNWGTFNGLTEVPIAEKGFLFVGRSGSGKSTLLDAMSALLTPPSIVDFNAAAREAERSGRDRSLVSYVRGAWADQQDSTSGEIATQYLRKGATWTALVLEYANAHGEAVSLIRLFWIAGSGNAAADVRRHYMVAPRSFDVATELDGFDLDLRKLKARLGQEIAHFDGFAGYAERFRHALGIGNEMALRLLHKTQSAKNLGDLNAFLRGFMLDEPRTFEAADRLVEDFAELDGAHHAVVTARRQVETLTPAREHHAALMALRHSVGELRELQLGVDSYREQQRLALLEERLQELDNQDRGLAGEEGQRRESLDNYEQKLVGLEREQRAAGGEQIEELERERARVERERDERLRRRAQIEQACRQLGTALAAGASGFAAQIAHAQTVLDNGKHDASALDDAIAERMGARRDDERRFAEIRAELDVLKRAPSSMPAPMQALRARLCEDIGIAEAALPFVGELVRVRDDQMAWRGAIERVLNGFAQSLLVDERHYAQVSEWVNRTHIGTRLVYFRVRRNDDLHARRVDPDALPGKLQLREHAFTDWLRNELTRRFDYACVDNANALRNADRAITREGQVKHPGDRYEKDDRHAVNDRKRWLLGHDNRDKLKVFEREAQALAQQIASCDADVAALRKQREQDQERQLAAHTLVERDWDEIDVGPKLQRLSDIDEQLVQLREGNSGLRALGQAIDTARTLRDQAKRTYDDVRLERAQLARERVRLEQQHAACAGRAGTATLTPTQLQGLRERLAALTPLSLDNLEAHFRVVERGLAEQLAESQGRDSRLSTQLLECFRRYCQQWPEDSGDFAVSLASADDFLARLDRLESDGLPRHEHRFFDLLQTQSKNNLLALQRHTAEAHKGIKQRMDEVNASLEQVPFNRDTVLTIEVSDRRLAEVQEFQQQLRAVLSHQQTEDRALAEAQFSTLRALVARLGAQEPEARRWREQVLDVRLHVEFIGVELDAQTRAQVEIYRSGAGKSGGQRQKLATTCLAAALRYQLGGEDGELPRYCAVVLDEAFDKADNEFTALAMNIFENFGFQMVVATPLKSVMTLEPFIGGACFVEISGRHNSGVLLIEYDEQAQRLKLPERSRGDEAAVADATDAAPSIKAAIEPEEVQGAAAADGIAADDLPMHAASPVPGHATPAVENKRSGKRVPAVATTNKQNKNEQNKKARTASSTRAVAQPRATQPKKSPVRTSAVTGKPASDKRTSGAQQAPAVSSGAASKSNVGKTTRSSKTQGKPMTATRASNATSKKAAAKPRASTASTGQPARGAGKTTSARAAVKPSPTKKRGAKAGTVQPRGKR

SEQ ID NO: 31934 - protein, 489 aa, Xanthomonas vasicola pv. vasculorum NCPPB 1381; identical to SEQ ID NO: 31931

SEQ ID NO: 31935 - protein, 234 aa, Xanthomonas vasicola pv. vasculorum NCPPB 1381; identical to SEQ ID NO: 31932

SEQ ID NO: 31936 - protein, 1338 aa, Xanthomonas vasicola pv. vasculorum NCPPB 1381
MTSQPNLSPVQPGTSLFAETLAEQRAQQFRMRRLQVHNWGTFNGLTEVPIAEKGFLFVGRSGSGKSTLLDAMSALLTPPSIVDFNAAAREAERSGRDRSLVSYVRGAWADQQDSTSGEIATQYLRKGATWTALVLEYANAHGEAVSLIRLFWIAGSGNAAADVRRHYMVAPRSFDVATELDGFDLDLRKLKARLGQEIAHFDGFAGYAERFRHALGIGNEMALRLLHKTQSAKNLGDLNAFLRGFMLDEPRTFEAADRLVEDFAELDGAHHAVVTARRQVETLTPAREHHAALMALRHSVGELRELQLGVDSYREQQRLALLEERLQELDNQDRGLAGEEGQRRESLDNYEQKLVGLEREQRAAGGEQIEELERERARVERERDERLRRRAQIEQACRQLGTALAAGASGFAAQIAHAQTVLDNGKHDASALDDAIAERMGARRDDERRFAEIRAELDVLKRAPSSMPAPMQALRARLCEDIGIAEAALPFVGELVRVRDDQMAWRGAIERVLNGFAQSLLVDERHYAQVSEWVNRTHIGTRLVYFRVRRNDDLHARRVDPDALPGKLQLREHAFTDWLRNELTRRFDYACVDNANALRNADRAITREGQVKHPGDRYEKDDRHAVNDRKRWLLGHDNRDKLKVFEREAQALAQQIASCDADVAALRKQREQDQERQLAAHTLVERDWDEIDVGPKLQRLSDIDEQLVQLREGNSGLRALGQAIDTARTLRDQAKRTYDDVRLERAQLARERVRLEQQHAACAGRAGTATLTPTQLQGLRERLAALTPLSLDNLEAHFRVVERGLAEQLAESQGRDSRLSTQLLECFRRYCQQWPEDSGDFTVSLASADDFLARLDRLESDGLPRHEHRFFDLLQTQSKNNLLALQRHTAEAHKGIKQRMDEVNASLEQVPFNRDTVLTIEVSDRRLAEVQEFQQQLRAVLSHQQTEDRALAEAQFSTLRALVARLGAQEPEARRWREQVLDVRLHVEFIGVELDAQTRAQVEIYRSGAGKSGGQRQKLATTCLAAALRYQLGGEDGELPRYCAVVLDEAFDKADNEFTALAMNIFENFGFQMVVATPLKSVMTLEPFIGGACFVEISGRHNSGVLLIEYDEQAQRLKLPERSRGDEAAVADATDAAPSIKAAIEPEEVQGAAAADGIAADDLPMHAASPVPGHATPAVENKRSGKRVPAVATTNKQNKNEQNKKARTASSTRAVAQPRATQPKKSPVRTSAVTGKPASDKRTSGAQQAPAVSSGAASKSNVGKTTRSSKTQGKPMTATRASNATSKKAAAKPRASTASTGQPARGAGKTTSARAAVKPSPTKKRGAKAGTVQPRGKR

SEQ ID NO: 31937 - protein, 489 aa, Xanthomonas vasicola pv. vasculorum NCPPB 206
MKHQARIAGYRQLREQPVWKLLAADHAPELIGLLQTVLMDGERRLPSAVLHARLQRQLDALRADELSRELPRTAQAYLTHWLAQGWLERRLPEGATEEEYELSRAATQAIRFIVGLRESSSSATESRLSLVIQQLVQLAGQTEADPEVRLAALRDERARIDAEIERVASGRVAALDGKRALERARDLIHLSDELAQDFHRVRDDFEQLNRQFRERIIDDEGARGDVLEQLFNGVDVIADSEAGRTFEAFWSLLNDTQQSSQLDQALDALLARGFARKLDRRERAFLRGLTGTLLERGGEVHMVMQHFARSLRGFVQSRGYLEQRRLNQLLKQAQGEALQLRDSLHATTATGYTQALSGSRLRSLSQWRLHDPRLTQVDGRVQAADAAEISLDSVGDLVAQSEIDVRSLRRDLHALLGQRPRLTIGDALQQRPAIQGLGSVIGYLSLGTRHGMVIEGQMETVQWEGSDGAVRRARIPLVWFTREKRNELV

SEQ ID NO: 31938 - protein, 234 aa, Xanthomonas vasicola pv. vasculorum NCPPB 206; identical to SEQ ID NO: 31932

SEQ ID NO: 31939 - protein, 1338 aa, Xanthomonas vasicola pv. vasculorum NCPPB 206; identical to SEQ ID NO: 31936

SEQ ID NO: 31940 - protein, 489 aa, Xanthomonas vasicola pv. vasculorum NCPPB 890; identical to SEQ ID NO: 31931

SEQ ID NO: 31941 - protein, 234 aa, Xanthomonas vasicola pv. vasculorum NCPPB 890; identical to SEQ ID NO: 31932

SEQ ID NO: 31942 - protein, 228 aa, Xanthomonas vasicola pv. vasculorum NCPPB 890
MTSQPNLSPVQPGTSLFAETLAEQRAQQFRMRRLQVHNWGTFNGLTEVPIAEKGFLFVGRSGSGKSTLLDAMSALLTPPSIVDFNAAAREAERSGRDRSLVSYVRGAWADQQDSTSGEIATQYLRKGATWTALVLEYANAHGEAVSLIRLFWIAGSGNAAADVRRHYMVAPRSFDVATELDGFDLDLRKLKARLGQEIAHFDGFAGYAERFRHALGIGNEMALRLLHK

SEQ ID NO: 31943 - protein, 489 aa, Xanthomonas vasicola pv. vasculorum NCPPB 895; identical to SEQ ID NO: 31931

SEQ ID NO: 31944 - protein, 234 aa, Xanthomonas vasicola pv. vasculorum NCPPB 895; identical to SEQ ID NO: 31932

SEQ ID NO: 31945 - protein, 1338 aa, Xanthomonas vasicola pv. vasculorum NCPPB 895; identical to SEQ ID NO: 31936

SEQ ID NO: 31946 - protein, 492 aa, Alishewanella aestuarii B11
MSGDKGLNFLGLQAKYRRLFDESAAWRMLRADNAPYILAFIAELFSEESEVPYGRARILLDAEIERSRELGIWQTESSAATYLNQWIKYGWLREMDDSLTKTDASEIALRFCKGLDERHSGTTASHLRIVQEAVRDLAVAISPNVDEKVTLLESKKAEIQREIESLQAGVVPVLSESEQRERIRQIYQLASVLTGDFRRVEDEIRILDKELRIQIIEGDISRGDVLLSVMEREALLSTTEAGSAFEGFYQLLCDQNRAMEFREQLRSILSRPIGQQLSSSQHQFLSHLMRELSRESERVFRVRRRSEEGLRSYIESGAAAENQAVDRLLSKLERQALLLRDGDLDLMTETELSLPVGPIEIKSPESMRLRSPDDKLDTSGVEENANKREPSTSMLNCLDAVQVRQVANKVLNALKKHGPMSIARLAEENPLKSGLEELVAYLRVAKAVNATMLDEKEEVILVDKQGVKLKAFIPTYLLTAELFPKDIDELAL

SEQ ID NO: 31947 - protein, 288 aa, Alishewanella aestuarii B11
MTNAMPPNSFFSMVTGKSDKELHADVNEVKSGGTDAAPHDLDDSFLKVPNRHIEDLTLQSDESGLITESHKSSDSEMPHDARRVLVHLMRQGAVMASQKPKLFEQLCRYELAVRKHLSEVYLQLVLDQKSGVAFVASTTSEHSGKIEGGELEDEVTETDESATLIPTRTLSLFDTLILLVLRKHYQERESAGEQKITIDIERLESYLTPFLPITDHASKDRKKLLIRVKEMVKRKVLSTIRGEDDRYEVTPIIRYVVNAGFLENMLAEYTALAQKQLNETVFAGSDHK

SEQ ID NO: 31948 - protein, 1153 aa, Alishewanella aestuarii B11
MTANLLENSAHSSTNELGNLISRNDLFSKGQIRLSELSVFNWGSFHGLHTATIDPEGTLVTGDNGAGKSTFIDGLMALILPAGKATFNVAAAQGDRSDRSLLSYMRGSFGSAHDGAATRVKSKREKGVVTGLRALYRADDGSCITLGALFWTTSTTNILSDVKRVYLVAKRNLQLKELLDAFGEGNTRQLKQWLRDDPAITDCDSNFSEYQELYRKHLYMDNKNAPVLLSRALGLKKIDDLTKLIRELVLEPSGVKDDAKNVVEEFADLVAIHEQLIDAKEQYSHLSRLPELADSIAKATNAMGALLLEKRNLGTYFGEALSILWAEKLVDINKALDLISREINSLEIDESDAQSSVEQRHEEYLSLGGDKIESLKGKIKDVKDKLDSVIQVSSKYQGDCRSLSLNSELNEEVFLTNKSKAIENLAKIEEDTKQAQDRFGDVAAQLSEQQKNLNAIKGEILEIEARPDSNIDVRYQKLRDEMIESLGLPGEELVFIGELLDVKDDEKLWQGAIERAMGGLKTTLLVPQKNYSMVTRWLNVRHTGLHVRAQVVSQVRTDQRSTGFTEFSERGYLRKLIWKDHAYRDWLKSHLYNFDLQCVSGTDELDTTPFSMTREGLVHMERGRFEKKDQRNIDDRRSWSLGFSNKSRLALLNTDKGAAEHRLSELGKTLKEAREALNKNAEKAKIWERLSSFTWEQINAPYWQRRLESEQVALNDLEKSGGDLEVARSRWDKAKEHLKEIQESKGLLLTRKGSLEKDKSNAQELLNKHQQQAAAGMTDEIRQLLQSRVGEIRLEDAHRQSDFEKAIDSELDKIRSAKSTAENVANGIMGAFRGKDKWQPITVDWPSGLEGLQYYLEHYTYIETEGLPELIDRFKERLNKHATQSLARIKTRLESEREDILERIDTINRVLKRTEFKQGSHLRLGSKREKYPHVMEFERKVRSALSYATSDDHEVRFRLLSEVVDILDKASAPGTSTNEESKRLLDPRYQMSFFAEEIDSQTLEVRDVLESSSGKSGGEKESFAGTIVAASLAYVLTPDGYDRPIYCTVFLDEAFSNTAEAVSRRVLRVFKELHIHVNLITPYKNLNLARESARSLLIAERDPALHESHLCEVTWEEIDKRMAQQKRSVQFIDIAGEIELKDLGNPEVESSDV

SEQ ID NO: 31949 - protein, 421 aa, Alishewanella aestuarii B11
MSETNSRPAWGLLQQDIVELLRAKYWNNTKTLKGLLGGNKEFPIRISLKPPKGNAVLNDIKHFQEFIDSWRSFCEQIEYESLKVKVSWDTVKFRSLSEQKVPTSVAIPDISSIAQMLGSEQERQLIDWQNRVAFIFDSLAVELAKRSVHPIRSGYERELFSELIGNLEVLSDFSDSDLKLLVKLIPQLHKGMGRGCYLRALPVIFVDTKFIEKNLRVIESVTSAVLDCSVKEIGLLSWLDCRNKPKDWLLVRPLCKKTKDSLRGLPQLRLSSETLMDFELPAKNILVIENEQSCLSLDNIPDTIAVSGGGKNVSWMKASWLTSKRVAYWGDIDSEGLAILSDVRSKLSSIIPLMMDSDTVEAYRDRMVDEPESVTREPVALTDRELILFRMLRNGTFGCTRLEQERLPIDFVYEKLRLWVG

SEQ ID NO: 31950 - protein, 474 aa, Chryseobacterium sp. CF314
MNYEKALSLYKNDKTLQLLRAEHFPLLVSFFHLMFKQQDRISYLQTELQSILGDYIFSLQRLGIEDYQKAPVDYLQKWADQGYLRRYYERADEPMYELSPATENALKWLEDLNKQQFVGTHSRLIQFFDLLQRIVNTTSGPYERIQQLQEERRKIDQEIEQIRQGNYTKPSDTQLKENYFLAEETAKRLLSDFRQVEENFRELDSQTRQTIIKSNLAKADLLDNVFQQQDFLWNTDQGKSFKAFWEFLMSEQMQEELEELLDKINAIPAIVEIKKEQTVDRIKTNLVDAGDKVNRSNDGLIEQLRKFVEQKNLSESRHILQSIEEMESLLLEHKETLDQQVAWMEIDEVFKPSFTMDRPLFNPPVKVAFAATEIADGVATADTDLLFEQFYVDVEVLRNHVKTLLKSRSQVALSELLNHYKPTKGVAEILGYMQIATNEGKHFVNRDQFEYHIIENKSTGKTYRMQTPIIIFNR

SEQ ID NO: 31951 - protein, 189 aa, Chryseobacterium sp. CF314
MEYRYSASLIALLKGIVYSHQKETWENLLQYEPDVKKYFIPIGLELFLDKSEGYAFLRQKEWEDDERHFPRMTEKRSLNFMTSLVCIVLRKFLLEHDAQGGSVRSIISDQEIINRVKVFLPNVNDEAKQQEKINTAINRVLAIGFLRKLEDQEKNYEIHRIIKGFVNADVIDETLQKFRNYAAENQPKD

SEQ ID NO: 31952 - protein, 1134 aa, Chryseobacterium sp. CF314
MEELFDTHPEELNLAGYRLQYLEVLNWGTFNQVRWQIQPNGQNALLTGDIGSGKSTLVDALTCLLVPHHKIIFNKAAGAEGKERNLLSYVRGEFKKEKEEITKTAKKVYLRPDDHTYTVIIGNFYNQGYNEHICLAQFFWIGKEGKVEKLLIIGTIPLTIKDHFQHFGDINELRKNLRNTPGIQLFNDNFSQYSEHFRRLFGMNSDKAIDLFYQTVSMKSVSSLTDFVREQMLEKTDVKEQIDALLKRFDDLNKAHAAVVHTREQYQILKPLAEASETYETVTREIEDIEAMLEVMPVWFAERKWELLEQAIADAGQELSTAEQQLHTITQEIEAWEERRQTIVQDIASNRGTRIEQIAGEIKRHEQDKEIKQKEFDDYERLALQTGLASIKQESDFQNNIKRANESIEKCGQIEEKIREQRDNEVSELRKQEAEYQAERKELQSLKERKTQIPAWLIAFRSQLCADLRINEEDLPFTGELLKVNEQETEWEGAIEKLLRDAGISLLVPGKHYRSVSRYVNSNPLKGADGRGIKLTYLEADLNGNTRLLKELDEDSIAYKINIKPETPFYDWLENYLQRSFGDYICTDVDGLPHVPFGITRQGLIKSGRIRHTKDDRKRIDDRRNYVLGWSNAEKIKALENSVDKLERNIYELKSRLKDIEEKEEKNREQKQLLGLLLYVKDFSRINWQYHVAKIYELEQERDQLLNNNDKLAQLQHNKIEVDQQIIDGRTRQKQFTEDIGGFKTKIQNYREQQHHAIQQKEQLAPQLKEKWYSLIDEKLTGVKINLRGIENRQEEFRKQFQGENGELKRLRGRQAGHRTHIEKKMREIKEHSRAEYSEVTDNIDARTEYIKKFRQLESEDLKRHEERFKEELNKNVINSIAVFDSQLQKHEKDIKQKIRTINEHLSEIVYNAVQDTYITILMDATPNKEVRLFREELKKCYIHSFSSHNDLYTEEKYEQVKRILDRFASMENADRDWTSTVTDVRQWFEFNASERYRSDETEKEFYEGSGGKSGGQKEKLAYTILASALAYQFGLQFGERKSKSFRFVVIDEAFGRGSDESTRYGLELFKKLNLQLLIVTPLQKIHVIEGHVSSFHFVSNREGNNSQVSNFTKEEYEIERDKHNGIFPNTPEK

SEQ ID NO: 31953 - protein, 388 aa, Chryseobacterium sp. CF314
MISPAEIKKQALKWWKPLLQSHIQKEPFFPKIIDRIGKVKSAHITERFEILQKEIEELYHYSKNQTGKGYLVQTADRNFRRTGSHDLPDTIIFESLEDYLYFTGYQKYWKVFLKYYDTIISTIPVLKDWTLQHCLWLTDHHINWNDVLKVCRYFMETPRPNLYLRQLPIEIHTKFIEENNILIQSLLDFLIPDHVRSAKQKRFAERFFLRYDEPLIRLCFLDENPNPDFKFRDISIPLSDFETLEILVENILITENKMNFLTLPLLGSTVAIWSGGGFNISFLKNAAWLSDKKIRYWGDIDEHGFQILHQLRSYHPHAQSIMMDRTTFETFQNYAVSGARNKSQNLNLLSKEENDLFQYLKALEKNRLEQEKIPQVYIDRCLKNRIES

SEQ ID NO: 31954 - protein, 476 aa, Mycobacterium smegmatis str. MC2 155; identical to SEQ ID NO: 30530

SEQ ID NO: 31955 - protein, 240 aa, Mycobacterium smegmatis str. MC2 155; identical to SEQ ID NO: 30531

SEQ ID NO: 31956 - protein, 1115 aa, Mycobacterium smegmatis str. MC2 155
MRPGAGYRLQYAEIYNWGTFDGQVWRFTPGAETALLTGDIGSGKSTIVDALTTLLVPSHKAAYNKAAGADAKERTLRSYVEGHYRSERNEATGKSRPKGLRENRRTYSVILGVFRNHGHDETVTLAQVFQQRESTGQPYRFFVTATKELSIAVDFADFGSDLRELRKRLRSAGAEIFDEFPKYATSLRRLLGIRSEQALELFHQTVSMKSVGNLNDFVRDHMLEPSDSTERIREIISHFDDLTRAHDAVKRAREQLEALEPIADTAAKYDAALAERDGLEHERSAVRLFIAELRSGLLADEIGRLEADGAALWQQQDAAEADQRRLNHERDSLIEERAKAGGDRIGELERLAHEARAQAESRRQARTLFDSAVGEAGLTTVADEEAFLNLPTLVAAERTRLAAEKREVDAATVDAIGRERDCERKCTTLSAEIESLEQRTSNLPHEQVVMREELCAAIGLTPEQLPYAGELLDVYDERAEWRGAAERVLRGFALSLLVPQPHYDAVTRWVNERRLTVAGRGAKLVYERVAARRVRLQPAESDGLLLADCIEVREGPFEEYLRNELMKRADFRCATTLQEFRDLRRAVTREGQVRSGDRHEKDDRHRVDDPRRWVLGWVNERKLTALRDEFADLERDRQEAAAVAAALSARREVLQHRLDALVRIEGFRSWTELDADEAVSRAGAHDAERARLQSGSSRLEEITRALERNAEEAGVVAERIRQLTGQLATTAAAVQRAQQDRKRDQEFVTAQSPEQLEVARASYPALDRRLAASRPTRADDCAAAESALSEDLYRRIERLTRELGGYGQSLAQYMLEVLRRWPELRADMDATVEARGDFLAFRRRVATDDLPRFESEFKEQLNKNAIQELAGFNNWLSRQASAIDERIDRINEALGAVPYNPGRFIRLEKEPTTNQDVAQFRSDLRNLTNDALAVDGDQYSEQRFLDVKRIIERFRGREGYAESDRNWTRRVTDVRNWFVFSASERDVDTGAEWEHYSDSDGKSGGQKEKLAYTILAASLAYQFGLEWGAEESRDFRFAVIDEAFGRGSDVSTRYALDLFATLGLQLLIVTPLQKVHVIEPYVKAIGIVDNPTGTYSRLQTMTIEEYRARRNGTRP

SEQ ID NO: 31957 - protein, 386 aa, Mycobacterium smegmatis str. MC2 155
MWATPGDIAAKVRRRWDDGSLLRAYGEGEPFAPIEVPLRGPTPAQIGDDVARVRDWVTALDAGRHDDARYMLEWKSVGGKKFGRNMLPARAVICSYGQAWTLLGVTAAVGRFDELLASAHDHPRIRQWVIANPHRALALAADMPKLIAACEWLDRHRHSQRYLREISAPGVDTKFVERRRSDLAGILGVPSSAQGFLTELGLRSKPSLVRLRPAPSLGLPAPLSELAVRPDELAQLDLRPRTAVIVENEISYLSVDVPEAGVVIWGKGFDVDNVGRLPWLAGVRVVYWGDIDTHGFAILDRLRAWQPTAESVLMDRATLIAHRDRWVVEDRPARSILPRLSPEEQQLYRELVEDSLGDRVRLEQERIDWGWVEGRLKAIYQGRIDS

SEQ ID NO: 31958 - protein, 488 aa, Mycobacterium smegmatis str. MC2 155; identical to SEQ ID NO: 30534

SEQ ID NO: 31959 - protein, 240 aa, Mycobacterium smegmatis str. MC2 155; identical to SEQ ID NO: 30535

SEQ ID NO: 31960 - protein, 1118 aa, Mycobacterium smegmatis str. MC2 155; identical to SEQ ID NO: 30536

SEQ ID NO: 31961 - protein, 485 aa, Blastococcus saxobsidens DD2
MHYDDVAALQRHSSAWRLVRADHAPLIISFLDQVFVEGNIRGIAAGELADRLDDVLHALNEGHDPPLFPKPARAYLDFWAAPDAGWLRKYYLAGSDEPHFDATPAAEKAVAWCTSLRARSFVGTESRLNTVVDLLRQMVYGAEADPDTRLAELERRRQEIDDEIERVRRGEVDVMDPSAQRDRYQQFAGTARELLADFREVEGNFRALDRDLREQITTWDGAKGGLLEQVVDGRASIADSDQGKSFHAFYDFLLSPTRQEELTDLLRRVHELPALADGDDRLRAVHHEWLAAGERTQTTVRTLSEQLRRYLDDRVWLENRRVMDILRSIETSALQLRGERRIEVTVEIDALAPTVVLPMERPLYTPQTRVAVDSSDLQSGDDDFDATALFGQVHVDPAPLTAHVRRALLQRPQVGLATLLNHHPLEQGLAELVTYFSLTDGTFDVVFDDIPEQVAWTDSDGRTRRATVPRLTYARRAELPQSAPT

SEQ ID NO: 31962 - protein, 215 aa, Blastococcus saxobsidens DD2
MTAPPVRSELDLPLVATSLMKGVIYRDTHEQVWRHLLPLQSRLREYMSTIGLVPVIDEAEGYAFLRQRDDDAEGTDGARAGSAVPRLVARRSLSFHVSLLLALLRRRLAEFDATDAGSRLVLTREQIVAMLRVFLPSTSNEARLVDQVDQSITKVVELGFLRRVPGSDGAVEVRRILKAFVDAQWLADFDTRLAAYAAQLRHPDAAAEPEEGAQP

SEQ ID NO: 31963 - protein, 1127 aa, Blastococcus saxobsidens DD2
MTTPVHLATDETPPPEVPSGFRLDRLEVLNWGTFDQKVWTLRAGGANTLLTGDIGSGKSTVVDAVTTLLLPAQRISYNKAAGADTRERSLRSYVQGHWRSERNEATGTTRHVGLRAGSTYSVLLAVFTNPGYDTTITLAQVFWLKDGDGGQPDRFYVTADRDLTIAADFADFGTDVTALKRRLRGQTGISVQNAFPDYGRDYRRRLGIDSEQALELFHQTVSMKAVSDLNGFVRSHMLEPFDAAGWIDRLVAHFDDLTRAHESVVRARTQLDQLRPVLADADAHDRLGAEIAALDAQREALPVHTAQLRADLLARRIECLRESVAEDDRELARLTDDLGRHRRRERELIVERAGHGGDRLARIDELVDAEERALDTRRQKAATFADLLTAAGLDPVADEHGFSARRVEVRVATAAAESDAAEAQNRLRELAVDARGLQDESDDLRAELASLRQRTSSLPRQSLELRQRLVTELGIPAAALPFAGELIQVGAASRDWEGAAERLLRGFALSLLVPGEHYPAVSRWIDAHDLRTRLVYYRVAARAPTLPALPSADSLAAKLEIKDSAVRPWLEAQLAHRADHVCVDSIEAFQRTPKALTRAGQIKESGGRHEKNDATRIDDRRSYVLGWSNAEKIEALLSQAQQLQERLNRLADDRARSEAAYRTAAVRGRTLSKLDVFDDWAELDWQAVVRRIADLTAERERLLSASGELQRVDRELDGVRSAISEADDALSARQQRRGGHGSELADAEQRATAVAARLEDAGSVPAEHLDALAGRAAAHPAPTTVEGVDGLEEALRRQLTEDRDHRAKRQSGVESRLVRAMGKFISDHPVETSEMDASVAAAGEFRALHERLTGDDLPRFEATFKRYLNENTIRDIAGFLAELNKRSELISQRVATINASLVGIDYNPGRYIRLDTQLTPHPEIKDFKRDLRACTDDALADGDDQYSEQRFLQVQAIVERLRGRPGHGDVDRNWSRFVTDVRNWFVFTASERWREDDTEYETYSDSGGKSGGQKEKLAYTILAASLAYQFRLDPAAARSKTFRFVVIDEAFGRGSDESTRFALTLFTRLGLQLLIVTPLQKIHVIEPHVAAVGFVDNPTGNYSRMQSMTIEEYREQQALSRAAGDAG

SEQ ID NO: 31964 - protein, 401 aa, Blastococcus saxobsidens DD2
MAGSATRGTSGPGRRRSEWTTWSDVRDQLRRRWDRGDSLSAHAAGLPFEPLDLPIRGPGPRDIGDRFDDVRAWRTGWTAAPRGARVVEASIGGRLIGVNRLPSRVAIDSWDELISVLGVWRDVDTFDARLASARDLAPALVEWMTRSPMRVLAAGEDWDRLVTTVLWIDQQARPGSYLREIDVPGVDTKFVETHRGLLADLLESQLAPARIDATRPRSDFAGRFGFRSKPDHLRLRLPPEHAGPFSEIAVRVEELAHAPVGADTVIVVENEITYLALPPRPRTAVLLGGGYAARRLTPLTWLADVDLRYWGDIDTHGLAILDRLRAAFPHTRSILMDQATLLAHRTQWVQEPSPTAERLDRLTPEESALYAALVTDAFGPSVRLEQERVRMSLAERALRVD

SEQ ID NO: 31965 - protein, 509 aa, Bradyrhizobium japonicum USDA 6
MTLFRHLHDDAFLAFSRDHKHLYAACLLDLHERFFSGAPSFPTPQQVVHAIYDVMRANPVLWNEGDDFGSLPEMISARRRRIRKADVALASEKGDKALGLARQLYARLLVWGWLEEEEYGLRVTVDMAMGPLLVLQRLASLNKDLSQRFGGLIVQIRLNLEAVEKLRPEITDRKQREAALAVREARNQADQFTKSLRAILADLKRVRRTVMESKTVATRLEAFFEEFIEQLLLKDFESILTVNHPYRFRDAIVDLARRISYSPETMQVLAEEYIASSMAADIEDGRMAAADDLLAIESIFDQIGEMFDRIEAFRRQLEARVRNTIKYAERGGQGLVGRAGDLVRRLDALLRDGRHHKATIEWSIEPLRSPWSEHHQAPARQPRRPVEARELAEPPSDPLYELRKKLRLEYIARIAPRPEDVRRFLEGQVPPFATREARFMEIDTVDDFLAFDCARRYALTGEVPAQVAAGFELEPCPDTPPHDSEWLRCANFLVKRSGALRKARAAHAQ

SEQ ID NO: 31966 - protein, 212 aa, Bradyrhizobium japonicum USDA 6
MLSEFENVERSFGAEKAADLRKAQHFLLRRQFVFAGDPRTGTVYNTIMDGRFRDVVDGFFDSCGYRVHRDPEAQWAGIVAMDEDVPLPRMKLDETIVMLVLAAYWQQEVNVGAVEDRAVVVATLNDLFDRYREMAQHGGGGAISAARFRDILREVAQRSLVEIGDFDDEQQDCEIRIRPMIKLISGGDALQRLERYVRSEEARFPQPTGGEA

SEQ ID NO: 31967 - protein, 1144 aa, Bradyrhizobium japonicum USDA 6
MMELRHLTMVNWHLFDVADIDVTGHVGVLGENRSGKSTILDMAQVVLTGASRRFLRLNAVAGDSGKSRSGSKRSVVDYCLGTLGEDQRRRDEARTYIALGFEDTEDARPPVTIGMALEARKSDSRETVLALFVAVGTVLSSKDFIEQRGKSQFPAQWEDVRARIVAAVGEGSFVNHRDRASDYVREYMRHLLPHSSFGEQNASALQKSIVNAMTLDHNQTATQFVRNYILEDSPIGIKELRESIQTYHNISETIRKMRLRLEALRALRSVLAALEEALETKFREEWVAKRATWLAARATNLDFKTKRRTEMARRDAAAKELEFIDDDVKAIDKEIERLTAAIAEHDAKTGRKSLQQTADVAGQAAHRASADFKARMENIRRLEPLRAMCADGFEDFVPALERLLTATAGADIVGVSDEVTAAEKSFAASGAKWLPKIDEARQTIIAELSGLRGRRDEVLERIRQHAAGGARAYLGDDTELLCRRLRQEGMVPRVLCDIIEVAEPEWVGAAEALLGRDREAVFVDRADISAATSIFKEGRREFRHASLVSLNKLEQFRAKPERGTFPSIFRSQDPDAMAFIMRRYGNVRLADTLDQFNRPGRAIMKDGLYDDGLVRSHRWIESSQHKIGKAAQANALRSLQDQAEELGRIMTDKGKEAHAAEQAFAALKNICEGRNDLGACAAAFVAAQTEVAEAQARLDALDGAGDGGLREKKRAQQKLKEKRLEERKTQQKAFGEHDGEVRSAERRLGEGENVPGSELNLRVARSIYRKFFPLYSTAKGRAVYRDRLDAAAQKGFAEKHRAIAEKALKDANASDNERARIERRVRELLYDYFDQFGMSSQVGAESEPLREVKPWMEQLISDIESNELRQYERQAREAAEKASTLLRGEFINALTARIGKMERELQSLNRSLYAHPFHNERYSFHRTQMVEFQPILKIIEIAKTSPEALDMLFRGDVPDDFPHKDTIVALEALLEDPDKDFAQFEDYRNFYTFEIHMEDVATGRSTRWEQRRGTGSGAEQQVPIYVAIGASLAAVYGSAERRAGKPAGFALAMFDEAFSKMDGKNQRQMMSFYKNLGLQFVIAAPFEKRVAVLEHMDTIVEVDRIGEQSRATVVELKEKAKRELMAIDPDLMSEDELATRLAAE

SEQ ID NO: 31968 - protein, 389 aa, Bradyrhizobium japonicum USDA 6; identical to SEQ ID NO: 30454

SEQ ID NO: 31969 - protein, 450 aa, Pseudomonas aeruginosa NCGM2.S1; identical to SEQ ID NO: 30847

SEQ ID NO: 31970 - protein, 249 aa, Pseudomonas aeruginosa NCGM2.S1
MAGIFDRIAGASGADETDLTVEPMALDDSMDDEQPVMSAAVQVDERRTPQRVREAVQEMLKYGLLEESHKPNLYRSALSNIEAVDRILEPLDLAMGVDEVRGLVFVIVRQGEVAEEDDWSHPLVRRQRLNLEQSLLIAILRQHFIAYEQESGTGASQALVAVDELIPQLQVYLGELGSEAKERNRIITLLDQLKGHGLVSALDAHDRVIIRPIITHLANPENLQALVAWLREQVEGAATPVAGAEEDEA

SEQ ID NO: 31971 - protein, 905 aa, Pseudomonas aeruginosa NCGM2.S1
MGENAFTLLNRAAGLKQLNSIDEIFRELVLDDRSAFERAAEVASSFDDLTDIHRELETARKQQRSLQPVADGWERYKALQQQLHDKQTLEGILPVWFAEQGYRLWLAETNRLEKAQKQAELNQEQCRGQFDIQKGVVDQHRQRYLRVGGAEIDLLRARIADWVREFDKRRLKAEQYQRLAKGLGLVVELSAAALEENQQQITARLEVLAEQITEARQKAFDAGIVQKELDGRLQSLQHERAEVERRPGSNLPGHFHAFRGDLAQALCVDESALPFVAELVQVKPEELAWRGAIERAIGSHRLRILVPQGSSEAALRWVNQRHNRLHVRLLEVKEPSSRPVFFDDGYTRKLTFKEHPYREAVKVLLADNDRHCVESTEQLRHTPYAMTAQGLMSGKERFFDKQDQKRLDEDWLTGFDNRDRLAFLTEQIREVNEQLAPAKLALDAAQGDVRKLEDQASLLQRVEELQFEEIDLPGAERQLESLRAQLDTLTRPDSDLALIKSELDEAEALLDSLDRQRQQLIEQCGQLKIQFEQAASATRKAYRGAEKGLSDTQRELALAHFPTLSAAELGDIVELERKHTHELQGQLKALGEKLGDQKSELAKRMSDALKVDTGALSEVGRELVDVPKYLERLRVLTEEALPEKLKRFLEYLNRSSDDGVTQLLSYIDHEVSVIEERLDDLNSTMQRVDFQPGRYLRLVATKVIHASLRTLQQAQRQLNSARFIDDEGESHYKALQELVGLLKDACEHNRNQGAKALLDPRFRLEFAVSVIDRESKSVIETRTGSQGGSGGEKEIIASYVLTASLSYALCPDGSSRPLFGTIVLDEAFSRSSHAVAGRIIAALREFGLHAVFITPNKEMRLLRHHTRSAVVVHRRGVESSLVSLSWEALDEHHQQRIKAMHEVAH

SEQ ID NO: 31972 - protein, 113 aa, Pseudomonas aeruginosa NCGM2.S1; identical to SEQ ID NO: 30850

SEQ ID NO: 31973 - protein, 489 aa, Stenotrophomonas maltophilia D457
MKHRERISRYRHLREQPQWKLLAADHAPEIIGLLQGLLMDGERTLPSSVLNERLQRALDQLNGDELSRELPRTAQAYIAHWLAQGWLERRLPEGADQEQYELSTAALQAIRFADGLEQARVAATESRLALVIEQLSQLAAQTESDPDARLSALRDERDRIDAEIARVGAGRVIALDGKRALERARQIIGLADELTEDFRRVRDDFEQLNRDFRERIIDDEGERGDVLSQLFEGVDVIGESDAGRSFQAFWRLLNDAEQSAQLDAALEAVLARGFARRLDRNERNFLRGFTSTMLERGGQVHDVLQNFARSLRGFVQSRGYLEQRRLNQLLKQAQSEALALRDEFPAQRGIGRDLQLTTSRLRSWSQWKLHDPRSAQVDGNVEYNDAAAISLESVGDLVASSEIDFRTLRRDLHDLLDAQPRLSIAQALSQREAPQGLGSVIGYLSLGTRFGNVIAGEQELAEWRGGDGQVRRARIPLVWFTQERRHELA

SEQ ID NO: 31974 - protein, 233 aa, Stenotrophomonas maltophilia D457
MSWHEDPIDAPQADVAEDAYEAEPVAAVAQPRRGNDVYYLGDTGRLPLDARRALCQLLIGPSIDQLRHAKLWPALIRSEAAIRSSLADLFLELVLDRDSGVAFTRQADTEDVDAPVLLRTSPLTFIDSVLLLYLRQQLAEADARGNRAVVADAEMAEALAIYEKNLSTDRAGFNRRVASAVQKMKDNHILTRLSGQDDRHEVSPALKLLFSAEDVSQLSAVYRQLRETPAAEA

SEQ ID NO: 31975 - protein, 1126 aa, Stenotrophomonas maltophilia D457
MAISKHTPALFNEGLPDPRLQQFRMRRLQVHNWGTFNGLTEVPIAERGFLFVGRSGSGKSTLLDAMSALLTPPAIVDFNAAAREAERSGRDRNLVSYVRGAWADQQDSGTGEIATQYLRKGATWTALALEYRAGDGRVVSLVRLLWISGNGTSAGDVRKHYMIAERPFDIAKDLGGFDLDLRKLKQKLSDLHHFDTFSGYAERFRDLLGIDNEMALRLLHKTQSAKNLGDLNVFLRDFMLDTPKTFDAAERLVSDFAELDGAHQAVVTARRQVETLLPARAYYNDLKEMHRRRGDDEALKLGVDSFRESRRQALIEARLREMDVRDRGLLGEEAQRRAALDNHTERLAELELQRRQQGGERIEELEREQGRAEAERDRRQAKREQASLAAQQLGAELPDDAHGFAELVERAQNELQDRQRASSALDDAISDRLGGKRDDERRFGEVRAELEAMQRTPSNIPAPMQKLRARLAEETGIAEAALPFVGELIQVRSEEQGWQGAIERVLGGFALSLLVDDKHYNDVAEWVNRTHLGMRFTYYRVRRNDDAFAREPSAKSLLHKLELREHVFESWLRRELGKRFDYECVDAKQLRNVDRGITREGQVKHPGDRFEKDDRSAVGDRRRWILGFNNHDKVGAFEREAQELAKRIASCETDIARLRGQRDRDNERRLACHELVSISWNEIDIAAPQQRLTDIEATLRDLREGNADLAKLAKQIDAVRADIEQARRTYEDVRVERGQLVKERDRLDRARQQSRALVLPSLGQEQEAGLAERLQEQGPLSLETLEAHMRQVSNALNEQLSTSQQDLNRIENQLIGCFRRFIQQWPEESGDFTVSVASAEDFLARLERLERDGLPQHEERFFDLLQNQSKNNLLALQRHSAEARKSIGQRLDEVNASLEQVPFNRGTLLTIELSDRRLPEVGEFHLQLREVLAQQQTEQRELAESQFTVLRQLVNRLGSQEGEDKRWRELVLDVRMHVEFIGVELDAETRQQVEIYRSGAGKSGGQRQKLATTCLAAALRYQLGGADSQLPSYAAVVLDEAFDKADNEFTALAMNIFDNFGFQMVVATPLKSVMTLEPFIGGACFVEISGRHDSGVLLIEYDEEGKRLKLPERSRQQANEPEEAEA

SEQ ID NO: 31976 - protein, 489 aa, Xanthomonas axonopodis pv. punicae str. LMG 859
MKHQARIAGYRQLREQPAWKLLAADHAPELIGLLQTVLMDGERRLPSAVLHERLQRQLDALRADELSRELPRTAQAYLAHWLSQGWLERRLPEGAAEEEYELSRAATQAIRFIVGLRESSSSATESRLSLVIQQLVQLAGQTEADPELRLAALRDERARIDAEIERVASGRVAALDGKRALERARDLIHLSDELAEDFHRVRDDFEQLNRQFRERIIDDEGARGDVLEQLFDGVDVIADSEAGRTFEAFWSLLNDTQQSSQLDQALDALLARGFARKLDRRERAFLRGLTGTLLERGGEVHTVMQHFARSLRGFVQSRGYLEQRRLNQLLKQAQGEALQLRDSLHATTATGYTQPLSSSRLRSLSQWRLHDPRLTQVDGRVQAADAAEISLDSVGDLVAQSEIDVRSLRNDLHELLGQRPRLTIGDALQQRPAVQGLGSVIGYLSLGTRHGMVIEGQMETVQWEGSDGAVRRARIPLVWFTREKRNELV

SEQ ID NO: 31977 - protein, 233 aa, Xanthomonas axonopodis pv. punicae str. LMG 859
MNWSEDTGLYADEDTGAPAIDDRMPMAQTSSAEPRGELFLGDTGTLPFDARRALCQLLAGPSIDAQRHGALWPALLRNEVAIRQVLCELFLELVLDREGGVAFTRQADTAELESPTLLRSAPLTFIESVLLLFLRQQLAEADTRGERAVVDEAQLVEALSVYEKNVSTDRAGFARRVMTAIGKMRDNQLLSRLRGSEERYEVSPVLKLLFSAEDVQALVVAYRELREGEVALD

SEQ ID NO: 31978 - protein, 1340 aa, Xanthomonas axonopodis pv. punicae str. LMG 859
MNSQSNLSPAQPGASLFAETLAEQRAQQFRMRRLQVHNWGTFNGLTEVPIAQKGFLFVGRSGSGKSTLLDAMSALLTPPSIVDFNAAAREAERSGRDRSLVSYVRGAWADQQDSASGEIATQYLRKGATWTALVLEYANAHGQTVSLIRLFWIAGSGNAAADVRRHYMVAPRCFDVATELDGFDLDLRKLKARLGDEVAHFDGFAGYAERFRHALGIGNEMALRLLHKTQSAKNLGDLNAFLRGFMLDEPRTFEAADRLVEDFAELDGAHHAVVTARRQVETLTPAREHHAALMALRHSVGELRELQLGVDSYREQQRLALLEERLQELDNQDRGLAGEEGQRRESLDNHEQKLVGLEREQRAAGGEQVEELERERARVERERDERLRRRAQIEQACRQLGTALAAGASGFAAQIAHAQTVLDNGKHDASALDEAIAERMGARRDDERRFAEIRAELEALKRAPSSMPAPMQALRARLCEDTGIAEAALPFVGELVQVREDQTAWRGAIERVLHGFAQSLLVDERHYPQVSEWVNRTHIGTRLVYFRVRRNDELHSRRVDPGALPGKLQLREHAFTEWLRNELTRRFDYACVDNAAALRNADRAITREGQVKHPGDRYEKDDRHAVNDRKRWLLGHDNRDKLKVFEREAQTLAQRIASCDADVAALRKQREQDQERQLAAHTLVERDWDEIDVGPKLQRLSDIDEQLVQLREGNSGLRALGQAIDTARTLRDQAKRTYEDVRLERAQLARERVRLEQQQAACAGRAGSATLTPTQLQGLRERLAALTPLSLDNLEAHFRVVERGLAEQLTDSQGRDSRLSAQLLECFRKYCQQWPEDSCDFTVSLASADDFLARLDRLESDGLPRHEHRFFDLLQTQSKNNLLALQRHTAEAHKGIKQRMDEVNASLEEVPFNRDTVLTIEVGDRRLAEVQEFQQQLRAVLSHQQTEDRALAEAQFSTLRALVARLGAQEPEARRWREQVLDVRLHVEFIGVELDAQTRAQVEIYRSGAGKSGGQRQKLATTCLAAALRYQLGGEDGELPRYCAVVLDEAFDKADNEFTALAMNIFENFGFQMVVATPLKSVMTLEPFIGGACFVEISGRHNSGVLLIEYDEQAQRLKLPERSRGDEPAVADATDAAPSIEAAAESAGVQGAASADGMATNGVPMHTASPATEETPPAAQETQTGQRKPAVATTSKQNKTAKTASSTRAAAQPQAKRPKKSPSRTPALAGKPASNKRPAGVPAVSSGVASRSNVGKTTRSSKTPGKPIAATSASNATSRKVAAASAALKTAAAKPRATAASTGQPARGAGKTTSTRAVAKPSPATTRGAKAGAPQARRKR

SEQ ID NO: 31979 - protein, 335 aa, Ralstonia solanacearum K60-1
MRGCRNALDAALSDRGDAHDLVDAYEYAEKVIEDLTDGIDYFQELVRHLMQTASVQTQWSEFVEFLDRFQRDYSKQLTADNATLNRQAIVQKLERLRLVPEAKFKRMDEQLRDIAHWAVKEHVGTSVYDWLLTRIEDIVDAACQSKQPGFLKAMETYLKRVNGLALQSMMLRAGQTRHAYLAAIQQVAEAPKEQQDLLLMHIGQFLAPAEVRLLDPASFKLRTAAQRRKAVTISVRPRPSREERLAAAMARAEAEAFSIPNEEVAQLLRRDLRIFQHPIRVSALPTATARDALRAMQAVEAVRSEVGADLSIKKLPTRLENELYSGNDYEIDLKK

SEQ ID NO: 31980 - protein, 223 aa, Ralstonia solanacearum K60-1
MSLLSHINEQLALANIKPDRFREIINRLMAYGAIVREEDRVELLLYDDARRVEGLLEDYFDIAGFRLHHDSNNQFYRLYVAGAVVDGLPEDILEPTPSLRARVSPDFVAMALALRFLYQNKLNTGDIQPQGEALVSFEEIAATMQTQLKRPLPNGMGDKMALLAELKRHRLLSYTAEFSISDEDALLAIRPTILGIVSNDALSAALEAEGVVDQEASAEEADQ

SEQ ID NO: 31981 - protein, 1210 aa, Ralstonia solanacearum K60-1
MKLDRLVLVNWGQLQPGNYELGNMTLLTGPTGAGKSTMLDGLQTIMTAAYQGIVAYNPGQEEVQQNHRRGKSKRTLESFVVGAEYSLFSRPAGAQGYLAAVFRPGPEDGSAKMFTALVAASARVDGSGERRDAKLERLVLVIVEDAALSVEQFFEDLDQGICVPVENIVRQLKARYPKVVTYDDHKRDYLSGLYGRFRGRVSIPWDEAQNAAKAWSQSIAYKPIGSVHDLVRDDILEFDGKLLQESITRISDLMRQVTNLKVEGKRIEGTVTQLRALKEVIGKTAASFEEQVQYDLLLAKMHLAADDERVASEQGKIKHDRALVDQHKLKAQTEAQLKRNVDNGRIHIAAKLSGIPAHTEKKTLDERLVRATSAARAKLAELHAGLVAAAHIKNTGDAIVGRPVPEQFPRLRASVDVVAEALASTNVDRLVGLLNSVDDANRDDVLSVEKLLQLASAFDGIDAGLSQLHNSLVGTEGSVLMAVAAESASLGQRVDSAKKERDELADRKRRLAAGAGNYNRDTVLALERIRERFPDASVQVLCDLVEPVSEEWQSAIEGYMDGARFNLIVKPDWEARTIDFLKSWGSRSKVVQGKRCLERADESRVPVTSIIHELRTDHPIARAYLIEQFGPVVKVGDSEELRRTPRGLTKDGKGSSSMTMFICERRDFVLGRKARERALERTAEMLEAAEKDISKLASYQGDLEGFRKLLTTLKEPTFDAQPLAQHAADLDVTRRSLSQLNLTEVEQLQAELTRMEELIQAHDLAIDAAKETVTLAEQRITAAESAIKRINEGRDARFQERENQIRRLKHLCEANSEKTYTVMAQEVDDLIASHAYEIPAVQARVSHLHGQPDKLFADVREMLAEYNAAVRADERFQSALPHLTDAPSFDPCYGPLVLLGRSVSMLHNELESIGLYNNRAKVEEAERSFHDVFTKQFCVEIKSKVDEGVRMLRQLNVELEKLKFGTDRFSIDWSKWEPEFQEYYGFFSAVAELADSPEAVDLFGETELSPKHIEVRDRLVKLLLDQDQDRAGRELLRIADYRNYRRYEIWNDSDSGGRIALSTWGTGSGGQLETPAYIVRAAVVTNRLRLFDKGASLKLLVSDESFSRMDEPRARAVLRYLRDSMGLQLVSAMPTKHAGALRPEFDREFSFSRMSVPDNGEIDFVSECDERVFKKDRMRDVWEAQRQEVREQAKLLFDAAEVEEVTGAAK

SEQ ID NO: 31982 - protein, 381 aa, Ralstonia solanacearum K60-1
MTEQLLWLQSPPVQQLLNLLVDRMDSAEQRGSARTQSVALGERTWPALYKAQRESEKEELWGHAVELVRWGWLTVKPAAAIRSRSGYADSPRVMVANEVEVRRMVGRAQRVKSAAERWREAVRDGLQGTAEVKAAVCDFCIDMPDHTMAEVVERLNELPALAGKPMLLREVSSQLFWGMSKVLDKRQSLVAAVLGVDECPFPESPIQLQVFLPPAGLRGVLFIENLMSFERATRSTSSAFDGLALVYASGFKGSAQRLRTPDGCSLFYAARGGISQNLRDGFEAWLFGKDVIPAFFWGDLDWSGMRILSAMRTSFLGLTAWEPGYSQMLAALIEGKGHSPEAADKQGQKALNTSGCAYADAHLIPALQSYGRFVDQEQINP

SEQ ID NO: 31983 - protein, 387 aa, Selenomonas sp. FOBRC6
MIRRMKEFGWLDYEQRENFKIFILLPHYSSRLWGLFANLCEGRAVEYQRFAFTTYQVLSGEAAKVQPSMAVLEAERLAEEFVEELRILLNNIKSKMEQVSAQTSLQDVLSHHFVEYRPDIVDRSYHRLKTSDHVSRYRIRILQEVQEIRQNKERLRALCDDAVRRQLADSVEAAEYRMNASLQTIEEIYRGLDDMFAQIDRRHNQYVRASYERALYLQQAGSARMESMIAGVLLAIAEAREERTEVGGLPRLFRLQAMDMLLPASRYVPRKKRILEPAAATPVRDVDEALRARVRRESAERVARGISRQKIEAWILDVLGQRGSMEIEELLTILREVEEPDLLQLLYVYLYGHDELARYQLGKHKEIREQDTIRYSNRTVRRREKRK

SEQ ID NO: 31984 - protein, 205 aa, Selenomonas sp. FOBRC6
MKLELLNEEERIRIRNVIQSLLACNFLTREHDAALYIAARRYREELAEYFQVIGWEFRVDERYEIVWLLSTGMAHRRSLTLEESIWLLVLRLIYEEKRTGLNLSTFPMTTLAEIRAKYLALHLPDLKKTALQRLTQLSKQYRLADVLDRELSEEARIRLFHTLVLAVDGEELSELHKRLEIYRQRKEEDDEEAAENEGHQLALFR

SEQ ID NO: 31985 - protein, 1100 aa, Selenomonas sp. FOBRC6
MKVINWHYFDEDEISFGSATMLSGYSGAGKSTLLDALQYIFIGSQTQARFNAAATQEARRTLLHYLRGKIKAEGVQYLRADEFTSYIVLEFYDDIKKVSFIAGYVVDVFRDDSLQEEFFLLDRRALSEVEFRGEDGALYTREAFHRRYAHGSSVFETGKKQWQRRLMNRLGQLSARFLPAFSRALAFRPINQVRDFIYEYILLPRDLKLDVLREVFYSYQKFERDLQGLRAQKRELETLQEHYDSYCKWRDTACEQEFVLLSYRHMREAEKLDAGRMQKESCRERVDELQVRMHEQERLSERRNLEQQEAYAAWQGNDTKRRRDELLAAQKECEEKQRALIDSHRRLQQGLLREAERIAALAAYPAGEFYALPEGFAASLGELSQVLTHVAEDGVQSEEIGQLQGDLRNGGALLAEIGAGMQRGALLLEHEQTAAGARQEELRAEIEGLKRRQRKYGPEMTRLKELLEQRLAGRSGVYVLCEELEILDEEWRDTLEGYLNTQRFDLLVDESVFREALHIYETEKKQRHFDGVGLVNTEAEKKYLGEREHNSLASLLQAKNPLAQARVDHLLGTVMQAADEQEMITYRSAATKSCMSYKGLVARQIPRRFYEIPYIGAGAIERQLEIRQRELEEVQQRLAALAEEASRMQTFADLLHEPLHRYGDFAEQLGVLSELEACAAELARMAEELSSMDLSEAERLKAAYEEARQRAEEAARACSETTKEQARAESALDQAERALPLLARAEEESGQAVRAWRDAYPELSEAAEARLAALMQEAHGERSMEERLQSYDSSRRGNETRRDNMWQQLLVARERYGLEHGDTGHVYDPDHAYYAQIHARLAATDIPAFEEKAREALAQSEMEFKAHFIFSMREAIESARHEFRDLNYSLDQFQFHKDKYSFLITPSAKYKPFYDAVMTADWEMAGGLFAETDAAANEQAMELFEKLVKGTPEEQEEFSDYRRYLDYDIRITDTAGQSYLYSRVLRQTSGGETQTPFYIAILAAFQQIYNDKTIRLTVFDEAFNKMDEERIKSCIQLIKRMDMQLIVAVPDEKLAAIAPLMDQSIIVTNAGNHCFTDELGDVRTWEKGMTHEANREQGTL

SEQ ID NO: 31986 - protein, 411 aa, Selenomonas sp. FOBRC6
MRQIESRAHYEREILTILLEKYERSRAAVGAAGRRPQFRLRKSPLASAYADELDADRREAIEAAAEELERQGMISVVWERHGTGQIERILLAADAAQLYERMGRTMPLMRVEEYRADISTLTLSAAIWVRRCCNAAHTILSENKIPSFLPRENEIRRDLIRAILSLPVVGENAVPKRVFSQRVFGDSKYFERCIEAPLLILLRRFAEEPCETDAAYLDMAGISGHHGKVWIAGRMDFSLHGRGYMLADFAGGIELTYDTVAAMEIDALPPSILTVENLTNAEALAQEKVDRLLIYTAGFPNRTIQALLSKIAGKQLPTVRHWGDLDYGGIRIFEYLRKHFFSHLMPYRMGVEELRAHRAFAQNLTDAQKKRLKELLRREAFALWHELIRAMLSEGIWLEQEALLWENDMTS

SEQ ID NO: 31987 - protein, 468 aa, Lachnoanaerobaculum sp. ICM7
MNIFDEVDENLFRPLTGTNKRKYVDILALIWEKCKRMPMYAIEKSTIFDMAEEYLLGLDEKVEPDMEEQEYTSGNIADMRTISGSFIRRLRDTGWLLEKPGEYEDEDNLAIHYKVVPILKSFQEIISPTIITYKGKLFKIYSMFEHISEQGSPYEGVLKEASEDFDNLNQALRTLAASIEDHINDLTLGKSPEEILDFFEKYEEKIVVGSYHRFKTNDNLFYYRSSLYESLDRCEDNLFDALVLDYMDTERVERDEAGVKIKELIQKLRMDIEEMEAIMRTIDDRHILYRTRAVQRAQFLLLSDGSSKSKINNILKFYASQINSKEDVYDEDDSIASDIFQIFVQNFFDCNSLSTPVKKRKPTAIEFVDIIEELDQDIIDEKNRKMMEYIKNALTSENVNRFARDILNENHAVQISSVFENDPDTLIKIIGLYTYSKTSEREYDIRLRDNVVESNGVRFKDFIVEERR

SEQ ID NO: 31988 - protein, 191 aa, Lachnoanaerobaculum sp. ICM7
MATDIKEEIANYLLNNCFLMGTVDTTREKYYYVINHEESFRQIFLPIGYTLVIHRNLRVVQLINNHGSGRIALRKYESIILLIFRLLYVEKRESLSTNEDRIYATVEEIKNEYEKLNLPRKFDRAFLEDSIRNIKRYNLVQVADKLVDMDARIQIYPSVMLAMPDSNISKAYDETVKLLSQYENSEEEDEE

SEQ ID NO: 31989 - protein, 1109 aa, Lachnoanaerobaculum sp. ICM7
MIRMTRLHLINWHNFQDDIIDFKNITYLLGVNAVGKTTIMDAIRYCLTTNKDFNTAGNKKSGRTLLGSVHQKQRAEDSYLRPGHTVSYIGIEFLDEAIKKTFVIIARVESETPKQDLRGVYQDWYITKPGYSLLDIPFFVKNKDGKSPASREAFKLDNKGMDRASNQADARRKICRMLGIGEADSPIGKKFNEVFHMGTSLEDIKDIREFIYTYILPEPEVNIDFLQKDMIELERLQEILQEASDREALLKEINEKIKNARELLVKVKINEILVTYANLQGNIEETNERKYLIGEWEVSLSLFEEKLTELSGRESKASELLYEAQRAAENNAENKEMLSLESENKNNKVEEKRLTEEAAKFDNVAKDLFELKDKLNKLGFIFDIDNCIRDENCFEETKIAEIKRIAKIFADMEEQIKNHDAKIRTDIAKLNEEGNGLSSKIKSLESGVMCYPKEAIFVRDKINEALSEQSKKADARLLCELLYMTDRSWQDAVESYLNTQRFNIIVEPDNYILAKKVFISLGDKVNGIGLIDTRKIKNVEYKTEKESYLGDKIESENIYAKAYARFVMKDVICCENSDDLEKFSKSVTKDRLRFQSFCLQRMAKREHFIGVDAIEKQLKAAKKELVDIQNSLKELEDAKKSFDLVYNGYTKFRAGDGFSKLEMYCESKKRAKELGIKIADIAKKIEEFKQNPILLAMYDRVKECKKNVNDIRDEITDIKAKKQNISDNIRKSNLLIEELEKNFVELKIVYENSIKGYSEFALDVEKKYLNERKSKKSSAIAYNFSNRMAQDNIALNSYLNQELVPLQQKYTATYTCDYAIGLEGANRCMQEYLTLQNIELERHKNELAQAQIRCKDRFRKEVLFRMKDDILRARQQFKQINRVMENLEYGEESYRFGIDKSKDKELGLFYDIIMDKDNQQIDRENDMLAYMAEVNKSEVFESQIDDFMSRIMIDVEEHAKQNLTGQKSKAKSMGMYVDYRTYLDYDIIIKNSVTEKEVALSKVSGEGSGGENQAPFYVAICSSLLQIYEQSKEESMRLILLDEAFNNMTSDRIEPMMNMFKKLNLQLVLIATAEKATSILPYCDITYSIVKSGNRNAIRAFERLEDGLR

SEQ ID NO: 31990 - protein, 403 aa, Lachnoanaerobaculum sp. ICM7
MDYGKDILNSLVDMYERREGYIKEPSSLRAIQIDIKKNYPAYADRYNHNAYKDINSAIEKLISEDVIISKLESTGSYSKVRLNIDRIADCYKKLNRKSIPEQCEYIKQILSSFADSKYRLLNNIISDWMNLAVNYRKLPYDLKYDGKRLKDILTILEAVFKIEQESYIRNFSTAVFKDSKRFQKEFKSCIESILFDYTDDPIEKDKILEYYNLYENPTYVYIKGDVIISFENSTIYASELPDGIALSNASLKRIKNIKVLTKAVITVENLTTYHDENKKEAVYIYLGGYHNKSKKELLEKIYKDNKSCEYLHEGDIDIYGFLILENLKEKTGIPFRPLLMDVNTLKRFYEAGIYKELNVSDIRMIEKNRENLKEYSEVLDFMLLNNCKVEQESLRAVRLLENS

SEQ ID NO: 31991 - protein, 489 aa, Stenotrophomonas maltophilia Ab55555; identical to SEQ ID NO: 30775

SEQ ID NO: 31992 - protein, 233 aa, Stenotrophomonas maltophilia Ab55555; identical to SEQ ID NO: 30657

SEQ ID NO: 31993 - protein, 1126 aa, Stenotrophomonas maltophilia Ab55555
MAISKHTPALFNEGLPDPRLQQFRMRRLQVHNWGTFNGLTEVPIAERGFLFVGRSGSGKSTLLDAMSALLTPPAIVDFNAAAREAERSGRDRNLVSYVRGAWADQQDSGTGEIATQYLRKGATWTALVLEYRAGDGRVVSLVRLLWISGNGTSAGDVRKHYMIAERPFDIAKDLGGFDLDLRKLKQKLSDLHHFDTFSGYAERFRDLLGIDNEMALRLLHKTQSAKNLGDLNVFLRDFMLDTPKTFDAAERLVSDFAELDGAHQAVVTARRQVETLLPARAYYNDLKEMHRRRGDDEALKLGVDSFRESRRQALIEARLREMDVRDRGLLGEEAQRRAALDNHTERLAELELQRRQQGGERIEELEREQGRAEAERDRRQAKREQASLAAQQLGAELPDDAHGFAELVERAQNELQDRQRASSALDDAISDRLGGKRDDERRFGEVRAELEAMQRTPSNIPAPMQKLRARLAEETGIAEAALPFVGELIQVRSEEQGWQGAIERVLGGFALSLLVDDKHYNDVAEWVNRTHLGMRFTYYRVRRNDDAFAREPSAKSLLHKLELREHVFESWLRRELGKRFDYECVDAKQLRNVDRGITREGQVKHPGDRFEKDDRSAVGDRRRWILGFNNHDKVGAFEREAQELAKRIASCETDIARLRGQRDRDNERRLACHELVSISWNEIDIAAPQQRLSDIEATLRDLREGNADLAKLAKQIDAVRADIEQARRTYEDVRVERGQLVKERDRLDRARQQSRALVLPSLAQEQEAGLAERLQEQGPLSLETLEAHMRQVSNALNEQLSSSQQDLNRIENQLIGCFRRFIQQWPEESGDFTVSVASAEDFLARLERLERDGLPQHEERFFDLLQNQSKNNLLALQRHSAEARKSIGQRLDEVNASLEQVPFNRGTLLTIELSDRRLPEVGEFQLQLREVLSQQQTEQRELAESQFTVLRQLVNRLGSQEGEDKRWRELVLDVRMHVEFIGVELDAETRQQVEIYRSGAGKSGGQRQKLATTCLAAALRYQLGGADSQLPSYAAVVLDEAFDKADNEFTALAMNIFDNFGFQMVVATPLKSVMTLEPFIGGACFVEISGRHDSGVLLIEYDEEGKRLKLPERSRQQANEPEEAEA

SEQ ID NO: 31994 - protein, 450 aa, Pseudomonas aeruginosa NCMG1179
MEDALQALSEMLAAYASQDLYEIDPDATHIQAGRELREWIKRRLVVEREGRIYATDALESAIQFVDSLDSRIMTSTASRLSVVQREIENLETGLNPSPSGRIASLRRRIQDLEHELAQVEAGHVVVLDEAQAIEGIREVYNLATSLRADFRRVEDSWREADRALRQSIISEQSHRGEIVDRLLDGQDALLNTPEGRVFESFQQQLRQSAELEVMRERLRTILRHPAVPKALNRPQQRELRWLALRLVRESQAVLQARARSERDVRGFMKTGLAAEHHRVGQLLNDFFNLALSVDWQRQAVRRSTVRLPPVGVAITGVPAIERLRFKTLDDDDTGELDLSLKPAGLEQIDDDFWDAFDGLDREALIHDTLAVLVEQGRPVSLGELASLLPPAHDLETFALWLAMAREAGTEVLTEERQLVELVDEDEQRWRFNLPYVGLDHEALKDIDWEL

SEQ ID NO: 31995 - protein, 213 aa, Pseudomonas aeruginosa NCMG1179
MSAAVQVDERRTPQRVREAVQEMLKYGLLEESHKPNLYRSALSNIEAVDRILEPLDLAMGVDEVRGLVFVIVRQGEVAEQDDWSHPLVRRQRLNLEQSLLIAILRQQFIAYEQESGTGASQASVVVDELIPQLQVYLGELGSEAKERNRIITLLDQLKGHGLVSALDAHDRVIIRPIITHLANPENLQALVAWLREQVEGAATPAADGEEDMA

SEQ ID NO: 31996 - protein, 1101 aa, Pseudomonas aeruginosa NCMG1179
MKQALLWRDSETFILTSIELYNWGGFQGYHRAEIDPSGTAVIGPTGSGKTTLVDALMTLLCANPRYNLASTGGHESDRDLVSYVRGVTGPGDGGIEQSHIARQGKTVTAIAATLERDGAQVRLGAVLWFEGTSSSASDLKKLWLLSESPEQTLEHWLSQHHAGGMRALRQMEKDGTGIWPYPSKKAFLARLRDYFEVGENAFTLLNRAAGLKQLNSIDEIFRELVLDDRSAFERAAEVAGSFDDLTDIHRELETARKQQRSLQPVADGWERYQVLQEQLHDKQALEGILPVWFAEQGYRLWLAETNRLEKEYKKAELDQEQCKSQLEAQKGVVDQHRQRYLRVGGAGIDQLRERIADWVRECDKRSLKAEQYQLLAKGLGLADELSAAALKENQQHIAARLEILDQQITDARQKAFDAGLVQQELNGRLQTLQQEGAEVEKRPGSNLPGQFHAFRSDLAQALGVNESALPFVAELVQVKPEELDWRGAIERAIGSHRLRILVPQDSSQAALRWVNQRHNRLHVRLLEVQEPTSRPVFFDDGFTRKLTFKEHPYREAIKALLADNDRHCVESPEQLRHTPHAMTAQGLMSGKERFFDKQDQKRLDEDWLTGFDNRDRLAFLAEQIREVNEQLEPAKLALDAAQGDVRQLETQASLLNRVKELQFEDIDLPGAQSQLESLRTQLATLTRPDSNLAMIKVELDAAEALQESLDQQLRQLIEQYVQLKTQFDQAASATRKAYNSAEKGLNDTQRELAQAHFPTLTADDLGDIVELERKHTRELQGQLKALGEKLGDQKSELAKRMSDALKVDTGALAEVGRELVDVPRYLERLRVLTEEALPEKLKRFLEYLNRSSDDGVTQLLSYIDHEVSMIEERLDDLNSTMQRVDFQPGRYLRLVAGKVIHESLRTLQRAQRQLNSARFIDDEGESHYKALQDLVGLLKDACEHSRNQGAKALLDPRFRLEFAVSVIDRESRNVIETRTGSQGGSGGEKEIIASYVLTASLSYALCPDGSSRPLFGTIVLDEAFSRSSHAVAGRIIAALREFGLHAVFITPNKEMRLLRHHTRSAVVVHRRGLESSLVSLSWEALDEHHQQRIKAMHEVAH

SEQ ID NO: 31997 - protein, 483 aa, Phaeospirillum molischianum DSM 120
MSLFGHLDDTAFLIFSRGNRHLYAEAVLVVYRQFFSGSRIIVPLRDDVVETLARLVRQRPELWQDPEEIEDVPVGRGRKPLPLPTDEIGRKAQHVYGRLLRCGWIEEEPHGFNAVVEMPSAAMALADQFDAIERGLPQLFGGVVVDVKSSIEAIALNPSANALGLPEAAANAVRFTRRLRAILSSLRAVQRAIMASPDIKSRLDTFFEDFIGRILIADYKATFSYAQHPLRFRADVARMARAYATNVALVEDIAQAYVKNGVSPDVASARREVFGQLDTIAEIFEGMTSFVSRIEDFRTRLERRLRNTIRYMDRSDDSITTRLATTMRRVDGLRTRGEPHGLELEIPTLLAVRPRLFSPDGFAEPRESKAPIKPRPVQRGEADPVEDFRDLLVEAFEGMLEPDEATVAAFLDRSIASDRPNEGRWLCPDDLAGFAAFDALVERLNEPGGGEIDGRYRIAPAEGRHASAWIDAPNFTITPAEES

SEQ ID NO: 31998 - protein, 242 aa, Phaeospirillum molischianum DSM 120
MPAILAELTTFEEKVAASKGQAAAERAVGTLRRALNVLLDRQFIYNGDRGMAPLYEALLRPDVRQIVEGVLDALGYALVVETTDQWIGVVPSEGGELHGARLRIDETIILLLLGLVWQEGMNTGLSEDRATVPTTSEEVFARHAAILGRERIPRARFQDILLDLRRRALIEIGEEDPETRDMILRIRSTIRLVSGEAQVQMIERFAQETDRRLDGLDREAARREAGLEEMPEDEALDEDGEV

SEQ ID NO: 31999 - protein, 1152 aa, Phaeospirillum molischianum DSM 120
MYELVNVALIDWFLLGRQDIPLRGAVGVYGENRSGKSTLLDAIQTAMLSNDKNALQLNAAANPEKKRKNRRSVHGYCLGRLGGAGEPPLRDAARSHIALAYRDSIDGRYVSTGLIFEARQSETREETTARWLVTGIKVDSADLVLSGPDGDVARTWPELEAHLEARCAAEGGEVRVYMSPSEHIGDMLHWCSQSGQHGGIDQFRRAFANAVSFETIDDESQFVRTYVLDRDAISIRGLRESMRNYREIAETIRRLLQQVEDLDAILAAAHRHTALVEEKYHRAWMMRRAKVLLALRDVRKHRKALRSAQNDVARLKRIIEDCERQSIELRDEKQGLERSVRSSEVAGELARVELDLEQKKGQLAEVMAPVRHWELAVTRAASIPGQTGPALDILRERAPALLTALNTLQRLSGADKLPVWPVDPDALARIIDQMPDLDGLCRTLGDLADDRLRGLGTQEIEDLHRRLEAIEKTGSAISSETGAFLFDLEAEGFSPKLVCAEIEMLDPDWRDAAETILGRDREAVVLPPDQARRAIALLRERRHTGRYHGCRVVNTTRIETGRSPPGSLASVLRARNPLVAAFIVHRLGNVRLVETEAELQEGGRAVTKDCAYCDGLVTEIRQVGERKIGADATGALRRDLESRLRVLLSEQSETKDLVHGLRSLAERLTPLAAARTHGVGLVDAVFAYRDKLRQIEGLRGQIKRLQDYVHPEISRRVAEIDSDLAALALELSGDPDGADPDSRKGAKRLLDDALRAEGTATTGCNSGLPDLIVALNFYREERARGIFAQAMPLWIAERARSRGALPPIVRSCDERLTVLAEEIPRANKAVFAQIFEFRRTSQRDLGFTIDSSIGEEIVPWASRLRNDIADKDLAQHRRRADEAVDEAQKLLKGNFVNMLRDRFERVTNAISMLNNVLRQHAFHNERYRFEVEPDADFVGLIDLVVAATQDEMILLPLFGGAEIEKSLHAESLKMVEAILMEDDLDYSRYEDYRNYFRFNLVMTDIETGKATTFAHRLGVGSGAEKQVPFYVAIGAALASAYHNGLYAASKPGGLGLALFDEAFMKMDPKNQREVLHFYREIGLQPVLAGPKGGKLFMQKFMDTLVKVARPSYRRMAITVTHPGTALKEALMTEDPSEWSRETLERLYSTLRP

SEQ ID NO: 32000 - protein, 375 aa, Phaeospirillum molischianum DSM 120
MAKVYVVTADQAFDHFLSAYERKPDRTRDVHVYPDYHGMGVDRAGERFNVRMVEASNFNRITETGEKVPAVELTWEPFPAKRYIARVTLRDAKALYDHLKRQPPEQPALSPAVQAVLAEAAPVSDGERAGWIEIARAIEGDWPPSKLPALVAELKRIRSEPTDRPAFIASAAGPLASSKLLDRLPRAALRRIGLSLEDYPASPVVLLTAGVAVPEAVVLVENPRAFERAFVATRDLPVAWISTHGLVAMSVVRALQGVWYGAPVDGTPPPLDALLGAERLFYWGDLDAAGLMIFAEARKRLPQMSLSALYRPMLALLSEGGGPPYAAVTDKAGQRPWTSDDPELQALLDACASSCIDQEWVSPQSIRDLCTQGFC

SEQ ID NO: 32001 - protein, 480 aa, Arthrobacter sp. Rue61a
MSSADAISARLRDLEQLTRGPAWALTRSAPWVIAVLQASFTRTRPQLPLEEFHADVDAFLEQLRRQDPALGGQQNGKLFGDEWTRKQFLTRRNQSGQIVYEVTEPAARVLAFLDSLSSERSTLNGSRLGTLLGDVEKLANETNPDQSARLEALEEEIQERQQLVEDISSGEFDGLLDDEEAVEAAGNILDLAASLPADYKKMRDRIEELVGELRNQIIEESLSKGATMAQVLEADKRLRQSPEGRTFRSFTAFLEDPQQQLRFRSAIGEVLSRQFADDLSHEDRETLKNLVAELRTQHSQIQRIYGKLSESLNTYIQSDDVRQSVSLRKVLAEAEQAIRSMPYERDRPGLVRGPVLFNAGFESLAMVKLFDPDEFATPPRLADPIAFSDSDRVRSARTGKAKPAVVRAAMAGAATLGDAWENLPAEERHINTVRTLLSMALQTGAAFDRAAWEHIDFEQIDGSIRTAYLPVVSLNEDSDD

SEQ ID NO: 32002 - protein, 300 aa, Arthrobacter sp. Rue61a
MTEEITTTDVTEAEQVTEAVAEVGVEAEPAPEVSHADPFRITPRDTFVDGAALFPGDTGVLPMKVRHALVKLLKGPYIDGGRDEKLWTTLLDNQLILRSRLSELFLTLQLDHDRKIAVLRPVDPEVIGASSRSSILRQQRALSRVETIVLLRLRLLLDRHVTAQTDPTITREEISDLVANYTPAGQQDALRDSDVVTRTITKLLARQLILPTPLDDTYTISNALPLALPFENIGDIPAQIEALIAVAADESGTEPLLDLDSSDSNQPNPSGDDVDDDPEGDDRADVSTAADATTTDGTQK

SEQ ID NO: 32003 - protein, 1159 aa, Arthrobacter sp. Rue61a
MTIASMLPLGELTNPGQMRLALVQVVNWGTFHGAHTMHVDRRGTLLTGNSGVGKSTLFDAMLRVFDARPRSNEAAAQRSGGAVEDKRTTFTYMRGKVGDKAVGDSSASAFQRPGATWSAVALTFDNAAGTKVTVSALFDLPKNGTESSVGRFYVIDSKPLDLEAIEGIAQKRFTKGALESIFPDGQVFDVHKAFAERFRRLLGINSDQALPLLRVIQAGKGLGGSVNTFFRDQVLDAPATLAAADDVVEEFSNLMSIRQRLEDVRQQRDQLAPVPGLNKEYAQALLDANRLRELAGEEFEAYKQQLAVTVHAKTLARFKELAQSKAQELAAERTVRDALSKDLRDLELDYNNRGGNAISAIEQSLENAKVGLKLRQQVEDSAKKALADAGLNLEWSAEGWDQAHEQAAARSAELKDDSEALKELRFEAFDGHATRKRELAAAQQELLSLRSRKSLLPPSSIENRAAIAAATGVPEERMPFGGELIDLAEGQDQWRPAAERALRNLATTLLVPGEHFAAVTRYLNDNTVRGALRAVDVSKPLAGGALAVEDVSDGDLLTKLSILTSGANADAGEWIRERIALDFAYPCVEDPDELASMDKGLSLGGVVKRNRHTVEKDDRFTSRQDYVLGFDNASKLELVAARVGELENELVKAAELAQSREDSHQGMARQLEALRRVAEDERPWEQVSAAVAADELARIEQRLTDALAAQADLEPLRANIEAVREKHQSSTGAAAVLQSEYKALDHKMTTADGLLDAARLKLEQTPPSASTVTALEPYFVGAAEVSELYELDNLANSVRNKLLDELHAAESRGQATAERLTRMFEAFVRDWGSAISADHGTSIGAAGDFESRYHAIVSDGLPAQEAEFRLFFNQRTHESFSTLLHLLDEERRSITSRILPLNGILSQVNFHEGSFLELDIKQTLPATAKQFKDAIQNALKAKHTRPSRAAAAGSTAEIDDDAELTARYKSLETLVKRLGSQTPEDRRWRAEVLDVRGHLFIQCKEHREVAPKSGKAGGSGKAGKKKTDVFMHADTGSMSGGERQRFTAFIMAAALSYQLGIAEQGFTTYGTVMMDEAFVLASEEFAGAGIKALHEFGFQLLLAAPENVIDLSRHLGSVTEILRDKRTNRSGVLTAPVIAGPGEPGAWRSEANPVDIVLR

SEQ ID NO: 32004 - protein, 491 aa, Mycobacterium vaccae ATCC 25954
MDDNSTLSAVDLLELNRDLQTSPAIRLLATTNLSLYATLMERHLAEGVVPETELVVRLERDLDDLDLGTEAQSGLALIKSWASQGWLHRIVDRRSDQNVCYLTQDARRTLDFLRGMRRQDTIATGGSINGIASRLKQVAIRVGNDPARIRKSIEAEIQALHQELERLDAGSAPVHEDADLTDAYDEARAIALQMERLITDIGQYGSMIEQATAALDEPIDSNVEYRDRQRQMYADYQAAWDSQGRDSHRAFLRMINDPDQRAEFEADVAAVAEALPALDPALRKVMAGFFELVGHQIDEVERIQQRCAQRVKRFTAFGTLEQSRGVARQLNEAIGAARNLLKSSLIDSRLDIELPLARHAISSVGALSFKIGDLSSPKPAKAAEGEVDLASFAALTTQVDAPAMSDMLNAAVADGPVSLPEAVAMLGRSGQGAYLGHVIVLWSWALKQPNDAETATAASTTVRFRSLDGRDREIAVPDLKFTEPISVGASA

SEQ ID NO: 32005 - protein, 230 aa, Mycobacterium vaccae ATCC 25954
MTTEHDADFAAFSALPEVDQNARPPHQRRPRFDGDVSELPDRACWALQHLLTRRYISAETDSDIYAWVLEYRGQLSVRLSELDLILRVVDGTAVAFIEQARYESAKGIKLLRREPLGTYDSILALHLAQMMRAAGGQSVLISREEMHGLFSGVLNDTDRDAVTFTGRIDAAIARLTGLEILRRSRDDEDSYTISPVITAVMTASVITELQQQFELLQGGATPEVEVALDD

SEQ ID NO: 32006 - protein, 1120 aa, Mycobacterium vaccae ATCC 25954
MTEQFHLSRLQVINWGVFDGYHDIPFSEGGALIAGASGSGKSSLLDAISLGFLPFNRRNFNASGDNTAAGSSAGRRTVDKYVRGAWGQRSDGGTSRVMYLRGDGTAWSAVAVTYSSDSGRTVTGLVLKWLTGESRNDSSSRFVLGDGDFDIEDVCNRWAAGRFDTGVFKDSGWRFTTKVESQYLAQLYATIGIRASDAAQQLLGKAKSLKSVGGLEQFVREFMLDEPESVTRLPEALKQIDPLVEARELLAVAQKKRKILGDIEKIQQRYASESTDLGIIDLVDLPMVRAYTDHVRVAQCPAQIEQLDTTIDQLDNEYEDVTRSLNLAKAEADSLNAQISGSSASIGPLQSQVTAAETEAEQISRRRGAYEDMLAAQGLDIPETAEDFWNQREELLAEATELLAKVERNREASTDAEYAQKSARLVRDEAAKELKRVEHVGSALPEFALTMREQICAAVGVEAADLPYVAELMDLRPDQTRWRTAVEKVLRGVGLRLMVPDQHWTKVLAFVNETNMRGRLQLHHVRARLLGAEPVDPEPNTLAGKLFPVDPAHPCAAEAVDVVSAAGDHVCVDTPEVFARFRRAVTDTGLYKDSDRLAIKDDRRPLKQSEYLYQGDVSAKINALTVDLAAAEEAYQKARRVADDIAAQRQQWRDRAAACKAICEQFPQWSQIDTETADGHADRLREQYELLLADHPDIEALNARADECWSQIQKLMTRRGAIQTRRDDLDGRRTRLLELAERLQPAFVSEPLTELLNRYAGQLPVSLELLDPEPHRDALFGAIKKEREQLRESRRRSYDELARILNTFDTSFPDAVPNDSENFDERVHDYVALCRHIDERELPEAYERMMRLVTEQAPDAILTLHRVAEQEARRISDQIARVNTGLGAVEFNRGTRLTLRATPRTLTAVSELTEIVRAISRRIAEVGLGDKQAILDQYADILRLRNRLASTAPEDKAWTRDALDVRNRFTFDCAEWDVSTEELIRTHSNAGDNSGGEQEKLMAFCLAGALSFNLASPDSTDNRPVFAQLMLDEAFSKSDPQFAQQALQAFRKFGFQLVIVATVQNATTIQPYIDSVVMVSKTEATGRNARPVATVATRTISEFGQLRKQMRADAKVPAGV

SEQ ID NO: 32007 - protein, 361 aa, Mycobacterium fortuitum subsp. fortuitum DSM 46621 = ATCC 6841
SISGIAAGLRRVAGQVSNDPDRIRADIEAEMAKLRDELEALEQGQRPEPDLVDAEDEARAIALQMEQIISDIGQYGAMLNRITTRLLDASADTDLGYRERQRQLFDDYESLFASRESASYTAFTRMIQDPEQRAALVADIEAVTRELPHLDPDLREVMTGFFSLVSAQTAEVGRTRQRCARRIKRFVASGTLEHSRGVTRQLNDALTSAHDLLSISLADSRIGIEVPLVRTDFNSIGAVAFKIRDAIPPSQAETSHGEVNLSAFSALASQVDAAELADLVNGAVAAGPLALSDAIGMLDSAYLGHVIVLWSWALKQPLSQPESDAESVRVRFRSLEGADREIEIPRLVFTEPIPTASESML

SEQ ID NO: 32008 - protein, 254 aa, Mycobacterium fortuitum subsp. fortuitum DSM 46621 = ATCC 6841
MTDNPDTSPVKDGSIDFDALPSIDAVERSTNQRRAPRFDGDVSELPDRACWALQHLLSRRYVSKDNHSELWSWVTRYRAELTVRLSELDMRLCISDDHDIAYVEQADYESQWRRRLLRRETLNTYDSILALHLAKLMRAASRDENVLISRDEIHELFAGVNNDTDRDTASFDKRIDNAIERLTDIEMLTRNREDEDSFTISPVVNAIMTASMITELQQQFEQLKRVANGTAYDPGASDDPDVSERLEDEVDAHG

SEQ ID NO: 32009 - protein, 1120 aa, Mycobacterium fortuitum subsp. fortuitum DSM 46621 = ATCC 6841
MAEPTNQFSLSRLQVINWGVFDGYHSIPFSRHGTLITGSSGSGKSSLLDAISLAFLPSHRRNFNASGDTTAAGSGTGKRTVDKYVRGAWGERREGTSRQIMYLRGTGPAWSAVAVTYSDRTGRSVTGLVLKWLAAEKTSDPGSRYYLIDADRDIFGLCNRWASNGYDAAVFRDDGWTGGRSESQYLAQLYSSIGIRASEAAQQLLGKAKSLKSVGGLEQFVREFMLDEPASLSGVEEALEQINPLVEARGLLDVARRKRNTLGNIAAVQARYADEAAKFGVIDTIDNAMIRDYVDHVRLAQAGPEIANLDDQITQLGAQRDEFGTQQRQLKNEHNALMAQINSVAVDLVPLQQRLTEAERISEEVSRRRSAYEEKVTSLGLTPPDNGEEFWSLRETLMEEADRLHRELFTGNQPYVEASAKEVRAREARESVEAELERVQRLGSPLPRTEYEMRARIARALDISERDLVYVAELMELKPDESRWRLAVEKVLRGAGLRLLVPDAYMERALRFVNENDMRGRIQLQHVQHGAQLRTPAPGTLATKLQLADPTHDSAVEALNVIAAVGDYVCVDGPGEFTEQSRAVTDQGLRKDSGRLSIKDDRSRLRPSDYIFLGGTAAKVEALQDDLTAAQDVYQVARTARERLDEHRGQLQSRERACRALCDQYMQWSDIDTDSVDAMLERLQGEHDLLVSDNPDAERLQQRADDCWERVEKVIQQIGSLNERETTLDRRRTALLELSETLTERLGSSEFPSHARDTIDGYAADIALNLELLEPEPYRNELVRVIGRERDRLRADRNRSHDELAGIMAAYDSSFPDAIPNDSDVFDERVHDYVALCRRIDERELPDAYERMQRLITEQAPGAILNLHMIADNEARRITEQIARVNTGLGAVEFNRGTRLTLHAGTRHLAAVDELNEKAQRISSRVSLVSFGDETAMFEQYTDILQLRKLLAGNTPEDRQWTRDALDVRNRFVLYCEERDAETGEVIRTYSNSGDNSGGEQEKLMAFCLAGALSFNLASPDSDDTRPLFAQLMLDEAFSKSDPQFAQQALSAFRKFGFQLVIVSTVQNSTTIQPYIDNVVMVSKSDASAPNARPVASVTSASISEFADLRKTSGEAVASA

SEQ ID NO: 32010 - protein, 491 aa, Actinomyces massiliensis F0489
MGTRRVVADALRLTRLVRKDPGLALLRADLGPMAAAILAEHLGGEVRRRPVAELHELVDEDLAALRDAGVAASRAGRAYCDQWRRAGVLVRATAPGSRRETYELSAPAEAAIRFLVRSGRPRPVATQSRLDTISTQVSRLARDSDPTAMGRLEALRAERDALDAEIARVEAGDFVPLDGPEAAERLAEILALAEQVPGDFTRIRNEIAALNRSLREHVVSLDATRGDVLDDIFRGVDRIESSETGRSFLGFHELLMDSESSARLDENLETVLARAFATRLEDAELRFLRRWRSAVAQEATSVRSTMDDLSRSLKHFVRSRAFEDQRRLGAELAEAQRLAARLAARTPPQTQMDLGLALTGVHMASIGSWRMRNPADAVVTEKIHSREVARLDLEEVRRVVRASEIDLVELIDAVDAVLEERGAATVAEVLAAHPATQGLASVVGLLLLARRRGQEVPGDETVTWRTAGGAERSARIPRFLFTNRTEKSGDA

SEQ ID NO: 32011 - protein, 284 aa, Actinomyces massiliensis F0489
MSSHAAPAQDGLDHTGGANPGALWDGDPGSLPRDTRRTLVRLLQGPYLTTELHPELWNALLKDEADIRRRLGDLFLELVIDRAAGLAFTRNASDPTGAAPSVMRAMRLTLVDTVLLLHLRTLLLRANTPGERVFVDRSEIDDHLSVYRPHTSTDHTGFMRRVSSSVDKLKRAALLRDTDVAERYEVSPVLALVFTADEVAAVTAEYRRLLGEDGRDSSDSSESSGGSGGSESNGAPEGGLLGGGAPADAGKGGAPAGAPAEERPASPEAASDPVANSSEERDES

SEQ ID NO: 32012 - protein, 1298 aa, Actinomyces massiliensis F0489
MTSSATAPQTASQHRLARIQVYNWGTFSGHHDLPVPRSGLLLTGPSGSGKSSLLDALSAVLVPAKSLRFNAAAQESSSTADRSRSVLSYVRGAYRRSADEITGEVVTDYLRPRATRSGIALTFTRLRPEETITLVTLYHARQGSTSDDSITQTQLLVEGDIALTELMEYLVNGIDKRALSRDLKGRATRFERYEAFAARFRRRLGLSGEVAQRLLHRTQSAKNLTSLDTLLRDFMLDEPETFAMAAAAVEQFAELREAHSSVVEARNQEALLSPLRRLEERITAARRDQERTEQLRAAIDPYLEQLKTTLHEQTADTARRALDRLADELAAARRVEEDARREREAARLALAGGIGENLPALDARLEAARRTAERIARARELLDSQLGVLGASTPSEGAAFAELRRTAEQEIERAERAEDEQDQARSALRAEQIALEERSRELRERAEQITASRSAMSTDLLRARDSIAHAVGQAPAALPFAGEVLELVPGQEEWRVAVETVVAPFARTMLVPEHLYRKVADAVDAKRLRARLAYERMAAAPRSARPVTADALARRIRPKPGSEHAAWLDAEIMRRFDHDCVEDARDLVGLDRGVTRAGQVKSSRTSHLKDDRRDLTDSRNWTVGVDPAERLEQVIAEGREVTARLEDIGGELAALDRARAVGRERRDACLRILETSWEELDVDGARAREADLAAQRERAAHALPGLAELESRAAAAGLAEDKARDAVLRLAGEEQVQRSRLEDAEAALAGIARRRQERADEGRVRDGADGTDGLGPGDAGASEHGSRWLALGEAEREALFAELEQRFRTRRRHAGLAEVDIAAREVEQQIAYDNQRASQAESRGLGEARAIMVRFSERWPIPSSGVRPEAAFLGDYLELLNRLQTDSLPRFERRFAELLHNQSRQNIGRLAGEVRRAVSQVRSRIGPVNDALRATEYSPGHHLHIEVAERRLPIVHDFLSDLATIAAGSLDLADETTEEAEERFAVLNSVMTRLGSSDPRDESWRRQCLDTRLHVSFTAVERDASGVAVDYYEGAAGLSGGQRQKLVVFCLAAALRYQLTEPGQAVPGYALVVLDEAFDKTDAEFTRAGLDVFRGFGFQLLLATPMKMLQTLEEHVGGAAMVTNSPAGDDSQLAVVLFDGDRPSRRARAVRAAVEPEATTGTGVRVAEPEATTGTGVRVIEPEATTGAGRRVAEPEATTGAGRRVAEPMATTGAGRRVAEPGTATGAGRRVAAEPRATTGAGRRVAEPEVTTGTRVRVAEPEATGSVTRVSRARHAAEGAPDLGGQGSRPDGSGDTSA

SEQ ID NO: 32013 - protein, 505 aa, Slackia piriformis YIT 12062
MVTIDDARSLPFALRRDVEAQRRLYAVLSSPKRMFYVHGIVVLWDLHCAKRWITKEDFIETLATRFENYLIEGNLGVRDEFLDKNFSIEEEDCADEEDPFLQARIVFRRLHETGWFELFKDAVEGSLRTTLVVGEQASRLAEFVAAEQRHAHVDSTSCVLNVRVGLEHAQGALNQMRSGSRGLDDAVLRSVVGRELCEALKNAQERSAVLNARIRRTCHEFKLTSMRIAGCRTQYDLQLVMDDYEQGLFDSIMQPLRIEDGFDRNGDAIVRMLDAWSVDSELLSLVHETSRLPGMPEGLSRPFEFIQDVRYAYAVRVRDAWEYALSLEKRITSEMSKKHRMLLGGTSTMAAAYERAIMHIAQSDDALAACALEAMQDVLFLPGKGPFDDSCLSTFRAYDDAEKMNRVRIADRGDMATVCRADAVAESALTRAGKKMQRMIARQGSLDGSSLPLSSRADRVEQMLYVLAADSKDSTYVVPRIDDEDRVVSDGQNIARVRFVERASR

SEQ ID NO: 32014 - protein, 217 aa, Slackia piriformis YIT 12062
MKRFYQMETEKKVKTVCAMLIAHRYLCKMKWVSQEGQRTKDIAPEFMFCKDHEDEVRDRLDAVGYNLDLDPQGNFYICAPQDDVDVRYERLDRTETLFLFGLAVTYENKRSEMGRFATVDSDMNELLSLLCVTYRAFEKEPSVSEVRRIMSRFERAGVITRKRGRWSDFDVEFAIQPAIAHVADRATIDAYEKRYAAAIDAAVIDAMDDDAGDDDDE

SEQ ID NO: 32015 - protein, 1131 aa, Slackia piriformis YIT 12062
MTNKGMRTGIYARKLLVVNWSLHQMKLYEPFSIDGSVFAGANGSGKSTAFDAFLTVLLGSTRRSNYNQASKSHSADTRNFAEYVVGRRKGSSQKGVREGMDFTTHIVAVFWDSLRASEVTFGMCCDYRSRIGAHALVPNYYFYEGGLPENRLVEDGEALSVRDTKIYLKHLEDQGVISNVHLCESSSEYNKGFLARMGFSDPGYFGALKNLVAIGKDTRIEDFIYRYLCDGRSVTTADDMNSNIDSWQQCREDLDRAIERQSAIGQERERYAAWRASEDERDIFMRARILRQRADLADEIESLRKEEEDIEAERSRLNARIAALEAHADSMDSERQAKWDLVKNDDVQRERSRLAKDIERIDGEVERYEQRFRDDFRMLSENLAVLHEARRSPGFAELSCSDTVQRLTSTLEDVIERGMGVLGEGPDAFGYLVDLATEAYQEAQREEFVALDEHREASGRQLEAMRRKKAAEAGEAVRDADADALIAYLREEAGIEATCLCDAIDIAPGEQGWRAAVEGMLGRRRSDLLVAPDSFARAFRAYGSYRGRKTVRLIDTPGILKHGEKTKRVEGSLAAKTVASEGRFAKVATAYTDWALGDIACCADREGLLAFIRENPGKSAVTANGDCYRGFAVYALAGRDRLRFMIGSSAQEARRIEDIHDAEKVIADNERLAAALSARQELLRSIKTACPDKESRFARGIASMAEDYDKLVSGRAEAEGMRAALAASGSAESASIMESVRALKNEIESVRAESAQCQRSLGDADRRAKNAAARREQCEADLAKVEAANVALEEEHLEEAACRECAANSLKDLEERSRAKASASRECWNALVAFRRERSSAVSSEQIDETDRGNEAWDREWCALETSVIPERRALFERMEAETKEGFTTAIVGALRNGIVDVRRTIRETNAYLSECPFGDIRYRFDCSKNIDYAPYYDMIMDPDFDNALGGLWDDEFHAKHGAVIDSFFDTIRDSRCAETEQQRSEALARKRALLDYKSYLSFDMKEVRPDGSEVSLKAGLGGSSGGEQMLPFYVVLFASMAHRCRTKKKGLDGNTLRTVLIDEAFEVVDSERTVQAIELMQRLGLQPILATPNERVGTFASMTGSGFIHRNLGGAFEVSRWYDEGMEGLE

SEQ ID NO: 32016 - protein, 486 aa, Pseudomonas pseudoalcaligenes CECT 5344
MKADKAIATYRRMRAQPLWRLLASTTGPTVIGLLQSHLYEGERSLPASIFHERIARDLEELRAQGEDFPQTAQAYVASWLADGFLERRFPAGASEEEYELTTAAVEAIRFVSGLAQPHSAATESRLTLVIEALARLAEDTDTDKFRRIDRLMAEQARIDKEIDAIQKGQMRVLPHTTALERTREIITLADDLAGDFRRVRDQFDQLNRDLRERIMDNDGNRGDVLDSLFAGIDLISESDAGRTFSAFWRLLTDPEQAATLDQALDSVMSREFVGQLEAKERRFLLRLTRTLLEQGGMVHEVLQTFARSLKHFVQSREYLEQRRLNHLLKDAQRAALALKNEVRATETLQYTLELTSSRLRSLSQWVLHDPSLQALPGQMAEGDAPPIDLESVSELVAQSEIDFRTLKANVLAVLEQRSQASIADVLEQFPAAQGLGSVVGLLALGSRHGFKADHSETVGWVGGDEQRRSARIPKIFFLRERANELV

SEQ ID NO: 32017 - protein, 235 aa, Pseudomonas pseudoalcaligenes CECT 5344
MNWSENDESAIPAETQAPDAAQAPTNTLFMGDSGELPLDTRRALVQLLAGPSLDGRRHPKLWPILARDEAVIRRRLAELFLELVIDRDVQVAFTRQADTGDLEVPLLLRRAQLTFIDSILLLHLRQRLTQADSQGDRAVVSTDEITEFLSLYERAANTDRAGFVKRVHASIEKIKKHSILQKIRSSEDRFEISPTLKLLFSAEEIQALTHLYQRMAAAETPAQLVQTEADEEADQ

SEQ ID NO: 32018 - protein, 1124 aa, Pseudomonas pseudoalcaligenes CECT 5344
MISEPQTASLFAREQFRMTRLQVYNWGTFSGLHDVPISERGFLFVGRSGAGKSTLLDAFSALLTPPRWIDFNAAAREADRSGRDRNLVTYIRGAWAEQKDGESGEIATRYLRAGTTWSALALTYQNALGQSVVLVQVFWLRGNANGSTDVKRHYLVMERAFDLRELEDFGQSNFDIRKLKQSFPEAFARDEFRPYCERFCRLLGIESEMALRLLHKTQSAKNLGDLNTFLRDFMLDKPETFEVADRLVSEFGELNAAHQSVVTAREQVQTLAPARDQHLRRDSLMLQRNGLDELRLGVDGYRETRRIDLLKEHVASLEVQANGSEGEVGRRQSTLDNHAAILRDLERQHREAGGDQIEQWETEKSGLEGQRTDRLRKRAQAEDACKKLGWSLPDSPQAFAELLGSARQEVENWEQRSNDSRAEQFRLDREKKDAETAFSQALKEVQALQRQPSNIPADMLEMRRNIAAAIGISESALPFVGELVEVKSDEVEWQGAIERVLHGFALSLLVDERQYSALANHINTTHLGQRLVYYRTGRPETRQAKPIGTNSLVLKLNVKEGSYADWLQAELRQRFDYACVDSIQSFRSADRAITREGQVKHSKTRHEKDDRRSVGDRRNWVLGFDNREKLGLFQAQAQEQADAISRLAGEIDKLSEQDKNRAARAMQCQTLVNLQWQEIDLLPLLDRISTIERQIHEAREGNTTLLQISEQIEKQKKLVDDADKDLRQATRAHDSIVDQIKTSTQKLESLLQDASIVPLTSQQVSGLDERFAKQSDAVRLDNIDKVTTSVERALNAEIEEVNRGIGACEKEIEARFADFKRQWPMDAGDMDTSLASAPDFFAKLVRLETDGLPAYEQRFFELLQNQSHQNLAALSTYLNDARKAILERMDLVNDSLGQVPFNQSANQRTYLHIDASDRQLVDVKEFKREIQQALSHAWTEDREFAEARFLALRRLVDRLASQDPEQKRWRETVLDVRQHVEFIGREIDESGVEVEIYRSGAGKSGGQRQKLATTCLAAALRYQLGGNDHGVPMYAPVVLDEAFDKADNEFTALAMNIFTNFGFQMVVATPLKSVMTLEPFIGGACFVDISDRRVSGVLLIEYDGDRQRLKLPEHAREEASVEAS

SEQ ID NO: 32019 - protein, 387 aa, Pseudomonas pseudoalcaligenes CECT 5344
MKLPEDVRQFLARRFQSKHREWLVGDPGEGQWPLEVPLGIPTEQAALRQVDGVRAWVSAWQGWQGVGTLSWCERRWKALGVQRLPEKLALRGPEDVAMWIGASARWVRSLSRYQTLTARWPVLAQQLPRYFDVLADYSDADFRRLAEMLDWISRNPKSNLYPRQIPVAGADSKWLDSRKGIISDLIATLQGDPTGERDFFWRCGLRAQPQLMRMRVLDPDLRAHFGGLGDISAPCDEVARIGIRPKSVFVVENLQTGLAFDDLPGAVVIMRLGYAVDVLGQLPWLQQAQCIYWGDIDTHGFAILNRARTYIPSLKSVLMDEFTLMSHRDLWVEEKDQHSSTELPLLTNTEQKLYQSIKGNVWDQQVRLEQERIRWDVAWNAIQASIR

SEQ ID NO: 32020 - protein, 249 aa, Pseudomonas aeruginosa ATCC 25324
MAGVFDRIAGASGADETELTVEPMALDDGMDDEQPLMSAAVQVDERRTPQRVREAVQEMLKYGLLEESHKPNLYRSALSNIEAVDRILEPLDLAMGVDEVRGLVFVIVRQGEVAEQDDWSHPLVRRQRLNLEQSLLIAILRQQFIAYEQESGTGASQASVVVDELIPQLQVYLGELGSEAKERNRIITLLDQLKGHGLVSALDAHDRVIIRPIITHLANPENLQALVAWLREQVEGAATPAADGEEDMA

SEQ ID NO: 32021 - protein, 1045 aa, Pseudomonas aeruginosa ATCC 25324
MTLLCANPRYNLASTGGHESDRDLVSYVRGVTGPGDGGIEQSHIARQGKTVTAIAATLERDGAQVRLGAVLWFEGTSSSASDLKKLWLLSESPEQTLEHWLSQHHAGGMRALRQMEKDGTGIWPYPSKKAFLARLRDYFEVGENAFTLLNRAAGLKQLNSIDEIFRELVLDDRSAFERAAEVAGSFDDLTDIHRELETARKQQRSLQPVADGWERYQVLQEQLHDKQALEGILPVWFAEQGYRLWLAETNRLEKEYKKAELDQEQCKSQLEAQKGVVDQHRQRYLRVGGAGIDQLRERIADWVRECDKRSLKAEQYQLLAKGLGLADELSAAALKENQQHIAARLEILDQQITDARQKAFDAGLVQQELNGRLQTLQQEGAEVEKRPGSNLPGQFHAFRSDLAQALGVNESALPFVAELVQVKPEELDWRGAIERAIGSHRLRILVPQDSSQAALRWVNQRHNRLHVRLLEVQEPTSRPVFFDDGFTRKLTFKEHPYREAIKALLADNDRHCVESPEQLRHTPHAMTAQGLMSGKERFFDKQDQKRLDEDWLTGFDNRDRLAFLAEQIREVNEQLEPAKLALDAAQGDVRQLETQASLLNRVKELQFEDIDLPGAQSQLESLRTQLATLTRPDSNLAMIKVELDAAEALQESLDQQLRQLIEQYVQLKTQFDQAASATRKAYNSAEKGLNDTQRELAQAHFPTLTADDLGDIVELERKHTRELQGQLKALGEKLGDQKSELAKRMSDALKVDTGALAEVGRELVDVPRYLERLRVLTEEALPEKLKRFLEYLNRSSDDGVTQLLSYIDHEVSMIEERLDDLNSTMQRVDFQPGRYLRLVAGKVIHESLRTLQRAQRQLNSARFIDDEGESHYKALQDLVGLLKDACEHSRNQGAKALLDPRFRLEFAVSVIDRESRNVIETRTGSQGGSGGEKEIIASYVLTASLSYALCPDGSSRPLFGTIVLDEAFSRSSHAVAGRIIAALREFGLHAVFITPNKEMRLLRHHTRSAVVVHRRGLESSLVSLSWEALDEHHQQRIKAMHEVAH

SEQ ID NO: 32022 - protein, 225 aa, Pseudomonas aeruginosa ATCC 25324
MDTKFFERNAILLTKLLDERFEGAASEQGLTTFLDAFEETSHWVLVVPLQPELLPFKRIRLTTSELAETSLPGSRLLVVENEQCVHLLPETLPDTLAVLGAGLDLQWLASAHLAGKQIAYWGDMDTWGLLMLARARHHQPAVEALLMDRELFDQHSLGSAVVEPAKAQELAPEGLMTDEADFYRYLLAQERGRLEQEYLPRRQVEQAISKWFGESVAPAHPERTA

SEQ ID NO: 32023 - protein, 538 aa, Pseudomonas aeruginosa CI27; identical to SEQ ID NO: 30515

SEQ ID NO: 32024 - protein, 249 aa, Pseudomonas aeruginosa CI27; identical to SEQ ID NO: 30516

SEQ ID NO: 32025 - protein, 1045 aa, Pseudomonas aeruginosa CI27; identical to SEQ ID NO: 30517

SEQ ID NO: 32026 - protein, 381 aa, Pseudomonas aeruginosa CI27; identical to SEQ ID NO: 30518

SEQ ID NO: 32027 - protein, 489 aa, Sutterella wadsworthensis 2_1_59BFAA
MKASISYPGFQRLRAAPLWKLLAAANAPAIIAILAEHLYEADHGMRASEFYARVDRSLEELRATGVDMPSTAREYASQWLAQGLLERTLPYGSDEEVYSLTSASVDAVRFVTGMGRPRAEATESRLQLVITALDGLEEDTDADVERREHRLIEEQSRIRRELEAVGRGEVKVLDKDTALERTREILTLFSGLVGDFHRVRDSFEALNADLRRRIMECSGSRGDVLEDVFAGLDLIRLSPAGRTFFAFWRLLNDPVESARFEEAIDAVLSRDFARDLTVEERRMLRTMRRNLLERGGDVHDTTKRLAQGLRNFVESRQYLEEHRLNRLLTEAMRAGIDAADEQSPVRRTGIELSRTGFTPRSAGQMVLWDPVTYAPPPPVEDGTPPPLDLSAVGERIARSEINIRELRENVADVLSRKDQASVGEVLEAHPAKQGLGSVVGLMELALRHGIPGSGTESLKWTGLDGRERSATVNQLFFVKDKIDELTRIY

SEQ ID NO: 32028 - protein, 238 aa, Sutterella wadsworthensis 2_1_59BFAA
MNSPESTDAARNDEQAAGLWRGDAGGLKLDARRALVQLLKGPVLDGMRMPVIWKALLESEDLIRSRLNDLFLDLVIDREQLFAFTRQADTDPVKAPILLKRKPLNYIETYLFLFLRLRLSSAEGRGERAVIGLDEIREHLADIAGRNRDAVGFERHLAGAVTKADHFGVLRRLKSGEDAFEISPVLKMLMTADLVEQVKGYYEGRAAKPGEVAAEIPAGIENDESEDEDDEDDAEDME

SEQ ID NO: 32029 - protein, 1126 aa, Sutterella wadsworthensis 2_1_59BFAA
MTDLALFPELMPEEQFRAVRLQVHNWGTFSGCNDIPIAEEGFLFVGASGSGKSTLLDAFSQLLIPPRWVDFNAAAHETGGKVKGDRSIVSYVRGAWSELQTDAGVTTQYLREETTASGLALTFRNARRIVTLLQVFWIRGKLNGVGDVKRLYAVVERDVDLKALITGFSESDYDLRRLKIDLGDARCSDLFPPYETAFTALLGIKSSLALKLLHKTQSAKNLGDLNEFLRNFMLDEPRTYTIAARLVDEFVELEASHRAVVAANAQIRVLSPAQTAFGDMQQAEEGRLRAKLLAEALPAYRESWRANLLTAQAAKLENERRTHEENVRTIQADLVARRSTLADLELRERQSGGDQIAGWEAEKARREQDRDRAMRERGKVEAAARELGEALPPTADEFRTLVEVAAAEEAGAADLKKARDAKIEALIGEEHGIKSELDVLCEEIESLESQRSGIPAVQLRIREKVAAEAGLRTTDLPFAGEFIEVLPEQIAWRGALERALRPLALSILVPSEHFEAVSRVVNGAHWGAHVRLLRTGGAIVEEAGSLSDDSVIRKIRVTDGVHAQWLESVLRRDYDLACVETPEAFAAARRAVTKTGFVKDTHARYDKNDTRAVDDPRAWVLGMDNRAKLAALRAEEEIRRRDLHEKRRAITALKNEEAEASRRLVHCHTLAAASWIDIDPAPILADIHRLEAQIRAVREGNEALRELAKAIEETRIQIAAVEEKLSDAKADLKTADGALTTVRKRLQTLNDAWSTQIAALTDGMRKGLGDRFGARLGEIRLDTLDDLVNMVAREINDEISKLVARVKDMEIRVTTAFDKFRDQFPAESADLGAGLEFAGDYFRLLETLERDRLPDFEAKFRELLRQQSMQNLSQLRQYLTEERRDILQRLELVNESLHVVPFNVTNGRRTFLRITTQERMLPEVVEFRKRIRDALEGAWDVKVEDGEAEKRFAILAELVSSLKDLPENRRYRDTVLDVRRHVDFIGEEVDDDGRQIEVYRSGAGKSGGQRQKLTTTCLAAALRYQLCGDSVSVPTYALVVLDEAFDKADSDFTTLAMNIFRQFGFQMIVATPDKAVTTLEPFIGGACVVHIVERKYSSVLTIPYDGAVHRLVWKAPAESAEPVKEA

SEQ ID NO: 32030 - protein, 403 aa, Sutterella wadsworthensis 2_1_59BFAA
MKTPAEVRTTVARRFRASCRRWLAGHLGLPDDSAWPFAVPLGVPSEREVLADPQKTLDWRDAWSAEAESGRLKVAFAVRDWTACGRQTVPERAVFESPEAVARAAGELHTWRRALERASRLVDGEDGLREALVRAWSVLAEWEDEDFAILLSAFRWLADNPESGLYVRQLPVEGMDTKWLTKPRMTVLRDLLAARWRASGRPVPEAQAFEAFAGLRSRPSSVRMRLLDPADRALMHGLSDLSAPPEEIAILPLHPRIVFISENEQSGLAFGDVPGAVLFFGLGKGVTQLDAVPWIHEGTVIYWGDADTWGLQILASLRRRFPKTRAVMMDEATLVRFHAYAVEEPRQAPEAVCEGLLPAEAALWDALKSDKYGMRLRLEQERIPWAHAWAELMKAVAEASRKS

SEQ ID NO: 32031 - protein, 486 aa, Gordonia rhizosphera NBRC 16068
MESAEQPTPRQAWEANRSIQKSAAVRLFAANNAALYWTLMERHLDFGARLGETELAIRLERDLAEFGIDDQSSGLDLIKSWAKQGWLHRITDSAGPSTQNLCYLTSEARSVLDYVRRLRREDSVATGGSINGVAAGLRRVAGRVTDDPRQIRDEITHQISELDAELAELDAGLRPDPDLRGAEDEARAIAYQMEQIISDIGQYGTMLDRITTALLDDPHDSDLAYRDRQRQMFDDYESLLESSQSASYHAFAHMIQDPQQRARLAADISTVTHRLPGIDAGLRSVMDNFFALVTQQMAEVGKTRQRCARRIRRFVATGTLEQSRGVARQLNDALATANDLLKTSLTDRRLGYELPLATPAITSVGRLAFEIRDPAPPAPVQPATGGADLASFASLAGQVDTVELTEVVNSAVAAGPVALSDVLERIGEPYLAHVIVLWSWALKQPGNADRRPEVVRFRSLEGEDRVIEVPALTFTEPIPTAEVDAL

SEQ ID NO: 32032 - protein, 252 aa, Gordonia rhizosphera NBRC 16068
MTTDFQTPDEFAGYDDLPAVPTRGTDDDTPKVPRFDGDHSALTDRACWALQNLLTRRYVSGDRHPQLWAWVVEYQDALRVRLSELDLRLRIVDELEVAFVEQASYESRWGRRLLKRETIQTYDAILALHLARYVRSARDEHVTITREDIHELFAGVTNTIDRDLALFDRRIDRAIDKLEEMEFLRKHRDDPDTFTVSPVISAVMTASVITDLQRQFEQFIGAGETGDEVDPATGTGGPDLDEDGDEDEGDDW

SEQ ID NO: 32033 - protein, 1116 aa, Gordonia rhizosphera NBRC 16068
MVSGRADQYHLSRLQLINWGVFDGYHSIPFSPNGSLITGSSGSGKSSLLDAISLAFLPDHRRNFNASGDATAAGSSSGRRTVGKYVRGAWGERRDGTNAHREIMYLRGTGPAWAAIAVTYTSSSGTSITGLVLKWLAAGKLTDAHSSYFISDGDVDIVEVCNEWAASNYNSARFRDRGWRGGPGEGKYLTALYSLIGIRGSEAAQQLLGKAKSLKSVGGLAQFVREFMLDEPTSIVGISDALEQIDPLVEARELLDIARRKRTILGNIETVQERYVTEAATFTVLDTIDSAAVRSYLNNLRLRTAEPEVADLDDQIARLDADLSALTAQHDQLRTDHSHLLSRIATSTGDLAPLQEQLTAAHKVGNEVSLRRASYEHKISALGCALPDDAEDFWSLRATLIQDATRIDGQLEAGKGHFADSLATEVAARAQRDAAQTELSRVQQAGSALPRAEHEMRRMIAHALQIDESELRYVAELVELRGDQERWRLAVEKVLRNAGLRLLVPDRHFRAALRFVNTHDMRGRIQLHHAETRPAPTPDPGTLAATLRAVDPDHPCSAEALSILTRLGNHTCVDDPAEFTDHAKAVTDTGLRKDSAKLAIKDDRMALRPSQYIFVGNVDAKIAALQAELEHEQHAYDSAREASAALDRERTEKEQRRDAYRRVCEQFTQWSEIDTDSADERVDQLTEQYELLMSEHPDIEALQRKAEDLWEQVRAAISQAALVRDKIATHDERRTRLLDLMDRLTPEDVAAQAENTLDGFREESAATLDVLAPEPFRQELMKAVTKDRDRMRADARRSRDELARILDTYDEEFPDAIPNDSDDFDERIHDYVAVCRRIDERELPAAYERMRRLITEQAPGAILSLHMAADAEERRIVEQIDRVNSGLGAVAFNRGSRLRLRPGRKHLTAVAELTDKARQIAQRTTAVSFGDEQAILEQYADILLLRARLAGATPEDRQWTRDALDVRNRFDFYCEEHDAATGETIRTYSNAGDNSGGEQEKLMAFCLAGALSFNLASPNGDDNRPIFAQLMLDEAFSKSDPQFAQQALSAFRKFGFQLIIVATVQNTSTIQPYVDNVIMVSKTEAGGDSRPTATAMSTSIRAFSDLRRSSGAQLPV

SEQ ID NO: 32034 - protein, 480 aa, Gordonia rhizosphera NBRC 16068
MDFDAFGSLWERHPAWRLLRAHNSPLILAFLGNFFVEGNRGATSASDLATALDDLLYDLNIAVPTEDGQARFPKEPRAYLEDWSATEAGFLRRFYPPGDDEVHYEVTPAFEKAYAFVVSLQGRSFVGTESRLHTVVELLRQIVHGTEADPEIRLAELRRRRAEIDAEIAAVESGDVAVLDSTGVRDRYQQLASTARDLLSDFREVEDNFRLLDRTAREKIASWDGPKGELLAELVGSRSEIAGSDQGRSFQSFYEFLLSDARQTELSDLLAKVSSLDIVDADRRIRGIHHDWSEAADRTQRTVRQISEQLRQFLDDQVWLENRRVLDLVRSVESTALEIRGEEPGFGLEVDQPGIEISLPFERPLYQQPAVVTVESRVDDATEQVDADLLFTQTFVDQARLAANIRNILPERSSALLSDVVTMYPIEQGAAEIVGYLALGDDDVSVDIDDTDEMLLEYPDPDDPDTTKRARLPRVTVRRR

SEQ ID NO: 32035 - protein, 192 aa, Gordonia rhizosphera NBRC 16068
MTDERAIASAIIRLMQGVVYRESDEDTWATLERSGAGVRDHFATIGVDVVVDDSEGYAYLRSRPESEGDEPLPRLVRRRALTYNVSLLLVLLRKRLLEFEITGGEGRLVLSTDQIVEMLRLFHADSTNEARLVDQAESTIKKAVELGFLRQLRGQTDQWEVRRIIKAYIDAQTLSDFAGKLREYAGAVATDE

SEQ ID NO: 32036 - protein, 1133 aa, Gordonia rhizosphera NBRC 16068
MSEGLFSSVELGTAGGGAGFRLQHVEVLNWGTFDRQVWRLTPNTDTTLLTGDIGSGKSTLVDAVTTLLMPAHKIAYNKAAGAEAKERTLRSYVEGHYKSERQEATGRSRAKGLRQDRSTYSVILGVFNNPGYDETVTLAQVFQQRDSAGQPYRFYVTATKQLAIASDFADFGSDLRDLRKRLRAGGADVVDEFPKYSTSLRRLLGIRSEQALELLHQTVSMKSVGNLNDFVRGHMLEPSDATDRVRDIIAHFDDLTKAYDAVKRAREQLEALDPIVSTTAKYDAALAERDALDLQRAAVRLFIAEHRSGLLADEITTLTAEGERLLREQDDAKARQRNLSRERESLIEERARAGGDRVGELERLAAAARDDVAKRRHGRTLFDATVADAAFDPVTTGEQFTALRGLITDERPRLDDAKRTLDSSTADAIGREKEAARRCDAIRAELDDLQNRTSNLPPDQVQLRDQLCTDLGLTHEDLPYAGELLDVDEDHAQWRGAAERVLRGFALSLFVPQQHYEAVTQWVNGRRLTFHGAGGRTVGAKLVYERVPARRVPLQRQDSGVMVLADCLEIKEGPFEDYLRDELIKRADHQCAVTLEEFRAAKRAVTREGQVRSGGRHEKDDRHRVDDPRRWVLGWANERKIAALREDLDDLDRHRAVAAADVAALSEERDALQTRREALARLDGFHSWADLDVEEAQRRADEYEAERVRLESGSSRLQEITTALERNAELSAAAAEVIDDLTGKLATTAAEANQAEQLKKRDDEFIAQHSDADLATARASYAALTQRLTGTLPTRATDCAAAENSLSSTLHQRIERLTRELGGFGQSLAQYMADVLRRWPDLRADMDAHVDARADFVMFRERVATDDLPRFELEFKEQLNKNAIQELAGFNNWLNRQAASIDERVARINEALGAVPYNPGRYIRLERESTTNQDVAQFRADLRNLTNDSLAVDGDQYSEQRFLDVKRIIERFRGRDGHADSDKNWTRRVTDVRNWFVFSASERDVDTGVEWEHYSDSDGKSGGQKEKLAYTILAASLAYQFGLEWGVEKSRDFRFAVIDEAFGRGSDVSTRYALDLFAKLGLQLLIVTPLQKVHVIEPYVKAIGFVDNPTGTFSRLQTMTIEEYRSRRDGRLK

SEQ ID NO: 32037 - protein, 383 aa, Gordonia rhizosphera NBRC 16068
MSRRWTVPDDVTTKVRRRWEDGSLLRAYATGSALEPIEVPLRGPTPSQIGEDLGAARDWVTALDAGRRDDRRYTLQWQTVGGRQVGRNRLPTRAVVSSFEQAWTLLGVGPSVRRFEEVLDLAATRPAIRNWVVDNPLRAIELAPEMPRLIAAYTWLDAHRRSDRYLREISAPGVDTKFAERHRSVLAAMLGVPSTASGFLSGLGLHGKPEFVRLRPSSSLGLPTPLTEISVRADELAQFDLRPHSALVIENEITYLSVDIPDDGMVLWGKGFEVDRIGRLPWLADVPLHYWGDLDTHGFAILDRLRAWLPQTESVLMDRTTLDAHRDRWVTEDRPTSSGLTRLTPAERDLYADLVSDVLGERVRLEQERIDWSWAQQRLGAGT

SEQ ID NO: 32038 - protein, 485 aa, Kineosphaera limosa NBRC 100340
MSALAAALTFGRLVRESATLRLLRADHVAVAAAMLSTHLGAPGARLPADDLHELLEADLEELRDHFDLGAKSAKAYCDDWRAAGLLVRRPAPESRGETYELSPEAIDGLRILAQLDEPRSTVTESRLVGLMAAVHQLAIDTDTDVTRRVEALRAERDRLDAQIDRLTGGDVDVLDDRRALERVTDVLLQARDLPADFARVRARFEELNQDLRASIVNADAAQSTVLDDVFRGVDLIESSDEGRTFTAFSALIRDPERSATFDVDVADILDREFARRLPPEARRMLRTLVRELKNGSREVHGVLTEFARGLRRYVHSQEFARDRAMRQALQEALAAAIPASRQTRPYRDVGLELELSAMRLTSVGETTPHDPTEFDTGSALLDEPPGSVDLAVLAALARETEIDYPELVRHVNAVLAGASTASVGEVLHAHPASQGVASVVGLLSLATRYGEVRDAETEQLTWQGVDGIDRHADVERHLFTQEVDA

SEQ ID NO: 32039 - protein, 247 aa, Kineosphaera limosa NBRC 100340
MSPDQPVSSDRPSGVGMGQEIGHDDCRDDAHDDGAQVGLWPGDTGTLHDGSRRALLRLLQGPYVSGRANPQLWAALVADEKAIRSRLHDLFLDLVIDRVDEFAFTRKVRTTQADVPQALRSERLTFVDTAMLLVLRQLLLSAAGEPRVIVGQEEVYERLSVYRDGDESTYLRNLNGAWTRMKNRFRVLHDVGEDRVEISPVVKFLIDEEQVGALSRVYARLAESDEPTLPDADADADAAETDDGEAP

SEQ ID NO: 32040 - protein, 1114 aa, Kineosphaera limosa NBRC 100340
MSDTLPFDLAAEPDRDAGAAPDGQWRLAEIQVANWGTFDGAIYRMPIARAGHLVTGPSGSGKSSLLDAIAAVLTPDRWLRFNQAAQGAGARVDQRSVVSYVRGAWSRTTDELEDRVVSAYLRTGATWSGIVLRYENGVDRPVSLARLFFVKGTGTTSSDVSDLYLLDRSAIDLRDLEPYARAGLETRKVKAAWPDAVVTSGGAHARFYARLRSLFGIPHEGALQLLHKTQSAKSLDSLDQLFREYMLERPGTFALAESAVTQFGELRDAHDHVVQLRKQRDLLLELRTAAQEFDRANTAASTAGALAEALGPYRTRRGLDLTRAEIRGVLEQIAGLSLDAQRAQETAARAEEDFERAQRRARDLGGSEAEHLQHRIRAAREAVDSTTRRWEELRRLVSTAGIAHTPTTSTEFTELLAQIDTAPTPSAAGPTHAQLDRHAQARREKERVEVEIASLRRSGSTVPDRLVAVRASIAQATGLPVSALPFAAELIDVRAEFAEWAGAIERVLRPFALTLLVRSEHLPVVRRWVDAHRIPARLVYEEVRGDAPAPRPAGHESSLVHRVRVADGPFAAWVSGQLSERFDVACVDSPDDLDAHPRAVTIHGQIKSRSRYEKDDRQRLDDRAHWVLGDREGKLEALIAQLREATREEEAAGAIVDRAARLRSEADYRRATLESIRGQSWADLDRAAAQAEVERLTTTLAQLTAHDGDLGVAVREAEEARVARDTATGLREDARLALRQAGSARDELTAAAQALEAQIASGEVPEVDEATWAELDRRFRAVQRRITRSTIADVGHDVMRRLQRERDVAQEAAREASGTVTTLATRFKERWPASSADLVPRVEDRAAYLEILDQIIAHGLPEHEATFLRLLRERSRDMIGELVSDILAAPREIEDRVVPVNSSLRRSPFDDERWLRLRVKTRRSETVTRFIGDLRSIAEGGWGQDDLDAAERRFATLAELMRRFASSDHVDRVWRTQCLDTRLHVTFRAEEIDAHGRAHATYDSGAAMSGGQQQKLVVFCLAAALRYQLADADEPHPRYGTIVLDEAFDKADTRYTRMALDIFREFGFHLVLATPQKLLQTIEPYVGAATSIENPTRRRSQIATIEWDERGASS

SEQ ID NO: 32041 - protein, 447 aa, Kineosphaera limosa NBRC 100340
MIGVAAARELARARLQAKSAQWAAAAVSGAMSGEVSGAVTGAVAEASGEGAELVADSPDGPVGALVSIPLKPPTERQMLADEPAAEAWAREWAGLAPLSGVEVEWQIRSWRSIGRQRVPVRLHLSDADAVGRFVGGSAEAHWRRLRDRAVCLADRLGALDALGAVIRRHARDLAGYDPDRFGQVVDVAAWIVAHPVAGLRPRQVPVRGVDSKWLGAHRRLVTDLVAAATGSPDLGLLDADRLIRIRILDDADDADEAGDADEAGETDQAGETDQARQALAVGGLRDLAAPAAQLAELALAPRLVIVLENLESMLALPPWPGAVAVHGSGYAVSVVGGLPWVRRAPVLYWGDLDSNGFAILRHLRRGHPNVTSVLMDEPTLLAHRDLWVPEPTPVRGDIDTLTEGEVRALHALRREGDVRLEQERIPWEHALAALRRAAPQEAGDGPL

SEQ ID NO: 32042 - protein, 506 aa, Gordonia namibiensis NBRC 108229
MEISAFPAQHEVGRPAVPLESAQVTLGDALEANRALQKSAAVKLFAATNSALYVTLMERHLDYGTKMSEVELTMRLERDLAELDLTEDQPTGLELVKLWARQGWLHRVTDTTDPDAPNLCHLTSEARSVLDFMRRQRREDSIATGGSITGIAAELRRVAGQVSNDPETIRLELEAQMSDLDAELADLEAGRRPPVDLRVAEDSARAIGYQMEQIISDIGQYGTMLDRITTALLDDPGDSDLAYRDRQRQLFDDYEALLQSSQSASYQAFSQMIQDPERRARLKADIDTIIENFPGMDAGLRSVMDNFFGLVTQQMAEVGRTRQRCARRIRRFVASGTLEQSRGLARQLNDALATANDLLKTSLADRRLGYELPLAAPTLNSIGRLAFEIREHVPPAPALPAGGADADLAAFASMTGQVDTVELTETVNKAVAAGPVALTDVIEGLDEAYLAHVIVLWSWAQKQAAAGEKVPMTTVRFRSLLGEDHAIEVPDLTFTEPIPTAEVDAE

SEQ ID NO: 32043 - protein, 290 aa, Gordonia namibiensis NBRC 108229
MTTTDETNAGSDETQSSLPEVNAEANPSLPEVRAERATKGPDLPDEFAGFDDLPTVANRATSHAPSAPRFDGDVSEMPDRACWALQNLLARRYVSGDRQPQLWSWVSEYQDVLRIRLSELDLRLRLVDELQVAFVEQAGYDSRWGRRILKRETVHTYDAILALHLAKYIRAARDEDALITREEIHELFAGVTNTIDRDLALFDKRIERAIDKMEELEFLRKQRDDADTFTVSPVISAVMTASVITDLQRQFEQFIGSGDTGDEPPESATDDPARPDDAEDGFGDDEGDDW

SEQ ID NO: 32044 - protein, 1112 aa, Gordonia namibiensis NBRC 108229
MSVDQYHLSRLQLINWGVFDGYHSIPFSSNGSLITGSSGSGKSSLLDAISLAFLPDHRRNFNASGDATAAGSSSGKRTVGKYVRGAWGERRDGTNAHREIMYLRGTGPAWAAIAVTYTSTSGTAITGLVLKWLAAGKMTDAHSSYFIYDGDADIVDACNEWAASNYNSAKFRDRGWRGGPGEGKYLSTLYSLIGIRGSDAAQQLLGKAKSLKSVGGLAQFVREFMLDAPTSIVGISDALEQIDPLVEARELLDVARRKRTILGNIEEVHERYASESATFSVLDTIDSTTIRSYVNNLRIRNAQPEVADLDDQITRLDSDLAALTTQHDQLRQDHSLLLARIATSTGDLAPLREQLGGAQKLSTEVTARRNAYEDKVSALGFSAPTNAEGFWSLREELIEEATKIDGQLDAGRAHYAEALAREVAARSRRDTAQEELGRVEQAGSALPRTEHEMRRVIAHALQIDESELKYVAELVELDPDEERWRLAVEKVLRNAGLRLLVPDKHFRSALRFVNSHDMRGRIQLHQAETRPMPDVEPGTLASKLRPVDPGHPCAAEAMTILARLGNHMCVDNPGEFSQYAKAVTDQGLRKDSAKLAVKDDRQQLRRSQYIFVGDVESKITALRDELAYEERAFEDAREDCAELDRERSAKERRRDAYRRVCEQFTQWNEIDVDSVDDRVDQLTDQYDLLMEEHPDVEALQRKAEDLWEQVRNAISQAALVKDKIARQDERRTQLLDLIDRLKPEDVPAQAEKTLDGFREDLSATLDVLNPEPYRQEIVKAAGRERDRMRSDARRSRDELARILDTYDEEFPDAIPNDSDDFDERIHDYVAVCRRIDERELPSAYERMRRLITEQAPGAILGLHMAADAEERRIVEQIERVNTGLGAVAFNRGTRLRLVPGRKKLAAVEELTEKARQISTRATAVSFGDEQAILEQYSDILLLRERLAGNTPEDRQWTRDALDVRNRFDFYCEEHDAASGETIRTYSNAGDNSGGEQEKLMAFCLAGALSFNLASPHGNDNRPIFAQLMLDEAFSKSDPQFAQQALSAFRKFGFQLIIVATVQNTSTIQPYVDNVVMVSKVEAGPDLRPIATATSTTIKAFSELRRSKSQLSV

SEQ ID NO: 32045 - protein, 499 aa, Alcanivorax pacificus W11-5
MDNSPQHRTRKYIAARRQHPAWLLLASPRAPLVLGCLTALFDFAEDGIAETDALQALSDMLANYAAQDEYDIDPDNTRLLAARELRQWIKRGLVIERGQRIYGTDALSSAIQFVEALDNRIMTSTASRLSVVQREIENLEVGLNPDASSRKAAIRRKITLLENELADVEAGHVPVLTEAEAVERIREVYTLATGLRADFRRVEDSWREADRALRQSIMSEHYHRGEIVDRLLDGQAALLDTAEGRVFDSFQQQLRQKVELDNMRQQLRSILAHPAVEKALTRTQRQDLKLLRMRLVLESQAVLQARARSEKDVRAFIKTGLAAEHHRVGQLLNEVLNVAQDLDWQQQKVRRAASPLPPLGFALTNLPVAERLRFKALESDAENELDLSPQDADLSGIEDEFWDALDGLDREALVQDTLAVLSKEERPLTLAELAERLPPAHDLETLALWLGMAREAGIDIITQDTETLTLTDKEQREWLFRVPRVALSEQAFDGIEWEF

SEQ ID NO: 32046 - protein, 248 aa, Alcanivorax pacificus W11-5
MAGIFDQITGQPAGDEPEDADSNTDVDPGETTGASLAEADRTDRALREAAQELLRLGLLEHTHRPNLYRTALVALDQLNAILEPLDLLARVDDIRGLVFLAVRHTTDSPQGAAAEQDDWSHPLVRKQRLNLEQTLLVAILRQHFIAYEQEAGSGATEAIVAVDELVPSLQLYLGDSGSEARERSRVLQLLDQLKGHGLVSAPDSHERVVIRPMIAHLANPENLTALLHALKQQVAEAARNQDGTGGER

SEQ ID NO: 32047 - protein, 1115 aa, Alcanivorax pacificus W11-5
MATQYTLDAAGQTNGWQLAATYTLHSLELFNWGGFNGLHRADIDLQGTAIIGPTGSGKTTLVDALMTLITAAPRYNLASTGGHESDRDLVSYVRGVTGPGDGSEAQSHIARQGRTVTGLAATLHNGDGLVRLGALLWFDGPSMSPSDMKKLWLFSTHPEQTLQSWLTVQHEGGMRALRQLDKTGSGIWTYPSKKAFLARLRDHFEVRDNAFNLLNRAAGLKQLNSIDDIFRDLVLDDNAQFQRAREVADSFDDLTAIHEELDIARRQQRSLEPIRAGWDKYQQNRTLLTDKITLSEVLPVWFGEQAHRLWKAESERLTHQLHQAEAALATAEEQHRHQQQTRNQLHEAYLQLGGADIETLEDLIREKRANLERCQHHAAQYQQLARSLSLPDTLTREAVLANQTQAAEQLQQVTQAHQDAQEHAFEQGSHRRQASNTLDALRRERSEVEARPRSNIRSDYQQFRALLAEELSLTEDDLPFVGELVQIKASEKAWRGAIERAIGSHRLRILVPPGAMSQALRWINSRHNALHVRILEVKAPQKPPQFLEDGFTRKLDYKDHPYRETIKDLLAGLDLHCVDSSETLRDTPHAITIEGLMSGKARFFDKQDQKRLSADWQTGFDNRDRLAALTQEIADSQAALDAARAEEEKAKSSLAALEQQMASLNLLKNLDYTQINVSQAERELREQDSRLQALKAPDSDAAVAKEKLTEADRLLAQLDTARTDCIGACQKLIASLEQAERAKRNAFSKAEAGLKNAARQLAEAHLPALEPQQLNDIDNIERQTASDLKRQLDKLQGIDTQLAKDLVRAMGNAQKEDRGALSEAGTELEDVPEYLKRLTLLIEEALPEKQQRFKEYLTRSSDEGVLQLLSTIEGEVERIEERLEDLNHTLRRVDFQRDRYLQLVANKVVHESLRTFNKAQNSLNSSRLVDDGGESQYTALQHIVRLLRDACERHRTLGARALLDPRFRLEFKVSVLDRESGRVIETRSGSQGGSGGEKEIIASYVLTASLSYALCPDGSNRPLFGTIVLDEAFSRSSHAVAGRIISALKAFHLHALFITPNKEMRLLRNHTRSAVVVHRRGNESSLTPVSWEALDEARAQRAHTDNEVMNDEGRA

SEQ ID NO: 32048 - protein, 389 aa, Alcanivorax pacificus W11-5
MKSPTELAERLARQWHRAPLRVERLLSADSWPLRLPIGKPTGGQFAHQIPQVQAHVQRWRAVSIGEVIWETVNYRAGAEPVSVPVYWCLRTPSEWVAATGNDLVREEFSILEELAHGVSPLYRELLVTERPLWRSKAPRDVITAATLADTLSPGIAAGRPLRLLGGLEVDTKFVERHATLLTRLLDERYNGAASEQGLYPFLDAPADKDHWLMIVPLQAGLLPFRRQRVTAQELARAPLPGSRVLVVENEQCLHLLPALPDTVAILGAGLDLQWLGADTFRDKQVAYWGDMDTWGLLMLARARQYCPALCSLMMTRAHFERHAPGCAVPEPVPAKHSAPAELNDEERAFFEFLLGQEKGRLEQEYLPEEVVHREMGGWGRCHGIEHQAL

SEQ ID NO: 32049 - protein, 506 aa, Bifidobacterium bifidum LMG 13195; identical to SEQ ID NO: 30917

SEQ ID NO: 32050 - protein, 350 aa, Bifidobacterium bifidum LMG 13195
MSDLTNDTAQPDADMDMIDDDMTGTDSADTDSADTDSADTDSASTGADDMGAADVEYDGADAEGAVNPYALFEGDTGDMTADARMVAIMLKRERYISGRFYDLALDNRAAVIRSLNNDLLDLVVNEHYRVMYATAVSGPDMTLRALKTRASLKREEAALLAFLRIRVLEYENAHVAPDEWLVSFEEIRAALATGAGYLASRNDEEGVLRQVGAIVSVMCTYGYLRQLDDDETMYRITPLVPVVLDRQLADSWLVVADRDDDGEPAGDMAPAGSRSAAGDTSNADASGADDDGDSDDAGPDAELFEAPLFDDGADADAAEDIKGADDANGANDSGIDDETASDGGTAREGE

SEQ ID NO: 32051 - protein, 1196 aa, Bifidobacterium bifidum LMG 13195
MSGKDMQMIADRWMMESRRLVNWGSYEGYHEFRPSTDSQLPVTLLAGASESGKSTLVDAQISLLYPTGTPFNKASNSGRSERSDYTYLRGMIGVGGSDGVDEPMYLRGRDESGAPRSIWGAIVDTYRNFTTGQILSCGKFLYLMPGDGRGDVRRLYLAWDKPIDPRRMDVFRESSFTPTQLKSTYPGCVTFPNAEAFHTHIWDVMGLSAEACRLLARIQSADAPSRLDDIFKQGVLGVPEALDLARATVEDYERYDANFRSMEEKTRRMGKLRAITASYGDYESARDAVHSFDAVNPATKSGSATIRAWAIRRMIGEVSERQPLDSRLRDERRSEARAAGKRIESLRTRIDAVRERMRGLDGGDLTRLDAEMRQAERALADITAGRQRIGRMFEAAGEEFPKDEHAWDERRIEAVTFMRSYEQRKGLLDDMRNQTYAAHASVKQTLQRLNDDYERQKSQRTRISRQMDETRAMLCRATGLGPSELPYVAELMDVREDQEHWRLAMNAAYGSMAQTILVDKRHERGFAAKVSAIDPHAMARRTWQFVDTERGGAGNGPGGANTGATGGRDGEVWLSSKLRYREDSPFAGWLREQTSSERLDALCVDGIDDSDHAVRQVQADGQIKSGKRGQHGIKDRQQVIGFVNESYLAQLRTRIQDAQRQCDETAQSYASAKEQADRLQRERELADQLAYTAWEKIDENSAKAAIADIERTIASVRNNPKLAELDTLQESLSKELDRSQRQRIDIERQAELADQAVNAAQAWLDEHAAQPQPQPQTRPLDGEAADVSPKAVTNGRTLLTDEVEEALAESYEQRLSGLGDATTRAHMIIGAGAPQRMAQGDTFADRVIAGIGKDLEARVSMLEGRAASARTAVEARMGAYIEMYAGGDDTIAASVDDYRYYQDELESLSKLATVEATAVEYRNCLDKLLMSFLTIKRAIDTDAGDIHDQLERINAMLDGQQFGPRHGSLSLHADVRRPERAFWSALTRVIGTLNDRKAAQTDDDLDGARCAFASCAAMIDMLRREIGQIRDVNGVKSYGARNLDPRCRSSFYALVRHSDGQVERITSTGGRSGGALQELTSFVYGAALIYLLGGGMDNKLKPSYTTLFLDEALIKADGRYTRRALSVLPRLGFQVIVSAPESKTGEILEVSTKAYVTRKDPDTGYTTLHEARLDGIDEMDGADEPEGTVESDDAAE

SEQ ID NO: 32052 - protein, 478 aa, Alcanivorax dieselolei B5
MFFTEDRHQFFKPLTGKYREQVAECLRLLHERLYSAQADYGESLKREQVLDVFSEALERAPLLEGGDEDGGRFRNNREQAAWILNTLVEHGWLKRDKDEASFQSTYPFSRTGRLFTQTLAEVDGRGIRTRHRNTRNTLNALAAFLDRGEVYDLLDAHEHSERIIADFTDIIAELEERKRELVKEVEAQQLVQQASDQFFEFMEKRFQPDVAIRMSADSVEKHRDRIQNTIERIRRKPKAWKRNAELELRRLAPDLVINPEGSVLWQLLDSIETRMRSAAEIMLPALRRTLQGFTRRADIIIRQLSYLHSQQHSDIVGLCRELSELDDTTAAKRLEAAGQAMAHLRLGLVDPAQNRLREQREKRQVQSRMAHLDAPDPATLRDLAIQQLLEKAFSIHGEGLRDYLRQALGASRRIDNRDLPVNNATDLLALSHVIELGSADHRASGFRLRIEPTDPIIGEPYFARRDGFLLELEHDDDT

SEQ ID NO: 32053 - protein, 222 aa, Alcanivorax dieselolei B5
MTIRDALAEALEARGVGPDQFSELMIRLLDRGVLCRDESKKETELYDRYLQVADLVEDYLSVLRIRLLHERRFHSLRLFPPGAEVPGLADSEDGFNQGLRERLSQQEVAAILVLRAEYDKALREGQIDEHGQVMLPLEAFNLASKNLLGRPLPEALTERRALFRRLRQLRLIRTASDDGLEDAETWLTIRPDITSLVTDAVLSQLTGDGPDAEAPSSEELPS

SEQ ID NO: 32054 - protein, 1216 aa, Alcanivorax dieselolei B5
MFLKRSITVNWGNLPAEELEYGPINLFSGGNGSGKTTAADALQTLMTAAHDNLFNYNPGQDETTQRGRGGKQVRTLASYILGCDDGAFARPYDSDGYLAGVFHPTKGETAEPFTAVIGVRAHLDRAGVTAQARQNELLLMIVPGEMLSLSHFVHGEGAERQVVEITELPNALRRTFGKKNVETYEKKGAYLARLYGALRGRRDAVSQQEAKNAARTFARFMAYKPVDSIDQFVAGEVLEAQDMGDTLRRIRDMLRTIHGMEQEARQLRASVDYLEQARGLAGQYQETWLERTALAYGAAAQRYRRNQRQYLEKKEEQSQLRQQQQALREEAEQVEQRLEQAHDELVGLEARIQGIPALRDKQQLQAQLESLTQQLQQGARPLLEQDQQRSRNFTALRNLRDLLNRHSIELELPLFASKGWRATSKELLALEQRPIPDLNQMLARDWIDLSPLESGLEQARAEQQLHNYLAEQLHGPAESGTNQDALSLAQRLDRLVTQRAQALEKLDEQQRQIQHRISTLESKRVNYPRDVEEALQAIREQCPQADPRVLCDHVEVQDPEWQMAIEGYLGGARFGILVEPDYEAEAIRVVRRLAGRQRNKARVIQGEQARRDAEKAALPAESIFHVLRFSHRTAEHYLKASYGNVVRVDDAETLRRTRRGITSDGLGSGNYALFRCDLDDSQLVFGETARERNLYAQRNALMDVQESYRHASDDYQAVRQLQQQVLEFKPLDWVATVTHLLQCQRQLSDTEQALANLDLSDHEELERQQQDARQRHKQLSQRQGELKEENGKLGEQQHACERAISALADQSEQLQQDQEDAEAHLHACTRYWPDLDVLPRIEAMDRRLQAAQDDIDFSVEEQTQSKALNLAVLTLERLVGDYNQQAQPADQILIETAEELHSAPFFGHVHHLHQQLDNLHNRLRNNVLLSKLEQLGGLRDTFNTTFVSDLCNQIQQAIKDGERTLKNLNKELEHHYFGADRERFSFDWEWVREYKEYWDFFRDVTEIPNLGDGASLFESTLSDKATEVRDRLLALLLDGDEQQALRELERISDYRRYRRYDILKHPEGKAPIRLSQYGTGSGGQLETPAYIIRAAAITSAFRFNEGDSHLRMVIVDEAFMHMDETRSRQVIRYLTETLGLQLIFIMPTSKAGPFLDLVSNQFVFSKVPSPVPVGELNTRVLVDRQQLNQERIAELWDQHRRVIRQQGALDFMEGIS

SEQ ID NO: 32055 - protein, 375 aa, Alcanivorax dieselolei B5
MSAPPWLEEEPWLRRLLSWFLDRLEHPRTQAITRRVKKTTVPELFRFSEDTRYRWQLVERLAQEYRVFSIHYDSRLDPFQEHYENAQLRLDPICEALLRDWLDRPRVDPRRRAWQNALSGHEAHFQDDGAALLDAQPALAGESPEDMVGQFVLAANLLDSDLTLRELSARCFRGDSKFLDGRQDLLARLFGERAQRLRPRPLLLTAWAPAGFDRLLIVENQDSFLRLVEQAPAGHALLYSGGFRASAQRLTSPHTRFAFLSGSDGADFQARWLSDTLPAFFWGDLDFAGLGILAALRHSLPQLTAWRPGYEPMLLALKDGQGHGAEQAGKARQNDPGNTGCPYADQQLLPALRDCRRFLDQEGFLPVLSSPRTPL

SEQ ID NO: 32056 - protein, 486 aa, Mycobacterium hassiacum DSM 44199
MDDNSGLSAAELLELNRDLQGSRAIRLLATHNLALYATLMERHLADGVVNETELVVRLERDLESLDHPDGQSGLALIKSWASQGWLHRIVDERSGQNICYLTQDARRALDFLRGMRRNDTIATGGSLHGIAARLKQVAIKVGGDPARIRKSIEEQIAALQDELTALDAGYRPEPDVTDCYDEARAIALQMERIVTDIGQYGTMIEQATAALDEPIEDNADYRERQRQLYDDFQAAWESAGRDSHRAFLRMVNDPDQRAEFEADVAAVASALPDLDPALRKVMTNFFELVGQQIDEVERIQQRCAQRIKRFTAFGTLEQSRGIARQLNDAIAAARALLRTSLTDSRLDIEVPLARHTITSVGALSFKIGDLSAPKPAKPATGEVDLTSFAALTTQVDAPAMAERLNEAIAAGPVSLPDAVDLIGRGGTGVYLGHVIVLWSWATRQPGADPHAESIPVRFRSLDGRDLAIEVPRLMFTEPISLAGAAA

SEQ ID NO: 32057 - protein, 242 aa, Mycobacterium hassiacum DSM 44199
MTTEPDIDFNKLPEVDQSARPPQQRRPRFEGDVSELPDRACWALQHLLTRRYISNESDPDLYAWVIEYRDQLRVRLSELDLILRVVDGPYENGGVAFVEQARYESSRGAKLLRREPLGTYDSILALHLAQMVRAAGGQKVVISREEMHALFAGVLNDTDRDAVTFAARIDGAIARLTSLEILRRNRDDEDSYTISPVITAIMTASVITELQQQFEQLMKGETAAATDDEAPEHEEDVADDDD

SEQ ID NO: 32058 - protein, 1103 aa, Mycobacterium hassiacum DSM 44199
MFDGYHSIPFSRGGALIAGASGSGKSSLLDAISLGFLPFNRRNFNASGDQTAAGSSAGRRTVDKYVRGAWGQRTENGTSRVMYLRGEGTTWSAVAVTYRSDSGRTVTGLVLKWLTGESRSDSSSRFAIGDGDRDIEEVCNRWAARRFDTSVFKEDGWRFTTKVESQYLAQLYATIGIRASDAAQQLLGKAKSLKSVGGLEQFVREFMLDEPESLVRLPEALKQIDPLVEARELLAVAQRKRKILGDIEKIQQRYASESSDLGIIDLVDMPTVRAYTDHVRLAQCPEQIAQLDSTIEQLDNEYQEITRQLNLAKAEADSLNAQISGSAADLAPLQSQLTAAEAEAEQVSRRRAAYEDLLNAHGIEVPETAEEFWNLREELLAEATELLARAERQREASTDAEYAQKAARIARDEAAKELRRVEAVGSALPEFALAMREQICAAVGIDPSQLPYVAELLDLRRDQTRWRVAVEKVLRGAGLRLLVPDEYWGPVLRFVNETNMRGRLALHHVRTKLYGAEPAELDPKTLAGKLFVVNPDHPCAAEAVDVVAHAGDHICVDTPDVFGRFRRAVTDTGLYKDSDRLAIKDDRRPVRPSEYLYQGDISAKINALTMELAAAEENYQAARRKADEIAAQRQQWRDRAAACKAICEQFPQWSQIDTETADGHADRLREQYELLLADNPDVEALTARAEDCWAQIQKLMTRRGAVETRRDELDQRRTRLLELQERLAPPFVSEPLTELLNRYAAQLPVTLELLDPEPYREALFAAIKREREQLRESRRRSYDELARILNTFDTTFPDAIPNDSDDFDERVHDYVALCRHIDERELPAAYERMMRLVTEQAPDAILTLHRVAEQESRRIVDQIERVNTGLSAVEFNRGTRLTLRATPRQLTAVTELTEIVRAISRRVAEVGLGDKQAIMDQYADILRLRNRLASANPEDRAWTRDALDVRNRFTFDCAEWDVATGELIRTHSNAGDNSGGEQEKLMAFCLAGALSFNLADPDSDDNRPVFAQLMLDEAFSKSDPQFAQQALEAFRRFGFQLVIVATVQNATTIQPYVDSVVMVSKTEPSGRNARPVASVTTRTIAEFSALRRQMTSEPAAAAV

SEQ ID NO: 32059 - protein, 498 aa, Escherichia coli N1
MEENTRQRTENYISAKNQHPAWILLATRRAPLVLSCLKTLFEKSHDGIPLEEAIQSLSSILIEHVSQEQYDINQDNPFLQASRELREWIKRRLIVERDGRIFATDALEVAITFVESLDNRFMTSTASRLSTVQREIENLETRLNPNPANRVATLRRRISELERELQEAEAGHIEVLETHQAVEHIREVYNLASSLRADFRRVEDSWREADRALRQSIIGEQYHRGDIVERLLNDQDALLNTPEGRVFDSFQQQLRQSSELKAMSERLRVILSHPSASDALNRLQRHDLRWLVKRLVDESQTVLQARARSERDVRGFMKTGLAAEHHRVGHLLNEFLNLALKLDWQRQMIRKQEVPLPAVGVAVTGIPAIERLRFKEVDDEAEQTLDLSNHAADLTQIGDDFWDAFNGLDREVLIQQTLQLLAKENRPVGLAELAALLPPAHDLETFAVWIGMAREAGIEVIDSQREFAELSDGEGRRWRFNLPTTGLESQALMDIDWE

SEQ ID NO: 32060 - protein, 249 aa, Escherichia coli N1; identical to SEQ ID NO: 31335

SEQ ID NO: 32061 - protein, 1095 aa, Escherichia coli N1
MNQVSGLAGKESFILTRIELFNWGGFHGLHQAAIHQDGTAVIGPTGSGKTTLVDALMTLLCANPRYNLASTGGHESDRDLISYVRGVSGPGDGGEGQSHIARPGKTVTGIAATLEREGKQVRLGALLWFDSTSSSVTDMKRLWLFSDNPGQTLEHWLNVYHEGGTRLLRQMEKEAIGLWTYPNKKQYLARLRDFFEVGENAFTLLNRAAGLKQLNSIDEIFRELVLDDHSAFDRAAEVANSFDGLTEIHQELETARKQQQSLQPVALSWEKYQKQERQLADWQTLESLLPLWFAQQANHLWREKINLLNARLAEAQTSEEQLQSQLDLQKKVVSDCMQRYLQVGGANIDELNERIKDWQKTLGSREALARQYQQLTRNLGLPSDLIQPQLEANQHEAAALCEQIAVDIKLKQEEAYQKGALSHHITEELRERENERAEIARRPDSNLPAHYQAFRSELAKALNVDESELPFVAELIQVKPEEAQWRGAIERAVGSNRLRILVAPESAQEALRWVNQRNNRLHVRLLEVKLPHSPARFFDDGFTRKLLWKDHPWREAVKALLAESDRHCVDSPEQLRDTPHAMTVQGLMSGKQRFYDKHDQKRLDEDWLTGFDNRDRLNFLAKEITTLQEQVKTANAAFEFAKGEVGILQNQAASFQKIEQIDFDSIDVPGAKSQLDALRERLENLTRPDSDASVAKAKLDEAQTVESELDKQLRAANKVTNVLDTELTSARAAERKAQQTAQQGMKEEERELCASHFPVVTLEQLPDIRDLERQHERGIQHEIERVKAELHRLNIELTKRMSEAKRVDTGALVEAGTDLDDITVYLQRLQELTEEALPEKLNRFLDYLNRSSDDGVTQLLSHIEHEVLVIEERLNELNETMFRVDFQPYRYLRLDTKKVVHESLRTLEKAQRQLNAARFVDDNGESHYKALQILVAQLRDACERNRTLGAKALLDPRFRLEFAVSVMDRQSGNVIESRTGSQGGSGGEKEIIASYVLTASLSYALCPAGSRYPLFGTIILDEAFSRSSHAVAGRIIAALREFGLHAVFITPNKEMRLLRDHTRSAIVVHRRGQNSNMASLSWEELERHYQRRGNA

SEQ ID NO: 32062 - protein, 311 aa, Escherichia coli N1
MSYRASDTSVLMPLRWILNSPSEWINAAADPVVSREFRLLEGIIEQVNPIFHPLLVKHRSLWRHKDPQGVISAATLACRLEPGCAKGLPLRLLSGQGVDTKFIENNISLLTRLLDVRFSGEASEQGLTTFLDAFDESSHWVLVVPLSPGLLPFKKCRVTTAELAETTLPASQVLVVENEQCLHHLPALSDTIAILGCGLDVQWLSSSVLDEKRVAYWGDMDSWGLLMLARARRCRPTLDALLMNRELFEQYASHSAVPEPVIAKEAVPDGLLNEEADFYRYLTRLPCGRLEQEFLPVGIAEEVLLRWGKES

SEQ ID NO: 32063 - protein, 498 aa, Simiduia agarivorans SA1 = DSM 21679
MFFTDSRLHFFRPLVGKYREVVVECVRLLYQKLYTDLTGYGQSHGRDFVIDVFVEAIARAPLLDEEVGAPEGRFKDARALAGFILNNLLDNGWMERRLDEATLQSHYGFTRMGRGFAQPFVESGKLEYRSRNRNTRNTRNSLQAFAEKGEVYDLLDALEYSERIISDFADTIAELEERRLQLVREVESRQLIEQAADQFFDFIDTVFKPDLEVRLSADSVEKYRDQIASLIRQVRRRRKYGEGEHAELLWQTVMEMRLRKLLPGRVVEGQSLLENIVHTIEERLQSACDIMLPALRRALNSFTARADIIIRQLSYLHRQADEPLLDACSRLREMSPDNQEQALQRMGQVLAGVRSGWPASEQFVLRSRNRRRTVRATLANAPGLDRDAQKAQFISQVLDQAFHVSSQHIRAYVSDKLITQGRVYSKHLAVQDARQLLALAHVVSLAGERLDNGFEILIHPARSDSAGLQVFEASNCGDGYFDSRENFELELVDRQRAS

SEQ ID NO: 32064 - protein, 242 aa, Simiduia agarivorans SA1 = DSM 21679
MTMRESLEQALAEKDLGLNQFQTLIQRLLDYGIICRDESQVEAELYDLFLRIETLVDEYLAFAGIRYFHEPRFEYVRLVPPGSQLPGVDDETEDAPFNQGLRAALPPALVAVVMVLAVEYEKALREARVDERGLANLSLEALSLSLKNLLGRSLPDALQERKALFRQMRQLRLVRMSAEADLLQGDSWLQIRPMILTLVSPDVLSQIEDHAGQSIVIGDADDTALESTGPRDNSSVDSGAGE

SEQ ID NO: 32065 - protein, 1208 aa, Simiduia agarivorans SA1 = DSM 21679
MYLKKFIYVNWGNIPHGEFEFGPTNLFSGGNGSGKTTAADAIQTVMTAAHDGLFHFNPGQDESTQRGRGGKQVRTLASYVLGCDDGAYARPESAFGYLAACFVPHPGEDAVAFTAMLAMSAFVEQAGRQKTARMDSIDFYLLPDVSLVLGDLLKEDSGGRYVVPTDQIQKLLRKQYGDARVEKYERKKAYLCRLYGALRGRDDAVSEREAINAARAFSRFMAYKPIKAIDEFVATEVLEPKDIGDAVRDVSSMLKRIHAMEADARKVAEAADRLQQARNSADTFIAHWLELQQLIYAVARRDYDIGQKKYLAEKSRQTDLKTQLEQNLRDSDIARERLEVLQQEINEIQLQKLQVPALRDREQLAREQQQIEAAMVRAMPPLMQDVAGIRQAQANAAQLLTLSKTVPWEGFERPAFKALAARVAERASGEPADIHQLANRDWIDISPLESQLDAAQGLQQLHNDWVAAWHAKGGLQQSLQQALDKQLTQVRQTERQLQARLAEVAQLEAKQVSYPSYVRVALEALRRQLPEADARVLCDHVEVDDPQWQAAIEGYVGGARFGIIVDPDWEAEAIRLIRQLPGRDNRARVIQGSQARKDADRMTLEADSVLGVMSFSHDTARHYMQASYGQVLRVDSADALKQVRRGVTQDAIGAANYALFRCDIDEADLVFGLKARERALKARQAETQQLARELQAQQEQAGALQQLVDLTDGLGLSRYADSLQQLLAQQREHEALSARLARLDVSDFAELEQTANTLQASFNEQKQALAALEEQRIQVEAEQRLVTLNCQKADQQQDEKLGQLEAAEDRLAQLVNLWPDFNADAALEQAEDWAQTRQVAQLNEQQTDIRSGLGRIVRRLDNLVQEHNLAADLADGIVYEPDLASLESDTNFSAICQLQRSLDGLYNRLRNNILATRQSEISGMRESFNNAFVTNLCHAIYQSVKEGEATLEQLNRELEHHRFGADRERFYFGYSWVPEFNEYRQFFKAVIDNPSIGDGESLFDMPLDKKQRQVRDKLMAMLLDADEQRALKELARIADYRNYRRYEIYKEPEGKEPIALSQYGTGSGGQLETPAYIIRSAAITSAFRFNEGRNHLRMVLVDEAFSKMDEHRSKEVIQYLTETLGLQLMFIMPSSKSGPFMDLISNQFVFSKCATEQAIGELRSRVLVDRQVLNQSAIKALMNEHRSTLRHQASLDFLEEMERVTGAG

SEQ ID NO: 32066 - protein, 473 aa, Thermacetogenium phaeum DSM 12270
MGLFQVIPENLFSLLSSKNKETYLDGLFVLHRAYKQEMILTKDQVVSMLISELEDKIMEMDLEGEEMVPERNLSALAHFLIRKFHQTGWIALEYATDSFEEQITLYDYSIKILNTLHDLLDTTPREYNSLVYSTYSLLKTANEERDMYTYNALIQAYKNTNSLVDELKSLLNNIRRYHQALLDQTEVKGILKEHFDSFKEMIEDKIYHPLKTFDSVPRFKAPIINILKGWLADPAILDLLVTSARRRRQDKDEDALLEETIVMIEEIIGVYEGIDILLKEIDRKKAAYTRASVEKMEYLLNTDRSIKGKLVEILKAAGEKGEESRLQQMMQESLNLFPQRFLDEASLYSRQKPRAREPGQPLKMSQAVDDTLLEKELDDLLNRAKNSYSTRRIMNFMERQFAGRQVIETGDLIIRGDEDFIMVILGILKHDEAAAFYRIEFLPGYLLVNGYRLPMMRLSRKDAAPCGLMNTSS

SEQ ID NO: 32067 - protein, 214 aa, Thermacetogenium phaeum DSM 12270
MWLDEYEQLTHTEKEEFIRIANQLLSRTFIVRDRYSSKDKCLKLNPDYRFIERHLELFRQYLRLSGWELQKDNNYGVIALYNRFDLNRARLDKRTTLILYVLRLIYEEKREKLSLKREITTSVGEVVEKMINLGLIDKKPPNRDLLNAFGALSRYQIIERLESDVTQPETGIIIYPSILFVVTNEKISEIYELAGADANDEEENTEEILPEAEE

SEQ ID NO: 32068 - protein, 1135 aa, Thermacetogenium phaeum DSM 12270
MKLLQKLLLINWHYIERELIEFSGINFLTGKNASGKSTIIDALQLLFLGDTSGNFFNKAANDYSQRTLKGYLRGEVADDGGTGFIYLRDGVFSSYIVAEFFDTIKKKSFCFGVVFDVYGEDNPTHKFFLLEAPLPEHQFILNNTPMDYHTLRNHLNSTGKIKYQFFDSNRSYRESFLGKMGGLNNKFFTLFKKAVPFSPIMDIEKFICEFVCDVSNRIDISDMQANIRHYKQLELEAGFVKERIERLTVISAKYQDYLIEKERLLQQSYLMDRAQLQESVDRIDALREAIRQNNEKMVSLAAQLEKKEQEIKKLDEKRDRLLKEKFESDLYKKTESLKKQLDDLTAQLKQLDGVRQRLAELITRTGNTWKRALKDYAKHIAPEKAHAYASLQREAAYLSGIKPDGLICPETQGELDAERLQEIRSRMKAFRNEVDALYFDTRSRLEAARNRAAELASEIANLKKGIKPYDAKLLELRREIKNQLQQQYGREVPVEIFCELIEVRDKRWQDALEGYLHTQKFYLLVPPEYFVAALKVYDRLKFERQFYDIGLVDIGKLQELNPKVKQGSLAEEVVTDNPYARVFADYLLGRVIKCERVEDLRQYRTAITPTGMLYHNFTARQINPDRWKVPYIGKQAVKKQIEIKEQELAGLNQEIRKGEFRFEVLEGLKEIDPLGDDTIAHITGSLQQLRTYQDLVGERRQVQEALERIDLSYLEKLDREIEEVEKRRTAVEEQREQLKRENNKLEYENNAIREEKIPAEESRRADCKQRIDEKYDAGWIRETGEPRFLKEMEKRGSPRKIIEAFHSQLERTKNQAERKWQELVRARSDYNRDYKMSYDINLPENTPFDEELTELRDTHLAEYEAKIKDAREKAQKQFQEDFISKLKQNIDTVRGQIEELNDALKNVAFGRESYRFEIKPNPNYKRFYDMITDSMLLEGYNLFSQAFQAKHRDAIDELFKQIVDVGEGDLSADQRAELERNIEKFTDYRTYLQFDLISKDESGRESRLSKTITKKSGGETQTPFYISVLASFVRVYRLQQRYRNKNNTLRLIVFDEAFNKMDHQRIQESIKLLRSFGLQAVICAPTEKIGDIAPLVDRTLCVTRLNNITVVRAFDPRKLEDEDELPERYHQPAAR

SEQ ID NO: 32069 - protein, 409 aa, Thermacetogenium phaeum DSM 12270
MNYQNVIINLLLDKYEQSRHFRGNARVNRRVALKFDKKNFPLYDIERVDVKEAIHHAALELQQRGLITVEWMKFEVGNIISRVFLNLEMVAEAYALVNRKGKKDILVEARRKLERLREQVTTPWIKDFCREMLQEIEEKKEMPRYLPREEEKFDLLVRALQGIEQKGEDELLERIFSRRYLGGSKEFERKIRSRLITIVKNYLLPGRDMDDEEVLEHIGLLKTSEELSFFGPLVIDLHGQVIDFSPFCYGASMNAEMIRNFEVSRLPVNRVVTIENKAAYLEYIKNTRPERELVVYLAGFYSPLKRLFLEKIYNHLRKHTPQAAYYHWGDLDLGGFQIFVYLKNLIPELQPLHMDVATLRENARFADTFDDKYRKRLEQLLKQEEYAVFFEVINFMLQAGIKLEQEALV

SEQ ID NO: 32070 - protein, 485 aa, Leptospira noguchii str. 2001034031; identical to SEQ ID NO: 31618

SEQ ID NO: 32071 - protein, 187 aa, Leptospira noguchii str. 2001034031; identical to SEQ ID NO: 31350

SEQ ID NO: 32072 - protein, 1118 aa, Leptospira noguchii str. 2001034031
MTDLFSSGEITANTGYRLKSLEILNWGTFNGKIWKLNSQGETFLLTGANGSGKSTLVDAILTLLVPSTKRNYNLASGLESKKRDRSEKSYVEGHYGRASSGSEGILKIRGKQEECYSVLSAVFNAKGKFPIIRIAQIFWFESSDLKKIYLISDESLDFEKDLVLRNRTIKELRSDLKNSGARLYDNFKAYGVDFRKMVGLESEKAIDLFNQIVAIKSLGVLNEFVREHMLEAKDKRFRIEELDRNFFDLNETYETILSAREQLRLLEPIEKKAFEYRDWNSKVEGVQELILFAPEYFTQKKYELCKKKEQDYTLDLFRVQDHLKELNSLTESLKKEERELYYSLENNDTRKRISDLKRKFEEIQTNLNKRRSEREKYSEYLLKLDLEKVLIEDSFYSNFRKAGEKLQKSDSTRDSIRDRLTDLTVKRKESKVEFDSVYSELEHLKKSKDNLPRIVSSMREKISQGLGVSEKKFPFVCELIRVKDSEKEWTGALERLLHNFGLRMLVDEEDYKVLSSYVNSSHLGGKIVFSRMLTQGGPILQPKDKDEVFYKLEIKPSLSKFQKEWLETQILKEFGHICGDLQRLQKEEKALTKEGLIKSGKIRHEKDDRKNINDARDYILGWNNREKISALESEFMRLGKVIDKIESEIKKVEEEQKQNDLFRDDLKSFLRFEQFSQIDDQSLEEPLEQTRKEIQDLEVLSEEYGKLKEQYESAKVRLSEAEGKEKETTKELTLLEERFSNLKKEMETLNSRIKEFDPNRRTRLEPILNERLGQVIFNLDSILEQERKFLEVLIKERNDFIEKRDSIGEELNKGMDRYVKKFREEADREELSVSILNAEAFAELTERIRKDRLPEFQDKFRNLMSDKVAKQILEFKAELEDDVSEIKDRIDELNESLRYLDYSKGKSYIQIRYFETKDREIIGSTGFKELLRNSIPDMGDSSNNEEKFSRIRELLGKLKGENGSDRWSRLVTDSRNWLDFQAAEFQRDTDTIIQVYDSSAGKSGGQTVKLAYTILASAIAYQFKIRELNSFRFVVIDEMFNNLDNENSRYAMDLFRQLGLQLLVVTPMDKITVVEPYVQSVHFVKNNSDGNDSRVYLITKEKLDSEKIENTDRKVGNL

SEQ ID NO: 32073 - protein, 389 aa, Leptospira noguchii str. 2001034031; identical to SEQ ID NO: 31617

SEQ ID NO: 32074 - protein, 485 aa, Leptospira fainei serovar Hurstbridge str. BUT 6
MDYRILNRLFGSPAIRLLKKDNAPFILYFLEKYFRDSGRNFVPFEELKILLRHELENIREVHDLSLYREAEVYISEWVGENFLYRRIRSSEGNEEIILEPTSELEKVFSWIEDLRSLNEREAIGTESRFFSVLNKLKEIVEESVSDPKEKIKQLELKRDVLDEQIGKLKLGDEVSIFPSERIRSQYVYARKEALALLSDFRQVEGNFNEITKLIHKKYLDVAQKGEILQFALDGDQELLQSEQGRSFQAFWDFLRSEKSQEKFESILDSLYLLKDVIALDDRKFFRNFRRNLREAGSRVNGVVSRMSEQLKKSLVERTLRENRRSKELISEIKNIVIERRFDYDNENFHSMEEIEIRLPMERPLWTGDPVDAFKSIQISNDEEESLSIDFLESIRGVDLEIYENRILSLLRSYPEITLEKVLDTFPDDIGFESLVAYVWIAARGENHFLDDVETFLCFPSLKSSGDQKLSAYRVPKGIYRVGTDG

SEQ ID NO: 32075 - protein, 187 aa, Leptospira fainei serovar Hurstbridge str. BUT 6
MDKIALFATAVLKLLKGPIGIESDFKAWDNLLTYERQVREYFEKIGLFLHLDREDGYAFLRQTSEDESIESEEKLPVLTRRLPLTKEETLFLVLLRECIIELEEADPSGSVVLRKGEIFDRVRPFFPDSSDEIDTQKKFERLFKKAEDMGFIKQIDSDTARIEKILKAKITVSDLERLRTKFKQGSE

SEQ ID NO: 32076 - protein, 1118 aa, Leptospira fainei serovar Hurstbridge str. BUT 6
MLDLFSPGEISTNSGYRLKSLEILNWGTFHGKIWKLNSEGETFLLTGANGSGKSTLVDAILTLLVPSAKRNYNLASGLESKKRDRSEKTYVEGHYRRFASGSEGILKIRGKQEECYSVLSAIFEAKGKNPQIRIAQIFWFESGELRKIFLVSNEILEFEKDLLLSNRTVKELRSDLKNSGARIYDNFKAYAVDFRKAVGLASEKATDLFNQIVAIKSLGVLNEFVREHMLESRDKRDRIEELDRNFSDLSETYQAILNAREQLKLLEPIERKGAEYREWDEKVRNVQDLIRFVPIYFSKKSYELHKIKEQEYILDLSRIQDRLKVLSDQVESFKRDERELFNALENNDTQKRISDLKRKYDVIFLEQKRRRSEKEKYSEYLRKIGLKNVLTEEVFYSNYQKAGEKLSETESTREEIRDRLGDLMVQKKELESEFHSIRSELEHLKKNRENLPKTQSEIRAKMSEELGLSEKMFPFVCELIRVKDSEKEWTGALERLLRSFGLRMLVTEEEYEKVSGYVNSSYLGGKLVFSRMLSSAGPLLQPKDRDEVFYKLEIKPDLQRSQKEWLEAQILREFGHICSDLQRLRKEEKAVTKEGLIKSGKIRHEKDDRKSLNDARDYILGWNNQEKISALEGEFVKLGQEVYKIELEIKKVKEEEIQNDRLRDDLKSFLRFEQFSQIDDQSLEEPILETQKQIQDLEILSVEYGKLKEQYELAKVRLSEAEGREKETTKEFTIVEERLSNLRKEMDELTFRIKEIDPEMSAQIGPVIAERLSGMVITLESISENERKFFEMLTNERDDHLRKRDSIGEELNKAMDRYVKRFQEEADREELSVSVLNAGAFAKLTERIRKDRLPEFQDKFREMMSDKVAKQILEFKAELEDDVAEIKERIDELNSSLRYLDYSKGKSYIQIRYFETKDREIVGDIGFKEMLRASIPDVGDSSNNEEKFARIRELLGKLKGENGTDRWSRLVTDPRNWLDFQAAEFHRETEEILQVYDSSAGKSGGQTVKLAYTILASAIAYQFKIREQDSFRFVVIDEMFNNLDHENSRYAMDLFRQLGLQLLVVTPMDKISVVEPYIQNVYFVKNNLEGSDSRVYRIKKEKLDPDENTNGDRKSGKF

SEQ ID NO: 32077 - protein, 388 aa, Leptospira fainei serovar Hurstbridge str. BUT 6
MISFEEIRKKSLSYYNKILFHSILRIDSFPWEIPTGKVEPAELIRNPSLLEEIKEGSKERKEFGFRLVSVQRETRKFGMQTLPVKIVFDSEDDFLAFLNKRDEFKDFRSECERILAKIPQLKDWLSKNPLTVVEQTGKWEDLLSVCEYFLKNPKPNLYIRELPIRVSTKFIEENKAVLRSLLDFLIPEHIDREGRDFESRYGLKKAEASVRLRILDAEISEKYCGGLTDISIPVSDFLNLRLGECKRVFILENKTNFANIYNFLSFPKLSNAIAIFGQGFGLGVLKDCVWLKGMEILYWGDLDVQGFEILSVLRSQYPQTKSFLMDKEVFLKFRNFAVDGAHSKFLKLQNLTEAESETWNFLRTLDSKNRLEQERIPHDYVKKRLSTF

SEQ ID NO: 32078 - protein, 483 aa, Leptospira sp. Fiocruz LV3954
MDYKLLQRLLRSSAIRLLRKDNAPFIIYFLEKYFRSSARTFVPFEELKILLRYELENLNDQEEISLQRSADVYLGEWIGENFLTRRIRSAEGIEEIILEPSVELEKVFSWMEDIRSLEDKDVIGTESRFFSVLNKLKEIVEESVSDPEEKIRQLEFKRDELDLQIRKLKAGEQVSKFPSERIRSQYVYARKEALGLLSDFRQVEGNFMEITKMIHKKYLEVVQKGEILRFALDGNDELLRSEQGRSFQTFWDFLRSERSQEQFESILDSLYSLEDVLDLDSRKFFRNFRRNLREAGSRVNGVVTRMSEQLKKSLVERTLRENRRSKELIAEIKNLVLENPLDFSQTDFYSLEEMDVRFPMERPLWRGDPEETFRTVRIENTDEDENVFDILESIRGIDLEMYEQRIQTLLRISPEVSLEKVLREYPDDVCFESLVAYVWIAGNGEFHSLDDSETFVYSVSIMDHPSEKLAYRIPKGTYRVGHL

SEQ ID NO: 32079 - protein, 187 aa, Leptospira sp. Fiocruz LV3954
MNKPHIYAASILRLLKGSINSESDAKIWKNLLDNEKSVREHFEKLGIFLHLDREDGYAFLRQTSDDESAESDEKLPVITRKLPLTKEETLFLILLRECIIEIEEKDPSGSILFRKEELSDKVSPFFSDLSDEIDRQKRFEKLLRKSEELGFVKQIEPETIRIEKLLKAKLTVSELEGLRGKFRLGTE

SEQ ID NO: 32080 - protein, 1118 aa, Leptospira sp. Fiocruz LV3954
MTDLFSPGEIAANTGYRLEFLEILNWGTFHGRIWKLRPEGENFLLTGANGSGKSTLVDAILTLLVPAAKRNYNLASGLESKKRDRSERSYVEGHYGRSSSGSEGILKIRGKQEECYSVLSAVFEANGRFPRIRIAQIFWFESGELKKIYLFSDKELDFEKDLVLGKRTVKELKADLKNSGARLYDQFKAYNVDFRKAVGLESEKAIDLFNQIVAIKSLGVLNEFVREHMLESRDKRSRIEELNRNFSDLSETYEAIVNAKEQLKLLEPIEKKAAEYREWNRKAADLQALIVYVPYYFAEKNYELRQIREQDYLFELSRLKDRSDELSTEIESLNQEERKLFNALENNDTQRRIADLVRKREGILSDLKTRGIERKKYSSYLSKIGLEETFSEETFYTNLRIAGGMLTETDSIWEEIRDRLGKLTLQKMELQKNFDSVRSELEYLKKKRDNLPRTQSEIRAKIASGIGLSEKRFPFICELIRVKESEKEWTGALERLLRNFGLRMLVAEEDYEAVSAYVNSSYLGGKLVFSRMVPLSGPILQPKDKEEVFYKLELKSELSNVKKEWLEAQILREFGHICGDLNRLRKEEKALTKEGLIKSGRIRHEKDDRKNISDARDYILGWNNTEKIAALESEFALLGQNIYRLNSAIDLVREEENKNKNKRDDLLLFLRFEQFSQIDDESLKGPLQDTERQIRELELRSEEYGKLKEQYELAKARLTDVQGRQRETAKEFNVLEDRLSTLRKDMEDLQQRIRKVDRETSISLEPILNERLRETILTLESIAETERNFSDRLVVERDQYLEKRDSIGEELNKGMDRYVKRFREEADREELSVSVSNAEGFAKLTERIRQDRLPEFQEKFRTMMSDKVAKQILDFKAELDDDVSEIKERIDELNDSLKDLDYSKGKSYIQIRYFDTKDREIVGDSGFKEMLRGSIPDLGDSSHNEEKFAKIRELLKKLKGEGGSDRWSRLVTDPRNWLDFQAAEFLRDNNQILQVYDSSAGKSGGQTVKLAYTILASAIAYQFKIRERNSFRFVVIDEMFNNLDGENSRYALNLFRQLGLQLLVVTPMDKITIVEPYVRSVHFVKNNSEGNDSRVYPISKENVSSGKDENSERKVGNL

SEQ ID NO: 32081 - protein, 392 aa, Leptospira sp. Fiocruz LV3954; identical to SEQ ID NO: 31360

SEQ ID NO: 32082 - protein, 483 aa, Leptospira santarosai str. AIM; identical to SEQ ID NO: 31357

SEQ ID NO: 32083 - protein, 187 aa, Leptospira santarosai str. AIM
MNKPYDYAPSILRLLKGSINSESDAKIWKNLLDNEKSVREHFEKLGIFLHLDREDGYAFLRQTSDDESAESDEKLPVITRKLPLTKEETLFLILLRECIIEIEEKDPSGSILFRKEELSDKVSPFFSDLSDEIDRQKRFEKLLRKSEELGFVKQIEPETIRIEKLLKAKLTVSELEGLRGKFRLGTE

SEQ ID NO: 32084 - protein, 1118 aa, Leptospira santarosai str. AIM
MTDLFSPGEIAANTGYRLEFLEILNWGTFHGRIWKLRPEGENFLLTGANGSGKSTLVDAILTLLVPAAKRNYNLASGLESKKRDRSERSYVEGHYGRSSSGSEGILKIRGKQEECYSVLSAVFEANGRFPRIRIAQIFWFESGELKKIYLFSDKELDFEKDLVLGKRTVKELKADLKNSGARLYDQFKAYNVDFRKAVGLESEKAIDLFNQIVAIKSLGVLNEFVREHMLESKDKRSRIEELNRNFSDLSETYEAIVNAKEQLKLLEPIEKKAAEYREWNRKAADLQALIVYVPYYFAEKNYELRQIREQDYLFELSRLKDRSDELSTEIESLNQEERKLFNALENNDTQRRIADLVRKREGILSDLKTRGIERKKYSSYLSKIGLEEASSEETFYTNLRIAGGMLTETDSIWEEIRDRLGKLTLQKMELQKNFDSVRSELEYLKKKRDNLPRTQSEIRAKIASGIGLSEKRFPFICELIRVKESEKEWTGALERLLRNFGLRMLVAEEDYEAVSAYVNSSYLGGKLVFSRMVPLSGPILQPKDKEEVFYKLELKSELSNVKKEWLEAQILREFGHICGDLNRLRKEEKALTKEGLIKSGRIRHEKDDRKSISDARDYILGWNNTEKIAALESEFALLGQNIYRLNAAIDLIREEENKNKNKRDDLLLFLRFEQFSQIDDESLKGPLQDTERQIRELELRSEEYGKLKEQYELAKARLTDVQGRQRETAKEFNVLEDRLFTLRKDMEDLQQRVRKVDRETSISLEPILNERLRETILTLESIAETERNFSDRLVVERDQYLEKRDSIGEELNKGMDRYVKRFREEADREELSVSVSNAEAFAKLTERIRQDRLPEFQEKFRTMMSDKVAKQILDFKAELDDDVSEIKERIDELNDSLKDLDYSKGKSYIQIRYFDTKDREIVGDSGFKEMLRGSIPDLGDSSHNEEKFAKIRELLKKLKGEGGSDRWSRLVTDPRNWLDFQAAEFLRDNNQILQVYDSSAGKSGGQTVKLAYTILASAIAYQFKIRERNSFRFVVIDEMFNNLDGENSRYALNLFRQLGLQLLVVTPMDKITIVEPYVRSVHFVKNNSEGNDSRVYPISKENVSSGKDENSERKVGNL

SEQ ID NO: 32085 - protein, 392 aa, Leptospira santarosai str. AIM
MISPEILRKRSLAYYHNELLRSIVLGGVLFPWEISIGKVLPEEILKNPSLLRELRAESKENKGFGFRIVFRSKETRKYGIQTIPTKIVFDTEDDFLRFTKKKDEFLSYRTDCTLILSVLPELKDWILKNTLSVIEESGKWESILSVCSYFLEYRNPGLYIRELPIRIPTKFIEENKKVLRSLLDFLLPEIADAKDFETRYGLKKAEPLVRFRILDLEIAKSSTGGLTDLSIPVRDFRKLELSGCGRVFILENKTNFANLFNFLSFPQLKGTISIFGQGFGLNVLKDCNWLEKMEIFYWGDLDVQGFEILSQLREQYPQSRSFLMDLKTFVRFRDFAVDGISSSKSSEPKFLTPSERETWKYLSSLDSKNRLEQEKIPHEYVQEVLSGLGGSQ

SEQ ID NO: 32086 - protein, 483 aa, Leptospira santarosai str. JET; identical to SEQ ID NO: 31357

SEQ ID NO: 32087 - protein, 187 aa, Leptospira santarosai str. JET; identical to SEQ ID NO: 32083

SEQ ID NO: 32088 - protein, 1118 aa, Leptospira santarosai str. JET
MTDLFSPGEIAANTGYRLEFLEILNWGTFHGRIWKLRPEGENFLLTGANGSGKSTLVDAILTLLVPAAKRNYNLASGLESKKRDRSERSYVEGHYGRSSSGSEGILKIRGKQEECYSVLSAVFEANGRFPRIRIAQIFWFESGELKKIYLFSDKELDFEKDLVLGKRTVKELKADLKNSGARLYDQFKAYNVDFRKAVGLESEKAIDLFNQIVAIKSLGVLNEFVREHMLESKDKRSRIEELNRNFSDLSETYEAIVNAKEQLKLLEPIEKKAAEYREWNRKAADLQALIVYVPYYFAEKNYELRQIREQDYLFELSRLKDRSDELSTEIESLNQEERKLFNALENNDTQRRISDLVRKREGILSDLKTRGIERKKYSSYLSKIGLEEAFSEETFYTNLRIAGGMLTETDSIWEEIRDRLGKLTLQKMELQKNFDSVRSELEYLKKKRDNLPRTQSEIRAKIASGIGLSEKRFPFICELIRVKESEKEWTGALERLLRNFGLRMLVAEEDYEAVSAYVNSSYLGGKLVFSRMVPLSGPILQPKDKEEVFYKLELKSELSNVKKEWLEAQILREFGHICGDLNRLRKEEKALTKEGLIKSGRIRHEKDDRKSISDARDYILGWNNTEKIAALESEFALLGQNIYRLNSAIDLIREEENKNKNKRDDLLLFLRFEQFSQIDDESLKGPLQDTERQIRELELRSEEYGKLKEQYELAKARLMDVQGRQRETAKEFNVLEDRLFTLRKDMEDLQQRIRKVDRETSISLEPILNERLRETILTLESIAETERNFSDRLVVERDQYLEKRDSIGEELNKGMDRYVKRFREEADREELSVSVSNAEGFAKLTERIRQDRLPEFQEKFRTMMSDKVAKQILDFKAELDDDVSEIKERIDELNDSLKDLDYSKGKSYIQIRYFDTKDREIVGDSGFKEMLRGSIPDLGDSSHNEEKFAKIRELLKKLKGEGGSDRWSRLVTDPRNWLDFQAAEFLRDNNQILQVYDSSAGKSGGQTVKLAYTILASAIAYQFKIRERNSFRFVVIDEMFNNLDGENSRYALNLFRQLGLQLLVVTPMDKITIVEPYVRSVHFVKNNSEGNDSRVYPISKENVSSGKDENSERKVGNL

SEQ ID NO: 32089 - protein, 392 aa, Leptospira santarosai str. JET
MISPEILRKRSLAYYHNELLRSIVLGGVLFPWEVSIGKVLPEEILKNPSLLRELRAESKENKGFGFRIVFRSKETRKYGIQTIPTKIVFDTEDDFLRFTKKKDEFLSYSTDCTLILSVLPELKDWILKNTLSVIEESGKWESILSVCSYFLEYRNPGLYIRELPIRIPTKFIEENKKVLRSLLDFLLPEIADAKDFETRYGLKKAEPLVRFRILDLEIAKSSTGGLTDLSIPVRDFRRLELSGCGRVFILENKTNFANLFNFLSFPQLKGTISIFGQGFGLNVLKDCSWLEKMEIFYWGDLDVQGFEILSQLREQYPQSRSFLMDLKTFVRFRDFAVDGISSSKSSEPKFLTPSERETWKYLSSLDSKNRLEQEKIPHEYVQEVLSGLDGSQ

SEQ ID NO: 32090 - protein, 483 aa, Leptospira santarosai str. 200403458; identical to SEQ ID NO: 31630

SEQ ID NO: 32091 - protein, 187 aa, Leptospira santarosai str. 200403458; identical to SEQ ID NO: 31627

SEQ ID NO: 32092 - protein, 1118 aa, Leptospira santarosai str. 200403458; identical to SEQ ID NO: 31632

SEQ ID NO: 32093 - protein, 392 aa, Leptospira santarosai str. 200403458; identical to SEQ ID NO: 31633

SEQ ID NO: 32094 - protein, 483 aa, Leptospira santarosai str. CBC1416; identical to SEQ ID NO: 31626

SEQ ID NO: 32095 - protein, 187 aa, Leptospira santarosai str. CBC1416
MNKPYDYAPSILRLLKGSINSESDAKIWKNLLDNEKQVREHFEKLGIFLHLDREDGYAFLRQTSDDESAESDEKLPVITRKLPLTKEETLFLILLRECIIEIEEKDPSGSILFRKEELSDKVSPFFSDLSDEIDRQKRFEKLLRKSEELGFVKQIEPETIRIERLLKAKLTVSELEGLRGKFRLGTE

SEQ ID NO: 32096 - protein, 1118 aa, Leptospira santarosai str. CBC1416; identical to SEQ ID NO: 31655

SEQ ID NO: 32097 - protein, 392 aa, Leptospira santarosai str. CBC1416
MISPEILRKRSLAYYHNELLRSIVLGGVLFPWEISIGKVLPEEILKNPSLLRELRAESKENKGFGFRIVFRSKETRKYGIQTIPTKIVFDTEDDFLRFTKKKDEFLSYSTDCTLILSVLPELKDWILKNTLSVIEESGKWESILSVCSYFLEYRNPGLYIRELPIRIPTKFIEENKKVLRSLLDFLLPEIADAKDFETRYGLKKAEPLVRFRILDLEIAKSSTGGLTDLSIPVRDFRKLELSGCGRVFILENKTNFANLFNFLSFPQLKGTISIFGQGFGLNVLKDCSWLEKMEIFYWGDLDVQGFEILSQLREQYPQSRSFLMDLKTFVRFRDFAVDGISSSKSSEPKFLTPSERETWKYLSSLDSKNRLEQEKIPHEYVQEVLSGLGGSQ

SEQ ID NO: 32098 - protein, 450 aa, Pseudomonas stutzeri KOS6
MEDALQALSEMLAAYASQELYEIDPDATHLQAGRELREWIKRRLVVEREGRIYATDALESAIQFVDSLDSRIMTSTASRLSVVQREIENLETGLNPSPTGRIASLRRRIQDLEHELAQVEAGHVIVLDEAQAIEGIREVYNLATSLRADFRRVEDSWREADRALRHSIISEQSHRGEIVDRLLDGQDALLNTPEGRVFESFQQQLRQSAELEAMRERLRTILRHPAVPKALNRPQQRELRWLALRLVRESQAVLQARARSERDVRGFMKTGLAAEHHRVGQLLNDFFNLALSVDWQRQSERRKPVRLPPVGVAITGVPAIERLRFKTLDDDDTGELDLSLKPAGLEQIDDDFWDAFDGLDRETLIQDTLAVLAEQGRPVSLGELASLLPPAHDLETFALWLAMAREAGIEVLKEERQLVELVDEDEQRWCFNLPYVGLDHEALKDIDWEL

SEQ ID NO: 32099 - protein, 249 aa, Pseudomonas stutzeri KOS6
MAGIFDRIAGASGTDETELTVEPIALDDGMDDEQPLMSAAVQVDERRTPQRVREAVQEMLKYGLLEESHKPNLYRSALANIEAVDTILEPLDLAMGVDEVRGLVFVTVRQGEGAEQDDWSHPLVRRQRLNLEQSLLIAILRQHFIAYEQESGTGATQALVAVDELIPQLQVYLGELGSEAKERNRVITLLDQLKGHGLVSALDAHDRVIIRPIITHLANPENLQALVVWLREQVEGATTPAAAAEEDEA

SEQ ID NO: 32100 - protein, 1101 aa, Pseudomonas stutzeri KOS6
MKQALLWRDSETFILSSIELYNWGGFQGYHRAEIDPSGTAVIGPTGSGKTTLVDALMTLLCANPRYNLASTGGHESDRDLVSYVRGVTGPGDGGVEQSHIARQGKTVTAIAATLERDGTQVRLGAVLWFEGTSSSASDLKKLWLLSESTEQTLEHWLSQHHAGGMRALRQMEKDGTGIWPYPSKKAFLARLRDYFEVGENAFTLLNRAAGLKQLNSIDEIFRELVLDDRSAFGRAAEVASSFDDLTDIHRELETARKQQRSLQPVAEGWERYRALQEQLQDKQALEGILPVWFAEQGYRLWLAETNRLETEHKQAELDQEQCRSQLEIQKGVVDQHRQSYLRVGGAEIDLLRARIADWLRECDKRRLKAEQYQRLAKGLGLVDELSAAALEENQQQIAARLEILAEQITEARQKAFDAGIVQKELNGRLQSLQQERAEVERRPGSNLPGHFHTFRGDLAQALDVDESALPFVAELVQVKPEELAWRGAIERAIGSHRLRILVPQGASEAALRWVNQRHNRLHVRLLEVKEPSSRPVFFDDGYTRKLTFKEHPYREAVKALLADNDRHCVESTEQLRHTPHAMTAQGLMSGKERFFDKQDQKRLDEDWLTGFDNLDRLAFLTEQIREVNEQLAPAKLALDAAQGDVRKLEDQASLLQRVEELQFEEIDLPGAERQLESLRAQLDTLTRPDSDLALIKAELDEAEALLDSLDRQRQQLIEQCGQLKIQFEQAASATRKAYRGAEKGLSDTQRELALAHFPTLSADDLGDIVELERKHTHELQGQLKALGDKLGDQKTELAKRMSDALKVDTGALAEVGRELVDVPRYLERLRVLTEEALPEKLKRFLEYLNRSSDDGVTQLLSYIDHEVSMIEERLDDLNSTMQRVDFQPGRYLRLVAKKVIHESLRTLQQAQRQLNSARFIDDEGESHYKALQALVGLLKDACEHSRNQGAKALLDPRFRLEFAVSVIDRESRSVIETRTGSQGGSGGEKEIIASYVLTASLSYALCPDGSSRPLFGTIVLDEAFSRSSHAVAGRIIAALREFGLHAVFITPNKEMRLLRHHTRSAVVVHRRGVESSLVSLSWEALDEHHQQRIKAMHEVAH

SEQ ID NO: 32101 - protein, 385 aa, Pseudomonas stutzeri KOS6
MKSPTDISRSLARQWQRSSVRLERLLNPASWPQSLNIGKPSARLFTDNIQAVLRHVENWRSVNVGTVDWEPVSYRAGLSPISLPMRWHLHSPSEWIAATNDPAVSREYAQLEYLVEQVDSAFHALLVAQRGLWLTKPPEEVVATAQLATRLSLGCARGRPLRLLAEHGVDTKFFERNASLLTRLLDERFEGAASEQGLTTFLDAFEESSHWVLVVPLQPELLPFKRLRLTTAELAETPLPGSRLLVVENEQCIHLLPENLPDTLAVLGSGLDLQWLASAHLAGKQIAYWGDMDTWGLLMLARARLHQPAVEALLMEQELFEQHSPVSAVVEPTKALDSAPPGLLADEADFYRYLLVQERGRLEQEYLPKEQVERAIEQWARKIPV

SEQ ID NO: 32102 - protein, 486 aa, Mycobacterium abscessus subsp. bolletii 1S-154-0310; identical to SEQ ID NO: 31485

SEQ ID NO: 32103 - protein, 249 aa, Mycobacterium abscessus subsp. bolletii 1S-154-0310; identical to SEQ ID NO: 31486

SEQ ID NO: 32104 - protein, 1115 aa, Mycobacterium abscessus subsp. bolletii 1S-154-0310; identical to SEQ ID NO: 31487

SEQ ID NO: 32105 - protein, 489 aa, Nocardia brasiliensis NBRC 14402
MAGAGALMTSSPLADLFESNKTLQDVAAVRLFAAKNLAPYVTLMERHLDGSAKVAEPELVLCLERDLEEVGLAEQTGLGLIKTWASSGWLNRVSDGAGQGAQNVCSLTEDARSALAFLRKLRRGDTVATGGSIVHIASGLKRIASQLDEDPARLRVEIEAQIEDLFGQLTDLDKGHRPEPNLVDLADEARAIAYNMEQVVTDIVSYGGMQNDITTKLIEGVEDSDIEFRDRSRRMFTDYDALFVSRERASYAAFTRMVQDPDQRARLRSDINTVVERLPDLETGLRDVMVHFFQRVSAQIGEVGRVEQRCALRIKRFFAAGTAEQARGLARQINAALATGHALLREAVVDSPTRAELPISPSSVTSVGALVFDIQDPSPPKPAKEVPPSDDLSGFSGLIAQVDIPALTALVNRAVSMGPIPLPEVIGMIDDPYLGDVVVLWALADKQDPGTAVTADTRRVRFRSVDGRQCLIEVPCVVFRRPVEAVSDL

SEQ ID NO: 32106 - protein, 240 aa, Nocardia brasiliensis NBRC 14402
MGAFNFDDLPEVDLAATAEATTSPRFDGDSSGLPNQACWVLQNLLTRRYLTKDDKPDLWSWLIEHRKVLASRLCELDLRLRIHEDLDVAYVEPALLDNPNPHSRKVLRREPLGTYASIVALHLAKIARTSHDEHVIISRADIQDLFGSVRHRVDRDEAMLRNRIDEAITKLNKTQILLRTRDDEDSYAISPVILAIMSGQMVDELSKEFDQLLRRAQDDAPGSSTLDSDDYGERELGGDD

SEQ ID NO: 32107 - protein, 1128 aa, Nocardia brasiliensis NBRC 14402
MATTSAIQRQVWLSRLQVINWGVFDGYHDIRFSRAGTLITGASGSGKSSLLDAVSLAFLSAKRRNFNASSDSTAIGSNLGKRTVDKYIRGLWGERQQPGERPKPMFLRGTGPAWSAVAVTYTGSDDTIVTGLVLKWLAAGADTDASSSYHLIKQDADILDLCNTWRDRGYAKAVFESAGWQGRRDHESWYLDRLYAATGIQGQTAALQLLGKAKSLKSVGGLEQFVRDYMLDVPESFTSIKDAVNQITPLVDARNALAVAQKKRGVLGDVEDIHDRYVTEGAQLASIDIIDQQMVRDWVDEQRLAQIEPEVLGLDTEIERIGAERQELSNQRDILTAKRDVLTARIASAGGDLPSLRAELAQASDYAEKVGRQRTRYDELLLDMGYPPVDNAADFASMRSYSHAESTRITAEIKALQHRLTDQEGPRRRAAEDQMNSSRKELKRVELLRTTVPANEDRIRTEIAQALGVSSKHLPYVCELMDLEPQYAMWRKAVEKVLRTAGLVLLVPDRHHRAVLHYVNDHNMRGLIRIEHVQGADRQPSQPQTGTLAECLQVIDRDHECARTAAQVISKAGDYTRVGGPDEFRRHRRAVTIEGLRQESELRAVKDDRREIPASQYIYQGNIEHKIAALREELGHATAEFEASDEAVTGLHTTIESLGAEKERWGRLSAGFEHYRDVDADSADGEVQRLQNQLDQFEAEHPDLANLQKQAGDYLKGINALSGRIVILDEREITHDARRTQLLELQDTLHPGVVGPQARTTLHDYLPQLSVSLDVVVPAPYRQALVALIEKDQRQLGEAVRRSLGELQRIVSQFDAQFPDDIPNSSDDLDEKIHDYVALCQRIDSRELPQAYDRMLRLITEQAPTAALRLYQLAEEETQRIEDQVARVNLGLGSVEFNRGTRLTLHADIKKLAAVTDLNDRARRISGRAAAVSAGDQHAIHDQYRDILELRNLLSAETPEARQWTRDALDVRNRFTLYCAEREATTSDLIRTYSNAGANSGGEQEKLMAFCLAGALSFNLADPETGDNRPVFSQLMLDEAFSKSDPVFAQQALSAFRKFGFQLLIVATVQNTTIIQPYIDSVAMVSKRDQPGKDPVASVRTVTVTEFADIGHSLTAASKTGVSTNAYR

SEQ ID NO: 32108 - protein, 386 aa, Nocardia brasiliensis NBRC 14402
MRIGLGAPKGTEFDNDVIGVTNWAGTWQAAIDNARIPGITATESRRARGLGAHFLPTVWEIEGPEEALVVAPDVAASYRIAEQRLQEAVSLAGVVWDDISMIPIKNARTIAAFDGKDWTNAVAVVNHLTTIGVGEATMVRQLAIPGVHSKWIERNATVLGAMLGVPNDRTLGDPLTRLFNHIGLKGKDIPLRVTLACPHLRTKAAGLLRFDATIPILNSSTLCPSAVLVVENLELGHTLPTELPGVAIICGLGSGAPLLAALGWVHAAACVLYWGDIDRAGLAILATVRRAGIRAHAVMMDGTTLDAYPSAQHETDTQMDSDEVPIGLEGGEVDLYVRLNRFHNETGRELQLEQEHIPVAQAHLAITGALRECSTWRESSMPPRSR

SEQ ID NO: 32109 - protein, 489 aa, Xanthomonas axonopodis pv. malvacearum str. GSPB1386
MKHQARIAGYRQLREQPVWKLLAADHAPELIGLLQTVLMDGERRLPSAVLHERLQRQLDALRADELSRELPRTAQAYLAHWLSLGWLERRLPEGAAEEEYELSRAATQAIRFIVGLRESSSSATESRLSLVIQQLVQLAGQTEADPELRLAALRDERARIDAEIERVASGRVAALDGKRALERARDLIHLSDELAEDFHRVRDDFEQLNRQFRERIIDDEGARGDVLEQLFDGVDVIADSEAGRTFEAFWSLLNDTQQSSQLDQALDALLARGFARKLDRRERAFLRGLTGTLLERGGEVHTVMQHFARSLRGFVQSRGYLEQRRLNQLLKQAQGEALQLRDSLHATTATGYTQPLSSSRLRSLSQWRLHDPRLTQVDGRVQAADAAEISLDSVGDLVAQSEIDVRSLRNDLHELLGQRPRLTIGDALQQRPAVQGLGSVIGYLSLGTRHGMVIEGQMETVQWEGSDGAVRRARIPLVWFTREKRNELV

SEQ ID NO: 32110 - protein, 233 aa, Xanthomonas axonopodis pv. malvacearum str. GSPB1386; identical to SEQ ID NO: 31977

SEQ ID NO: 32111 - protein, 1337 aa, Xanthomonas axonopodis pv. malvacearum str. GSPB1386
MNSQSNLSPAQPGASLFAETLAEQRAQQFRMRRLQVHNWGTFNGLTEVPIAQKGFLFVGRSGSGKSTLLDAMSALLTPPSIVDFNAAAREAERSGRDRSLVSYVRGAWADQQDSASGEIATQYLRKGATWTALVLEYANAHGQTVSLIRLFWIAGSGNAAADVRRHYMVAPRCFDVATELDGFDLDLRKLKARLGDEVAHFDGFAGYAERFRHALGIGNEMALRLLHKTQSAKNLGDLNAFLRGFMLDEPRTFEAADRLVEDFAELDGAHHAVVTARRQVETLTPAREHHAALMALRHSVGELRELQLGVDSYREQQRLALLEERLQELDNQDRGLAGEEGQRRESLDNHEQKLVGLEREQRAAGGEQVEELERERARVERERDERLRRRAQIEQACRQLGTALAAGASGFAAQIAHAQTVLDNGKHDASALDEAIAERMGARRDDERRFAEIRAELEALKRAPSSMPAPMQALRARLCEDTGIAEAALPFVGELVQVREDQTAWRGAIERVLHGFAQSLLVDERHYAQVSEWVNRTHIGTRLVYFRVRRNDELHSRRVDPGALPGKLQLREHAFTEWLRNELTRRFDYACVDNAAALRNADRAITREGQVKHPGDRYEKDDRHAVNDRKRWLLGHDNRDKLKVFEREAQTLAQRIASCDADVAALRKQREQDQERQLAAHTLVERDWDEIDVGPKLQRLSDIDEQLVQLREGNSGLRALGQAIDTARTLRDQAKRTYEDVRLERAQLARERVRLEQQQAACAGRAGSATLTPTQLQGLRERLAALTPLSLDNLEAHFRVVERGLAEQLADSQGRDSRLSAQLLECFRKYCQQWPEDSGDFTVSLASADDFLARLDRLESDGLPRHEHRFFDLLQTQSKNNLLALQRHTAEAHKGIKQRMDEVNASLERVPFNRDTVLTIEVGDRRLAEVQEFQQQLRAVLSHQQTEDRALAEAQFSTLRALVARLGAQEPEARRWREQVLDVRLHVEFIGVELDAQTRAQVEIYRSGAGKSGGQRQKLATTCLAAALRYQLGGEDGELPRYCAVVLDEAFDKADNEFTALAMNIFENFGFQMVVATPLKSVMTLEPFIGGACFVEISGRHNSGVLLIEYDEQAQRLKLPERSRGDEPAVADATDAAPSIEAAAESAGVQGAASADGMATNGVPMHTASPATEETPPAAQETQTGQRKPAVATTSKQNKTASSTRAAAQPQAKRPKKSPSRTPALAGKPASNKRPAGVPAVSSGVASRSNVGKTTRSSKTPGKPIAATSASNATSRKVAAASAALKTAAAKPRATAASTGQPARGAGKTTSTRAVAKPSPATTRGAKTGAPQARRKR

SEQ ID NO: 32112 - protein, 489 aa, Xanthomonas axonopodis pv. malvacearum str. GSPB2388; identical to SEQ ID NO: 32109

SEQ ID NO: 32113 - protein, 233 aa, Xanthomonas axonopodis pv. malvacearum str. GSPB2388
MNWSEDTGLYADEETGAPAIDDRMPMAQTSSAEPRGELFLGDTGTLPFDARRALCQLLAGPSIDAQRHGALWPALLRNEVAIRQVLCELFLELVLDREGGVAFTRQADTAELESPTLLRSAPLTFIESVLLLFLRQQLAEADTRGERAVVDEAQLVEALSVYEKNVSTDRAGFARRVMTAIGKMRDNQLLSRLRGSEERYEVSPVLKLLFSAEDVQALVVAYRELREGEVALD

SEQ ID NO: 32114 - protein, 1340 aa, Xanthomonas axonopodis pv. malvacearum str. GSPB2388
MNSQSNLSPAQPGASLFAETLAEQRAQQFRMRRLQVHNWGTFNGLTEVPIAQKGFLFVGRSGSGKSTLLDAMSALLTPPSIVDFNAAAREAERSGRDRSLVSYVRGAWADQQDSASGEIATQYLRKGATWTALVLEYANAHGQTVSLIRLFWIAGSGNAAADVRRHYMVAPRCFDVATELDGFDLDLRKLKARLGDEVAHFDGFASYAERFRHALGIGNEMALRLLHKTQSAKNLGDLNAFLRGFMLDEPRTFEAADRLVEDFAELDGAHHAVVTARRQVETLTPAREHHAALMALRHSVGELRELQLGVDSYREQQRLALLEERLQELDNQDRGLAGEEGQRRESLDNHEQKLVGLEREQRAAGGEQVEELERERARVERERDERLRRRAQIEQACRQLGTALAAGASGFAAQIAHAQTVLDNGKHDASALDEAIAERMGARRDDERRFAEIRAELEALKRAPSSMPAPMQALRARLCEDTGIAEAALPFVGELVQVREDQTAWRGAIERVLHGFAQSLLVDERHYAQVSEWVNRTHIGTRLVYFRVRRNDELHSRRVDPGALPGKLQLREHAFTEWLRNELTRRFDYACVDNAAALRNADRAITREGQVKHPGDRYEKDDRHAVNDRKRWLLGHDNRDKLKVFEREAQTLAQRIASCDADVAALRKQREQDQERQLAAHTLVERDWDEIDVGPKLQRLSDIDEQLVQLREGNSGLRALGQAIDTARTLREQAKRTYEDVRLERAQLARERVRLEQQQAACAGRAGSATLTPTQLQGLRERLAALTPLSLDNLEAHFRVVERGLAEQLADSQGRDSRLSAQLLECFRKYCQQWPEDSGDFTVSLASADDFLARLDRLESDGLPRHEHRFFDLLQTQSKNNLLALQRHTAEAHKGIKQRMDEVNASLERVPFNRDTVLTIEVGDRRLAEVQEFQQQLRAVLSHRQTEDRALAEAQFSTLRALVARLGAQEPEARRWREQVLDVRLHVEFIGVELDAQTRAQVEIYRSGAGKSGGQRQKLATTCLAAALRYQLGGEDGELPRYCAVVLDEAFDKADNEFTALAMNIFENFGFQMVVATPLKSVMTLEPFIGGACFVEISGRHNSGVLLIEYDEQAQRLKLPERSRGDEPAVADATDAAPSIEAAAESAGVQGAASADGMATNGVPMHTASPATEETPPAAQETQTGQRKPAVATTSKQNRTAKTASSTRAAAQPQAKRPKKSPSRTPALAGKPASDKRPAGVPAVSSGVASRSNVGKTTRSSKTPGKPIAATSASNATSRKVAAASAALKTAAAKPRATAASTGQPARGAGKTTSTRAVAKPSPATTRGAKTGAPQARRKR

SEQ ID NO: 32115 - protein, 484 aa, Thauera phenylacetica B4P
MPLDFATLDTLRSHHPAWRLLRSDHAPLVASFLHRVFVTPNVRGMPAADLAEALEDELYALRLTRGEDAFPKAAIDYLDDWAAADKAWLRKYYKPGTDEAQFDLTPATEKALAWLAQLSERQFVGTESRLLTLFALLKQMGEGSETDPARRIAELQRRRDEIDAEMARVLAGDIPLLDDTAIKDRFQQFMQGARELLADFREVEHNFRQLDRRVRERIALWEGSKGALLEQIMGERDAIADSDQGRSFRAFWDFLLSSRRQEELSDLLDQVLALPAVAELNPDARTRRVHYDWLEAGEHTQRTVAQLSQQLRRFLDDQAWLENRRIMDLLHGIESKALALRAAPPPSPAMEIALPGAAIELALERPLHTPPTRPAIAELRIEAGDEDVDPHALFEQVTVDKARLARHIRHALQDRAQVTLAALVAAQPLEQGLAELIAYLQLGSDAFTTTLDEATPEPIEWQASAADGSTITRRARLPRVIFMR

SEQ ID NO: 32116 - protein, 227 aa, Thauera phenylacetica B4P
MKLTMDDEDLAPGPTEPAAPAPAPDLSVLLIGLLKGVLYREADERQWSSLLQLQARVREYVAVLNLELVLDEAEGYAFLRGRPEPADDDPAPRLPRLVARRPLSYPVSLLLALLRKKLAEFDAGGGDTRLVLGRDDIVELVRVFLPEGPNEARLIDQVETHINKVVELGLLARLKPTSASATAPASFEVRRILKAFVDAQWLADFDARLATYRAALADGKETPSDDA

SEQ ID NO: 32117 - protein, 1139 aa, Thauera phenylacetica B4P
MNDPQSLGLDFVADDTLSGFRLQRLEVLNWGTFDRHVWTLQLDGRNGLLTGDIGSGKSTLVDAITTLLVPAHRIAYNKAAGADTRERSLRSYVLGHYKSERNEVTGAARPIGLREPGSYSVILGVFHNAGYDQTVSLAQVFWFKEPQGQPARLYLGAEHALSIAADFSGFGPDITQLRKRLRGAGAEIFDSFPPYAAWFRRRFGIDNEQALELFHQTVSMKSVGNLTDFVRHHMLEPFEVGPRIQALIGHFDDLDRAHQAVLKAQRQVSLLAPLVEDCHRHDALAADIGALRRCREALQPHFAARKLALLDHRLALAAEEWARADAQARRLDGLREEQALRIDALKQAINANGGDRLERLAAEIRKLAQVRDARLAKSRRYAELAVVLGTPAAADGEAFAAQRLHFAAGREDARNRDAELQNTLTEHAVSLRQGKLEHDALSAEIDSLRRRRSNIDDRQIQIRAALCGALGIDVEDMPFAGELLQVREDERDWEGAAERLLRGFGLALLVPDAHYKAVAEWVDGNHLRGRLVYFHVRPPRAGELPALHPDSLVRKLAIKPDSPHYDWLERELAHRFDVACCATQEQFRRETRAITRAGQIKDPSGRHEKDDRHAIADRSRYVLGWSNTAKIEALEAQRRQLEARLGEVGSQISRIEAERRALAGRLDALTRLEEFIAFDELDWHSVASDIATLEDERRALEAASDLLKELNRQLAELQQIRGDTERELGAARERRAKVEQRQADAESLRATTLALVDAAPIDPALVPQLEALCAEVLGEHALTVESCDNREKEVRDLLQTRIDAEDRRLARLAEKIIKAMSAFKQQFALETAEIDASLEAGFEYENLLTQLNRDDLPRFLARFKELLNVNTINEIANFNAQLARERETIKERIAHINKSLGEIDYNPGRYIVLESQPSPDAEIRDFQQELRACTEGALTGAGEGDDEQYSEDRFLRVKGIIDRFRGREGLSDQDRRWTAKVTDVRNWFLFAASERWREDDSEYEHYSDSGGKSGGQKEKLAYTILAASLAYQFGLEWGAVRSRSFRFVVIDEAFGRGSDESAQYGLRLFEQLNLQLLIVTPLQKIHIIEPFVASVGFVHNEGGSASKLRNLSIEEYRAQKAEMRAAAQAAPRAGGAAAS

SEQ ID NO: 32118 - protein, 439 aa, Thauera phenylacetica B4P
MSWSTASDLRAQVMRLWERGELLREGLPQGNGELPRACLPEEGGEGAQPCEQPSDAAVDTTAGLPAGRSRFPLRLSLKTPGPDDITRRFDAVRAWVVAISATPHVRLEWQETRHRVQGSQRLPASAWVDRLDDALAWIGRRAEHARFRALHDETAARQPLLLPWLAKRPLRALELAAEWSRLLDVVAWLQAHPRPGVYLRQVDLPGIHTKFIESQRGVLAELLDLALPAAAIDPARSGAQQFAARYGFLDKPVLLRLRVLDPALGLLPGAPCPDLALDADSFARLRLDVARVFITENETNFLAFPRVDKAIVIFGAGYGWEALARAEWLQRCPIHYWGDIDTNGFAILAQLRARFAHVESLLMDRATLLAHEALWGREDSPRPADVSRLTAEERSLYEDLRDHRICPSLRLEQEHIGFGWLEKWLKIVHVMDDFQPYGG

SEQ ID NO: 32119 - protein, 483 aa, Leptospira santarosai serovar Shermani str. LT 821; identical to SEQ ID NO: 31357

SEQ ID NO: 32120 - protein, 187 aa, Leptospira santarosai serovar Shermani str. LT 821
MNKPYDYAPSILRLLKGSINSESDAKIWKNLLDNEKPVREHFEKLGIFLHLDREDGYAFLRQTSDDESAESDEKLPVITRKLPLTKEETLFLILLRECIIEIEEKDPSGSILFRKEELSDKVSPFFSDLSDEIDRQKRFEKLLRKSEELGFVKQIEPETIRIEKLLKAKLTVSELEGLRGKFRLGTE

SEQ ID NO: 32121 - protein, 1118 aa, Leptospira santarosai serovar Shermani str. LT 821
MTDLFSPGEIAANTGYRLEFLEILNWGTFHGRIWKLRPEGENFLLTGANGSGKSTLVDAILTLLVPAAKRNYNLASGLESKKRDRSERSYVEGHYGRSSSGSEGILKIRGKQEECYSVLSAVFEANGRFPRIRIAQIFWFESGELKKIYLFSDKELDFEKDLVLGKRTVKELKADLKNSGARLYDQFKAYNVDFRKAVGLESEKAIDLFNQIVAIKSLGVLNEFVREHMLESKDKRSRIEELNRNFSDLSETYEAIVNAKEQLKLLEPIEKKAAEYREWNRKAADLQALIVYVPYYFAEKNYELRQIREQDYLFELSRLKDRSDELSTEIESLNQEERKLFNALENNDTQRRISDLVRKREGILSDLKTRGIERKKYSSYLSKIGLEEASSEETFYTNLRIAGGMLTETDSIWEEIRDRLGKLTLQKMELQKNFDSVCSELEYLKKKRDNLPRTQSEIRAKIASGIGLSEKRFPFICELIRVKESEKEWTGALERLLRNFGLRMLVAEEDYEAVSAYVNSSYLGGKLVFSRMVPLSGPILQPKDKEEVFYKLELKSELSNVKKEWLEAQILREFGHICGDLNRLRKEEKALTKEGLIKSGRIRHEKDDRKNISDARDYILGWNNTEKIAALESEFALLGQNIYRLNAAIDLVREEENKNKNKRDDLLLFLRFEQFSQIDDESLKGPLQDTERQIRELELRSEEYGKLKEQYELAKARLTDVQGRQRETAKEFNVLEDRLFTLRKDMEDLQQRIRKVDRETSISLEPILNERLRETILTLESIAETERNFSDRLVVERDQYLEKRDSIGEELNKGMDRYVKRFREEADREELSVSVSNAEGFAKLTERIRQDRLPEFQEKFRTMMSDKVAKQILDFKAELDDDVSEIKERIDELNDSLRDLDYSKGKSYIQIRYFDTKDREIVGDSGFKEMLRGSIPDLGDSSHNEEKFAKIRELLKKLKGEGGSDRWSRLVTDPRNWLDFQAAEFLRDNNQILQVYDSSAGKSGGQTVKLAYTILASAIAYQFKIRERNSFRFVVIDEMFNNLDGENSRYALNLFRQLGLQLLVVTPMDKITIVEPYVRSVHFVKNNSEGNDSRVYPISKENVSSGKDENSERKVGNL

SEQ ID NO: 32122 - protein, 392 aa, Leptospira santarosai serovar Shermani str. LT 821; identical to SEQ ID NO: 31356

SEQ ID NO: 32123 - protein, 489 aa, Xanthomonas translucens pv. graminis ART-Xtg29
MKHRARIARYRSLREQPLWKLLAADHAPEVIGLLQSLLLESERRLPAAVLHERLQRMLDELNAEQLSRELPRTAQAYVAHWLAQGWLERRLPDGAQQEEYELSTQATQAIRFADGLEHARGAATESRLALVMQQLAQLAALTETNPDARLSALRDERDRIDAEIARVSKGKVAALDGKRALERARQVIALADELTEDFRRVRDDFEQLNRDFRERIIDDEGERGEILGKLFEGVDVIGDSDAGRSFQAFWALLNDAEQSAQLDAALETVLARSFARKLDRRERGFLRGLTGTMLERGGQVHDVMQHFARSLRGFVQSRGYLEQRRLNQLLKQAQAEALALRDHIPAQRSIGRDLNLTTSRLRSLAQWRLHDPRQQQVEGSIQRNEAAAISLDSVGDLVAQSEIDFRSLRRDLFDLLAEQPQLSIAQVLTQREASQGLGSVIGYLSLGTRHGVVAAGQHEIAQWRGGDGQWRRARIPLVWFTQEKRHELA

SEQ ID NO: 32124 - protein, 234 aa, Xanthomonas translucens pv. graminis ART-Xtg29
MNWHDHEWDAEQERLPDAADNAAPDAGSGLFPGDSGRLPVEARRALCQLLSGPSVDAQRHSKLWPALLRSEAAIRSALADLFLELVLDRDAGIAFTRQADTGELEAPVLLRSSPLTFIDSVLLLHLRQQLAEADARGLRAVVEEAQLGEALAVYEKNLSTDRAGFLRRVGNAVQKMKDNHILTRLRGEDERYEVSPALKLLFSAEDVAALAQVYRQLREGPGSGEDAAEAAQDA

SEQ ID NO: 32125 - protein, 1178 aa, Xanthomonas translucens pv. graminis ART-Xtg29
MRRLQVHNWGTFSGLTEIPIAARGFLFVGRSGSGKSTLLDAMSALLTPPSIVDFNAAAREAERSGRDRNLVSYVRGAWADQQDSESGEIATQYLRKGATWTALVLEYRNGEDRVVSLVRLFWIAGNGTAAADVRKHYMVAERAFDIAADLDGFDLDLRKLKQRLHDVHHFDSFAGYAERFRHQLGIGNEMALRLLHKTQSAKNLGDLNAFLRGFMLEEPKTFDAAERLVGDFAELDGAHQAVVTARRQVETLLPARAHHAELMAVRRQRSELDELKLGIDSYREQRRLALLDARLQELDTQDRGLAGEEGQRRAALENHQRRLDDLEAQRRAQGGERIDALERERGQQETERDRRAAKRTQAEQACRQLEQVLAGSAHGFAEQAAQARAALEDGTRAAAELDEAIGQRIAGKAEDARRFAEVRAEIDALKRNPSNIPAPMQALRARLSADTGVPEAALPFVGELLQVRSEDADWRGAIERVLHGFAQSLLVDERHYADVADWVNRTHLGIRLVYYRVRDNEHALPGRAPAAGSLLHKLELREHAFAGWLRRELGKRFDYDCVDSAKALRHAERAITREGQVKHPGERYEKDDRHAVNDRRRWLLGFDNRDKLALFEEEGLALAQRIAACDADVAALRARRERDGARRLAQHTLANLAWDEIDVAAPLQRLEDIATALRQLREGDANLRALGEAIDHARADIKQAERTFDGVRTERITLGAERARLEKQRLSCADADARVVTPLQRQGLDERLAGLGVLSLDNLEAHFRQIGNAIVEQTSASDKEHNRLEQLLLGCFRRYCQQWPEDSGDFTVSLSSAEDFLARLQRLERDGLPQHEARFFELLQSQSKNNLLALQRHTAEARKSIAQRLDEVNASLEQVPFNRGTLLTIELGDRRLPEVIDFHQRLRDVLGHHQTEQRELAEQQFAVLRELVRRLGSQDGEDKRWRELVLDVRLHVEFVGVELDAATRQQVEIYRSGAGKSGGQRQKLATTCLAAALRYQLGGEDGELPRYCAVVLDEAFDKADNEFTALAMNIFENFGFQMVVATPLKSVMTLEPFIGGACFVEISGRHDSGVLLIEYDEQARRLKLPERTRGANAADAAAAAPDEQEAPEAEQAQPAPQRLRAGAVAVVRGTAADPALADAAAATAATPQRTPPKSKPTSRTKPTSKPKPKPKPKA

SEQ ID NO: 32126 - protein, 392 aa, Xanthomonas translucens pv. graminis ART-Xtg29
MARANAMLLPDAALAALRGQWRLHRGAWLLGEAAPQPVALRMPTQAQASAGFEAFGAWLRAWHATPLPGRVEWRDVKWPQLGPQCLPQAWQPNADEAALALGEHPRWQRARQRCATLVARWPQALGFAARLRRQFDLLADAPEADFVRLLAVVEWLHAHRDSGLFLRQLPIAGIDSKWIEPRRGIIADWLAGLRGIAEPRGFDSLSGLRHAPDRVRLRLLDPDLRARLGGLDDIQAPIAQIAALQLPVRQVLIVENRETGLACEDLPGTLLLMARGYAVDYVRAIDWLQALPLYYWGDIDTHGLAILHRLRRHVPRTLALLMDETTLRATPSELWGHERRQHRAQRLDALSTAEQALYTDLRSGRFGPAPRLEQERIAWDYAWPRIHAALAG

SEQ ID NO: 32127 - protein, 487 aa, Brevibacterium casei S18
MSALSSALAYKRLLESDETLRMLRADHLPVMAVTLDAHLGRPGTRMITEDLHESIDSDLEDLRDHFPLGTRTAKAYCDDWRRAGILVRRPATSARGETYELSAAGFDAIRMLEQLRTPPQTATESRLVSLAQAVRQLAIDTDPDSARRLAALHAERDRIDAEIARVRRGDPRSIVLDRRRANERVADILQQAQGMPADFARVRARFEELNQDLRLSILSAEDSQSKVLDEVFRGVDLIESSDEGRTFAAFSALVRDPEQAAAFDEDIAAILDRDFSAALTPETRRSLRTLMRQMKDGSREVSDILTEFARGLRRYVHSHEFQRDRVMRSLLQDALATAAPVAAVRRPYDDVGVELELSSVPLGSLGEVILHDPAEFDAGDELAEAGEADVDFAELIAIARESEIDFAELTDNINRAIAGTDSVTVAEVLETYPATQGLASVVGLLSLASTYGTVDPEARERITWSGVDGVDRHAIIRRHRFTEGIRL

SEQ ID NO: 32128 - protein, 246 aa, Brevibacterium casei S18
MTDTPDTRLDADRQATDSPDGLWTGDTGTLGENTRRVLLELLKGPYVSGTQSPQLWSALVTDEALVRSRLHELFLDLVIDKVDEFAFTRKVVTDELDVPAAVRSERLTFLDTAMLLVLRQLLLAAPGERRVIVDRDEVYERLAIYRTGDESTFQRNLNGAWGRMSNRLRVLHKVGDDRFEISPMVRFLIDEDRVRELIDVYERIAGTGEAGTADTDTDDPAEAVADTRNAGTGDPATNVAHGKVDA

SEQ ID NO: 32129 - protein, 1133 aa, Brevibacterium casei S18
MTEALFPLDAALIADQARARGAHRPDVGSQWRLSEIQIANWGTFDSDIHRIPVSHRGHLITGPSGSGKSSLLDGIAAVLTPDKWLRFNVAAQTAGSRVDQRSLVSYVRGAWTRTADSDEDRVVSKYLRPRATWSGIVLRYDNGSDRPLTLARLFFLKGSSTTAADLADVCLLERAGLDLADLQQYARTGLETRRLKADHPEAVITSNGMHAKFYARMRKVFGMASDAALQLLHKTQSAKSLDSLDRLFRDHMLEVPNTFALADTAVSEFGDLKDAHDHVVELRRQRDHLLQLRDAATRYDSAHEAEAQAVALNDALLPFQKRRELDVLRTELSARSRDLVELEVAADRAKRDYDTAVDDYDLARRATLELGGAEAEHLQQRIATAETERRAVADRWAGLERRLEQAGIDHAPTSAAEFAALQEQIAAALDDDSESGPSHADHDRFSTARRRVRDLEAEIDSLRKSGSTVPGSLLEIRRELAEGTGLSEKALPFAAELIEVDPAHAQWTGAIERVLRPFALTVLVRQENLGAVRSWVDAHRVRGRLVFEEIPAKAPKPRPASSEKSLVNKIDVAESGFGEWVRSALSERFDVACVDRPDDLDDYARAVTLAGQIKSSRTRYEKDDRRRIDDRSNWVLGNRDAKLDALIDSLRDAQTELAAAEEIVRAATAETALANRRKGILAGIREQSWRDIDTAGAEAAITALEKQLSDLEAADGDLQQAIGAERRARAAKESAEAQTRDADYALRRANEQISDLRADIDRLTEDIDAGRILEVDPALADALDARFGKVEGSIGRETLAEAGQQVSQTLQAEKDRAQAAASEAGQAVTRLAAEFKAAWPSVAVQLTAEVADRHDYLVMLDEIEAHGLPDHENRFRDLLRERSRDLIGELLNEIYAASHEIEDRVAPINSSLLRSRFDEGRYLRLKVKTRRSETVNAFIADLRRIVGGGWNEDDSETAEERYATLAEVMRRFASSEHVDRVWRTQCLDTRLHVSFLAEEIDDHGRAHATYDSGAAMSGGQQQKLVIFCLAAALRYQLADPDEAISKYGTIILDEAFDKADARYTRMALDVFLEFGFHMVLATPQKLLQTIEPYVGAATSIENPSRQKTLASTMVWETGDGSHGEGARAETPVT

SEQ ID NO: 32130 - protein, 484 aa, Massilia timonae CCUG 45783
MDYQQLLAQRRAHPSWRLLAADHAPMIASFLHRSFVAPNVRTIARQQLVSQLDDHLYQLHELTGEQLFPKPAASYLDDWASDDRGWLRKYYPPGEDEPHYDLTSPAEQALEWLQGLGQRAFIGTESRLMTVFDLLKQIADGTELNPRARIAELQKRKADIDAEIARIKEGHLTLMEPTQVRERFLQMAATARELLSDFRALDQNFRMLDRSVRERIATWDGGKGELLQQIFGWRDLITESDEGKSFRAFWDLLMSPSRQDELGKLLEQVMALAPIRELEPDGRLRRIHYDWLEAGEVTQRTVARLSEQLRRYLDDQAWLENRRIMELIRQVEQKALSLRGQVPDAAFADIDDAGPEFALPMERLLYTPPFKADIRAVEVEEAGATALSDALFEQVYVDQVRLASNVRRALQTRSQVSLAAVVMDNPIEQGLAELATYLKLATQDVAAVIDDERDECVRWTGADGHQRQATLPMVIFTLREREDE

SEQ ID NO: 32131 - protein, 198 aa, Massilia timonae CCUG 45783
MIDDDQLGQVVVTLFQGVLYRENAEPQWQALLDLQARVRDYCSVIGLELILDEAEGYAYLRQRASKPETPDLPRLVQRRQLSFPVSLILVLLRKKLAEFDALSADTRLVVSREDIVDQMRLFLPDTANEARLLDRMDTHLGKVVDLGFLRRLRGQDGQFEVRRVLKAFVDAQWLDDFAQRLDGYARHAGASAGKEGVE

SEQ ID NO: 32132 - protein, 1122 aa, Massilia timonae CCUG 45783
MNAGPDPELATATEQAGFRLRRFEVYNWGTFHQRVWRMQPHGANMLLTGDIGSGKSTLVDALTTLLVPFNKISYNKAAGADARERSLRTYVLGHFKSERGDTGLSARAVALRDQHSYSVLLGEFHNEGYEETITLAQVFWFKDPRGQPERFYVVAETALTIADDFSGFADINQLRKRLRARSGIALHDSFPAYGADFRRRFGIASEQAMDLFNQTVSMKSVGNLTEFVREHMLEPFPVQARIDMLITHFDDLNRAHETVLKARAQIERLQPLNADCDRHAALVTQMDELRICREALRPWFALLKTELLDKRIANLAADEERTATRLAQLEQERREHARTRDELTAAISANGGNRIEQIMGEIARVDAARSEKNARAQQYELIASALGLPAPHDAGAFDANRGAIDTGQAACVAQRDERSNRLTEAGVTVRELRKLHGELTDELESLRKRRSNIPRQMLTLREALCDALTIAPDALPFIGELIQVREDERAWEGAAERLLHAFGLSLLVPEQHYAQVAAWAERTHLGARLVYYRVRPLSPAEPPSLHPHSLVRKLSIQPDSPFYAWIEGELARRFDYACCDSMELFRREQRAITRNGQVKSGGERHEKDDRRQIGDRTSYVLGWSNEAKIAALEKQERDLSTRITEHTRQILELKREAAEWGRVLGLWQQLAVFASFADLDWKPLVAMIDRLEREQQELAASSDLLRTLQQQLRDLGDVQAGIDAQHAQANAALATLVEKLSQARSLLGESEALAGAIDDAMRATTLPVLETLREQALGEHTLTVESCDNRERDMREFVQARIDADSKRIATLRDRIITAMQDYATTWPLDAREVDVSIEAAPEFRRMLQVLEADDLPRFAGKFKELLNENTIREIAGFQSQLKRERETIRERVETINTSLHAIDYNPNRYIALEAEPSLDADLRDFQQDLRSCTEGALTGSSDEEYTEAKFLQVRRIIERFRGREGCAEMDRRWTRKVTDVRNWFVFSASERWREDDSEHEHYTDAGGKSGGQKEKLAYTVLAASLAYQFGLEWGAVRSRSFRFVVIDEAFGRGSDESARYGLELFRRMNLQLLIVTPLQKIHIIEPYVAGLGFVHSEEGRQSMLRYLSIEEYRAERGARAG

SEQ ID NO: 32133 - protein, 400 aa, Massilia timonae CCUG 45783
MMAARSAWSSPGDIVASVQRLWDSGAILAARLDGVALFPHEVRLRQPSVAAMGEQFDLVRDWIGALRSSSRPERGDGYELVWRDINHRQLGRNRIPVAAIVESEASALRMIGRGADTRRFDELVAMTLGAFPVLRPWLARQPLRLLEHGDGWERVLAVLRWFVANPRPGIYLRQLDIPGVDTKFIEVRKGLMAELLDQVLPAESIDAGAVGARQFDTRYGLLGKPAQIRFRILDQRHYVGGCSDLMVPVAQFAALRTGVDRVYITENEVNALAFPDVESSMVVFGGGYGIDRLAQVDWLRSRRVLYWGDIDTHGFAILDRLRASIPGAASLLMDADTLQAHRHVWGQEDGDKRCLADLMRLTEQERELFLQLRGDILGERLRLEQERIGYTWAVDAIRQT

SEQ ID NO: 32134 - protein, 509 aa, Sphingobium yanoikuyae ATCC 51230
MLFGQLHSDIFALFAGSNRFLYERVLIGLYEGFYRSDLHFPTQGEVVQLIYTLLGDNAELWREDESPVVLDKLAARPGRRVRRHKLEAADAQATSAAMMRARHIYNRLQATGWIEESRYGLKVTVDMSAGAMRLAEFLCSLREGLSDQLGGLVIQVKNELEALQRNARENAPGLHKAARDAASFGRYLRSVLSALRDIDKRVVESDSVGRRLRHYFEDFVEKLLLQDYAAISTTSHPYRFRHRIFTALDAIEDSIADVAAIAEAYHEARLAPDPSAARDLVYDDLHKVRRVFDQIEEAFERIQQHRSRLETRLRNTVRYAGRRGNSFLQRSEPMLLQLDRLLARTDGQDMAPSMSGLLEPRRSYWSPALLARPRTYRSTVSGGLLVLPPPDPLREWRKRLDRDYLARLAVTPEQVSRFLERRVAPFGSGEASRFAIETVDDFLTLEALRLSVLAADADGRGNAIANHLAPHFRFSVDTGSTIDNDWLHCAGFTVSRIGDAVTPEIQDAQ

SEQ ID NO: 32135 - protein, 222 aa, Sphingobium yanoikuyae ATCC 51230
MLSEFQTLEARDPRRMHRVTQAISQLLRHQFLHVQDRGSSALLEVLLRPEVERLVADYFEVAGYRLVVRESEGWAGILPDTEQIGHPRMRIDETLVLLLFRRLWEEGIQEGDVERYGSVMVTLNAAYDAYQDMVARARRATLGINEFKALVTALDRRAIVHMGDIDEELEDMPITIRALIATVAGEEFMAHLEQLLAGGDYQESETEEPVIDLDDADEEEVA

SEQ ID NO: 32136 - protein, 1147 aa, Sphingobium yanoikuyae ATCC 51230
MMQLAHIALVQWHLFGREDLAVGGDTAVLGQNRSGKSTLIDLIQAVMTGGSRRWYQFNRSAGETGSRKSERTLRGYCLGQLNEHEFLRQESVTHIVLTFDDPDGVRPPVSVGLCVEASAIEDAQVVGRYIAPGVRVDTDLLIEHLDSGQQRSAPWSLVRERLEQACAAAGTQLIRPDGPRNHIREYMRQLFTGRRHSDPDRFIRAFVMALSFEDMRSVEGFVHNFLLARNDIDIGELREGIQRYRDIQKDVHELERRLDALRALAELVSRFVTLLEREDVARGTARLAAMIEAGAALIANLRERRDTLAELDDIQQDIGRCDAEIAALGDRQDSLLAQSVAEGAAGKRAVVASELKAVDLARTGVVQRLEARFRAAALGASLLDHRERLAPLKLGALFQALEALRQHSDGLEPPTWPRDPLAMEDLIASARRSAIDSIAKIQERRDQAIAQRRGLQDELADLVARRDKARAGQVSLDDRTIRLMGALERENMRPRTLCQVAEIVDPQWREAAEALLGRDREAILVDPEHASRAVEIVRANRDGFRGCRVINSRRLAEQPPGFDTDSLATVFASDDPLAIAFLRFRTGQVRLAGTQAELLAGGRAIMRDGAYNSGIVVEVLRTRDLKIGRAAAPLMEAELLARIEDRQALIAVHAETERFHDDIHRKLLPLMADVDPADRLDLLVAAIDQHEESRSELQHRLDKIAMTVDPAIQHNLDKVKLQLRSATEEKEELIGRRGQLGQARIEIQRRLDAGDAQPGSWLCLRSRRALFKDRVRSSASLSILREAYRQQRGRPLTRLVQEMMKRADEARDAYQALQGEIRETLGHYRADFDNSAPIALPGAIATEVKPWLAANIAALEENELIQYRRQADEAAEQIGQLFRTAFIHELNARFNDLRSELDNLTRALRMRPLHGEIYTLHARPKEEFAALHRLARESEHDELTFDALFGRAAPRDAEHAQALAEVERLLSDESLDFSAYQDYRNYFTFDLRMEDVNKGRTTSYDKRKGTASGAERQVPYYVVIGAALASIYHGARRQYERAELGLGLAVFDEAFSKMDGPNQRTLLEFYDDIGLQVVIAAPSEKRAVVYENLDSVIDVFRHGDNASAEAVRIKPHARTQMRAANPQHLDDAALAERLDLFALDSAE

SEQ ID NO: 32137 - protein, 490 aa, Pseudomonas sp. M1
MALDHLTLTTYRDRHPAWRLLASPHAPLVASFLYRVFVAPNVRLTSEADLAEMLEDELFALREQLGAEAYPKAATEYLNDWCAPDKGWLRKFYKPGTDEAQFDLTPATEKAIAWLVSLTERPFVGTESRLLTLFALLEQISTGSEADPAKRLEELRRKRDEIDAEIGRVLSGDVPLMDDTAIKDRFLQFQQLARELLSDFRQVEHNFRQLDRSVREKIALWDGSKGALLDEVMGERDAIGDSDQGRSFRAFWDFLMSSRRQEELSARLDQILGLPAVVALKPEPRTRRVHHDWLEAGEHTQRTVAQLSQQLRRFLDDRAFQENRRILELLHGIETKALALRDMPPAGDVIRLDEMGADIALPQERPLFALHAKPRLAELVLEDGDDDIDTARLFDQHVVDKTRLRQALRQALRQQSQISLRALLETQPLQQGLAELVTWLELAHAGSRGLDGLRATVDDDVQEIVEWAMQDSDGSTVRRRARMPRVIFAR

SEQ ID NO: 32138 - protein, 224 aa, Pseudomonas sp. M1
MNDMHQDDPEGSTESRPPVVAELSQLMVHLLKGVLYRQDDERLWASLLSLQARVREQAAVLLLDLVLDEAEGYAFLKSQPEPEHADATPRPPRLIARRPLSYPVSLMLALLRKRMAESDASGGDTRLVLSREEIAELMRVFLPDGTNEARLIDQVDSTITKVVELGYLRKLKPAAGAAQQATRYEVRRILKAFVDAQWLADFDARLEGYRTALSGADRDKEAGR

SEQ ID NO: 32139 - protein, 1125 aa, Pseudomonas sp. M1
MNDFSPQELDFVADDSRVGFRLQRLEVLNWGTFDRRVWRYELDGRNGLLTGDIGSGKSTLVDAVTTLLVPAQRIAYNKAAGAETRERSLRSYVLGHYKSERNETTGSTRPVALRDTTSYSVILGVFRNEGYGQAVTLAQVFWFREPQGQPARLFVAVERELSITEHFSGFGSDINGLRKKLRAMGCELNDSFPPYGAWFRRRFGIEHEQALELFHQTVSMKSVGNLTDFVRSHMLEPFDVGRRIEALLGHFDDLDRAHQSVLKAKRQIELLAPLVEDGLRHGQITGEIQALRQGRDALRPYFAGLKAALLERRLELLTQDATRWDARIKQLGEQRDNARIEQGKLEGALRENGGDRLQQLAAAIQQQEAEKQQRQEKADAYTTLLTRIGEAAPGDEAAFMTQRSTIGEHAEALRTSIADHDTQINEDGYALRRGQEEHKALSDEIDSLARRKSNIDAAQVRIREALCTALSIAEEDLPFAGELIQVREDERDWEGAAERLLHGFGLSLLVPDVHYKDVADWVERQHLGTRLVYFHVRARKSTQAVSLPPQSLVRKLLIKPDTQHYDWLERELHHRFDLACCDNTEQFRRETRAITRAGQIKDPSGRHEKDDRRRIDDRSRYVLGWSNADKLRILRDEREGLEQQLGDIGLRIANTQRLRGQCQAQLEALAKLEVFTRYSEIDWQAPAREIARLTEERDRLKAASDTLRELESQLAQVVERLKEIEDDLGEAQGKRGEIRSKHETAQAQHAQALEIQTQAALDDMLLQSLEGWRAEVLGDHQLTVESCDNREQDVRNGLQARIDAEDKRLSRLTERIINAMRGFKEAFKAETAEIDISLAALPEFERLMKDLQHDDLPRFEARFKELLNVNTINEIANFNAQLARERETIKERVDVINQSLQVIDYNPGRYIRLLAQPSPDAEIRDFLQDLRACTEGALSGSEDEQYSETKFLQVKAIIDRFRGREGLAEIDRRWMQKVTDVRNGFLFSASERWREDDAEHEHYSDSGGKSGGQKEKLAYTVLAASLAYQFGLEWGAVRSRSFRFVVIDEAFGRGSDESAQYGLELFRQLNLQLLIITPLQKIHIIEPYVSSVGFVHNEGGRESRLRSLSIEEYRAQKAAARGGAV

SEQ ID NO: 32140 - protein, 401 aa, Pseudomonas sp. M1
MTWSQPADLRAQIERLWQRGELLRAVVGDGTLGWPLRLSLKSPSAADLSNRFDAVRGWVRDISAMPLVRIEWREWTHRVQGRQRLPDTLWIDTLEDALAMIGKTGDAHRFQALWQQTAEAQPALLPWLHRAPLQTLALAEHWPRLLAVVAWVQTHPRPGVYLRQVDAPGVDSKFIEAHRGTLAQWLDLALPTEAIEPAATGMTGFARRYGFLEKPVRIRLRLLDPQLPQLPGCTGLTDITLDEDSFAALALPAQRVFITENEVNFLAFPPVSGAIVVFGAGYGWGALARADWLHRASLHYWGDIDTHGFAILDSLRKYFPLAASFLMDRSTLMAHALQWGEEPLDKRHTLPLSRLVDDEPALYDDLRGDRIRPQLRLEQERIGYRWLCAALVATVRDDFRP

SEQ ID NO: 32141 - protein, 470 aa, Mycobacterium neoaurum VKM Ac-1815D
MRELLDANREVQASRALRLLATSNLAVYATLMERHLFDGLVGETDLVVRLERDLETLHEAGEQSGLALIKSWASQGWLHRVASQHAGVERNVCYLTQDARRALDFVRGVRRNDTIATGGSIHGIAARLKQVATRAGDDPDRIRAGIEAEIAALHAELDELAAGTRPEPDTVAMYDEARAIAMQMERLITDIGLYGNMIEQATAALDDPIDTNLEYRDRQRQMYADYQAAWDSAGRDSHRAFLHMINDPQQRAEFEADIATVASQLPELDPALRKVMANFFELVGHQIDEVERIQQRCAQRVKRFTAFGTLEQSRGVARQLNEAIGAARTLLKESLTDSRLDIEVPLARHAISSVGALSFRINDLSSPKPAEIAQGEVDLSTFSSLTTQVDAPALTEMLNSALPVSLPDACAMLDAPYLGHVIVLWSWALKQPAPAVTESVTVRFHSLDGHDREMEVPHLMFTEPVTEVAS

SEQ ID NO: 32142 - protein, 223 aa, Mycobacterium neoaurum VKM Ac-1815D
MTDATTSTPEVDFASLPDVDRSGRSTGTRRPRFDGDVSVLPDRACWALQHLLTRRYVSGEADPDIYSWILEYRNDLAVRLSELDLQLQISAQVDIAYIEQARYEPTRGAKLLRREPLGTYDSILALHLAQMMRAGGDVSFLITRDEVHGLFAGVLNDTDRDTVTFTARIDAAIARLAGLDILRRTRDDEDSYTVSPVITAIMTASVITELQQQFEQLSKGGAE

SEQ ID NO: 32143 - protein, 1123 aa, Mycobacterium neoaurum VKM Ac-1815D
MSEQFHLSRLQVINWGVFDGYHSIPINAGGSLIAGSSGSGKSSLLDAISLGFLPFNRRNFNASGDNTAAGSSAGRRTVDKYVRGAWGQRSDGGTSQVMYLRGDGTTWSAVAVTYTSNTGRTITGLVLKWLTGESRSDSSSRFVLGDGDLDIEGVCNRWAAGRFDSKVFTDSRGERSDGASHGWRFSTKVESQYLAQLYAAIGIRASEAAQQLLGKAKSLKSVGGLEQFVRDFMLDEPDSLSRLPEALKQIDPLVEARELLAVAQRKRKVLGDIEAIQLRYASESSDLGIIDLVDMPMVRAHTDHQRLQQCPAQIESLDGTIDQLENEYGDITRQLNLAKAEGDALNAQISGASASIGPLQSQVAAAEAQAEEVTRRYAAYAEMVRAHGAEVPETADEFWNLREELSKQAAGLAVQLDRGRESSTDAEYAQKAARMARDHAAKELKRVEHVGSALPEFAVAMREHICTTLGIDPSALPYVAELMDLRPEENRWRAAVEKVLRSVGLRLLVPDQHYAKVLRFVNENNMRGRLALHQVRVNAPDRRPEPNTLAGKLFVVNPSHPCAAEALDVLAAAGDHICVDSPDLFARFRRAVTDTGLYKDSDRLAIKDDRRPLKPSEYIYQGDITAKLDALTAELAEAEEVFAAARTAADEIAAGRQHWRDQAAACKAICEQFPQWSHIDTETADGHADRLREQYELLLADNPDVEALSTRAEECWNDIQVLMTRRGAIQTRRDDLDSRRTRLLDLQDRLDPAAVSEQATELLNRYAAQIPVSLELLNPEPYREALFNAIRRERDRLTESRRRSHDELARIIATYDSSFPDAIPNDSDDLDERVHDYVAVCRHIDERELPDAYERMMRLITEQAPDAILTLHRIAEQEARRIAEQIERVNTGLGAVEFNRGTRLTLRATPRSLTAVTELTEIVKAISRRIAEVGLGDKKAILEQYADILRLRNRLAGNTPEDRVWTRDALDVRNRFTFDCAEWDVRTEELIRTHSNAGDNSGGEQEKLMAFCLAGALSFNLANPDSGDNKPVFAQLMLDEAFSKSDPQFAQQALQAFRKFGFQLVIVATVQNATTIQPYIDGVVMVSKTEASGRNARPVAHVTTKTISDFTALKRELKVPEPV

SEQ ID NO: 32144 - protein, 489 aa, Streptomyces ipomoeae 91-03
MDFDEVTALVRHPAWVLLRADNAALVLSFCGTVFVDENARGVPETVLESRLDDRLYLLNEEKPGSFPRSADAYLAEWTKNGWLRKYYPPGEDEAHFDATAALEKAVAWVRDLPARSFIGTESRLNTIVALLRQMAFGTETDPQTRIDELRRERDAIDAQIARLRAGEVDMLSPLALLDRYQQVESTAVELLRDFREVEANLRELDVRLRHQVATAEGGKGEQLAAFLLDRDEIARSDQGQSFQAFFDYLLSPRRQQELRELLQQVNQLPQLEGRANQSLLKIPFAWLEAAENTQDTVRQLTEQLRRFLVDRSRAEDRRVLALVRSIQRHVTALEGRADLPGMALDIPQAHLTLPMERRLYMPAERIELDTAAVEESDDAEVDISELFSGVHVDTEALTGHVLEAVAASPSGQANLAAIVDDHPLTLGLAELLAYFQVEHPGLDMIVDPDRTDLLVYPRVHVPGHTQARVPHVTFVRDEGGTAAGKAEQE

SEQ ID NO: 32145 - protein, 196 aa, Streptomyces ipomoeae 91-03
MSDALTVPVVHLLKAGVLYQSDAPAVWEQIVSQQAAIGDYLSVIGLDVVIDRAEGYAYVRQQDLDSRDDGVPVPRLVTRHRLSFPVSLMLVLLRGRLADSDADSADPRLVLTRDNLVEMIRGFLPPRSNEAQLVDQIDAHIKKLVDLKALRQTKQTGAYEVRRHIKALVDAQALNDFNDLLATYRDAASTTAKDDT

SEQ ID NO: 32146 - protein, 1145 aa, Streptomyces ipomoeae 91-03
MTLTTDPAALIPRQATTAEPAGTFDVGPGYRLARLEVLNWGTFHRTTCTFTIDGHCALLTGGVGSGKSTLVDALTTLLLPAHKIAYNKAAGADAKERDLRSYVLGHHKNERVEASDTTRPVGLRDHTSYSVILGVFTNYALGTHLTLAQVFYWTSPTSTGQPERFYLTAEAPLSIDTDFTGFGTDITDLRRQLKQRGATIHGSTYTQYGKALLRGLGIPSLQALDLFHQTVSMKAVGSLDEFVRERMLEPFDAKTAVDKIVAHFDALTASHNEVVRARRMIEDLTPIVVACNRYDTVQGEITALDKRRSAVPAFFAQHRHRLLTTRHTALMSGAAELEELQSTRERQLEQLRGTADGLRRRIDGVGGEKLISLTGRIEELGRERERRRKRATEYGTWLAQAGMDPVTDAASFRERTDQISTARSRAEEQEQQARGKLDDLAIARHNNTISTDALRREITSLQQQRSSIPAQLLTLRRELATATGVSDEVLPFAGELIQVRDDEAEWAGAAERVLHGFALSLLVPHAHYDTVSAWVNDRHLGLRLVYYQVPAHTPITTLPDDPILLTGKLRLKSDSWARDWLAARLRSRADYLCAEDLDAFARATRPAVTRQGLVKGGGGRHEKNDTHRIDDRRNWVLGWSNQAKLDALLAEATRLTRESADITTAARELEKQQRARAGTSAALTLLGSVGTYAELDWRSTVAHIEQFEQQKSALEAEAGLDKLTAQLRRTEDEIVQSSKTFTTGQEELGGLRRDVQHIADLLGRTTTFLAKCDLDGMAEHEEALRKFLPAADGDGLLEMLDDAERHAEARLLRSSGSRHDALRHAGSQAAGLMTAFRGRYPVHTAELDNTIESASSYRALHSRLTDEDLPRFEEQFLLYLRTNVIRDIASFQAHLGAQEQQIRERIDVINTSLAGIDYNPGRYIRLNAAPTPNKEVREFQHDLRACTSEALSNDADDAYTEEKFLQVKALLDRFKGRPEHTRLDKEWTARVTDVRRWFVFSASELNREDDAEYEVHSDSGGKSGGQKEKLAYTILAASLAYQFRIDPTAAKPKTFHFVTIDEAFGRGDDPSAHFALDLFQRLGLQLLVVTPLQKLHVIEPHVTRVGYVDRPDKTRSRLNNLTIEEFRAHKQAAAQQANQPPKEQS

SEQ ID NO: 32147 - protein, 392 aa, Streptomyces ipomoeae 91-03
MTPAEWTRPEHVVETLRRKWTSGRYLTAAAGGHPFEPIGVPLKGPTAADALQHYEQALAWAQCWAPDRNPHLRIQTKSIGGRNGTPSNTVPARAWVDTRDRLWTLLRVTTQVDRFHTLHEQTARQDPGIARWMADHPMKVLAHAADWHRLVRTTCWIRDHDTEAVYLREIDTPGVDTKFIETNKGILAELLDCVLPESRVNTSAPKSDLVARYGFRTKPIYIRLRYLGTSPLPFSELTVRAEELADWSLGVRTVFVLENEITYLSLPPVPDAIAILGSGYAAALLRHLPWLDDVDLCYWGDIDTHGFAILDQVRGRFPHTTSLLMDRATLLAHESHWGQEKTQARGGLTHLTPEEAHLDRDLRTGVYRPHLRLEQERIAITAVREALTRHQG

SEQ ID NO: 32148 - protein, 531 aa, Corynebacterium durum F0235
MAWNGELIVSSVNAVADALQCQRVASESSAWSLLRSSNAPAIAAAFRSVFDGQRRSVTGTEFVEELNPLLVELREEGFDLPRNAVGYISDWVKAGFLIRRSPQGMQEEFYELSTDAITALDYISVLLKPRKSATRSRLSTVAERLTSLAIDTDPDESHVLARLEEEKKQIERRIALVQERGVDVISEDEALEQVENILSLVADIPSDFARVRQATEELDQNLREQILVDELSAAEVLDNVFRGVDVIQDSDEGKSFNGFYELLFDREQSTRLESTLESILSRPFVEDLSTDQRAELRWLLRNLEEHSDEVHNSMTSLARSLRRFVQSREVESQQALASAINHAQALALRLGHQVNPSTKIGVDLELTSRHPSSMSTWVLHDPADFHIEGDMEVAPADVANLAELQARVRDSEIDWAELQSNIVSVLTQHQIATVGDVLKAHPATQGLASVVGVLKLAMQHGERVGGTEYVTWDTSQDSQYDEGADTTRTKRAKVVRYRFTPKSLAELGQTQRHVRLVPVSETATKGMHTDG

SEQ ID NO: 32149 - protein, 218 aa, Corynebacterium durum F0235
MAKHGVEKTSSGPEVSQLHETDTGTLTAAQRQAFATLLRGPFISVDKQPEIFRTVSANREVLAQQLDNLFLTLIVDDSAGVAYAKNWDTDIEGSRILMRKHPLTFMETVVLLHLRHMLVMTSPNERAVVGEEEVFEATLPYQSATGNDKAAQRKKFQAAWNKMKDRSIVRTTTTEDRFEISPVLRLIFTAEEVAAVSDSFASLLDDDDDDSGETVTHE

SEQ ID NO: 32150 - protein, 1111 aa, Corynebacterium durum F0235
MNKIAGQFRLSSIQVYNWGTFSGVHTVPVAREGYLVTGASGSGKSTLIDAVSAVLVPPSTMRFNAAAQDPGTKSGRNLITYCRGAWRREHSEDIDELTQSYLRTGATWSGVALTYEDGEGAAVTALRLMFLSAHCHQPTDIVNLFVLVPRVAELWEFNDLAKEGLDLRKAKQQHKDALAVQRSHSPFMNVFRRELGIADQAALTLLHRTQSAKSLGDLNALMRDFMLPEPPTLKTAADAVEKFTELNAAYQGVHTARMQIEALEPIRSADEDIARLTAETTLREEEQTHLDAYVTHHRLALERTKWERITGDIAVQQATLEDISAQAADLKTTYDQLQVQIHGHENIGLLQAQHDLTQAKQQLESIQSARELFEKSTRVVGAVVPNTSEDFTNLRLQLQELTTELVLKASKYSERRQALYGALNTTQETVTRLQQELDFVRTYRSPMDQRLLEARRRVAEFVGIEENELPFVADLLTMRDSETDWQPAAERVLGGFARTLIVPEEYYARVSDAIDAMNLEARLVYIRFTSDLARRIPSSFAAGSLGSKIDVTPGRFFTWLQSELSSRFDYECVDTVAELRKTRRAVTRNGQFRDDFRHEKDDCTQIDDRSSWVLSTSYDDKIDSLREQIRLAKAELAKRFADSEGFEDSVKEEATRHHACDTLLAVENFAAIDTTAAAQAVSQRQTVVDELTDSNPELKDLQDQRDRVVFEQEKLKQQEDEARDVLGGLRRELRQAEELIAQLEERQKINRNVPEEVVQRLNELVGTFTRKIRADNVVDVQKKMLDALNSAQQALARQLHEQERKTAQVMLEFLQQWPERRGDLFPEQEYRGDFIALLHRLENDDLPAFEARFLELLRSQTQNNLNRLLLQIQRATQAIRDGIEPINASLMAAEFEPDTHLQIEVRESQPAEAREFMAKLKEVVDGVLNDESTLASEERFLKLRAVIEMLKITDETPERIYRLRLDTRKHVTFLGVEHNADGTRGAVYDSAQGLSGGQAQKLVFFCLAAALRYQLTGAGLSTSRAKNCTIEHDGKQFSRFGTVILDEAFDRADSQFTRRGMDVFNEFGFHMVLATPEKMLQTIQDYIGGAAVVQCFDRKHSTLALLEIEDA

SEQ ID NO: 32151 - protein, 403 aa, Selenomonas sp. oral taxon 138 str. F0429
MAKDAGAEESRAKANHMIRRMKEFGWLDYEQRENFKIFILLPHYSSRLWGLFANLCEGRAVEYQRFAFTTYQVLSGEAAKAQPSMAVLEAERLAEEFVEELRILLNNIKSKMEQVSAQTSLQDVLSHHFVEYRADIVDRSYHRLKTSDHVSRYRIRILQEVQEIRQNKERLRALCDDAVRRQLADSVEAAEYRMNASLQTIEEIYRGLDDMFAQIDRRHNQYVRASYERALYLQQAGSARTESMIAGVLLAIAEAREEGSEVGGLSRLFRLQAMDMLLPASRYVPRKKRILEPAAATPVRSVDEELRQRVRRESAERVARGISRQKIEAWILEVLGQRGSMEIEELLTILRETAEPDLLQLLYVYLYGHDELARYQLGRHKEIREQDTIRYSNRTLRRREKRR

SEQ ID NO: 32152 - protein, 199 aa, Selenomonas sp. oral taxon 138 str. F0429
MKLELLNEEERTRIQSVIQSLLACNFLTREHDAALYIAARRYREELAEYFQVIGWEFRVDERYEIVWLLSTGMAHRRSLTLEESIWLLVLRLIYEEKRTGLNLSTFPMTTLAEIRAKYLALHLPDLKKTALQRLTQLSKQYRLADVLDRELSEEARIRLFHTLVLAVDGEELSELHKRLEIYRQRKEEDDEEATENEGH

SEQ ID NO: 32153 - protein, 231 aa, Selenomonas sp. oral taxon 138 str. F0429
MKVINWHYFDEDEISFGSATMLSGHSGAGKSTLLDALQYIFIGSQTQARFNAAATQEARRTLLHYLRGKIKAEGVQYLRADEFTSYIVLEFYDDIKKVSFLAGYVVDVFRDDSLQEEFFLLDRRALSEVEFRGEDGALYTREAFHRRYAHGSSVFETGKKQWQRRLMNRLGQLSARFLPAFSRALAFRPINQVRDFIYEYILLPRDLKLDVLREVFYSYQKFERDLQGLRA

SEQ ID NO: 32154 - protein, 487 aa, Thioflavicoccus mobilis 8321
MVTPVQEAAVLRNLRAAPAWRLLAADLAAPIAALLKAHLLGKERKLPASVLVERLGRDLERLRAEGWELPQPASAYLADWLSFGWLERSYAGGGEEEYELTTAAIQAIRFLQGLAAQRAVATESRLNVVIQQLVQLAEQTETDPEARVERLLRERERIDAEIAAIRAGHIETLPDERALERLREVFGLADELISDFRRVRDELRGLNRELRERIVDSEGSRGEVLEAVFAGVDLIADSDAGRSFRTFWRLLTDPREGAELESALDALMARPFVAGLERSERRWLLGLTRLLLERGGEVHEVMQHFARGLKQFVQSQAYREQRRMTRLVKAAQRRALQHKDRIRPYQSIGTDLQLTGATCRSLAQFRLYDPSLDHVDAGIPAAEAAEISLEGIGELVAHSEIDFRTLEAHVDSLLEEREQVSIAEVLEVYPAEQGLGSIVGYLALGGRCGVRSEASDHISWRGLDGAERAARIPRIYFVRDDGSDGEA

SEQ ID NO: 32155 - protein, 231 aa, Thioflavicoccus mobilis 8321
MERPEFADTDPQSAEAPGERTGETGGLYPNDTGVLPEAARRALVQLLSGPSLEGRRHPRLWPALVQHREEIRSRLAELFLELIVDADRQVAFTRQADTGELEAPILLRRSPLTFLDSVLLLYLRGTLVEADTQGVAALVSLDEMIQQLGLYEPQASTDRVGFEKRARAAIEKAKKNSLISSIRGSPERFEVSASLKLMLGPEEVESLGRIYDRLAMTDAGSNRPDDAEDDA

SEQ ID NO: 32156 - protein, 1130 aa, Thioflavicoccus mobilis 8321
MSQLPLDLTARAQQFRLRRLQVFNWGTFSGLHDIPIAIDGFLFVGRSGSGKSTLLDAFTALLVPPLWRDFNAAARDGDRGRADRNLVTYLRGAWADQSSADSGEILTRMLRPTTTWSALAAEYGNDLGQVVSLVQLFWIKGTSNRTNDARRHFLIAERPFAIGRELKGFAEDLDLRRLKQALSDCAHFERFEPYGERFRRLLGIESKMALKLLHKTQSAKNLGDLNVFLREFMLDQPETFQVAERLVEEFTELDAAHQAVVTARRQIEILSPARDAHREHQAAAQGVIELDQLLSNVDGYRDLRRRELLEAQSVRLATEAQGLAGRETQQGELVSAQKGALRSLEERHRAQGGARIEALEDEVHALGERRDQRLGRRSEAERLCRSLGWALPTGPEAFAELSARARSVVEGWPVEQERSEARRDALRDRRRDLAEEQGTVGAEVAAMLRQPSNIPAEQLALRARIAEALGLTEPDLPFVGELIEVRPEAAEWRGAIERVLHGFALSLLVEERRYGAVARYVNETHLGQRLVYFRVGEAETTTRARAGPQSLVLKLALKETSLRPWLRAELHRRFDYACVEGVRAFQDHERALTREGQVKQGRARHEKDDRHRIDDRRRWVLGFDNRDKLALFQQRAEELRRELAGIDRELQQLSDQRTQAQQRALACQRLANLQWSDIDVASLLDRIQALGVELERLRRGDTVLRALGEEVAAARTRLDEAEERLRQIQVAHGKVQDRLNDHQQELAALDARLGDLVLSETQHTGLAERFARDPAPLTLGNLDERSRKVERALNEDRRALVDRQAAAARTVQRGFAAFKREWPMEASELDDTLASAPEFLKLLQRIERDGLPRFEERFFTLLKDQSSQSLAELNSRINEARKEIRDRMELVNESLAEAEFNPGTHLQIEVSERQLPDVRAFREQVRQVLEHAWTLEHDPAAAEARFATLRALVTRLAGRESEHQRWREEVLDVRRHVEFVGREQDGEGHEIEVYRSGAGKSGGQREKLATTCLAAALRYQLGGSDGGLPIYAPVILDEAFGKADNEFTELAMRIFERFGFQMIVATPLKSVMTLEPFIGGACFVDITARNRSATLQIAYDHAHHRLDLPDRDGLLSGADQPTHDGRRATA

SEQ ID NO: 32157 - protein, 389 aa, Thioflavicoccus mobilis 8321
MAAARRLDPEAVTRRLRRHFERHRGGWLEGRGDWPLEVPLHPPTEREAGRDLAGVRAWIAEWQGWRGPGEVVWTERAWASLGRQRVPERLRLQAPEQIGDWVGEGERWRRALGRAERIAAEFPALAGHLGRHFDWLADSLDTELERLTAVLAELSRGVAAGLYVRQLPIAGVDTKWINANRARVTELLRALLDAPADRDLWSLTGLRREAPLLRLRLLDPALRQKVGGLEDLTAPVEQLAALALHPARVFIVENLQTGLAFTDLPGSVVFMGQGYAVECFGQIPWLRGAACWYWGDLDTHGLAILDRLRRYLPEARSLMMDEAILMAHRALWTIEARPRQEETLARLTAEERAVYEALTEDRWGKGVRLEQERIEWGGAWRKVRETSDR

SEQ ID NO: 32158 - protein, 506 aa, Gordonia rubripertincta NBRC 101908
MEISAFPAQREAGRPAVPSESVQVTLGDALEANRALQKSAAVKLFAANNSALYVTLMERHLDYGTKMSEVELTMRLERDLAELDLTDDQPTGLELVKLWARQGWLHRVTDTTDPDAPNLCHLTSEARTVLDFMRRQRREDSIATGGSITGIAAELRRVAGQVSNDPETIRLELEAQMSDLDAELADLEAGRRPPVDLRVAEDSARAIGYQMEQIISDIGQYGTMLDRITTALLDDPGDSDLAYRDRQRQLFDDYEALLQSSQSASYQAFSQMIQDPERRARLKADIDTIIENFPGMDAGLRSVMDNFFGLVTQQMAEVGRTRQRCARRIRRFVASGTLEQSRGLARQLNDALATANDLLKSSLADRRLGYELPLAAPTLNSIGRLAFEIREHVPPAPALPAGGADADLSAFASMTGQVDTVELTETVNNAVAAGPVPLTEVIESLDEAYLAHVIVLWSWAQKQMAAGEKVPMTTVRFRSLLGEDHAIEVPDLTFTEPIPTAEVDAE

SEQ ID NO: 32159 - protein, 290 aa, Gordonia rubripertincta NBRC 101908
MTSLPPEVRAERATKGAPEVNADTDPSLPEVRAQRATKGAETDLLDEFAGFDDLPTVANRTTSHAPSAPRFDGDVSEMPDRACWALQNLLARRYVSGDRQPQLWSWVSEYQDVLRIRLSELDLRLRLVDELQVAFVEQAGYDSRWGRRILKRETVHTYDAILALHLAKYIRAARDEDALITREEIHELFAGVTNTIDRDLALFDKRIERAIDKMEELEFLRKQRDDADTFTVSPVISAVMTASVITDLQRQFEQFIGSGDTGEEPPEAAAADATDLDAEDAYSDDEGDNW

SEQ ID NO: 32160 - protein, 1114 aa, Gordonia rubripertincta NBRC 101908
MSGQVDQYHLSRLQLINWGVFDGYHSIPFSSNGSLITGSSGSGKSSLLDAISLAFLPDHRRNFNASGDATAAGSSSGKRTVGKYVRGAWGERRDGTNAHREIMYLRGTGPAWAAIAVTYTSSSGTAITGLVLKWLAAGKMTDAHSSYFIYDGDADIVEVCNEWAAANYNSAKFRDRGWRGGPGEGKYLSTLYSLIGIRGSDAAQQLLGKAKSLKSVGGLAQFVREFMLDAPTSIVGIADALEQIDPLVEARELLDVARRKRTILGNIEEVQERYATESATFSVLDTIDSNTIRSYVNNLRIRNAQPEVADLDDQITRLDGDLAALTTQHDQLRQDHSLLLARIATSTGDLAPLREQLGGAQKLSTEVTARRNAYEDKVSALGFSPPTNAEGFWSLREELIEEATKIDGQLEAGRAHYAEALAREVAARSRRDTAQEELGRVEQAGSALPRTEHEMRRVIAHALQIDESELKYVAELVELDPDEERWRLAVEKVLRNAGLRLLVPDKHFRSALRFVNSHDMRGRIQLHQAETRPMPVVEPGTLASKLRSVDPGHPCAAEAMTVLSKLGNHMCVDNPGEFSQYAKAVTDQGLRKDSAKLAVKDDRQQLRRSQYIFVGDVESKITALRDELAYEERVFEDAREDCAELDRERSAKEKRRDAYRRVCEQFTQWNEIDVDSVDDRVDQLTDQYDLLMEENPDVEALQRKAEDLWEQVRHAISQAALVKDKIARQDERRTQLLDLIDRLKPDDVPAQAEKTLDGFREDLSATLDVLNPEPYRQEIVKAAGRERDRMRSDARRSRDELARILDTYDEEFPDAIPNDSDDFDERIHDYVAVCRRIDERELPSAYERMRRLITEQAPGAILGLHMAADAEERRIVEQIERVNTGLGAVAFNRGTRLRLVPGRKKLAAVEELTEKARQISNRATAVSFGDEQAILEQYSDILLLRERLAGNTPEDRQWTRDALDVRNRFDFYCEEHDAESGETIRTYSNAGDNSGGEQEKLMAFCLAGALSFNLASPHGNDNRPIFAQLMLDEAFSKSDPQFAQQALSAFRKFGFQLIIVATVQNTSTIQPYVDNVVMVSKVEAGPDLRPVATATSTTIKAFSELRRSGSQLSV

SEQ ID NO: 32161 - protein, 480 aa, Arthrobacter crystallopoietes BAB-32
MDFYAVNSLRENHAGWSLLRAQNGPLAIAFFMAAFTGPNQRNIGRQALIDTLDDVLFGLRDGLGEDRFPRPAAEYLDDWAAPEKAWLRKYYAPGEDEPLYDLTATAEDVVRWVENLRGRDFVATQSRLTSIFQLLKTLVQESETDPEVRLAELQKQRDAIDAQMQQIRDGRIQVMSGPEALDHFQQLTALAKDLLSDFREVEQNFRQLDRQVREQIATWDGSQGELLESIFANQQDISGSIQGRTFQGFWDYLMSPQLRSELQDLLDRATQIEALAGLDNIHAIGELHQDWLPAVEQTQSTVRQLSQQMRRLLDDKVFLENKRIMQLIRSIEGNALAVRNDRPPATFMEVSAQAVDVVLPFERPLYEPARRVAVDDEVFLAEDGDVDPAALFEQFHVDKARLQDNIDAVLDGADQATLADITDAFPLSQGLAEIVTYFQLASDSPWASISPDVTQQLVWTLPDGSIREATVEQIIFARPS

SEQ ID NO: 32162 - protein, 214 aa, Arthrobacter crystallopoietes BAB-32
MTAEPNSAPAHPDELPAVVTRLFRGVLYAEADEKAWQSLLPLASHVRDYVAVLGLELFLDESEGFAFLKSRPDADGTLPRLVPRRQLTFNVSLLLALLRARLAEFDQRAGESRLVMTEQDIADMVSVFLADSSNEARILDQLGANIKKVVELGFLRKLRGQQGTYEVARILKAFVDAQWLEEFDARLADYRASLDGGSGGGQAPETNRPKGASK

SEQ ID NO: 32163 - protein, 1131 aa, Arthrobacter crystallopoietes BAB-32
MTIDLQDSLFSLEDIDDGAGPAPGFRLRRLELLNWGTFHQGVRTFRLDGENSLLTGDIGSGKSTVVDAITTLLLPANRIEYNKAAGAQKKERSLMSYVRGYHKSTRTTAGDNSKPVALRGPGSYSVVLGVFHHAGLDKTVSLAITLWAVQEAGQPNRFYSLAETEQAIARDFADFGKDPAKLKKKLRAAGVTVHDSFEPYAAAFRRQFGISGSQAMELFHRTVSMKQVENITHFVRTNMLEQDDIASRIKNLIGHFDDLKKAHDAVLRAKDQIQRLTPIRDGAARHEDLAQREQRGRLQRDQLHPWFTARKLELSLAHEQELERTGSRLEDEQEKLQAELTRLAHELSGIQEDIRTNGGGRLAALDADISRLAEEARAQRSRFDSYTTAAEALGLRTPEDQVLFDGNAARLAEVEDSLRAENTGLQDSRTAASQQRNEASARADELRAELKSLQSRQNLMPRTQLELRRRLCEGTGIPEAELPFAGELLKVRDEEAAWEGAAERTLRGFALSLLVPAAHYAAVTGWVDRTHLGNRLVYLKVGPAGAHRTAEPGTLAAKIVLKPATEFRNFLLEELATRFDHVCCDSLEDFRRYPKAVTLNGQLKGGRGRHEKDDRQALSDRRHYVLGWDNHAKISRFHAELEEAQGQLRSAENRIATLDAALGQLGRQWQHLGTVRGVQDFGAIAWQLTSRRIEELKTEKAALEAASNVLQQLTAREAETRQHLDRANAKARTMYERIGRNKSDLDKIREAIAECRTILVETPLTNDGGLLGELQDLALRALGEAELTYKNTDRTEAAVRSDLSSAIDALAKQLARAAESTVRLMAEFRNKYPEETTEIDAALDAAGEYNRLLDQLVDNDLPRFEAHFKDSLNQNTIHEVVAFNAFLESRRQDIVKRIGEINQSLAGIEYNPGRHIQLEHQNTTDMDVREFGADLRACSEGTLGDEDQYSEQKFLQVEKLVSRFRGREGLTSLDERWTAKVTDVRNWFTFSASEKWTETGEEHEHFTDSGGKSGGQKEKLAYTILAAALAFQFGLGRVPGHGSRTGAGRSFRFVVIDEAFGRGSDESARYGLELFKRMKLQLLIVTPLQKIHVIEPYVANVGFVANTSGEDSQLRNMTIQEYREERDRRAG

SEQ ID NO: 32164 - protein, 434 aa, Arthrobacter crystallopoietes BAB-32
MPASGGKAAAQSSGWTTLSALRQQSERAWDKGDLLRELLAPTGAYPRRRPLKHPTAAQLRDNYGAARDWAAELHVGATDFTLESVSIGRTTIGANKVPAGALFAAADDEIAFLGHQRKARRFLELAARLEQLDPTLRHWALKRPLALLELDEAALTAAAVAAWLRDHPAPGIYVRQLSLPNVHTKFVASHRRTIDEMAILLRSDAAGTSSVPPPPAAGTATAAGEPDALMEPGAPPAAGPVSGPGTGFAARHGFLSPPELVRFRVLDPSIPLLGAARDLSVTAEAFASLELPVQRIIVTENLVNFLALPELPGTMALFGAGYGFSALRHAAWLKRCETIYWGDIDTHGFQILDQLRSGHPHVRSVMMDTGTFLAHRQFWGREAKPSSARLTRLTADEAELYTALVNDEHGPALRLEQEQIPWDWALGRLASARR

SEQ ID NO: 32165 - protein, 480 aa, Mycobacterium canettii CIPT 140070017
MEYATIDALRERHPAWRLLRAGNSTLILSFLGMFFVEGNRGACPVSQVAAALDDHLYALNIEISTENGQERFPKDARSYLEDWAATDTGYLRRFYPTGDDEVHYEVTPAFEKAYTWVMGLKGRSFVGTESRLHTVVELLRQIVHGTEVEPDARLAELRRRRDELDAEMAAVEAGVVQVLDATGVRDRYQQLATTARELLSDFREVEENFRLLDRAAREKIAAWEGSKGELLAELVGSRSEITGSDQGRSFQAFYDFLLSESRQAELAELLAKVSTLKTIEADDRIRGIHHDWSEAADRAQRTVRQISEQLRRFLDDQIWVENRRVLDLVRAVESVALELRDNPPTFGLEVDQPGIEIVLPFERPLYQPPAVVAVESVIPSASEEVDTDLLFTQTFIDQARLIETIRDVLPENSSALLSDVVAVHPIEQGAAEIVGYLALNDEDVAVEMDDADETLLEYADPADPDFTKRARLPKVTVRRR

SEQ ID NO: 32166 - protein, 192 aa, Mycobacterium canettii CIPT 140070017
MSNEHAIASAIIRLMQGVVYRESDEDTWLTLERSGAGVRDHFGTIGVEVVVDDAEGYAYLRSRPSEDGDEVLPRLVRRRALTYNVSLLLVLLRKRLVEFETTGGEGRLVLTTDQIVEMLRLFQAESTNDARIVEQAETTVKKAAELGFLRQLRGQRDQWEVRRILKAYVDAQTLADFSAKLREYAGAVASDE

SEQ ID NO: 32167 - protein, 1132 aa, Mycobacterium canettii CIPT 140070017
MSETPSATVELGDTRRAGYRLQRAEVLNWGTFDSQVWRFTPNTDTALLTGDIGSGKSTIVDAITTLLVPSHKAAYNKAAGADARERTLRSYVEGHYKSERNEATGKSRAKGLRENRRTYSVILGVFTNHGYDETVTLAQVFQQRESTGQPYRFFVTATKELSIATDFADFGSDLRDLRKRLRAAGADIFDEFPKYATSLRRLLGIRSEQALELFHQTVSMKSVGNLNDFVRDHMLEPSDSTDRVRDIIAHFEDLTKAHDAVKRAREQLDALEPVVQTTAKYDAALAERDTRERERSAARLYIAELRSNLLAGEIERLDAEGSALWQQQDAAEAKQQKLNHERESLIEERAKAGGDRIGELERLASEARVQAETRRRTRTLFDAAVFDAGLEPVAGSEEFAALSALVSAERSRLAADKRAVDAASADAIGRERELQRKCDVVAEELTSLEQRTSNLPVEQVEVRAELCAALRLTPEDLPYAGELLDVFDEHSDWRGAAERVLRGFALSLLVPQQHYDAVAAWVNGRRLTFHGRGGKVTGAKLVYERVPRQRVRLQPPEHDGLLLAECVDVKDGPFREYLVNELTKRADFRCTASLEEFRSQRRAVTREGQVRSGERHEKDDRHRVDDPRRWVLGWANERKIAALRTELAELEVERETAETQLARLTEQRTALQGKLDALLRVEGFRSWLDLDVDEAEARANDHDAERARLQTGSSRLEEITHALNRNAEQAAVVAQLIKKLTGRLATTAAEKNQAEQDKRRDDEFVEGQPEQELATARASYAALDERLGQHRPTRAADCAETETNLSADLHRRIEKLTRELGGYGQSLGQHMAEVLRRWPELRADMDANVEARHDFLAFRERVATDDLPRFESEFKEQLNKNAIQELAGFNNWLNRQASVIDERVHRINEALGAVPYNPGHVIKLEKEPTTNQDVAQFRSDLRNLTNDSLAVDGDQYSEQRFLDVKRIIERFRGRDGYAEADKNWTRRVTDVRNWFVFSASERDVETDLEWEHYSDSDGKSGGQKEKLAYTILAASLAYQFGLKWGAEQSRDFRFAVIDEAFGRGSDVSTRYALDLFATLGLQLLIITPLQKVHVIEPYVKAIGFVDNPTGTYSRLQTMTIEEYRKRRDGRRP

SEQ ID NO: 32168 - protein, 397 aa, Mycobacterium canettii CIPT 140070017
MSARWTTPDDIAARVRRRWDDGSLLRGYANGDPFEPIEVPLRGPKPSQVGDDIAAARDWVAALDAGRRDDGRYTLQWQSIGGRQIGRNRLPVRAVVSSNEQAWALLGVGSLVRRFDELLVLAQQHPRVREWVVDHPHRALSLGPEMSQLIAAYVWLDGHRQSNRYLREISAPGVDTKFAERHRPVLAAMLGVSSTASGFLAGLGLRSKPGLVRLRPSPSLGFPGPTLTELAVRSDELAQLTVEPRVAVIVENEISYLSINVPEDGVVIWGKGFEVDNVGRLRWLAEADILYWGDIDTHGFAILDRLRAWLPRARSVLMDRETLLAHRDRWVTEDRPAKSVLTRLTPDEQDLYSELVGDGLGERVRLEQERIDWHWVEQRLPGCQQRADLIGHRTDVG

SEQ ID NO: 32169 - protein, 495 aa, Streptomyces turgidiscabies Car8
MRSGGCVDFDQVTELMRHPAWVLLRADNAALVLSFCGTVFVDENARGVPETVLESRLDDRLYLLNEEKPGSFPRSADVYLAEWTKNGWLRKYYPPGEDEAHFDATAALEKGVAWVRELPARSFIGTESRLNTIVALLRQMAFGTETDPQTRIDELRRERDAIDAQIARLLAGEVDMLSPLALLDRYQQVESTAVELLRDFREVEANLRELDVRLRHQVATAEGGKGEQLAAFLLDRDEIARSDQGQSFQAFFDYLLSPRRQQELRELLQQVNQLPQLDGRANQSLLKVPFAWLEAAENTQDTVRQLTEQLRRFLVDRSRAEDRRVLALVRSIQRHVTALEGRADLPGMTLDVPKADLTLPMERRLYMPVERIELDTAAVEESEDAEVDISELFSGVHVDTEALTGHVLEAVAASPSGQANLAAIVDDHPLALGLAELLAYFQVEHPGLDMIVDPDRADLLVYPRVHVPGHTQARVPHVTFVRDERGTAAGKTEHQ

SEQ ID NO: 32170 - protein, 154 aa, Streptomyces turgidiscabies Car8
MIGLDIVIDRAEGYAYVRQQELDSRDDGVPVPRLVTRHRLSFPVSLMLVLLRGRLADSDADSADPRLVLTRDDLVEMVRGFLPPRSNEAQLVDQIDAHIKKLVDLKALRQTKQTGAYEVRRHIKALVDAQALNDFNDLLATYRDAASTTAKDDT

SEQ ID NO: 32171 - protein, 564 aa, Streptomyces turgidiscabies Car8
MTLTTDPAAFIPRQATPAEPAGTSGVGPGYRLARLEVLNWGTFHRTTCTFTIDGHCALLTGGVGSGKSTLVDALTTLLLPAHKIAYNKAAGADAKERDLRSYVLGHHKNERVEASDTTRPVGLRDHTSYSVILGVFANYVLGTHLTLAQVFYWTSPTSTGQPERFYLTAEAPLSVDTDFTGFGTDITDLRRQLKQRGATIHGSTYTQYGKALLRGLGIPSLQALDLFHQTVSMKAVGSLDEFVRERMLEPFDAKTAVDKIVAHFDALTASHNEVVRARRMIEDLTPIVTACDRYDTVQGEITTLDKRRSAVPAFFAQHRHRLLTTRHTALMSGAADLEELQSTREGQLEQLRGTADGLRRRIDGVGGEKLISLTGRIEELGRERERRRKRATEYGTWLTQAGMDPVPDAASFRERTDQISTARSRAEEQEQQARGKLDDLAVARHGNTLATEALRREISSLQQQRSSIPAELLALRRELATAAGVLDEVLPFAGELIQVRDDEAEWAGAAEAYCTGSPCPCWSPTPTTTPSRPGSTAVTWASDWSTTRSPPTHPSPRCRTTPPC

SEQ ID NO: 32172 - protein, 495 aa, Streptomyces turgidiscabies Car8
MRSGGCVDFDQVTELMRHPAWVLLRADNAALVLSFCGTVFVDENARGVPETVLESRLDDRLYLLNEEKPGSFPRSADVYLAEWTKNGWLRKYYPPGEDEAHFDATAALEKGVAWVRELPARSFIGTESRLNTIVALLRQMAFGTETDPQTRIDELRRERDAIDAQIARLLAGEVDMLSPLALLDRYQQVESTAVELLRDFREVEANLRELDVRLRHQVATAEGGKGEQLAAFLLDRDEIARSDQGQSFQAFFDYLLSPRRQQELRELLQQVNQLPQLDGRANQSLLKVPFAWLEAAENTQDTVRQLTEQLRRFLVDRSRAEDRRVLALVRSIQRHVTALEGRADLPGMTLDVPKADLTLPMERRLYMPVERIELDTAAVEESEDAEVDISELFSGVHVDTEALTGHVLEAVAASPSGQANLAAIVDDHPLALGLAELLAYFQVEHPGLDMIVDPDRADLLVYPRVHVPGHTQARVPHVTFVRDEGGTAAGKTEHQ

SEQ ID NO: 32173 - protein, 196 aa, Streptomyces turgidiscabies Car8
MSDPLTVPVVHLLKAGVLYQGDAPAVWEQIVSQQAAIGDYLGVIGLDIVIDRAEGYAYVRQQELDSRDDGVPVPRLVTRHRLSFPVSLMLVLLRGRLADSDADSADPRLVLTRDDLVEMVRGFLPPRSNEAQLVDQIDAHIKKLVDLKALRQTKQTGAYEVRRHIKALVDAQALNDFNDLLATYRDAASTTAKDDT

SEQ ID NO: 32174 - protein, 564 aa, Streptomyces turgidiscabies Car8; identical to SEQ ID NO: 32171

SEQ ID NO: 32175 - protein, 476 aa, Mycobacterium smegmatis MKD8; identical to SEQ ID NO: 30530

SEQ ID NO: 32176 - protein, 192 aa, Mycobacterium smegmatis MKD8
MSNERAVATAIIRLMQGVVYRDADEDTWLTLERAGAGVRDHFATIGIDVVVDDAEGYAYLRSRPSEDGEEELPRLVRRRALTYNVSLLLVLLRKRLVEFETSGGDGRLVLSTEQIVEMLRLFQADSTNDARVVDQAETTIRKAAELGFLRQLRGQRDHWEVRRILKAYVDAQTLSDFAAKLRQYAGAGAGDE

SEQ ID NO: 32177 - protein, 1127 aa, Mycobacterium smegmatis MKD8
MSETISRTAELSVRPGAGYRLQYAEIYNWGTFDGQIWRFTPGAETALLTGDIGSGKSTIVDALTTLLVPSHKAAYNKAAGADAKERTLRSYVEGHYRSERNEATGKSRPKGLRENRRTYSVILGVFRNHGHDETVTLAQVFQQRESTGQPYRFFVTATKELSIAVDFADFGSDLRELRKRLRSAGAEIFDEFPKYATSLRRLLGIRSEQALELFHQTVSMKSVGNLNDFVRDHMLEPSDSTERIREIISHFDDLTRAHDAVKRAREQLEALEPIADTAAKYDAALAERDGLEHERSAVRLFIAELRSGLLADEIGRLEADGAALWQQQDAAEADQRRLNHERDSLIEERAKAGGDRIGELERLAHEARAQAESRRQARTLFDSAVGEAGLTTVADEEAFLNLPTLVATERTRLAAEKREVDAATVDAIGRERDCERKCTTLSAEIESLEQRTSNLPHEQVVMREELCAAIGLTPEQLPYAGELLDVYDERAEWRGAAERVLRGFALSLLVPQPHYDAVTRWVNERRLTVAGRGAKLVYERVAARRVRLQPAESDGLLLADCIEVREGPFEEYLRNELMKRADFRCATTLQEFRDLRRAVTREGQVRSGDRHEKDDRHRVDDPRRWVLGWVNERKLTALRDELADLERDRQEAAAAAATLGARREVLQHRLDALVRVEGFRSWTELDADEAEDRADAHDAERARLQSGSSRLEEITKALECNAEEAGVVAERIRQLTGQLATTAAAVQRAQQDRNRDQEFVTAQSPEQREVARASYPALDRRLAASRPTRADDCAAAESALSADLHRRIERLTRELGGYGQSLGQYMLEVLRRWPELRADMDATVDARGDFLAFRHRVATDDLPRFESEFKEQLNKNAIQELAGFNNWLNRQASAIDERIDRINEALGAVPYNPGRFIRLEKEPTTNQDVAQFRSDLRNLTNDALAVDGDQYSEQRFLDVKRIIERFRGREGYAESDRNWTRRVTDVRNWFVFSASERDVDTGAEWEHYSDSDDKSGGQKEKLAYTILAASLAYQFGLEWGAEESRDFRFAVIDEAFGRGSDVSTRYALDLFATLGLQLLIVTPLQKVHVIEPYVKAIGIVDNPTGTYSRLQTMTIEEYRARRNGTRP

SEQ ID NO: 32178 - protein, 389 aa, Mycobacterium smegmatis MKD8
MSTMWATPGDIAAKVRRRWDDGSLLRAYGKGEPFAPIELPLRGPTPAQIGDDVARVRDWVTALDAGRHDDARYMLEWKSVGGKKFGRNMLPARAVICSYGQAWTLLGVTAAVGRFDELLASAHDHPRIRQWVIANPHRALALAADMPKLIAACEWLDRNRHSQRYLREISAPGVDTKFVERRRSDLAGILGVPSSAQGFLTELGLRSKPSLIRLRPGSSLGLPAPLSEIAVRPEELAQLDLRPRTAVIVENEISYLSVDVPEAGVVIWGKGFDVDNVGRLPWLAGVRVVYWGDIDTHGFAILDRLRAWLPTVESVLMDPATLIAHRDRWVVEDRPARSILPRLSPEEQQLYRELVEDSLGDRVRLEQERIDWGWVEGRLKAIYQGRIDS

SEQ ID NO: 32179 - protein, 488 aa, Mycobacterium smegmatis MKD8
MPDADVGRPSLQRLHELNREVAESRSVRLLVANNLAGYLTLMERHLDRGTKLTEPELVARLERDLADLGADGEQSGLALIKYWASQGWLHRITEQAGDGERNVCYLTYEARAVLDFARRMRREDTIATGGSIAGIAAGLRRVAGQVSNDPERIRADIEAEIDRLRAELDALDEGRRPEPDPLDVEDEARAIALQMEQIISDIGQYGAMLNRITTRLLDASADSDVGYRERQRQLFDDYESLFASRESASYTAFTRMIQDPEQRAALVADIELVTSQLPQLDPSLREVMSGFFTLVSAQTAEVGRTRQRCARRIKRFVASGTLEESRGVTRQLNDALAAANALLSVSLADSRVGFEVPLARADFNSIGAVAFKIRDAVPPTPAQPSEGEVNLSAFGALAAQVDATELAELVNDTVVSRPLPLDEAIGMLDSAYLGHVIVLWSWALKQPAGGNAESVRVRFRSLEGPDREIEVPKLVFTEPIPIVSESLL

SEQ ID NO: 32180 - protein, 240 aa, Mycobacterium smegmatis MKD8; identical to SEQ ID NO: 30535

SEQ ID NO: 32181 - protein, 1124 aa, Mycobacterium smegmatis MKD8
MASEPTNQFYLSRLQVINWGVFDGYHSIPFSPAGTLITGSSGSGKSSLLDAISLAFLPSHRRNFNASGDTTAAGSGTGKRTVDKYVRGAWGERRDGTSRQIMYLRGTGPAWSAVAVTYSDRTGRAVTGLVLKWLAAEKTSDPGSRYYLIDDDRDIFDLCNRWAAGGYDASVFREAGWNGGRSESQYLAQLYSIIGIRASEAAQQLLGKAKSLKSVGGLEQFVREFMLDEPASLAGVDEALEQINPLVEARGMLDVARRKRNTLGNIEAVQARYADEAAKFGVIDTIDNAMVRDYVDQLRLQQAGPEIENLDDQINQLGAQRDDFGAQQRQLKNEHNALMAQINSASVDLVPLQQRLSEAEKLADEVGRRRGAYEDKVTALQLTPPDTAEEFWSLRETLMEEADRLHRELFTGNQAYVEASAKEVRAREARDAVQTELERVRRLGSSLPKTEYEMRARIARAIGIPERDLMYVAELMELKPDESRWRMAVEKVLRGAGLRLLVPEAHLDSALRFVNENDMRGRIQLQHVKHDAHPGHPMRLRTPPEGTLASKLQVVDPTHDSAVEALNVIASVGDHMCVDSPDEFTTHTRAVTDQGLRKDSGRLSIKDDRSRLRPSDYIFVGGTEAKVAALQADLAAAEDVYAAARKARERLDQHRAALQARERACRALCDQYMQWTDIDTDSADEALTRLQDELDLLVSDNPDVEKLQQRADECWERVEKVIQQIGSLNERETLLDNRRTALLELTERLRPGEISQHARDTLDGYAADIALPLDLLDSEPFRNELVRVIGRERDRLRADRNRSHDELAGIMAAYDSSFPDAIPNDSDDFDERVHDYVALCRRIDERELPDAYERMQRLITEQAPGAILNLHMIADNEARRITEQIARVNTGLGAVEFNRGTRLTLHAGTRHLAAVDELNEMAQRISARVSLVSFGDETAMFEQYTDILQLRKLLAGNTPEDRQWTRDALDVRNRFVLYCEERDAETGEVIRTYSNSGDNSGGEQEKLMAFCLAGALSFNLASPGSADTRPMFAQLMLDEAFSKSDPQFAQQALSAFRKFGFQLVIVATVQNTTTIQPYIDSVVMVSKSDASAPNARPVASVTAASIAEFGELRRGAEPEAVPAP

SEQ ID NO: 32182 - protein, 469 aa, Photobacterium marinum
MNFSSLNTHLFRPIAGDNGPHMLALLVELDAFLDPAQLIDEPTPSQVRVFIRDYIANHNLRIEIESGESNESKSAPEQYTYSRLRDTGWLREERESGYRYVVWMSQDGRRLLNFLQSMSAEHPSLGIVCLSVRSNLAEVVKDPTSGSLIRKAADDMESFLNRMRALVGNIREIHHQLNHGSSQVHGRFEFYFNEYLGELFLPNIEKLALKGNPKLHGNKILKLANKIRFDSDLLEECVKAYKRSDIANSSKDLVENDLDRLSKAFEGIEPLFAKTQDYARRITRRIHEQIKYTVHTPSNIGQQIQFLLEKIGQDDSVDKLPSLSIGEELISGSRLAKPKTKPIEPSESSRRQQKPLWEKRAYNQLKQEHIDFQKCNLERVDKYLEDSLRGRTQVTTDELTIKSPDEMMAALHLRLLAQGISKTHVLHPLQEKYQVSFDDEEAWTTLEAMAGRRLVIRRIKDIEDASYGK

SEQ ID NO: 32183 - protein, 216 aa, Photobacterium marinum
MASEIILRELKDIELKKSADYIDSLRKTSAYLIRNQWVWNEKRGHKEHFKRCEENQTYFHKLFDSLDMTWHFDRNFGYAGVLPRGAGKRLDVTTTLFLLILRKMYDTEASMGRTELGRVKPPATELINQYELIRGDRPPVTETSYALENLKRKGVIELGERDGDTKLYEITVLPNITRVVSAAYLGVLEQFMDSYSDAVLKEDSAECDEAMEMSND

SEQ ID NO: 32184 - protein, 1135 aa, Photobacterium marinum
MFSGDNGAGKTTIFDAIQFTLMGGDQRLTRYNAAADGRTSERTARSYALGEFQDNDSTSLLRDNANSYIFLNFYDELKRPYSFGLTFYASKQSPSVEKIRGHIIKGYHVTESDLLSDEGNFLPWVDFVEHMKRTAKGLNGAMSYETVDGARIIREKIAELMSRNQTRTGKIESNLLVKTLSSALQLKMDSPIDVFIRDFILPPMPIETEQLREDLIAHQRIEEEIERAESHKSEREALLKECENISNFRVATHHAKWVSQEAEISRLNQECDVNEDEKEKQCRRLKHAKSTLELQSPRLPKLQADYDDAVIAWNNSDSASLNRTVSHASRTVEEYKNQLHSNLESIQAITRNIRSFQFPDTLNLQSFELFAQQWGSCLNAIERSGIHQLSISAPGDIVSVADKLNESQSLISSIGNLVEVADKDVSKLVMDLRVRGESTQKRLDRLCQGLSDINQATAITIHLLQGAGISATPVCDVCEISDKAWQQAIESYLGTNREALLVSPDDFEQVLELYEIAQQHDGRIKRARIINPDHALKQSRSPSAGMVSSLVETSDPVARGFMNIVLNRTRIAKTLSDLRRETKALMASGLATGGGTVGGTSNISGLMIGKSAKLDQQKLLEIEIQEVTKLLVSAKDPAVSLSKLNQQWAKLSSELSQRLIDAQNISSQYLHALNSLKQAQEQLKPLSSEDMQLELAKKQAELELSNCNVLIIQANSDVESISPALEKLDEVIGLLSTKREEAEQHRTQMEQSALHDDTKADQFWQKYEEKFDDGINAYSLIRIEAEKEAQKLHEKEIRARGVLREKIIAFTNYYSEDIANRQELLEAARQDNNNVEAYLFIEADCRDWIERILSVKLLQHRQAAQAAAEQMEQNFRGIIVGELQSRFEQMKFTFNQLNNLLKKIPFHDNIYSFHYSVVESKSLKEVYDYITTADREETELVGTMFDLPSEHEAIGLLKSALINGDDLINEIKDYRNFFTYDMKMKNKETGEENRISKMQGTGSGGEQQTPAYIALAASFMNVYKIGSESGQGASIVLLDEAFNNMDAGNASAAVAFLKEIGLQLLIAAPPEVTLKIGKEMDQIYTICREGRDVAIDHTKIYERGQEFIDQSNPAYHPELISERVAELKTKATSDV

SEQ ID NO: 32185 - protein, 416 aa, Photobacterium marinum
MFEMSQNLKRFLTQLSKKIDLSGEVKSGVTIRITDHAYKWYFALSDTTKDALHREMENLGFVRLCYRKKVMLGAFKHIESIHVVDGGVLLDSLGITPRTKLIGDLSAQLENVSFQVSWWEETRDNVIIAWSQSKTFHGIRPAQIELILDAMKLVELISSSSLSASLPDMRTLSVNLYYDSKRLENKTLVNLVYKLMSPHLDPDVAEMIETGEELLEHFGICKYPVPMRFKAKGTLICQGRIDLSALQYGIGVSPDEVLGVEWAQDVPYVLFIENRTSFERYVREVDDDGLVIYTAGFPPSAWMRAINLLVKNLINHVPVYHWGDRDVGGYRILAFLAKWLNADITPYLMGLELELDIEFDEANTTRPVSELILALESARGYPSISVLYDQLVALNQRELIWIEQEKISPRSPVPPS

SEQ ID NO: 32186 - protein, 478 aa, Myxococcus stipitatus DSM 14675
MDFATLETLRLKHPAWRLLVAGNASLIASFLHPVFVASNARAIPRRELVLRLEDHLHALREQRGETAFPRAAHVYLDEWAADSAGWLRKFYPPDTDEPHFDLTPAAERALRWLSQLTEQPFVGTESRLLTVFHLLQEMTEGTEPDPGARLAELERRKAEVEAEMARVRAGHLDLLEESALKDRFQQMSDTARGLLSDFRALEDSFHALDRRVRERIATWEGTRGALLETVLGERDAISGSDQGRSFRAFWDFLMSPERKDILTKNLERILAHPAIQSLQPDPRLLRIHFDWLEAGEHTQRTVARLSGQLRRFLDDRVWWENRRILQVLRGIEKHALALRASPPEGPFMELDDLAPTLDLPLERPLYAPPSRARMVDEEVMDATEDVPSDALFNLAYIDKTRLRSNVRQALLDREQVSLADLVRSHPLEHGLAELVVYLSLASEDRKASVDESRTQELFWTDARGLPRRATLPLVLFLR

SEQ ID NO: 32187 - protein, 203 aa, Myxococcus stipitatus DSM 14675
MTAPMSHVAEAPDALSLVVVSLLKGVVYREENPSLWQSLLKLHARVSDHVSVLGLGLALDEPEGYAFLRQRAEGEGAGELPRLVARRPLGYGSSLLLALLRKRLADADAAAGGTRLVMRRHELQDLVRLFLPEGTNEVRWGERVNQDIERAVGLGFLKPLAEEDTFEVRRILKAFVTAHCLEGLEQRLAAYRAQLIEEQGGRE

SEQ ID NO: 32188 - protein, 1127 aa, Myxococcus stipitatus DSM 14675
MSTVRPLLQADLLDVGTPNARAGFRLRRFEVFNWGTFHQRSWHLDLLGESGLLTGDIGSGKSTLVDGLVTLFVPPQKLAYNKAAGAEARERTLRSYVRGQYKSERGETGQGARPVFLRDAPTYSVLLAHFHNEGYGQDVTLAQVMWMREAEGQPAKLYLVADGKLSISEHFSRCGSDLNALKKRLKSLAREVHETFPPYQAAFRRRFGLENEQALDLFLQTVSMKSVGNLTDFVRQHMLPPFDVESRLAALMGHFDDLHRAHEAVLKAKRQAGMLEPLVADHERFTTLSAELEDLKGGREALRPWFSARKAGLFEARLAELEGEREKLRAKAERIQETRARHLADRERLRQSISDNGGDRLETEKAELVRRRHERDERMRKADQYARMAQAVGLPAATELEVFVANTRDLKRERTRTANELSEAQNSRTELAMRLRDLEREHETVSVELEVLRRQRSNIPARFLHLRARLCADLGLPEERLPFAGELLRVRDEARDWAGAIERVLYPLGVSLLVPDDDYARVSQWVDRTHLNARFVYFRVREEAASRGGASRPESLLLKLAFKPGAPQSAWLETHLARQFDYACCETSEQFMRARQALTRMGQVKTGGDRHSKDDRSRIDDPSNWVLGWTNDTKRKVLESAARSRELGVQAASARWAALEQECARLQLRTEQLGQLGVFENFSELDWRLVAGDIHRREERLKALQAESDILQGLSRQLDAVEKDVATVETTLKAVEKEQTRNEEREATTRKLLLACQRTVSECPDTLRSSFPRVARFSEEVLAGAALEADTCDERERQVRDRLQARIDGDGRKLERVRDSLLAAMHAYRTAFPLESQELGAGLEGAPEYVTLLASLRADDLPRFEARFKSLLNENTIREVANFQAQLHRERHDIHERVETINRSLRAIDYNPDRYIVLELVPTVDLDIRAFQQDLRACTEGSLTGAEDDAYSEQKFLEVKRIIERFQGREGQGELDAKWTQRVTDVRNWFSFSASERWRADDQEHEHYADSGGKSGGQKEKLAYTVLAASLAYQFGLQWGETRSRSFRFVVIDEAFGRGSDESATYGLELFRRLDLQLLIVTPLQKIRVIEPYVASVGYVHNEEGRCSRVRNLTLEEYQTERAARSA

SEQ ID NO: 32189 - protein, 478 aa, Clostridium stercorarium subsp. stercorarium DSM 8532
MILFEKDEFDKFFNPLCCKNKKVYYECILQLIEKSKTVPLLYETEARDTLVLYLRNCTYAIEDEEGLSVDYAEISNKKSEFENASEILRYFRQCGWISERELGRSGDNIATVTPQCRKMIEAIERIFNRDNRAALTNHIFAIYDILHSAFVTDHGRTHRPYVNILVPVCDSVEDLKNELLILRDSIESIMRMVIKMTEANQLGQFLIRDEMMESFFNDYFFIKKDGLIPGYIEEIEKMLRIIPETDVYKNMIKEYQEFYKVDESTAKSVIDNQLNGIMSFISYDYVKEMDYIDKKINKYYSLYATRILMVLSNNVNLQTYLNKILMTIKDFDMDVKKEFLERLSVSFNLTEHKYVGKKSIERRKKRKPNTKSGAIITSGLSDDEKLKLTEEILYAYPDKYGVKQAKNYFDRLLKNRDELIPDESVVKSRDDAMMVAASIIYSGSMEFPYEVEFLGGTVETGVATISKVKIKRKVSENG

SEQ ID NO: 32190 - protein, 215 aa, Clostridium stercorarium subsp. stercorarium DSM 8532
MGEIKLNLSIKEENMPLFKRCVRKLLGSTFIVGDKDENLYAFISRESNRQDVSDYLRMIGFDVLVDEKVRIAMLKPYEGDEETPGLKRSNVVVFTSEQYHLLLVLWEAYLESLGYSEQNIVFLGDLIDKMKAYNVDMDGSKLFAALKIFKKYDLIDFDPNNKSEDAIITLYPSLQFGWNIEQFRTVVEEYMKENQYEVSPEDENIDFESGEDDTE

SEQ ID NO: 32191 - protein, 1095 aa, Clostridium stercorarium subsp. stercorarium DSM 8532
MILLNRLRLINWYAFNNVTVPIGIFTLIAGKNGNGKSVLLDAIKYALYGDTVFNKSTENKGSRTVVSYTRGLLDVTAGTYMRPADRIPNVYTHIVLEMSEAELNRNFILGTVIETDSGNGFRTQRYVIENKTLDDIKHTYELDGKEFPYSAAELQKEYGLKMMDATNGLLRFMQRTGLHFNNQQMATFRRKLRSIMSYDPEAKIDQFIRENVLEEKKVDLSKLIEVKSNIDDLNKNFELIDKEITELDEIINTFRELKQKENRLLADDVKIAYQKYLECEERLKDCKHNMEIAEQQMKFDIQMLENLEVHEEEIRELYNNAREHLNSMDCAKAIEDAKKALDNALAEKERLKKEKDALCCFQTKINELLSWFDKMQFDVINKKILSSLTYNTVTKAEKQNAVRMFLSQIQEYRDKLIENRAEINNFLAENQKEQNKCLKIIDAYEDKRVIFSEIPEYVALKNEINREFTRRGINSEAKFAFEYVIGISDEEWRDAIEAYLGNRRYTILVEPEYYDIADDVLNVSNNKYAHLFNTKLLMKKDIKPEPDSVVHFIEVKNPVAKKYFEWQLGKLHATAVDKVRNYENAISKEGRVSVAMDSYFLRFDRIKFYCLGLSAMELNRARAKKNLEKLRQEYMAVQETLNDVNAKIAYLDKMRGFFLDYNYDACEEYDKAVSECMKKETELKVLEEAQKNNIEYMELVQRVEILKKELENIENERGRLQEDKFRVKVMYEKYSKEKENIETEIVSVKAKLQEYECKNSEVYSKAIEDYKKYVDNGKTGPGGPLKDRQRLEREVNEARRQLISKQATYNALRATEKPLPETIESVAEYQKRRERIWVDNRQEIQAKLKEQTQRYEEIFKNEFVLTILKYCETARNDIKLINAELANLKFKSHYEFDVKYVKDGSDYEKIIEYAKYLKEREKLGVSTEQMSIEDMVLNSDNKGKELEQEIKRIVNHITENGDKEQIDSYADYRNYMTYEILLTNDVLSKAKLSKQSGYNSGAEVQIPYMLILLSALLMIYNEKNNSTRLVFIDEPFAKMDPINVKIMLDFMKKQNLQMIFCAPDKTELIGNECDVILPVLRTKPDLMEIGIVKIH

SEQ ID NO: 32192 - protein, 406 aa, Clostridium stercorarium subsp. stercorarium DSM 8532
MSYEEKILTCLVNKYRSSKKDSGTNKIYKRTQIKPEKIYKKYSANDGDFDEINRLNATVELLEKRGYITSVRESFGTQIKCIYLIDEKVDEIERYLEEKYGFVSKNTQLEYVKNLIKLYKEASPICKEECKLLEQAVLNRKLPKNIKLLDDIFKAIAFIENNQEQLYIREVSMKIYGDSKYFEKVTLQPVCSILRKYTNKPLEDSELLDEILLYYHILREPQKICIKGNAVIYMFGTEVDISRFSDGIEIMASDLVNIESVILHASKFMTIENRTSYLRYKHPDVVTFYLGGYANRYQRDFIKMVYKANPTITYLHFGDIDPGGFWIHYNLCQVTGIEFGMFCMSVEELRNNVYQPYLRKLTDNDIIRLQELKDMDIYAKTVKFMLDNNVKLEQEIVSYTLMNTKK

SEQ ID NO: 32193 - protein, 484 aa, Xenococcus sp. PCC 7305
MEHEKIQYDLENSPNIKLLKSRNAPLIVSFLYQHFKKKQQISIPESELTKKLEDYLEFLRDSEPDLYPRSPREYLNQWCNDDFLRKTYKADSDDPVFELTPATEQVITWLEDLEQSEFIGAESRFLQIFSLLKEIRDNSTEDLETRISQLEQERDRIQQEIDKIKQTGIVENYNQTQIQERFEFANSIARQLVADFRTIEKNFRELTKKITTARLEVKANKGSILDRVLDADEELRESNQGKSFYTFFNFLQSDSKQQELEILIEAVYNLEDLSASGSRYESLRRIKSRLVNEAQYIMQSNYRLAEKIRQLLDESNLEENRRVGELIREIQGLALKITESPPLEPNFWIFEGKPELNIFMDRPFHSLQESPSPSFALDLDNLPEVDLRQDLNEIYHQVYVDEDLLRDRLELILATRAEITLVELIRLYPISQGLAEIVAYIVIAKQDQQHEVNLRKFEYIDIDSLELGDKLSLNMPEVIFRRLH

SEQ ID NO: 32194 - protein, 197 aa, Xenococcus sp. PCC 7305
MSTQPRPAYAPVIIKLFKGVIYSNDSHWNQLQSYLTPLKEFFGQLGLEIRNYETDGFAYLTQPEADPEDESEPLPRLTTRHPLSFKMTILCILLREELRQFNTSEATGQLVISIEKIRDLLQPYLPESNNEEKFRRNVNSLVKQAENLEFLRQLSGQDDKYEIRAILKAKLDAQTLTNLKQKLAEYAANSTSAETDS

SEQ ID NO: 32195 - protein, 1126 aa, Xenococcus sp. PCC 7305
MQQTPLQLKLTPDSEHNSSGYRLQRYEVLNWGTFDNRPWALNLQSKTSLLTGANGSGKSTLVDGLLTLLVPNRGRNYNLASGDTGKRERNEKSYVLGAYDRTSLEESYGSKSKFLREEGIPTILLAYFCNTDNQQQVTLAQVLWVKDGSVKKFFVVSKDELSIEKDFNNYQNVSELKKKLKKNKATTTFENFNKYSASFPRLLGLQSDKALDLFNQTVSIKEIRSLNEFVRKHMLEKTDVQAKIEELQKSYEDLTVCHNVIEQSRQQLETLIPLTEEDEKYNRLTQEIVNLQQNITVAPAYFAKEKFGLLTAEITKIEQQLAQRKLDQDNSEQQLDSLRQQEQDLKIAISQDSVGRRLEELKREIKQDTQEISHKKHQATEYDRLAELLQLPLYRDKEIFFTAREQGENLKQNIIAALRDLEIERDELVGQRKELESQCQELQSELDSLRQRKSQIPQRNLDIRDRIADALNLEQSDLPFVGELLKVRDDAAEWEAAIERLLKGFGLCILVSEQYYSKVNSYVNSNNLKGRLVYYRVAPSPTQATQRALAPDKVPSKLEIKPDNRIFAQWLQHKLVQSYSYTCCDTVELFLQQTRAITSMGLIKHSGERHEKDDSSRIGDRRNYILGWDNAEKIAAIETELSSLNQDLQELIQQVKELELKRSQRQRQQSWLQDFMNFTDFNSIDWRLVEQGKQRRERELAELTASSNHLQQLETQLKEVQQQIITANSLRDNLIRQIQTLEDNRRKAEAAKSKCQEKFRHSIESQLENFAKKHLRKLQHNNLNLENIDEIEDQVNNKFGEQIQKKINQQNSCRNSIEKQIYNFRRNFTQVTIDMGSDFESLPEYIKLTHKIEQDDLPRHQKRFKKLMTEKIVDSIIMFKTSLEQTEEEIKQDIDNLNNSLRTIDYTTSTYIELQYHKNRDREITDFRHNLKTCLGDVARQTAEDNEQRFKNIQKFLIEPLKNNEVRWQNKVTDVRNWLDFSVSERDRSDNQEQRTHTDSAALSGGQKNKLACTILASAIAYQFGLHRANSSGKSFRFVVIDEAFSKLDDKNARYAMELFKNLDLQLLMITPQDKINITEPYISSLHVVSNTEARDYSSVVSMTIEEFQHNRQIELAKNRDYSQSN

SEQ ID NO: 32196 - protein, 384 aa, Xenococcus sp. PCC 7305
MITPNQIKQKAKRKYTSFLQTIIKNQIFFPLVLPIGKIPQEYIQLRDELTCLINQSKSTLGYGYTVKLTTKNTRSYGSQSLPTKITIETKKDYLVLLNKQSEFSKFKANIELIRVSIPQLEEWIFKHTKQVIDHAGQWEDLLKVCHYFQQNPGPNLYLRELPIEVNTKFIEQNKAIIDSLLSAILPSEVIQPVDKQKKYSFEQKFSLRYEEPLVRFRILDKQLKEKYCFPVFDLTTPLSEFQQLDLKKYHCFITENKMNFLTLPNLQDSFAIWGSGYKTQVLKSVSWLADCPIFYWGDIDADGFKILHQLRIYFPQTISVMMSQDTFNKFEQFSVEVTSSEPENLSNLTKEEYLLYAHVSREGIRLEQEHINQNVAIKHLKECN

SEQ ID NO: 32197 - protein, 483 aa, Leptospira santarosai serovar Shermani str. 1342KT; identical to SEQ ID NO: 31357

SEQ ID NO: 32198 - protein, 187 aa, Leptospira santarosai serovar Shermani str. 1342KT; identical to SEQ ID NO: 32120

SEQ ID NO: 32199 - protein, 1118 aa, Leptospira santarosai serovar Shermani str. 1342KT; identical to SEQ ID NO: 32121

SEQ ID NO: 32200 - protein, 392 aa, Leptospira santarosai serovar Shermani str. 1342KT; identical to SEQ ID NO: 31356

SEQ ID NO: 32201 - protein, 483 aa, Leptospira weilii serovar Ranarum str. ICFT
MEYSKIKYLLKSSAIRILRKDFAGVIVSFLYDQFKTGNRFWIPTAEMSLNLRNFLEDLKDEGDVEPTDFVRSSDVYINEWVNEGFLTNRVQIVDGSEEIILELTPEMEKLFSWLEDLRDLESNEIVGTESRFFSILNKLKEIVEETVSGPEEKIRQLEKKKEELDLEIAQIRESGRVDVFPSERIQSQFLYAKKEALSLLGDFKQVESNFHDMTQSIHRKYLEIAEKGDILEFVLGEDTELLKSAQGRSFQTFWEFLRSEKHQDFLEKLIQTLYSMTDVLTVDPEYFFKKLRKNLREAGARVNTVVSQMSEQLKKTLVDQTILGNRKVKELINEIKNSALNSDFSSEFAFYGFEEPEVRLTMERPIWKGDDFDSSRTVFVEEQQESFFDWETLYPMIRGIDPEELEGNIRSLLRYKPEIGLEEVLRQYPDQTSLEEIVIYLWIASVRETHSIDTQDFFRWIRDREKEIVYRIPKVIYRVREDG

SEQ ID NO: 32202 - protein, 197 aa, Leptospira weilii serovar Ranarum str. ICFT
MDKPLVYASSILKLLRGPISLDEDPKAWDQLYGKKEEVRKYFEQIGLILYMDEVDCYAFLRQTSDEDDDDDKEKLPKLTRKIAINRRETLLLVLLREVILEREEKDPSSSAIVRKEDIYELLKPYFPKTTNEVDLYKDFDRMIRAVENLGFIRMMDGSGIKIRKILKAKLSVADLERIKSKFREGGADDESIQSQNE

SEQ ID NO: 32203 - protein, 1121 aa, Leptospira weilii serovar Ranarum str. ICFT
MTSLFNLKTSELPSGFRLQSLEVLNWGTFNGKVWKLTPEGDNFLLTGANGSGKSTLVDAVLTLLVPSNKRNYNIASGFESRRKDRSEKTYVEGHYGRETSGVEGILKVRKNQEDCYSVLSAVFSEPEKKVFVALAQVFWFQGGELNKFFLISDKPLSVRDSLLLNRRSIKNLKADLKNDGVRIFDNFKAYSAEFRNLVGLRSEKAIDLFNQIVGIKSLGVLNDFVREHMLERIDVRSKIEELDKSYSNLTEAYQAIVKAREQLKLLEPIGEKAGDLRQVRTKIKFAEKLLKSLVPYFSKLHLEILAKDEKEKELELSKIQDQLYSIRADVERLREEELKIAISLENNDTVRRIADLKKRIEDLQKEKSIRDQSWKQYSGLASRLNLPYERKETDFYEVFRLSGVRLEENESHKEILRTQITELEVENDNLKKRNRITEEEIAHLKRNKHLLHQDKVKIRNQISETLGISVQELPFVCELIQVKETERPWLGAIERLLHSFGLRMLVPEIHYIRITEYVNRTFLNSKFTYFRMLPVSGYSNESPANKNELFYKLEIKPELDSEKRRWIESQILRDYNYVCCDIDSFYNYDKAITTEGLIKTGKIRHEKDDRSKVSDGRNFILGWNNLEKIRALEEEFVETGKRIYELTPKLKEYRTQEDTNSQERSDLNRIREFNVFSKIDTEGIESDLQKSNAHLDELERSSEDYKKLKSQHDTVKKRLGESVLLEKEAEKTITVLEQRIAQIREKRSELLRTVSEYSLEELSDAFEEISERTLDETLTGENLYTIRKKLEGRMESEKTELVSEEAKIADALNKQLDKYVKKFSEDSERIGLVGNVDYIESFEEELEKIRKERLPEFENRFRTMMDDKVSKQIIEFKMGLEDDVLEIKERIQELNESLRWLDYVKDKTYIQLEFSDTKNKEIVGENGFKFLLKECIPNVGDGSSNEDKFQKIRELLDRLKVQDGNDRWSKSVTDTRNWLDFRVVEFDKETNKPKEVYDSSAGKSGGQTVKLAYTILASAIAYQFGFRNKKSFRFVVIDEMFNNLDNPNSKYAMDLFQQLGLQLLVVTPMDRIGVVEPYISSANFVSINSEGNGSSVVPITKEKLKNNKLENYVLENGNVLS

SEQ ID NO: 32204 - protein, 389 aa, Leptospira weilii serovar Ranarum str. ICFT
MISPEEIRKKAEKYFPTVLKNSILNVTSFPWEISVGKVLPGELLRFAEPLRVLEKNSKQETGFGYRLFSLPKETRKFGTQTLPESIVFDTQSDFLIYIGKEQEFESYQKNVKLILNSIPELHDWILEFPMFVIEKENSWKELLEVCDYFRKNPKSGLYIRELPVRVHTKFIEENKTILRKLLDFLIPNEVLVESSVFEDRYGLKKEEGLVRFRILDSEISKNCFGGLSDISVPIGEFRSLRMEGCKRILLIENKTNFSNIHNFLTVPRLQRTVAIFGKGWGLGILKDCEWLKTKELFYWGDLDVQGFEILSTLREIFPAARSFLMDRKTFHTFREFAVDGVLGRIGELRFLNEEERATWEFLTSLSEKNRLEQERIPNWYVEEVLNELF

SEQ ID NO: 32205 - protein, 483 aa, Leptospira santarosai str. ST188; identical to SEQ ID NO: 31630

SEQ ID NO: 32206 - protein, 187 aa, Leptospira santarosai str. ST188; identical to SEQ ID NO: 31627

SEQ ID NO: 32207 - protein, 1118 aa, Leptospira santarosai str. ST188; identical to SEQ ID NO: 31632

SEQ ID NO: 32208 - protein, 392 aa, Leptospira santarosai str. ST188
MISPEILRKRSLAYYHNELLRSIVLGGVLFPWEISIGKVLPEEILKNPSLLRELRAESKENKGFGFRIVFRSKETRKYGIQTIPTKIVFDTEDDFLRFTKKKDEFLSYSTDCTLILSVLPELKDWILKNTLSVIEESGKWESILSVCSYFLEYRNPGLYIRELPIRIPTKFIEENKKVLRSLLDFLLPEIADAKDFETRYGLKKAEPLVRFRILDLEIAKSSTGGLTDLSIPVRDFRKLELSGCGRVFILENKTNFANLFNFLSFPQLKGTISIFGQGFGLNVLKDCSWLEKMEIFYWGDLDVQGFEILSQLREQYPQSRSFLMDLKTFVRFRDFAVDGIPSSKSSEPKFLTPSERETWKYLSSLDSKNRLEQEKIPHEYVQEVLSGLDGSQ

SEQ ID NO: 32209 - protein, 481 aa, Leptospira alstonii serovar Pingchang str. 80-412
MEYSKIKYLLKSSAIRILRKDFAGVIVSFLYDQFKTGNRFWIPTTEMSLNLRNFLEDLKDEGDVDPSDFARSSDVYINEWVNEGFLTNRVQIVDGSEEIILELTPEMEKLFSWLEDLRDLESNEIVGTESRFFSILNKLKEIVEETVSGPEEKIRQLEKKKEELDLEIAQIRKSGRVDVFPSERIQSQFLYAKKEALSLLGDFKQVESNFHDMTQSIHRKYLEIAEKGDILEFVLGEDTELLNSAQGRSFQTFWEFLRSEKHQDFLEKLIQTLYSMPDVLTADPEYFFKKLRKNLREAGARVNTVVSQMSEQLKKTLVDQTILGNRKVKELINEIKNSVLNSDLSSDFAFHDFEEPDVRLTMERPIWKGDDFDSSRTVFVEEQQESFFDWETLYPMIRGIDPEILEGNIRSLLRYKPEIGLEEVLRQYPDQTSLEEIVIYLWIASVRETYSIDARDFFRWIRDKEIVYRIPKVIYRVREDG

SEQ ID NO: 32210 - protein, 197 aa, Leptospira alstonii serovar Pingchang str. 80-412
MDKLIDCASSVLKLLRGPISLDDDPKAWDQLRRYEKEVREYFEKIGLILHLDEADCYAFLRQTSDDTDEGDKEKLPVITRKIAINRKETLLLVLLREVILEREEKDPSSSVIVRKEDIYELLKPYFPKTTNEVDLYKEFDRMIRAVENLGFIRMMDGSGIKIRKILKAKLSVADLERIKSKFREGDSDDEPIQSQNE

SEQ ID NO: 32211 - protein, 1121 aa, Leptospira alstonii serovar Pingchang str. 80-412
MTSLFNLRTSELPSGFRLQSLEVLNWGTFNGQVWKLSPEGDNFLLTGANGSGKSTLVDAVLTLLVPSNKRNYNIASGFESRRKDRSEKTYVEGHYGRDASGAEGILKVRKNQEDCYSVLSAVFSEPEKNTFVALAQVFWFQGGELNKFFLIADKPLSVRDSLLLNRRSIKNLKADLKNEGVRIFENFKAYSAEFRNLVGLRSEKAIDLFNQIVGIKSLGVLNDFVREHMLERIDVRSKIEELDKSYSNLSEAYQAIVKAREQLKLLEPIGEKAGDLRKVRTKIKFAEKLLKSLVPYFSKLHLEILSKDEKEKELELSKIQDQLYSIRADVERLREAELKIAVSLENNDTVRRIADLKKRIEDLQKEKSIRDGSWKQYSDLASSLNLPYERKETDFYEVFRLSGVRLEENESHKEILRTQITELEVENKSLEKRNRITGEEIAHLKKSKHLLHPDKVKIRNQISETLGISVQELPFVCELIQVKETERPWLGAIERLMHSFGLRMLVPEIHYKRITEYVNRTFLNSKFTYFRMLPVSGYSNESPANKNEVFYKLEIKPELDSEKRRWIESQILRDYNYVCCDIDSFYNYDKAITTEGLIKTGKIRHEKDDRSNVSDGRNFILGWNNLEKIRALEEEFVETGKRIYELTSKLKEYRKQEDTNSQERSDLNRIREFNVFSKIDIEGIQSDLQKSNVYLEELERSSEDYKKLKSQHDTVKKSLGESVLLEKEAEKTITVLEQRIDQIQEKRSELLQTVSEYSLEELSDAFEEISKRTLDETLTGENLYMIRKKLKEFMESEKTELVSEEFKIADDLNKRLDKYVKKFSEDSERIGLVGNADYIESFEEELEKIRKERLPEFENRFRTMMDDKVSKQIIEFKMGLEDDVLEIKERIQELNESLRWLDYVKDKTYIQLEFSDTKNKEIVGENGFKFLLKECIPNVGDGSSNEDKFQKIRELLDRLKVQDGNDRWSKSVTDTRNWLDFRVVEFDKETNKPKEVYDSSAGKSGGQTVKLAYTILASAIAYQFGFRNKKSFRFVVIDEMFNNLDNSNSKYAMDLFQQLGLQLLVVTPMDRIGVVEPYISSANFVSINSEGNGSSVVPITKEKLKNNKLENYVLENGNVSS

SEQ ID NO: 32212 - protein, 389 aa, Leptospira alstonii serovar Pingchang str. 80-412
MISPEEILKKAEKYFPTVLKNFLLNVSSFPWEISVGKVSPGELLRFAEPLRILEKNSKQERGFGYRLFSSPKETRKFGTQTLPESIVFDTQSDFLIYIGKEKEFASYQKNVKLILNLMPDLRDWILEFPMFVIEKEDGWEELLEVCDYFRKNPKSGLYIRELPVRVHTKFIEENKTILRKLLDFLIPNEVLVESSVFEDRYGLKREEGLVRFRILDSEISKNCFGGLSDISVPIGEFRSLQIQGCERILLIENKTNFSNIHNFLTIPKLQKTVAIFGKGWGLGILRDCEWLKTKELFYWGDLDVQGFEILSTLREIFPAVRSFLMDRKTFHTFREFAVNGVLGRVAGLRFLSEEESATWELLTSLPEKNRLEQERIPNWYVEEVLSELF

SEQ ID NO: 32213 - protein, 485 aa, Arthrobacter nitrophenolicus
MPRSARSSADAISARLRDLELLTKGPAWALTRSAPWVIAVLQASFTRTRPQAPLEEFHADVDSFLEELRRQDPGLGGGANGKSFGDEWTRRQFLTRRNQSGQIVYEVTEPAARVLAFLDSLSSERSTLNGSRLGTLLGDVEKLANETNPDQSARLESLEEEIEERQQLIQDISSGEFDGLLDDDEAVEAAGNILDLAASLPADYKKMRDRIEELVGELRNQIIEESLTKGATMAQVLEADKRLRQSPEGRTFRSFTAFLEDPQQQLRFRSAIGEVLSRQFADELSAEDRETLKNLVAELRQQHSQIQRIYGKLSESLNTYIQSDDFRQSLRLRQVLREAEQAIRALPYERDRPGLVPGPVLYNAGFESLSMVKLFDPDEFAAPPKLADPIAFSDSDRVRSVRTGKAKPQAIRLAMAGAETLAEAWQNLPPEEQHINSIRALLSEALHAGADFNRGAWDGLDFEQIDGTTRRAYLPMVTLAKDSND

SEQ ID NO: 32214 - protein, 267 aa, Arthrobacter nitrophenolicus
MTEEITTPVVEPVETREAPISTGSITGAVTPRDTFVDGAALFPGDTGVLSMKVRQALVKLLKGPYIDGGRDEKLWTVLLDNQVILRSRLSELFLAMQLDHERKIAVLRPVDPEVIGGGARSSILRQQRALSRVETIVLLRLRLLLDRHVTAQTDPTITREEIADLVAHYQPAGQQDALRDSDVVTRAVTKLLARQLLLPTGLDDVYTISNALPLALPFENIGDIPAHIEALVAASADQSGTEPLLDLDADPVVEPVETEEDEAESAQ

SEQ ID NO: 32215 - protein, 1154 aa, Arthrobacter nitrophenolicus
MSIASMLPMGEVTNPGQMRLALVQVVNWGTFHGAHTMHVDRDGTLLTGNSGVGKSTLFDAMLRVFDARPRSNEAAAQRSGGAVEDKRTTFTYMRGKVGDKAVGEGSASAFQRPGATWSAVALTFDNAAGTRVTVSALFDLPKNGTESSVGRFYLIDSTPLDLEAVEGIADKRFTKAVLESTFPHAQVFDVHKAFAERFRRLLGINSDQALPLLRVIQAGKGLGGSVNTFFRDQVLDAPATLAAADDVVEEFSNLMSIRQRLEDVRQQRDQLAPVPGLNREYAQSLLDANRLRELAGEEFEAYRQRLAVTVHEKTLVRFKELAQAKAKELGAERAVRDGLAKELRQLETDYNSQGGNAISAIEQSLENARVGLKLRQQVEESAQQALADAGLRLEWTAGGWEQAHEQAAARSAELKDDSQALQELRFEAFDAHATKKRELAAAEQELVSLKTRKSLLPPSSIENRSAIAAATGIPEERMPFAGELMDLAEGEERWRPAAERALRSLATTLLVPGEHFAAVTRYLNDNKVRGALRAVDVSKPLAGGALAVEDVRDGDLLTKLDILATGAAAEPGAWIRERIALDFAYPCVEDPDELAGLDKGLSLGGVVKRNRHTVEKDDRFTSRQDYVLGFDNAAKLELVAGQVEDLRQEVAKAAELAQSREDSHQGMSRQLDALRRIAEDDRPWEQVSAAVAADELARIEQRLKDALAAQADLEPLRATIEEVRQKHQSSTEAAAVLQSEYKALDRQLTAADSMLEGARERLAQSPPSDATVAALEPYFADFGDVTEMHELDNLANRVRTALLGELHAAESRGQATAERLTRIFEGFVRDWGSAISADHGTSIGAASEFESRYHAIVSDGLPAQEAEFRQFFNQRTHESFSTLLHLLDEERRSITSRILPLNGILSQVNFHEGSYLELDIKQTLPPTAKQFKDAIQNALKARHARPSRPDAAGGDKNDDDELTARYKSLETLVKRLGSQAPEDRRWRAEVLDVRGHLFIQCKEHREVAGTPSNGKNSGKKTDVFMHADTGSMSGGERQRFTAFIMAAALSYQLGIAEQGFTTYGTVMMDEAFVLASEEFAGAGIKALHEFGFQLLLAAPENVIDLSRHLGSVTEILRDRRTNRSGVLTAPVIKPRPGEEGAWRSEANPVDIVLR

SEQ ID NO: 32216 - protein, 489 aa, Arthrobacter nitrophenolicus
MTVLRAALTASRLLSEDPAWRLLRANNAAIAVAMLSKHLGGEQRRLAAPALFEQVEEDLEELRGNGFDLPQTAQAYCTAWRNDGILIRRTAEGSREETFELSLGSLQAIRFVTELSEPRQAVTESRLATILDRVRVLARETDPDSTSRLRALHDERARIDAQIERAAGGDVDVLSAEQAAERLRDVLSLIEEIPSDFARVRCELEQLNRDLRERLIEQDGPRGSVLDDIFRGVDLLAESEAGRSFSGFYALLLDPEQGRDFEDSIDTIMDREFTSRLSAAQVRILRRILPTLQDRSSEIHAVMTAFSRSLRRFVQSQELEQDRLINQRLRSALRQALETSQSVKPYAKTELSLDLTSVPLNSVAALNLHNPADFEAAGEITEHDAETVDIEELRALARASEIDMIELTGNINAVLSRQSSATIADVLADRPATQGVASVVGLLVLAEEHATALSGREDVTWQPPDSTNDAGTTRRGTVGRYLFTERIHP

SEQ ID NO: 32217 - protein, 224 aa, Arthrobacter nitrophenolicus
MSESGVTGPAGGEELVSDVVLWDGDNGTLREPSRRVLVQLLRGPYLSASRHGNLWTALLSDEDAVRSSLADLFLDLVTDHAAQVAFVRNTYADVDAPKVMRTATLTFLDTALLLHLRQTLLQESGGRKTIVGADEVADQLQVYRGKDNADIAGFSKRINSSWQKMVKYGLLAATSTEGRFEVSPVLRLVFGAEEIAAVQAEYRRLAAEVEPGSAELPDTDEESE

SEQ ID NO: 32218 - protein, 374 aa, Arthrobacter nitrophenolicus
MPVTPAWAAALALKKYNRHVGSWAVGDDASLPFAIPLHPPTEAQALASVSAAVDWAKSWEGTADVLWTERRWASLGQQRIPDRVQLDTPVAVAAFAGKTTHWQRAFSRATSLLDSVPLPHTDRFATAVARSVEELAALAPEDFTRLFGVLEWLRVHPASGLYIRQLPIRGVDTKWVQKYRPLVTRLHEAATGESGLGLADKPDLVRVRFLDPALAPGGLADLAAPVTELAAMDLSPEVVYVFENLESVLAMPPLPGAVVVHGSGYAVDRLARIPWIRDLGVVYWGDLDSHGFGILNRLRAQGIALSAALMDLDTLEKFKDLWGHEPKPAVGTMQHLLPEELAVVEQLATRGNVRLEQERIDWTTAMTVLISTRR

SEQ ID NO: 32219 - protein, 452 aa, Anaerostipes hadrus DSM 3319
MKFAYDIPDSFWSLFRSMNRELYMEALLKINEEYEYNNYYLSKEVCLQVLEDWNESQRIWLSPEEFESENDASQTPPNRILNWLIKTGWLKRIEDFSTLTTNIIIPDYAAVFLTAFEELVNPSTDDTEIYIQNVYATLFSFWHDKKMNLAMLKTALVNTKKLNKALQDMLHNMDHFFSRLLKQKSYEEVLAEHLEGYVEEIVEKKYHILKTNDNFYLYKNDIKRCLREMREDIPWMEQVQKKADKEKGEDVLSIINAIERGFDDIEHRISNMDKEHSKYIRATVTRMNYMLNGESDTRGLMIQLLKTIGDSKDSEEKIEKVGQSMNLSHFEVLSEKSLYKKRKRRDFASQVEEEKQQEELSREDVLRLNKIHTRYQQAEIEDFIESYMQDDHMEVKDIDIRDEESFEKLILAYDYSTRRNSKYKVIERDDKLIDNGSYRYPALTFVRRKPKS

SEQ ID NO: 32220 - protein, 218 aa, Anaerostipes hadrus DSM 3319; identical to SEQ ID NO: 31156

SEQ ID NO: 32221 - protein, 1071 aa, Anaerostipes hadrus DSM 3319
MIDAMQIVLYANTDGRGFFNKAAADDSDRNLIEYLRGMVAVGEKDEVTYLRNKNFSTTIVLEFTQTESDEKECLGVVFDVDTARNDTSRLFFWHKGGILENAYRTEEHAMTISELRKYMQKNFKKEDFYFGTSNERFRKQMYDIYLGGLDMEKFPRLFKRAIPFKMNIKLEDFVKEYICMEQDIHIEDMQESVMQYGRMRQRIEDTLKEAKSLEEIKESFVKFKTKKEEQDYCQYRMNKLDVLKLKSDIHLLQQKIEDGEKDLKTQEENETVLEKKLEKLAKEYDALVAQIAGSGYDQIATRKKDVQELLGQLNHSVQRWEQTSKDLKKWCDLDITPNQAIWDIEKFEQGDITEDDLNRLKHTLDILRKETEEERQDNASALRALKKQEKSISDELKELKKGNKAYPKEVLDARYELQTKLSEKCGDFVKVNVLADLLDMKDEKWHKAVEGYLGSNKLTLIVEPKYVKDAMEIYRDMDQKKYWRISIADTQKIDKQDMKVEGNALSEEVLAEQSYVKKLIESLIGRVIKCETIDELRNCRTGITPDGMLYKNFQLKRLDPKQYTRNSYIGDNSLRHRIKELEKEKDKIFDKKDPLEKEVLSAVVILDYEYLPQSAEEYLKQQETLERAKERQEEYEDLENQLTKLREGALKGLEEERDQNRLKQEDCKQEINAMKEAIWATQNALKECRQQIIDQNEALIRAQNELPENGEYEQQFAQEIEKTDTEDYERLKKRAARKYYDAGTKKEEEYRKLVEVRTAYLREYPNRTFSAVDENNDVYDKLYKELSSDHMEMYREKAAKQAKTAMEHFKDDFVYKIRSAIREAYQRRDELNRMISGLDFGKDKYQFKITRNTGADGKYYPMFMDDSLNIDPSVLNTTMDDQMNLFSMEHENKYGELMNELIEIFIPPEGATGEELENAKRDMQKYSDYRTYLSFDMEQIVDGDEKLTIGLSKMIKKNSGGEGQNPLYVALLASFAQAYGIHLSPKVRRNPSIRLVVLDEAFSKMDAEKVASCIDLIRNLGFQAIISATNDKIQNYLENVDKTFVYANPNKKNISIQEFEKCEFDNLLTEE

SEQ ID NO: 32222 - protein, 514 aa, Gordonia aichiensis NBRC 108223
MANSAVDGARTLTDTFEANRSIQRSAAVRLFAASNSALYVTLMERHLDFGIRHTESELAIRLDRDIVELGVDDQPPGLDLIKSWAKQGWLHRVTDIASPSAPNVCFLTTEARSVIAYMRRLRREDSVATGGSIIGVAAGLHRVATQVTDDPERIREDIEHQIDELDAELVELSEGRRRPFDLRGAEDEARAIAYQMEQIITDIGQYGAMLDRITTALLDDPHDSDLAYRERQRQMFDDYESLLESSQSASYHAFTQMIQDPEQRARLIADIELVVDRLPSIDTGLRTVMENFFPLVAEQMAEVGRIRQRCARRIRRFVASGTLEQSRGVARQLNDALATANALLRDSLADRRLGYELPVATPQVTSIGRLAFEIRNPAPPEQARPADGHTNLASFSSLAGQVDTVELAEVINDRLAAGPVSLSDAIAALDEPYLGHVIVLWSWALRQPRETQRQPRETQRQPREVQGPGDSTFVRFRSLEGEDRAIEVPILMFSEPIPSQYSDTDSILSTEADA

SEQ ID NO: 32223 - protein, 293 aa, Gordonia aichiensis NBRC 108223
MTSTDSTNPSTSPNPSTSTAEVPTGTSADTAAQVSTVPADEYAGYDDLPTAATHGRVDGPRAPRFDGDVSAMPDRACWALQNLLTRRHISGDRNPQLWAWVIEYQDMLRSRLSELDLRLRLVDELQVAFVEQAGYDSRWGRKILKRETIQTYDAILALHLAKFLRSSREETAIITREEIHEMFAGVTNTIDRDLALFDKRIEHAIDKLEEIDFLRRHRDDPDTFTVSPVITAVMTASVITDLQRQFEQFIGAGETGDDVIADTDTAGGNEDSESSHPHPADDTDDYADEGDEW

SEQ ID NO: 32224 - protein, 1134 aa, Gordonia aichiensis NBRC 108223
MVSDLDNVDQTDRVGRRHGPGGHTEEQYYLSRLQLINWGVFDGYHSIAFSPGGALITGSSGSGKSSLLDAISLAFLPDHRRNFNASGDTTAAGSSGGRRTVGKYVRGAWGERRDATGAHREIMYLRGSGPAWAAIAVTYTSTSGTAITGLVLKWLAAGKLTDAHSAYFIHDGDVDIVDACNEWAANNYSAARFRDRGWQGGPGEGKYLSTLYSLIGIRASDAAQQLLGKAKSLKSVGGLAQFVREFMLDEPTSIAGISDALEQIDPLVEARELLDVSRRKRTILDNVEALQERYAAESATFTVLDTIEPEVVRSYVTNLRLRNAEPEIADLDDQIARLDADLAALTSQHDQLRQDHSHLLGRIATSTGDLAPLQEQLSTAQKASNEASIRRATYEHKISALGFDVPEDGESFWELREHLMEEATRLDGQLEAGKPHFAETLATEVAARAQRDAARDELERVRHAGSALPRAEHEMRRILANALQLDESELRYVAELVELDPSAERWRLAVEKVLRSAGLRLLVPDKHFAAALKFVNDHDMRGRIALHHAEARPAPMVEPGTLGATLHAAEPDHPCTNEALTVLARLGNYVCVDSTSDFVDHSKAVTDRGLRKDSAKLAIKDDRSQLRPSQYIFVGNVTAKITALQEELDLENDLYEQARARSAELDRERTAKEQRRDAYRRVCEQFTGWNEIDLDSADDRVDTLTEQYELLMEEHPDTEALQRKAEDIWEQVRAAISQAALVRDKIATHDKRRTQLLDLVDRLTITPIPPHAEATLDRFREESAAVLDVLAPDPFRQELLKAVGRERDRMRADTRRSRDELGRILDAYDKEFPDAIPNDSDDFDERVHDYVALCRRIDERELPAAYERMRRLITEQAPGAILSLHMAAEAEERRIVEQIERVNSGLGSVAFNRGTRLRLCPGRKTLAAVAELTDKARQISARTAAVGFGDEEAILEQYADILLLRERLAGATPEDRQWTRDALDVRNRFDFYCEERDAETGETIRTYSNAGDNSGGEQEKLMAFCLAGALSFNLASPHGNGNRPIFAQLMLDEAFSKSDPQFAQQALAAFRKFGFQLIIAATVQNTSTIQPYIDNVVMVSKTEDVNSRPVATAISTSIQTFSDLRRTSTSRLPV

SEQ ID NO: 32225 - protein, 480 aa, Gordonia amicalis NBRC 100051 = JCM 11271
MDFDAFGSLWERHPAWRLLRAHNSPLILTFLGNYFVEGNRGAGSASDLATALDDLLYTLNIASSTEDGQPRFPKEPRAYLEDWAATDAGFLRRFYPPGDDEVHYEVTPAFEKAYGWVVSLRGRSFVGTESRLHTVVELLRQIVHGTESDPEIRLAQLRRRRAEIDAEIEAVEAGDVSVLDEVGVRDRYQQLSSTARELLSDFREVEDNFRLLDRAAREKIASWDGPKGELLAELVGGRSEIAGSDQGRSFQSFYEFLLSDERQTELSDLLDAVSSMDIIDADRPIRGIHHDWSEAADRTQRTVRQISEQLRRFLDDQVWLENRRVLDLVRSVEATALEVRGREPGFGLTVDQPGIEIVLPFERPLYQQPAAVTVESRLDDATEEVDADLLFSQTYVDQARLAANIRTILPQRSSALLSDVIEMYPIEQGAAEIVGYLALDDDDVSVDIDDTEETLLEYPDPDDPDTTKRARLPRVTVRRR

SEQ ID NO: 32226 - protein, 192 aa, Gordonia amicalis NBRC 100051 = JCM 11271
MTDERAVASAIIRLMQGVVYRESDEDTWSTLERSGAGVRDHFAIIGVDVVLDDSEGYAYLRSRPAEEGDEPLPRLVRRRALTYNVSLLLVLLRKRLLEFEITGGDGRLVLSTEQIMEMLRLFQAESTNEARLVDQAEATIKKTVELGFLRQLRGQTDQWEVRRIIKAYIDAQTLSDFAGKLREYAGTASAND

SEQ ID NO: 32227 - protein, 1133 aa, Gordonia amicalis NBRC 100051 = JCM 11271
MTEGLFSSVELAAPAGGAGFRLQHVEVLNWGTFDRQVWRLSPNTDTALLTGDIGSGKSTLVDAVTTLLMPAHKIAYNKAAGAEAKERTLRSYVEGHYKSERQEATGRSRAKGLRQDRSTYSVILGVFTNPGYDETVTLAQVFQQRDSAGQPYRFYVTASKQLAIATDFADFGSDLRDLRKRLRSGGADVVDEFPRYSTALRRLLGIRSEQALELLHQTVSMKSVGNLNDFVRGHMLEPSDSTDRVRDIIAHFDDLTKAYDAVKRAREQLELLDPIVATAQKYDAALAERDALDRQRAAVRLFMAEHRSGLLAHEIATLTAEGERLLREQDEAKARQRTLSRERESLIEERARAGGDRIGELERLASTARDDVDKRRHGRALFDTAVTAAGFEPVITAEQFTSLRGLIADERPRLAATKQSLDASTADAIGREKEVARRCDAIRDELDDLANRTTNLPPDQVQLRDELCTDLGLSHEEVPYAGELLDVAEEHAEWRGAAERVLRGFALSLLVPQQHYEAVTQWVNGRRLTFRGAGGRTVGAKLVYERVPARRIPLQRQGSATLLLADRLDVKAGPFADYLRDELIKRADHQCAATLEEFRSAKRAVTREGQVRSGGRHEKDDRHRVDDPRRWVLGWANERKIAALREDLADLDRQRATAATEVEALSSERDQLQTRREALARLDGFHSWADLDVDEAQRRADQYAAERARLESGSSRLQEITTALERNAELAATADTAIDELTGKLATTAATRHRAEQDRKRDDEYVAEHTDTDLATARTSYAALTQRLSGSLPTRAAECAAAENTLSSTLHQRIERLTRELGGFGQSLAQQMAEVLRRWPDLRADMDADVDARADFVTFREQVATDDLPRFEFEFKEQLNKNAIQELAGFNNWLNRQAASIDERVARINEALGAVPYNPGRYIRLEREATTNQDVAQFRADLRNLTNDSLAVDGDQYSEQRFLDVKRIIERFRGRDDHADSDKNWTRRVTDVRNWFVFSASERDVDTDVEWEHYSDSDGKSGGQKEKLAYTILAASLAYQFGLEWGVEKSRDFRFAVIDEAFGRGSDVSTRYALDLFAKLGLQLLIVTPLQKVHVIEPYVKAIGFVDNPTGTFSRLQTMTIEEYRSRRDGRLK

SEQ ID NO: 32228 - protein, 380 aa, Gordonia amicalis NBRC 100051 = JCM 11271
MTRRWTSPDDIAGKVRRRWDDGTLLRAHADAKPFEPIEIPLRGPTASQIGEDLGAARDWVTVMDSGRQGDRRYALVWQSVGGRHVGRNQLPSRAVVSTFDQAWALLGVSPAVRQFDELLESASAHPAVRDWMLRYPLRALELGPEMPRLIAAYAWLNTHRDSHRYLREISAPGVDTKFAERHRPVLAAMLGVSSTASGFLSGLGLQTKPESVRLRPSASMGLPAALTEITVRTDELARLAVQPRTALVIENEITYLCVDVPDDGVVLWGKGFEVDRIGRLPWLAGVPIRYWGDLDTHGFAILDRLRAWLPQTESVLMDRETLVAHRDRWVIEQRPASSDLVRLTPTERDLYTDLVMDALGERVRLEQERIDWAWAQERLG

SEQ ID NO: 32229 - protein, 506 aa, Gordonia amicalis NBRC 100051 = JCM 11271
MEISAFPAQRETGRAVAPTESVQVTLGEALEANRTLQKSAAVRLFAATNSALYVTLMERHLDYGTKMSEVELTMRLERDLAELDLTDDQPTGLELVKLWARQGWLHRVTDTSDPDAPNLCHLTSEARSVLDFMRRQRREDSIATGGSITGIAAELRRVAGQVSNDPETIRLELEAQMSDLDAELADLDAGRRPPVDLRVAEDSARAIGYQMEQIISDIGQYGTMLDRITTALLDDPGDSDLAYRDRQRQLFDDYEALLQSSQSASYQAFSQMIQDPERRARLKTDIDTIIENFPGMDAGLRSVMDNFFGLVTQQMAEVGRTRQRCARRIRRFVASGTLEQSRGLARQLNDALATANDLLKSSLADRRLGYELPLAAPALNSIGRLAFEIREHVPPAPALPAGGADADLTAFASMTGQVDTVELTETVNNAVAAGPVPLTEVIEGLDEPYLAHVIVLWSWAQKQLAAGEKVPMTTVRFRSLLGEDHAIEVPDLTFTEPIPTAEVDAE

SEQ ID NO: 32230 - protein, 297 aa, Gordonia amicalis NBRC 100051 = JCM 11271
MTSLPPEVRAQRASKGPDVQAETAPSLPEAHAAAAPSLPEVRAERASKGTPDEFAGFDDLPTVANRATSHAPSAPRFDGDVSEMPDRACWALQNLLARRYVSGDRQPQLWSWVSEYQDVLRIRLSELDLRLRLVDELQVAFVEQAGYDSRWGRRILKRETVHTYDAILALHLAKYIRAARDEDALITREEIHELFAGVTNTIDRDLALFDKRIERAIDKMEELEFLRKQRDDADTFTVSPVISAVMTASVITDLQRQFEQFIGSGDTGEEPPEGAADEPTQPDDAENAYGDDEGDDW

SEQ ID NO: 32231 - protein, 1112 aa, Gordonia amicalis NBRC 100051 = JCM 11271
MSVDQYHLSRLQLINWGVFDGYHSIPFSSNGSLITGSSGSGKSSLLDAISLAFLPDHRRNFNASGDATAAGSSSGKRTVGKYVRGAWGERRDGTNAHREIMYLRGTGPAWAAIAVTYTSTSGTAITGLVLKWLAAGKMTDAHSSYFIYDGDADIVEACNEWAVANYNSAKFRDRGWRGGPGEGKYLSTLYSLIGIRGSDAAQQLLGKAKSLKSVGGLAQFVREFMLDAPTSIVGISDALEQIDPLVEARELLDVARRKRTILGNIEEVHERYASESATFSVLDTIDSTTIRSYVNNLRIRNAQPEVADLDDQITRLDGDLAALTTQHDQLRQDHSLLLARIATSTGDLAPLREQLGGAQKLSTEVTARRNAYEDKVSALGFSPPTNAEGFWSLREELIEEATKIDGQLEAGRAHYAEALAREVAARSRRDTAQEELGRVEQAGSALPRTEHEMRRVIAHALQIDESELKYVAELVELDPDEERWRLAVEKVLRNAGLRLLVPDKHFRSALRFVNSHDMRGRIQLHQAETRPMPVVEPGTLASKLRSVDPGHPCAAEAMTVLAKLGNHMCVDNPGEFSQYAKAVTDQGLRKDSAKLAVKDDRQQLRRSQYIFVGDVESKITALRDELAYEERVFEDAREDCAELDRERSAKERRRDAYRRVCEQFTQWNEIDVDSVDDRVDQLTDQYDLLIEENPDVEALQRKAEDLWEQVRHAISQAALVKDKIARQDERRTQLLDLIDRLKPEDVPAQAEKTLDGFREDLSATLDVLNPEPYRQEIVKAAGRERDRMRSDARRSRDELARILDTYDEEFPDAIPNDSDDFDERIHDYVAVCRRIDERELPSAYERMRRLITEQAPGAILGLHMAADAEERRIVEQIERVNTGLGAVAFNRGTRLRLVPGRKKLAAVEELTEKARQISNRATAVSFGDEQAILEQYSDILLLRERLAGNTPEDRQWTRDALDVRNRFDFYCEEHHAETGETIRTYSNAGDNSGGEQEKLMAFCLAGALSFNLASPHGNDNRPIFAQLMLDEAFSKSDPQFAQQALSAFRKFGFQLIIVATVQNTSTIQPYVDNVVMVSKTEVGPELRPVATATSTTIKAFSELRRSGSQLAV

SEQ ID NO: 32232 - protein, 500 aa, Gordonia hirsuta DSM 44140 = NBRC 16056
MISNDRFIIRGDIMAALGDVYRLAGLRTDDAAWRLLRTDHAPVILGLLGRHFTHGARPLPAPELFALLDADLEELRDNGWDLPQTGRGYCAAWVRDGFLLRRSSSTAREEFLEPTEGTLAALDFAGALQAPIRAVTESRLTTLASQLSALARDSDPSAQSRLARLQVERAALDRQIAAVESGDFPVLGGERALERGREILALASEVPSDFARVQSAFDELNRSLRARILDDESDRGDTLGDVFRGVDLIADSEAGRSFSAFYDTILDPARAAQIDDAITAVLDRPFAAEFTGEQHRRLRGLLTDMEVAAGEVHAVMTSLSRSLRHFVQSRAYEEHRRIQQLIRSTQQQARTVATVRRPFDVLDLELVRVGMAIESVSALRLHDPADDRVTDEVVVHPAGHADLESLRQLIRESEIDFDELTGNIAATLTQRGQASIADVLVEHPATQGLASIVGLLVLAGRHGHRVDGTERIGWTSQAGLTRSVVIHRHQFDPTAPELQP

SEQ ID NO: 32233 - protein, 229 aa, Gordonia hirsuta DSM 44140 = NBRC 16056
MSSPEPGFPDHGELGAAASESVGHYPGDLGTLAPASRRALVQLLKGPLITSARHPEIWRTVIADQRLLRSRLADVFLDLVIDDENEIAFTRPADTGDAVAAPVVLRTERLTFMDTVMLLALRQLLLRAQPGERVIVDRDEIAEQLEIYRRRADTDPAGFRRRINASWSKLTKYSLLSSTTTEDRMEISPVVRQLFDADQVALVAAEFDRILAEEKPADGTPADDVPDIE

SEQ ID NO: 32234 - protein, 1095 aa, Gordonia hirsuta DSM 44140 = NBRC 16056
MSSTAGQYRLARIQVVNWGTFDGYHQIPVARDGYLITGGSGSGKSTLLDAISAVLMPGDRVKFNAAAQESDRSGRSLVSYIRGAWRRDTDADSDVLVSSYLRDGATRSAIALTYRTQDPRMAVTLIKLLHLGRGKNAAGEVVSLHLLVDGEFDLTDVLPYLSNGIDRRGIRKRWPNADVNPSYSPFARKFRSRLGISSEAAQRLLHRTLSAKSLGSLDRLFRDYMLDVPATFALAERAVEQFEDLREAHRVVVDARDQVQTLDPLVDLDRLRQESLSLVEATAEEASFLDIAHAQRTLEILQRELTELEGRTPLIEEAQTAAQGHDERARDAVLDAKVAIEHLDAGRLSVLNAQHDEQRRAVARIGTRRERIQQAVAVWDGTVPTDAEGFARLRGQLEDQLAESTGGHEQRRGEQYAISARREAARTEIRRLEADREALARRRSNLDPALLRARELICATASLTEDQLPFAGELLQVRGDQSDWTGPIERVLGAFGRTLLVTDELYRRVSAAVDTQHLGTRLVYRRVVPAPEHRTRRTGSSSLVRKLEVAPGPLHDWLQQQLADRYDYACIPDVAGFADHERAVTRAGQVKHSAQRHEKDDRSSVDDRRRWVLGFDNEAKLNDLRHRIDQLHSEVDGLSARLDALDRREQQIAAQNRAAQSVLDVQWAEIDVATAQTELDTVAARIARWQQDHPEHAALALALTQAQQAAEQAAGALAAATAKALSHRSELDRYRDLVAASTSDAHSSVPEAVAERLDRRYQAQTRRITSANIDKVVHEVSKAITGENQRAARELSKANDGIVRVLSRYLARWEARAGELRAEPEFSGDALAVLHRLRADGLPEYETRFFELLNEQSTRNLGQLAINIRRAPGEIRARIDPVNQSLRTSPFDTDRWLKIDVRERRSPLAAEFLDSLAEVSSGSWAQETREAAEGRYVRMAQLLERLGSREPADERWRKHVLDTRLHVGFIGVEYDGDAEPRNYHDSSAGLSGGQAQKLVFFCLAAALRYQLSPDGSGVPGYGTVILDEAFDRADAAYTRRALDVFAQFGFHLVLATPLKLLQTLEDYIGGAATISIREGKYSQIDLLEWSDDDPQ

SEQ ID NO: 32235 - protein, 392 aa, Gordonia hirsuta DSM 44140 = NBRC 16056
MTRNEITPAQTRERAHAAVRSRLRDWLTDPVAAQADVLNIALKPPTERRLATQSESARDWVRLWHEYHGPGAVDWEPRRWPSFGTQNVPVRLRLSGADQICRAAEQATRWRRLLSRREKLVALGRSDGLPGAVAATFPRWETLDDDDFIRLIATTDWLLKNPRSGLLIRQLPIEGVDTKWLRAHRRLVENLVDGARGSTDLGIGNLPSLREIVLLDPALLPGMPKVLASTVAGLAELPITPSTVLILENREGVHALPPIPGTVAIAGGGNAVTDLTAIEWVRHADIVYWGDLDTHGVVILDRLRRRLPQVRSLLMDPATFTRFRHLCVPEPAPATEDPSTLTDTEFAALLAIRASGLRLEQERIPWPYVLQQLAAAGLPVVHSDGSDLIAGN

SEQ ID NO: 32236 - protein, 503 aa, Gordonia sihwensis NBRC 108236
MQFDEIVAVRRSNAAWRLLRADNAPLLLSFLGRVFVDDNVREISESALVSLLDEELYSLNERLGEGTYPRSPKAYLDEWSAADTAWLRKYYVIESDEPHYDATPAVERAVAWVRSLRDRDFVGTESRLKTVLELLRQIVYGTTTDAEVRLAELRRRRAELDAEIEAAERGEFQVLDATSRRERYQQFADIARALLSDFREVETNFRTLDRQMRERIATWRGTKGELLDEIVGSRNVISDSDQGRSFQAFYDLLLSADRLDELDELVRHAQGLDEVADSDIRLTNIHHDWLDAGTRAQDTVRRLSEQLRRFLDDQAWLENRRVMDLLRSIESSAYAIRDRRVDDFAQEIDSPAPSVNLPLERPLYRPAAAVEVASEGIEEGEAQGASEALFEQIHVDPAPLIDGVRRALRRSGQVTLAEVLAERPLEQGLAELVTYLSLTDDGFGKVFDESADETVSWTDESGGRRVARVPRVIYTRPSPTASPTAGPTVNPTADPTAPDQETR

SEQ ID NO: 32237 - protein, 199 aa, Gordonia sihwensis NBRC 108236
MSRPVPRDELNLSLAVTSLMKGVVYRDTAETAWRHVLGLAAQVSDYVATLGLTVVIDEAEGYAFLRSKSDDELADLGIGRLVARHQLPLHPSLLLALLRKKLAEHDTSDAGNRLIVTGAQLREMVSPFFPATTNEARIADQADTAIRRVVELGFLRRMPGQDGEYEVRRVIKAYVDAQWLSDLDAHLAEYAEIATEERR

SEQ ID NO: 32238 - protein, 1134 aa, Gordonia sihwensis NBRC 108236
MTGLFAPTELENADSARSGFRLQRFQVLNWGTFDQRVWTLVLDGQNGLLTGDIGSGKSTLVDALTTLLLPAHRVAYNKAAGGESRERDLRSYVLGYYKSERNEVTGASRPVALRGMSNYSVILGVFHNEGHDETVTLAQVFSMRHDSGQPERFFTVTDRALDIATDFADFGSDLRALRKRLKDGDTRIHEHFPEYGRDYRRALAIRSEQAMELFHQTVSMKAVGNLNDFVRDHMLEPFDSSGWVDTMVSHFEDLTAAHDAVVLARTQLEELGPLLADDDRYRRHVEMAAELKARRGALRHYFAQQRHDLLAGELENHNRDLAATRAALEAVDRDLADLRIGLRELELRQAGLGGTDIAALEQQIVDAARQREERAAAHERYTRMIEDAGLAPVSDRGQFEQRRTEVADAVEALDAEAAEVDNALNEVRYSRRQLDGEGRRVAGEIASLRGRTSNIPERNLRIRELICQGVGLPHDELPFVGELIGVRADESRWEGAAERVLRGFGLSLLVAADLYDEVSAWIDANHLGGRVVYFKVSDHVSSKGAPTPPPTALAHKIDIKEGRFETWLERRLFERARHVCAETLEEFRAADYAVTVNGQVRSGGGRHEKDDSQRVDDRRNFVLGWSNEQKITALFTAGQRVQDDLNRVDQEIADLEDRRRALMDRRNALTGLDAYPSFDVIDWMSSAARIAEITERKTELEHSSTELAEVTDAVAATREQLSAADATRDGLRDKVSRLEMARDQGEKARNAAQAVLAEPEFAEAEAYFEAIAEAVQAYRAKVDGGADQVLTVAECAELEASLTEKLTDESEQHTSRAGTYETRVVNRMSEFNRNHPVLTTEFDADIASADEYRELHRRLAEDDLPRFESEFKNYLNTNAIRDIAIFAAKLNKEVHQIHSKIDTINESLAGIEYNPGRYIRLDVNPTAAQDIREFRADLRKCSDGSFDSGGDDQYAEEKFLLVKALVERFRGREGFTDLDRKWTEQVTDVRNWVTFAASERYLDGDGEYENYTDSDGKSGGQKEKLAYTILAASLAYQFDLKWGATRSRDFRFVVIDEAFGRGSDDSARYALSLFARLGLQLLIVTPLTKIYTIEPFVSAVGYVENRGGSYSQLQCLTIEQYREKRAVRELVHEA

SEQ ID NO: 32239 - protein, 489 aa, Xanthomonas translucens DAR61454
MKHRARIARYRTLREQPLWKLLAADQAPEVIGLLQSLLLDSERRLPAAVLHERLQRMLDELNAEQLSRELPRTAQAYVAHWLAQGWLERRLPDGAQQEEYELSTQATQAIRFADGLEHARGAATESRLALVMQQLAQLAALTETNPDARLSALRDERERIDAEIARVSKGKVAALDGKRALERARQVIALADELTEDFRRVRDDFEQLNRDFRERIIDDEGERGEILGKLFEGVDVIGDSDAGRSFQAFWALLNDAEQSAQLDAALETVLARSFARKLDRRERGFLRGLTGTMLERGGQVHDVMQHFARSLRGFVQSRGYLEQRRLNQLLKQAQAEALALRDHIPAQRGIGRDLNLTTSRLRSLAQWRLHDPRQQQVEGGIQRNEAAAISLDSVGDLVAQSEIDFRSLRRDLFELLAEQPQLSIAQVLTQREASQGLGSVIGYLSLGTRHGVVAAGQHEIAQWRGGDGQWRRARIPLVWFTQEKRHELA

SEQ ID NO: 32240 - protein, 234 aa, Xanthomonas translucens DAR61454
MNWHDHELDPEQGRSNDAVDSAAPDAGTDLFPGDSGRLPVEARRALCQLLSGPSVDAQRHSRLWPALLRSEAAIRSALADLFLGLVLDREAGIAFTRQADTGELEAPVLLRSSPLTFIDSVLLLYLRQQLAEADARGLRAVVEEAQLGEALAVYEKNLSTDRAGFLRRVGNAVQKMKDNHILTRLRGEDERYEVSPALKLLFSAEDVAALAQVYRQLREGPDSGEDAAAAAQDA

SEQ ID NO: 32241 - protein, 1202 aa, Xanthomonas translucens DAR61454
MKSSASTPGLFAGDLPDPRLQQFRMRRLQVHNWGTFSGLTEIPIAARGFLFVGRSGSGKSTLLDAMSALLTPPSIVDFNAAAREAERSGRDRNLVSYVRGAWADQQDSESGEIATQYLRKGATWTALVLEYRNGEDRVVSLVRLFWIAGNGTAAADVRKHYMVAERAFDIAADLDGFDLDLRKLKQRLHDVHHFDSFAGYAERFRHQLGIGNEMALRLLHKTQSAKNLGDLNAFLRGFMLEEPKTFDAAERLVGDFAELDGAHQAVVTARRQVETLLPARAHHAELMAVRRQRSELDELKLGIDSYREQRRLALLDARLQELDTQDRGLAGEEGQRRAALENHQRRLDDLEAQRRAQGGERIDALERERGQLEVERDRRAGKRTQAEQACRQLEQVLAGSAQGFAGQAAQARAALEDGTRAAAELDEAISQRIAGKAEDAKRFAEVRAEIDALKRNPSNIPAPMQALRARLSADTGVPEAALPFVGELLQVRSEDADWRGAIERVLHGFAQSLLVDERHYADVADWVNRTHLGIRLVYYRVRDNEHALPGRAPAAGSLLHKLELREHAFAGWLRRELGKRFDYDCVDNAKALRHAERAITREGQVKHPGERYEKDDRHAVNDRRRWLLGFDNRDKLALFEEEGLALAQRIAACDADVAALRARRERDGARRLAQHTLANLAWDEIDVAAPLQRLDDIATALRQLREGDGNLRALGEAIDHARADIKQAERTYESVREERIGLGVERVRLEKQRLNCADANARVVTPLQRQGLDERLAGLGVLSLDNLEAHFRQIGNAIVEQTSASDKEHNRLEQLLLGCFRRYCQQWPEDSGDFTFSLSSAEDFLARLQRLERDGLPRHEARFFELLQSQSKNNLLALQRHTAEARKSIAQRLDEVNASLEQVPFNRGTLLTIELGDRRLPEVIEFHQRLRDVLGHHQTEQRELAEQQFAVLRELVRRLGSQDGEDKRWRELVLDVRLHVEFVGVELDAATRQQVEIYRSGAGKSGGQRQKLATTCLAAALRYQLGGEDGELPRYCAVVLDEAFDKADNEFTALAMNIFENFGFQMVVATPLKSVMTLEPFIGGACFVEISGRHDSGVLLIEYDEQARRLKLPERTRGTATPADAAPAPEAEQPGTAPSRLRADTAAVVRGDAGEPAVSDGAAAMAPVPHRALPKSKAKSKPESKPESKPGSKPGSKPKSKA

SEQ ID NO: 32242 - protein, 402 aa, Xanthomonas translucens DAR61454
MARANAMLLPDAALAALRGQWRLHRGAWLLGDAAPQPISLRMPTQAQASAGFDAFGAWLRAWRTTPLPGHVEWRDVKWSQLGLQCLPHAWQPNADEAALALGEHARWQRARQRSAALVARWPQALGFAARLRRQFDLLADAPEAGFVRLLAVVEWLHAHPHSGLFLRQLPIAGIDSKWIEPRRGVIADWLAGLRGIVEPRGFDSVSGLRRAPDRVRLRLLDPDLRARLGGLEDVQVPIAQIAALQLPVRQVLIVENRETGLACEDLPGTLLLMARGYAVDYVRAIDWLQALPLYYWGDIDTHGLAILHRLRRHAPRTVALLMDEATLRDTPSELWGHERRQHRAQRLDALTAAEQALYTDLRTGRFGPAPRLEQERIAWNYAWPRIRAALAEERAEPCAIVR

SEQ ID NO: 32243 - protein, 513 aa, Brachybacterium muris UCD-AY4
MSAIARALENRDLFGGEGVLALLRTDNAPVTLGLLGTHLAGDVRTRTAADLYDLLSADLAELRFHGIDLPRTAQQYCATWVEQGYLTRRAARTERTEEFALTENSQSALRLIEQLHTPRDAVTRSRLTLLTERLRTLARDTDADSAGRLEALHTERDRLDEAIAQVMELGAEPLPEAQALETIDELYSLALDVPSDFTRVRGELERLHRRLRLDLVEHEGSQGEILDQLFLGVDAIEDSEAGRSFAAFHDMVIDPVQEARFHDAVDALATRPFAHRFGRERIVYLQSYLARLQRESHQVRHAMIDLSRSLREFVRSRQFEEFRALADRLRRPQRIGLEIAPQVRPHTRIGVELTLSTFTPRSVGQLHLLVPSDVTAQDDLELASTEVLDLEAMRAAIRESEIDMAELVDAVDDVLSRRSTATVGEVLEEHPATQGLASIVGLLVLAHRHGERVEGPSDTVETVRWRLVGRRAGAEREAGVGRAEHNGGNGWRSARISRSRFTRPLGKDSHVGE

SEQ ID NO: 32244 - protein, 247 aa, Brachybacterium muris UCD-AY4
MSESDDHVVLWPGDPGTLPLDVRRALVALLRGPYISFRRDPLVWSALLAHEAVVRRHLGDLLLDLVIDADAEVAFSRNLEPGPDFDQAVPSVLRKAPLSFIDSALLLHLRHLLLQGAAQQERMVVGRDEIEAHMQAYATSSGHDQAQFGKRLTASIKRMREWSILLPTDTDDRWEVSSILALILTPEVIEGIEVEYERLRRGGTGDLPSADGMTEEDAESDDADSDGPDPDEPDTDETGLDETESAT

SEQ ID NO: 32245 - protein, 1117 aa, Brachybacterium muris UCD-AY4
MSQTSLDLDPTAAGVSHPGQMRLARIQLHNWGTFDKRHDLTVPRAGLLLTGESGSGKSSILDAISAVLMKPGETRFNAAAQDGPAGDRDRSPMSYVRGAYRRHTDEATGEVRPGYLRQSTTVSGIALTFEDGLGRAVTAMRVMHVAGRSAAAVDLRSAFVLFDRPTELADVLRLCDTGIDRRRLKQQLSPQAAEDSYTRFGVHLRRLTGIGSEDAQRLLHRTQAAKSLTSLDDLLRGFMLETPSTFALADQAVEQFRALQDAHATVIDAREQIEALIPQREQWQVHRAATAEQEQLSALLAAVGTYRYTRLAELAQSDLSASEIELAAAAHERDRTRRAEDDAREAERRARQALDDRGGAALQVLESRIEQAEDRQERVRNHIDRIAPVLDRLGSPMPGTAEELATAQAQAQREQQRIDHETGGLTRTSGPVHVEHAEATRRRDDLIAEIRSLNARRSNLPASLVEVRDQLAEAAGESPASLPFAGELMNVRDEQWQGAVERLLAGLSTTILVPERLYPAVARAVDARHWNRRVSYERVRETDRHRHDADAVSHRTVLSVLELAPSPFQSWLRGRISSGFPHVLVDDAQQLARHEKALSRAGQVKNRDRHIKDDRHRISDRDHWVIGTDNAALLEVRRQQLEQANAEIAQSQQRLADMERQRRALRDRDLDLAQLLQLNWEDIDAVDVDQRLGTLRQQRQDLLSDADMARLEVLLRTAGEDHAQARDDAEQARNRHHDLSAAVESATADLERARGELADAHLDLVHREQLDRRVRARRRTLAREQLPDVISEVSGQIRDELDQVKDQIRSAESALALARARYLRQWAERSVNLVDDIAATPDFLAQLGRLESDRLPEFEHRFRDLLRTQSQNNIGQLRADIAHAIRDVQQRLGPVDESLRATPFDTERRTWLTLIAHQRLSDEAKAFLGELMEITHGAFHQDDESVTAAEERFARMDHVLRRLGSAESADQSWRKRVLDTRRHVEFEAREIDAEGMVVDVYKGSDGRSGGQRQRLVTFCLAAALRYQLTSSADGFPPYGLVVLDEAFDKTDIHFTRAGLEVFRSFGFQLLLATPLKMLQTIEEYVGGAAVVSNPTGRASRLTAVAFTDMGSGPHAHT

SEQ ID NO: 32246 - protein, 404 aa, Brachybacterium muris UCD-AY4
MRTPEDVRATLRTKWDRNLPAWLAEPSKATVSVPLHPPTAAQALADPPAVSEWVQLWRRAPEPLGLHVQWEERRWAHLGSQRVPVRWGATGADVLTECAGGPTQAEAELLRVRYEAAVSHLAHHEETPHLANHPGVGGEALRHSVAAGMDRSRAQWLRMSPTDADLSIAVAAWLLSHPRSGLRIRQVPFPGMHTKWLRDHRSLVSRLVGAARADGSEDLGLAADPVFHDVLVLDPRLRQGHPGFPRSSRIAVRQLPDLELTPRVVIVCENAETVQVLPDIPEAVAVSGSGYAIPSLLDVPWIRDVPVIYWGDLDADGFRILDRARHHHDDVTSILMDANTLEDHRALAVTTSVRPVVTLSRLTGSEQILHDELATGGTRLEQERIELGYAVTHLEAAVMIDRSC

SEQ ID NO: 32247 - protein, 466 aa, Corynebacterium urealyticum DSM 7111
MLRAHNAPAVLSVLSAVFEGSNRQIAGTDLTLAVESLLIDIREQTNLELPKSAVAYINDWVKLGYLTRRSPQGSREEFYELTTDAHVAIDYVQQLISPQRVVTKSRLGTLFNNLQDLAAETDPDEARAISRLEAQRDQIQSRIDNIRINGVGVISDEEAVERAREILALARDLPTDFSRVREEVENVDHELRESLVEGQLNAGEVLDNVFRGVDLIAESEAGRAFNSFYELFLDPEQSKQLDAVMDAVQSRDFMKQLGPEERIEIAQLVDMLDSSSGQVHTSLTGLSRSLRRFVQSREAESQQALTRAINQAQQQALELAKRGIAPYEKVGYELELTTRQPTSLSSWELHNPKEYRIERSMEVNESGEIDFEQMRQRIRESEIDWQELRVAINDVVGSKGQASIREVLEEHPATQGLASVVGLIKLAHDHGERSDGTEILQWERPSGKRYQARYERFVFRRKVGRI

SEQ ID NO: 32248 - protein, 195 aa, Corynebacterium urealyticum DSM 7111
MENKLYEGDTGTLTGLQRRALAELIRGPYVSSVKSPEVFTAISNSREVLAQQLDNLFLTLILDENAGVAYTKAWEADVPEKRALLRKQSLTFMDTVVILHLRRELVTTSPNERTIVDEGEVFEATLPYQGHAGTDKSTQRKRFTAAWNKLKNYSIIASTPTEGRFEVSPVLRIIFSSEEIAAVTESFRALLEEEE

SEQ ID NO: 32249 - protein, 1116 aa, Corynebacterium urealyticum DSM 7111
MTTTLPGQFRLSQIQVYNWGTFDNLHCVEVPREGFLITGPSGSGKSTLIDAISTILVPPGKIRFNAAADNQAHSGRNLVTYCRGAWRREHSIEADELTQSYLRTGATWTGVALRYSDGAGETVTACRLMFLPANAYSRQEITDLYILLPRDADLTEFEDLAQKNLPVTEAKKTYGDALHVSRNHPKFSLALRRAVGIADAGALDLLNRTQSAKTLGDLNHLMRTFMLPEPETFEIAEQAAENFTDLRTAYESVVKTRKQIEQLVPVRVAAEKRAEVEDSLTRVKEDRDGVETFVDEWRQRFAEQERDQRTSEIKAVSATIEEATGVRDVHRAQADQLRALIHGAQDSALVSAQARRDRLQDRLERVTKEEEAFNSRLKSIGATKPGSAEEFTNLVLQLREERERLSVAYETEDGKLAQAHVRVHELGENKKERIAELEALRKYESAMDNRLLRARALIAERSGVRESDLPFIADLVSMRPGEGHWQGTAERVMGGFARRILVPDEHYDQVSSAIDGTYLGAKVSYTRFTQDLEEQRPSRFVPNSLGLKINVKPGRYHDWIQTQLSKNFDYLCCDSMEEFRAARRAVTAKGQVKHNRNDHIKDDRRRIDDRSNWVLWGNLADKIDALQASVRSTVAKLEDAERQRKTIAAGQEKRRAQIATIERLLETERFQDIDVSSVAQELAEAQRDVDELTDGNAELAQLKAKLKSVEAALDKVEEQVMALRNQLSGFKIRLEQAEETLERVRNRRGGKTVSEDVAARLAERCKAIDRTIRSDNIDALSTQLVRGIEDQLAELNARFTKHGGDLVNAMNLYLVRWPDRAGDLKADMEWEQDFLQELGRLEADDLPRFEQRFRDMLQDETHKHLGRLRRLIRDAAAKTRSSIQMINDSLAEVEFYPGAYLTIEVREAQPAIARDFVELLDSALAGIINDADQEESEQRFHKLQAVIDAVTVSDGTSTRDRQLRLDTRQHVKFLGVEYSEDGARGAVYDSSEGLSGGQAQKLSSFCLAAALRYRLTGMGLPTAQEKKSIVRVGEDIYPRFGTIVLDEAFDRADTEFTRAAMEAFRRFGFHMILATPEKLLQTVQDYIGGVLMVECPDRKRSRTSSLTIEEVQDEDS

SEQ ID NO: 32250 - protein, 371 aa, Corynebacterium urealyticum DSM 7111
MKTPDQVRQRAAVFYSRNHRSWLAGEFKTLTINLDPPTGRAAERDDGAAVRAWVAQWNRSSITAEWEDKKLSYLGTYSLPRRVVLSDADTAARVAGKLDHWQRLQAVLGRFCMEFGESVRPELIRHLSSWEDWGDVTVEQFIAVVRWVHEHEVSDFYIRELPIFGVDSKWFEAHRAVVEAVVGPLNFKSKPQLVEVRSLDPALDISGMRYLACPVAELGETPGERVLIVENHQSFLALPDLPATVAIFGGGLNAARIVQQIPSLGEIDVLYWGDLDSYGFYILEIVRRYVPHARSVLMDLDTVRDHVDLAVEEPQPSRFDPELLSYGERLALDYLRGRSAGGCLRIEQERILFDYAQQQLCHAASPNGAGA

SEQ ID NO: 32251 - protein, 509 aa, Rhodopirellula europaea 6C
MEIERLVAFLDSSPTVRLLRADQAAFVVCFLRHSLKLTGQDSAISLSHDELQHRLTVFQEQLRDDGYEAFSGSADRYLREWSDAGWLRRFLPAESSSPHYQLTRYAEDAIGFLEQSISRESRMVGTESRLRMVIDTLTDLVQGASSDREQRLQTLIEQRDDLNRQIDAIRGGAEIETYHPAQVRERFHTAVDLLKTLQGDFRAVEDRFEEIARDVTRGALDTERGRGDILAGALDAEDLVKQQDEGVSFDAFVAFLFSPQAQAKLRETIAEVTRLEAIADQRGAIEHVRAMVPSLLAEAENVLRQTGRLSQTLRRLLDSQSTSHRKRTAEVLQEVRTLAAKMKQSTMQTGEPVPSEIGLRVDTTLGVSSPLTRPFWTPPQVFDIAVEANEIDWETAKQQARKLSGLKRLQWDRMRELVHRVTDLQTNITLSQLLEHRPPNVGVIELVGWMQIAHEDGHEIDTEGTEQVTVTTEDPLTGESSTVHVRVPLVTFSKTHQTENETVRKGKPR

SEQ ID NO: 32252 - protein, 221 aa, Rhodopirellula europaea 6C
MTESSSETDPTADDTFSDTMPPPVPWAPAAVRLLQGIVYHDDAGDTWERILSGVTPLTDYFARIGLQLIVNEEDGMAYLRQIDPESLPPEYPSIPKLFRSVRLTFEASLLCVLLREELRQFEEEIHRDGRCVVTQAALLEVWQSLVPTETDDVRANRLLGGQLRKLEELKFVRQFEKDPPSWEVRRILKARLPLQELERLRADLEAELKRRDAGMVQGEEN

SEQ ID NO: 32253 - protein, 1140 aa, Rhodopirellula europaea 6C
MLRFSVSRILTPTNMKPSQPLELFADDDEVSERLKPGFRLATFEVFNWGTFDGQVHSISPQGTSCLLVGENGAGKSTLVDAMLTLLVRPGVRNYNVAAGASKKERDERTYIRGAYDRTAGSDEKPRIQYLREGTGFYTALLATFASARSGESFTVCQVMYLTSSGDRKIFYAFDRKPRSIAGDLGDLTSTGDIKNTLIDRGFDVTENFKTYHGWMKRLVKFRSKAMDIFNQTVAVKDVQRLDQFIRDHMLEKKSWNDKVSKLLEHFAQLSEAHRALVQVRQQSELLVPILRTGKRFQETNAKLQSAREELAASGLFFDIQTSELLRPLCQQWKLRMEHLDEQISLLDHSLKSKRGEAASVDHEIRHSGGARLQQLPFLIEKEGQHAASKREKRLLYESKLKQVGIDEPISSPEQLEKVHRQIGDQQQRIAIEKQTATDQLESLNYEIGVLRQELATDESELESLRQRKGNLPDAFIEIRTELCAAFRLSPTDLPFAAELIAVNPDHGRWESSIEQVLHSFARTLLVPDDLYAKVSGYVDSQRLTDSRGRGLRLTYDRVGSRQSAPSQRSTDLSLPEMLLYREDHPLVPYVRGEIVSRFDHLACESIQDFQMAGRRAMTIHRHVKQNLRQHSKDDRGGHGDRKHFVLGWDNRTKREALERSIGEQRAVLDRRVSSAGSLRRSSDQATRRLSLLDELSAVTQFDTIDDHRHDYEASQLRLEKQKLEESSDQVRQLKAKLAALNAEIQGLESERDRFVGERSNLQTEVGRSEGILKQVDAKVEEARSNDRFASAQAFFDGIVHQLGERKLTLENLGMLPRDIADELNVRVSELEERIVPVRDNLTKAMSKLLNRFPVFESELDPTPQALPSFEQLAERINKDDLPRHERRFKQRLKEKVLQEIGLLHGSLEDEREEIRSKIETLNQALRQLDWNPSSYMRLEPSDTSDAEIRDFRRELAGCLEGTLDGTDDANEATFKKIEKLVDRLRDDANLRWREKVIDVRNWFKFAAREYDAASGEPGSYYDGGTGQSGGEKGKLAFLVLVAAIAYQYDLQLDDPNSERFQFVMVDEMFSRSDDTRAKYALDLFERFGLQLAIVAPLDAKARITESYVGTYGHIIKDPDTHRSQLISLTTEQYRAADQEA

SEQ ID NO: 32254 - protein, 385 aa, Rhodopirellula europaea 6C
MITAEQIRVKAKRLFGKAIKAWLNHELDAFFPHRIPANLTPSKDLSKAIAEVESLREHSKQAIGSGYRIEWRSRRSRTHGRNDFPDAIFVDTMDDLVEMSHRVSDWKSLQMAVATLRDRQPRLDEWLRTGTNWKLILELSDVLPDLLSILDHMLLHPRPDCFARELPVPVSTKLIEQHRRRLAIWLDTLLPPDAIDFRFGHDQFEPRYGLRYARPHYLLRVLDEELQRDLGLPFDELSLPAESIDKLPASDQRVIIVENKVSLLSLPSMHRTLALGGLGNGVTQLSDISWLSECKVIYWGDLDADGFRILDRLRAVLPNVESRLMDRSIVDQFANLATKGNGDEAQAVEHLCEGELQCYHHLCANNLRIEQEHLPSEWILKALSI

SEQ ID NO: 32255 - protein, 480 aa, Mycobacterium haemophilum DSM 44634
MDDNAGLSAVELLELNRDLQNSRAIRLLATTNLGLYATLMERHLAEGAIAETELVVRLEYDLDDLDDPQSGLALIKSWASQGWLHRIVDERHDQNVCYLTQDARRALDFLRGMRRHDTIATGGSITGIASRLKQVAVKVDRDPARIRKHIEAEIAALHEELDQLDAGQRPQPDVTDCYDEARAIALQMERLITDIGQYGTMIEQATAALDEPIDSNTEYRDRQRQMYTDYQAAWDSQGRDSHRAFLRMINDPDQRAEFEADVAAVAEALPALDPALRKVMAGFFELVGHQIDEVERIQQRCAQRVKRFTAFGTMEQSRGVARQLNNAIGAARALLKSSFTDSRLDIDVPLARHAISSIGALSFKIGDLSNPKPAKPGNSEVDLTSFAALGTQVDAPAMSDMLNHAITNGPVSLPDAVAMLDTAYLGHVVVLWSWALQQPNPESSESTPVRFRSLDGRDREIAVPRLTFIEPITTLAGATA

SEQ ID NO: 32256 - protein, 238 aa, Mycobacterium haemophilum DSM 44634
MKTDQPTPDPDIDFSSLPQVDQNARPPVARRPRFDGDVSELPDRACWALQHLLARRFITAEADADVYSWVLEYRKELSVRLSELDLLLRIAEVGYETNGVAFVEQARYESARNIKLLRREPLGTYDSILALHLAQMMRAAGGQTVLISREEMHGLFAGVLNDTDRDAVTFAARIDGAIARLAGLEILRKSRDDEDSYTISPVITAIMTASVITKLQQQFEQLLTGGTPQDTEEIALDD

SEQ ID NO: 32257 - protein, 1120 aa, Mycobacterium haemophilum DSM 44634
MTEQFHLSRLQVINWGVFDGYHCIPFSAGGALIAGASGSGKSSLLDAISLGFLPFNRRNFNASGDNTAAGSSAGRRTVDKYVRGAWGQRSDGGSSRVMYLRGDGTAWSAVAVTYASDSGRTVTGLVLKWLTGESRNDSSSRFVLGDGDLDIEDVCNRWAAGRFDAAVFKEDWRFSTKVESQYLAQLYATIGIRASDAAQQLLGKAKSLKSVGGLEQFVREFMLDEPDSLSRLPEALKQIDPLVEARELLAVAQKKRKILGDIETIQQRYASESSDLGIIDLVDAPMVRAFTDHVRLAQSPTQIATLDGTIDQLENEYEDVTRCLNLAKAEADSLNAQISGCSANIAPLQSQVTAAETEAEQVTRRRTGYEGLLTAHDIEIPDTAEEFWNLREELLAQATELLAKVERNREASTDAEYAQKSARIARDDTAKELKRVEHVGSALPEFALAMREHICAAVGADAAELPYIAELLDLKPDQTRWRLAVEKVLRGAGLRLLVPDQHWAAVLRFVNETDMRGRLQLHHVRAKFLGAEPVETNPNTLAGKLFAVDPQHPCAAEAVDIITAAGDHVCVDTPDVFDRFRRAVTDAGLYKDSDRLAIKDDRRPVKQSEYLYQGDVSAKINALTLELAGAEEAYQKARRTADDIAAQRQQWRDRAAACKAICEQYPQWSQIDTETADGHADRLREQYELLLADNPDIEALNARANECWSQIQKLMTRRGAIQTRRDGLDERRTRLLELQDRLSPTFVSEPLTDLLRRYAATIPVSLELLDPEPHRDALFAAIKKEREQLRESRRRSYDELARILNTFDTSFPDAIPNDSDDFDERVHDYVALCRHIDERELPEAYERMMRLVTEQAPDAILTLHRVAEQEARRISEQIDRVNTGLGAVEFNRGTRLTLRATPRHLLAVNELTEIVRSISRRIAEVGLGDKQAILDQYADILRLRNRLASTAPEDRAWTRDALDVRNRFTFDCAEWDISNEELIRTHSNAGDNSGGEQEKLMAFCLAGALSFNLASPESTDNRPVFAQLMLDEAFSKSDPQFAQQALQAFRKFGFQLVIVATVQNATTIQPYIDSVVMVSKTEATGRNARPVASVATRTISEFTSLRHEMRAAVPRVPARA

SEQ ID NO: 32258 - protein, 487 aa, Microbacterium sp. UCD-TDU
MTGTRAEAAFSRAVTAFSTPTLDLLHGRFAPFVVASLSLLFTADRASIPIADAQAELSEILDELRGAGDEEDDRRVPAGTGRDVARNWVRLGWLVQQIDEDIEVYRLSAHAVEALEIAGRTGGGRTRVSNSRVRTLLEAVEHLADSAEADPLRRLARLREERAALDAEIDRIEEAGRADPLDDEELYEEAENVLHLARELPADFTRVAESLKLMQRDVVAHLRRDERPTGEVLREYLQRAQDVMNSTPEGRAFAGALRLIGDPDRIDALTEQLHGLLRQPFARMLDATQRAELDAIGRRVELGVEEVLAAQRRASHVITGQVKTHDPLRDRQIDDLLRDVIAALHVWDGTGASAAPVRSLPLIDLGHLRQTVSSIRPPAVPAPLADADDVEFPDVDTRAWGGPRYAELEEYVAGLGPEFDLAAAFEDAADDTRRPVDLVGLLEIAHRNGMTESDAVSVVEALRPDGSTRRFAFGAVTARNPKEEAHA

SEQ ID NO: 32259 - protein, 220 aa, Microbacterium sp. UCD-TDU
MPEESLVTQAPVDDAFIAPVPMEDDIEEHFAGDRGTLDPEIRRLLAHILQRRFIAAERNRREWTLLLDHQQVIESRLNDLYLRLVVDHGRGFAYKQQLRSDEIDMPVLLKDAPYTRAETLVLVHLRTVYQRESAAGEASVRIDIEDLEQTVLSYFTDVDGGTARQQKAIRNAMDRLDREGIVQEETSGRYRISALVEVVLSAETLKELRDWLRSQEEVER

SEQ ID NO: 32260 - protein, 1119 aa, Microbacterium sp. UCD-TDU
MTMVDTLFGLIPAGSRGQQWVAEELQLINWGGYDAGPHRVRFSPDATLLCGGSGSGKSTLMDAYIALMMPHTTPFNGASNGGVTGRPRGDEQRNILSYGRGKIDESRTEDGTKLRVLRGDGEDTWSAIATTWLDHDGSRFTAVRAWYIPADARTLEDTTRVRATVNGSFDLGLLERAATQRLSDASVRATGLETLATDREFSARLQAVLGIGAAGSGAKAISLLARIQAGQQITTVDDLYKKLVLEEPETMATADAVVAHFDELESTRTRMLTAKQQVSALEPIRGIKDRIAAAAERVRVIDEVGVFTDPSSLAALWNAQRRLDLLREVEVELGDRTRALSLAVREKRALVDAADLEREGLLDVLRQSGGDRLETAQRELRVAERRLEDVRRERAKFDAIAEELGVEVETAAQFDAFVAGARGSSPKSDIRDARAAFADAETARRSAESEMRRLRDERERTVRVRGSIPAHLDESRALLAQAVGLSPSDLPFVGELIEVRTEFEPWREAFNLALGGFARTLLIDAEHLAEFRSAINAVRTPERLNYEGVQTGLPEMRGADPKTLPGRLDHLPTPFTGWLQQRLQDRFGYVCVDSSSQLSAHQRALTISGQISQGSRGAHGGQGRANMLGFTNDRRLREIDEQLRQLSARHDECAASAADAEAALDRIEARSTAFARIDDLTWEQIDVAAVEAERERWVAVEAEVTTASPEIGQLRRQADELRTRAARLRDDEARLSNELAQTQDHWGQVTDDVDACQSVIDAAAASGLEMGERHASFLDGRFLHSETGDTPSAAERLAHLDTALRTAAQRLHEDRREAAEAHEQQRESMRRLMTGFLERWDNLTLLPDPDASVGEFESILEALQTNGLHELETEWRDSLLKLSGNDLTSLDSTLSRSLREIKDRIDPINRIMEELPFYDDDHRLQITPRENQTEARKRFRRELREVRGLIDAASTDAEREAVYRKMSRLIARMRRTAPDFAELIDVRNHVRVSAERVTAATREHVALYDHIGEKSGGESQELVAFIVGAALRYQLGDAGAARPRYAPVFMDEALIKADAHFTKRAIGAWRGLGFQLVIGAPNDKYSAIEPHVDVEYNILKDTRGRSWAKAKVGLPQAAV

SEQ ID NO: 32261 - protein, 479 aa, Desulfocapsa sulfexigens DSM 10523
MNLDYETLSSLKKVHPAWRLLDAALAPLIVSFLYRVYISENVRNISQIELISKLEDELFFLREVEGEEKYPRSAADYLEEWAQNDKGWLRKFYPAGSDEPSFDITSATEKVIGWLESLTSRKFVGTESRLMMVFELLRQMIEGTEVDPEKRIVELQKKKREIDAEIDNIRNGDVSRMSNTALRDRIQQVESTARDLLRDFREVENNFRQLDKEVRERIALWDGRKGELLEEILSERDAISSSDQGRSFQAFWNFLMSLSRQAELTEMLTKVLGFEAVKELKIDPRLKRIHYDWLEASNHTQRTVAKLSHQLRRYLDDKAYLENKRIIDILQKIQATAIEVRDNMPAGFFMEVDEAAATIALPFERPLFSPPVKPVIAADVVDADISDMNADVLFEQFVVDRLKLESQVNQLLQQNEQVSLHEVTKVYPVEKGLAELVTYFAIAADRGAVFDEERQEEISWLEQDSSRKCVHIPRIIFSR

SEQ ID NO: 32262 - protein, 217 aa, Desulfocapsa sulfexigens DSM 10523
MRTHTQNNFQQMSMTNMSNPEPGISKIVINLLKGVVYQEADPALWQHLLTVQTAVSEYVSVLGLFLLLDESEGYAFLKYKEPEGEEEPLPRLVGRRQLSYPVSLLLALFRYRLAEFDASGDDTRLIMSRDDVVDMVSTFLPSGVNEAKFVDKIDAHINKVVELGFIRRLPGKENMIEVKRILKAYINAHWLNEMDQRLKEYKTHLQGENSCDEEEVE

SEQ ID NO: 32263 - protein, 1125 aa, Desulfocapsa sulfexigens DSM 10523
MQAPLFDFAGSDTYAGFRLERLEVYNWGTFDKKVWALQPNGDTCLLTGDIGSGKSTLVDAVTTLFMPAHRIAFNKAAGAEKKERSLRSYVLGFYKTERSDFGGSATPVALRDHNSYSVILGVFFNKGYNQKITLAQVFWCKDKQGQPERYYVVSKQPLTISHNFSGFGSDLGNLRKRLREESGVEIFDSFTLYSAEFRRQFGIKNEQALDLFHQTVSMKSVGNLTEFVRQHMLESFDVESDITALIGHYDDLNRAHDAVIKAKEQIRQLSPLVENYTEYQQVVKKNEHLRSCREALHGYFASLKTELLKTRLQKHSEEKKWLENRIGEAEKTKIEQANNRDALTKAIAENGGDRLAQLAREIDAVLERKRSRKEKSDRYKSLVIDVGLSQAESLEAFLENNSHLPDILKDKDTESKDLQDAITKDAVRLDRKREEHRELSRELDSLRQRQSNISANLISIRKDLCGALQLDEENIPFIGELLQIKEEEKQWEGAAERVLHNFGLSLLVPEIHYARVAEYVDSTHLKGRLVYYRVRPEQIPGTVDCGQQSLVNKIAIKPQSEFYSWLEHEIVHRFNYICCEDVSQFRREKQAVTQAGQIKSGGRRHEKDDRHLLSDRSRYILGWDNRQKIKAITVDVEKCEKVIQNIGGDIAQTEKLKRKVDTVLEKLHRLEEFPNFSELDWQSDARKAENLKQEKIALESTSDKLALLTDQLKKLEIELRSTERDHQELIRKEATLAEKQTQAENELKQCLQDIERVDESVRSELFSYLESVREEALGPHKLTVESCQNHEQEMRFWFKRHIDDNAERFKRLEVKITSAMHTYCNDFPAETQEVDKTIEAAFEYEKMLEALRADNLPKYEQKFKELLNQNTIREVVQFQAQLEKQNRTIKERIEQINQSLATIEYNPGRYIELENAKTVDQEIREFQQQLRICIEGTVTGSEDEQYAEKKFVEVSKLIDRFKGRADSIDLDRKWMKKVTDVRNWFTFAASERYQEDGSEYEHYTDTGGKSGGQKEKLAYTVLAASLAYQFGLERGEIKSRSFRFVVIDEAFGRGSDESTRYALKLFKELNLQLLIVTPLQKIHIIEPYVSSVGFVHNKGGQESQLRSLTIEEYRQERAAREARTA

SEQ ID NO: 32264 - protein, 392 aa, Desulfocapsa sulfexigens DSM 10523
MSNWSSIKDLRKKLEREWEQGKLLSARLRGEDLCPRRITLKRPLGNEWAEKWDTAKAWVDELIEAETHGAFTIESQEVNHRQLGRNSFPQAVLFKTDESILSFIGKLSAARIFDELCCQILADFPELRSWLEKRPLVALQYQKQWPRLLAVLKYLKSNPRPGIYVRQLEIPEVDTKFIEKHKKPLSELLDLILSKEMIESSATGAKRFEERYGFLSKPVQVRFRILDPDLYLHGLSDLHVPVSEFCALNLEVDHVFITENEINGLAFPNVKNAIIIFGLGFGLDRLANIQWLLGKKIHYWGDIDTHGYVMLDQLRSYFPQASSFLMDRETLMAHESLWGQESKPTRRSLTRLDEKELGIYEFLVKNLLRDALRLEQERISYSFVLKILKKLV

SEQ ID NO: 32265 - protein, 493 aa, Rhodococcus ruber BKS 20-38
MSTADLHRLTRLRQEHPAWALLRSDNAAAVLALLGRHFDRGTRRLPAPELFARLDADLQELRDEGFELPRTGQAYCADWVRAGYLLRRASADAREETLEPTEATFAALTFVEGLTTATSSVTESRLTTLSSQLQALARDSDPRSESRLAALRAERDELDRQIAAVESGDFPVLDGNRAVERSAEILALAGEIPGDFARVRAELEALNRELRARILDDEGDRGDTLGEVFRGVDLIGSSDAGRSFAGFYDMIIDPERSSQLDDWIEAVLQRPFAQQLTTEQRRRFRTLLTEMEDAGGEVHATMTSLSRSLRHFVQSRHYEEHRRLQRLLRSAQQQALQVAQRRKPYDLLDLELVRVGMSIDSVAALRLHNPADDLVAEPVVTQPVGEVDLAELRRIVRESEIDMDELAGNVAATLRSRGSATIGDVLRDHPATQGLASAVGLLVLAAEHGHRVDGTEEIAWTSPSGATRVATVRRHLFDPTDPEFTARVTEDAS

SEQ ID NO: 32266 - protein, 197 aa, Rhodococcus ruber BKS 20-38
MTESTTRTGDTGELDLDTRRALVQLLKGPLVTADKHPEVWRTVIRDERVLRSRLADVFLDLVVDEDDQLAFTRPADTGDHKAPTVLRTERLTFMDTVMLLALRHRLLRAQPGERVIVDFDEVAGQLEMYRAATSTDPAGFRKRVNASWEKLKKYTLLASTSTEGRMEVSPVLRQLFDADQVAAVEAEFRRIVEEDAP

SEQ ID NO: 32267 - protein, 1099 aa, Rhodococcus ruber BKS 20-38
MSAAPIHPGQFRLARVQVVNWGTLHGHHDIPVARKGFLITGASGSGKSTLIDAISTVLMPGGSVRFNAAAQESAAGSGRNFVSYIRGAWRREADADTDALTASYLRTGATWSAVALTYSAADGTAPVTLVKLMHLRRGANANNEISHLHLILDTDVELTDLEPFVARGIDTRGIRKRWSDAVVNPSYAPFARAFRSKLGISSEAAQRLLHRTLSAKSLNSLDQLLRDYMLDEPPTFAMAERATTQFRELREAHRVVVDARRQVETLEPLVALADARRTGLQAQRELQDETDHLDAVHARMTVDLLSDRLDETRAQTGLLQAAADKTGDEADHAGERTLDLRVRAESAGDGRLATLRVHKETAETALERIIQQRRRFDVALAHWEAEAPATADDFAHLQAQLERELRELDATADTRRAELYEVAGALAESRKTIRALIADREVLARRRSNLDPDLLRARELVCSAAGLEEDALHFAGELIAVRAEHAEWTGPIERVLGGFGRTLLVPDELYPRVAAAVDTHHLGARLVYRRVRTGVGAPDAPTTADGSLVRKLEVRPGPLAAWLHHHLADRFDYACVDTADDLRRVPRGVTRAGQVKHGGDRHEKDDRRRIDDRSRWVLGFDNEAKLADLRRRIGDAETDVDALQRRQEALERAESAIQQRRQAAAVIRESAWADVDVAAAGNAVDAIEERLREWMQGNTEYATLTADLARAESEERAARQAHTAALAKLEQHRDELTRVQARLDEAQAHAGAAVTEPIAARIRARFAAAVRRVTVDNIDRALSTVGRAINEETRAAQRDTADAERRITAILTGYLAEWEARRAEMRSEAEYVDDALAVLARLRSDGLPAYEDEFFRLLREQSHRNIGELARAIRKAPGEIRSRIEPVNESLRRSPFDTDRILRIDVKDRRSPAASEFLAELLQITSGAWKEEDRAAAERRFDQMAAVLERLDSGEPADLRWKRLVLDTRLHVGFIGVEVDPEGRDANYHDSSSGLSGGQAQKLVFFCLAAALRYQLAAAGEELPRYGTVILDEAFDRADPAYTRRALDVFTQFGFHMVLATPLKLLQTLDDYIDGVAAVSIRDKRYSQIALLPIREDGT

SEQ ID NO: 32268 - protein, 382 aa, Rhodococcus ruber BKS 20-38
MSALCVPPSAVAAKAQAAYRSRRARWITDPTAAESDSLTIALHPPSERRVAQDPDAVVAWVRAWHGYRGGGRVEWETRRWPSFGTQEVPVRLVLSGATEIAAAAGRAAEWRTLTARQACLLDGLGPGTATLASAIAATHTRWLELDEPDFGRLVAAVRWLAEHPSSGLFIRQLPVPGVDTKWVSRHRGLVETLLEGVRGDRDLGVRSLPRMCEVAVCDRTLLAAPRIFATSLDELAALPVTPARTLILENKEGLHALPQLPATVAVHGGGYAVHELADVPWLATSDVVYWGDLDTHGFAILDRLRGHLPHVRSLLMDRGTVERWRELAVPEAAPAPHVPAHLTGPERDAFDAVRTDGLRLEQERIPWPYVVEQLARMSEAQP

SEQ ID NO: 32269 - protein, 507 aa, Gordonia malaquae NBRC 108250
MQFDEIVAVRRTSAAWRLLRADNAPLVLSFLGRVFVDDNVREISESGLISLLDDELYSLNKRLGDGTYPRTPKGYLDEWSAPDTGWLRKYYVVESDEPHYDATPAVERAVAWVRSLADREFIGTESRLNTVFDLLRQIVYGANADPDVRLAELRRRRAEIDAEIEAVERGEVSVLDASRRRDRYQQFGEVSRALLSDFREVEANFRTLDRQMRERIATWRGTKGELLDEIVGSRTTITDSDQGRSFQAFYDLLLSADRLDELDQLVREAQSIDTVTDARLTNIHHDWLDAGTRAQTTVRRLSEQLRRFLDDQAWLENRRVMDLLRSIEATAYTVRDQRIDDFTHEIDSPSPGVHLPMERPLFRPTASLEVDSDGIEDGESDGDADALFEQIHIDPAPLIDGVRRALRRTTQVTLADVLAVTPLTQGLAELITYLSLTDDSFTKIFDDTSTESVTWTDDDGDARTARVPRVIYTHNRSSNDSPSSSSTSPRSSSTYPRSSSAVEMETP

SEQ ID NO: 32270 - protein, 199 aa, Gordonia malaquae NBRC 108250
MSRTVRRDELNLSLAVTSLMKGVVYRDSGQTTWQHVVGLAAQVSDYVATLGLSVVIDEAEGYAFLRSRSDDELADLGIPRLVARHQLPLHTSLLLALLRKRLAEYDTTDAGSRLVLTGDQLRELLAPFFPATTNEARTTDQTDTAIRRVAELGFLRRMPGQDGEYEVRRVIKAYVDAQWLADFDTHLAEYAAIAGEETR

SEQ ID NO: 32271 - protein, 1131 aa, Gordonia malaquae NBRC 108250
MTGLFSATELQSTESARSGFRLQRFQVLNWGTFDQRVWTLELDGENGLLTGDIGSGKSTLVDALTTLLMPAHRVAYNKAAGAESRERDLRSYVLGYYRSERNEGSGASRPVALRGMSNYSVILGVFANEGYDETVTLAQVFSMRHDSGQPERFFTVTDRALDISADFADFGTDLRALRKRLTAGGTRIHEHFPEYGRDYRRSLAVRSEQAMELFHQTVSMKAVGNLNDFVRDHMLEPFDSSGWVDTMVAHFEDLTAAHDAVVLARRQLDELTPMLADHDRYTSHVAMSEELKERRSALRYYFAQRRVDLLGDGLDTYNRDLAATRSALDATERDLADLRISVRELEFQQAGLGGNDIATLEAQIADAQRQREERAAAFERYSALLDDSGLGPVEDRGQFDHRRSEASAAIDELDAEVADVANAITELVVDRRQLDGEGRRVAGEIASLRGRTSNIPERNLRMRDMICAGVGVGHDDLPFVGELIGVRADESRWEGAAERVLRGFGLSLLVSTELYDAVSSWIDANHLGGRLVYFKVPERMQAKGAATPPPNALVHKLDIKEGPFYAWLERRLFERARHVCADSLDEFRSAEYAVTASGQVRSGGGRHEKDDSRRVDDHRDYVLGWSNEQKVNALFTAGQRVQEELNRIDAEITELEDSRRRSMDRRNALTGLDAYPTFDAVDWMSVASRIADLTRRKSDLEHSSDELVEITETIASTREQLSAVDATRDGLRDKVSRLEMARTQAEQSRDTARITVEEPGFGDASTHFDAISAAVDDYRAKVDGGTDTELTVDECGELETALGESLTDASEQHTSRAGTYQTRVVNRMSEFNRSHPVLTTEFDADIKSADEYRELHRRLSEDDLPRFEDEFKNYLNTNAIRDIAIFAAKLNKEVHLIHSKIDTINESLSGIEYNPGRYIRLEANPTTSQEIRDFRADLRRCSDGEMEIGTEEEQYSEEKFLLVKAIVERFRGREGFADIDRRWTELVTDVRNWVSFAASERYVDDDAEYENYTDSDGKSGGQKEKLAYTILAASLAYQFDLKWGATCSRDFRFVVIDEAFGRGSDDSARYALTLFAKLGLQLLIVTPLTKIYTIEPFVSAVGYVENRGGNYSQLQCLTIEQYRESRRSRES

SEQ ID NO: 32272 - protein, 506 aa, Gordonia paraffinivorans NBRC 108238
MESSAFPAQHEVGRAAAPSESAQVTLHDALEANRSLQKSAAVRLFAASNSALYVTLMERHLDYGAKMSEPELTMRLDRDLTQLELSDDQPTGLELVKLWARQGWLHRVTDTSDPNAPNICHLTSEARSVLDFMRRQRREDSVATGGSITGIASELRRVAGQVTNDPEQIRSEIEAQMEELDAELADLEAGRRPPPDLRVAEDSARAIAYQMEQIISDIGQYGAMLDRITTALLDDPGDSDLAYRDRQRQLFDDYEALLQSSQSASYQAFVQMIQDPERRVRLQADIDTIIENFPGMDAGLRSVMDNFFSIVSEQMAEVGRTRQRCARRIRRFVASGTLEQSRGLARQLNDALATANELLKSSLADRRLGYELPLAAPTVNSIGRLTFEIREHVPPAPALPAAHDAADLSAFASLTGQVDTVELTETVNSAVADGPVPLTEVIEGLDEPYLAHVIVLWSWAQKQAKPGEKIPMTTVRFRSLVGEDHVIDVPDLTFIEPIPTAEVDAE

SEQ ID NO: 32273 - protein, 288 aa, Gordonia paraffinivorans NBRC 108238
MTTTDETVNEGPETAEADTPETEARETDALSSEYAGFDDLPTVAATAAQSHATSAPRFDGDVSELPDRACWALQNLLTRRYISGDRQPQLWSWVAEYQDALRVRLSELDLRLRIVDELQVAFVEQAGYESRWGRRILKRETIHTYDAILALHLAKYIRAARDEPVLITREEIHELFAGVTNTIDRDLALFDKRIERAIDKMEELEFLRKQRDDADTYVISPVISAVMTASVITDLQQQFEQFIGSGEEGEEPPEGAADPGELDTDDARDHDGRDFDDADAYGDEGDDW

SEQ ID NO: 32274 - protein, 1114 aa, Gordonia paraffinivorans NBRC 108238
MSGQVDQYHLSRLQLINWGVFDGYHSIPFSANGSLITGSSGSGKSSLLDAISLAFLPDHRRNFNASSDATAAGSSSGKRTVGKYVRGAWGEKRDGAGAHREIMYLRGTGPAWAAIAVTYTSTSGTSITGLVLKWLAAGKMTDAHSAYFIYDGDADIVDVCNEWAASNHNSAKFRERGWKGGPGEGKYLSTLYSLIGIRASEAAQQLLGKAKSLKSVGGLAQFVREFMLDAPTSIVGISDALEQIDPLVEARELLDIARRKRTILGNIEEIHERYAGESATFSVLDTIDSATVRAYVNNLRIRNAEPEIADLDDQIARLDGDLAALTTQHDQLRQDHSLLLARIATSTGDLAPLREQLGGAQKLSTEVTARRNAYEDKISALGFSPPTNAEGFWSLREELLEEATKLDNQLEAGRAHYAEALAREVAARTRRDTAQEELSRVEQAGSALPRTEHEMRRMIAHALQIDESELKYVAELVELDPDEERWRLAVEKVLRNAGLRLLVPDKHFRAALRFVNSHDMRGRIQLHQAETRPMPDVEPGTLASKLRPVDPKHPCAAEAMTILARLGNHMCVDSPNEFGQHAKAVTDQGLRKDSAKLAVKDDRQQLRRSQYIFVGDVESKISALRDELAYEERAFEDAREDCAELDRERSAKEKRRDAYRRVCEQFTQWNEIDVDSVDDRVDQLTDQYDLLMEENPDVEALQRKAEDLWEQVRHAISQAALVRDKIAKHDERRTQLLDLLDRLKPEAISAQAEKTLDGFVEDLSATLDVLHPEPYRQEIMKACARERDRMRSDARRSRDELARILDTYDKEFPDAIPNDSDDFDERIHDYVAVCRRIDERELPAAYERMRRLITEQAPGAILGLHMAADAEERRIVEQIERVNTGLGAVAFNRGTRLRLVPGRKKLAAVEELTEKARQISNRATAVSFGDEQAILEQYSDILLLRERLAGNTPEDRQWTRDALDVRNRFDFYCEELDAESGEIIRTYSNAGDNSGGEQEKLMAFCLAGALSFNLASPNGKDNRPIFAQLMLDEAFSKSDPQFAQQALSAFRKFGFQLIIVATVQNTSTIQPYVDNVVMVSKTEAGADSRPTASAVSTTIKAFSELRRSGSQLSV

SEQ ID NO: 32275 - protein, 489 aa, Stenotrophomonas maltophilia EPM1; identical to SEQ ID NO: 30775

SEQ ID NO: 32276 - protein, 233 aa, Stenotrophomonas maltophilia EPM1
MSWHEDPIDAAQADVAEDAYEAEPVAAVAQPRRGNDVYYLGDTGRLPLDARRALCQLLIGPSIDQLRHAKLWPALIRSESAIRSSLADLFLELVLDRDSGVAFTRQADTEDVDAPVLLRTSPLTFIDSVLLLYLRQQLAEADARGNRAVVADAEMAEALAIYEKNLSTDRAGFNRRVASAVQKMKDNHILTRLSGQEDRHEVSPALKLLFSAEDVSQLSAVYRQLRETPAAEA

SEQ ID NO: 32277 - protein, 1126 aa, Stenotrophomonas maltophilia EPM1
MAISKHTPALFNEGLPDPRLQQFRMRRLQVHNWGTFNGLTEVPIAERGFLFVGRSGSGKSTLLDAMSALLTPPAIVDFNAAAREAERSGRDRNLVSYVRGAWADQQDSGTGEIATQYLRKGATWTALVLEYRAGDGRVVSLVRLLWISGNGTSAGDVRKHYMIAERPFDIAKDLGGFDLDLRKLKQKLSDLHHFDTFSGYAERFRDLLGIDNEMALRLLHKTQSAKNLGDLNVFLRDFMLDTPKTFDAAERLVSDFAELDGAHQAVVTARRQVETLLPARAYYNDLKEMHRRRGDDEALKLGVDSFRESRRQALIEARLREMDVRDRGLLGEEAQRRAALDNHTERLAELELQRRQQGGERIEELEREQGRAEAERDRRQAKREQASLAAQQLGAELPDDAHGFAELVERAQNELQDRQRASSALDDAISDRLGGKRDDERRFGEVRAELEAMQRTPSNIPAPMQKLRARLAEETGIAEAALPFVGELIQVRSEEQGWQGAIERVLGGFALSLLVDDKHYNDVAEWVNRTHLGMRFTYYRVRRNDDAFAREPSAKSLLHKLELREHVFESWLRRELGKRFDYECVDAKQLRNVDRGITREGQVKHPGDRFEKDDRSAVGDRRRWILGFNNHDKVGAFEREAQELAKRIASCETDIARLRGQRDRDNERRLACHELVSISWNEIDIAAPQQRLSDIEATLRDLREGNADLAKLAKQIDAVRADIEQARRTYEDVRVERGQLVKERDRLDRARQQSRALVLPSLAQEQEAGLAERLQEQGPLSLETLEAHMRQVSNALNEQLSSSQQDLNRIENQLIGCFRRFIQQWPEESGDFTVSVASAEDFLARLERLERDGLPQHEERFFDLLQNQSKNNLLALQRHSAEARKSIGQRLDEVNASLEQVPFNRGTLLTIELSDRRLPEVGEFHLQLREVLSQQQTEQRELAESQFTVLRQLVNRLGSQEGEDKRWRELVLDVRMHVEFIGVELDAETRQQVEIYRSGAGKSGGQRQKLATTCLAAALRYQLGGADSQLPSYAAVVLDEAFDKADNEFTALAMNIFDNFGFQMVVATPLKSVMTLEPFIGGACFVEISGRHDSGVLLIEYDEEGKRLKLPERSRQQANEPEEAEA

SEQ ID NO: 32278 - protein, 494 aa, Rhodopirellula sp. SWK7
MDEQAQRLIQLRRHHPAWMLLASTNGPLMAASMKSLIDAHPAGIELESAVEHLALAMADYANDTQFDIGEDHALSARRELRSWIRRGLIVERGGELLATDALQKVCDFVDSLSDETMTSTASRLATVQRAIEELQSKLSSSQSGRERILRERIENLQEQLAEVRSGRFEVLRGKPAEEGIREVYQLAISLRADFRRVEDSYREADRTLRQRVLSEQQNRGQVVDELLDGHDALVATPEGQVFESFHEQLVKSAELARMKERLRAILDNENTNRSLTRRQRADLRKLVSRLVAESERVIQARASSERDVRGFLKSGLADEQIRVGAILQDIFRAALDVDWKSQAIRRTPGPLPPIGVAIPGLPVIERLLVKQIHGDSGDDLDLTVSEGDPAAMDDEFWQAFHSLDRAKLFEETLDRLQKAGKPLTIRELSDALPPTHDLETLSYWLALAREASVSVDETTESIELFNDGIATRFHVPLVEIDAHATEQLDPGRLE

SEQ ID NO: 32279 - protein, 241 aa, Rhodopirellula sp. SWK7
MSNIFDSMVPDPDSQRTESDLVTQADNPDHDADHRVTFGTPSDIKQVIGELLKSGVIDESAKTDLFRRCVTHQTIIDEKLEPLDLSVRLDEHRGVAFVVVADSGKDAVESQDADEWSHPLVRRQRLTLEQSLLIAILRQAFVMHEQEMGVGQTMVKVAVDELLPQFMTYLGDSGSDQKNESRLLNQLDHLKGYGVVSAVDKNQEVTIRPLIAHLANPQSLKALLEVLIAQADAVGGEESSQ

SEQ ID NO: 32280 - protein, 1109 aa, Rhodopirellula sp. SWK7
MPTQKPTQQETLFANEPEPAQDDTTYRLTQLEVFNWGPFSGLHRADFDIGGTAVIGPTGSGKTTLIDALMTLLVAQPRYNLASTGGVESDRSLVSYVRGVLGGDGSGGNEDVSRPGKTMTGICACYQSQHETDEPQTLRLGGLLWTDGPSDSTSDLKRRWMFSLAGDQTLEGWLQVLHEEGARGISKLGRETPQLRVFDSKKPYLAHLRKFFDVSENAFTLLNRAAGLKQLNSIDEIFRDLVLDDAAAFDRALEVAGEFDNLADIHAELETAKKQHQSLLPIRHEHDELKKLNQKTTALQTLKRILPTYFAIRCELAWAAELQRINTERDAANTRLYARQNDLAIQQTKTDTLKESYLKLGGNVIGELEKTIEVLRRVVVERTRHADDYRRLMRSFDLSEDLTADSLQKNQMILKERRKEVQTAREAQEERTLSVLASQQIQNKEVAELSESLRKVKERPASNIPPRFGDFRSELAIQLNLPDEDLPFLAELVEVKANESAWRGAIERALGSERLRVLVPEKHLNEALRFVNSRNNRLHVRLQRARTDEPSPNFFDDGYARRLNFKSHPLIETAKWLIGGRDLHCVSSPERLRNIEHGLTVEGMMSGRAGRFDKQDRRRIDEDWMTGFDNQAQLKMLVEQLTTLQANIQQFESEAKRERSKLNEIDGRLTIIDQLLLLEFTTIDSPNATAELESSESRLQRLLDPDSDASRAKAEYEIQRKELDTIAGEVSSMQSQIAVLARDADESDKQRERAKSRVGSGLSPEETALADRKLSIDSAASAADLSDIERHYFKLVDDKLHKSHDKVQDQQQRLIRLMAAAKQVDTGALVESGTEISDIPDYLDRLRVLSEEALPEKQKRFREYLNQSSDQGVTQMLAGIEEEVDAIQQRITELNHTLAEVDFRSHRYLQLLPQKIKHERLRALETAMRKVRSSALKDDEGISHYKSLRELVEILRSAADNRRQLGSKALLDPRYRLAFFVVEVDRKTGDRSQPRTGSQSGSGGEKELMASHILTASLSYALCPAEASRPLYGTVVLDEAFSKSSPSAANRIIDALRIFHLHPIFVTPNKEIGLLKKHTRRVICVQRQGTSSTLASISWEVLEGLATKS

SEQ ID NO: 32281 - protein, 383 aa, Rhodopirellula sp. SWK7
MKSPEDLRGLLRRQWENADHRERRLLGDSDAWPISLSIGVPSASELTSKLDAVKKHVEAWRNVKVGEVAWEPKQYRASDDAVDVPVRWLIKKPSHWLAACGDSAMKNEFETLAELISNSDPLFHSAFIRRRSLWQSKPVHEIVLAATVAMQLNPGAAAGKPLRLLSLEGVDTKFFERNESLVRTLLDIRFDGEVSCIGLETFLDAFNEKDHWLLVLDLDGGLLPFRSQRVSVKELGRCRLPGQNLVVIENECCSHLLPAVPDTLAVLGAGFDLAWLANPLLPEKQIAYWGDVDTWGLSFLSRARGLLPRTAVLLMDSKTFEDHRDRAVPEPITASPDPAESLTPAEQALYRRLLTESRGRLEQEYLPRRLVHDAIHSWLATSR

SEQ ID NO: 32282 - protein, 489 aa, Stenotrophomonas maltophilia AU12-09
MKHRERISRYRHLREQPQWKLLAADHAPEIIGLLQGLLMDGERTLPSSVLNERLQRALDQLNGDELSRELPRTAQAYIAHWLAQGWLERRLPDGADQEQYELSTAALQAIRFADGLEQARVAATESRLALVIEQLSQLAAQTESDPDARLSALRDERDRIDAEIARVGAGRVIALDGKRALERARQIIGLADELTEDFRRVRDDFEQLNREFRERIIDDEGERGDVLSQLFEGVDVIGESDAGRSFQAFWRLLNDAEQSAQLDAALEAVLARGFARRLDRNERNFLRGFTSTMLERGGQVHDVLQNFARSLRGFVQSRGYLEQRRLNQLLKQAQSEALALRDEFPAQRGIGRDLQLTTSRLRSWSQWKLHDPRSAQVDGNVEYNDAAAISLESVGDLVASSEIDFRTLRGDLHDLLDAQPRLSIAQALSQREAPQGLGSVIGYLSLGTRFGNVIAGEQELAQWRGGDGQIRRARIPLVWFTQERRHELA

SEQ ID NO: 32283 - protein, 233 aa, Stenotrophomonas maltophilia AU12-09; identical to SEQ ID NO: 31708

SEQ ID NO: 32284 - protein, 1126 aa, Stenotrophomonas maltophilia AU12-09
MAISKHTPALFNEGLPDPRLQQFRMRRLQVHNWGTFNGLTEVPIAERGFLFVGRSGSGKSTLLDAMSALLTPPAIVDFNAAAREAERSGRDRNLVSYVRGAWADQQDSGTGEIATQYLRKGATWTALVLEYRAGDGRVVSLVRLLWISGNGTSAGDVRKHYMIAERPFDIAKDLGGFDLDLRKLKQKLPDLHHFDTFSGYAERFRDLLGIDNEMALRLLHKTQSAKNLGDLNVFLRDFMLDTPKTFDAAERLVSDFAELDGAHQAVVTARRQVETLLPARAYYNDLKEMHRRRGDDEALKLGVDSFRESRRQALIEARLREMDVRDRGLLGEEAQRRAALDNHTERLAELELQRRQQGGERIEELEREQGRAEAERDRRQAKREQARQAAQQLGAELPDDAHGFAELVERAQNELQDRQRASSALDDAISDRLGGKRDDERRFGEVRAELEAMQRTPSNIPAPMQKLRARLAEETGIAEAALPFVGELIQVRSEEQGWQGAIERVLGGFALSLLVDDKHYNDVAEWVNRTHLGMRFTYYRVRRNDDAFAREPSAKSLLHKLELREHVFESWLRRELGKRFDYECVDARQLRNVDRGITREGQVKHPGDRFEKDDRSAVGDRRRWILGFNNHDKVGAFEREAQELAKRIASCETDIARLRGQRDRDNERRLACHELVSISWNEIDIAAPQQRLSDIEATLRDLREGNADLAKLAKQIDAVRADIEQSRRTYEDVRVERGQLVKERDRLDRARQQSRALVLPSLAQEQEAGLAERLQEQGPLSLETLEAHMRQVSNALNEQLSSSQQDLNRIENQLIGCFRRFIQQWPEESGDFTVSVASAEDFLARLERLERDGLPQHEERFFDLLQNQSKNNLLALQRHSAEARKSIGQRLDEVNASLEQVPFNRGTLLTIELSDRRLPEVAEFHLQLREVLSQQQTEQRELAESQFTVLRQLVNRLGSQEGEDKRWRELVLDVRMHVEFIGVELDAETRQQVEIYRSGAGKSGGQRQKLATTCLAAALRYQLGGADSQLPSYAAVVLDEAFDKADNEFTALAMNIFDNFGFQMVVATPLKSVMTLEPFIGGACFVEISGRHDSGVLLIEYDEEGKRLKLPERSRQQANEPEEAEA

SEQ ID NO: 32285 - protein, 485 aa, Leptospira noguchii str. Bonito
MDYNLLQRLFRSSSIRLLKKDNAPFIIYFLEKYFRGSARIFVPFEELKILLHHELENFRELEETFLSRTAEVYIGEWVSENFLSRRIRSLEGSEEIILEPSSELEKVFSWMDDLRSLENKESIGTETRFFSVLNKLKEIVEESVSDPKEKIRQLESKKDELDDQIKKLTEGKEIITFASERIRGQYLYARKEAIGLLSDFRQVEGNFTEITKFIHKKYLEVVQKGEILQFALDGDEELLQSEQGKSFQAFWDFLRSEQSQENFESILDSLYSLKDILVLDDRKFFRNFKRNLREAGSRINAVVSRMSEQLKKSLVERTLRDNRRSKAIISEIKHLVLEKKFDLSEENFYSMEEIFVHLPMDRPLWKGDSADTPRSIQISGPDDEMISLDFLDSIRGINFEIYEQRIQTLLRSFPEVSLEKVLEEFPENIGFESIVAYVFIASKGEYHSLDDSESFLFYPAFNFTQKETQSVYRVPKATYRVGKDG

SEQ ID NO: 32286 - protein, 187 aa, Leptospira noguchii str. Bonito; identical to SEQ ID NO: 31350

SEQ ID NO: 32287 - protein, 1118 aa, Leptospira noguchii str. Bonito
MTDLFSSGEITANTGYRLKSLEILNWGTFNGKIWKLNSQGETFLLTGANGSGKSTLVDAILTLLVPSTKRNYNLASGLESKKRDRSEKSYVEGHYGRASSGSEGILKIRGKQEECYSVLSAVFNAKGKFPIIRIAQIFWFESSDLKRIYLISDDSLDFEKDLVLRNRTIKELRSDLKNSGARLYDNFKAYGVDFRKMVGLGSEKAIDLFNQIVAIKSLGVLNEFVREHMLEAKDKRFRIEELDRNFFDLNETYETILSAREQLRLLEPIEKKAFEYRDWNSKVEGVQELILFAPEYFTQKKYELCKKKEQDYTLDLFRVQDHLKELNSLTESLKKEERELYYSLENNDTRKRISDLKRKFEEIQTNLNKRRSEREKYSEYLLKLDLENVLIEDSFYSNFRKAGEKLQKSDSTRDSIRDRLTDLTVKRKESKVEFDSVYSELEHLKKSRDNLPRIVSSMREKISQGLGVSEKKFPFVCELIRVKDSEKEWTGALERLLHNFGLRMLVDEEDYKALSSYVNSSHLGGKIVFSRMLTQGGPILQPKDKDEVFYKLEIKPSLSKFQKEWLETQILKEFGHICGDLQRLQKEEKALTKEGLIKSGKIRHEKDDRKNINDARDYILGWNNREKISALESEFMRLGKVIDKIESEIKKVEEEQKQNDLFRDDLKSFLRFEQFSQIDDQSLEEPLEQTRKEIQDLEVLSEEYGKLKEQYESAKVRLSEAEGKEKETTKELTLLEERFSNLEKEIETLNSRIKEFDPNRRTRLEPILNERLGQVIFNLDSILEKERKFLEVLIKERDDFIEKRDSIGEELNKGMDRYVKKFREEADREELSVSILNAEAFAELTERIRKDRLPEFQDKFRNMMSDKVAKQILEFKAELEDDVSEIKDRIDELNESLRYLDYSKGKSYIQIRYFETKDREIIGSTGFKELLRNSIPDMGDSSNNEENFSRIRELLGKLKGENGSDRWSRLVTDSRNWLDFQAAEFQRDTDTIIQVYDSSAGKSGGQTVKLAYTILASAIAYQFKIRELNSFRFVVIDEMFNNLDNENSRYAMDLFRQLGLQLLVVTPMDKITVVEPYVQSVHFVKNNSDGNDSRVYLITKEKLNSEKIENTDRKVGNL

SEQ ID NO: 32288 - protein, 389 aa, Leptospira noguchii str. Bonito
MISLEEIRKKCLLYYHKVLNRAVLGEKSFPWEISTGKIDPGEIIHNPSLLEKIKKESKEKKGFGFLLVSFQKETRKFGTQTLPSKIRFEDEIDFLRFLHKEQEFSFYKSDCDMILFKIPALMEWILKNPFLVIQESGNWEDLLSVCSYFLKNPRPGLYIRELPISVPTKFIEENKKVLRNLLDFLVPENIDYEGKDFESRFGLKKSEALVRFRILDPIIAEKSSGGLFDISVPVDEFRNLHLFGCKRIFILENKTNFSNIDHFLTFPKLSGSIAIFGQGYGLGILKDCVWLNKMEILYWGDIDVQGFEILSLLREQYSQTKSFLMDKETFLKFQNFAVDGKYSKFSKLDYLTESEKETWEYLRSLGSKNRLEQERIPQEYIEKTLHSQF

SEQ ID NO: 32289 - protein, 483 aa, Leptospira sp. Fiocruz LV4135; identical to SEQ ID NO: 32078

SEQ ID NO: 32290 - protein, 187 aa, Leptospira sp. Fiocruz LV4135; identical to SEQ ID NO: 32079

SEQ ID NO: 32291 - protein, 810 aa, Leptospira sp. Fiocruz LV4135
MTDLFSPGEIAANTGYRLEFLEILNWGTFHGRIWKLRPEGENFLLTGANGSGKSTLVDAILTLLVPAAKRNYNLASGLESKKRDRSERSYVEGHYGRSSSGSEGILKIRGKQEECYSVLSAVFEANGRFPRIRIAQIFWFESGELKKIYLFSDKELDFEKDLVLGKRTVKELKADLKNSGARLYDQFKAYNVDFRKAVGLESEKAIDLFNQIVAIKSLGVLNEFVREHMLESRDKRSRIEELNRNFSDLSETYEAIVNAKEQLKLLEPIEKKAAEYREWNRKAADLQALIVYVPYYFAEKNYELRQIREQDYLFELSRLKDRSDELSTEIESLNQEERKLFNALENNDTQRRIADLVRKREGILSDLKTRGIERKKYSSYLSKIGLEETFSEETFYTNLRIAGGMLTETDSIWEEIRDRLGKLTLQKMELQKNFDSVRSELEYLKKKRDNLPRTQSEIRAKIASGIGLSEKRFPFICELIRVKESEKEWTGALERLLRNFGLRMLVAEEDYEAVSAYVNSSYLGGKLVFSRMVPLSGPILQPKDKEEVFYKLELKSELSNVKKEWLEAQILREFGHICGDLNRLRKEEKALTKEGLIKSGRIRHEKDDRKNISDARDYILGWNNTEKIAALESEFALLGQNIYRLNSAIDLVREEENKNKNKRDDLLLFLRFEQFSQIDDESLKGPLQDTERQIRELELRSEEYGKLKEQYELAKARLTDVQGRQRETAKEFNVLEDRLSTLRKDMEDLQQRIRKVDRETSISLEPILNERLRETILTLESIAETERNFSDRLVVERDQYWRNEIRSEKN

SEQ ID NO: 32292 - protein, 498 aa, Leptospira kirschneri str. JB
MKPSEISILLKSPAIKVLRKDTAAIVLSFLFEQFKIKNNFWVLEEELRSNLRHFLEDSREEGNLSESDFLRSPETYIQEWVNDGFLSNRIRTSEGFDEVILELTPETEKVFSWLEEIKELQDKEVVSTESRFFSILNKLQEIVEETISSPEDKIAQLEQKRKDIDIEIERIQKNGRVDVFPSQRIQSQYLYARKEAHGLISDFKQVEGNFYDLTQAIHRKYLDIVGKGEILASVLEQDAALLDSPQGRSFQAFWDFLRSDRHQEFLEKTIRALYDIPDVLEVDTDRFFKKFRKNLREAGARVNSVVSQMSEQLKKTLVDRTLKENRKTKELIAEIKTQALNSDLSSEENFYFLERIEIRLIMEKPLWKGDDIDTIREIQIDDQEVEDFDWKDLSSSMVGVDPEILIENVQTLLRYKPEVDLEEILQTFPISSELEEIVTYLWIAGNDENHSIQENHFFRFAVDKENIYRIYNIPKTTYRVGKTEIGLKESESLGFDTY

SEQ ID NO: 32293 - protein, 195 aa, Leptospira kirschneri str. JB
MDFKFASSVLKLLKGPVSLENDPKGWDQLKSQAERVRNHFSEIGLTLHLDDVDCFAFLKQTSDEEEEDEKEKLPVLTKRIAINRKETLLLVLLREAMLEKEEKDLSSPVLLRKEEIYERLRPFFQKTTNEVDLLKDFDRMIRSVEGFGLIRILDDFSVKVQKILKAKISVAELERMKAKFQEGEGNVDVIPSQGE

SEQ ID NO: 32294 - protein, 1122 aa, Leptospira kirschneri str. JB
MSTLFHLRENELPTGFRMRKLEVFNWGTFNGKIWVLEPNEKNFLLTGANGSGKSTLVDAILTLLVPSNKRNYNMAGGVDTKKKDRTEKSYVEGHYGREASGAEGIRKVRNKQEDCYSVLLTVFSEPEKDTSVTVAQVFWFQSGELNKFFLIADRSMSIQESLILKGRSVKDLKSDLKKDGIRVFDNFKAYASEFKNLVGLRSDKAIDLLNQIVSIKSLRELNEFVRDHMLEPLRVNAKIEELDKSYSNLTETYQAIVKAREQLKLLEPIGDKAGEYREVLIQERRIERILGSIVPYFAKLEFESLVEEEKNEILKQKQTEDQLISVREETENFREEERKAAITLENNDTVRRMEDLKRKIEDLGKEKTIRDLSWTKYSELALSIGLSTEREETAFYDNFRISGPRMEENERRKESLRSKSARLDMEKAKLEGRNEEVKEEIEHLQKNRDLLPQHRVKIRKQIADALNVPFSEIPYACELIQIKETEKHWRGAIERLLNSFGLRLLVPEKHYQKITDYVNRTFLGDRLVYSRMLFSSENYSGSPKNRDEVFYKLEIKPDLDKEIKTWLEFQILQDYNYVCCDMATFYRQEKAITESGLIKTGKIRHEKDDRSSVNDSRNYILGWNNREKLEALQKEFAETGQKMYELDSELKELKSEEDKNGKEFRNLDRFREFDSFSVLDISGLQSDLERSNSNLEELERSSEDYQNLKTQHTIVKEKWEHSAKREKELERTITQIESRIQQNRIMRSKLEQTLAEYSLDELEPFFDEIRKRTLDEILKNENLDRLQKKTEEHFRSEKDQIQTGKLKIADDLIRKMDRYNKKFSEDCDRVGLVVGIDYLDAFEEELEKIRKERLPEFESRFKAMMDDKVTKQITEFKSGLEDHVSEIQESIQKLNESLLHLDYVKGKTYIQLDYTETKNKEIVGENGFKILLKECIPDVGDAGSNEEKFRKIRELLDRLKAVDGNERWSKSVTDTRNWLDFRAVEYERETNRIKEVYDSSAGKSGGQTVKLAYTILASAIAYQFGFNNKKSFRFVVIDEMFNNLDGQNSKFALELFERLKLQLLVVTPMDKIAIVQPYVSSVHFVRINPEGNFSKVVPITQEELLKDKLGDSNSSKEEGIPV

SEQ ID NO: 32295 - protein, 391 aa, Leptospira kirschneri str. JB
MISPEEIRKKAEKYYISVLKNSILTQPSFPWEIAVGKVLPQDLLQSSEPLRILEKSSKAENGFGYRLFSSKKETRKFGAQTLPQRIVFDTQTDFLLYLDKAREFEEFQKSVNLILEKIPDLREWILSDPLKVSEYADRWEGLLEICEYFRVNPRPGLYIRELPVRVPTKFIEENKSVLRELLDFLLSAEMRSDVPVFEDRFGLKKAEDLIRFRILDSEIAKNGFSGLTDLSVPIHEFRSLCLEKCDIVFLFENKTNFSNIYNFLTIPLLRGAIAIFGKGWGVGSLKSCEWLKTKRLLYWGDLDVQGFEILSSLRETFPKTESFLMDRNTFFKFQEFAVDGVPGRISNLPFLNEEERATWELLSSLQGQNRLEQEKIPNWFVQNCIHSIFDF

SEQ ID NO: 32296 - protein, 483 aa, Leptospira santarosai str. HAI1349; identical to SEQ ID NO: 31626

SEQ ID NO: 32297 - protein, 187 aa, Leptospira santarosai str. HAI1349
MNKPHDYAPSILRLLKGSINSESDAKIWKNLLDNEKSVREHFEKLGIFLHLDREDGYAFLRQTSDDESAESDEKLPVITRKLPLTKEETLFLILLRECIIEIEEKDPSGSILFRKEELSDKVSPFFSDLSDEIDRQKRFEKLLRKSEELGFVKQIEPETIRIEKLLKAKLTVSELEGLRGKFRLGTE

SEQ ID NO: 32298 - protein, 1122 aa, Leptospira santarosai str. HAI1349
MTDLFSPGEIAANTGYRLEFLEILNWGTFHGRIWKLRPEGENFLLTGANGSGKSTLVDAILTLLVPAAKRNYNLASGLESKKRDRSERSYVEGHYGRSSSGSEGILKIRGKQEECYSVLSAVFEANGRFPRIRIAQIFWFESGELKKIYLFSDKELDFEKDLVLGKRTVKELKADLKNSGARLYDQFKAYNVDFRKAVGLESEKAIDLFNQIVAIKSLGVLNEFVREHMLESKDKRSRIEELNRNFSDLSETYEAIVNAKEQLKLLEPIEKKAAEYREWNRKAADLQALIVYVPYYFAEKNYELRQIREQDYLFELSRLKDRSNELSTEIESLNQEERKLFNALENNDTQRRISDLVRKREGILSDLKTRGIERKKYSSYLSKIGLEEASSEETFYTNLRIAGGMLTETDSIWEEIRDRLGKLTLQKMELQKNFDSVRSELEYLKKKRDNLPRTQSEIRAKIASGIGLSEKRFPFICELIRVKESEKEWTGALERLLRNFGLRMLVAEEDYEAVSAYVNSSYLGGKLVFSRMVPLSGPILQPKDKEEVFYKLELKLELKSELSNVKKEWLEAQILREFGHICGDLNRLRKEEKALTKEGLIKSGRIRHEKDDRKNISDARDYILGWNNTEKIAALESEFALLGQNIYRLNAAIDLIREEENKNKNKRDDLLLFLRFEQFSQIDDESLKGPLQDTERQIRELELRSEEYGKLKEQYELAKDRLTDVQWRQRETAKEFNVLEDRLFTLRKDMEDLQQRVRKVDRETSISLEPILNERLRETILTLESIAETERNFSDRLVVERDQYLEKRDSIGEELNKGMDRYVKRFREEADREELSVSVSNAEGFAKLTERIRQDRLPEFQEKFRTMMSDKVAKQILDFKAELDDDVSEIKERIDELNDSLKDLDYSKGKSYIQIRYFDTKDREIVGDSGFKEMLRGSIPDLGDSSHNEEKFAKIRELLKKLKGEGGSDRWSRLVTDPRNWLDFQAAEFLRDNNQILQVYDSSAGKSGGQTVKLAYTILASAIAYQFKIRERNSFRFVVIDEMFNNLDGENSRYALNLFRQLGLQLLVVTPMDKITIVEPYVRSVHFVKNNSEGNDSRVYPISKENVSSGKDENSERKVGNL

SEQ ID NO: 32299 - protein, 392 aa, Leptospira santarosai str. HAI1349; identical to SEQ ID NO: 31360

SEQ ID NO: 32300 - protein, 481 aa, Leptospira alstonii serovar Sichuan str. 79601; identical to SEQ ID NO: 32209

SEQ ID NO: 32301 - protein, 197 aa, Leptospira alstonii serovar Sichuan str. 79601; identical to SEQ ID NO: 32210

SEQ ID NO: 32302 - protein, 1121 aa, Leptospira alstonii serovar Sichuan str. 79601; identical to SEQ ID NO: 32211

SEQ ID NO: 32303 - protein, 389 aa, Leptospira alstonii serovar Sichuan str. 79601; identical to SEQ ID NO: 32212

SEQ ID NO: 32304 - protein, 480 aa, Gordonia sp. NB4-1Y
MDFHAFTALWDRHPAWRLLRAHHSPLILAFLGTYFVEDNRGASPAGELAAALDDLLYELNAVLPTDDDHVRFPKEPRAYLEDWAATEAGFLRRFYPTGDDEVHYEVTPAFEKAYAWIISLQGRAFVGTESRLHTVVELLRQIVHGTEVDPEIRLTELRRRRAEIDAEIAAVEAGDITMLDRAGIRDRYQQLSSTARDLLADFREVEDNFRLLDRAAREKIAAWDGPKGELLAELVDDRSEIASSDQGRSFGSFYEFLLSDSRQSELADLLAKVSSLGIVDADPRIRGIHHDWSEAADRTQRTVRQISEQLRRFLDDQVWLENRRVLDLVRSVESSALELRGNTPDFGLEVDQPGIDITLPFERPLYQKAATVTVESRIDDATEDLDAELLFAQTHIDQVRLAANIRSVLPKRSSALLSDVVDMYPIEQGAAEIVGYLALTDDDLSVDIDATDETLLEYPDPDDPTTTKRARLPKVTVRRR

SEQ ID NO: 32305 - protein, 192 aa, Gordonia sp. NB4-1Y
MTDERAVASAIIRMMQGVTYRESDEDTWATLERSGAGVRDHFATIGVEVVVDDSEGYAYLRSRPEEEGEEPLPRLVRRRALTYHVSLLLVLLRKRLLEFEISGGDGRLVLSTDQIVEMLRLFQTESTNEARLVDQAESTIKKTVELGFLRQLRGQTDQWEVRRIIKAYVDAQTLSDFAGKLREYAGRKDCDD

SEQ ID NO: 32306 - protein, 1133 aa, Gordonia sp. NB4-1Y
MTDGLFSTVELTAPAGGAGFRLQHVEVLNWGTFDRQVWRLTPNTETALLTGDIGSGKSTLVDAVTTLLMPAHKIAYNKAAGAEAKERTLRSYVEGHYKSERQESTGRSRAKGLRQERNTYSVILGVFTNPGYDETVTLAQVFQQRDTAGQPYRFYVTATKQLTIAADFADFGSQLGDLRKRLRSGGADVHDDFPKYSTSLRRLLGIRSEQALELLHQTVSMKSVGNLNDFVRDHMLEPSDASGRVRDIISHFDDLTKAHDAVKRAREQLEALDPIISTTRRYDAALAERDTLDRHRAAVRLFIAEHHSALLADEIADHTVQGERLLREQDEARARQRDLSRERESLIEERARAGGDRVGELERLAAAARDDVAKRRHGRELFDATVADAAFDPVGTAEQFAALRGLIDDERTRLAETKRALDTAIADAIGREKDAARRGDAIRAELDDLRNRTSNLPPDQVQIRDQLTTDLGLTHDDLPYAGELLDVDEEHGEWRGAAERVLRGFALSLLVPQQHYEAVTEWVNNRRLTFHASGGRSVGARLVYERVPARRIRLQRPDFGVPVLADCLEVRDGPFEGYLRDELFKRADHQRTTTIAEFRATKRAVTREGQVRSGGRHEKDDRHRVDDPRRWVLGWANERKIAALVDDLADLDRQRTAAVGEVTMLSGQRDAVQRRGEALARLEGFHSWAELDVDEARHRADAHEAERARLQSGSSRLQEITAALDRNAELATATTATIEGLTGRLATSAAAMNRAEQDKRTDDEFIAAHTDTELDSARASYDALTQRLDGTRPLRADDCAAAESVLSSALHQRIERLTRELGGYGQSLAQYMADVLRRWPDLRADMDADVDARADFVAFRDRVATDDLPRFEYEFKEQLNKNAIQELAGFNNWLNRQAASIDERIARINEALGAVPYNPGRFIRLERESTTNQDVAQFRVDLRSLTDDSLAVDGDQYSEQRFLDVKRIIERFRGRDGHADSDKNWTRRVTDVRNWFVFSASERDVETDVEWEHYSDSDGKSGGQKEKLAYTILAASLAYQFGLEWGVEKSRDFRFAVIDEAFGRGSDVSTRYALDLFAKLGLQLLIVTPLQKVHVIEPYVKAIGFVDNPTGTFSRLQTMTIEEYRSRRDGQLR

SEQ ID NO: 32307 - protein, 382 aa, Gordonia sp. NB4-1Y
MSRRWTSPDDIATRVRRRWDDGSLLRAYANGDSFERIEIPLHGPTVSQIGDDLDAARTWVTALDRGRRDDRCYTLVWQSVGGRRIGRNTLPARAVVSSFDQAWALLGMAASVREFDTVAHLAAGHPPVYAWVLRYPLRAIDLLPEFSRLIAAHTWLDTHRDSQHHLREITAPGVDTKFAERHRVVLAAMLGVPSTAAGFLSGLGLRSKPDFIRFRPSPSLGLPPQLTEMSVRADELAQLTLQPHDVLVVENEITYLSVEVPDHGLVLWGKGFEVDRIGRLTWLADVQVRYWGDLDTHGFAILDRLRAWLPHTESVLMDRETLLAHRDRWVGEDRPATSTLTRLSPAEHDLYADLVDDSLGEKVRLEQERVDWAWARRRLTGS

SEQ ID NO: 32308 - protein, 509 aa, Bifidobacterium thermophilum RBL67
MSDVRAQLERLRPVYETGVLRLLLRNHAMTYVALLRTCFKPLTAELPKETLEVRLAGALEELAHDGEWQFKDGEAAQDSAHQTLVELTREGEGDYAWLANSYDPASHHYLYRLTARAHRAIDALSQLEDTTRALSGAQANSIIMEVENARKRLTVDPSERIALLESEVKEREQEISRLRNGESVESLSDKDVEDIIAVVHNTLRGVPVDLHELALEERDNGDALRRRMQENSMSVDEILTAYHERYRRSMRESDSGRRFEDAFQVIVTDEGRRQIDDAVQDIAKSPYLHGEPNQLLNQVRAELKRIYEGIEDVRHQVRVSDEAVSRLVRQRSDTRYRTALDTFNRLFATISQEIKAGASSPSPYSFDVGDATLLALPTRPARPMAFAAPPSLDAVSSVQDDDNPGFADVDLRAMVEAGGPRLRHMLSLIVQDPIMRDGRVDVAASFNQLSDSERRESELVGFLGTLRVDDNGQFSTWRCVSADGTTRAWRTRPVLADVGVLHEIIEEDA

SEQ ID NO: 32309 - protein, 298 aa, Bifidobacterium thermophilum RBL67
MTDELDDMMAAMGTARMGGDADAVVDAHEDGSGETDGVSNAGRDTDTIGDIDPADNPHALFPGDTSTMDAEARAVAIALKRDRFITGDAYETALDHMDEVRRSLNDDLLELVDVPRYQVMYARPVTADGLGMRSLKTRASLTREEAAMLALLRIRVLGYESSRESSKDWIISTDDIRAALTTGAGWLAARNDEEGVMKRIGIAISRCVTYGYLAPVEDTDDMYCITPLVPAVLTTELAEQWLGESENSAAGSADDPEEDVQITANTDTSDIADTTYTNTADGLNAGATAAQTGEETRL

SEQ ID NO: 32310 - protein, 1202 aa, Bifidobacterium thermophilum RBL67
MTDEALMADHWMLASRQLVNWGSYEGYHVFRPSMDPDMPITLLAGASESGKSTLVDAQNSLLYPAGTAFNKASNSGRSERSDYTYLRGMTAVADDAEGGTAVYLRGSAEDGTPSAVWGAIVDTYVNRMGGEMLSCAKFLYLSPGDERGNVRRQYVSWNHEIDPRKMDGYRSSPFTADQLRKVYPGCAVYSNAENFHESVWTRMGLKAAACRLLYKIQSADAPSRLDDIFKQGVLDVPNALTKAREAVEDYDRYAENFRSMEENARQMDALREIRDEHAEYDKAARQARDLQVTDPQDDAGLTTLRSWVFSRLASAVRDQLPQDRRELERQQEQCHKADTTVENVQRELGEVTEMMHGAGGDTLTHLENEHEQALQELERMRHTVGRIRQAFARADEPMPRSEASWEQRRQEAQDFIEDANVQRDELQRQRDACVVRRKGITDRLDPIKRDFERQSRKRTRITQDMEDDRAAIAQATGLSERDLPYVAELMDVRKGEERWRTAMNVAYGPIAQIILVDRRYERGFARKVSTIDPSTMFRRTWQFIDIDNIDYQSGTQEHGEDGEHDDRLSGKLRFREDSPFLGWLREQTTSRRLDALCVEHIDDADTPRQIQPDGQIKAGQRGSYGTKGINQVIGFADEAYLRGLKQQIDRLSEQLRQCELDGEDIKRQQSHLDELRTLSSQIADLSWTEVDEAGTEANVERLERDIDTLRNDPKLAQLAERRDQLQHALRDALDSQANARFAVANTQQAVDAAEAWLTERAGQIADTAEQPTLPDTVTELLSTAYSAATGSVAGELAHMTVLPGQPGIRRFDERVLGMVGNAITKRISEASTQANKARASVERRMSDYLARWAADDTTVTPTVDDYRYYEDELRDLSKIVAKAATPEEIANSVDKMQRDFNELSMSLENDQREVREQLDRINSMLRDQQFGPRHGSLTLDVTIRPRSAAFNGTLRRTIGRLNSWQAEQPSGGASDSRTAKRAFDSCKPMVELLRSELGKVRDTAGIRQYGARNLDSRARSSFYAVVHHDDGPDERISSTGGKSGGALQELTSFVYGAALIYLLGGDISGHPTYTTLFLDEALIKADGRYTQRALAVLPRLGFQVIVSAPESKTGEILEMATRGYVVLKDERLHSHLQELDLVGAHADGGPFEQRNPSAGKSSTGTAASSIPADAGNADDTVETSNVTNSGDSTASSSGKPQS

SEQ ID NO: 32311 - protein, 420 aa, Bifidobacterium thermophilum RBL67
MTGIRARGVNARTAPTEIRDAVTRYLQRRRYDAEPRWPLVFSVRWPDQRTLTAQAPDWHKANNALREWAQRLGCPVTNKHRLMVTPVELIDTVTVADEQTALRIADRTSARHYRKARQRIDLLADECSIPRDTAASVAKMLDSESDVDVTLVIRAAQFFGAHDATGLTPRQVPLAGFSAKWLDQTHRRNVICTLCGKDSLGLSDRPPELRMRWLDPAYSNEPEMMITRPWRPGGERDIRYVIIVENKDTYQSMPDIAHGLCVWGAGKAILASIALLLPWLTTARPDDGDDSSPQVVYWGDMDADGLEILDAVRHTGVRCQSLFMDLEAYQRYSWFGTNLASTSTPLTSREPKATPTLDFGERELYLLTCGEAVGQSDESGLSDGPTHLRVEQERIPLIDTADALRSLGWPIAANNDKETQ

SEQ ID NO: 32312 - protein, 493 aa, Rhodococcus ruber Chol-4
MSTADLHRLTRLRQEHPAWVLLRSDNAAAVLALLGRHFDRGTRRLPAPELFARLDADLQELRDEGFELPRTGQAYCADWVRAGFLLRRASADAREETLEPTEATFAALTFVAGLTTATSSVTESRLTTLSSQLQALARDSDPRSESRLAALRAERDELDRQIAAVESGDFPVLDGNRAVERSAEILALAGEIPGDFARVRAELEALNRELRARILDDEGDRGDTLGEVFRGVDLIGSSDAGRSFAGFYDMIIDPERSSQLDDWIEAVLQRPFAQQLTTEQRNRFRTLLTEMEDAGGEVHATMTSLSRSLRHFVQSRHYEEHRRMQRLLRSAQQQALQVSQRRKPYDLLDLELVRVGMGIDSVAALRLHNPADDLVAEPVVTQPVGKVDLAELRRIVRESEIDMDELAGNVAATLRSRGRATIGDVLRDHPATQGLASAVGLLVLASEHGHRVDGTEEIAWTSPSGATRVATVRRHLFDPTDTEFTARITEDAS

SEQ ID NO: 32313 - protein, 1099 aa, Rhodococcus ruber Chol-4
MSAAPIHPGQFRLARVQVVNWGTLHGHHDIPVARKGFLITGASGSGKSTLIDAISTVLMPGGSVRFNAAAQKSAAGSGRNFVSYIRGAWRREADADTDALTASYLRTGATWSAVALTYNAADGTAPVTLVKLMHLRRGANANNEISHLHLILDTDVELTDLEPFVARGIDTRGIRKRWPGAVVNPSYAPFARAFRSKLGISSEAAQRLLHRTLSAKSLNSLDQLLRDYMLDEPPTFAMAERATTQFRELREAHRVVVDARRQVETLEPLVALADARRTGLQAQHDLQDETDHLDAVHARMTVDLLSDRLDETRAQTGLLQAAADKTADEADRAGERTLDLRVRAESAGDGRLATLRVHKETAETALERITQQRRRFDVALAHWEAETPATADDFAHLQAQLERELRELDTTADARRAELYEVAGALAEHRKTIRALIADREVLARRRSNLDPDLLRARELVCSAAGLGEDALHFAGELIAVRAEHAEWTGPIERVLGGFGRTLLVPDELYPRVAAAVDAHHLGARLVYRRVRTGVGAPDAPTTADGSLVRKLEVRPGPLAAWLQHQLADRFDYACVDTADDLRRVPRGVTRAGQVKHGGDRHEKDDRRRIDDRSRWVLGFDNETKLADLRRRIGDAETDVDALQRRQEALERAESAIQQRRQAAAVIRESAWADVDVAAAGNAVDAIEERLREWMQGNTEYATLTADLTRAESEERAARQAHTAALAKLEQHRDELTRVQARLDDAQAHAGTAVPDPIAVRIRARFAAAVRRVTVDNIDRALSTVGRAINEEMRSAQRDTADAERRITAILTGYLAEWEARRAEMRSEAEYVDDALAVLARLRSDGLPAYEDEFFRLLREQSHRNIGELARAIRKAPGEIRSRIEPVNESLRRSPFDTDRVLRIDVKDRRSPAASEFLAELLQITSGAWKEEDRAAAERRFEQMAAVLERLDSGEPADLRWKRLVLDTRLHVGFIGVEVDPEGNDANYHDSSSGLSGGQAQKLVFFCLAAALRYQLAAAGEELPRYGTVILDEAFDRADPAYTRRALDVFTQFGFHMVLATPLKLLQTLDDYIDGVAAVSIRDKRYSQIALLPIRGDGT

SEQ ID NO: 32314 - protein, 378 aa, Rhodococcus ruber Chol-4
MSALCVPPSAVAGKAQATYRSRRTRWITDPAAAESDSLSIALHPPSERRVAQDPDAVVAWVRAWHGYRGGGRIEWETRRWPSFGTQEVPVRLMLSGATAIAAAAARAPEWCTLTERRARLLDGLGPGTATLATAIAATHARWLELDEPDFARLVAAVRWLAEHPSSGLFIRQLPVPGVDTKWVSRHRGLVETLLEGVRGDRDLGVRSLPRMCEVAVCDRALLPAAPRVFATSLDELAALPVTPARTLILENKEGLHALPELPATVAVHGGGYAVHELADVPWLAASDVVYWGDLDTHGFAILGRLRGRLPHVRSLLMDRGTVERWRDLAVPEASPAPHVPAHLTGPERDALAVVRAEGLRLEQERIPWPYVVAHLEAL

SEQ ID NO: 32315 - protein, 483 aa, Leptospira santarosai str. CBC1531; identical to SEQ ID NO: 31626

SEQ ID NO: 32316 - protein, 189 aa, Leptospira santarosai str. CBC1531
MNKPHIYAPSILRLLKGSINSESDAKIWKNLLDNEKSVREHFEKLGIFLHLDREDGYAFLRQTSDDESAESDEKLPVITRKLPLTKEETLFLILLRECIIEIEEKDPSGSILFRKEELSDKVSPFFSDLSDEIDRQKRFEKLLRKSEELGFVKQIEPETIRIERLLKAKLTVSELEGLRGKFRLGTEKR

SEQ ID NO: 32317 - protein, 1118 aa, Leptospira santarosai str. CBC1531
MTDLFSPGEIAANTGYRLEFLEILNWGTFHGRIWKLRPEGENFLLTGANGSGKSTLVDAILTLLVPAAKRNYNLASGLESKKRDRSERSYVEGHYGRSSSGSEGILKIRGKQEECYSVLSAVFEANGRFPRIRIAQIFWFESGELKKIYLFSDKELDFEKDLVLGKRTVKELKADLKNSGARLYDQFKAYNVDFRKAVGLESEKAIDLFNQIVAIKSLGVLNEFVREHMLESKDKRSRIEELNRNFSDLSETYEAIVNAKEQLKLLEPIEKKAAEYREWNRKAADLQALIVYVPYYFAEKNYELRQIREQDYLFELSRLKDRSNELSTEIESLNQEERKLFNALENNDTQRRISDLVRKREGILSDLKTRGIERKKYSSYLSKIGLEEAFSEETFYTNLRIAGGMLTETDSIWEEIRDRLGKLTLQKMELQKNFDSVCSELEYLKKKRDNLPRTQSEIRAKIASGIGLSEKRFPFICELIRVKESEKEWTGALERLLRNFGLRMLVAEEDYEAVSAYVNSSYLGGKLVFSRMVPLSGPILQPKDKEEVFYKLELKSELSNVKKEWLEAQILREFGHICGDLNRLRKEEKALTKEGLIKSGRIRHEKDDRKNISDARDYILGWNNTEKIAALESEFALLGQNIDRLNAAIDLIREEENKNKNKRDDLLLFLRFEQFSQIDDESLKGPLQDTERQIRELELRSEEYGKLKEQYELAKDRLTDVQWRQRETAKEFNVLEDRLFTLRKDMEDLQQRVRKVDRETSISLEPILNERLRETILTLESIAETERNFSDRLVVERDQYLEKRDSIGEELNKGMDRYVKRFREEADREELSVSVSNAEGFAKLTERIRQDRLPEFQEKFRTMMSDKVAKQILDFKAELDDDVSEIKERIDELNDSLKDLDYSKGKSYIQIRYFDTKDREIVGDSGFKEMLRGSIPDLGDSSHNEEKFAKIRELLKKLKGEGGSDRWSRLVTDPRNWLDFQAAEFLRDNNQILQVYDSSAGKSGGQTVKLAYTILASAIAYQFKIRERNSFRFVVIDEMFNNLDGENSRYALNLFRQLGLQLLVVTPMDKITIVEPYVRSVHFVKNNSEGNDSRVYPISKENVSSGKDENSERKVGNL

SEQ ID NO: 32318 - protein, 392 aa, Leptospira santarosai str. CBC1531
MISPEILRKRSLAYYHNELLRSIVLGGVLFPWEISIGKVLPEEILKNPSLLRELRAESKENKGFGFRIVFRSKETRKYGIQTIPTKIVFDTEDDFLRFTKKKDEFLSYSTDCTLILSVLPELKDWILKNTLSVIEESGKWESILSVCSYFLEYRNPGLYIRELPIRIPTKFIEENKKVLRSLLDFLLPEIADAKDFETRYGLKKAEPLVRFRILDLEIAKSSTGGLTDLSIPVRDFRRLELSGCGRVFILENKTNFANLFNFLSFPQLKGTISIFGQGFGLNVLKGCSWLEKMEIFYWGDLDVQGFEILSQLREQYPQSRSFLMDLKTFVRFRDFAVDGISSSKSSEPKFLTPSERETWKYLSSLDSKNRLEQEKIPHEYVQEVLSGLGGSQ

SEQ ID NO: 32319 - protein, 489 aa, Xanthomonas axonopodis Xac29-1; identical to SEQ ID NO: 30402

SEQ ID NO: 32320 - protein, 233 aa, Xanthomonas axonopodis Xac29-1
MNWSEDTGLYTDEDTGAPAIDDRMPMAQTSSAEPRGELFLGDTGTLPFDARRALCQLLAGPSIDAQRHGALWPALLRNEVAIRQVLCELFLELVLDREGGVAFTRQADTAELESPTLLRSAPLTFIESVLLLFLRQQLAEADTRGERAVVDEAQLVEALSVYEKNVSTDRAGFARRVMTAIGKMRDNQLLSRLRGSEERYEVSPVLKLLFSAEDVQALVVAYRELREGEVALD

SEQ ID NO: 32321 - protein, 1340 aa, Xanthomonas axonopodis Xac29-1; identical to SEQ ID NO: 30404

SEQ ID NO: 32322 - protein, 491 aa, Bdellovibrio exovorus JSS
MKIRHEITFEQLHHLRKFSAAWGLLSSTMAPFVASFLYRVFIQTNRRSITVSEIIEALDNYLYVIRQKYPDDAPPKSAKEYIEDWSSPDKAWLSQRYTGRGDMPEVDLTPDAERAIRWLETLNPRNFVGTESRLLTIFQLLNELNQKIETDPNKILDDLYKKKKEIEDQIDKFKSTGKTERPDATQIKERYYQLDDTANTLLSDFRQVEENFRKLDREVREKMTLSVKTKGDFLDDVFGGEDEISESDQGKSFRAFWEFLIHSEKQNEFEELLENVLKQPEIATLEDKGVLPLFRDFLLDAGNKVYIVNNQLTSQLTKYLSEKSIAENKRIVEMISEMEKTIIELRGADFDKYFFSVPFLKPTLNLSASRPLFEIPDMIPLNEPVDSTDETILSENDMSKLFSLNIVDEQLLERIIESSLVQNEQTSLEDILKENPPSKGLSEVISYLKIAERRKHTHVYEDKFFIAEMLNEKGNKKRVKCPQVIFQRMLL

SEQ ID NO: 32323 - protein, 195 aa, Bdellovibrio exovorus JSS
MSFDIKKTKVLVQLLKGPIYRDSMPVLWQDFLIYKEQVHDYFQHIGLNVFVHDDFGFAFLRQPLASESVDDDKVVPRLIQQRELSFELSVLLILLRKRLAEHDNSSSEARVVLDERDIIQMMKVFLPETNNETKQKKDVDSLIEKAVDMGVLRRMTHDQRKLEVLRILAALFDASRLAELQNRIEEYKEYAQRST

SEQ ID NO: 32324 - protein, 1131 aa, Bdellovibrio exovorus JSS
MHKDQLDLFVKGQRPGFRLKHLEVYNWGTFHNKVWTLFTNGGQNLLTGDVGSGKSSLVDALTTLLVPHNKITYNKAAGADKQERSLYTYIKGAYGNEQDEESQTSKLLTLRDETSYSVILGVFHNEAMQRSITLAQVFRLRKNDKNPDRFYVLAENELSIKNDFFAVKKDISDIKSNLKKKDGCEVFDSFKEYSIRFRQEFGIKSDQALDLFYQAVSMKSVGNLTEFVRTHMLEKTEVENHIEELCSSFEDLRNAHEAVIKARKQIEHLEPIVELGKKYNEDQKIKSENILYRSHTESYLAKIKFQLLEESLLNLNEKKERTESNLTNVQNLRQAESKNLIDLQVSLQSAGGGRIQSLKSTIEEKSKEKDRRLSQHNRYDEPCSFLGLPTPKSVDEFITNKNQAQVIQDETKLAKDKIETEILNLNIDVSKLKTQESSIIEEIESLKSRQSNIPKHSLDLRANMARELNLNEQDLPFVGELLQVKSSEKKWQGSIERVLRSFGLSILVSEKDYLDVSAYVNRTHLKDKLVYFRVNEARRTINSKPAQDTLLGKLDIKKDSQFTAWLRQELEGHFNFICCESVEDFQKQVRAISISGQIKSFNKRHEKDDRFRIDDKSRYILGWSNKEKIESLKNDLKLLQHEGQKLIDKVLQNNKTKSELDSRMSNCQRILHFLSFEDINWYDISQLILSIEKEIKKLTAESSNLKAIEDLIKVSNDKIQEFDNKLNEMQKSWGALDSTIKQQEESKVNCLEQLSTLDSEVTEKVFPHLDEICQTLKLFSDVNLANLGKKQNQLRDSIQSKIDALSKITEKDQERIVRLIGGFLSQFPEFTTNIDASPKSLFEISNILKKLKDEDLPRHEQRFYKKLKEDTIKGMAMFQELLEKEKRNIEGKIKTINVCLRDIDYNEGTYISILLNKSADQEIVTFRNDLRQILSNTAGVENVYNEQKFTQVKTLIDRFRGRQQFSDIDKRWTAKVTDVRNWFTFAASEKFHADNTEKEFYPDSGGKSGGQKEKLAYTVLASALAYQYGIDSMQESPKSFRFVMIDEAFGRGSDESARYGLTLFEKLNLQLLVVTPLQKIHVIEDYVSHVHFVHNEASKESRLHTLTIEQFRESKNSHRNKQANVGDVVDA

SEQ ID NO: 32325 - protein, 381 aa, Bdellovibrio exovorus JSS
MLEDLKKKAQRLYESKEIFRSYLLGENKFPLEISLRNVSSAQLRDQFVTVGQQIDELAKECKKFSLEVVSTEVNNRQRGTQSIPDKVVFPNLESYLKFISKVKDYQLFKNTIDELLLIDNSKLREFFVKSPQLAIEYNSVWSKILAVTRFLINNPKTNLYIRQLEIPDVDTKFIQNHKKIILQVVSALTGDDEAILENLEFEERLGLRKESGRVRFRILDPNIQKLFYGLEDIETSIEKLAETEIPCENIIIVENKITGLCLPHYDKTIVFFELGYKAALLKQIPWISNKRIVYWGDIDTYGFSILSNIREAFPKAESRLMDLDTLFSYQNLWVEEKVQYQGACGGLSQAELELFNDLRSNRYGQGVRLEQERIKISDFKL

SEQ ID NO: 32326 - protein, 485 aa, Paeniglutamicibacter gangotriensis Lz1y
MRPTHQASPLWSQTQQFRSSAAWKLLSTAPWAVAFLRAEFTSAKPRVGLEVFHASLESFLKVVRSEDPSFNDSMSASQYADAWVRNQFLARPLVDGHFVYEPTAQTSRVLKFLADFSGDRTNLNSSRLNTLLTSLESLAHETDPDPEARIRALEAEITQRQEKIASLRDGTTPAVLPREGALAATRSVLDMASGLPADFKRMRDGVQEMLHALRGEIMESSSVKGVAVGAVLEGDKQLRSTPQGETFRGFTEFLNSPEAQVRFREAVNEVLERDFVDSLDAQERHTLANLLRELRRQASEVHQSYGRLSESLHAYVQSAEFKEAAILREAVRAAEIAVSSSRVLHSRTPVAPIKLYAPRFTSIAALGIYDPDEHVAPPKLAAPPQLSVADIRRTPSTPSPNIPVLHRAITDSRAKAGGTVKLADTYNSLDAEHRHLNTLRYLIETARNGGDSIDESTCEEISFTQVNGTTRIALVPAMSFTKDPA

SEQ ID NO: 32327 - protein, 219 aa, Paeniglutamicibacter gangotriensis Lz1y
MSSTLPTGAVDERRLFAGDTGSFELPLRQLLVRLLRGPYLDGVAEPRLWQLVLDRRAEISAYVAEIFLELEVDANRKIALLSPVDLEAAHTTAIAPRRALKREETLLALRLRLLLERHAGSGTDAVISREAAREILLEHRTPGDTDDKKLEENTDASLTRLLNLKLILPTELTDEYKVSGALALALPFAGIEEIPDYIKAIERVGVDDTEEFDLETEEL

SEQ ID NO: 32328 - protein, 1107 aa, Paeniglutamicibacter gangotriensis Lz1y
MSIEMTLPLSDAVNPGQHRLTQIQVINWGTFHGRHTLYVDRSGTLLTGHPGVGKSTLFDGIGHIFHAAPRLNESAHEASTRKDRRTTYSYMRGRRFKTEAGTLYQRPGATWSALALVYEDGLGSSVCIGAIFDLPANGLEGQVGKHYVMGDRVLDTAALEDHGARRFTPSSLQKSLPGFEAFDVHRSFAEKFRRRLGIDNDKAFSLLRTLQNGKGLDKGVNQFFRYEVLEIPATMKAAAGAIEDFSHLRGIHRQLEEARAQRDALSDVPEQKLRIDELNGELATLNALVSTQLPAYGAQLATRALQGQTSSLTSAVETNAALIEESGVRKATLETKVASLAEQHEADGGAGVALLEREAESARKHLADREAVLQTLRDNFEAVGLTFTFTASGLQAMRRQAAVSAENLASIAKDARTMEYEAMASVMNLKDRAKKLRLQIDSYAKRGSNIDDRSIAARRAIAASTNLDIEDLPFAGELIDLSPSHGQWRPSAEKALRSLATTLLVRGEDIKSVTRAIDSLSGLGRIRWMDISRTPREVVSGPGDLVGKLDFKHSAAGTWLRAKIAADYPLACVESDTGLHVHDKAISLAGTIKTGSGTFERDTRPVAASDYLLGFTNAEKISELQTKLAALEEDTARAAAVADDRTAAKDQLAAKFALLGTLASDNRSFASLDASGALHTLQDLEARMAEALSKSGDLSHVRRALDAARKELEECVGTLAVARAEATTLSASLDRASNALRASSVREALTEDWAVEKLSASEQLAPLIKRLDEGSAVDTAELEAALNALALSLSESGAELKREAYTLEAALKDTFKAFAREFGNSAAASYGTGIEAAEHYVSLHQGIIEQGLPQHEEEFREYFSNRSYERFSDLLQLLEEERRSIAERISPLNQILADVPFEHGSKLALEVSTTVPDEARAFRQALKEALAGAYSSRGAGTLSESYKALETLVDALDDSSRAAWRDTVLDVRQHVTIACNEHKPNGEIETGLEPGTLSGGEGQRFTSFIMGAALAYQLGFATAGFTAYGTVMIDEAFIQANSEYAAAGINALQEFGFQLLLAAPEDKIDLSRHLGSVCDIIKHPESNVSGFVASGRSPAVATSIILR

SEQ ID NO: 32329 - protein, 489 aa, Xanthomonas citri subsp. citri Aw12879; identical to SEQ ID NO: 30402

SEQ ID NO: 32330 - protein, 233 aa, Xanthomonas citri subsp. citri Aw12879; identical to SEQ ID NO: 32320

SEQ ID NO: 32331 - protein, 1340 aa, Xanthomonas citri subsp. citri Aw12879; identical to SEQ ID NO: 30404

SEQ ID NO: 32332 - protein, 521 aa, Curtobacterium flaccumfaciens UCD-AKU
MTDVDLEFARVRAVLDRPTLRLMSRPTSATVLAVFRTVFDRDVQYVPADRMHLQVEEHVARLQAAGARVPASDQAVPTASRQADTEQSDGEQEARPNGRALCREWVGAQWLVRSNSPDGDEQYSLTSHALEALSLVDALSADRALISESRLAMIVDAVHRWAARAEPDPDVQIRRIDAQIAELQSERARLEHGDDVVAVDDDRMRDGYTNISDLIRQLPSDFKRVEEAVATMHRSIVEDFRQEVRPIGEILDDYLARTDNLMEATPEGRAFEGAFELLRDDALLLRLRDDIATILAHPFAQGLGASERRAFRNTVTILRQGIEDVLAQRRQLTATLRDQIVAHDVVRDRELDAVLRSINRGLATLMDQGGARDRIPLPLLPAAAEVGTLRERFYDPDAESVPPPIEEPDDDVFEDLDVEMLRKHGGPLLTELRAALRFAEADSSVDAFHGLPPEQRRPVELFGLAHLLTGHEDFESAAHVAEHWTVRPDGTAITFQMPIAALDDERTPVGDAHDENAQEAR

SEQ ID NO: 32333 - protein, 262 aa, Curtobacterium flaccumfaciens UCD-AKU
MSDTTPAPVDDTVPYDDPASVMQDDERDESSFALFEGDEGRLDEHQRRALVALLRHSYVSSRTHPDEWRAVLDAEYQLRSRLNDLFLELHVDRDREVAWKRQARSESQRRTFPTLLRDLPYTREETIVLVYLRMRLRADARPGPDQVVVDRSEILGHVAGFRPATATDRTRDEGRVAKAIERLVTARILIRTSDPDRFRVASVVEVLLPLERLLELDAWLRTTTAQDEATAPGGEPTDGDDPGLPADGEAETDTDDEGETEA

SEQ ID NO: 32334 - protein, 1122 aa, Curtobacterium flaccumfaciens UCD-AKU
MTDTFEIPALFDTVAQWRAESMQVVNWGGFHGHRQVELSGTATLISGASGTGKSTLMDAYLAVMMPSDVPFNGASNDATTGRARSADQRNLLTYLRGKVDTRRDPETGSLRDVNLRGDDQTTWGAAAVTFRNDDERRFTVLRAYIVPKRARGVGDIQMTMATVDDTFDLRRLEEFVPSRFHHLELTGRVPGLVIRDTYQELAYTLQTRLGIGDSGGGNRAMRLLARIQAGQHLPTVDALYKSLVLETPGTYEAADRALAHFSALDEAYEAMDTEERKVRILSPITDLHDEISRATEAAAALDGIATGAEVSPFAHWTASRKRDLLDAEVSRNARERTASRAEVAAAEARHAAVEIELRDAEARLRDQGGNALAQLEDRIERLTRERDGVVRTRATFDERTAVLGTSVATEADFTAAQRSSHEFLGSYADARTALDERRDALTREEYPLLDRERSLRQERQSLEHRQGAMPLPMHEARLAMARAAGIDPAELPFVAELLDVLPGEERWRTAIESVLAPVARTLLVDQDRLGDFSEAIDALRLPVRVQFEGVPTGPHLDLDGDPAMVSGKLAIKPSPFSTWVRERIESDRTDARCVASASDLGGGGRRVTESGQLRDGRRGAHGDRRQSNVIGFTNEARVAAVEQELASIAEDLATLEARRTDVAQDLTALDVLRAAHQHVVDATWAAIDVDGLGASLARLDEERQALLAADDGLRTLRASVARLRKSLDEAADRRSAARLSVQRLEERHAVLVDGQDAAAEILERFESSPGSLPDDQQSRLLEETFEEIGAPDGVDGFDDATRRLKRRLEERLSQALDGAAAASTSLTLTFQRYQDAWPDPNLGTGVASYPDYHAILDQIVATGLHARRSEWRRRLSQWSGEDLVPLAGAFDRAVVEIEERLEPVNEILRELPFGANRDRLKIQIRRVTREDVTAFRRELRALSASVDTELTDDVLETRFRRFRRFMAVIRPDPDAARGRTTQRDAVLDVRRHMEITAVRYDTDGNDLGVYSSLGDKSGGETQELVAFIVGAALRYQLGDETRPRPRFAPVFLDEAFIKADSEFAGRAVTAWLRLGFQLVVSAPLDKVTALEPSMERLLSMRKHPETGHSSITEIARVEPVAV

SEQ ID NO: 32335 - protein, 477 aa, Dietzia sp. UCD-THP
MDYAAIDALRERHPAWRMLRATHAPLLLSFLGRFFVDEGHGASPEGEIIDALDDELYLRNGEDPENPRFKRAAADYLAEWASIDSGFLRRFYPLGTDEIHYDATPALEKAYSWVQSLHARPFVGTESRLQTAIELLRQIAQGTEVDPEIRLAELQRRKQEIEREIEQIEADPEAGLLDITAVRDRYQQFSSTARELLADFREVEENFRALDRSARERIATWEGSKGDLLEELVSGRSRIDSSDQGRSFQAFYDMLLSSSGQEELSALLERLTTIDELKADRSIRTVHHGWAEAAERTQLTVRQISEQLRRFTDDQIWLENRRVLDLVREIEGTALALRTGAPPEFGLELEQAGVDVSLPTERPLHSVRPASEVDSLLPPAEQEDVDTSVLAEQVIVDPARLAARLRNLVPERGTALLEDVVTMYPVEHGAAELVGYLALDTDDIEVTTDEQEETVIEYDEAGRSMRARMPRVVVRRR

SEQ ID NO: 32336 - protein, 191 aa, Dietzia sp. UCD-THP
MNPDERAVATSAIRLMQGVVYQESDAWEDLLRHRGAVRDHFAVIGLDVVIDDDEGYAYLRTTEPQDGDEPLPRVIRRRALTYADSLVLVLLRKRMVEFESAGDQGQLVLTQDEIIEMIRLFLAHSTDEARVLKQVDTSINRLVSMGFLRQLRGRRDTWEVRRILKAYVDGQTLSDFSAKLAEYADGGADDE

SEQ ID NO: 32337 - protein, 1128 aa, Dietzia sp. UCD-THP
MSEGLFSSVDLAPQGRPGFRLVRLEVLNWGTFDKRVWQLEPDGETLLLTGDIGSGKSTLVDAVSTLMLPSHRIDYNKAAGAARKERTLRSYVEGHHRTERNESTGSVRPVGLRDRRSYSVILGVFVNEGYDDEVTLAQVFQQLDATGQPWRRFVTADRAMSIESHFTDFGSDLGDLLKRLRRDGATVEKDFPPYGRAMRRLLGIRSEQAMELFHQTVSMKAVGDLNEFVRTHMLEPADASERIEGIIRHFEDLTRSYDAVQRARAQLEALEPLVASISRYESAVERLDRLHEERVAIRPYFAELRIELRQAEIERVRAEVTTIAAQLEQVRTELQALGAERDQLLAARAEAGGSRIGELERAARDAGAQAEERRTRRERFEDAVARAGLDPVGDAAGFADLAVQVGRAQAEIETQIAELKERYDALVLGHGEEKAQLREVQEELDSLATRRSNLPTEQLQVRSALCAELGVSEEELPFAGELLDVSEEHAQWRGAAERVLRGFAVSLLVPQRYYADVAEWVNARRLTARRSDGREMGVRLTYERVPERHLPLQRPHSDGLLLADTVEIADTPLRGYLSKELFARADHLCATTVEEFRHAERAVTREGQVRSRNHHVKDDRRSAADPRGWVLGWRNDQKIAALQDRRGDLTRSVERLAAQLESVSREQNEVGERRTALSRVADYPSWRDLDWEDARSRADAADAERRRLLEGSSELAEIDRRVAEVDTRVNELGQTKDTLGEAKGSGESRIAQESSQIDRDRRSLDELTADIRAAAADIYPRLRTRQGRAGSTTADQAELHERRLSDEIDKETGQTQRELNGYTTSLQQGMAEIRRRWPEQTTEMDASVDARGEYIRFHAQVAQDDLPRFIAEFEEQLKKNAIRELAGFHNWLQRQADDIQQKIEKINEALGAIDFNPGRFVRLDRENTVNQDVREFRADLRAVTDDTLGGDDRYSEQRYQEVRAILERLRGREGHSDTDKTWRARVTDVRNWYTFSASERDRETDEEWEHYRDSDGKSGGQKEKLAYTILAASLAYQFGLEWGAEKARDFRFAVIDEAFGRGSDASTRYALELFAKLGIQLLIVTPLQKVHVIAPYVRSIGYVDNVEGRYSRLVMMSTEEYHRQRGSA

SEQ ID NO: 32338 - protein, 387 aa, Dietzia sp. UCD-THP
MVAGARKWATPEMVREKVHRRWVDGTLLRAFARGEALIPLEVPLGPPRAAEIGGRFGEVQDWMAALEAGSRDGSRYTLRYTAVGGRRVGRNQIPTHAVVTRFDQAWALLGVRSQVSIFEQMLAEAPDAAVADWLLARPVAALEYAQEWPQILAAYRWLEGARGSGRYLRQIDVPGVDTKVVESHRTVLAGLLGVSRNATSFLEDLGLRTKPQYVRFRMAGSVAPASVTELSVRPEELDGLGMSVTTAVIVENEITYLTLPVPDAGVLIWGKGFNVARLGRWDALREADVHYWGDLDTHGFAILHRLRTHLPPVRSFLMDLETLHAHPRRWGQESSPTSATLDRLTAAEAAVYDDLVSDRYGERVRLEQERIDWAWVLERLPYRPDEA

SEQ ID NO: 32339 - protein, 478 aa, Clostridium stercorarium subsp. stercorarium DSM 8532; identical to SEQ ID NO: 32189

SEQ ID NO: 32340 - protein, 217 aa, Clostridium stercorarium subsp. stercorarium DSM 8532
MKMGEIKLNLSIKEENMPLFKRCVRKLLGSTFIVGDKDENLYAFISRESNRQDVSDYLRMIGFDVLVDEKVRIAMLKPYEGDEETPGLKRSNVVVFTSEQYHLLLVLWEAYLESLGYSEQNIVFLGDLIDKMKAYNVDMDGSKLFAALKIFKKYDLIDFDPNNKSEDAIITLYPSLQFGWNIEQFRTVVEEYMKENQYEVSPEDENIDFESGEDDTE

SEQ ID NO: 32341 - protein, 1095 aa, Clostridium stercorarium subsp. stercorarium DSM 8532; identical to SEQ ID NO: 32191

SEQ ID NO: 32342 - protein, 406 aa, Clostridium stercorarium subsp. stercorarium DSM 8532; identical to SEQ ID NO: 32192

SEQ ID NO: 32343 - protein, 471 aa, Clostridium termitidis CT1112
MQIFDIVNEDLFRPLTGINKRRYVDVLSLLWDKCKRMPMYAVEKSTIIDEVESYFIGLGERILLDESDNMDDAELAYSSDCRVIATVFLRKLKSTGWLDEKEGEYENESSLAINYKIIPIISAFIEIVNPKFVTYKGKLFKIFTLLNSIEKHSSPYEAVLKEVSEDMVDLNLSLRQLAASIEEHIDVLTKGKTPEEVLKFFEKYEEKIVIGAYHRFKTNDNLFYYRTSLYEQLDLCETDYLNMLVKDFSVVEQKDEIDSVFEVKRLISKMREDVQEMESIMRVIDNRHILYRTRAVQRAQFLLLSDGSVKGKINGLLQYYATQIRDKDELFEYDETTANSMFQIYGQNYYSYESLATPSSRKKPTEIELMTSIEALDAKIVEGEQNKLLEYAKNALTSENVNSYAKEILHNKKAVSAGSIFRQDESCLVKIIGLFTYSQAYDRTFDIITKDNYVVHAGVKFKDFIIEERKK

SEQ ID NO: 32344 - protein, 193 aa, Clostridium termitidis CT1112
MAGDIRQEIANYLLNNCFIIGNVDATREKYYYIINHEEAFREVFQPLGYSVVIHRNLRVVQLVNSLGAGRLILRKYESIILLILRLIYIQKRESLSTNEAMVTASVEEIKNEYDKLNLPRKLDKKLLEDSLVNIKKYNLAMPLDKLNDTDAKIQIYPSVMLAMPDSGITNAYDATKEFLLKYKNSRDSEEDKV

SEQ ID NO: 32345 - protein, 402 aa, Clostridium termitidis CT1112
MRDYYKLILNGFIEIYERRELYINRQENVRVVQVVPEKEFKEYTDRYNHESYREINAAIEKIVREGLAEAVCNASGKYLKIKLVASKIDEIYEILKKKPIPLLCEKMRKTLLKVDFHGNKLIMDFCKDQWALMEECKDIPYGIGYDNEQLAKVVRTLQAIMDLKQETYVRNFSTALYRDSKEFQKNMRNTIQSILYDYSDIVVEKERVLEMYNLFDNPTYVMIKGNAVIEIGTTKIILSEIDGGIAIPNAALKNIINCKICTDKVITVENLTTFHDTDEKKGVTIYLGGFHNETKQRLLELIYLQNGEVKYFHKGDLDVYGFAILENLKEKTGIPFEPLEMDIETLKKFYQCGLYKKLTSADKRAMKLNNLIKYKDVFDFMILHDCKVEQESVKALMLICKE

SEQ ID NO: 32346 - protein, 480 aa, Desulfotignum phosphitoxidans DSM 13687
MDVDYDTLQALRKTHPAWKLLVADHSPLIAAFLQHTFIVPNQRRLSRADLASALEDLLFTLRETQGKDAFPRSAQAYLDDWAGEDKGWLRKFYPQGSDEVHYDLMPAAEKALSWLESLIQRPFVGTESRLMTIFDLLRQMVEGTEKDVQVRIQELEKRKAAVENELALVRSGRVDILDDTAVRDRFLQVSQTARELLGDFREVEYNFRRLDRKIREQITLWEGSKAQLLADFFGERDMIAESDQGKSFTAFWDLLMSPARQEELTGMLEKVFDLAAVKALSPDRRLKRVHYDWLSAGEHTQRTVAKLSGQLRRYLDDQAFLENKRIMQVIQQIEARAVKLRDQMPQGSIMEMDEASPDIHLPMERPLYKIPVKPRITDTVTLGDGSDIPADMLHDIVFVDRLTLKQRIRTALQTRDQVTLAQILFDHPLEKGLAELVTYLTLAAEDDNAWFDDTLTHRAVWTDAGGIRRQATFNAVIFSR

SEQ ID NO: 32347 - protein, 229 aa, Desulfotignum phosphitoxidans DSM 13687
MDITQPYPSDISRPLVALMKGVVFRDNDPALWHLLEESQMAVRDYVRVMGLDLMLDTAEGYAWLATREPEQGEDPLPRLVGRRQLSYPVSLIIALLRKKMAEQDAAGEDPRLILSVEEITDMVRVFLPASGNEAKMMDRINTHLNKIADLGFIRRLKGEKDKIEVIRILKAFVDAQWLSELEDRLKEYQAHLEDGNDSGSADVSHTDPSGGSDMDGNIDSTPTGDRGGG

SEQ ID NO: 32348 - protein, 1125 aa, Desulfotignum phosphitoxidans DSM 13687
MEQQLLDFASDDALAGFRLHTLEVFNWGTFHKQVWRLDLDSRNSLLTGDIGSGKSTLVDAVTTLVVPAHRVAYNKAAGADTKERSLRSYVLGYYKSERSTTGHAAKSVSLRDHNSFSVILGVFKNAGYLQKVTLAQVFWIKDAQAPPERFYVVADQALSITGHFSGFGTDIGQLKKRLKKMKDVAVFDTFPKYGAAFRRRFGIDNEQALALFHQTVSMKSVGNLTDFVREHMLEPFDVTPRIDALLHHFDDLNRAHAAVLKAKQQIERLTPLVADCDTHTQLEKEAEQLRECREALAPFFAVHKKKLLKKRMANLTDEHARLTRKATALESEHKEQMARRDDIRQAIAENGGDRLERLRADIKRFADQKYKRQAQAQRYADLAQDLSFKPVHTRTDFDDNAAAIQDRQQTLKKKQADFLNRRTELSMQFRDFKTDHDELTKELASLSARKSNIHARQISIRQTLCRHLDMDETDLPFAGELIQVREDQAPWEGAAERLLHNFALSLLVPESHYRAVAAWVNNTFLQARLVYYLVRPVPSNKSVDLHPDSLVKKLAVKPNNKCYDWLEQELAARFNYACCTDMQRFQQEPWAMTEKGQIKSGGRRHEKDDRRDLTDRSHYVLGWTNEAKIRTLKKQHRHLEEQMQTTGIDISRLESRQNTLEEQLSNLIRLGEFQDFSDLDWHASAEAILHLEAEKQELETRSDILQTLGMQLEALETEINDTETALKQARDDLAGNREKQNQTRHMADTCEQDLAGWAAMDPDQATALYRHLESLRINELPAHTLTIESCSNKEREMRELLQNRINNLDKRIATLAARIIRAMHGYRRDYQLETREVDDAVSSGPEYRAMLDQLRSDNLPEFEKRFKELLNENTIREVANFQSQLLREKETIKERIERINRSLSDIEYNPGRYIVLEAELTPDMEIRDFGQQLRACTEGALTGSEEDHYSEAKFLQVRRVIERFRGREGTVDLDRRWTKKVTDVRNWFVFAASERWKQDHTEYEHYTDSGGKSGGQKEKLAYTVLAASLAYQFGLEWGAIKSRTFRFVAIDEAFGRGSDDSTRYSLELFKKLNLQLLIVTPLQKIHIIEPYVSSVGLVYCPDGTESLLRNMSVAEYRDCRERTET

SEQ ID NO: 32349 - protein, 402 aa, Desulfotignum phosphitoxidans DSM 13687
MTAAWTRIQDLKDRLEKKWRKGIFLAQMITPENFTPLRIPLKHPTARELAHDFAAARDWVAHWAFHESAPGRAGFDIEWHAFTHRSLGKNRLPAAVIFPTLADVVSFLGKTRQTERFHTLFHIITDRFPPLAGLLLDHPLTVLQHDKVWEKLLAILDFMTGHPLPGIYIRQLEISGVDTKFIETHKAWLVKLLTCVLPETAVDDTAKGPAAFENRFGFLSRPARVRFRCLDPDLSIKGLSDLEIPAHDFACLPVQPDTVFIVENDITALSFPFFPNALVIFGRGYSLSVLSEARWLTNKPVWYWGDLDTHGFAMIDMIRHYFPRTRSFLMDEATLLSHKPLWGTEPSPVSRDLPLLTPDEARVYDALRNHTHTPNLRLEQERISFTLVRRVVEDIRMNRYFR

SEQ ID NO: 32350 - protein, 485 aa, Leptospira noguchii str. Cascata
MDYNLLQRLFRSSSIRLLKKDNAPFIIYFLEKYFRGSARIFVPFEELKILLHHELENFRELEETFLSRTAEVYIREWVSENFLSRRIRSLEGSEEIILEPSSELEKVFSWMDDLRSLENKESIGTETRFFSVLNKLKEIVEESVSDPKEKIRQLESKKDELDDQIKKLTEGKEIITFASERIRGQYLYARKEAIGLLSDFRQVEGNFTEITKFIHKKYLEVVQKGEILQFALDGDEELLQSEQGKSFQAFWDFLRSEQSQENFESILDSLYSLKDILVLDDRKFFRNFKRNLREAGSRINAVVSRMSEQLKKSLVERTLRDNRRSKAIISEIKHLVLEKKFDLSEENFYSMEEIFVHLPMDRPLWKGDSADTPRSIQISGPDDEMISLDFLDSIRGINFEIYEQRIQTLLRSFPEVSLEKVLEEFPENIGFESIVAYVFIASKGEYHSLDDSESFLFYPAFNFTQKETQSVYRVPKATYRVGKDG

SEQ ID NO: 32351 - protein, 187 aa, Leptospira noguchii str. Cascata; identical to SEQ ID NO: 31350

SEQ ID NO: 32352 - protein, 1118 aa, Leptospira noguchii str. Cascata
MTDLFSSGEITANTGYRLKSLEILNWGTFNGKIWKLNSQGETFLLTGANGSGKSTLVDAILTLLVPSTKRNYNLASGLESKKRDRSEKSYVEGHYGRASSGSEGILKIRGKQEECYSVLSAVFNAKGKFPIIRIAQIFWFESSDLKRIYLISDDSLDFEKDLVLRNRTIKELRSDLKNSGARLYDNFKAYGVDFRKMVGLGSEKAIDLFNQIVAIKSLGVLNEFVREHMLEAKDKRFRIEELDRNFFDLNETYETILSAREQLRLLEPIEKKAFEYRDWNSKVEGVQELILFAPEYFTQKKYELCKKKEQDYTLDLFRVQDHLKELNSLTESLKKEERELYYSLENNDTRKRISDLKRKFEEIQTNLNKRRSERKKYSEYLLKLDLENVLIEDSFYSNFRKAGEKLQKSDSTRDSIRDRLTDLTVKRKESKVEFDSVYSELEHLKKSRDNLPRIVSSMREKISQGLGVSEKKFPFVCELIRVKDSEKEWTGALERLLHNFGLRMLVDEEDYKALSSYVNSSHLGGKIVFSRMLTQGGPILQPKDKDEVFYKLEIKPSLSKFQKEWLETQILKEFGHICGDLQRLQKEEKALTKEGLIKSGKIRHEKDDRKNINDARDYILGWNNREKISALESEFMRLGKVIDKIESEIKKVEEEQKQNDLFRDDLKSFLRFEQFSQIDDQSLEEPLEQTRKEIQDLEVLSEEYGKLKEQYESAKVRLSEAEGKEKETTKELTLLEERFSNLKKEMETLNSRIKEFDPNRRTRLEPILNERLGQVIFNLDSILEKERKFLEVLIKERDDFIEKRDSIGEELNKGMDRYVKKFREEADREELSVSILNAEAFAELTERIRKDRLPEFQDKFRNMMSDKVAKQILEFKAELEDDVSEIKDRIDELNESLRYLDYSKGKSYIQIRYFETKDREIIGSTGFKELLRNSIPDMGDSSNNEENFSRIRELLGKLKGENGSDRWSRLVTDSRNWLDFQAAEFQRDTDTIIQVYDSSAGKSGGQTVKLAYTILASAIAYQFKIRELNSFRFVVIDEMFNNLDNENSRYAMDLFRQLGLQLLVVTPMDKITVVEPYVQSVHFVKNNSDGNDSRVYLITKEKLDSEKIENTDRKVGNL

SEQ ID NO: 32353 - protein, 389 aa, Leptospira noguchii str. Cascata
MISLEEIRKKCLLYYHKVLNRAVLGEKSFPWEISTGKIDPEEIIHNPSLLEKIKKESKEKKGFGFLLVSFQKETRKFGTQTLPSKIRFEDEVDFLRFLHKEQEFSFYKSDCDMILFKIPALMEWILKNPFLVIQESGNWEDLLSVCSYFLKNPRPGLYIRELPISVPTKFIEENKKVLRNLLDFLVPENIDYEGKDFESRFGLKKPEALVRFRILDPIIAEKSSGGLFDISVPVDEFRNLHLFGCKRIFILENKTNFSNIDHFLTFPKLSGSIAIFGQGYGLGILKDCVWLNKMEILYWGDIDVQGFEILSLLREQYSQTKSFLMDKETFLKFQNFAVDGKYSKFSKLDYLTESEKETWEYLRSLGSKNRLEQERIPQEYIEKTLHSQF

SEQ ID NO: 32354 - protein, 480 aa, Leptospira noguchii str. Hook
MQRLFRSSSIRLLKKDNAPFIIYFLEKYFRGSARIFVPFEELKILLHHELENFRELEETFLSRTAEVYIGEWVSENFLSRRIRSLEGSEEIILEPSSELEKVFSWMDDLRSLENKESIGTETRFFSVLNKLKEIVEESVSDPKEKIRQLESKRDELDDQIKKLTEGKEIITFASERIRGQYLYARKEAIGLLSDFRQVEGNFTEITKFIHKKYLEVVQKGEILQFALDGDEELLQSEQGKSFQAFWDFLRSEQSQENFESILDSLYSLKDILVLDDRKFFRNFKRNLREAGSRINTVVSRMSEQLKKSLVERTLRDNRRSKAIISEIKHLVLERKFDLSEENFYSMEEIFVHLPMDRPLWKGDSADTPRSIQISGPDDEMISLDFLDSIRGINFEIYEQRIQTLLRSFPEVSLEKVLEEFPENNGFESIVAYVFIASKGEYHSLDDSESFLFYPAFNFTQKETQSVYRVPKATYRVGKDG

SEQ ID NO: 32355 - protein, 187 aa, Leptospira noguchii str. Hook; identical to SEQ ID NO: 31350

SEQ ID NO: 32356 - protein, 1118 aa, Leptospira noguchii str. Hook
MTDLFSSGEITANTGYRLKSLEILNWGTFNGKIWKLNSQGETFLLTGANGSGKSTLVDAILTLLVPSTKRNYNLASGLESKKRDRSEKSYVEGHYGRASSGSEGILKIRGKQEECYSVLSAVFNAKGKFPIIRIAQIFWFESSDLKRIYLISDDSLDFEKDLVLRNRTIKELRSDLKNSGARLYDNFKAYGVDFRKMVGLGSEKAIDLFNQIVAIKSLGVLNEFVREHMLEAKDKRFRIEELDRNFFDLNETYETILSAREQLRLLEPIEKKAFEYRDWNSKVEGVQELILFAPEYFTQKKYELCKKKEQDYTLDLFRVQDHLKELNSLTESLKKEERELYYSLENNDTRKRISDLKRKFEEIQTNLNKRRSERKKYSEYLLKLDLENVLIEDSFYSNFRKAGEKLQKSDSTRDSIRDRLTDLTVKRKESKVEFDSVYSELEHLKKSRDNLPRIVSSMREKISQGLGVSEKKFPFVCELIRVKDSEKEWTGALERLLHNFGLRMLVDEEDYKALSSYVNSSHLGGKIVFSRMLTQGGPILQPKDKDEVFYKLEIKPSLSKFQKEWLETQILKEFGHICGDLQRLQKEEKALTKEGLIKSGKIRHEKDDRKNINDARDYILGWNNREKISALESEFMRLGKVIDKIESEIKKVEEEQKQNDLFRDDLKSFLRFEQFSQIDDQSLEEPLEQTRKEIQDLEVLSEEYGKLKEQYESAKVRLSEAEGKEKETTKELTLLEERFSNLKKEMETLNSRIKEFDPNRRTRLEPILNERLGQVIFNLDSILEKERKFLEVLIKERDDFIEKRDSIGEELNKGMDRYVKKFREEADREELSVSILNAEAFAELTERIRKDRLPEFQDKFRNMMSDKVAKQILEFKAELEDDVSEIKDRIDELNESLRYLDYSKGKSYIQIRYFETKDREIIGSTGFKELLRNSIPDMGDSSNNEENFSRIRELLGKLKGENGSDRWSRLVTDSRNWLDFQAAEFQRDTDTIIQVYDSSAGKSGGQTVKLAYTILASAIAYQFKIRELNSFRFVVIDEMFNNLDNENSRYAMDLFRQLGLQLLVVTPMDKITVVEPYVQSVHFVKNNSDGNDSRVYLITKEKLNSEKIENTDRKVGNL

SEQ ID NO: 32357 - protein, 389 aa, Leptospira noguchii str. Hook
MISLEEIRKKCLLYYHKVLNRAVLGEKSFPWEISTGKIDPEEIIHNPSLLEKIKKESKEKKGFGFLLVSFQKETRKFGTQTLPSKIRFEDEIDFLRFLHKEQEFSFYKSDCDMILFKIPALMEWILKNPFLVIQESGNWEDLLSVCSYFLKNPRPGLYIRELPISVPTKFIEENKKVLRNLLDFLVPENIDYEGKDFESRFGLKKPEALVRFRILDPIIAEKSSGGLFDISVPVDEFRNLHLFGCKRIFILENKINFSNIDHFLTFPKLSGSIAIFGQGYGLGILKDCVWLNKMEILYWGDIDVQGFEILSLLREQYPKTKSFLMDKETFLKFQNFAVDGKYSKFSKLDYLTESEKETWEYLRSLGSKNRLEQERIPQEYIEKTLHSQF

SEQ ID NO: 32358 - protein, 486 aa, Thalassolituus oleivorans MIL-1
MFFEQERGQFFRPMTGKYRAQIMECLRELYQRLYSSSSADYGQAIQRDTVVEVFQEALVRAPVLADGSEEADDTPDGRFRNSREQAGWVLNQLLEHGWLEKQVDEATLQSTFAFTRYGRLFTEPFITESRSMARTRHRNTRNTRNSLESFLERGDIYDLLDAYEYSERIISDFTDVIAELEERKRDLVREMEDQLLIQRASEAFFDFMENRFQPDLSVRLSADNVEKHRDTIQKIINAIRKKDVAFKAKTERRLRELLPELGQEGQSVFWTLLDGIEMRLRNASDIMLPALRRALQSFTKRADIIIRQMSYLASQSKNDVLTVCKHLASKTEKEQNSILERAGELMAVPQVRLVDPGQVRMAAPRHRRHIEAHLDDGQGDFDIEARRDIYVQQVLDQAFLVNQQALKNYMQRQLSTGKPVSTRDMPIESAQDFLAVAHAIGLGAADGLSSEFTFRIDYDESPAREQGDVYFTKKDHFTFELVQKES

SEQ ID NO: 32359 - protein, 312 aa, Thalassolituus oleivorans MIL-1
MLQSIEKELEKEGLSQRDYSELLIRLLDYGVICRDESQIEQTLYDRYVRLEELVGEYLSLIGVRIQHDRRFQFVRLFPPGSQVPGMDEDQEFGGQQSFRTRLNQAEVALTLVLRAQYDKALREGAVDDQGCVMTSLEALSIAMKNLLKRNLPDNLTDRKQLFRRLKQLRLVQIANEETLGDGDMWLRIRPMIMSYVSDQVLTELMDGEDDSDDVEIAALDTTPVPEKEAEVAAELTDSEDGDAVETVEETTEDVVVADAESEAEITAEAADSDPAEEADLAENTEQAAAVKADEDTNNEPQRSHQPASLFGE

SEQ ID NO: 32360 - protein, 1220 aa, Thalassolituus oleivorans MIL-1
MFLKKFIYVNWGNIPATEFEFGPINLLSGGNGSGKTTAADAIQTIMTAAHDTLFHYNPGQDEATQRGRGKNVRTLASYVLGCDDGSYARPGGAVGYLAAVFHPTANSADGTGGESGEPFTAIIGVSASIDRAGSQPVARQNDLQFFIIAGEQLTLNDFLLDQADGQRNVVELNKLGKNLARRIEPHNIEKYDTKKQYLRRLYGALRGRNDAVPEREAMNAARTFSRFMAYKPVKSINGFVANEILEAKDMGDAIRSVSDLMKTIYAMESDANTLAETIAILNSTKGATGRYIDQWIDYNVLEYTAARSRFLHDQRSYLSAKEQQQNFREQLNKTQKERDVAQDRRKQLREQLITMEARRRGIDALQDKDAAESALADGKKKLQQQAIPLLEQEQLLQASLRATELVHGALQKTSVAAEIPSLGSKRILDQAKQVLAIKDQDAVDFRKLLGKDWVDLSPLEAHLDEAREQQSLVNQWRDRFHNVDLESSGISLRDQIARNVDRREQKFQQVQARMNQKQGDIDSLEARQLNYPGFVRQALEAILRECPQADPRVLADYVEVTDPAWQSAIEGYIGGARFSIIVEAAFEAEAAHILRSIPGGSRARVIQGQKAKKDCERLKLPSNSILNVMSFEHATARYYLEASYGTVEQVEDLHTLRLTRRGVTKEGLGSGAYSIYRCDLDDTELVFGLGARERALSAKRGELETLAEQANEANHQFRQAQQLLDAVNLLRHVTFADQMQGMLDTQYQMDQAEKALNQVDVSDFSNMEDEFTGLKEKADELDAVIKELDGELGRLQQMLNDSEKFCKNLSDMQEKTSEIADKKEENLRAIVSVWPDFDSEARLAAADAEANDSPAEAIENMRKSVSQELNATAYEIERNINEHNLRCQTADAIVYAPDYREEHSAHFFKGVCGLQREIERVHNRLKNNILVEKQDKLAQLRESFNNVFITNLCHSIYQAINDGKRILEDLNKELAHHQFGADRETYWFDWEWVPEYKEYWQFFDEVIKNPSLGDGATLFTADISAASKKVRDHLMAMLLDDDEQKAMRELERISDYRNYRAYEIYKQPANKEPIALSQYGTGSGGQLETPAYIIRSAAITSAFRFNEGDTHLRVVLVDEAFSKMDETRSKEVINYLTESLGLQLLFIMPTSKSGPFMDLVSNQFVFSKVPLVGGQCKGELQTRVLVDRQECNQDKVKELWANHRRTIRHQAALDFMEEFA

SEQ ID NO: 32361 - protein, 514 aa, Clostridium sp. ASF502
MNLISKIPKEFYKLFASKYTEYYQRFLIAIYEESGRSSSLLGLTERECRFVMNEQIAAETLDWSEEQFDEEGELLTRSNMASICLKHLEDWGWLRRDYDEVLDSYVVSFPEYSQIFVELFGRLYSEDSTRERESVLAVYSYLYTYGSDREKNNEILKSALQTSRSLLQMLSNMQEGMRGYFDELSRQRSFLGIQEVLVKEMNNNESRKYAILTTTDSFYRYKEAVKELIDRNLSENEVRKQELLSRQRELKLRAELEGGEHIGTAGKTQIEITDHGNQATPDSRTHPAISRSPEEKNAARDYGIEYRRLEHAVHLADEAMNIICRIEREFDAIERRYNKLIEQKTLFASRAAARIRYILMEGALEEDPAAALANLLSKSKNSAEILEKLSERMHLTEPFRAVTGQSMFRRRNTEKTAFTPQAVVQHTDQQEELEEFVLKPLYSRQEIAEFRRKNERNGTFTVTRDTVRSAEDLEKLFFVWQDAVEIADDARRIEIGQELENRDGCRFSELTIHE

SEQ ID NO: 32362 - protein, 211 aa, Clostridium sp. ASF502
MITYMEELSAAEAENLKKTISRLFRQTCILQLRYDPVTLTPRDNPDYETCIRHRHFIENYLAVLGCEMEHDPQEHIFRLKGEGTETERFSLTTTRIILLVRMIYRDKILGEGLGATVTNLGEIREYGANTGLLDRKLTAAEWRDALYMMSRHQMIELPGAVRDMKDETPIYLYSTLLLYVSAADMNELIEEYREEADDEAVQENLPADADQ

SEQ ID NO: 32363 - protein, 1128 aa, Clostridium sp. ASF502
MKQSKKIFRRMLINNWGGISHKIMEFHEYVNLFSGKSGSGKSTVMDAIQVILYGSVSAAFLNKAADDAKNKRSVLSYLRGAQKDGTSNRENVDFCSQIVLELEDTGSRVCTCIGAVFEVGSQDTELRKYHFFSHSGHLPKDGYLTEQGVPYTSAQMKKLIEARSRSEENRGRVDVNRMYPSREAYLGTLYDSIFGYLDPGRLMTMEKSAIALRMADGTGQFIKDYMFPKSKEDTVSAISRQLGAYREIKEKVDDLERRIEILDEVHHANQELVRIRADRLRAESVLRIVDLESCKTRLEAKQEDLEGISAKISELEERYKILDADKKEKTEALIEVKAELHSSDYGVKQKEMEELKNTISLLKGNARQWQEILQGLREWETDEEISGYISNPTLQCLEEVLEGGVSEHVLDKLRSGIQNGLEMIREEMADLSDSIRSTARELSEKKEMAEDLKHDRKPYRKALKSARAQLQSELSSQYGRTIHVEIFADLFDIVDEKWKEAIEGRLGRIKHSLVTEPQYALDAARIFRRMKRKEYEEIDLINTAAVKRDEPGAEEGTLYEAVQAGEPYADLCLKRYLGRICKCETVEDLHQVRDGVTPDGYSYSNYVFRHLREDDCRRYACIGTRVSKAKLKELEEEIYELEQRQIAYIQMREILGRAQKLEQLNQKTEQLLRLSKAAEELEHYLDKQEQLARELKNLEDGTLTAELKGQKEILEQGIAELARIQEQVNKERISREGDLRAAQKEYRDFQDRLSGLQEGFRADEQLLAEVRENLGVQTEAAYRRKQYNLCQRLAGQEEQSAEERILARNRFNREYPAYGFTGVEHENDVYDKLREDLKRDYEPQYQEEFENQYRLVYHCLRENVIATIHGEIKAAYRHRREINRMLSRIRFSDSTYQIDILPAENENGQFYEMLMAPELDSKVLDNDGFEGQLSIGEDAFFQKYEQQIWRLTEKFMPPRDGEAENRSRHHQEMERFADYRNYLTFSMYERVEDEQGNVKKNAVDEMAGRDSGGEGQNPKYVALLAGFAMLYMQQSSRDSKIRLVLLDEAFSKMDKERSEVCLRYARELELQLIVCVPDERLQSLIRNVDSVYGFRRYQNQITMMHIDKGNYLEMMEMGGRNAGESVTS

SEQ ID NO: 32364 - protein, 456 aa, Methylobacterium mesophilicum SR1.6/6
MLFAQLPDELFKPLASASRGFNAALLLHLHRRVLGAEPVRKAELLAEIGDFAAGWSDPEVGGDEPISADPAERRATLYRRLLETGWLIERRERYVPVVEFDPEARLLLEELSRLERGETRSYGGAVLEVLGGLESALSDPGSRSEALANAARAAAAFLSHVRGLAAGMRKVEERILREPDRAKTFRLFFEEFVERHLISDYRTLHTRFNPFRFRASVVREAGRALRDALTVRALAEGLIREGRSPDLDAAQRAVRADLAQILSVFEGLDNHLDAVDAVVARLERRIGAALHVMDRPDPSGVERAAAMLRAIGGSDIAPDVPADVSQLRPPIGHAHLQAPRARKAAIDVEPLPDLEDDPVVDAFAAAKAAFRRRTTVTPESMTAFVEARLGNALTLRGSQVVIAGVDDFIVFQRLREIDVLFDARLGARYAVTRLPERVANGWLDCPDFVVERRRGA

SEQ ID NO: 32365 - protein, 208 aa, Methylobacterium mesophilicum SR1.6/6
MLEGFRAIIDGDEPPPPGARAPEAEELSRALQVLLKGQVIYADTQGIGRSYELARHYAPFFTDYFACLGYAFTVSHRDQMVSLSPAADAPRHDIVSERLRKDETLVLLTLRLLYEEGLRDHRAGTDGIVECTTDEIVEKIRTVARNEPPEEGRLADILRLYAKRGGLRLGERDRVERVTPLSLLPGLAVLASDAWLERLRTWSEAAET

SEQ ID NO: 32366 - protein, 1145 aa, Methylobacterium mesophilicum SR1.6/6
MYVLTDIAISNWYLIRREQIRLRGAAALVGPTGAGKSTIFDAVGTVLAGNNASRLALNASASGRSARTVRDYCLGWISDPAEGGRPTRESCETVLALVFENPASGRVITVGLALAARAVEPKETVLSRFIAVGHRFEIADYARTAPGGSFTAPWTEIAADLRARAASFTEYRTSGERFTSDVLATLREGAPAPDPRHFLRSFANAVAFKPIFDTSAFVRAFVLDPEPLDVERVRLSIANWRRLLETIAELESRLARLRRLRDRYDAWSEAVLATATHELRAACAELRRRSLDLVAVRTRLREGADTLRIARERVAASRGHVREIDGEIAEKKALAASSAAEGRLAASTLGLSMLDRDRKELVARTADLVGLVGQMGKLQPVAPILRQASPQAARLAEACARAGLRREAPPEENLRADGPLAELVDGLARLPEFDEALERAAEDAALKARAQESEAERTAPRTGAGPAARLSSDTVAFRGELARKGIEAVPICELAEIVDPAWGPALEGLLGRAREALVVAPDRLNEALGVLQSGRDRFHRCILVKTTDTAKQRARRYDDGPLTVIETSDPHAEAFLGVRLGGYDLARDDAELARLARAVAPSGRTTAGMAYSVTRSVDLLMTRGHRGPTADGRKAHEAAVAEARRLRGEAAVLREAARTAAAIRARIARGLDDVEALRAELDGLDGRRRTLQTERADIEKRDTAGIAAEIAALTAERAGYLRELSEELEPKLDRLLADEAALRARLVTMREAARAALSGRRAALRQLMGGDAARVRLARAEPFDPTVIVEARRALAGLDAKAAGSRATAERGLARESAEAARSHGRIAERELAEACAAWRVENPLNAGDAPAIDGFAWVRREYEAVEGHELRRYRAQAERAEVEMRRLMTEDLLTRLADRFERVHARLEALNERLSARSFTGQIYAFEAAVDRRYAAVHALATETARSPEAAQALLAGEAEGPMAAALEEITALIAGDEDAGRLADYRNYFVYEIGMRDRAGNRTTMSARALRGSGGEAQAPFYVAIAASLASAYYPGDRPGDENPGLGLCLLDEAFSKLDVRNSQALVDLYRAWGLQLLIAAPEDKRTTLTEVMDTIVTVYKSPDLTSVRIEAEHPLEAARRALHAINPDQVGIEGFRQSDAAE

SEQ ID NO: 32367 - protein, 472 aa, Pseudomonas putida TRO1
MEPNIPPLFEHLPKELFRPLAAANNLRYWDVLCRLMAAMWGEGGRSPGEEAPKSLVLRTIESFLVADDPWEDMDSSLTVTGRAHLIFTSLHASGWLSQRRKGVVEQVTVRPVVARFFGHLVEFANQTPEFLGIRFHSIYVSLREVRDANAHGLYHEAARQAKQCMAHITNTSCRIQDLMGKLSAKETMGEFVRGFFEEYIENVFIADYSDLRTHNHPLQFRSQIIALVRQLQCDDQQRQGLIGWYAQMKTDDDFLRAELLYERDTHQLLRLREVEEHLQRLDEEVRDANQMAIALFEYKLRSPGNFDKLIARALNAVEILGEGHASLPGRSGFYHASEVGLSKPRVTPRVHEPTLVETYSPTTEELAMEALRQRMNANRHVTPLKLAEYVTRHVGSDLRVTSSQLSIESVIDLCCYQRLLLIASREACPPGKRRDDVHLQLVPGIRVEFVPEAMTRNAYMEHQEFMIHVRMP

SEQ ID NO: 32368 - protein, 200 aa, Pseudomonas putida TRO1
MVNWERLAEQSEVSYVSADFERAAYRLMVEQILYANDKFSRVAYHLIVKHLAAFREVMSLLGVHLIHNAHHAYVAAIPSHPVAEKMRLSETRLALVLRRIYDDRMQSAEIADGEAFVSLEELERAYKEWLKRELPERGELRELAQAMKRYGLVRVSEADDGQPYKIVIRPGIVDVLSEGALHQLAAHAPMKDEEAGDGLA

SEQ ID NO: 32369 - protein, 1141 aa, Pseudomonas putida TRO1
MVLLERVNLIQFFLYEARDVDIGRNTAFLGPNGTGKTALLDAIQVVMLAADGNRINFNAASDSKKKRSRSMRDYCLGSIVPGGSSYQRTSANTYVGLVFRNTITGVPFTAGVSLQAHIEDAKAEVNGYFILPGVELSAKQYLQTDGARETVMPWRAFQHVVADLCRLEANSTPYITPHNRDDFIRRLLIDHLAGPGDKPNSQAFRAAFSRSLKLNEDIVDLNETLRQHLIEPMPIRITEFRERLNEVRDMRDLIRRLRGRITQASEVADTYAQVLQARTSEANLTALKHVYATERSAEAVDAIQIKQEALEEALTRAQRELGRACAQAQLANAARDLALTALTSSPDFQQQAGHAGELLLLEKQFDEKQAQLRTQLHAMQRALSDASGLAEIASSRDLFDSGLEQLQSLEKRLESDDMPSSESLQRTLQAVSQAFEVLRRAMAETEGKAEKAANHLRDAEMASARAGQGLAKLSDNTTALLRILANAGIDATPICDLVSVADVAWQAAIESWLGRHVEALLIPEDRELEAIKVYRSAAADGVYRVKLALPSRIRDWHGYDTEPYAAQLVQGQNLLAVRYLQGALGRTILAESNEQLRVGVKALSKDGMVSSGAAVERQSLPKPSELRLGRKDVDAMRQQAEQALQIAQAQSRQHEEAVIRLRNGLQNLTPFANTETLQTSLESIFMAKVQANAHAAHLRERLARTQTAGLVELEARKQLADEAAHTANELVLRWTKDEASFVEQLKLLGEQLGVLTKQLEVESARERESRQHPLYNANEVDRHRKRSDERHGDDASAKVIALEQAIVTVNGVAGSKDREAWNLFANYLKDYNLQNTDICSNDWKGAYGFILEDQQRLVNLELVEQEEKAEEAYQAAVKVFRSDVAQALLAGFDRIEEQIAGLTSILENAPMFSNNERYEFKFKVVEEHRSLYEFLLRVRTHGTEDDLFGGPGEVPEEFRALVEGDSNSPLLNEASPLNDHRRFFSYDVEVYQMSESLGLLSRRFEQASGGEHRTPVYLIFGAALAACYGKSKDSLSGGGIMLLDEAFEKMDPQNIRATVQFLNALGLQLILAGPESDQAKLSSFLNIYYDMSRFGTRNVQMKKNVVHDAARELLQSDNYLLNPVLLQQEINRLKEEQNEPG

SEQ ID NO: 32370 - protein, 388 aa, Pseudomonas putida TRO1
MSLDDATLDRLLVRAERARLSGSTRTIRESFKSLTSPYWQLSLDERDRMHERMRAAASAGAIKLEWARQGGGDRPLDAVVLQDLDRLADHLQRPTSSAILGQAAALLAPWHGQGQVDELLACWAQLKQVRLLGPGSAADFADALRALDAMAGTKEDRIVRQLSTQLFGDSKRLEALSKHLDLLTAETLNAPARHWSEVFGAIGLIKEPQPFLVAGMGKLRLTDQDDCTVIRPYLGVANTVIQGYMGAPAWLLTIENLTTFHQAARELSKNPSGVIIYTAGMPSPSWGQAYVRILSSLEHKPPIYHWGDHDEGGFRIAARIAQFATQSGFRLQPWSMQASRWPDRGQEAKAEQHRAMKRNAARAGWAELADQLAPVLFEQEGQPLNLPT

SEQ ID NO: 32371 - protein, 488 aa, Acinetobacter parvus NIPH 1103
MNIQGIQATYRRLYHESPVWKLLRAENAPHILAFIADLFVEETEVPYGRARSLLDEFIKYSREQGLWQTENNAAYYLNSWIKAGWLREMDDMLSKTDASETVLRFCRNLDERHSSTTASHLRIVQDAVRDFVVAISDSIDDRVNLLEQKKAQIQQEIDDLHAGVVTQLNETEQRERIREIYQLASILTGDFRRVEDEIRQLDKELRIDMIEGNASRGEVLLALMQKEQLLAKSDAGSAFDGFCQLLQDQDRSTEFREQLRSILNHPVAQQLSEAQKKYLGQLMRELARESGRVFQVRRRTEEGLRAYIESGAALENRMIERLLSQLEKQAVNLTLEQQCDLKTEMQVDLAVGSVQISSPENFALKSPNEHMDTRGVQQQQNRKEPSNQMLHYLDSVQVREVAEKARHTLLKKGVMSIAHLTQEHPLQAGLEELVAYLRIAKAIKAPQLTEQNEQIQFQDQHGVNLQARIPTYYLSAELFPENLDELAL

SEQ ID NO: 32372 - protein, 261 aa, Acinetobacter parvus NIPH 1103
MQPQESSFFDRVRRPTSDENHDIQPQRIAEVEDELIEVEADQEVESDLQLSDELSSMPHEARRVLVYLMRQGTILAAENLKLFDVLCRYETVIRQHLAEVYIQLVLDAKQGVAYIINTENINDENDDTALSDDFPTLIRKRTLTLYDTLVLLILRKYYQERETAGEQKIIIDLERIQASLIPFIPITNHDSKDRKKLSGTLDKFSEKKILSVIRGEDGRYEITPIIRYVVNAEFLQSLLTEYEQLADKAAMHQCEQNKGKV

SEQ ID NO: 32373 - protein, 1125 aa, Acinetobacter parvus NIPH 1103
MQEMTLDTLFAQGQIRLAEISVFNWGSFHNLHTARIDPEGTLITGDNGAGKSTFIDGLMALLQPASKASFNVAAAQGDRSDRSLVTYMRGSYGSEHDGSTTKVKSKREKAVTTALRALYIAEDGSQITLIGLFWLGQGKNSLSDVNRLYMIASRNVLLTEVLEIFADGNTRQLKQHFNPKTDQRIHYFESDFKSYQDMYRKYLFMDNQNAPALLSRALGLKKIDDLTKLIRELVLEPSNLRETAQTAVNEFADLEANYKHLVDTREQVEHLERLPQCAEQIAELTQRLAQLHLEKQSIAAYFGELFAALWTEKLQQLEQELLQLKQQFQQIEQLEQDAETRQERRHEEYLQLGGHQIENLHKELGFITDKLKSLVIEASRYQDDARQLQLADDLTEHALLENQGIATEKLVNTEQDTKQRQDEFAEISGKYAQTQQQLKDIQEDIQEIEARPDSNIHDVHLLRLRDELKQHLSFDEHELMFIGELIDVKEHEKAWQGAIERALGGLKTTLLVPQHRYSMVTKWVNARNNKTHVRLQVVNLEQVEHVHFKDNGFLGKLLWREHAYRDWLKQHLQRFDLNCVSNTQILDHMPFSMTQQGLIHLERGRFEKKDQQRVDDRKAWCLGFSNTSRLSLLKHEYSQLEQQLKQLYQQIEQARQLLNNVNQQKGLWERLQRYQWDNINLPYWQQRQQQTQQDLQRLQQADSDAEQARQRWEDAKNELKQIRLQKGESQKIRGQLEQQHHDTQLKQQKAQQAAEHGISDDARQLLKQRIGEVKQLDDALQAEAERKLERLIGQANDQKTTVSNTANGIMVSFRSKDKWAHIPLQREWATGLAALEDYVAYLQELQQEGLPNLVEQFQQRLHKHTAQSLSVIQDKLNANREEIIDRIDMINQVLQRTEFKLGSYLRLGYKKEKYPHVHDFEQRLKQVLSGVNSEEYERRFKHLAELMAILDRASSSATANNQESLRLLDPRYQMSFHAEEVDAQTSEIRDVLESSSGISGGEKESFAGTIVAASLAYVLTPDGYDYPIYSTVFLDEAFSNTAEAVSRRVLKVFKALKIHVNLITPYKNLNLARESARSLLIAERDIDQHESHLCEVTWQEIDERMQQRKQTIATEAQKLGIELHG

SEQ ID NO: 32374 - protein, 404 aa, Acinetobacter parvus NIPH 1103
MAKTVAWGILPDDAIAQLRKKEWDHPRHLKQRLRHQRPFPIVLSLKAPTGQQAFADIDHFHTFFKTWKNFAYPDLVEWQKRQFKQLATQHVPVKLVIPTLDVMVELLGQQQRLKKISDKISFLLQQLFVEPHIEYALFSTLIEYLEQIEQYPEHDWQLLIHLIAQLKANMGAGHYLRALPLQHVDTKFLEKNLIFVEAICDVLHQGEIQATGGLLSWLNCLDHPKGWLMIKPLCAKVQQSLGGFPVFQLSTDVLTEFELPAQHIMVVENIQSGLALPMLENSIVVCGGGKNIKWLDAAWLQHKKVYYWGDLDSEGLNILSMVRQKIPDVIPLMMDEATVLQFQDKMVDEPDSVFSEPQYLTAEELSLFHALRKNCYKNKRLEQERISNDWINLYLTVESKLLKK

SEQ ID NO: 32375 - protein, 488 aa, Acinetobacter parvus DSM 16617 = CIP 108168
MNIQGIQATYRRLYHESPVWKLLRAENAPHILAFIADLFVEETEVPYGRARSLLDEFIKYSREQGLWQTENNAAYYLNSWIKAGWLREMDDMLSKTDASETVLRFCRNLDERHSSTTASHLRIVQDAVRDFVVAISDSIDDRVNLLEQKKAQIQQEIDDLHAGVVTQLNEAEQRERIREIYQLASILTGDFRRVEDEIRQLDKELRIDMIEGNASRGEVLLALMQKEQLLAKSDAGSAFDGFCQLLQDQDRSTEFREQLRSILNHPVAQQLSEAQKKYLGQLMRELARESGRVFQVRRRTEEGLRAYIESGAALENRMIERLLSQLEKQAVNLTLEQQCDLKTEMQVYLAVGSVQISSPENFALKSPNEHMDTRGVQQQQNRKEPSNQMLHYLDSVQVREVAEKARHTLLKKGVMSIAHLTQEHPLQAGLEELVAYLRIAKAIKAPQLTEQNEQIQFQDQHGVNLQARIPTYYLSAELFPENLDELAL

SEQ ID NO: 32376 - protein, 218 aa, Acinetobacter parvus DSM 16617 = CIP 108168
MQPQESSFFDRVRRPTSDENHDIQPQRIAEVEVEDELIEVEADQEVENDLQLSDELSSMPHEARRVLVYLMRQGTILAAENLKLFDVLCRYETVIRQHLAEVYIQLVLDAKQGVAYIINTENINDENDDTALSDDFPTLIRKRTLTLYDTLVLLILRKYYQERETAGEQKIIIDLERIQASLTPFIPITNHDSKDRKKLSGTLGSVENYRELITLAHN

SEQ ID NO: 32377 - protein, 1125 aa, Acinetobacter parvus DSM 16617 = CIP 108168
MQEMTLDTLFAQGQIRLAEISVFNWGSFHNLHTARIDPEGTLITGDNGAGKSTFIDGLMALLQPASKASFNVAAAQGDRSDRSLVTYMRGSYGSEHDGSTTKVKSKREKAVTTALRALYIAEDGSQITLIGLFWLGQGKNSLSDVNRLYMIASRNVLLTEVLEIFADGNTRQLKQHFNPKTDQRIHYFESDFKSYQDMYRKYLFMDNQNAPALLSRALGLKKIDDLTKLIRELVLEPSNLRETAQTAVNEFADLEANYKHLVDTREQVEHLERLPQCAEQIAELTQRLAQLHLEKQSIAAYFGELFAALWTEKLQQLEQELLQLKQQFQQIEQLEQDAETRQERRHEEYLQLGGHQIENLHKELGFITDKLKSLVIEASRYQDDARQLQLADDLTEHALLENQGIATEKLVNTEQDTKQRQDEFAEISGKYAQTQQQLKDIQEDIQEIEARPDSNIHDVHLLRLRDELKQHLSFDEHELMFIGELIDVKEHEKAWQGAIERALGGLKTTLLVPQHRYSMVTKWVNARNNKTHVRLQVVNLEQVEHVHFKDNGFLGKLLWREHAYRDWLKQHLQRFDLNCVSNTQILDHMPFSMTQQGLIHLERGRFEKKDQQRVDDRKAWCLGFSNTSRLSLLKHEYSQLEQQLKQLYQQIEQARQLLNNVNQQKGMWERLQRYQWDTINLPYWQQRQQQTQQDLQRLQQADSDAEQARQRWEDAKNELKQIRLQKGESQKIRGQLEQQHRDTQLKQQKAQQAAEQGISDDARQLLKQRIGEVKQLDDALQGKFEKELDELVGQANDQKAKASNTAIGIIGAFRGKDKWAHIPLQREWATGLAALEDYVAYLQELQQEGLPNLVEQFQQRLHKHTAQSLSVIQDKLNANREEIIDRIDMINQVLQRTEFKLGSYLRLGYKKEKYPHVHDFEQRLKQVLSGVNSEEYERRFKHLAELMAILDRASSSATANNQESLRLLDPRYQMSFHAEEVDAQTSEIRDVLESSSGKSGGEKESFAGTIVAASLAYVLTPDGYDYPIYSTVFLDEAFSNTAEAVSRRVLKVFKALKIHVNLITPYKNLNLARESARSLLIAERDIDQHESHLCEVTWQEIDERMQQRKQTIAIEAQQLGIELHG

SEQ ID NO: 32378 - protein, 404 aa, Acinetobacter parvus DSM 16617 = CIP 108168
MAKTVAWGILPDDAIAQLRKKEWDHPRHLKQRLRHQRPFPIVLSLKAPTGQQAFADMDHFHTFFKTWKNFGYPDLVEWQQRQFKQLATQHVPVKLVIPTLDVMVELLGQQQRFKKISDKISFLLQQLFVEPHIEYALFSTLIEYLEQIEQYPEHDWQLLIHLIAQLKANMGAGHYLRALPLQHVDTKFLEKNLIFVEAICDVLHQGEIQATGGLLSWLNCLDHPKGWLMIKPLCAKVQQSLGGFPVFQLSTDVLTEFELPAQHIIVVENIQSGLALPMLENSIVVCGGGKNIKWLDAAWLQHKKVYYWGDLDSEGLNILSMVRQKIPDVIPLMMDEATVLQFQDKMVDEPDSVFSEPQYLTAEELSLFHALRKNCYKNKRLEQERISNDWINLYLTVESKLLKK

SEQ ID NO: 32379 - protein, 261 aa, Acinetobacter seifertii
MQPQKSSFFDRVRRPSSDENHDIQSQCIAEVKDEFTGGEVDQELENDPQASDELSSMSHEARRVLVYLMRQGTILAAENLKLFDVLCRYETAIRQHLAEVYIQLILDARQGVAYIINVEGIGNENDNSPLSDDFPTLIRKRTLTLYDTLVLLILRKYYQERETAGEQKIIIDLERIQGSLIPFIPITNHESKDIKKLSGTLDKFSEKKILSVIRGEEGRYEITPIIRYVVNAEFLQSLLSEYKQLADKTALHQSEQNKGKV

SEQ ID NO: 32380 - protein, 1028 aa, Acinetobacter seifertii
MQEMTLDTLFAQGQIRLAEISVFNWGSFHNLHTARIDPEGTLITGDNGAGKSTFIDGLMALLQPANKASFNVAAAQGDSSDRSLVTYMRGSYGSEHDGSSTKVKSKREKAVTTALRALYTAEDGSQITLIGLFWIGQGKNSLSDVNRLYMIASRNVLLTEVLDIFADGNTRQLKQHFNPKTDQRIHYFDNDFKSYQDMYRKYLFMDNQNAPALLARALGLKKIDDLTKLIRELVLEPSNLRETAQTAVNEFADLEANYKHLVDTREQVEHLQRLPQCAEQIAELTQHLAQLHLEKQSINAYLGELFAALWTEKLQQLEQELLQLNQQFQQIEQQEQDAETRQERCHEEYLQLGGNQIENLRKELGFIADKLKSLVLEASRYQDDARQLQLSDDLTEHRLLENHEIATEKLVNIEQNTKQRQDEFAEVSGKYAQTQQQLKDIQEDIQEIEARPDSNIHDVHLLRLRDELKQHLSFDEHELMFIGELIDVKDCEKAWQGAIERALGGLKTTLLVPQDRYSMVTKWVNARNNKTHVRLQVVNTEQLGHVPFKDNGFLGKLLWREHAYRDWLKQHLQRFDLNCVSDTQTLDHTPFSMTQQGLIHLERGRFEKKDQQRIDERKAWCLGFSNTSRLNLLKHEYSQLEQQLKQQYQQIEQARQLLNNINQQKGLWERLQRYQWDAINLPYWQQRQQQTHQDLQRLQQTDSDAEQAHQRWEAAKNELKQIRLQKGELQKIRGQLEQQHGDIQLKQQKAQQAAEQVMNDDARQLLKQRIGEVKQLDDALQAEIERKLERLIGQTNDQKTTISNTANGIMVSFRSKDKWTHIPLQREWATGLVALDDYVAYLQELQQEGLPNLVEQFQQRLHKHTTQSLSVIQDKLNVNREEIIDRIDMINQVLQRTEFKLGSYLRLGYKKEKYPHVQDFEQRLKQVLSGVNSEEYERRFKQLAELMAILDKASSSATANNQESLRLLDPRYQMSFHAEEVDAQTGVIRDVLESSSGKSGGEKESFAGTIVAASLAYVLTPDGYDYPI

SEQ ID NO: 32381 - protein, 400 aa, Acinetobacter seifertii
MARTAAWGLLPDDAIAQLRKKEWDHQRHLKQRLRHQRPFPIVLSLKAPTGQQAMSNLDHFHTFFKAWKNFVYPDLVEWQQRQFKQLATQQVPVKLIIPTLEVMVDVLGQQQRFKKISDKISYLLLQPFVQPQVEYALFCTLIEYLELLEQYREADWQLLIQLISQLKANMGAGNYLRALPLQHVDTKFLERNVLLVEAICDVLYHGEVQAAGGLLNWLNCLDHPKGWLMIKPLCTLVQQSLGGLPVFQLSTDVLIQFELPAQHIIVIENVQSGLALPVIENTIVVCGGGKNIKWLDALWLQNKQVYYWGDIDSEGLNILSMVRHKVPDVIPLMMNEATLLQFQDKMVDEPDSVFLEPKYLTDEELILFHQLRSKAYIHKRLEQERITNDWIRENLKRQIK

SEQ ID NO: 32382 - protein, 488 aa, Acinetobacter sp. CIP 102159; identical to SEQ ID NO: 32375

SEQ ID NO: 32383 - protein, 265 aa, Acinetobacter sp. CIP 102159
MQPQESSFFDRVRRPTSNENHDIQPQRIAEVEVEVEDELIEVEADQEVENDLQLSDELSGMPHEARRVLVYLMRQGTILAAENLKLFDVLCRYETVIRQHLAEVYIQLVLDAKQGVAYIINTENINDENDDTALSDDFPTLIRKRTLTLYDTLVLLILRKYYQERETAGEQKIIIDLERIQASLIPFIPITNHDSKDRKKLSGTLDKFSEKKILSVIRGEDGRYEITPIIRYVVNAEFLQSLLTEYEQLADKAAMHQCEQNKGKV

SEQ ID NO: 32384 - protein, 1125 aa, Acinetobacter sp. CIP 102159
MQEMTLDTLFAQGQIRLAEISVFNWGSFHNLHTARIDPEGTLITGDNGAGKSTFIDGLMALLQPASKASFNVAAAQGDRSDRSLVTYMRGSYGSEHDGSTTKVKSKREKAVTTALRALYIAEDGSQITLIGLFWLGQGKNSLSDVNRLYMIASRNVLLTEVLEIFADGNTRQLKQHFNPKTDQRIHYFESDFKSYQDMYRKYLFMDNQNAPALLSRALGLKKIDDLTKLIRELVLEPSNLRETAQTAVNEFADLEANYKHLVDTREQVEHLERLPQCAEKIAELTQRLAQLHLEKQSIAAYFGELFAALWTEKLQQLEQELLQLKQQFQQIEQLEQDAETRQERRHEEYLQLGGHQIENLHKELGFITDKLKSLVIEASRYQDDARQLQLADDLTEHALLENQGIATEKLVNTEQDTKQRQDEFAEISGKYAQTQQQLKDIQEDIQEIEARPDSNIHDVHLLRLRDELKQHLSFDEHELMFIGELIDVKEHEKAWQGAIERALGGLKTTLLVPQHRYSMVTKWVNARNNKTHVRLQVVNLEQVEHVHFKDNGFLGKLLWREHAYRDWLKQHLQRFDLNCVSNTQILDHMPFSMTQQGLIHLERGRFEKKDQQRVDDRKAWCLGFSNTSRLSLLKHEYSQLEQQLKQLYQQIEQARQLLNNVNQQKGMWERLQRYQWDTINLPYWQQRQQQTQQDLQRLQQADSDAEQARQRWEDAKNELKQIRLQKGESQKIRGQLEQQHRDTQLKQQKAQQAAEQGISDDARQLLKQRIGEVKQLDDALQGKFEKELDELVGQANDQKAKASNTAIGIIGAFRGKDKWAHIPLQREWATGLAALEDYVAYLQELQQEGLPNLVEQFQQRLHKHTAQSLSVIQDKLNANREEIIDRIDMINQVLQRTEFKLGSYLRLGYKKEKYPHVHDFEQRLKQVLSGVNSEEYERRFKHLAELMAILDRASSSATANNQESLRLLDPRYQMSFHAEEVDAQTSEIRDVLESSSGKSGGEKESFAGTIVAASLAYVLTPDGYDYPIYSTVFLDEAFSNTAEAVSRRVLKVFKALKIHVNLITPYKNLNLARESARSLLIAERDIDQHESHLCEVTWQEIDERMQQRKQTIATEAQQLGIELHG

SEQ ID NO: 32385 - protein, 404 aa, Acinetobacter sp. CIP 102159
MAKTVAWGILPDDAIAQLRKKEWDHPRHLKQRLRHQRPFPIVLSLKAPTGQQAFADMDHFHTFFKTWKNFAYPDLVEWQQRQFKQLATQHVPVKLVIPTLDVMVELLGQQQRFKKISDKISFLLQQLFVEPHIEYALFSTLIEYLEQIEQYPEHDWQLLIHLIAQLKANMGAGHYLRALPLQHVDTKFLEKNLIFVEAICDVLHQGEIQATGGLLSWLNCLDHPKGWLMIKPLCAKVQQSLGGFPVFQLSTDVLTEFELPAQHIIVVENIQSGLALPMLENSIVVCGGGKNIKWLDAAWLQHKKVYYWGDLDSEGLNILSMVRQKIPDVIPLMMDEATVLQFQDKMVDEPDSVFSEPQYLTAEELSLFHALRKNCYKNKRLEQERISNDWINLYLTVESKLLKK

SEQ ID NO: 32386 - protein, 488 aa, Acinetobacter sp. CIP 102129
MNIQGIQATYRRLYHESPVWKLLRAENAPHILAFIADLFVEETEVPYGRARSLLDEFIKYSREQGLWQTENNAAYYLNSWIKAGWLREMDDMLSKTDASETVLRFCRNLDERHSSTTASHLRIVQDAVRDFVVAISDSIDDRVNLLEQKKAQIQQEIDDLHAGVVTQLNETEQRERIREIYQLASILTGDFRRVEDEIRQLDKELRIDMIEGNASRGEVLLALMQKEQLLAKSDAGSAFDGFCQLLQDQDRSTEFREQLRSILNHPVAQQLSEAQKKYLGQLIRELARESGRVFQVRRRTEEGLRAYIESGAALENRMIERLLSQLEKQAVNLTLEQQCDLKTEMQVYLAVGSVQISSPENFALKSPNEHMDTRGVQQQQNRKEPSNQMLHYLDSVQVREVAEKARHTLLKKGAMSIAHLTQEHPLQAGLEELVAYLRIAKAIKAPQLTEQNEQIQFQDQHGVNLQARIPTYYLSAELFPENLDELAL

SEQ ID NO: 32387 - protein, 263 aa, Acinetobacter sp. CIP 102129
MQPQESSFFDRVRRPTSDENHDIQPQRIAEVEVEDELIEVEADQEVESDLQLSDELSSMPHEARRVLVYLMRQGTILAAENLKLFDVLCRYETVIRQHLAEVYIQLVLDAKQGVAYIINTENINDENDDTALSDDFPTLIRKRTLTLYDTLVLLILRKYYQERETAGEQKIIIDLERIQASLIPFIPITNHDSKDRKKLSGTLDKFSEKKILSVIRGEDGRYEITPIIRYVVNAEFLQSLLTEYEQLADKAAMHQCEQNKGKV

SEQ ID NO: 32388 - protein, 1125 aa, Acinetobacter sp. CIP 102129
MQEMTLDTLFAQGQIRLAEISVFNWGSFHNLHTARIDPEGTLITGDNGAGKSTFIDGLMALLQPASKASFNVAAAQGDRSDRSLVTYMRGSYGSEHDGSTTKVKSKREKAVTTALRALYIAEDGSQITLIGLFWLGQGKNSLSDVNRLYMIASRNVLLTEVLEIFADGNTRQLKQHFNPKTDQRIHYFESDFKSYQDMYRKYLFMDNQNAPALLSRALGLKKIDDLTKLIRELVLEPSNLRETAQTAVNEFADLEANYKHLVDTREQVEHIERLPQCAEQIAELTQRLAQLHLEKQSIAAYFGELFAALWTEKLQQLEQELLQLKQQFQQIEQLEQDAETRQERRHEEYLQLGGHQIENLHKELGFITDKLKSLVIEASRYQDDARQLQLADDLTEHALLENQGIATEKLVNTEQDTKQRQDEFAEISGKYAQTQQQLKDIQEDIQEIEARPDSNIHDVHLLRLRDELKQHLSFDEHELMFIGELIDVKEHEKAWQGAIERALGGLKTTLLVPQDRYSMVTKWVNARNNKTHVRLQVVNLEQVEHVHFKDNGFLGKLLWREHAYRDWLKQHLQRFDLNCVSDIQILDHMPFSMTQQGLIHLERGRFEKKDQQRVDDRKAWCLGFSNTSRLSLLKHEYSQLEQQLKQLYQQIEQARQLLNNVNQQKGLWERLQRYQWDTINLPYWQQRQQQTQQDLQRLQQADSDAEQARQRWEDAKNELKQIRLQKGESQKIRGQLEQQHRDTQLKQQKAQQAAEQGISDDARQLLKQRIGEVKQLDDALQGKFEKELDELVGQANDQKAKASNTAIGIIGAFRGKDKWAHIPLQREWATGLAALEDYVAYLQELQQEGLPNLVEQFQQRLHKHTAQSLSVIQDKLNANREEIIDRIDMINQVLQRTEFKLGSYLRLGYKKEKYPHVHDFEQRLKQVLSGVNSEEYERRFKHLAELMAILDRASSSATANNQESLRLLDPRYQMSFHAEEVDAQTSEIRDVLESSSGKSGGEKESFAGTIVAASLAYVLTPDGYDYPIYSTVFLDEAFSNTAEAVSRRVLKVFKALKIHVNLITPYKNLNLARESARSLLIAERDIDQHESHLCEVTWQEIDERMQQRKQTIATEAQQLGIELHG

SEQ ID NO: 32389 - protein, 404 aa, Acinetobacter sp. CIP 102129
MAKTVAWGILPDDAIAQLRKKEWDNPRHLKQRLRHQRPFPIVLSLKAPTGQQAFADIDHFHTFFKTWKNFAYPDLVEWQQRQFKQLATQHVPVKLVIPTLDVMVELLGQQQRFKKISDKISFLLQQLFVEPHIEYALFSTLIEYLEQIEQYPEHDWQLLIHLIAQLKANMGAGHYLRALPLQHVDTKFLEKNLIFVEAICDVLHQGEIQATGGLLSWLNCLDHPKGWLMIKPLCAKVQQSLGGFPVFQLSTDVLTEFELPAQHIIVVENIQSGLALPMLENSIVVCGGGKNIKWLDAAWLQHKKVYYWGDLDSEGLNILSMVRQKIPDVIPLMMDEATVLQFQDKMVDEPDSVFSEPQYLTAEELSLFHALRKNCYKNKRLEQERISNDWINLYLTVESKLLKK

SEQ ID NO: 32390 - protein, 488 aa, Acinetobacter sp. CIP 102529
MNIQGIQATYRRLYHESPVWKLLRAENAPHILAFIADLFVEETEVPYGRARSLLDEFIKYSREQGLWQTENNAAYYLNSWIKAGWLREMDDMLSKTDASETVLRFCRNLDERHSSTTASHLRIVQDAVRDFVVAISDSIDDRVNLLEQKKAQIQQEIDDLHAGVVTQLNEAEQRERIREIYQLASILTGDFRRVEDEIRQLDKELRIDMIERNASRGEVLLALMQKEQLLAKSDAGSAFDGFCQLLQDQDRSTEFREQLRSILNHPVAQQLSEAQKKYLGQLMRELARESGRVFQVRRRTEEGLRAYIESGAALENRMIERLLSQLEKQAVNLTLEQQCDLKTEMQVYLAVGSVQISSPENFALKSPNEHMDTRGVQQQQNRKEPSNQMLHYLDSVQVREVAEKARHTLLKKGVMSIAHLTQEHPLQAGLEELVAYLRIAKAIKAPQLTEQNEQIQFQDQHGVNLQARIPTYYLSAELFPENLDELAL

SEQ ID NO: 32391 - protein, 263 aa, Acinetobacter sp. CIP 102529
MQPQESSFFDRVRRPTSDENHDIQPQRIAEVEVEDELIEVEADQEMENDLQLSDELSSMPHEARRVLVYLMRQGTILAAENLKLFDVLCRYETVIRQHLAEVYIQLVLDAKQGVAYIINTENINDENDDTALSDDFPTLIRKRTLTLYDTLVLLILRKYYQERETAGEQKIIIDLERIQASLTPFIPITNHDSKDRKKLSGTLDKFSEKKILSVIRGEDGRYEITPIIRYVVNAEFLQSLLTEYEQLADKAAMHQCEQNKGKV

SEQ ID NO: 32392 - protein, 1125 aa, Acinetobacter sp. CIP 102529
MQEMTLDTLFAQGQIRLAEISVFNWGSFHNLHTARIDPEGTLITGDNGAGKSTFIDGLMALLQPASKASFNVAAAQGDRSDRSLVTYMRGSYGSEHDGSTTKVKSKREKAVTTALRALYIAEDGSQITLIGLFWLGQGKNSLSDVNRLYMIASRNVLLTEVLEIFADGNTRQLKQHFNPKTDQRIHYFESDFKSYQDMYRKYLFMDNQNAPALLSRALGLKKIDDLTKLIRELVLEPSNLRETAQTAVNEFADLEANYKHLVDTREQVEHLERLPQCAEQIAELTQRLAQLHLEKQSIAAYFGELFAALWTEKLQQLEQELLQLKQQFQQIEQLEQDAETRQERRHEEYLQLGGHQIENLHKELGFITDKLKSLVIEASRYQDDARQLQLADDLTEHALLENQGIATEKLVNTEQDTKQRQDEFAEISGKYAQTQQQLKDIQEDIQEIEARPDSNIHDVHLLRLRDELKQHLSFDEHELMFIGELIDVKEHEKAWQGAIERALGGLKTTLLVPQDRYSMVTKWVNARNNKTHVRLQVVNLKQVEHVHFKDNGFLGKLLWREHAYRDWLKQHLQRFDLNCVSNTQILDHMPFSMTQQGLIHLERGRFEKKDQQRVDDRKAWCLGFSNTSRLSLLKHEYSQLEQQLKQLYQQIEQARQLLNNVNQQKGMWERLQRYQWDTINLPYWQQRQQQTQQDLQRLQQADSDAEQARQRWEDAKNELKQIGLQKGELQKIRGQLEQQHGDTQLKQQKAQQAAEQGISDDARQLLKQRIGEIKQLDDALQAEVERKLERLIGQANDQKTTVSNTANGIMVSFRSKDKWAHIPLQREWATGLAALEDYVAYLQELQQEGLPNLVEQFQQRLHKHTAQSLSVIQDKLNANREEIIDRIDMINQVLQRTEFKLGSYLRLGYKKEKYPHVHDFEQRLKQVLSGVNSEEYERRFKHLAELMAILDRASSSATANNQESLRLLDPRYQMSFHAEEVDAQTSEIRDVLESSSGKSGGEKESFAGTIVAASLAYVLTPDGYDYPIYSTVFLDEAFSNTAEAVSRRVLKVFKALKIHINLITPYKNLNLARESARSLLIAERDIDQHESHLCEVTWQEIDERMQQRKQTIAIEAQQLGIELHG

SEQ ID NO: 32393 - protein, 404 aa, Acinetobacter sp. CIP 102529; identical to SEQ ID NO: 32385

SEQ ID NO: 32394 - protein, 488 aa, Acinetobacter sp. CIP 102082; identical to SEQ ID NO: 32371

SEQ ID NO: 32395 - protein, 265 aa, Acinetobacter sp. CIP 102082
MQPQESSFFDRVRRPTSNENHDIQPQRIAEVEVEVEDELIEVEADQEMENDLQLSDELSGMPHEARRVLVYLMRQGTILAAENLKLFDVLCRYETVIRQHLAEVYIQLVLDAKQGVAYIINTENINDENDDTALSDDFPTLIRKRTLTLYDTLVLLILRKYYQERETAGEQKIIIDLERIQASLIPFIPITNHDSKDRKKLSGTLDKFSEKKILSVIRGEDGRYEITPIIRYVVNAEFLQSLLTEYEQLADKAAMHQCEQNKGKV

SEQ ID NO: 32396 - protein, 1125 aa, Acinetobacter sp. CIP 102082
MQEMTLDTLFAQGQIRLAEISVFNWGSFHNLHTARIDPEGTLITGDNGAGKSTFIDGLMALLQPASKASFNVAAAQGDRSDRSLVTYMRGSYGSEHDGSSTKVKSKREKAVTTALRALYIAEDGSQITLIGLFWLGQGKNSLSDVNRLYMIASRNVLLTEVLEIFADGNTRQLKQHFNPKTDQRIHYFESDFKSYQDMYRKYLFMDNQNAPALLSRALGLKKIDDLTKLIRELVLEPSNLRETAQTAVNEFADLEANYKHLVDTREQVEHLERLPQCAEKIAELTQRLAQLHLEKQSIAAYFGELFAALWTEKLQQLEQELLQLKQQFQQIEQLEQDAETRQERRHEEYLQLGGHQIENLHKELGFITDKLKSLVIEASRYQDDARQLQLADDLTEHALLENQGIATEKLVNTEQDTKQRQDEFAEISGKYAQTQQQLKDIQEDIQEIEARPDSNIHDVHLLRLRDELKQHLSFDEHELMFIGELIDVKEHEKAWQGAIERALGGLKTTLLVPQHRYSMVTKWVNARNNKTHVRLQVVNLEQVEHVHFKDNGFLGKLLWREHAYRDWLKQHLQRFDLNCVSNTQILDHMPFSMTQQGLIHLERGRFEKKDQQRVDDRKAWCLGFSNTSRLSLLKHEYSQLEQQLKQLYQQIEQARQLLNNVNQQKGMWERLQRYQWDTINLPYWQQRQQQTQQDLQRLQQADSDAEQARQRWEDAKNELKQIRLQKGESQKIRGQLEQQHRDTQLKQQKAQQAAEHGISDDARQLLKQRIGEVKQLDDALQAEAERKLERLIEQANDQKTTLSNTANGIMVSFRSKDKWAHIPLQREWATGLAALEDYVAYLQELQQEGLPNLVEQFQQRLHKHTAQSLSVIQVKLNANREEIIDQIDMINQVLQRTEFKLGSYLRLGYKKEKYPHVHDFEQRLKQVLSGVNSEEYERRFKHLAELMAILDRASSSATANNQESLRLLDPRYQMSFHAEEVDAQTSEIRDVLESSSGKSGGEKESFAGTIVAASLAYVLTPDGYDYPIYSTVFLDEAFSNTAEAVSRRVLKVFKALKIHVNLITPYKNLNLARESARSLLIAERDIDQHESHLCEVTWQEIDERMQQRKQTIAIEAQQLGIELHG

SEQ ID NO: 32397 - protein, 404 aa, Acinetobacter sp. CIP 102082
MAKTVAWGILPDDAIAQLRKKEWDHPRHLKQRLRHQRPFPIVLSLKAPTGQQAFADMDHFHTFFKTWKNFAYPDLVEWQQRQFKQLATQHVPVKLVIPTLDVMVELLGQQQRFKKISDKISCLLQQPFVESHIEYALFSTLIEYLEQIEQYPEHDWQLLIQLIAQLKLNMGAGHYLRALPLQHVDTKFLEKNLIFVEAICDVLHQGEIQATGGLLSWLNCLDHPKGWLMIKPLCAKVQQSLGGFPVFQLSTDVLTEFELPAQHIIVVENIQSGLALPMLENSIVVCGGGKNIKWLDAAWLQHKKVYYWGDLDSEGLNILSMVRQKIPDVIPLMMDEATVLQFQDKMVDEPDSVFSEPQYLTAEELSLFHALRKNCYKNKRLEQERISNDWINLYLTVESKLLKK

SEQ ID NO: 32398 - protein, 488 aa, Acinetobacter sp. CIP 102637; identical to SEQ ID NO: 32371

SEQ ID NO: 32399 - protein, 261 aa, Acinetobacter sp. CIP 102637
MQPQESSFFDRVRRPTSNENHDIQPQRIAEVEDELIEVEADQEMENDLQLSDELSSMPHEARRVLVYLMRQGTILAAENLKLFDVLCRYETVIRQHLAEVYIQLVLDAKQGVAYIINTENINDENDDTALSDDFPTLIRKRTLTLYDTLVLLILRKYYQERETAGEQKIIIDLERIQASLIPFIPITNHDSKDRKKLSGTLDKFSEKKILSVIRGEDGRYEITPIIRYVVNAEFLQSLLTEYEQLADKAAMHQCEQNKGKV

SEQ ID NO: 32400 - protein, 1125 aa, Acinetobacter sp. CIP 102637
MQEMTLDTLFAQGQIRLAEISVFNWGSFHNLHTARIDPEGTLITGDNGAGKSTFIDGLMALLQPASKASFNVAAAQGDRSDRSLVTYMRGSYGSEHDGSSTKVKSKREKAVTTALRALYIAEDGSQITLIGLFWLGQGKNSLSDVNRLYMIASRNVLLTEVLEIFADGNTRQLKQHFNPKTDQRIHYFESDFKSYQDMYRKYLFMDNQNAPALLSRALGLKKIDDLTKLIRELVLEPSNLRETAQTAVNEFADLEANYKHLVDTREQVEHIERLPQCAEQIAELTQRLAQLHLEKQSIAAYFGELFAALWTEKLQQLEQELLQLKQQFQQIEQLEQDAETRQERRHEEYLQLGGHQIENLHKELGFITDKLKSLVIEASRYQDDARQLQLADDLTEHALLENQGIATEKLVNTEQDTKQRQDEFAEISGKYAQTQQQLKDIQEDIQEIEARPDSNIHDVHLLRLRDELKQHLSFDEHELMFIGELIDVKEHEKAWQGAIERALGGLKTTLLVPQDRYSMVTKWVNARNNKTHVRLQVVNLKQVEHVHFKDNGFLGKLLWREHAYRDWLKQHLQRFDLNCVSDTQILDHMPFSMTQQGLIHLERGRFEKKDQQRVDDRKAWCLGFSNTSRLSLLKHEYSQLEQQLKQLYQQIEQARQLLNNVNQQKGLWERLQRYQWDNINLPYWQQRQQQTQQDLQRLQQADSDAEQARQRWEDAKNELKQIRLQKGESQKIRGQLEQQHHDTQLKQQKAQQAAEHGISDDARQLLKQRIGEVKQLDDALQAEAERKLERLIGQANDQKTTVSNTANGIMVSFRSKDKWAHIPLQREWATGLAALEDYVAYLQELQQEGLPNLVEQFQQRLHKHTAQSLSVIQDKLNANREEIIDRIDMINQVLQRTEFKLGSYLRLGYKKEKYPHVQDFEQRLKQVLSGVNSEEYERRFKHLAELMAILDRASSSATANNQESLRLLDPRYQMSFHAEEVDAQTSEIRDVLESSSGKSGGEKESFAGTIVAASLAYVLTPDGYDYPIYSTVFLDEAFSNTAEAVSRRVLKVFKALKIHVNLITPYKNLNLARESARSLLIAERDIDQHESHLCEVTWQEIDERMQQRKQTITTEAQQLGIELHG

SEQ ID NO: 32401 - protein, 404 aa, Acinetobacter sp. CIP 102637
MAKTVAWGILPDDAIAQLRKKEWDHPRHLKQRLRHQRPFPIVLSLKAPTGQQAFADIDHFHTFFKTWKNFAYPDLVEWQQRQFKQLATQHVPVKLVIPTLDVMVELLGQQQRLKKISDKISFLLQQLFVEPHIEYALFSTLIEYLEQIEQYPEHDWQLLIHLIAQLKANMGAGHYLRALPLQHVDTKFLEKNLIFVEAICDVLHQGEIQATGGLLSWLNCLDHPKGWLMIKPLCAKVQQSLGGFPVFQLSTDVLTEFELPAQHIIVVENIQSGLALPMLENSIVVCGGGKNIKWLNAAWLQHKKVYYWGDLDSEGLNILSMVRQKIPDVIPLMMDEATVLQFQDKMVDEPDSVFSEPQYLTAEELSLFHALRKNCYKNKRLEQERISNDWINLYLTVESKLLKK

SEQ ID NO: 32402 - protein, 488 aa, Acinetobacter junii CIP 107470
MNIQGIQATYRRLYHESPVWKLSRAENAPHILAFIADLFVEETEVPYGRARSLLDEFIKYSREQGLWQTENNAAYYLNSWIKAGWLREMDDMLSKTDASETVLRFCRNLDERHSSTTASHLRIVQDAVRDFVVAISDSIDDRVNLLEQKKAQIQQEIDDLHAGVVTQLNETEQRERIREIYQLASILTGDFRRVEDEIRQLDKELRIDMIEGNASRGEVLLALMQKEQLLAKSDAGSAFDGFCQLLQDQDRSTEFREQLRSILNHPVAQQLSEAQKKYLGQLMRELARESGRVFQVRRRTEEGLRAYIESGAALENRMIERLLSQLEKQAVNLTLEQQCDLKTEMQVDLAVGSVQISSPENFALKSPNEHMDTRGVQQQQNRKEPSNQMLHYLDSVQVREVAEKARHTLLKKGIMSIAHLTQEHPLQAGLEELVAYLRIAKAIKAPQLTEQNEQIQFQDQHGVNLQARIPTYYLSAELFPENLDELAL

SEQ ID NO: 32403 - protein, 261 aa, Acinetobacter junii CIP 107470; identical to SEQ ID NO: 32399

SEQ ID NO: 32404 - protein, 1125 aa, Acinetobacter junii CIP 107470
MQEMTLDTLFAQGQIRLAEISVFNWGSFHNLHTARIDPEGTLITGDNGAGKSTFIDGLMALLQPASKASFNVAAAQGDRSDRSLVTYMRGSYGSEHDGSSTKVKSKREKAVTTALRALYIAEDGSQITLIGLFWLGQGKNSLSDVNRLYMIASRNVLLTEVLEIFADGNTRQLKQHFNPKTDQRIHYFESDFKSYQDMYRKYLFMDNQNAPALLSRALGLKKIDDLTKLIRELVLEPSNLRETAQTAVNEFADLEANYKHLVDTREQVEHLARLPQCAEQIAELTQRLAQLHLEKQSIAAYFGELFAALWTEKLQQLEQELLQLKQQFQQIEQLEQDAETRQERCHEEYLQLGGGLIEKLQSDLVHIQENLQRVTRASSSYQKDAQNLNLKIELQEISLKNNQKLVLEQLKDIEQDSQASFEQYSNVNQQAKILKNKITELEDEIQEIEKCPESNISDTNLLLMRKELIQDLQFEEHELMFIGELLDVKDSEKAWQGAIERALGGLKTTLLVPQDRYSLVTKWVNARNNKTHVRLQVVNLKQVEHVHFKNNGFLGKLIWREHVYRDWLKQYLQRFDLQCVADTQTLDKTPFSITQQGLIHKEYGRFEKKDQHHINARKEWCLGFSNKSRLALLQHEKIQLEQEKIQADRLVQAALLNAKQINDRQNKLNNFLEYKWEEINLPYWQQRQQQTQQDLQRLQQADSDAEQARQRWEDAKNELKQIRLQKGESQKIRGQLEQQHRDTQLKQQKAQQAAEHGISDDARQLLKQRIGEVKQLDDALQAEAERKLERLIEQANDQKTTLSNTANGIMVSFRSKDKWAHIPLQREWATGLAALEDYVAYLQELQQEGLPNLVEQFQQRLHKHTAQSLSVIQDKLNANREEIIDRIDMINQVLQRTEFKLGSYLRLGYKKEKYPHVHDFEQRLKQVLSGVNSEEYERRFKHLAELMAILDRASSSATANNQESLRLLDPRYQMSFHAEEVDAQTSEIRDVLESSSGKSGGEKESFAGTIVAASLAYVLTPDGYDYPIYSTVFLDEAFSNTAEAVSRRVLKVFKALKIHVNLITPYKNLNLARESARSLLIAERDIDQHESHLCEVTWQEIDERMEQRKQTIATEAQQLGIELHG

SEQ ID NO: 32405 - protein, 404 aa, Acinetobacter junii CIP 107470
MAKTVAWGILPDDAIAQLRKKEWDHPRHLKQRLRHQRPFPIVLSLKAPTGQQAFADMDHFHTFFKTWKNFAYPDLVEWQQRQFKQLATQHVPVKLVIPTLDVMVELLGQQQRLKKISDKISFLLQQPFVEPHIEYALFSTLIEYLEQIEQYPEHDWQLLIHLIAQLKANMGAGHYLRALPLQHVDTKFLEKNLIFVEAICDVLHQGEIQATGGLLSWLNCLDHPKGWLMIKPLCAKVQQSLGGFPVFQLSTDVLTEFELPAQHIIVVENIQSGLALPMLENSIVVCGGGKNIKWLDAAWLQHKKVYYWGDLDSEGLNILSMVRQKIPDVIPLMMDEATVLQFQDKMVDEPDSVFSEPQYLTAEELSLFHALRKNCYKNKRLEQERISNDWINLYLTVESKLLKK

SEQ ID NO: 32406 - protein, 488 aa, Acinetobacter junii CIP 64.5; identical to SEQ ID NO: 32402

SEQ ID NO: 32407 - protein, 263 aa, Acinetobacter junii CIP 64.5
MQPQESSFFDRVRRPTSDENHDIQPQRIVEVEVEEELIEVEADQEVESDLQLSDELSSMPHEARRVLVYLMRQGTILAAENLKLFDVLCRYETVIRQHLAEVYIQLVLDAKQGVAYIINTENINDENDDTALSDDFPTLIRKRTLTLYDTLVLLILRKYYQERETAGEQKIIIDLERIQASLIPFIPITNHDSKDRKKLSGTLDKFSEKKILSVIRGEDGRYEITPIIRYVVNAEFLQSLLTEYEQLADKAAMHQCEQNKGKV

SEQ ID NO: 32408 - protein, 1125 aa, Acinetobacter junii CIP 64.5
MQEMTLDTLFAQGQIRLAEISVFNWGSFHNLHTARIDPEGTLITGDNGAGKSTFIDGLMALLQPASKASFNVAAAQGDRSDRSLVTYMRGSYGSEHDGSSTKVKSKREKAVTTALRALYIAEDGSQITLIGLFWLGQGKNSLSDVNRLYMIASRNVLLTEVLEIFADGNTRQLKQHFNPKTDQRIHYFESDFKSYQDMYRKYLFMDNQNAPALLSRALGLKKIDDLTKLIRELVLEPSNLRETAQTAVNEFADLEANYKHLVDTREQVEHLERLPQCAEQIAELTQRLAQLHLEKQSIAAYFGELFAALWTEKLQQLEQELLQLKQQFQQIEQLEQDAETRQERRHEEYLQLGGHQIENLHKELGFITDKLKSLVIEASRYQDDARQLQLADDLTEHALLENQGIATEKLVNTEQDTKQRQDEFAEISGKYAQTQQQLKDIQEDIQEIEARPDSNIHDVHLLRLRDELKQHLSFDEHELMFIGELIDVKEHEKAWQGAIERALGGLKTALLVPQDRYSMVTKWVNARNNKTHVRLQVVNLEQVEHVHFKDNGFLGKLLWREHAYRDWLKQHLQRFDLNCVSDTQILDHMPFSMTQQGLIHLERGRFEKKDQQRVDDRKAWCLGFSNTSRLSLLKHEYSQLEQQLKQLYQQIEQARQLLNNVNQQKGLWERLQRYQWDTINLPYWQQRQQQTQQDLQRLQQADSDAEQARQRWEDAKNELKQIRLQKGESQKIRGQLEQQHRDTQLKQQKAQQAAEHGISDDARQLLKQRIGEVKQLDDALQAEAERKLERLIEQANDQKTTLSNTANGIMVSFRSKDKWAHIPLQREWATGLAALEDYVAYLQELQQEGLPNLVEQFQQRLHKHTAQSLSVIQDKLNANREEIIDRIDMINQVLQRTEFKLGSYLRLGYKKEKYPHVHDFEQRLKQVLSGVNSEEYERRFKHLAELMAILDRASSSATANNQESLRLLDPRYQMSFHAEEVDAQTSEIRDVLESSSGKSGGEKESFAGTIVAASLAYVLTPDGYDYPIYSTVFLDEAFSNTAEAVSRRVLKVFKALKIHVNLITPYKNLNLARESARSLLIAERDIDQHESHLCEVTWQEIDERMQQRKQTIATEAQQLGIELHG

SEQ ID NO: 32409 - protein, 404 aa, Acinetobacter junii CIP 64.5; identical to SEQ ID NO: 32401

SEQ ID NO: 32410 - protein, 486 aa, Acinetobacter towneri DSM 14962 = CIP 107472
MNILGLQAKYRRLYHENSIWKLLRADNAPHILAFIVDLFAEQNEVPYGRARNVLDELIKSSREQGIWQTENNAAHYLNHWIHSGWLREIDGKLSKTDISETVLRFCQGLDERATHTTASHLRIVQDAVRDFVVALSENIEERVELLEQKKLVIQNEIDALLAGVVTQLEESEQKERIREIYQLASILTGDFRRVEDEIRLRDKELRLDMISGAYSRGEVLLSLMEKEQLLAQSDAGSAFDGFCQLLQDQDRSTEFREQLRSILNHPIAQQLSESQRKYLGQLMRELGRESSRVFQVRRRTEEGLRAYIESGAALDNRLIDQLLSELEKNAVALLESECDLKTEVQVDLAVGSIQLNSPESLALKSPTEHMDTREVEEQQNKTEPSDQMLKYLDNVRVRAVAEKVYQTLAQKGVMSIAHLTHEHPLQAGLEELVAYLRIAKAIKAPQMQHTEQVELKDRSGVHLQASIPVYYLSADLFPKNIDELAL

SEQ ID NO: 32411 - protein, 277 aa, Acinetobacter towneri DSM 14962 = CIP 107472
MQSENKIQQHDNFFEMVRRPSSNSEKNIEIQANQPVEDSFATTGAEEQHADNQTEMEHAQDRDTDALMPHAARRVLVYLMRQGVILAAENLKLFDLLCRYEAEIRRHLAEVYIQLVLDAKQGVAYIINLKSIEDEQEDENQPLDDFPVLIRKRTLTVYDTLILLILRKYYQERETAGEQKIIIDVERIQSSLIPFIPLTNHDSKDRKKLNAALEKFIEKKVLTGLRGEEGRYEITPIIRYVVNAEFLQSLLSEYQQLAAKAKLQQSEQEYGESSCKK

SEQ ID NO: 32412 - protein, 1125 aa, Acinetobacter towneri DSM 14962 = CIP 107472
MQEMTLSTLFAQGQIRLSEISVFNWGSFHNLHTARIDPEGTLITGDNGAGKSTFIDGLMALLQPASKASFNVAAAQGDRSDRTLLSYMRGSFGSEHDGAGTRVKNKREKAVTTALRALYTADDGSMITLIGLFWVGQGQHSLSEVNRLYMIASRNVQLTEVLEKFADGNTRQLKQHFNPKTDARVHYFDSKFEDYQEMYRKYLFMDNKNAPALLSRALGLKKIDDLTKLIRELVLEPSQVRALAQTAVNEFADLEANYKHLVDAREQVLHLQKLPELAVQITALTLQLNNLQLEKQAFPAYLGELYVQFWTEKIHQLEQEIQRLHTQFKQLEQQEHDAEKRQERCHEDYLQVGGNRIENLQKELELIQRQLKQLTIEASRYQEDAQQLQLQDDLTEQNLIDNQKIAHEQLLNIGQEKTQRQDEFAQVSSKYAQTQQQLKETQSDIQEIETRPNSNIHDVHLLRLRDELRQHLDFDEHELMFIGELIDVKEAEKIWQGAIERALGGLKTTLLVPKDRYSMVTQWVNARHNKTHVRLQVIHLDATESVYFKENGFLRKLVWREHPYRDWLKQHLLRFDLQCVADTTIMNTTPFSMTQQGLIHREQGRFEKKDQQRIDDRKIWCLGFSNTSRLNLLKHEAKQLEVQLEQYALSVAQSRKVLDQVTQHKSLWERMLRYQWDMINIPYWTERQQQTSNDLQHLQRADTNIEQARQRWELAKEELKQLQEQKGQLQHTWGKLKQKFSDAEKQQQQAQKAANQGVPEQARELLLQRIGETPRLEDAYLTAVEKELERLIEHTSNQNTSAKNSATYIIGQFRGKDKWSHIALQREWAVGLAALDDCVAYFHELEKEGLPALVEQFEQRLQKHTMQSLSVIQNRLEADREEITDRIAIINQVLRRTEFKSGSYLRLGYKKEKYPHVIDFEQKLKWVISSINSIEYEQRFKKLAELISILEKASNSVTAHTFESQRLLDPRHQMSFYAEEVDLATEEIRDVLESSSGKSGGEKESFAGTIVAASLAYVLTPDGYDYPIYSTVFLDEAFSNTAEAVSRRVLKVFKALKIHVNLITPYKNLNLARESARSLLIAERDIEKHESHLCEITWQEIDEKMAQKQQQLHREAQQFGVQLDA

SEQ ID NO: 32413 - protein, 398 aa, Acinetobacter towneri DSM 14962 = CIP 107472
MPKIEKWGLLPNTVLGILHKKEWENRRNLKQRLLNQRPFPIEISLKVPTDQQARDNLGHFHAFFKAWTDFAYPELVEWQERQYRQLSEQRVPVKLRIFSLQQLTELLGTEQQLENWLDKISSFLKQSFVHDRHQHRLFQTLIHHLEQIERYSQQEWQWLIQLIEQLKPNMGAGLYLRALPLSAVNTKFLEQNLLLTEAICNVLYDDEIVLAGGLLAWLDCLDSPKGWLTIKPVCPNVQEKLGGLPVFQLSTEVLDQFELPAERIIVVENIQSGLACPYLENSIVVCGGGKNITWMKAKWLQYKQVFYWGDIDSEGLNILSMVRQKIPHVIALMMDEATVLQFQNHMVDEPDSIFSEPQYLTADELKLFHDLRAQTFKNRRLEQERISVDWVHRYLELL

SEQ ID NO: 32414 - protein, 487 aa, Acinetobacter haemolyticus NIPH 261
MNIQGIQATYRRLYQESAVWKLLRAENAPHILAFIADLFAEENEVAYGRARSLLDEFIKFSREQGLWQTENNAAYYLNSWIKAGWLREMDDMLSKTDVSETVLRFCRNLDERHTSTTASHLRIVQEAVRDFVVAISDNIDDRVSLLEQKKAHIQQEIDDLHAGVVTQLNEAEQRERIREIYQLASILTGDFRRVEDEIRQLDKELRIDMIEGSSSRGDVLLSLMRKEQLLSKSDAGSAFDGFCQLLQDQDRSTEFREQLRSILNHPIAQQLSEQQKKYLGQLMRELARESGRVFQVRRRTEEGLRAYIESGAALENRMIDRLLSQLEKQAVGLLEQQCDLKTEMQADLAVGSVQISSPENFALKSPNEHMDTRGVQQQQNRKQPSSQMLHYLDSVQVRVVAEKTRNTLLQKGVMSIAHLTQEHPLQAGLEELVAYLRIAKAIKAPQLTEQNEQIQFYDQHGVCLQASIPTYCLSAELFPENLDELAL

SEQ ID NO: 32415 - protein, 266 aa, Acinetobacter haemolyticus NIPH 261
MQDKEISQLQDASFFDRVRRPSIDEPHHAEQNKIMAVQDELAEVETEQESENDSAQLTDELSSMPHEARRVLVYLMRQGTILAAENLKLFDVLCRYEVAIRQHLAEVYIQLILDARQGVAYIINVESISDENADNQFSDDFPTLIRKRTLTLYDTLVLLILRKYYQERENAGEQKIIIDLERIQTSLIPFIPMTNHDSKDRKKLTGTLDKFSEKKILSVIRGEEGRYEITPIIRYVVNAEFLQSLLTEYEQLADKAVQSEQNKGKA

SEQ ID NO: 32416 - protein, 1125 aa, Acinetobacter haemolyticus NIPH 261
MQEMTLDSLFAQGQIRLAEISVFNWGSFHNLHTARIDPEGTLITGDNGAGKSTFIDGLMALLQPASKASFNVAAAQGDRSDRSLVTYMRGSYGSEHDGSSTKVKSKREKAVTTALRALYTAEDGSQITLIGLFWLGQGKNSLSDVNRLYMIASRNVLLTEVLEIFADGNTRQLKQHFNPKTDQRIHYFDSDFKSYQDMYRDYLYMENKNAPALLARALGLKKIDDLTKLIRELVLEPSHLRETAQTAVNEFADLEANYKHLVDTREQVEHLQRLPQCAEHIAELTQRLAQLHLEKQSIAAYFGEFFAALWTEKLQQLEQELVQLNQQFQQIEQQEQDAEIRQERCHEEYLQLGGHQIENLHKELGFIADKLKSLVLEASRYQDDARQLQLSDDLIEHRLLENQGIATEKLVNIEQDTTQRQDEFAEISGKYAQTQQQLKDIQVDIQEIEARPDSNIHDVHLLRLRDELKQHLSFDEHELMFIGELIDVKDHEKAWQGAIERALGGFKTTLLVPQERYSMVTKWVNARNNKTHVRLQVVNTKQVEHVHFKDNGFLGKLLWREHAYRDWLKQHLQRFDLNCVSDTQTLDHTPFSMTQQGLIHLERGRFEKKDQQRIDDRKAWCLGFSNTSRLKLLKHEYNQLEQQLKQQYQQIEQARQLLNNVNQKKSLWERLQRYQWDAINLPYWQQRKTETEQDLQRLQQADSDAEQARQCWEAAKNALKQIGLQKGELQNIRGQLEQQHRDTQLKRQKAQQAAEQGISDDARQLLKQRIGVIKHLDDALQVNTERKLESLIEQANNQKITVSNTANGIMVSFSSKDKWAHIPLQREWATGLVALDDYVAYLQELQQEGLPNLVEQFQQRLHKHTTQSLSVIQDKLNANREEIIDRIGMINRVLQRTEFKLGSYLRLGYKKEKYPHVQDFEQRLKQVLSSINSEEYERRFKQLAELMAILDKASSSATANNQESLRLLDPRYQMSFHAEEIDVQTGEIRDVLESSSGKSGGEKESFAGTIVAASLAYVLTPDGYDYPIYSTVFLDEAFSNTAEAVSRRVLKVFKALKIHVNLITPYKNLNLARESARSLLIAERDIDQHESHLCEVTWQEIDERMQQRKKLTITQVEQLGIQLHG

SEQ ID NO: 32417 - protein, 312 aa, Acinetobacter haemolyticus NIPH 261
MAKATQWGILPDDAIAQLRNKEWDHQRHLKQRLRHQRPFPIVLSLKAPTGQQALTDMDHFHAFFKAWKNFPYPDLVEWQQRQFKQLSSQHVPVKLIIPTLDVLVEVLEQQQRLQKFSDKISCFLQQPFVQPQAEYALFSTLVEYLEQVEAYREYDWQLLMQLVAQLKPNMGAGHYLRALPLQHVDTKFLEKNLVLVEAICDVLHYGEVQATGGLLTWLNCLDHPKGWLMIKPLCANVQQSLGGLPVFQLSTDVLAQFELPAQHIIVVENIQSGLALPVLQNSIVVCGGGKNIKWLDAVWLQHKKSVVFQKVC

SEQ ID NO: 32418 - protein, 488 aa, Acinetobacter sp. CIP 102143; identical to SEQ ID NO: 32375

SEQ ID NO: 32419 - protein, 263 aa, Acinetobacter sp. CIP 102143; identical to SEQ ID NO: 32391

SEQ ID NO: 32420 - protein, 1125 aa, Acinetobacter sp. CIP 102143
MQEMTLDTLFAQGQIRLAEISVFNWGSFHNLHTARIDPEGTLITGDNGAGKSTFIDGLMALLQPASKASFNVAAAQGDRSDRSLVTYMRGSYGSEHDGSTTKVKSKREKAVTTALRALYIAEDGSQITLIGLFWLGQGKNSLSDVNRLYMIASRNVLLTEVLEIFADGNTRQLKQHFNPKTDQRIHYFESDFKSYQDMYRKYLFMDNQNAPALLSRALGLKKIDDLTKLIRELVLEPSNLRETAQTAVNEFADLEANYKHLVDTREQVEHLERLPQCAEQIAELTQRLAQLHLEKQSIAAYFGELFAALWTEKLQQLEQELLQLKQQFQQIEQLEQDAETRQERRHEEYLQLGGHQIENLHKELGFITDKLKSLVIEASRYQDDARQLQLADDLTEHALLENQGIATEKLVNTEQDTKQRQDEFAEISGKYAQTQQQLKDIQEDIQEIEARPDSNIHDVHLLRLRDELKQHLSFDEHELMFIGELIDVKEHEKAWQGAIERALGGLKTTLLVPQHRYSMVTKWVNARNNKTHVRLQVVNLEQVEHVHFKDNGFLGKLLWREHAYRDWLKQHLQRFDLNCVSNTQILDHMPFSMTQQGLIHLERGRFEKKDQQRVDDRKAWCLGFSNTSRLSLLKHEYSQLEQQLKQLYQQIEQARQLLNNVNQQKGMWERLQRYQWDTINLPYWQQRQQQTQQDLQRLQQADSDAEQARQRWEDAKNELKQIRLQKGESQKIRGQLEQQHRDTQLKQQKAQQAAEHGISDDARQLLKQRIGEVKQLDDALQAEAERKLERLIEQANDQKTTLSNTANGIMVSFRSKDKWAHIPLQREWATGLAALEDYVAYLQELQQEGLPNLVEQFQQRLHKHTAQSLSVIQVKLNANREEIIDQIDMINQVLQRTEFKLGSYLRLGYKKEKYPHVHDFEQRLKQVLSGVNSEEYERRFKHLAELMAILDRASSSATANNQESLRLLDPRYQMSFHAEEVDAQTSEIRDVLESSSGKSGGEKESFAGTIVAASLAYVLTPDGYDYPIYSTVFLDEAFSNTAEAVSRRVLKVFKALKIHVNLITPYKNLNLARESARSLLIAERDIDQHESHLCEVTWQEIDERMQQRKQTIAIEAQQLGIELHG

SEQ ID NO: 32421 - protein, 404 aa, Acinetobacter sp. CIP 102143; identical to SEQ ID NO: 32397

SEQ ID NO: 32422 - protein, 460 aa, Clostridium clostridioforme CM201; identical to SEQ ID NO: 31512

SEQ ID NO: 32423 - protein, 249 aa, Clostridium clostridioforme CM201; identical to SEQ ID NO: 31513

SEQ ID NO: 32424 - protein, 1129 aa, Clostridium clostridioforme CM201; identical to SEQ ID NO: 31514

SEQ ID NO: 32425 - protein, 392 aa, Clostridium clostridioforme CM201; identical to SEQ ID NO: 31515

SEQ ID NO: 32426 - protein, 474 aa, Clostridium innocuum 2959; identical to SEQ ID NO: 31145

SEQ ID NO: 32427 - protein, 222 aa, Clostridium innocuum 2959; identical to SEQ ID NO: 31455

SEQ ID NO: 32428 - protein, 1093 aa, Clostridium innocuum 2959; identical to SEQ ID NO: 31456

SEQ ID NO: 32429 - protein, 458 aa, Hungatella hathewayi 12489931
MKQNKKLMEEIPDRFWGLFRSVNRSTYIEALLRINEEYEYSNYFLSREVCIQVLSEYFAKKRYVIWQDELEDELDTLEPPATRVLNWLLKTGWLRKVDDYASMTVYIVIPDYAAVMTEAFLRLDSEDEDETQIYIQNVYAILFSLKNDPRASISLLNTAFVNTKRLNKTLQDMLHNMDKFFASLLEQKSYEDLLRDHLEGYVEEIVKKKYHILKTSDNFYLYKTDIKRWIAAMREDTEWMEQMSRRSGGKVSAADIAEKLDQIERGFDSIEHRISNMDREHSRYIRATVTRLNYLLNQDDNMKGLVIQLLNHLSEGEEQEERIREVGEHMNLSQMTILSEKSLYKRRRPKADFTGNLEAEEEAEELSREEILNLNKLKNRYSKKEIESFIEENMEEGRMEVTDGSVRSGEDFEKLILAYDYSTRRKSLYRVEEADGEPEMIESGGYRYPKLTFIRRKS

SEQ ID NO: 32430 - protein, 216 aa, Hungatella hathewayi 12489931
MGYEEETTVNLGLPYYDSLLPEEQQEVTEAVKLLLRQTFVLERKYEKRSGRFTNNREFRICNKHLEFLRKYFAVSGVSVVENSQMGVIYIQGETLVGDKLPKLATLYLLILKLIYDEQMATVSTSVNIYTSLGEMHEKLGNYRLFKKQPSPTDIRRAVTLLKKYQVVEPLDLLEDLNGDSRLIIYPCINVVLFGDDVRVLLESFGEGEENDDESEI

SEQ ID NO: 32431 - protein, 1123 aa, Hungatella hathewayi 12489931
MTNQRFEALSRICLNNWHYINRKTLSFNREINFFTGHSGSGKSTVIDAMQIVLYANTDGRGFFNKAAADDSDRNLIEYLRGMVNIGENNEFAYLRNQNFSSTIVLELQRTDTEECQCVGIVFDVDTSTNEISRRFFWHRGPLWDSGYRTAKRTMSIAEVEGYLQSHYGKEEYFATSHNERFRRQLYDVYLGGLDSEKFPLLFKRAIPFRMNIRLEDFVKEYICMEQDIHIDDMQESVMQYGRMRKKIEDTYIEISILKEMQEKYGLVLEKEENIRKNGYFTGRLEILELKERAGELTDKAALSRDDLQKQESLKDGLDEQIAELTAQGEELLKRISSTGYEDLKTRLESLNELMEHLNKSEVKWRQTAERLNAWIDQETTSNQTIWDIEEFEKNTIDGEKLERLKKSIAEMRKEAEDLKSEAAAVLRDLKRQERQLKEELAQLKAGSKAYPKYLEHARSYIQRRLLEETGKAVEVHVMADLLDIRNEEWRNAVEGYLGGNKLSLVVPPAYAEEALRIYSELDKNEYFRVAVLDTEKAGKDTPTVLEDALCEEVEVREAYLKPYLERLLGQVVKCRSIDELRDCRIGVTPDCMVYHTFRLQQMNPEQYTKSAYIGKDSVRQRIRLLEKSLSEMEKKRAPEETTVRECEAVLSLEQLSEEISVYLEWQKDMEDLKERQKEKKRLEQKLLILKEENVDQWEKERSAVSALADGKRRERDAVSRRIYEINTRITQMAQAVTAVEQELLAKDREFMQDDLLEAEFAEYMAGKENPRFDKLKDYFTGRLNAAAEARDQAFQTLMDARGEYARKYPNRNFSITSRDNREYEKLMEILACDHLEEYRQIAAEQARSAVEHFKDDFMFKIRSAIREALQRKDELNRIISRLDFGKDKYQFVIGKNKGADGRFYDMFMDDSLEVNPNELSEAVDNQMNLFTMEHESQYGELIEELINVFIPPDNATPEQMEEAKRNMDKYADYRTYLSFDMQQLIQNEDEVIRIRLSKMIKKNSGGEGQNPLYVALLASFAQAYRISMPESVRRNPTIRLVVLDEAFSKMDAEKVASCIELIRGLGFQAIISATNDKIQNYVENVDKTFVFANPNKKSISIQEFERESFPQLMKELDEGEEDD

SEQ ID NO: 32432 - protein, 460 aa, Clostridium clostridioforme 90B1; identical to SEQ ID NO: 31512

SEQ ID NO: 32433 - protein, 249 aa, Clostridium clostridioforme 90B1; identical to SEQ ID NO: 31513

SEQ ID NO: 32434 - protein, 1129 aa, Clostridium clostridioforme 90B1; identical to SEQ ID NO: 31514

SEQ ID NO: 32435 - protein, 392 aa, Clostridium clostridioforme 90B1; identical to SEQ ID NO: 31515

SEQ ID NO: 32436 - protein, 460 aa, Clostridium clostridioforme 90A8
MILMNEIPDRFWSLFRSANRSTYIEALLKINEEYEYSNYFLSREVCIQLLSEYFSRKKYVIWQDETEDDWDELEPPATRVLNWLLRTGWLRKVDDYASMTVNIVLPDYAAVMIEAFSRLSNDDEDETQVYIQNVYAILFSLKNDPRSSVSLLNTALVNTKKLNKSLQDMLHNMDKFFGSLLEQKNYGTLLKEHLEGYVTEIVNKKYHILKTSDNFYLYKTDIKSWIAAMREDSSWINKMCAKSAASTRGQKKTPLTEYDIVEKLDQLERGFDDIEHRISNMDKEHTRYVKATVTRLNYLLNQEDNMKGLVIKLLNHMSEYGCPEDELTAVSARMNLSQMTILSEKSLYKRRKTKADFTEQLKDEEESEELSMEEVLNLNKVRNRYSQKEIEAFIEGSMADGKMVVDEQTIHSDQDFEKLILAYDYSTRRKSPYKVEEEDSEMVHSGGYIYPRLVFVRRTK

SEQ ID NO: 32437 - protein, 249 aa, Clostridium clostridioforme 90A8; identical to SEQ ID NO: 31513

SEQ ID NO: 32438 - protein, 1129 aa, Clostridium clostridioforme 90A8; identical to SEQ ID NO: 31514

SEQ ID NO: 32439 - protein, 392 aa, Clostridium clostridioforme 90A8
MNAPLECIIRKCENSTVDWKEGMSGNRSVIFREQDFKETGKQDFMNQLMKLEKEGLLKVKWYQYGTEAEKVWYRLEQMETIYQRLGKTPKFKRVNALKEEVDRQLALIQSQWIRSYYQSFLQSLDKGDVPKALDTPKRELLFTCFKAIDCLQEPVYKRIFSKKYLGNSKAFENHLQSKILSAARVYLDTVNDDMDDCQVLDQLLINGYAQELAVKGNLVIELEGNKINLSLFPCGFVFNNQTLRKASIPPEQSVTKVITVENKANYESMPYEEGTLIIYSHGYFSPDERAFLIHLERVLSSIRTSCGTTYLHTGDLDYGGVKIFQYIKKRIFPNLQPYLMDTQTHEQYKAYGEPIETSKLEKLQRTTEPLLQPLIDKICAEKQVIEQESFLF

SEQ ID NO: 32440 - protein, 460 aa, Clostridium clostridioforme 90A7
MILMNEIPDRFWSLFRSVNRSTYIEALLKINEEYEYSNYFLSREVCIQLLSEYFSRKKYVIWQDETEDDWDELEPPATRVLNWLLRTGWLRKVDDYASMTVNIVIPDYAAVMIEAFSRLLGDDEDETQVYIQNVYAILFSLKNDPRSSVSLLNTALVNTKKLNKSLQDMLHNMDKFFGSLLEQKNYGTLLKEHLEGYVTEIVNKKYHILKTSDNFYLYKTDIKSWIAAMREDSSWINKMCAKSAASTRGQKKAPLTEYDIVEKLDQLERGFDDIEHRISNMDKEHSRYVKATVTRLNYLLNQEDNMKGLVIRLLNHLSEYGCPEEDLTAVSARMNLSQMTILSEKSLYKRRKTKADFTEQLKDEEESEELSMEEVLNLNKVRNRYSQKEIEAFIEGSMTDGKMVVDEQTIHSDQDFEKLILAYDYSTRRKSPYKVEEEDSEMVHCKGYTYPRLVFVRRAR

SEQ ID NO: 32441 - protein, 287 aa, Clostridium clostridioforme 90A7
MENMELENSMTDIAPAAGYTGNGVPYYDNLMQSEQMEVTEIIRLLWRQTFILEHKYDKRTGRFQYNRDYRVCSKHLEFMKNYFAISGVELRENSQMGVMYIQGETVVGDKLPRLATLYLLVLKLIYDEQMESVSTSVNVYTSLREIHEKLGNYRLFKKQPAPTDIRRAVTLLKKYQVIEPLDLLEDLKSESRMIIYPCINVVLMGDDVRCLLSSFEDDSDESGVQLKADLEEEEPDATDEMTEDEMAEGEMSQDEMAENEMSQDEMTQDEMTQGEMTSEEGEPWNRK

SEQ ID NO: 32442 - protein, 1130 aa, Clostridium clostridioforme 90A7
MEQKIANDRFLALSRICLNNWHYITKRTLSFNDEINFFTGHSGSGKSTVIDAMQIVLYANTDGRGFFNKAAADDSDRSLIEYLRGMVNIGENNEFSYLRNQNFSSTIVLELKRSDTGQCQCVGIVFDVETATNEISRRFFWHKGPMWENGYRGGKRTMSIVEIEDYLEANYSREDYFLTSHNERFRRILYDSYLGGLDSEKFPLLFKRAIPFRMNIKLEDFVKEYICMEQDIHIEDMQESVMQYGRMRKKIEDTCAEIQSLKQIEDRFINYADKEQQIEKCSYFVQKLEILQLQSEVRTLADRAKLAGEDLKKQVQARSSVDEQIGELTRQSDELLRRIASTGYEELKSQLKSLNELLEQLGKSEARWQQTATALKRWEEEDITSNQTLWDMEEFENRTIDLETLERLKKNMVSMRTDTEKQHQETAAAVRELKKQEKQTGDELEKLRSGSKAYPKYLENARSYIQRRLLEKTGKSVDVHVLADLLDVKRDEWRNAVEGYLGNNKLNLVVAPKYARAALEIYGELDKKEYFNVAVLDTEKASQNQPQVQKGALSEEVTVRESYLKPYIDLLLGKVIKCNTIEELRECRIGITSGCMLYHTFRLQHINPDNYTKFAYIGKDSVRRRIRLLEQELASLEEKKKPLDETARESLRILALPWLSAEPAEYMDWLNDINSYKAKEREKKKLIQKLELLKEQNVDQLERDRQAVITLCDGKKRERDSLNVLIRDKEREIEGCRNKSIDSQSLLTSKERELKQNPDYDNELSAYLSSRDTVRYDREKETFIARCSKLSEAREAAFQVLLAVRTSYIRTYPNRNFTVNARDNAAYDRLLSDLKCDNLEEYKQKATQQAKSAVEHFRDDFMYKIRSAIREALIRKDELNRIISRLDFGKDKYQFVIGRNKGPDGRFYDMFMDDSLDINPADLNYSYENQMDLFTIEHEKQYGDLMNELISIFIPPENATPEQMDEARRNMDKYSDYRTYLSFDMQQLIQNEDEVIKIRLSKMIKKNSGGEGQNPLYVALLASFAQAYRINLPSKVERNPTIRLVVLDEAFSKMDGEKVASCIELIRGLGFQAIISATNDKIQNYVENVDKTFVFANPNKKSISIQEFERERFVELMQDIEDGDEFAETL

SEQ ID NO: 32443 - protein, 392 aa, Clostridium clostridioforme 90A7
MNAPLECIIQKYEKSTVDWKKGMSGKRSVIFREQDFKETGKRDFMNQLMELEMEGLVKVKWYQYGIEAEKAWYSLEQMETIYQRLGKIPKFKRIDKLKEEVDQQLALIQSQWIRSYYQSFLQSLDKGDVPKALDTPKRELLFTCFKAIDCLQEPVYKRIFSKKYLGKSKAFEKHLQSKVLSAARAYLDTVNDDMDDRQVLDQLMINGYAQELAVKGNLIIELAGNKINLSLFPSGFVFNNQTLRSASIPPEQSISKVITVENKANYESMPYEEGTLIIYSHGYFSPDERAFLIQLERVLSGIHTSCGTAYLHTGDLDYGGVKIFQYIKKRIFPKLYPYLMDTQTYDQYMAYSEPIETSKLEKLQRTAEPLLQPLIDKICAEKQVIEQESFLF

SEQ ID NO: 32444 - protein, 460 aa, Clostridium clostridioforme 90A6; identical to SEQ ID NO: 31512

SEQ ID NO: 32445 - protein, 249 aa, Clostridium clostridioforme 90A6; identical to SEQ ID NO: 31513

SEQ ID NO: 32446 - protein, 1129 aa, Clostridium clostridioforme 90A6; identical to SEQ ID NO: 31514

SEQ ID NO: 32447 - protein, 392 aa, Clostridium clostridioforme 90A6; identical to SEQ ID NO: 31515

SEQ ID NO: 32448 - protein, 460 aa, Clostridium clostridioforme 90A4; identical to SEQ ID NO: 31512

SEQ ID NO: 32449 - protein, 249 aa, Clostridium clostridioforme 90A4; identical to SEQ ID NO: 31513

SEQ ID NO: 32450 - protein, 1129 aa, Clostridium clostridioforme 90A4; identical to SEQ ID NO: 31514

SEQ ID NO: 32451 - protein, 392 aa, Clostridium clostridioforme 90A4; identical to SEQ ID NO: 31515

SEQ ID NO: 32452 - protein, 460 aa, Clostridium clostridioforme 90A3; identical to SEQ ID NO: 31512

SEQ ID NO: 32453 - protein, 249 aa, Clostridium clostridioforme 90A3; identical to SEQ ID NO: 31513

SEQ ID NO: 32454 - protein, 1129 aa, Clostridium clostridioforme 90A3; identical to SEQ ID NO: 31514

SEQ ID NO: 32455 - protein, 392 aa, Clostridium clostridioforme 90A3; identical to SEQ ID NO: 31515

SEQ ID NO: 32456 - protein, 460 aa, Clostridium clostridioforme 90A1; identical to SEQ ID NO: 31512

SEQ ID NO: 32457 - protein, 249 aa, Clostridium clostridioforme 90A1; identical to SEQ ID NO: 31513

SEQ ID NO: 32458 - protein, 1129 aa, Clostridium clostridioforme 90A1; identical to SEQ ID NO: 31514

SEQ ID NO: 32459 - protein, 392 aa, Clostridium clostridioforme 90A1; identical to SEQ ID NO: 31515

SEQ ID NO: 32460 - protein, 460 aa, Clostridium bolteae 90B8
MILMNEIPDRFWSLFRSVNRSTYIEALLKINEEYEYSNYFLSREVCIQLLSEYFSQKKYVIWQDETEDDWDELEPPATRVLNWLLRTGWLRKVDDYASMTVNIVIPDYAAVMIEAFSRLLGDDEDETQVYIQNVYAILFSLKNDPRSSVSLLNTALINTKKLNKSLQDMLHNMDKFFGSLLEQKNYGTLLKEHLEGYVTEIVNKKYHILKTSDNFYLYKTDIKSWIAAMREDSSWINKMCAKSAASARGQKKSPLTEYDIVEKLDQLERGFDDIEHRISNMDKEHSRYVKATVTRLNYLLNQEDNMKGLVIRLLNHLSEYGCPEEELTSVSARMNLSQMTILSEKSLYKRRKTKADFTEQLKDEEESEELSMEEVLNLNKVRNRYSQKEIEAFIEGSMTEGKMVVDEQTIHSDQDFEKLILAYDYSTRRKSPYKVEEEDSEMVHCKGYTYPRLVFVRRAR

SEQ ID NO: 32461 - protein, 282 aa, Clostridium bolteae 90B8
MENMELENSMTDIAPAAGYTGNGVPYYDNLMQSEQMEVTEIIRLLWRQTFILEHKYDKRTGRFQYNRDYRVCSKHLEFMKNYFAISGVELRENSQMGVMYIQGETVVGDKLPRLATLYLLVLKLIYDEQMESVSTSVNVYTSLREIHEKLGNYRLFKKQPALTEIRRAVTLLKKYQVIEPLDLLEDLKSESRMIIYPCINVVLMGDDVRCLLSSFEDDSDESGVQLKADLEEEEPDATDGMTEDGMAEDEMAEDEMTEDEMTEDEMTEDEMASEEGEPWNRK

SEQ ID NO: 32462 - protein, 1130 aa, Clostridium bolteae 90B8
MEQKIANDRFLALSRICLNNWHYITKRTLSFNDEINFFTGHSGSGKSTVIDAMQIVLYANTDGRGFFNKAAADDSDRSLIEYLRGMVNIGENNEFSYLRNQNFSSTIVLELKRSDTGQCQCVGIVFDVETGTNEISRRFFWHKGPMWDNGYRGGKRTMSIVEIEDYLQANYSREDYFLTSHNERFRRILYDSYLGGLDSEKFPLLFKRAIPFRMNIKLEDFVKEYICMEQDIHIEDMQESVMQYGRMRKKIEDTCAEIQSLKQIEDRFLTYADKEQQIEKCSYFVQKLEILQLQSEVRTLADRAKLAGEDLKKQVQARSSVDEQIGELTRQSDELLRRIASTGYEELKSQLKSLNELLEQLGKSEARWQQTATALKRWEEEDITSNQTLWDMEEFENRTIDLETLERLKKNMVSMRTDTEKQHQEAAAAVRELKKQEKQTRDELEKLRSGSKAYPKYLENARSYIQRRLLEKTGKSVDVHVLADLLDVKRDEWRNAVEGYLGNNKLNLVVSPKYARAALEIYGELDKKEYFNVAVLDTEKASQNQPQVQKGALSEEVTVRDSYLKPYIDLLLGKVIKCNTIDELRECRIGITSGCMLYHTFRLQHINPDNYTKFAYIGKDSVRRRIRLLEQELASLEEKKKPLEETARESLRILALPWLSAEPTEYMDWLNDINSYKAKEREKKKLIQKLELLKEQNVDQLERDRQAVITLCDGKKRERDSLNVLIRDKEREIEGCRNKSIDSQSLLTSKERELKQNPDYDNELSAYLPSRDTVRYDREKETFIARCSKLSEAREAAFQELLTVRTSYIRTYPNRNFTVNARDNAAYDRLLSDLKCDNLEEYKQKATQQAKSAVEHFRDDFMYKIRSAIREALIRKDELNRIISRLDFGKDKYQFVIGRNKGPDGRFYDMFMDDSLDINPADLNYSYENQMDLFTIEHEKQYGDLMNELISIFIPPENATPEQMDEARRNMDKYSDYRTYLSFDMQQLIQNEDEVIKIRLSKMIKKNSGGEGQNPLYVALLASFAQAYRINLPSKVERNPTIRLVVLDEAFSKMDGEKVASCIELIRGLGFQAIISATNDKIQNYVENVDKTFVFANPNKKSISIQEFERERFVELMQDIEDGDEFAETL

SEQ ID NO: 32463 - protein, 392 aa, Clostridium bolteae 90B8
MNAPLECIVQKYEKSTVDWKKGMSGKRSVIFREQDFKETGKRDFMNQLMELEMEGLVKVKWYQYGIEAEKAWYSLEQMETIYQRLGKIPKFKRINKLKEEVDQQLALIQSQWIRSYYQSFLQSLDKGDVPKALDTPKRELLFTCFKAIDCLQEPVYKRIFSKKYLGKSKAFEKHLQSKVLSAARAYLDTVNDDMDDRQVLDQLMINGYAQELAVKGNLIIELAGNKINLSLFPSGFVFNNQTLRSASIPPEQFISKVITVENKANYESMPYEEGTLIIYSHGYFSPDERAFLIQLERVLSGIHTSCGTAYLHTGDLDYGGVKIFQYIKKRIFPKLYPYLMDTQTYDQYMAYGEPIETSKLEKLQRTAEPLLQPLIDKICAEKQVIEQESFLF

SEQ ID NO: 32464 - protein, 460 aa, Clostridium bolteae 90B7; identical to SEQ ID NO: 30895

SEQ ID NO: 32465 - protein, 277 aa, Clostridium bolteae 90B7; identical to SEQ ID NO: 30896

SEQ ID NO: 32466 - protein, 1130 aa, Clostridium bolteae 90B7; identical to SEQ ID NO: 30897

SEQ ID NO: 32467 - protein, 392 aa, Clostridium bolteae 90B7; identical to SEQ ID NO: 30898

SEQ ID NO: 32468 - protein, 460 aa, Clostridium bolteae 90B3
MILMNEIPDRFWSLFRSVNRSTYIEALLKINEEYEYSNYFLSREVCIQLLSEYFSRKKYVIWQDETEDDWDELEPPATRVLNWLLRTGWLRKVDDYASMTVNIVIPDYAAVMIEAFSRLLGDDEDETQVYIQNVYAILFSLKNDPRSSVSLLNTALINTKKLNKSLQDMLHNMDKFFGSLLEQKNYGTLLKEHLEGYVTEIVNKKYHILKTSDNFYLYKTDIKSWIAAMREDSSWINKMCAKSAASTRGQKKAPLTEYDIVEKLDQLERGFDDIEHRISNMDKEHSRYVKATVTRLNYLLNQEDNMKGLVIRLLNHLSEYGCPDEDLTAVSARMNLSQMTILSEKSLYKRRKTKADFTEQLKDEEESEELSMEEVLNLNKVRNRYSQKEIEAFIEGSMTDGKMVVNEQTIHSDQDFEKLILAYDYSTRRKSPYKVEEEDSEMVHCKGYTYPRLVFVRRTR

SEQ ID NO: 32469 - protein, 282 aa, Clostridium bolteae 90B3
MENMELENSMTDIAPAAGYTGNGVPYYDNLMQSEQMEVTEIIRLLWRQTFILEHKYDKRTGRFQYNRDYRVCSKHLEFMKNYFAISGVELRENSQMGVMYIQGETVVGDKLPRLATLYLLVLKLIYDEQMESVSTSVNVYTSLREIHEKLGNYRLFKKQPAPTDIRRAVTLLKKYQVIEPLDLLEDLKSESRMIIYPCINVVLMGDDVRCLLSSFEDDSDESGVQLKADLEEEEPDATDEMTEDEMAEDEMSQDEMSQDEMTQDEMTQGEMTSEEGEPWNRK

SEQ ID NO: 32470 - protein, 1130 aa, Clostridium bolteae 90B3
MEQKIANDRFLALSRICLNNWHYITKRTLSFNDEINFFTGHSGSGKSTVIDAMQIVLYANTDGRGFFNKAAADDSDRSLIEYLRGMVNIGENNEFSYLRNQNFSSTIVLELKRSDTGQCQCVGIVFDVETATNEISRRFFWHKGPMWENGYRGGKRTMSIVEIEDYLQANYSREDYFLTSHNERFRRILYDSYLGGLDSEKFPLLFKRAIPFRMNIKLEDFVKEYICMEQDIHIEDMQESVMQYGRMRKKIEDTCAEIQSLKQIEDRFITYADKEQQIEKCSYFVQKLEILQLQSEVRTLADRAKLAGEDLKKQVQARSSVDEQIGELTRQSDELLRRIASTGYEELKSQLKSLNELLEQLGKSEARWQQTATALKRWEEEDITSNQTLWDMEEFENRTIDLETLERLKKNMVSMRTDTEKQHQETAAAVRELKKQEKQTGDELEKLRSGSKAYPKYLENARSYIQRRLLEKTGKSVDVHVLADLLDVKRDEWRNAVEGYLGNNKLNLVVAPKYARSALEIYGELDKKEYFNVAVLDTEKASQNQPQVQKGALSEEVTVRESYLKPYIDLLLGKVIKCNTIEELRECRIGITSGCMLYHTFRLQHINPDNYTKFAYIGKDSVRRRIRLLEQELASLEEKKKPLDETARESLRILALPWLSAEPAEYMDWLNDINSYKAKEREKKKLIQKLELLKEQNVDQLERDRQAVITLCDGKKRERDSLNVLIRDKEREIEGCRNKSIDSQSLLTSKERELKQNPDYDNELSAYLSSRDTVRYDREKETFIARCSKLSEAREAAFQALLAVRTSYIRTYPNRNFTVNARDNAAYDRLLSDLKCDNLEEYKQKATQQAKSAVEHFRDDFMYKIRSAIREALIRKDELNRIISRLDFGKDKYQFVIGRNKGPDGRFYDMFMDDSLDINPADLNYSYENQMDLFTIEHEKQYGDLMNELISIFIPPENATPEQMDEARRNMDKYSDYRTYLSFDMQQLIQNEDEVIKIRLSKMIKKNSGGEGQNPLYVALLASFAQAYRINLPSKVERNPTIRLVVLDEAFSKMDGEKVASCIELIRGLGFQAIISATNDKIQNYVENVDKTFVFANPNKKSISIQEFERERFVELMQDIEDGDEFAETL

SEQ ID NO: 32471 - protein, 460 aa, Clostridium bolteae 90A9; identical to SEQ ID NO: 32468

SEQ ID NO: 32472 - protein, 282 aa, Clostridium bolteae 90A9; identical to SEQ ID NO: 32469

SEQ ID NO: 32473 - protein, 1130 aa, Clostridium bolteae 90A9; identical to SEQ ID NO: 32470

SEQ ID NO: 32474 - protein, 460 aa, Clostridium bolteae 90A5; identical to SEQ ID NO: 30895

SEQ ID NO: 32475 - protein, 277 aa, Clostridium bolteae 90A5; identical to SEQ ID NO: 30896

SEQ ID NO: 32476 - protein, 1130 aa, Clostridium bolteae 90A5; identical to SEQ ID NO: 30897

SEQ ID NO: 32477 - protein, 392 aa, Clostridium bolteae 90A5; identical to SEQ ID NO: 30898

SEQ ID NO: 32478 - protein, 490 aa, Xanthomonas fragariae LMG 25863
MKQRARIARYRTLREQPLWKLLAADQAPEVIGLLQTLLLDSERRLPASVLHERLQRMLNELNVDQLLRELPRTAQVYIAHWLTQGWLERRLPEGAQQEEYELSTQAIQAIRFADGLEHARGAATESRLALVMQQLSQLAALTETNPDARLSALRDERDRIDAEIARVSSGKADSLDGKRALERARQVIALADELTEDFRRVRDDFEQLNRQFRERIIDDEGERGDVLTKLFEGVDVIGDSEAGLSFQAFWALLNDAEQSAQLDAALETVLARAFARKLHRRERSFLRGLTGTMLERGGQVHDVLQHFARSLRGFVQSRGYLEQRRLNQLLKQAQAEALGLRDHLRAQHLIGCDLSLTTSRLRSLSQWRMHDPRQVQVDGSIQRNDAATISLDSVGDLVAQSEIDFRSLRRNLYALLGDNAQLSIAQVLAQRQAEQGLGSVIGYLSLGTRHGQVDAHQSETAQWCGSDGQWRRARIPLVWFSQEKRNELAG

SEQ ID NO: 32479 - protein, 233 aa, Xanthomonas fragariae LMG 25863
MNWQADNAAADAQAQADHADDLAGSGADTGTGLFPGDSGRLAPDARRVLCQLLSGPSVDVQRHSTLWPALLRHEAAVRSSLADLFLELVLDREAGVAFTRQAETGELEAPVLLRSSPLTFIDSVLLLHLRQQLTEADARGVRAVVEDAALSEALAVYEKNLSTDRAGFMRRVGNAIQKMKDNHVLTRLRGDDNRYELSPTLELLFSAEAVSALAQVYRQLREQPGSLVEVGES

SEQ ID NO: 32480 - protein, 393 aa, Xanthomonas fragariae LMG 25863
MAAASPMLLLAAALQVLRGQWQRARGQWLIGEGTPQPISLRVPTQTQAIARFDAFGHWLQSWNRTELPGRVDYREVAWPQLGPQRLPQAWVLDDAAQAAAALGEAERWQRASQRGAALHARWPQAAALAARLRRQFDLLADWPEADFSRLVAVVDWLHRHRDSGLFLRQLPIAGIDSKWIESRRGVVADWLAGLRGIAGPRSFASLSGLRAAPDRVRLRLLDPALRQHVGGLEDITAPIAQIAALHLPARRVLIVENHETGLACEALPGTVVLMARGYAIEYVRSIDWLRALPLYYWGDIDTHGLAILHRLRTYAPPTVAVLMDQATLEATPRSLWGHECEQHPEQRLDALNDEEQCLYAGLRSGRFGPSPRLEQERIAWDYAWPCIQAALAD

SEQ ID NO: 32481 - protein, 450 aa, Azotobacter vinelandii CA; identical to SEQ ID NO: 30659

SEQ ID NO: 32482 - protein, 220 aa, Azotobacter vinelandii CA; identical to SEQ ID NO: 30660

SEQ ID NO: 32483 - protein, 979 aa, Azotobacter vinelandii CA; identical to SEQ ID NO: 30661

SEQ ID NO: 32484 - protein, 450 aa, Azotobacter vinelandii CA6; identical to SEQ ID NO: 30659

SEQ ID NO: 32485 - protein, 220 aa, Azotobacter vinelandii CA6; identical to SEQ ID NO: 30660

SEQ ID NO: 32486 - protein, 979 aa, Azotobacter vinelandii CA6; identical to SEQ ID NO: 30661

SEQ ID NO: 32487 - protein, 493 aa, Rhodococcus sp. EsD8
MSTADLHRLARLRQEHPAWALLRSDNAAAVLALLGRHFDRGTRRLPAPELFARLDADLQELRDEGFELPRTGQAYCADWVRAGYLLRRASADAREETLEPTEATFAALTFAAGLTTATSSVTESRLTTLSSQLQALARDSDPRSESRLAALRAERDELDRQIAAVESGDFPVLDGNRAVERSAEILALAGEIPGDFARVRAELEALNRELRARILDDKGDRGDTLGEVFRGVDLIGSSDAGRSFAGFYDMIIDPERSSQLDDWIEAVLQRPFAQQLTTEQRNRFRTLLTEMEDAGGEVHATMTSLSRSLRHFVQSRHYEEHRRLQRLLRSAQQQALQVAQRRKPYDLLDLELVRVGMGIDSVAALRLHNPADDLVAEPVVTQPVGEVDLEELRRIVRESEIDMDELAGNVAATLRSRGSATIGDVLRDHPATQGLASAVGLLVLAAEHGHRIDGTEEIAWTSPSGATRVATVRRHLFDPTDTEFTTRITEDAS

SEQ ID NO: 32488 - protein, 201 aa, Rhodococcus sp. EsD8
MTESTTRTGLYAGDTGELDLDTRRALVQLLKGPLVTADKHPEVWRTVIRDERVLRSRLADVFLDLVVDEDDQLAFTRPADTGDHKAPTVLRTERLTFMDTVMLLALRHRLLRAQPGERVIVDFDEVAGQLEMYRAATSTDPAGFRKRVNASWEKLKKYTLLASTSTEGRMEVSPVLRQLCDADQVAAVEAEFRRIVEEDAP

SEQ ID NO: 32489 - protein, 1099 aa, Rhodococcus sp. EsD8
MSAAPIHPGQFRLARVQVVNWGTLHGHHDIPVARKGFLITGASGSGKSTLIDAISTVLMPGGSVRFNAAAQESAAGSGRNFVSYIRGAWRREADADTDALTASYLRTGATWSAVALTYNAADGTAPVTLVKLMHLRRGANANNEISHLHLILDTDVELTDLEPFVTRGVDTRGIRKRWPDAVVNPSYAPFARAFRSKLGISSEAAQRLLHRTLSAKSLNSLDQLLRDYMLDEPPTFAMAERATTQFRELREAHRVVVDARRQVETLEPLVALADARRTGLQSQRDLQDETDHLDAVHARMTVDLLSDRLDETRAQTGLLQAAADKTADEADRAGERTLDLRVRAESAGDGRLATLRVHKETAETALERITQQRKRFDVALAHWEAETPATADDFAHLQAQLERELRELDATADMRRAELYEVAGALAERRKTIRELIADREVLARRRSNLDPDLLRARELVCSAAGLGEDALHFAGELIAVRAEHAEWTGPIERVLGGFGRTLLVPDELYPRVAAAVDAHHLGARLVYRRVRTGVGAPDAPTTADGSLVRKLEVRPGPLAAWLQHHLADRFDYACVDTADDLRRVPRGVTRAGQVKHGGDRHEKDDRRRIDDRSRWVLGFDNEAKLADLRRRIGDAETDVDALQRRQEALERAESAIQLRREAAAVIRESAWSDVDVAAAGNAVDAIEERLREWMQGHTEYATLTADLDRAESEERAARQAHTAALAKLEQHRDELTRVQARLDEAQAHAGTAVPDPIFARIRTRFAAAVRRVTVDNIDRALSTVGRAINVEMRSAQHDTADAERRITAILTGYLAEWEARRAEMRSEAEYVDDALAVLARLRSDGLPAYEDEFFRLLREQSHRNIGELARAIRKAPGEIRSRIEPVNESLRRSPFDTDRILRIDVKDRRSPAASEFLAELLQITSGAWKEEDRAAAERRFEQMAAVLERLDSGEPADLRWKRLVLDTRLHVGFIGVEVDPEGNDANYHDSSSGLSGGQAQKLVFFCLAAALRYQLAAAGEELPRYGTVILDEAFDRADPAYTRRALDVFTQFGFHMVLATPLKLLQTLDDYIDGVAAVSIRDKRYSQIALLPIRGDGT

SEQ ID NO: 32490 - protein, 378 aa, Rhodococcus sp. EsD8
MSALCVPPSAVAGKAQVAYRSRRTRWITDPTAAESDSLSIGLHPPSERRVAQDPDAVVAWVRAWHRYPGAGRVEWETRHWPSFGTQEVPMRLLLSGATEIAAAAARAPEWRTLTERQARLLDGLGPGTATLATAIAATHARWLELDEPDFARLVAAVRWLAEHPSSGLFVRQLPVPGVDTKWVSRHRGLVETLLDGVRGDRDLGVRSLPRMCEVAVCDRAQLAGAPRIFATSLDELAALPVTPARTLILENKEGLHALPDLPATVAVHGGGYAVHELADVPWLAASDVVYWGDLDTHGFAILDRLRGRLPHVRSLLMDRGTVERWRDLAVPEASPAPHTPAHLTGPERDALAVVRTEGLRLEQERIPWPYVVAHLEAL

SEQ ID NO: 32491 - protein, 495 aa, Corynebacterium glutamicum K051; identical to SEQ ID NO: 30443

SEQ ID NO: 32492 - protein, 212 aa, Corynebacterium glutamicum K051; identical to SEQ ID NO: 30444

SEQ ID NO: 32493 - protein, 1111 aa, Corynebacterium glutamicum K051; identical to SEQ ID NO: 30445

SEQ ID NO: 32494 - protein, 368 aa, Corynebacterium glutamicum K051; identical to SEQ ID NO: 31239

SEQ ID NO: 32495 - protein, 518 aa, Nocardioides sp. CF8
MLTPDQGTSCSSDTGRTVEMSEIAGELARVRSAFAQPTLTLLHQRQAPVVITIFRAAFGRNNKPIATARLHTQVEEHLAQIRLAGETEVPNGTGREICHRWMRGQWLVRSLDETGREVYSLTSHAQQALELVKNLARDRATLSEHRIATILGTIRRFNAEANPDRTARVTILNTEIARLQAERDRLVEGAEIVSATEDFMLEGFTELLSLISALPSDFARVEERFATIRAEILAAFRAEDRPAGEVIDDYLARADALMTATHEGRAFEGAFALLRDDALVTQLREDLTALLEHPLSDAILGEADRAELRGTVRLVRDGLDRVLAQRSRVTATLKEYIVSHDDARDRELEQTLRQVESELMTWMATTGPRATHDVPLLPPRTTVDHLRERFHDPADDVLPDRITVADPDAAPAVSLASLMAQGGPRLTSLRERLEQVLGDLLPVATLGELFAGLEPSMRRPVEIFGLLHLAADRGWEAEEALESYSAVRHDGSRRTFALPRMPLPDPDLGHDNQQETPA

SEQ ID NO: 32496 - protein, 241 aa, Nocardioides sp. CF8
MSLDIDIEAPDGEDFDLDLDDASVSLWEGDEGGLEHAQRLALVTLLKQRFISARTHPRDWRVLVEHERVLRSRLNDLFLDLQIDRGREVAWKRQALSETGSRFPTLLYDAAWSREETLVLVHLRDRLRAGQAGGDARVFIDREDIVEYVASFRPPHATDEAGDEKRARNAVLSVAKAGLLIATASEERFEICEAVEPLLPLELLQELLEALQRANGVPPEPEDDSLFDDDEPELHDHTEGE

SEQ ID NO: 32497 - protein, 1153 aa, Nocardioides sp. CF8
MTMSIDEIEQIEDDGTVEGLFDRGVVATPADDTVQWRAALLQLVNWGGFGGLTTVPLRGEATMISGGSGVGKSTILDAYTALMMPSDTKFNGASNDAVAGRARGVGQRNLLSYLRGAVDVIDDPRTGRPVEKLLRGKGTDTWGAVAMTFVNDQGGRFTALRTYYVPRRAVRSGDVQMQLATHEGSLSLETLEVAVPERFHASTLKKLFPGVRVHRTYAEYSAVLHARLGIGANGDGAKALRLLARIQAGNQVRSVDELYKEMVLERPSTYAAADRAIEHFDDLDAAHSAMRTEEQKLELLEPITALHERRDTARRRQAELDSYGVTLTGDTPLRLWLLRTHLRLLEAAVAANRDARTATGDELAATTSAEVARHKDLEDAKEAHRAAGGSTLQALGLSLEQEQVVREDRLGRRSVLQERLLPLIDASDAQAPGVEGALSSAAAFSALQEHARQWLSGRESDHERLKRERDAVLRRGYPLQQRQSELRSERASLEGRASRVPGPLHEMRAEVAAASGLGIDELPFVAELLDVAPEEARWRTAIETVLGGTARVLLVPLDRLEDFSAAIDGLHLRGRLTFEGVPLDLPDLGPADPECIAGKLVFKDSAFAGWVQAHVSEPSRNALCVETTAGLTGSGLRVTLAGQTRSGRRGAHGRSSARSIIGFSNEDALAEIDQELASIVDQLGEVDGQVAELDRQLRVSERQRTAYDAVAAARFDDLDVEGSDQRIADLERRRVEILGSDDQLQVLQGQIEQLGLELEEARKKRFGLEQRQRELNNAHAELVDSEDLVKDRLDAMERAGTAAPSVEQDTALIAEFAAAAAPADPEELDRFAENSQRLEERLRTAVADAEAEIRRVEEELAGIFRLYKLQWDSPNLGVTVDSYADYARILDEIRGKGLAQRRAEWRRRLTEWSGQDLVPLVGAMAASIEDIEDRLEPINAILRRLTFGASGDRLRIRLRRLAPAHVQVFMRDLRALSAGATSELGEDDLDKRFTELSRFMTQLRKPSHVGEGTTDRDRLLDVRRHVEISAERYDHLTGELRATYRTLGEKSGGESQELVAFIVGSALRFRLGDELRSRPRFAPVFLDEGFVKADSEFAGRAVQAWRGLGFQLIIGVPLDKVTGLEPHMDELLAITKNSATHQSWITPITDVGD

SEQ ID NO: 32498 - protein, 504 aa, Gordonia terrae C-6
MEFSAFPAPVEAPGTSSGPESVQLTLADAWESNRSIQKSAVGRLFAATNSALYVTLMERHLDYGTKLSETELSVRLDRDLADLDLTDQATGLELVKLWARQGWLHRVTDTTDPNAPNLCHLTSEARSVLDFMRRQRREDSIATGGSITGIAAELRRVAGQVSNDPDQIRSEIEAQMSDLDAELADLDAGRRPPVDLRIAEDAARTIGYQMEQIISDIGQYGTMLDRITTALLDDPGDSDLAYRDRQRQLFDDYEALLDSPQSASYQAFSQMIQDPERRARLKHDIETIVDNFPAMDAGLRSVMDNFFGLVTQQMAEVGRTRQRCARRIRRFVASGTLEQSRGLARQLNDALATANELLKTSLADRRIGYELPLAAPTVNSIGRLAFEIREHVPPAPALPAAVDADLTSFASLSGQVDTTELTDTVNAAVAVGPVALADVIEGLEEPYLAHVIVLWSWASKQQAAGEKVPMTTVRFRSLIGDDHAIEVPDLTFTEPIPTAEVDAE

SEQ ID NO: 32499 - protein, 295 aa, Gordonia terrae C-6
MTTTDETNAGSEDKQSSPPEVRAQRASKGLETDASTDAPTTPDEFAGFDDLPTVANRAATHTPDAPRFDGDVSELPDRACWALQNLLTRRYISGDRQPQLWSWVAEYQDVLRGRLSELDLRLRIVDELQVAFVEQAGYDSRWGRKILKRETIHTYDAILALHLAKYVRAARDEPVLITREEIHELFAGVTNTIDRDLALFDKRIERALDKMEELEFLRKQRDDADTFIVSPVISAVMTASVITDLQRQFEQFIGSGDTGEVPPEDLADEPTERDDDAADLDGDNAYGENDEGDDW

SEQ ID NO: 32500 - protein, 1114 aa, Gordonia terrae C-6
MSGQVDQYHLSRLQLINWGVFDGYHSIPFSRNGSLITGSSGSGKSSLLDAISLAFLPDHRRNFNASGDATAAGSSSGKRTVGKYVRGAWGERRDGTNAHREIMYLRGTGPAWAAISVTYTSSSGEAITGLVLKWLAAGKMTDAHSSYFIYDGDADIVEACNEWAANNYNSAKFRDRGWRGGPGEGKYLSTLYSLIGIRGSDAAQQLLGKAKSLKSVGGLAQFVREFMLDAPTSIVGIADALDQIDPLVEARELLDVARRKRTILGNIEEVHERYAGEAATFSVLDTIDNTTIRGYVNNLRIRNAQPEVADLDDQITRLDGDLAALTTQHNQLRQDHSLLLSRIATSTGDLAPLREQLGGAQKLSTEVTARRNAYEDKVSALGFTPPTRAEGFWLLREELTEEAAKIDGQLDAGRAHYAEALASEVAARTRRDAAMEELGRVENAGSALPRTEHEMRRAIAHGLQIDESELKYVAELVELDPDEERWRLAVEKVLRNVGLRLLVPDKHFRAALRFVNSHDMRGRIQLHQADSRPMPVLEPGTLASKLRPVDASHPCAAEAMTVLSKLGSHMCVDSPGEFSQYAKAVTDQGLRKDSAKLAVKDDRQQLRRSQYIFVGDVASKIAALRDELDYEERAFEDARQDCAELDRERSAKEKRRDAYRRVCEQFTQWNEIDVDSVDDRVDQLTDQYDLLIEENPDVEALQRKAEDLWEQVRNAISQAALVKDKIARQDSRRTQLLDLIDRLKPEDVPAQAEKTLDGFREDLSATLDVLNPEPYRQEIVKAASRERDRLRSDARRSRDELARILDTYDEEFPDAIPNDSDDFDERLHDYVAVCRRIDERELPAAYERMRRLITEQAPGAILGLHMAADAEERRIVEQIERVNTGLGAVAFNRGTRLRLRPGRKKLAAVEELTEKARQISNRATAVSFGDEQAILEQYSDILLLRERLAGNTPEDRQWTRDALDVRNRFDFYCEEHDADSGETIRTYSNAGDNSGGEQEKLMAFCLAGALSFNLASPHGNDNRPIFAQLMLDEAFSKSDPQFAQQALSAFRKFGFQLIIVATVQNTSTIQPYVDNVVMVSKTEAGPELRPVATATSTGIKAFSELRRSGSQLPV

SEQ ID NO: 32501 - protein, 488 aa, Gordonia terrae C-6
MKLFRKDSPEVTITVLRAAFSDVEDVVEVELLHSRTDALLSELEGLGESVPRRDRARMSGREFCQRLVSDQLLGLSANSNTYSLAPAAVEALEILERVGSDRALANSSRIEAILRAARDLAALATVDPLQRTKQLDREIERLQREVVRAAAERDRIAAGGQVETAPEQQLIDAYAHLDDLIKRLPADLARVRDSVDGEHRRLTRELRDGDQSTGQSIIDHLATADLLLDTPEGKAFRGVRDLLGDRDTLRELRTNILAAVNHEVLQIGLREDERRDLTATHRRLREGLRTVQERRDRTAETLSGYVITRSLIEERELGRILDQLLGHLSAWLQTATNRTVLPWELIPEGIEIESIPERFDLTFTETPPPPLEDTSQFAPPPPTLEDILALGGPRPETLAAVVDMLRNNRDEQATLGSLFNQLPPRLRRPVELFGLWQAAAGAGADITAAPTEPFHTVRPDGSECTILAAPIVLTDAQFLTLLEKANDR

SEQ ID NO: 32502 - protein, 216 aa, Gordonia terrae C-6
MTVDSGDHHRHEVFDGDRGELDYAARTALVALLKNRFITADKQPDHWLTLMDQRALIVSRMHELLLDVHIDERNRVAYKTRVTVAEPFGQVSLLRDVRWSAYATALLVVLRQRLRAERTIVSDDVYIGFEDMVAEMTTLMPQLSDESRPTTVTVTALKAVATARLVREVSPGRYLISPALESLLPLPKLDQLLSWLTDTTTTGTADRRDAEEAEAT

SEQ ID NO: 32503 - protein, 1088 aa, Gordonia terrae C-6
MPFAVNGTTLLSGASGAGKSSLLDAYLAVMMPTAALRFNEASNDTAGRARDARTGQRTILDYVRGKTGEHREGGEMRRDVLRGQDRATWSAVAVKFVNDRGDLFTAARVYFAGRAATSDTEVKSWGITAETHVDIDRLAGLATNTGFDKDAVVAHLGVQWLSRRDFESAVQLHLGIGGATSGAEALQLLSRIQAGKAMDSSVDQLFKELVLGRPATFDYADIAVTEFTRTEAAFREAREAGDKRDTLVPITEWHEQQRQHNLRVHLLESLGAKHPASDNPPIRRWAHGAEFEIVSAAIEANRAEADLLIEDQRVVGIRRANAQGRVERLQISRSNVAEGILVLEGTLKAYKQTHERARTDRATFARRTAVLDVTVDSEERFRELTAAATAFLRTAADRKQALHARQKPFYTAFGTANATIEQLTQERELLERSRGRMLPALLKARETIARATGMTEDELPFVGELLDINPSLAQWRTAAEVTLSAVTKVMLVDAERLAEFSATIDALQIPNISYQGVDLNQEPTGSPRTGRISEVLEFDHQSPFIGWVIDRVCQPHADALRVQNPRDLGGDQLKVTAAGQTRYGRRGSAGTANIARVIGFTNESRLAEIDADLATANHQRDQANTAINKIGAEINHHDQVHAAHQMVIDTRWEHIDEAGAADAVTVTVTELARLRDDNPQLQQIDHALKQANEDLATAVAALTRLSDRLTDLQNDYDRFVVREETLSYAAADAKPVAEHHRAELDRLYATRDPSETGYSIEGFQRTVREIAREIEGEIRSAATARDLAIAELTGIFKGYDGRWHDDPNRGIGVESYPQYLKILEQISADEVYRLDDHWKQLMDDQTGTHLVELIKSYEAARDDIDDRLDPIRTILQRLPFGEHGHRLDLILEDIPSREVADFHSRIYALTRELSAVRTDDEYAERYAEMKDIIEQIRKPEYGRAGAARRNRLLNVNDHIRITAAAYDVSRPTPVEVKHYDMISSLSGGEWQELVAFVAAAALRFRLGDSGNERPRYAPVILDEAFIKANGEFASRGINAWRNLGFQLIIAAPQDKVTGIESLMDELRCITKEHGYSHISRYTKNQTHP

SEQ ID NO: 32504 - protein, 400 aa, Gordonia terrae C-6
MMRAPDDIRVAVGKYLQNTWPTTIADIADKSWPKTWTLLAEKTPGKSILDNLTHNAATTRVWSELAQSQPGLELDTKTWRVMGGQTLAQRLTIANATAAAQFVRSDAPYGEPRRWSLWLSVAQRRAGVLRTTNPALSDTAVAHLLASTAAYSDIDFDLLNATATWFTHNPGATQGLTARQVPVPGVHAKWLNTHHRQLEALSGLTKLDLEPNHPPRIQFTYLDHSYLASGRRRYDMYTMGDTSTPAYQPQVVLISENKDTAVRFPRVERGIAVEGNGKEGPSRLKNVDWIRSCSALIYWGDIDSTGFTILNNYRELGMSIVSIMMDFNNFRDYAMYGTSHHPNGEPIKTTQVELPHLTDAERAAYRAINSADAPCRRVEQERIPLLAARQRLQHVRDQLG

SEQ ID NO: 32505 - protein, 450 aa, Pseudomonas aeruginosa VRFPA02
MEDALQALSEMLAAYASQDLYEIDPDATHIQAGRELREWIKRRLVVEREGRIYATDALESAIQFVDSLDSRIMTSTASRLSVVQREIENLETGLNPSPSGRIASLRRRIQDLEHELAQVEAGHVVVLDEAQAIEGIREVYNLATSLRADFRRVEDSWREADRALRQSIISEQSHRGEIVDRLLDGQDALLNTPEGRVFESFQQQLRQSAELEVMRERLRTILRHPAVPKALNRPQQRELRWLALRLVRESQAVLQARARSERDVRGFMKTGLAAEHHRVGQLLNDFFNLALSVDWQRQAVRRSTVRLPPVGVAITGVPAIERLRFKTLDDDDTGELDLSLKPAGLEQIDDDFWDAFDGLDREALIHDTLAVLVEQGRPVSLGELASLLPPAHDLETFALWLAMAREAGIEVLTEERQLVELVDEDEQRWRFNLPYVGLDHEALKDIDWEL

SEQ ID NO: 32506 - protein, 249 aa, Pseudomonas aeruginosa VRFPA02
MAGVFDRIAGASGADETELTVEPMALDDGMDDEQPLMSAAVQVDERRTPQRVREAVQEMLKYGLLEESHKPNLYRSALSNIEAVDRILEPLDLAMGVDEVRGLLFVIVRQGEVAEQDDWSHPLVRRQRLNLEQSLLIAILRQQFIAYEQESGTGASQASVVVDELIPQLQVYLGELGSEAKERNRIITLLDQLKGHGLVSALDAHDRVIIRPIITHLANPENLQALVAWLREQVEGAATPAADGEEDMA

SEQ ID NO: 32507 - protein, 1101 aa, Pseudomonas aeruginosa VRFPA02
MKQALLWRDSETFILTSIELYNWGGFQGYHRAEIDPSGTAVIGPTGSGKTTLVDALMTLLCANPRYNLASTGGHESDRDLVSYVRGVTGPGDGGIEQSHIARQGKTVTAIAATLERDGAQVRLGAVLWFEGTSSSASDLKKLWLLSESPEQTLEHWLSQHHAGGMRALRQMEKDGTGIWPYPSKKAFLARLRDYFEVGENAFTLLNRAAGLKQLNSIDEIFRELVLDDRSAFERAAEVAGSFDDLTDIHRELETARKQQRSLQPVADGWERYQVLQEQLHDKQALEGILPVWFAEQGYRLWLAETNRLEKEYKKAELDQEQCKSQLEAQKGVVDQHRQRYLRVGGAGIDQLRERIADWVRECDKRSLKAEQYQLLAKGLGLADELSAAALKENQQHIAARLEILDQQITDARQKAFDAGLVQQELNGRLQTLQQEGAEVEKRPGSNLPGQFHAFRSDLAQALGVNESALPFVAELVQVKPEELDWRGAIERAIGSHRLRILVPQDSSQAALRWVNQRHNRLHVRLLEVQEPTSRPVFFDDGFTRKLTFKEHPYREAIKALLADNDRHCVESPEQLRHTPHAMTAQGLMSGKERFFDKQDQKRLDEDWLTGFDNRDRLAFLAEQIREVNERLEPAKLALDAAQGDVRQLETQASLLNRVKELQFEDIDLPGAQSQLESLRTQLATLTRPDSNLAMIKVELDAAEALQESLDQQLRQLIEQYVQLKTQFDQAASATRKAYNSAEKGLNDTQRELAQAHFPTLTADDLGDIVELERKHTRELQGQLKALGEKLGDQKSELAKRMSDALKVDTGALAEVGRELVDVPRYLERLRVLTEEALPEKLKRFLEYLNRSSDDGVTQLLSYIDHEVSMIEERLDDLNSTMQRVDFQPGRYLRLVAGKVIHESLRTLQRAQRQLNSARFIDDEGESHYKALQDLVGLLKDACEHSRNQGAKALLDPRFRLEFAVSVIDRESRNVIETRTGSQGGSGGEKEIIASYVLTASLSYALCPDGSSRPLFGTIVLDEAFSRSSHAVAGRIIAALREFGLHAVFITPNKEMRLLRHHTRSAVVVHRRGLESSLVSLSWEALDEHHQQRIKAMHEVAH

SEQ ID NO: 32508 - protein, 330 aa, Pseudomonas aeruginosa VRFPA02
MGKVDWEPVSYRAGLAPISLPMRWHLRSPSEWIAATDDPSVSQEYAQLEYLVEQVDSSFHALLVAQRSLWLTKPSEEVIATAQLATQLSPGCAQGRPLRLLAEHGVDTKFFERNAILLTKLLDERFEGAASEQGLTTFLDAFEETSQWVLVVPLQPELLPFKRIRLTTSELAETSLPGSRLLVVENEQCVHLLPETLPDTLAVLGAGLDLQWLASAHLAGKQIAYWGDMDTWGLLMLARARHHQPAVEALLMDRELFDQHSLGSAVVEPAKAQELAPEGLMTDEADFYRYLLAQERGRLEQEYLPRRQVEQAISKWFGESVAPAHPERTA

SEQ ID NO: 32509 - protein, 484 aa, Agrococcus pavilionensis RW1
MTTVSAALRLQRLVADDPALALLRAEHAPIIVALLSRLLGGEVRRRPAEEFVDLVDADLDALRPHFELPQTGKAYAAAWRAAGWLVRRPAAEARAETVELSPAALRAIRVFEQLEQPRATATESRLMTIRDQVQRLAIETDPDGARRREALERERAAIDAQIRAIGEGRFEPLDAARTKERVAEILRLAEDVPSDFQRVRFRFDELNHELMASLLDADESQRTVLEDIFRGVDLIEQTDEGLTFAAFSVLVLDAERSEAFEADIASLLERDLGDAMSMSERRFLRTFLRELKLHSHEIHGVLAEFARGLRRYVQSQDFQRDRALQRSIRAALATALRAAEHVKPFHASGVELPLTSVELSSIGALTAHDPSEFAIDEHVVAHEPGLADYEQLKALARDTEIDFEELTGVVNARLRGAEALTVAQLLADWPATQGVASVVGLMTLAMQHGSVSGDETETLVWPGVDGTTRSAVVRSHRFVERIPT

SEQ ID NO: 32510 - protein, 236 aa, Agrococcus pavilionensis RW1
MTDPHAAALKHAAPDEERADASTGSSALWPGDSGRLREDSRRALLELIQGPYLSSSNRGRLWVALLADADEIRSRLHELFLELVIDRNDEIAFVRPVDAGERPVPLAVRSRALTFMDTLMLLVLRQRLLAARGERRVFVDRSDVFEQLAPYRVARDEADFERRMNASWTKLMNKLGLIHRAGGDDRVEISPALRLIFDDDRVQSLRREYERVLERGGEAALDLDAAADADDRELTP

SEQ ID NO: 32511 - protein, 1109 aa, Agrococcus pavilionensis RW1
MTMLEIEGLEVLEPTAQWRLAEVQLLNWGTFDGLHRVPIARKGQLITGSSGSGKSSLLDGIAAVLTPDGLLQFNAAAQGAGGGRGDRSIVSYVRGAWSKTADEEQDRVVSRFLRPGTVVSGVLLRYHDGADAVVALARLMFLKGTSTDKGDLRDAYLLEQGELDLERLRGFVTSGANGIDTRALQRAHPKAVLTTSGKHAKFYARLQSVLGIGGDNALQLLHRTQSAKNLGSLDHLFRTFMLDRPATFAIADNAVQQFGELDAAHRHVVDLRRQRDALMVMRELGDRYDDASARATAAGELRDLVRQFEARERLRLARQERAAAEIAAQQASAALAVAREADEAAADDHRLTQQALDRAGGADLVQLDVRIRDVEREAGQRRARLERLARQLADVGIERVPGTEEQFAGLRALAEDELRQPPAKLDMEHPAVQRLARSTERRRRIDDELRALRDSRSNVDARRLGVRSRLAEHLGVPERAVPFAGELLEVLPGERRWTGAIERVLRPLATTLLVRAEHLAAARRWIDAESLGTRLVFEVVEADVPSPRSLASDASLVRKVVVASGNFHDWLAHRLSEQYDIACVETADELDRFARAVTIRGQVKRSATRYEKDDTHAVDDPTRWLLGSSEARLEALLAQRVDADAEAKEAHREVEQLQADVELSTRRRQQLSQLVTESWEQYDASSAAARVAQLERQRLVLTSASGDLKRAAAAEQEARVAATAARAAADEALAAARAAVRELEGLAGAISEAERSIAADGRGELAPEPVEQLEARFREVRRRMTLAELPAAAREVEGRLGRERERAIGERDLAAQDFAAAATSFKEKWTVASADLVARVDDRAGFRALLETIEANDLPSQEQSFRRLLRAKSSDVVGFLRKELLDAPKEVRERIAPVNESLGRSQFDRDRFLRIRVKLTRGDVVQRFMQELARIAEGSWDDEDAASAERRFEVLAQLMARLGSSEPADRKWRELCLDTRLHVSFLAEVVDRAGLVLETYDSGASLSGGQQQKLVVFCLAAALRYQLTQEGSERPRYGTVILDEAFDKADSSYTRMAMDIFVEFGFHMVLATPLKLLQTLEPYIGGVAVVQNPTQRQSTVDQLGFERSR

SEQ ID NO: 32512 - protein, 382 aa, Agrococcus pavilionensis RW1
MIPVDEARARVAARVAALARDWAADPAAAAGAVVRIALHPPSERDALAQQGAVIAWRDAWTAAATEPGVALEWATRSWSRLGAQSVPARVAIEGADALARFAGRETADAWARVRDRVAAAIEGLGGGAAVASAARSHATALAAYGDDEFQTVLDVSRWLAEHPVDGMRPRQLPIRGVDSKWFGAHRAVVSALVLAASGRESLGIVGDAQQFRVRLLDERVLPGAPRAFGASVDELAVLRVEADAVLVLENLETLLALPPMPGVVAVHGAGYAAAELARIPWLTGARVRYWGDLDSNGFAILHRLRSALPSVVSVVMDEEALLAHRDLWVREPKPARGAYPTLEPFEQAALDRVRDEGDVRLEQERIPWAFALERLDAALAQR

SEQ ID NO: 32513 - protein, 486 aa, Acidovorax sp. MR-S7
MKADKAIATYRRMRAQPLWRLLASTTGPTVIGLLQSHLYESERSLPASIFHERIARDLEELRAQGEDFPQTAQAYVASWLADGFLERRFPAGASEEEYELSTAAVEAIRFVSGLAQPHSAATESRLTLVIEALARLAEDTDTDKFRRIDRLMAEQARIDKEIDAIQKGQMRVLPHTTALERTREIITLADDLAGDFRRVRDQFDQLNRDLRERIMDNDGNRGDVLDSLFAGIDLISESDAGRTFSAFWRLLTDPEQAATLDQALDSVMSREFVGQLEAKERRFLLRLTRTLLEQGGMVHEVLQTFARSLKHFVQSREYLEQRRLNHLLKDAQRAALSLKDEVRATETLQYTLELTSSRLRSLSQWVLHDPSLQALPGQMAEGDAPPIDLESVSELVAQSEIDFRTLKANVLAVLEQRSQASISDVLEQFPAAQGLGSVVGLLALGSRHGFKADHSETVGWVGGDDERRSARIPKIFFLRERANELV

SEQ ID NO: 32514 - protein, 235 aa, Acidovorax sp. MR-S7
MNWSENDESAMPAEAQAPDAVQPPANTLFLGDSGELALDTRRALVQLLAGPSLDGRRHPKLWPILVRDEAVIRRRLAELFLELVIDRDVQVAFTRQADTGDLEVPLLLRRAQLTFIDSILLLHLRQRLTQADSQGDRAVVSTDEITEFLSLYERAANTDRAGFVKRVHASIEKIKKHSILQKIRSSEDRFEISPTLKLLFSAEEIQALTHLYQRMAAGETPAQLVQTEADEDADQ

SEQ ID NO: 32515 - protein, 1124 aa, Acidovorax sp. MR-S7
MIPEPQTASLFAREQFRMTRLQVYNWGTFSGLHDVPISERGFLFVGRSGAGKSTLLDAFSALLTPPRWIDFNAAAREADRSGRDRNLVTYIRGAWAEQKDGESGEIATRYLRAGTTWSALALTYQNALGQSVVLVQVFWLRGNANGSADVKRHYLVMERAFDLRELEDFGQSNFDIRKLKQSFPEAFARDEFRPYCERFCRLLGIESEMALRLLHKTQSAKNLGDLNTFLRDFMLDKPETFEVADRLVSEFGELNAAHQAVVTAREQVQTLVPAREQHQRRDSLMLQRNGLDELRLGVDGYRETRRIELLKEHVASLEVQANGSEGEVGRRQSTLDNHAAILRDLERQHREAGGDQIEQWEAEKSGLESQRTDRLRKRGQAEDACKKLGWSLPDLPQAFAELLGNARQEVENWEQRSNDSRAEQFRLAGEKRDAEAAFSQAVKEVQALQRQPSNIPADMLEMRRDIAAAIGISESALPFVGELVEVKPDEAEWQGAIERVLHGFALSLLVDERQYSALANHINSTHLGQRLVYYRTGRPETWQAKPIGANSLVLKLNVKEGTYADWLQAELRQRFDYACVDSIQSFRSADRAITREGQVKHSKTRHEKDDRRSVGDRRNWVLGFDNREKLGLFQAQAQELADTISRLGGEIEKLSDQDKNRATRAMQCQTLVNLQWQEIDVLPLLDRISTIERQIREAREGNTTLLQISEQIEKQKKLVDDADKDLRQATRAHDSIVDQIKTSTQKLESLLQDASIVPLTPHQVSGLDERFAKQSDAVRLDNLDKVTTSVERALNAEIEEVNRGIGACEKEIEARFADFKRQWPMDAGDMDTSLASAPDFFAKLVRLETDGLPAYEQRFFELLQNQSHQNLAALSTYLNDARKAILERMDLVNDSLGQVPFNQSANQRTYLHIDASDRQLVDVKEFKQEIQQALSHAWTEDREFAEARFLALRRLVDRLASQDPEQKRWRETVLDVRQHVEFIGREIDESGVEVEIYRSGAGKSGGQRQKLATTCLAAALRYQLGGNDHGVPMYAPVVLDEAFDKADNEFTALAMNIFTNFGFQMVVATPLKSVMTLEPFIGGACFVDISDRRVSGVLLIEYDGDRQRLKLPEHAREEASVEAS

SEQ ID NO: 32516 - protein, 395 aa, Acidovorax sp. MR-S7
MKLPEDVRQLLARRFQSKHREWLIGDPGESQWPQEVPLGIPTEQAALRQVDGVRAWVSAWQRWQANTVQTSGTLSWCGRRWKALGVQRLPEKLALRGPEDVAMWIGESARWECAQSRYQTLTARWPVLAQQLPRYFDVLADYGDADFRRLAEMLDWIANHPQSDLYPRQLPVSGLDSKWLDGRKGLLTDLVAAIQEDSSSDLDFYQRCGLKAPPLLVRMRVLDQALRARVGGVGDITAPVEDLAGLNLPVSHVFIVENLQTGLAMSDMPGAVVFMRLGYNVDVLARFPWLARAKCIYWGDLDTHGFAILHRARSYIPELQSVLMDEDTLLRHKPLWVDESAQHPATELTLLTEQEQQLYRDLKQQRWGQNVRLEQERINWDAAWSTLKRSILQNN

SEQ ID NO: 32517 - protein, 477 aa, Lachnospiraceae bacterium A4
MILKKTIPKDFYKLFRTRNMDAYMMFLVSIYDENNEVYTALGLTIEDGQAIIGEVCSKMQIEWMEDSEEAPDSAPGTPSAILNTLIRWGWIKSDYDEQLNTYILSFPEYSQLYVELFKKLQSEDDSRERESILSIYSALFTYQAEHEKNNGILRSALATSKNLETLLSNMQNGMRTYFDVLSASRNFIQIQQVLVEEINNSDSQRYAILTTTDSFYRYKESVKELISQILSQHDLMKTELSRTLRQSTANTPEYTRAETALHYSDEAVGLIYKIERQFDLIERKYNKLVEQKAVFAKRALARIHYIFQEGAAEEDSVIRLLHLIEKSPESERILGALGTKICLTAPFKRFDDNSIYKRHDSSETPFQPLAVERAQEKAAQITDFVPKPRYTRKELKAFCDRNIKDGVFRATAETVQSVEDLEKLLFLWQEVTGKQTKQDLVQLGGEIQNEEGFTFSALCMTMEEEFGDEVHRGVVAE

SEQ ID NO: 32518 - protein, 203 aa, Lachnospiraceae bacterium A4
MKYIEELSQSEAAGIKKTIQDLFRQTCILQVKCDPVTLVQRDNPRYRICANHREFIADYLSVLDCELVHDPQEHIFRIKGESMPVDRLTLTGTRLLLILKVIYRDRIMGEGLNATVTCLREIRETGSNTNLLTRKLTAQEWQDALSVLKVHQIIELPGAIGNLEDDTPIYIYSTINIFCSSVEINELIKMYEESTGEEREEDI

SEQ ID NO: 32519 - protein, 1117 aa, Lachnospiraceae bacterium A4
MKNAKKIFKRMCLNNWGGITHQILEFHEYVNLFSGMSGSGKSTVMDAIQVILYGSVSSSFLNKAADDAKNKRSVLSYLRGEQKDGTANRAGSDFCSTIVLEIEDTGSHISNCVGLAFEVRRNDTELRKMIYFSHSGKMPAQGYLTSAGCPYTNQEIRRLVEERAVNSSYRERSDVNRIYPSKEAYTNALYDSLLGYIDGKRFHVMEKSAIALKMTDGTGQFIKDYMFPKNDGDIISKISEQLGSYRDIQEKIQDMRRRIELLNEVQEAGGRKAGVSAELYRTRAMVRCVDMMELQEKLAADEEGSQKAADELLRLEERQKKLDAELEALDAALIQVSADLKASDLGAKEIQLEELVKLQEMYAADSEQWRKVTTGLRRWEEDETVTDYVSNPMLNRISDFCKGKIDQELCEGLRKNIKAAKAAIDELLEEYSSQRRELEREMKEIGHLVEDMQNDRKPYPAVLKEARAALERKLTDRYGRTVKVQILADLFNVEDAVWKNAVEGRMGRLKLSLVTEPKYARDAAALFREMKKYEEVELLDTDALVKANAAADGNSLYEAVFTDTPYVDACLRRYLGHIQKCGTIEALEQVRDGVTPDCYSYSNYSFRHLRRNDYEKYACIGTRVSKTKLASYQETLAKQEAAHRELKHTIERLKASEGFEKLDNDMEYFVRLSKAGKELGKVTGNIAALRQDITRLREGEYRALQEEKERLEARRDEKRIEQKQNQRLTNEYTRIKSQKEGEAGRLRAELDEKRAGYHADAQMEEEAANQLQTRSAQTVRNRLFAQISTLEEKEQAEAEVLQNARNRFNREYPSVGFNGMEKDNTCYERLLQDYQSDYEPKYEQEFEKQCKQIYKSLRENVIATLHGDINAAKRHTCDINRLLRKTNFADSTYQIKVEPAKDERGQFYELLTAPELDSKNTGSHMTEGQLSLGEDEFYRKYEQKLQLLTDKFMPVREEDGRVREQRLRDMEAYADYRNYLSFSMYEQVTDENGTVIRENFVDEMAGRDSGGEGQNPKYVALLAGFAMLYNSQSSRDSKIKLVLLDEAFSKMDQERSAVCLKYARKMDLQLIVCVPDERLQSLIQNVDCVYGFRRHQNRISMMHIDKGNYLELLEGDF

SEQ ID NO: 32520 - protein, 472 aa, Lachnospiraceae bacterium M18-1
MNLISKIPKDFYKLFASKYMNYYQRFLTAVYEESGRSYSLLGLTERECRLIMNEQIAAETLDWSEEQFDEEGELLTRSNMASICLKHLEDWGWLRRDYDEVLDSYVVSFPEYSQLFVELFQRLYSEEDTRERESVLSVYSYLYTYSSDSEKNNDILKSALQASRSLLQMLSNMQEGMRGYFDELSRQRSFLGIQEVLVKEMNNNESRKYAILTTTDSFYRYKEAVKELIDRNLSENEVRKQELAGRKRELAEPDNLPAEERIESRRLEHAIRLADEAMNIICLIEREFDAIERRYNKLIEQKTLFASRAAARIRYILMEGALEEDPTAVLVKLLNESGHSAEILEKLSDRMHLTEPFRTVTGQSLARRRNTEKAVFTPQAVARDAEQQEDLDEFVLKPLYTRQEIAEFRSKNERNGTFMVTEDTVRSAEDLEKLFFVWQDAVEIADDARKIEIGEDLQNRDGCRFSALTIHE

SEQ ID NO: 32521 - protein, 211 aa, Lachnospiraceae bacterium M18-1
MITYMEELSASEAENLKKTISRLFRQTCILQLRYDPVTLTPRDNPDYEICVRHRHFIENYLAVLGCEMEHDPQEHIFRLKGEGAETEKFSQTTTMIILLVRMIYRDKILGEGLGATVTNLGEIREYGANTGLLSRKLTAAEWREALYLMGRHQMIELPAAVRDVKDETPIYLYSTILLYVSAADMNELIEEYREEADDEAVQENLPADADQ

SEQ ID NO: 32522 - protein, 1141 aa, Lachnospiraceae bacterium M18-1
MKQSKKIFRRMLINNWGGISHKVMEFHEYVNLFSGKSGSGKSTVMDAIQVILYGSVSAAFLNKAADDAKNKRSVLSYLRGAQKDGTSNRENVDFCSQIVLELEDTGSRLFTCIGAVFEVGSQDTELRKYHFFSHSGQFPEDGYLTEQGVPYTTSQMKKLIEARSHSKDNRGRVEVNRTYPSREAYLGTLYDSIFGYIDPGRLMTMEKSAIALRMADGTGQFIKDYMFPKSKEDTVSAISRQLGAYREIKEKVDDLEHRIEILDEVHNTNQELVRIRADRLRAETVLRIVDIESCKTRLEAKKEDLEAISVKISGLEERYGSLDADKKEKTEELIEVKAELHSSDYGVKQKEMEELKTTIGLLKGNSRQWQEILQNLKEWETNEEISGYISNPALQCLEEILDGEISESALDKLRAGIQNAMEMIGEELAELNDSIRGTARELSEKKEMAEDLKNDRKPYRKELKSARAQLQSELSSQYGRTIHVEIFADLFDIVDEKWKNAVEGRLGRIKHSLVTEPQYALDAARIFRRMKRKEYEEVDLINTAAIKRDGPAAEAGTLYEAVRAGEPYADLCLRRYLGRIFKCESVEELHAVRDGVTPDCYSYSNYIFRHLREDDYRRFSCIGTKVSKAKLKELEEEIYQLEQRQIGDMQMRETLNRAQSFERLHQSTGQLLQLAQASRELENYLDKQEQLAKELKELEDGTMTAQLKKQKEILEQGIQELTRMLEQVNKERIGREGDLRAAQKEYGDFQDRLSALQEGFRADDRLLAEVREGLEIQSEAAYRRKQHDLCQRLAGREEEQEEQRILARNRFNREYPAYGFSGVEHENAVYDKLWEELKRDYVPQYKADFENQYRQVYHSLRENVIATIHGEIKAAYRHRREINRMLSRIRFSDSTYQIDILPAENENGQFYEMLMAPELDSKVLDNDGFEGQLSIGEDAFFQKYEQQIQRLTEKFMPPRDGEGDNRSRHNQEMERYADYRNYLTFSMYERVEDDQGNVKKNAVDEMAGRDSGGEGQNPKYVALLAGFAMLYMQQSNRDSKIRLVLLDEAFSKMDKERSEVCLRYARELELQLIVCVPDERLQSLIRNVDSVYGFRRYQNQISMMHIDRGEYLELMDGGGRNAGEYGENSAEMERNEAIHPL

SEQ ID NO: 32523 - protein, 460 aa, Dorea sp. 5-2
MNFFDYIRNDSFFKPLNLKYRRVYYDCIQILIERAKELPVLYESDAKDSITIYLRNEEISASEDSDALLQAGEILSLFRECGWLLPREIGRNGEYVVDISTDCRRLMDFLRRMTEKTDEGEMSNRIFAMYDIIRSAFDEDSVRRERPYTNILLPLLNNETELKNELTDLKNSIAGIMKAVIAFQDINSFGQFIIRDEMLDHFFREYFFIKNNGLIPAQLSYIKGKLRVLRQGEMCDKMIRECSEMREMSYEAAQERVEKYFAELQHFLSVEYESNMEMIDSRINTYYNLANTRIMLMAGNGIRLEAVLHDFLTAVSKLPEDERDTAMEKAADCARVVNQKYIGYKSFEKNRRAKNEGENIGLAAEELSEEEKAAQTEHLFQSAPNRFSVERVSNFLDVQLGNEKKISIKEKKVHRKEEILMYAAAMVYARNKEFPYDVQLSEEMVETEAADITNVTVSRR

SEQ ID NO: 32524 - protein, 198 aa, Dorea sp. 5-2
MSDYSFMEKMSGEDAYLFKRCIRKLLDATFIVEDRDEKLYEFIASESNQYDVNTYLAAIGYKVVVEERMKVAMLQQADEDVETVGLKRLNLYRFDTKQIQLLMVLWGLFLERMGYSDAVYVTVGDIVDKCKIYQVMMKPSDFKDAYRIFKRFNLIDHSDDVGTEEGKVRLYPSLLFCMDIGQLRRVMEEYLESEDEDE

SEQ ID NO: 32525 - protein, 1103 aa, Dorea sp. 5-2
MNKTILRKVHLVNWYGFGNTTIPVSECLTLISGENECGKSTILDAVKYAYTGDTQFNKATSGYNTGVGKRNLLSYTRCLVDASAGIYARPAEKIPVVYTHIALEYFDQINENPFVLGVVIETAVTDIRGTHWYVSDGNTLKDIAFVYEEDAVKKPYDASGFQKRNGVQMKNKKEGITLFMQMTGLKLPYQEVPKYQRKLRNIMAYNPAAKIQEFIKESVLEEHDVNFDKLKEAKKNIEQINSSLEQIDQELKDLESILADYDEHDKKSFRLKIDDIKIKYKKQMQCQREIREAEDIVKEGRITCETLEKRIREQYQEIDEIDRYYSETKRALRDLDVSKAIDASQQLIHTYEEQLAVLDVEKERLEIFQKRMQEAAARLRESGAGKMDANMAGLLVSKEIEAAEKQRFIDTMKEEIRKRRDHLIEERILLKKESEDIRKECIEQTEIIENCNKNRTDHSHVREQLELIREINLEFKRQGIPDEAHMACEYVVELKDENWRNAIETFLGIHRYAIIVAPSSFDVANAVLDRSGHHYVELVNTKRLVQKETECKADSVFHYLYIQNETAAEYFKYWLGRIHAVELEDVPKYDNAMSKEGKLSRSMAVTYMNMKKIKSYCLGNQAIELNKRAAEKKLKELEARENEIMEKQENLQEDAEYLRISLDHFKEYDLNAHKEAAQVSASLKEERGHYQELIEAQEQNEEFMALNERVTELGRQLEQKKKAQTENLQKKTILETTISEKERRIKKLKAEEEEKRKELEEERSRNHSAAKRAVEEYDGYLSGENPGGGLMQYEMKQSEDRRVRELEGDIRGKQQSYNNRKQEEDRLPVGLEYEAAYQRRRGKIWIEDLQGIQKKMKEQTITYERIFKREFVLNIYEAAKDARSDIADINKELRKLQFSTRYQFDVKLLSDHSDYAKILRYAEYLQETNNMLDGQFAFTGLMGYENDEVETREKEIRDIINKIIDQNDMTQMKRFADYRNYMSYEIIINNDEVKDGKLSKQVGYNSGAGTQIPYTLILSAALSMLYNVRVNSVRLIFIDEPFEKMSDHNIKLMLDFFKNQHFQVIFCAPPNKLESIGNECGVIIPVLKVSNDNMQIGKVKFHA

SEQ ID NO: 32526 - protein, 396 aa, Dorea sp. 5-2
MRRRIILKPTEIYKDYKKNNADILRKQHFGDAVSELKSMGVITAECLKFSEDIEKIYLCEEKMDTIYEWLEEVYGVVPQSSIVKKIKKIMETYVCAGEAAQKYRDSILAQTEDPRKIFDPERIDANMKMLCFLENNTEELYLREASILVYGDSKWFENHNCDEVCAWLRNFAGMSGEEYERNDAVLAHYHIIPAEQEIFIKGDWKIAWEQYVLETDRFPGGIAIASKDVRSIRRITVNASSLLTVENKTSYQRLKNHNMAMMYLGGFASRPQIEFLKKVIRDNPDVMYQHFGDIDIGGFLIHRHLCKKTSAAFGLYCMGVRQLSDERFQGCLKALTENDLARLKGLKEDAAYREVLEYMEKYGVKLEQEIVSYYIGRDAEIDPYDCHIYGGCGESS

SEQ ID NO: 32527 - protein, 450 aa, Pseudomonas aeruginosa PA14
MEDALQALSEMLAAYASQELYEIDPDATHLQAGRELREWIKRRLVVEREGRIYATDALESAIQFVDSLDSRIMTSTASRLSVVQREIENLETGLNPSPTGRIASLRRRIQDLEHELARVEAGHVDVLDEAQAIEGMREVYNLATSLRADFRRVEDSWREADRALRHSIISEQSHRGEIVDRLLDGQDALLNTPEGRVFESFQQQLRQSAELEVMRERLRTILRHPAVPKALNRPQQRELRWLALRLVRESQAVLQARARSERDVRGFMKTGLAAEHHRVGQLLNDFFNLALSVDWQRQSERRKPACLPPVGVAITGVPAIERLRFKTLDDDDAGELDLSLKPAGLEQIDDDFWDAFDGLDREALIHDTLAVLVEQGRPVSLGELASLLPPAHDLETFALWLAMAREAGIEVLTEERQFVELVDEDEQRWGFNLPYVGLDHEALKDIDWEL

SEQ ID NO: 32528 - protein, 249 aa, Pseudomonas aeruginosa PA14; identical to SEQ ID NO: 30516

SEQ ID NO: 32529 - protein, 1101 aa, Pseudomonas aeruginosa PA14
MKQALLWRDSETFILTSIELYNWGGFQGYHRAEIDPSGTAVIGPTGSGKTTLVDALMTLLCANPRYNLASTGGHESDRDLVSYVRGVTGPGDGGVEQSHIARQGKTVTAIAATLERDGAQVRLGAVLWFEGTSSSASDLKKLWLLSESPEQTLEHWLSQHHAGGMRALRQMEKDGMGIWPYPSKKAFLARLRDYFEVGENAFTLLNRAAGLKQLNSIDEIFRELVLDDRSAFERAAEVASSFDDLTDIHRELETARKQQRSLQPVADGWERYRALQEQLQDKQALEGILPVWFAEQGYRLWLAETNRLEKEHKQAELDQAQCRSQLEIQKGVVDQHRQRYLRVGGAGIDQLRGRIADWVRECDKRRLKAEQYQRLAKGLGLADELSAAALEENQQQIAARLEILAQQTTDARQKAFDAGLVQQELNGRLQSLQQERAEVERRPGSNLPGHFHAFRGDLAQELGVDESALPFVAELVQVKPEELAWRGAIERAIGSHRLRILVPQGSSQAALRWVNQRHNRLHVRLLEVKEPSSRPVFFDDGFTRKLTFKEHPYREAVKALLADNDRHCVESTEQLRHTPHAMTAQGLMSGKERFFDKQDQKRLDEDWLTGFDNRDRLAFLAEQIREVNEQLVPAKLALDAAQGDVGQLESQASLLQRIEELQFDDIDRPGAERQLQSLRTQLDTLTRPDSNLAVIKAELDQAEALRESLDQQLQRLIEQCVQLKTQFDQAASATRKAYRGAEKGLSDTQRELAQAHFPILSTDDLGDIDELERKHTRELQGQLKTLGEKLGDQKTELAKRMSDALKADTGALAEVGRELVDVPRYLERLRVLTEEALPEKLKRFLEYLNRSSDDGVTQLLSYIDHEVSMIEERLDDLNSTMQRVDFQPGRYLRLVAKKVIHESLRTLQHAQRQLNSARFIDDEGESHYKALQALVGLLKDACEHSRNQGAKALLDPRFRLEFAVSVIDREGNNLIETRTGSQGGSGGEKEIIASYVLTASLSYALCPDGSSRPLFGTIVLDEAFSRSSHAVAGRIIAALREFGLHAVFITPNKEMRLLRHHTRSAVVVHRRGVESSLVSLSWEALDEHHQQRIRAMHEVAH

SEQ ID NO: 32530 - protein, 381 aa, Pseudomonas aeruginosa PA14; identical to SEQ ID NO: 30518

SEQ ID NO: 32531 - protein, 450 aa, Pseudomonas aeruginosa PAK
MEDALQALSEMLAAYASQELYEIDPDATHLQAGRELREWIKRRLVVEREGRIYATDALESAIQFVDSLDSRIMTSTASRLSVVQREIENLETGLNPSPTGRIASLRRRIQDLEHELAQVEAGHVVVMDEAQAIEGIREVYNLATSLRADFRRVEDSWREADRALRQSIISEQSHRGEIVDRLLDGQDALLNTPEGRVFESFQQQLRQSAELEVMRERLRTILRHPAVPKALNRPQQRELRWLALRLVRESQAVLQARARSERDVRGFMKTGLAAEHHRVGQLLNDFLNLALSVDWQRQSGRRRPVCLPPVGVAITGVPAIERLRFKALDDDDTGELDLSLKPAGLEQIDDDFWDAFDGLDREALIHDTLAVLLEQGRPVSLGELASLLPPGHDLETFALWLAMAREAGIEVLTEERQLVDLVDEDEQRWRFNLPYVGLDHEALKDIDWEL

SEQ ID NO: 32532 - protein, 249 aa, Pseudomonas aeruginosa PAK
MAGIFDRIAGAPGADKTELTAEPMALDDGMDDEQPVRSAAVQVDERRTPQRVREAVQEMLKYGLLEESHKPNLYRSALSNIEAVDRILEPLDLAMGVDEVRGLVFVTVRQGEVAEQDDWSHPLVRRQRLNLEQSLLIAILRQQFIAYEQESGTGASQASVVVDELIPQLQVYLGELGSEAKERNRIITLLDQLKGHGLVSALDAHDRVIIRPIITHLANPENLQALVAWLREQVEGAATPAADGEEGMA

SEQ ID NO: 32533 - protein, 1101 aa, Pseudomonas aeruginosa PAK
MKQALLWRDSETFILTSIELYNWGGFQGYHRAEIDPSGTAVIGPTGSGKTTLVDALMTLLCANPRYNLASTGGHESDRDLVSYVRGVTGPGDGGIEQSHIARQGKTVTAIAATLERDGAQVRLGAVLWFEGTSSSASDLKKLWLLSESPEQTLEHWLGQHHAGGMRALRQMEKDGTGIWPYPSKKAFLARLRDYFEVGENAFTLLNRAAGLKQLNSIDEIFRELVLDDRSAFERAAEVAGSFDDLTDIHRELETARKQQRSLQPVADGWERYQVLQEQLHDKQALEGILPVWFAEQGYRLWLAETNRLEKEYKKAELDQEQCKSQLEAQKGVVDQHRQRYLRVGGAGIDQLRERIADWVRECDKRSLKAEQYQRLAKGLGLADELSAAALKENQQQIAALLEILDQQITDARQKAFDAGLVQQELNGRLQTLQQEGAEVEKRPGSNLPGQFHAFRSDLAQALGVNESVLPFVAELVQVKPEELDWRGAIERAIGSHRLRILVPQDSSQAALRWVNQRHNRLHVRLLEVQEPTLRPVFFDDGFTRKLTFKEHPYREAIKALLADNDRHCVESPEQLRHTPHAMTAQGLMSGKERFFDKQDQKRLDEDWLTGFDNRDRLAFLAEQIREVNEQLEPAKLALDAAQGDVRQLETQASLLNRVKELQFEDIDLPGAQSQLESLRTQLATLTRLDSDLAMIKVELDAAEALQESLDQQLRQLIEQYVQLKTQFDQAASATRKAYNSAEKGLNDTQRELAQAHFPTLTADDLGDIVELERKHTRELQGQLKALGEKLGDQKSELAKRMSDALKVDTGALAEVGRELVDVPRYLERLRVLTEEALPEKLKRFLEYLNRSSDDGVTQLLSYIDHEVSMIEERLDDLNSTMQRVDFQPGRYLRLVAGKVIHESLRTLQRAQRQLNSARFIDDEGESHYKALQDLVGLLKNACEHSRNQGAKALLDPRFRLEFAVSVIDRESRNVIETRTGSQGGSGGEKEIIASYVLTASLSYALCPDGSSRPLFGTIVLDEAFSRSSHAVAGRIIAALREFGLHAVFITPNKEMRLLRHHTRSAVVVHRRGLESSLVSLSWEALDEHHQQRIKAMHEVTH

SEQ ID NO: 32534 - protein, 381 aa, Pseudomonas aeruginosa PAK
MKSPTDIGRSLARQWQRSSVRLDRLLNSASWPQSLNIGKPSARLFTDNIQAVLRHVENWRSVKVGKVDWEPVSYRAGLAPISLPMRWHLRGPSEWIAATDDPAVSQEYAQLEYLVEQVDSSFHALLVAQRSLWLTKPSEEVIATAQLALQLSPGSAQGRPLRLLAEHGVDTKFFERNATLLTKLLDERFDGAASEQGLTTFLDAFEESSHWVLVVPLQPGLLPFKRLRLTTSELAETPLPGSRLLVVENEQCVHLLPEPLPDTLAVLGAGLDLQWLASAHLVGKQIGYWGDMDTWGLLMLARARLHQPAVEALLMEQEVFEQHSQGNTVVEPAKALESAPPGLLADEADFYRYLLVQARGRLEQEYLPKAQVELAIRKWAR

SEQ ID NO: 32535 - protein, 497 aa, Corynebacterium pyruviciproducens ATCC BAA-1742
MAVADALTLGRVREESPAWSLLAATNAPAILAVLEEAFHGDNRTLAGSELLMQVDSMLVEIREQTKMELPKSAAAYVGDWVKAGYLVRRSPQGETEEFYELSSDAHVALEYVEELVEPQRVVTGSRLGIVYSSLTDLAADTDPDEQAAIARLEAQRERIDARIATIRERGVTVASENEALERAREVLTLARGLPTDFARMRTDVEKVDSELRESIVESEVNAGDVLNSVFRGVDLIEDSEAGRAFRGFYEVFLNSERSAQIDAVIDAIMSRDFAARLSMEEREELRGLMRTLDESSGQVHDSMTGLSRSLRRFVQSREAESQQALITAINEAQTLAMKVGKQGIAGSARIGVELELTARQPQSISSWQLYDPADYRIEEDLVTAESGSIDVEALLARIRETEIDWQELTANVNAVVGERGVATIGEVLEARPATQGLASVVGLIKLGARHGERANGTELVRWKSGTGKARQARLNRCVFTDQISDTYRSRIFGGSHG

SEQ ID NO: 32536 - protein, 200 aa, Corynebacterium pyruviciproducens ATCC BAA-1742
MADDTKLSDFDTGTLTLAQRRALVKLIKGPFVSASNSADAEDFHVISESRKEIASQLDNLFLTLIVDDTAGIAYTKVWDTDLEGMRKLLRAKPLNFVETITILHLRRQLAKANPNERTIVDKTEVFEATAPYQTAQGTDHTKQARNFDSAWNNLVKSKVVVPTPTPNRFEVSQVLRVVFSSDEIKAVTRSFEEMLEDTDE

SEQ ID NO: 32537 - protein, 1117 aa, Corynebacterium pyruviciproducens ATCC BAA-1742
MSKQPIVPGQLRLTTLQVHNWGTFSGLHTVHVAREGFLVFGPSGSGKSTLIDAVSTILGPSGRPRFNAAATESGKKSGRDLVTYCRGAWQKEHDAELDDVTRSYLRPGAIWSGVGLHFSDANGTEFTAIRIMCLSAKVATPADIKNRFLLLPGFVDLKECEPLGHDQAQEATAKKLFPECIAMNRNHAPFTAALRRQLGIADDKALELLHRTQSAKTLGDLNQLIREFMLPEPPTFGIADSAAENFVQLKTAYATVVKAREQIEALRPLRANAAKRDELLATIDALNLEFAAIPTYTAKRRLQFEQSALQESQSIFDEATSTLAQVKNRIEELGAREQGLNLAINGQQGAGIAQAKLRVKELKAELGRVQKNSAQFHAFLSDLTTVRPANNEDFINLRGQLQDEIAVLTDHKATNAKRYDEILSRLLELRKTLEQTKKELDTAQKYASSMDARLLAARRLICDITGIDEKALPFVADLIHIDPAEVRWQPAAERVMGGFARTLLVPDEYYGEVVRAVDATHLGTKLTYIHFDTVLEGYSPSRFTARTLGSKIIVEPGRFEGWIQYRLSSGFDHLCAENAEEFRRADRAVTMAGQIHDKQRHVKDDRSRIDDRSRWVLYENNEERIELLIERQKRTRTKLEAEESARNQLQEKEAREAEQMASAKRVLETESFTEIDEAGAQKNLDTAQGDLDRLVDSNKELARLESELRSVHAEKKKAEKEKEALTEKIGVARKDVKVASDQIKLLRIALEGLEPLSPEVESRVKARLLSFSHSVRRDNIDQITRDAENQINKERKQAVDRCASTETNIRDAMDRYLVRWPERQGDLVAEMVAVGDFLTELDRLERDDLPAFESNFRKKLFGDTNHHLQRLRKEITSAAKAIRTEIDKLNQSLAVVDFYPGRTLRIEVRESMTALARDFSDKLARAVDGTLENDESRAQERFEALSAVIDHIVVSDRTTANQRKMRLDTRFHVAFYGVEVDATGNRGAVYDSAEGLSGGQAQKLSSFCLAAALRFRLTGMGESASKARKSRVEVDGKVYPRYGTIILDEAFDRADADFTRTSMEVFDQFGFHMILATPEKLLQPVEDYIGGVLMVECKDRRTSTTSSLTIEEAEPLA

SEQ ID NO: 32538 - protein, 373 aa, Corynebacterium pyruviciproducens ATCC BAA-1742
MRDVAWARKRALTFYNNNFQSWLAGDFSPLSLNLQPPTVKDVEADGGAAFREWKAGWDAHWAEPTYVDKRLGLYGTYSVPFRLDIASADKAARLAGKTAHWRHLNEIASAIACGTGIPDAIPILARKVSSWEDWADLTVTQFNGVVRWLQVHDASDYFQRELPIPGVDTKWLEKHGGLVSAIVGKPTFRPRPTMVELKSLDEAVPVLGGVRHLSVESDDLERVPAGFELVIVVENYTTFIALPSLPRTLAVYGGGFSVTDKLDFIGANTPVLYWSDLDSAGFAMLARVRAHLPQARSVLMDLDTAREHLPFAVEEPQPTTAPSQLLTSDELATFEFLREHSAGTCARIEQERIGYPWVCDRLNLAMEGFRDLR

SEQ ID NO: 32539 - protein, 512 aa, Treponema medium ATCC 700293
MQSSDSAYIATLIAEDSGLRLLRSKNPAPVISFLFKIFRERHLQTVNADRFETLLADFLRSQEFSGFDNSSIDDWYDWETAEIQNSEEFRLATQSIEARAHFLANKWCSEKVGYIKKYYNERQDVIIELSAGVERLFTWLDTMDSKMFIGTESRFQDILHKLRELSENTTHDPQTQIAELEKQKEALQQRIDAIKTTGEAEVYTPVQMVERLREVSKAARELLSDFRQVEENFKTILADVYKKQSVSETKGAVLGYALDANLEMKETPQGQTFDSFWDFLAADAGKNEINHLTRTIIAQVTEHGIAWEDSFLLHLKQYLHEAGRKIIDTNHSLTHRLNRVLLSRDCGDHKQLTELIAFIKTKAFELAERDIVFPKEFGIQTKAVLHFPQARTLILPPLNQSFEPIVSFTEQESAALLQRSGIFNQFYIDEALLKKHIEQYRSQFLHSAVQFSLHDLSEKFPIEKGLSEVAAYFALAPKLKPAAVILDDATERITYTYNGKSVALTVPKILFG

SEQ ID NO: 32540 - protein, 194 aa, Treponema medium ATCC 700293
MMTAQWATVCIKLLQGAIYENEEPEAWKLLQQYQREIAAYFEQIGISLFIEPADGYAFLEQKESEEGDSKSVKLIRHYPLSFELSLLCVLLREALDQFDVSQNTSSILVLKASEIRGMLSIYFKEKTDQTKLYKELNRYLNQAVDIGFLKNLSEKDLSKTGDADIDPAYEVRRIIRAKVSVDFLAEFKERLQKL

SEQ ID NO: 32541 - protein, 1131 aa, Treponema medium ATCC 700293
MQFDLLKTEDIDKNGMYLDFFQVYNWGVFDSKVYTMRCGKKATLLTGLNGSGKTTLVDAFLSLIVPPRQRFYNQSAGAESKRERDEISYVLGTYGNKREEEFTSGTAKNLRTKENCISILLGCFVLGDDQRPITLMQVRFFSGGGALQKIYSITHTRLSIEEIQKAGIDFTPQSNWKKRMTEVFGTKFYADNFAPYAEAFSQLAGLRSDRALYLFSQTVGLKGVGNLNDFIRTYMFEGRDTERDFDDLVKHYEELSQIYNEIEKAQEQLRLLQEILDAGKIFEDCEQKNRTLKQFKMILQLWYIQTVLDTITKRIVVLQQEKLLADNKRNILEAEIKQLDADMDSLKAVIQKNSTAILIKEIEHKIQFNELRLQTCRNNVRDYEQCARVLSLEIPQTEKKFNANAALLPKLREKLSKEKDDLYESSLERNAQNQVNKKEEQAIIEELESLSKRTTNIPAHNIGIRDQICAHIGCSEKELVFAGELLQVAKEESRWEAAIEKLLHNFSLCLLVPPHLYTKVNKYAATHNLRGRLVYLKTDTKPQLKKSFPEKNSLIAKLEIQKKHELSDWLEAYLYDTFDYICTDDTEAFSRAAKALTSTGLIKSKIRHEKDDRPQQPGRQAFVLGWDNIQKRQELSFSLKKLQNEIEKDDTALEDSKKKQDDITDQLTILSSLEKMQFWDDLDVQKYSAALNASLEEKEAILRGDKELRQLENKLQGLQIEKQTKEEARTAYIETSSKAEQQLTDIRIKQERFTAQLHQYADGESEETQRALAIFTEHFSVQKTFEQSEAVDTERDRIELALNKESEQAETAVRNAERKVREKMSAVKNPKPDIKRKFPSWEADVRDFQVEVSGLADFQAFYDRVNRDDLPSCRKKFKLIFNEHVKNDITNFKTILDTGRQQIIVGIEELNKSLKTIPYSKNPPTYIKLENRKTTDQSIKDFQALLLAALPDSASIFNRTSGSEFEEYKKIETLIAYLKENDPRRKKVLDVRQWFNFAAIEYYLNDNTQKQYYEDSASLSGGEKSKLTYTILASAIAFQFGITGGEGYSLRLVIIDEVFSKIDMDNSCYAMELFKEIGLQMILVTPMDKINIVEDYIASVHITEKHNDNTSRLLNITIDRYREEKEQYDKC

SEQ ID NO: 32542 - protein, 438 aa, Treponema medium ATCC 700293
MISVEAIRKKAEHKFVPYLYSVLNGDDAFFPLHIPAARGSATDDFAMRKTEAEKLYRHSKQAKGFGYTVMSAVVKTRSKGVQTIIEKILFESEADFLRFIQKETEACNFKTNLEHIKMQCLKLDAADIMHDWTVKHSSVLTEAFDAQYWEQLFLCADWFIHHSPCGLYLREIPLPVHTKFIEQNRALIFSLYCALKRDWHRDETAGQRSDRAQPLAAESCNGRSAGEKATELQNTAEAIYAEWGVRTASPFVRLRLLDEAISVTIAGETLKSGEVQLPLESFATLRFNSVDTIFIVENLLVYLTFPTVPKGLCIFGSGFAAVQLQHNIHLRQKKLYYFGDIDEHGFEILSEFRAIFPDVTSFCMDSTTYQTFAQFAVPGKSSKRNSADLCLTAEELALFRYLREHTECNRLEQERLPQDFIKERLASLITIRNSYAKL

SEQ ID NO: 32543 - protein, 497 aa, Dermabacter sp. HFH0086
MSDLQTFGGHSANERAEAYERLRRMSTWRLLSATKAPATLAILQTVFPAGDRRLDRSELVARVASHLDLLRGDEDLQRGASEYVDSWVREGYLTRRDDPTTVETTFELSVSTVEAISFISSLEEHRPTTTESRLTLVMQQFERLAEDTEGDRDVRLRGLQLRRAQIEREIQALSEGELMLPPAEHSAERLRDILQVADELSGDFLQYREDLRAVDLHLREQILSPEGSRGEILEQLLAGDDLLGQSKVGKTFTAFFRMLNDPKQNERAQDLVDRLLSRDFTRTLTRRERDRLANVFSDLYEPAQEVLDVKTELYRSLARFVRSQDFRQHRVLLDLLQEAQGIALAQKDSVSHRKTEEVDLGLSRAQMSSVAQHLLKDPSDPGVPPEAEVHDASRLSVEVLDELVRTNDIDLVGLTSSVNEVVHAKGQASIGQVVREQGAPQGLASVIGLMFLATAHANAREGDTEIVRWREDSLEAGGTDYAARVPAFFFLSEVPEP

SEQ ID NO: 32544 - protein, 264 aa, Dermabacter sp. HFH0086
MDNSCAAGRLEGVENEKGPRMREHEETATDGRTAPAATPSTDRDEWALASDDEDLTYAGSTGGALVEDSRRVLVALLQGPYLDGRRDPQRYGQLLRDRAYIEQRLADMFLELVLDDDAQVAFVRQSEDDPDAPKLLRRLTGLNRLDSVLLLVLRQHLLTQSSRGQRAVVSEAELIANIAPYRRTTSTDEAGFTKDIRASIAKIQRAGLLEEQGDSFEVSPVLKLMINPDTARTFIDLYERAGDDITGAANALDNPGATNEGQAK

SEQ ID NO: 32545 - protein, 1139 aa, Dermabacter sp. HFH0086
MSNATGEVPLSDVHNTLDGLGEAGVGTAPENPRREPSDPEHPHPGQWRLNHVQLSNWGTFHGTHDLEISSKGYFLTGGPGTGKSTLLDAISALLTPPRALHFNAAASDAGPRSTKYRRTVASYVRGAWAMHYDPATGEFSQEVLRENSTLSVVSLRFGNGLGETLQLTRMFLLQSGHSADSDVKSLYVISSKPYDVSELRPFVGTSIEGRELEKTLEGTETFRQFREYRARFSQILGIPDEKALGLLHKIQSAKELGDVNALLRDYMLDEPRTFDLADQALANFQNLSEVYDALVTAREQRDVLTGLKNADQVWREARSRGSELVDRRNDIDVFAASHLVRLLADEKDRLTRDQDRLRAHRNRLSQDISDARGDLAQLKEQRKSAGGGEIDDWKKQIAGLEVERDRRRERATEFSGQLALAGLHTPSNEETFTQTQREVAKLRAALEEDEKNEAQTQWEAEAKVREHAHALETTRQELASLTTRASNLHSDDVALRDLLAERTGVAPTDLPFAAELLQVRAGEEEWTAAAEQALRGLARSILVPERAYRAFAREIDGMKLRRRVSYNRINTNVKTAPKKLDARALGAKIEIREGEFHEWLSNEVASRMDYLCAENLEEFTKHPRAVLRSGQIKHSATRHEKNAERQINDRSNWVLGFDNRAKRAVFEAERTRAEQALFEAQARRRDLEKEAQTRREKLFALQAIQAVTWDDVDAASVARRIANLEDMVRAAEDGSSALTEIARQIDQVEMSISEGDEELLEIVGQLGRVNEQLDQISERHLQAEAQLEERTLSPETTADLEERFRAIAPTLLISNIDQVTRDASATLDAELMALTKKTARAEEDMRTAMREFTRRWPAGGADVDTSLEAAPEYLAILRGIEEEKLPEVEDRFFEFFTSNTLGDVQALATAIAREPAQIRKRLAKINELLAQVEFHEGRYLQLSMRPVHLAALDEFKRALNEATSSSLENDLTLDRDKAEERFLALQNLMDIITKARTREDLASRAILDVRRHVHFHAEEVNEAGEVVHAHESGGPLSGGQNERLTTFCLAAALRYQLAGTGVDVPRYAPIIIDEAFSKGAGKFITAAMESFRHFGFQVVLANPGKNPQALAPFIGGVGVVSIREDRYSSVSPIDFIPAA

SEQ ID NO: 32546 - protein, 482 aa, Bacteroides stercoris CC31F
MQVEEITQILRESPSVRLIKSRSVDFFLSFVIEAFEGQAAIMQERLHMLLENRLDEQENTLVEDDSEMTRLVESNEQKAKRLIKDWTDKGFLTNYQNEEGEVIYEISSHTSKLIDWVVSLKKEDYIGTESKFKTLFSQLKELVEYSNEDREKRLELLRTKKMEIEHQIQRLEMGEEVEVYEDYQIEPRYNSLNKLAKELLSDFKEVDDNFKGIIKEIYERQTENAEKKALLNYIFDAYGELKQSQQGKSFYAFWEFLLSADLQKEWDELAGALYKTLENRGIDAHDMFLKEMKKHLFDAGEKVAKTNDRMSEKLSRIIRQNGHMNAEATKQVINDIKKLLIEASRRKEKPDASLEYETIDINLPLERPLTLTPVKETVYKDKPDIAGLSLADLESIGKLYNPYHIDRKVLRDRINEVLNDRQQTTLAEVIERNEGVEKGLSEVFGYIGVLKEYKTVVSEERQQHIIFTENKTISIPEIIITR

SEQ ID NO: 32547 - protein, 194 aa, Bacteroides stercoris CC31F; identical to SEQ ID NO: 30463

SEQ ID NO: 32548 - protein, 425 aa, Bacteroides stercoris CC31F
MTIMQQMNLFNTSSEVAGFKLDYLEVWNWGTFDKKVYHMNLHGNNSLLTGANASGKSTLIDALLTLMVPLKRQRFYNQSSGVEKKGNRTEESYFFGNYGNQQQEGAASTTTLRLRDKGARSVLLASFCNVDKRVVTLFQVRYYTGEELKVLFGVARESLTIERDFSEFDLHGDWRKRLTKKYNTNETKRTIEFFDGPVAYGEKMITLFGMRSDKALTLFNQIVGVKVLDDLDSFIRTNMLEELPAEEKYQELKDNFQNLMEAKTNIDKVKEQIAQLEPINALTEELKEIDIRIVEMEQEKSVAAYWFAARTVDLCDKELVCCKSDLRKLEDRLKELKVQKGELEQEQMRLTVAIEKDEVGQQIHEIEKEINQRVRIRDNRKAKAEEYDKLAKLVKMEQSPDVEVFEINRATAKREKDALQVTIDR

SEQ ID NO: 32549 - protein, 524 aa, Bifidobacterium animalis subsp. lactis Bl12; identical to SEQ ID NO: 30666

SEQ ID NO: 32550 - protein, 269 aa, Bifidobacterium animalis subsp. lactis Bl12; identical to SEQ ID NO: 30689

SEQ ID NO: 32551 - protein, 1165 aa, Bifidobacterium animalis subsp. lactis Bl12; identical to SEQ ID NO: 30668

SEQ ID NO: 32552 - protein, 406 aa, Bifidobacterium animalis subsp. lactis Bl12; identical to SEQ ID NO: 30669

SEQ ID NO: 32553 - protein, 485 aa, Pseudomonas sp. CFII68
MKASTAIATFRRLRTQPLWRLLASDHGPLTLGLLQTHLYESERGLPASIFHERIERELEELRVRGEHLGTAQSYVAGWLSEGYLERRFPPGASEEEYELSTAAIEAIRFVSGMEQSHSAATESRLTLVIQALVHLAENTDTDKHRRIERLLAEQARIGKEIDAIQGGQMRVLSEASALESTREIIALADDLTADFRRVRDQFDQLNRGLRERVMDSEGNRGEVLDSLFAGIDLIGESEAGRTFSAFWRLLTDPEQAAILDQALDSVMSREFIARLDTGDRRFLRRMTRTLLEQGGAVHEVLQTFARSLRHFVQSREYLEQRRLNQVLKGAQRAALGLKDEIKATETLNYRLDLTSAKVRSYSQWKLHDPSLQALPSEMHEGDAPTIDLESVGELVAQSEIDFRTLKANVLDVLSQRAQATIADVLEHFPATQGLGSIIGLLALGSRHGYKGQSHEVVSWVGGDDCPRSARIPTLFFSRERMDELV

SEQ ID NO: 32554 - protein, 233 aa, Pseudomonas sp. CFII68
MNWSEELNTDSPGAATTIDEAGPDALFINDCGELPLDTRRALVQLLSGPSLDGRRHPKLWPILIRDEAVIRRRLADLFLDLVIDIDLQVAFIRQVDTGDIEAPRLLRRAQLTFIDSILLLHLRHLLTQAESHGERAVVSTEEIVEFLHIYERIGSTDQAGFTKRIYASIEKIKKHSILQKIRASENRFEVSPTLKLLFSAEEIQALTRLYLDMAAGDIPMGEETAEPGEETDE

SEQ ID NO: 32555 - protein, 1124 aa, Pseudomonas sp. CFII68
MNTLSRTGLLLAPEQFRMSRLQVYNWGTFSGVHDIPVSSRGFLFVGRSGAGKSTLLDAFSALLIPPQWVDFNAAAREAEKTGRDRNLVSYVRGAWAEQKDGESGEIATRYLRTGTTWSALALSYCNDAGQRVVLVRLLWVRGNANGTGDVKPHFLIFERDFDLRELEEFSKWNFDVRKLKQTFPEAVSHDKFRPYCERFCRMLGIESEMALRLLHKTQSAKNLGDLNIFLRDFMLDKPETFEVADRLVSEFGELNAAHQAVVIAREQVQTLAPARDLYQQMQTLQLEHSSLEELRIGLNQYEQMLRINLLGKHIADLRIEAQGHQGEHDKLQAVLKNHNAGLQDLERRHGELGGDQIQQWRMDLGAQELQRDERLFKRRQVDEACRKLGWTLCTTPQGFAEQVGEAREEAERWESGNAGSRDLHIQLDGKKKETESTFERVRREVHALLRQPSNIPADMLDLREKIASAIGVAVDALPFVGELIEVKPEEAAWQGAIERVLHGFALSLLVGERHYAALSNHLNNTHLGKRLVYYRTGKVESSLTRPSGVESLFLKLNVKNGTQADWLRTELQQRFNYSCVDSVQAFRGAERALTREGQIKHSKIRHEKDDRRNINDRRHWVLGFDNRDKLALYQQQAQELADEIAGLDAKISALLEQDKTQRMRAIVCQTFVNVRWQEIDVAPLLERISMIERQIKETLSGNVALEGVAEQIAQLKDRIKQTSETLLNARVALETAQKQIRMDEERLQALQCDMPAVSLTPDQQRGLKELYNALSDFVNLDNLDRVTRSVDKKLGDEQSIVAQSIAERKNGIERSFDDFKRRWPMDAGDLDTSLLSAPDFFAKLARLESDGLPAHEYRFFELLRNQSHQNLAALSTYMNDARKAILERMDLVNESLDQVPFNQSTSQKTFLRIEANDRQLSDVREFKQQIQEVLLHAWSDDREFAESRFIELRKLVERLSSQDPEQKRWRDAVLDVRQHVEFIGREIDEEGIEVEIYRSGAGKSGGQRQKLATTCLAAALRYQLGGSDHGVPMYAPVILDEAFDKADNEFTALAMNIFTNFGFQMIVATPLKSVMTLEPFIGGACFVDISDRKTSSVLLIEYDDGHQKLKLPAHVREEAEVETP

SEQ ID NO: 32556 - protein, 392 aa, Pseudomonas sp. CFII68
MKLPEDVRALLIRKFRTKHREWMRAGVVPQEALLTWPLEINLGIPTEQAALRQSEGVRTWVSSWQAWQGPGTLEWSERRWRSLGTQRLPRSLILANPAEIALWIGETTRWATAQDRHTTLIGRWPMLSDVLTRHFDVLADYSETDFTHLVEMLKWISDHPNSNLFPRQLPIAGLDSKWLESRKGLISELLAYIQNDPLSSRDFFLRCGLKPLPLLMRLRILDPTLRRRFGGLSDITAPWEEIAGMDMPLSRVFIVENLQTGLAFEDLPGTVLIMRLGYAVDMLGRLPWLTRVPCFYWGDLDTHGFAIVSRARSYLPSLRTILMDERTLLSYKTLWGEEKEPHPSIMLANLTVREQVLYEKLKRNTLGQNVRLEQERISWDFAWREIQEVASD

SEQ ID NO: 32557 - protein, 472 aa, Osedax symbiont Rs1
MLFNKLPEDLFVPFSGQNRHIYQTVLIELADLFFDEDLIEPFIAKDLVRSTIENAVVRIGLRKWQREAEDTEDDYQPPRSTAEYANRIYRRLVSTGWLEEEQQIYKSYVLMAPSNSYLLRSLVAIAKMEKRSYGGAVLNVLSSLEAAINDPEGRGITLQEAAQSSAEFSAHLTDMLLGLRELKISLAQSTSPQEIVRQFFDTFVEQILVSDYKTLKTKNNPFRFRRQIISLLRDLQFDPIKLEKLINHYQLQFENDYLDAEAMVHTHINRIIRIFDSVDKRLDSIDDFRYKLEKRVADTIRYMDKTSPGMASRLSRLISAVAKNPLLLDQQPITQLENSGFLSPSSIRSPIRRKIQVAPRVIHQQIIDPKVLELRELFKSYKERREVRVDRIENYLHRHLSPGKSLSAEQFSIESIEDYICFSYIRHLASLGKRGKATHEKYQIEFKDNYTEVDDMVVCRDFTIHSTKQGSK

SEQ ID NO: 32558 - protein, 247 aa, Osedax symbiont Rs1
MLSDLQKYINRSDKYQEQDFIRAANLLMTNQFIHADRSSHRESYFLISSHIEYFKNLFSALGWSFIYQPDEAYLGILPQGDERNLKLKLDESLILLCLRQMYEQKLENFEIESGKAFTSSDEILSLFETLTGKDLPNETRTKELISLFAKHGLIERGKMEEGNAKNILFSILPTIRQVVVEDHIKQIELLCDPEHSRDALSAEEEALEELDDTEQEGAQHSAAASEDGHLANSSVDSNSMESKNETA

SEQ ID NO: 32559 - protein, 1147 aa, Osedax symbiont Rs1
MKQLNRIVLVNWYVLGAVEIPIKGNVAIVGPNGSGKSSLLDAIQTVLLGGNKRHLSFNASAGQKSERSLRTYCLGFMDDGGKQGSAREDSVSYLALSFFDTETATETCVGIAINANTASPDEEILGRFIIPNFSVQLDDFTLKDGVGRIPKDWDQVKQELFKQAPEMILEKRASRFVKELMLHLSEDSARPNDEEKFIKNFKNALRFVPIDSPTRFIREFVLEEKIVHVGAFRKSLEEYRAMEDKTAEVSSRIEQLTKVQEQCSGIKRNVKNAVEYEWVVHETRFENADLKKEGAADRIETNQAKEVDLQSELEKHSGDLNTLMQDLANARAQLNNTNSAHQIKALESNIAAQLHEEGVVKDQIQNSYNLLRSTVVFADHAELLPEKFAPLVNKCVTLWRSGEDMLASSWPAEPVEVDSTLAELKGQVDTIRRDIGRKFEESVIRINELRSNIQNQKGQVEQLKQGKAPVRHNTRELMALLADYGIESTPVCEMVDINDDKWRIAIESFLGARREALIVDADHVKEAITLYRRKGRHLKGCRIINTTRSRDWLNRHKPNSLVHFIDTDNEHAQAYMNRALGGVIAVETETELLKQERALTYDCMLQTEGSTTSIHEQTPIMGVRRRGDQLAVQGKQVDAMVAEFTSLGQRHQTLEKLRDNLINLTTSLVGSHESTFELVNQRTQLAKEIAGHRQAIEDLRNHDDSGIQANIVRLADQQKVAEQQHQQIMDHLQKARTAMIKDNAALEVLDQEIQEHVQARAVCEDKAIFDPQAAQEKRDYLDESCTGELARIIFEAAKKAQSELQLHERKKYAVRDAVAEYKAQYHGGGLSHQGLDKISPNSSHQELESYVTETLTALVDTELAQYKERAESARKEAEAAFRSDFVAHLNDQINQIKDLIRELNQHLKNRPFHKEMYSFEMTPNPELKDILELVEAYTRIDQANVGTLFDISYDPDKPYKNALEKIHEVLKSEGESSLLQDYRNFYNFELVIKDLKGRRKTTLSQRIKTGSGGEHQVPFYVAMAAALAASYRLKEGPEGRAVGGMSLSVFDEAFNKLDSENTMTSLGFMSDLGLQIIIAAPDEKYSLLSSCMDTIINVCRDGRVVDIDVEFPTEKAKKMLNADNPKKVQAEQAEAEAEAEAELEAKS

SEQ ID NO: 32560 - protein, 491 aa, Osedax symbiont Rs1
MSNDLSYEFLEQFKEQSIALRLLRSQNFSLIGSFFYRAFISKNRRAMPYQELIGLLDHHLSDIADTYGAAKYPKPARAYLDDWINSKGGFLRKYLPQHADEPECDLLPEVEKALRWLEEMQGKRFVGTESRLKLLLEMITNLVQGTSVDKPAKLAALQAKKAELEQQIIAVEQGMDSGLSHTEVRERLYLLSDMSRQLLGDFRQVEANFRLLDKDTRKKITLGGAHKGQVLDKVFGDQDLIDQSDEGKSFGSFFELLMTPKMRENMRGDLKRLLANPQGREFVNSDQLLQYLYSYLLDAGTKVNQTKQQINDQLRRYIQEQSQDNKRILELIREFEASALQVKEQQQEITAGEFSQIDGVQADICTQFSRSLYQQKLDEQFNSTVENASASPEVDLGSLFEVSHIDEFQLARNIQQGLAAHDGQVSLAQVIEKCPVEYGLDEVLTYIKLACEQQQKATIDTQQQQKISWQTAEGITRVLKIPAITFVRELT

SEQ ID NO: 32561 - protein, 217 aa, Osedax symbiont Rs1
MSATNENNTQTASLDSTQSAKLQQQQKSALQIKLLKGVLYRSKNRDLWQYLERDQYQVREYFSQLGLSLTLDDAEGYAFLKQVDFDRETEVLELPRLITRRHLSFNQTLLLVALRKRLAEHDSEESSPRLIVTRAEMHQWLSPYFSEVSNQIKQQREFDALIKKISEMQFIKPLINHSDDFEVLRIIKAFISAEQIIEFNQHLQTLALNHSEQGEAS

SEQ ID NO: 32562 - protein, 1142 aa, Osedax symbiont Rs1
MSLFDNPDLATKDALPSQSLDLFSEDQSMLGGFRLHCFAVLNWGTFDNKIWKMSPNSENALLTGNIGSGKSTLVDGLTTLLVPPRKVSFNKAAGAADKERSIESYFHGYYTSHQDETGKARAQGLRKAEHYSVLLAQFYSQALQQKISLAQVFWLKPGENKVKRLFVVAEQGLQIETDFSGFGTQITQLKKQLRKHPGLQTFDSFASYQQVFSRLLGLGADGKALELFNQTISMKSVGSVTDFVRQNMLQTPDVELQLQELESSYDDLKRLHDAVVAARQKVQLLTPVSDYGERALTAEREKVQLNHSRDLSDGFVASLAVDLYQKRIEQRQLQLDKLEIELGQLEQQKQQHEEAVAQLNDDILNSGGGRIQLLETAIGRASHDRDDSRKIYNNYQTLTRALALSDTLDVDTFVANLNSAKELAEQLNVDLEALETEQDELKHQLRASDTEQTGISEQLSALKQRKSNIHVRQLNIRERLCQELQVDEERLPFVGELLQVKPDQVRWQGAIERVLHNFALSLIVPDDLYQRVCDFVEQTHLGTRLVYYRVKAVDNYFPGTAAGQSLLSKIEIKAESEHYQWLHRELQQRFDYQCCAELSDFRRSEKAISLNGQIKSGKFRHEKDDRHQLQDRSRYVLGWSNKEKISLLTAALTQCQASAKQLVGRINLAKQQRDQLSLQQRNAFNLAAFDFSFENLNWPLHAAKVKSLVDEKNQLELASDILRELRERLASTKQALTVVDKERDSSLTLKGRTESELEADWQTLAQQQEILAQLDTTLRAACFPIVEQCYRQHVQKSLLRIDMLSGIATQLRSKLNEQIQNLESKRRRAEQKMIVAMSDFAHSFANEVTELDQSLASLKEYQALLKRLEQEDLPRHEERFKQMLNRDTIRAMVIFRSHLDKQEEEIDARIHLINQSLRELDYQAGTYIQIDAITSPDLEIREFKLRLKSCAEQNSDDDLYSEQKFEQVKELIEQMRNQPKWTQKVVDVRYWHLFNVIERYSADDSEKECYSDSGGKSGGQKEKLAYSILAAAIMLQYGLVHQESGNSGKRKFNLVVIDEAFARGSKDSTRFGLELFKKLGLQLLLVTPLQKLDVIEHYVQHVHFVDQQNNRSVLLNMSIEEYRDKLAKHKSLRHYQHLVKEA

SEQ ID NO: 32563 - protein, 397 aa, Osedax symbiont Rs1
MLTAKQLKAKLEKQWQQAKFQKAHFNNLPVFPFQIKIAKLSERTVMHKYAEFQAWQQSLSAAFSDIEGVELQEQEVSYKKIGRQLHPVALSFENIQAVARYLGKWQRWQVLEQQVKKLQQQLPVLREWLLENPTEVDNYLPHWPKLADICRYMQRHPQPKIYIRQLCIAGVDSKFIERHQGILKTLLDICLTPQDINQEYTKLKEHGFEKRFGFLYDQPLVRLRILDPALSVEFSGLSDISMPITEFTELNLLLDRVFITENKVNFLVFPPMKNSLVIFGVGYGVQLLQQSHWLADCQIHYWGDIDTHGLAILSQFRGYFPHTRAMLMNQHTLLACRSAWGEEPASKAHKSEKLAYLADAEQQLYQDLKSHKWQKNLRLEQEYIDYQLVIDWLGKLH

SEQ ID NO: 32564 - protein, 448 aa, Osedax symbiont Rs2
MLIELADLFFDEDLIEPFIAKDLVRSTIEDTVVRIGLRIWEREEEDTEEDYQPPRSTAEYASRIYRRLVATGWLEEEQQIYKSYVLMAPSNSYLLRSLVSIAKMDKRSYGGAGLNVLSSLEAAINDPEGRGITLQEASQSASEFSAHLTDMLLGLRELKISLTQSQSPQDIVRQFFDTFVEQILVSDYKTLKTKNNPFRFRRQILTMLRDLQFDSIKLEKLIHHYQLQFENEYLDAEAMVHGHINRIIRIFESVDKRLDSIDDFRYKLEKRVADTIRYMDKTTPGMASRLSRLITAVAKDSSLLRKHPIRHLENSGFLSPSSIRSPMRRRIQVAPRVIHQQIIDPKVIELRELFKAYKARREVRVDRIEDYLARHFANNDTLQADQFEIGSIEDYICFSYIRHLASLGKKGKATNEQYNIEFKENYIEVDDMVTCRDFTIHSTKQRVS

SEQ ID NO: 32565 - protein, 237 aa, Osedax symbiont Rs2
MLSDLQKIISRSDKYQEEDFVHAANLLMTNQFIHADRSSHRHSYFLISSHVEYFKNIFAAIGWAFVHQPDEAYLGILPQGHERNLKLKLDESLILLCMRQMYEQKLESFEIESGRAFTSSDELLSLYLTLTGKDIPNETRSKELLSLFSRHGLIERGKADESNPKNIFFSILPTIRQVVVEDHIKQIELLCDSENGRDALSDEEEALLEQEESEVSDREPVAATQPTTEMESNDETA

SEQ ID NO: 32566 - protein, 1139 aa, Osedax symbiont Rs2
MKQLNRIVLVNWYVLGAVEIPIKGNVAIVGPNGSGKSSLLDAIQTVLLGGNKRHLSFNASAGQKSERSLRTYCLGFMDDGGKKATAREDSISYIALSFFDTETAKETCVGVAISANTASPDEEVLGRFILPDFSVTLDDFTDKDGAGRLPKDWDIVKNSLLKQCPEMTLEKRASRFIKDLVAQLSQDAARPNDDEKFIKNFKNALRFVPIDSPTRFVREFVLEEKVVHVGAFRKSLEEYRAMEQKTAEVASRVTELEKVQELCSGIKRNVKNAVEYEWVVHETRFENADLKKEGSAERLEDNQQQEVQLQGRLEAQSAELNTLMQDLANARAQLNNSNSSHQIKALETTITAQLHEEGIVKDQIQNSYNLLRTTVAFDEHADLLPEKFAPLVKKCVSLWRSGEDMLASSWPQEPVEVDSTLAALKTQVDTVRRDIGRKFEESVIRINELRSKIQNQKGQVEQLKQGKAPVRHNTRELMSLLSDYGIDSTPVCEMVDINDDKWRIAIESFLGARREALIVDPEQVKEAITLYRRKGRHLKGCRIINTTRSRDWLNRIKPNSLANYIDTDNDHAQAYMNRALGGVIAVETEAELLRQERALTYDCMLQTEGSTTSIHEQTPIMGVRRRGDQLAVQGKQVDVMVAEFTTLGQRHQTLEKLRDSLINLTTSLVGSTESTFDLVNQRNQLAVEIAGHRQAIEDLRNHDDSGIQSNIATLAEQQKAAELKHKQLMDQLQKTRTAMIKDSAALEVLDKEIEEHVQARSLCEEKPQFDAQSSQEKRDYLDESCSGELDRIIFEAAKKAQSELGLHEKKKYSVRDAVAEYKAKYHGGGLSHQGLDKISPNSSHEELESYVSETLQSLVETELAQYKERAENARREAESAFRSDFVAHLNDQINQIKDLIRELNQHLKNRPFHKEMYSFEMTPNPELKDILELVEAYTRIDQANVGSLFDISYDADKPYQNALEKIHEVLKSEGESSLLQDYRNFYNFELVIKDLQGNRKTTLTQRIKTGSGGEHQVPFYVAMAAALAASYRLKEGPEGRAIGGMSLSVFDEAFNKLDSENTMTSLGFMTDLGLQTIIAAPDEKYSLLSSCMDTIINVCRDGRVVDIDVEFPTEKAKKLLNSDNPKMLQAQAELEQQIA

SEQ ID NO: 32567 - protein, 478 aa, Pseudomonas stutzeri B1SMN1; identical to SEQ ID NO: 30501

SEQ ID NO: 32568 - protein, 196 aa, Pseudomonas stutzeri B1SMN1; identical to SEQ ID NO: 30502

SEQ ID NO: 32569 - protein, 1127 aa, Pseudomonas stutzeri B1SMN1; identical to SEQ ID NO: 30503

SEQ ID NO: 32570 - protein, 394 aa, Pseudomonas stutzeri B1SMN1; identical to SEQ ID NO: 30504

SEQ ID NO: 32571 - protein, 491 aa, Mycobacterium sp. VKM Ac-1817D
MPDAGTGGTSLDQLYQLHREVADSRSLRLLVTNNLATYLTLMERHLDRGAKLTETDLVVRLERDLADLGSETEQSGLSLIKYWASQGWLHRVTEQSGDTERNVCYLTYEARAVLDFARRMRREDTIATGGSISGIAAGLRRVAGQVSNDPDRIRADIEAEMAKLRDELEALEQGQRPEPDLVDAEDEARAIALQMEQIISDIGQYGAMLNRITTRLLDASADTDLGYRERQRQLFDDYESLFASRESASYTAFTRMIQDPEQRAALVADIEAVTRELPHLDPDLREVMTGFFSLVSAQTAEVGRTRQRCARRIKRFVASGTLEHSRGVTRQLNDALTSAHDLLSISLADSRIGIEVPLVRTDFNSIGAVAFKIRDAIPPSQAETSHGEVNLSAFSALASQVDAAELADLVNGAVAAGPLALSDAIGMLDSAYLGHVIVLWSWALKQPLSQPESDAESVRVRFRSLEGADREIEIPRLVFTEPIPTASESML

SEQ ID NO: 32572 - protein, 254 aa, Mycobacterium sp. VKM Ac-1817D
MTDNPDTSPVKDGSIDFDALPSIDAVERSTDQRRAPRFDGDVSELPDRACWALQHLLSRRYVSKDNHSELWSWVTRYRAELTVRLSELDMRLCISDDHDIAYVEQADYESQWRRRLLRRETLNTYDSILALHLAKLMRAASRDENVLISRDEIHELFAGVNNDTDRDTASFDKRIDNAIERLTDIEMLTRNREDEDSFTISPVVNAIMTASMITELQQQFEQLKRVANGTAYDPGASDDPDVSERLEDEVDAHG

SEQ ID NO: 32573 - protein, 1120 aa, Mycobacterium sp. VKM Ac-1817D; identical to SEQ ID NO: 32009

SEQ ID NO: 32574 - protein, 492 aa, Corynebacterium terpenotabidum Y-11
MMNTRAHSAYRQAVGAFRNPTLELLHGRYAPFVVATLSLLFTADRPSVQVTDAHIEVGDIVDELRAAGAEEVDRGLPHGTGREICRYWVRVGWLVPQIEDDVEVYRLSAQAVGALDTVGRVGGGTNRVSRSRIRTLLDAVDQLSHDAETDPAERLAVLRAERDRIEEEMRLIAAGEIDPVDDEQLLEEAENILHLSRELPADFARVAESITAMQRDVVAELRRDVRPVGEVLREYLHRGQHVLEATAEGRAFAGALSLIGDPGRIDDLTDRVDALLALPFADTLLPPQRRELAAIARRVEQGVAEVLTAQRRASHVITAQVQTHDPVRDREVDDLLREAMAGLQTWMGASGPGDAVEPVRTFPTASLGHLRQTLSDPRPPGVPAPLHHEEEPDFAEEDARAWGGPHYADLEDHVARLADAGITDVDLAATFADLDTNLRRPVDLLGLLEIAHRNGMTETDEVSVVDAVRPDGTTRRFAFGAVTARTHEEDLP

SEQ ID NO: 32575 - protein, 210 aa, Corynebacterium terpenotabidum Y-11
MSEPFIAPVAMENDPAECFAGDRGVLDPAVRRVLVRLLQRRVLLADQAEDWTVLLDNQQIIESRLHDLFIRLIVDTDRGVAYKQQVRSGETEVPILLTDRAYSRVETLVLVYLRTVYQREATAGDQQARVDREEVEDTVLTYFTDPGGDIAGRQRAVAKALDRLRHEGIVDEESEGRYRIRPIIEIVLSAPRLRELNDWLAQSTTEETAR

SEQ ID NO: 32576 - protein, 1108 aa, Corynebacterium terpenotabidum Y-11
MTMLDTLFGLIPEASRGEQWLAGDLQLVNWGGYDGLHRVRFAPTATLLCGGSGSGKSTLMDAYIALMMPHTTPFNGASNGAVTGRPRGEDQRNILSYGRGKTDETRSGDHTRVRVLRGDGEDTWTAVAMTWTGRDNARFTAVRAWYIPATARVLDDAVKVRAVTGGEFDLADLEPAAAHRLSDATVRAAGLETFSTDREFLARIHTVLGIGAAGAGSKAMNLLARIQAGQQITTVDELYKRMVLEEPATMATAEEVVDHFDELESARVRMVTARKQVRALRPLREIRARQDAAARRLDLIDGIGRFEEAESVASLWRAARRLDLLTAEETVVRTRAREAKDEVRAQTAAVDAAVAERDGLIEVLRNSGGDRLETAHRELDAAARRSAEVRRARESFDEATACLGTPVTTRAEFDALSATARGVLDDPTATGRDRDAYATARAALSAARADLAQIEEERRTVGERTGNIPAPLHEARAQLAEAAGLPETDLPFVGELVEVRTEFEPWREAFNLALGGFATTMLIDDAQLPAFRRAVETVRTRTRIRYEGVRTSTPAVTPDPARLPGRLDYRDSPFTGWLTTRLDRQFGFVCVDSADQLGEHPSALTLTGQMSQGLRGAHGGHGRRNVLGVSNRRLLADLDARIADARRRVAAAEDAERAASAGLDALDERLAAYRRVREITWDRIDVATVTAGEDRWTQLIEQVGEDAPELGDLQRRIDGLARRIDSLQKSLGRAEGTQERLAEQWAAIADEVDAATALVDDATEAGRELTTEQADYLMERCGAPGADLAAFDAATALASRRLREDRDAAEDTVAEQRDQLRRTMESFLDQWPNPNLRTDPDTSLPDFERILADLETSGLHDLEAEWKGSLLRLSGNDLTNLASTLNRARREIQERIAPINRIMADLPFYDDDHRLQISLRDNRSEARTRFLAELREVRGLIDGASSDEDRGRAYDRMSLLINRIRRTAPDVDGLIDVRNHVRVSAEKIHAASGAHVALYDHIGEKSGGESQELIAFIVGAALRYQLGDADAPRPRYAPVFLDEALIKADAHFTARAIGAWRGLGFQLIIGAPNDKYSAIEPHVDAEYDILKDTSGRSWAKPKVGVPQG

SEQ ID NO: 32577 - protein, 486 aa, Mycobacterium abscessus subsp. bolletii CRM-0020; identical to SEQ ID NO: 31485

SEQ ID NO: 32578 - protein, 249 aa, Mycobacterium abscessus subsp. bolletii CRM-0020; identical to SEQ ID NO: 31486

SEQ ID NO: 32579 - protein, 1115 aa, Mycobacterium abscessus subsp. bolletii CRM-0020; identical to SEQ ID NO: 31487

SEQ ID NO: 32580 - protein, 481 aa, Mycobacterium sp. 012931
MHDDNAGLSATELLDLNRDLQGSRAIRLLATTNLSLYATLMERHLSDGALPETELVVQLERDLEDVNDPQPGLALIKSWAAQGWLHRIVDERHGQNVCYLTQDARRALDFLRGLRRQDTIATGGSITGIAARLKQVAVKVDNDPARIRKHIEAEIAALHEELDQLDAGQRPQTDVTDCYDEARAIALQMERLITDIGQYGTMIERATSALDEPIDSNAEYRDRQRQMYSDYQAAWDSQGRDSHRAFLRMINDPDQRAEFEADVAAVAEALPSLDPALRKVMAGFFELVGHQIDEVERIQQRCAQRVKRFTAFGTMEQSRGVARQLNEAIAAARALLKSSFTDSRLDIEVPLARHAISSVGALGFRIGDLSNPKPAKPGDTEVDLTSFAAFTTQVDAPAMSDMLNHAITAGPVALPDAVAMLDTAYLGHVIVLWSWALKQPNPDTAESTAVRFRSLDGRDLEIAVPRLTFTEPINTIAGAST

SEQ ID NO: 32581 - protein, 231 aa, Mycobacterium sp. 012931; identical to SEQ ID NO: 30759

SEQ ID NO: 32582 - protein, 1120 aa, Mycobacterium sp. 012931
MTEQFHLSRLQVINWGVFDGYHSIPFSVGGALIAGASGSGKSSLLDAISLGFLPFNRRNFNASGDNTAAGSSAGRRTVDKYVRGAWGQRSDGGTSRVMYLRGDGTAWSAVAVTYASDSGRTVTGLVLKWLTGESRNDSSSRFVLGDGDLDIEEVCNRWASGRFDAGVFKEDWRFSTKVESQYLAQLYAAIGIRASDAAQQLLGKAKSLKSVGGLEQFVREFMLDEPDSLARLPEALKQIDPLVEARELLAVAQKKRKILGDIEQIQQRYASESSDLGIIDLVDAPMVRAYTDHARLAQCPAQIATLDGTVDQLENEYEDVTRSLNLAKAEADSLNAQISGSSANIAPLQSQVTAAETQAEQVERRRTTYEDMLAAQGIEIPDTADEFWNLREELLAQATELLAKVERNREASTDAEYAQKAARIARDDVAKELKRVEHVGSALPEFALAMRDHICAAIKVDAAELPYIAELLDLRPGQTRWRLAVEKVLRGVGLRLLVPDQHWEKVLRFVNETDMRGRLQLHHVRAKFLGAEPAEPEPNTLAGKLFPVDPKHLCAAEAVDVITGAGDHVCVDTPDVFSRFRRAVTDTGLYKDSDRLAVKDDRRPVKLSEYLYQGDVTAKINALTVELAAAEEAYQKARRTADDIAAQRQQWRDRTAACKAICEQYPQWSQIDTETADGHAERLREQYELLMADNPDIAALNARADECWSQIQKLMTRRGAIQTRRDSLDERRTRLLELQERLSPAFVSEPLTELLQRYAAQLPVALELLDPEPHRDALFAAIKKEREQLRESRRRSYDELARILNTFDTSFPDAIPNDSDDFDERVHDYVALCRHIDERELPEAYERMMRLVTEQAPDAILTLHRVAEQEARRISGQIDRVNTGLAAVEFNRGTRLTLRATPRHLVAVDELTQIVRSISRRIAEVGLGDKQAILDQYAEILRLRNRLASTAPEDKAWTRDALDVRNRFTFDCAEWDVDTEELIRTHSNAGDNSGGEQEKLMAFCLAGALRFNLASPESDNNKPVFAQLMLDEAFSKSDPQFAQQALHAFRKFGFQLVIVATVQNATTIEPYIDSVVMVSKTEPTGGNARPVASVATRTISEFTSLRQEMRKTAERVPAGV

SEQ ID NO: 32583 - protein, 481 aa, Mycobacterium marinum str. Europe
MHDDNAGLSATELLDLNRDLQGSRAIRLLATTNLSLYAMLMERHLSDGALSETELVVQLERDLEDVNDPQPGLALIKSWAAQGWLHRIVDERHGQNVCYLTQDARRALDFLRGLRRQDTIATGGSITGIAARLKQVAVKVDNDPARIRKHIEAEIAALHEELDQLDAGQRPQTDVTDCYDEARAIALQMERLITDIGQYGTMIERATSALDEPIDSNAEYRDRQRQMYSDYQAAWDSQGRDSHRAFLRMINDPDQRAEFEADVAAVADALPTLDPALRKVMAGFFELVGHQIDEVERIQQRCAQRVKRFTAFGTMEQSRGVARQLNEAIAAARALLKSSFTDSRLDIEVPLARHAISSVGALGFRIGDLSNPKPAKPGDTEVDLTSFAAFTTQVDAPAMSDMLNHAITAGPVALPDAVAMLDTAYLGHVIVLWSWALKQPNPDTAESTAVRFRSLDGRDLEIAVPRLTFTEPINTIAGAST

SEQ ID NO: 32584 - protein, 231 aa, Mycobacterium marinum str. Europe; identical to SEQ ID NO: 30759

SEQ ID NO: 32585 - protein, 1120 aa, Mycobacterium marinum str. Europe
MTEQFHLSRLQVINWGVFDGYHSIPFSVGGALIAGASGSGKSSLLDAISLGFLPFNRRNFNASGDNTAAGSSAGRRTVDKYVRGAWGQRSDGGTSRVMYLRGDGTAWSAVAVTYASDSGRTVTGLVLKWLTGESRNDSSSRFVLGDGDLDIEEVCNRWASGRFDAGVFKEDWRFSTKVESQYLAQLYAAIGIRASDAAQQLLGKAKSLKSVGGLEQFVREFMLDEPDSLARLPEALKQIDPLVEARELLAVAQKKRKILGDIEQIQQRYASESSDLGIIDLVDAPMVRAYTDHARLAQCPAQIATLDGTVDQLENEYEDVTRSLNLAKAEADSLNAQISGSSANIAPLQSQVTAAETEAEQVERRRTTYEDMLAAQGIEIPDTADEFWNLREELLAQATELLAKVERNREASTDAEYAQKAARIARDDVAKELKRVEHVGSALPEFALAMRDHICAAIKVDATELPYIAELLDLRPGQTRWRLAVEKVLRGVGLRLLVPDQHWEKVLRFVNETDMRGRLQLHHVRAKFLGAEPAEPEPNTLAGKLFPVDPKHLCAAEAVDVITGAGDHVCVDTPDVFSRFRRAVTDTGLYKDSDRLAVKDDRRPVKLSEYLYQGDVTAKINALTVELAAAEEAYQKARRTADDIAAQRQQWRDRAAACKAICEQYPQWSQIDTETADGHAERLREQYELLMADNPDIEALNARADECWSQIQKLMTRRGAIQTRRDSLDERRTRLLELQERLSPAFVSEPLTELLQRYAAQLPVALELLDPEPHRDALFAAIKKEREQLRESRRRSYDELARILNTFDTSFPDAIPNDSDDFDERVHDYVALCRHIDERELPEAYERMMRLVTEQAPDAILTLHRVAEQEARRISGQIDRVNTGLAAVEFNRGTRLTLRATPRHLVAVDELTQIVRSISRRIAEVGLGDKQAILDQYADILRLRNRLASTAPEDKAWTRDALDVRNRFTFDCAEWDVDTEELIRTHSNAGDNSGGEQEKLMAFCLAGALSFNLASPESDNNKPVFAQLMLDEAFSKSDPQFAQQALHAFRKFGFQLVIVATVQNATTIEPYIDSVVMVSKTEPTGGNARPVASVATRTISEFTSLRQEMRKTAERVPAGV

SEQ ID NO: 32586 - protein, 481 aa, Mycobacterium marinum MB2; identical to SEQ ID NO: 30582

SEQ ID NO: 32587 - protein, 231 aa, Mycobacterium marinum MB2; identical to SEQ ID NO: 30759

SEQ ID NO: 32588 - protein, 1120 aa, Mycobacterium marinum MB2
MTEQFHLSRLQVINWGVFDGYHSIPFSVGGALIAGASGSGKSSLLDAISLGFLPFNRRNFNASGDNTAAGSSAGRRTVDKYVRGAWGQRSDGGTSRVMYLRGDGTAWSAVAVTYASDSGRTVTGLVLKWLTGESRNDSSSRFVLGDGDLDIEEVCNRWASGRFDAGVFKEDWRFSTKVESQYLAQLYAAIGIRASDAAQQLLGKAKSLKSVGGLEQFVREFMLDEPDSLARLPEALKQIDPLVEARELLAVAQKKRKILGDIEQIQQRYASESSDLGIIDLVDAPMVRAYTDHARLAQCPAQIATLDGTVDQLENEYEDVTRSLNLAKAEADSLNAQISGSSANIAPLQSQVTAAETEAEQVERRRTTYEDMLAAQGIEIPDTADEFWNLREELLAQATELLAKVERNREASTDAEYAQKAARIARDDVAKELKRVEHVGSALPEFALAMRDHICAAIKVDATELPYIAELLDLRPGQTRWRLAVEKVLRGVGLRLLVPDQHWEKVLRFVNETDMRGRLQLHHVRAKFLGAEPAEPEPNTLAGKLFPVDPKHLCAAEAVDVITGAGDHVCVDTPDVFSRFRRAVTDTGLYKDSDRLAVKDDRRPVKLSEYLYQGDVTAKINALTVELAAAEEAYQKARRSADDIAAQRQQWRDRAAACKAICEQYPQWSQIDTETADGHAERLREQYELLMADNPDIEALNARADECWSQIQKLMTRRGAIQTRRDSLDERRTRLLELQERLSPAFVSEPLTELLQRYAAQLPVALELLDPEPHRDALFAAIKKEREQLRESRRRSYDELARILNTFDTSFPDAIPNDSDDFDERVHDYVALCRHIDERELPEAYERMMRLVTEQAPDAILTLHRVAEQEARRISGQIDRVNTGLAAVEFNRGTRLTLRATPRHLVAVDELTQIVRSISRRIAEVGLGDKQAILDQYADILRLRNRLASTAPEDKAWTRDALDVRNRFTFDCAEWDVDTEELIRTHSNAGDNSGGEQEKLMAFCLAGALSFNLASPESDNNKPVFAQLMLDEAFSKSDPQFAQQALHAFRKFGFQLVIVATVQNATTIEPYIDSVVMVSKTEPTGGNARPVASVATRTISEFTSLRQEMRKTAERVPAGV

SEQ ID NO: 32589 - protein, 447 aa, Serratia liquefaciens ATCC 27592
MLALLVDLDTFLDPTQLVDEPTPQQVRVFLRDYIANKNLCLEIASVEATIGNPALEHYVYNRLRDTGWIREEQESGYRYVVWMAQDARRLLNFLGNMSAEHPSLGVVCLAVRSNLSEVVKDPTNGSLVRKAADDMEDFLNRLRALVGNIREIHHAISGGSVQGSGHFTFYFEEYLAELFLPNIEKLSLKGNPNLHASKIRKLVSDIRFSSERLEACARAYKRDDISNPSVQLVEADLDRLSKAFDGIAPLFKKTQDYARRITRRMYEKIKYTVHTPSNMGQQVQALLERIGSEALLVSLPSPLIGEELLADCRLATPKAKSILPVPTVRRQPKPLWEKRAYNQLKQEHISFQKCDPTRVANFIESNLGERVQMTTDDLRIDTADEMMAALHLRLLAQGIPKTHPLFSLQSMYCVEFDEGEWTDLKQMAGRRLRIRRIVAMEKRTHDE

SEQ ID NO: 32590 - protein, 223 aa, Serratia liquefaciens ATCC 27592
MTSEIALRELKDIEAKTSADYADSLRNTAAYLLQKQWVWKGKRGQKEHFKLCEDNLAYFNKLFDGLDMGWYYDRNFGYAGILPRGSGKQLDITSTLFLLILRKMYDAEASMGRTELGCVTPPTVELLNQYEHVRGEMPPITETNNALENLRKKGIIELGIKDPDTKLHELTVLPNITRVVDQTYVGMLNRFMDSYTPESASGEAVYEGTDDLETLEVYDDSAE

SEQ ID NO: 32591 - protein, 1170 aa, Serratia liquefaciens ATCC 27592
MTVQNNPIQAHILHNVVLAQWYLFELETIHLNAPATLVSGENGAGKTTIFDAIQFVLMGGDQRKTRYNSASETKTSGRSARSYALGEFKENDAKSCQRENANTYIFLNWYDNHQCPYAFGLSVYANSQSPNIETRGHIIKGRHITEADLLSGDDAFLPWRDFVDRMKQDAKERHGAMSYELLDSARTIREKMAEAMSVNQTRSAKIEPDLLVKTLSNALQLKMDSPIDPFIRDFILPPDLIETYQLREDLLEHQRIEAEIARAESHKNARELLIAEAKKLTRHYANAHHALWVSQEADTVRLNEELGRTEDAQIAAQERQTAAKRTIDREEPRLPELKQCRDDALIAWQNSDAASLSRAVDAAKSAVSKSTNSLTNRIFSLQNAVREVIRQRFPDTLGIQSFELLARHWATSVDILNRAGIESLSASEHENTLKVTDKLKSAKTLLDEIAERIEVADKNVSHDLTQTMHECKALQVRIERLRKGLSDINPATAKVIELLKQERIESMPVCDLCEIADRDWQEAVESYLGPNREALVVSVRDFDHALEVYEVAQKREPQLKRVRMINPDHALAANKAPTERMVSKLIETSDPIARGFMNVILDRTKMAATRDELRRERKALMASGLATGSGTVGGTAHIRGLLMGKQAKAEQLKLLEHERDVLAQRLSGVERSAQTLSRLNRNWAGLSTSIVEGSSSVRENSIRLMQDKKALSAAQEQLKPLTSKDEQLKAAKAQADDNYEACNTAIINATAEQKNAIATLNSLNTEIESLSKNRDEAERIRSETEKSPIHNTAKADERWQTYEQKFGGEEGCYSLIRNKAQNEAQVEREKALNTRGDLYYKVVRFTTDFAEDIANRQALLEAAKTDNVNTEAYHFIEADCTEWVERILAAQLLVHRQAAREAAEQMEKNFRGIIVGELQSRFEQMRYTFNQLNNLLKKVPFHDHIYSFHFKVREIESLRTVYEYITTADREETELVGTMFETASEHPAIDLLKEALLSGDDLINEISDYRSFFTYDMKMRNPDTGTERSVADMQSTGSGGEQQTPAYIALAASFMNVYKISGHSDRGASLVLLDEAFNNMDGGNASAAVAFLKEIGLQLLIAAPPEVTLKIGKEMDQIYTICREDRDVVIDHTQIFEAGQELIDQRNPVYHPELVAERAAELKAKAEMVE

SEQ ID NO: 32592 - protein, 412 aa, Serratia liquefaciens ATCC 27592
MNSYVEKFINQLIKKIDKPEGVELECRIRITDHAYRWYFALNNSTKTALHKTLESIAYLNIHYQRKVALGAFKHIEYIQIVDGYRLMDSQGVIPQADEIKVSFRHLETTVFNVPWWDNTKLEIAKEWSSNKTFCGVNRNQADRLFDAMKVIEWIVQLPVSENVPDIRTLSAMLYGNSKKLECKSFSGLIRKLMLPHIDDDVVDLLDDGVKLLEYFGISKYPIPMRFKANGLLHCRGIIDLSALHYGIGVSPDEVKGIVWGQRPPYVLFIENRASFERYVREIDDFGVIIYTAGFPPRSWVHVIEIIIAELRMEIPIYHWGDRDAGGYRILAFLAKRLDIDIQPYLMGVEAEALTQADDELVDKPVVELMQALESAKHYPAILALYRDLAKLQIKNLPWIEQEQIAPVSPRKY

SEQ ID NO: 32593 - protein, 482 aa, Desulfococcus multivorans DSM 2059
MNFDYNALDHLRQTHPAWRLLCAKYAPLTASFLHRVFIVPNVRILAEADLVEALEDELFVLREQMGNDAFPGSARSYLTDWADNDKGWLRKFYPPGTDEPHYDLTPASEKALAWLEGLTDRAFVGTESRLLTLFELLRQMSEGTQTDPEARIAELKRRRDEIDGEIDRILAGDIPLLDDTALKDRFQQFLQLARELLTDFREVEHNFRVLDRRVRERIALWEGGKGALLEEIMSERDAIADSDQGRSFRAFWDFLMSQSRQEELSRLLEEVLALPPIQAMQPEPRLYRVHYDWLEAGEHTQRTVARLSEQLRRFLDDQAWLENRRIMDILHHIETRALALRETIPQGDFMSLAETGADIDLPLERPLFRPAVQNRITETAVDEGDAEVDTGVLFSQVVVDRAELSGYIRRELQMRDQVSLGEIVARHPLRHGLAEVVVYLQLASEWPWTTVDEEHRERLRWRTETGRVREAILPRVILLRNG

SEQ ID NO: 32594 - protein, 209 aa, Desulfococcus multivorans DSM 2059
MMETNAVGTNLSDESPYELSAVVIPLLKGIIYQEDSPALWLALVNLQAGVRDYVAVLGLELMLDEAEGYAFLRSREEDPDVAGTPRLVARRQLSYPVSLLLALLRKKLAEFDAGGADTRLILSRDEVVELIRIFLPAGSNETRLIDQIDTHLNKIAQLGFVRRLRGQKQMIEVRRILKAFVDAQWLSDFDRRLAEYREETAGTRETTDD

SEQ ID NO: 32595 - protein, 1121 aa, Desulfococcus multivorans DSM 2059
MIETQELEFIKDDRLAGFRLQRLEVFNWGTFDRRVWTLRLDGRNGLLTGDIGSGKSTMVDAVTTLLVPSRRITYNKAAGADARERSLRSYVLGYYKSERQATLGSAKPVALRDANTYSVILGVFHNAGYGKTVTLAQVFWMKDSAGQPDRLYAACEGDLSIATDFSNFGADMTGLRKRLRKADIKLFNSFPPYGAWFRRRFGIDNEQALDLFLQTVSLKSVGNLTDFVRTHMLEPFDVDVRITALIQHFDDLNRAHEAVLKAKRQVEMLTPLVADCDRHGELVQAVDGLRACREALSPWFAGQKLGLLEKRLTLLQENLARHTVVIERLEEQRRVYQGRERELRRSIAENGGDRIDRIGAEISHQKASLERRKAKADRYAELVRSLDRVPATNPEDFLVQQRDFEALREAAVIAEDRVLNDLNALGVSFAQERREHERLQEEITGLKSRRTNIDEKQIAMRRMLCGAVNLAEVDLPFAGELLQVREAARDWEGAIERLLHNFGLSLLVPDRHYAKVADWVDRTYLKGRLVYFRVRKPRRGNAVPPHPDALTGKLAIKTDSPYYAWLEQEITHRFDVVCCADQDAFRRERKAVTKAGQIKMPGERHEKDDRHRLDDRRRYVLGWSNAAKIAALEESARRGEDRLTELGSRIADLQKEQKQIRERLGTFFKINEHKEFRDLDWQPAAVAIARLEAEKRELEAASDLLQTLAAQLETLEGDLAAVERRLDQRKDNRSETREKMRAAEAQREQTARLLEGSGGEASARFGQLETLCMEALGEHRLTVESCDHREREMRDWLRGKIDAEEKKVARLREKIIRAMTEYKEAWKLETRDVDVSVAAGFEYRAMLDRLRADDLPRFEARFKELLNENTIREVANFQSQLARERETIKERIARINGSLFQIDYNPGRYITLDAQATLDADVRDFQTELRACTEGALTGSEDAQYSEAKFLQVRRIIERFRGREEHTELDRRWTAKVTDVRNWFVFAASERRREDDSEHEHYADSGGKSGGQKEKLAYTVLAASLAYQFGLEWGAVRSRSFRFVVIDEAFGRGSDESTHYGLQLFDQLNLQLLIVTPLQKIHVIEPFVAMVGFVHNGDGRCSVLRNLSIEDYRAEKRRLQT

SEQ ID NO: 32596 - protein, 395 aa, Desulfococcus multivorans DSM 2059
MSWTTPEDLRGQVRRLWDRGLLPAALAGGDTIFPRRLVLKGPSSRELAERFDDVRRWIARLEKGAEFYRVGWRTVNHRILGVNAVPDEIWIDSLDDALGLIDKRRDAERFAALISLTRERRPELSAWLAKRPLRGLALADDWARLLDIVDWLRRHPRPDIYLRQVDVPGVHSKFIERHRAVLSELFDLVMPLAAVDASAGGIGGFCRRYGFRDKPMRVRFRTLDPDLSPFTTTADLDMTLTRDVFDRLALPVARVFITENEVNFLAFPPVSGTVVIFGAGYGFDNLAGAEWLRVGEIHYWGDIDTHGFAILNQLRRYFPDAASFLMDEPTLLAHRVHWGTEPNPETGDLERLTPEESALYDALRRNRWGNRIRLEQEKIGFNCVASALERLSRPD

SEQ ID NO: 32597 - protein, 503 aa, Ralstonia solanacearum CMR15
MHGPGKVQWEQSALIPSDLLPEPMTPPAGHPVFFEGERQRFFRPLNSSRRELVAACLRALYDRLHGPMADYAHNLTRDALRELLLPVVRQYQSVKAQEGGDDELSGAEADDPQALVGMVIRALLTDAWLEQFADRTGLVTAFRFSRPGKLFAEALWSLDRPSRSRQRNMRGCRNALEAALSDRGDAHDLVDAYEYAEKVIEDLTDGIDYFQELVRHLMQTASVQTQWSEFVEFLDRFQRDYSKQLTADNATLNRQAIVQKLERLRLVPEAKFNRMDEQLRDVAHWAVKEHVGTSVYDWLLTRIEDIVDAACQSKQPGFLKAMETYLKRVNGLALQSMMLRAGQTRHAYLAAIQQVAEAPKEQQDLLLAHIGQFLAPAEVRLLDPASFKLRTAAQRRKAVTISVRPRPPREERLAAAMARAEAEAFSIPNEEVAQLLRRDLRIFQHPIRVSALPTATARDTLRAMQAVEAVRSEVGADLSIKKLPTRLENELYSGNDYEIDLKK

SEQ ID NO: 32598 - protein, 223 aa, Ralstonia solanacearum CMR15
MSLLSHINEQLALANIKPDRFREIINRLMAYGAIVREEDRVEHLLYDDARRVEGLLEDYFDIAGFRLHHDSNNQFYRLYVAGAVVDGLPEDILEPTPSLRARVSPDFIAMALALRFLYQNKLNTGDIQPQGEALVSFEEIAATMQTQLKRPLPNGMGDKMALLAELKRHRLLSYTAEFSISDEDALLAIRPTILGIVSNDALSAALEAEGVVDQETFVEEADQ

SEQ ID NO: 32599 - protein, 1210 aa, Ralstonia solanacearum CMR15
MKLDRLVLVNWGQLQPGNYELGNMTLLTGPTGAGKSTMLDGLQTIMTAAYQGIVAYNPGQEEVQQNHRRGKSKRTLESFVVGAEYSLFSRPEGAQGYLAAVFRPGPEDGSAKMFTALVAASARVDGSGERRDAKLERLVLVIIEDAALSAEQFFEDMDQGICVPVEDIVKRLKAKYPKVVTYDDHKRDYLSGLYGRFRGRVSIPWDEAQNAARAWSQSIAYKPIGSVHDLVRDDILEFDGKLLQESITRISDLMRQVTNLKVEGKRIEGTVTRLRELKEAIGKTAASFEGQVQYDLLLAKLHLAADDERIASEQGKIKHDRALVDQHKLKAQTEAQLKRNVDNGRIHIAAKLSGIPAHTEKKTLDEHLVRAASAARAKLAELHAGLFAAAHIKNTGDAMVGRPVPEQFRRLRASVDVVAEALASTNVDRLAGLLNSVDDANRDDVLSIEKLLQLASAFDGIDAGLSQLHNSLVGTEGSVLMAVAAESASLGQRIDAAKKERDELADRKQRLAAGAGNYNRDTVLALERIREKFPDASVQVLCDLVEPVSEDWQSAIEGYMDGARFNLIVKPDWEARTIDFLKSWGSRSKVVQGKRCLERADESRVPGTSIIHELRTDHPIARAYLIEQFGPVVKVGDSEELRRTPRGLTKDGKGSSAMTMFICERRDFVLGRKARERALQRTTEMLEAADKDICELGSSQGDLEGFRKLLTTLKAPTFDAQPLAQHAADLDVTRRSLSQLNLTEVEQLQAELTRMEELIQAHDLAIDAAKETVTLAEQRITAAENVIKRINEGRDARFQERENQIRRLKHLCEANSEKTYTVMAQEVDDLIASHAYEIPAVQARVSHLRTQPEKLFADVREMLAEYNAAVRADERFQSALPHLTDAPSFDPCYGPLVLLGRSVSTLHNELESIGLYNNRAKVEEAERSFHDVFTKQFCVEIKSKVDEGVRMLRQLNVELEKLKFGTDRFSIDWSKWEPEFQEYYGFFSAVAELADSPEAVDLFGETELSPKHIEVRDRLVKLLLDQDQDRAGRELLRIADYRNYRRYEIWNDSDSGGRIALSTWGTGSGGQLETPAYIVRAAVVTNRLRLFDKGASLKLLVSDESFSRMDEPRARAVLRYLRDSMGLQLVSAMPTKHAGALRPEFDREFSFSRMNVSGNGEIDFVSECDERIFKKDRMREVWEAQRQEVREQAKLLFDAAEPEEATGAAK

SEQ ID NO: 32600 - protein, 380 aa, Ralstonia solanacearum CMR15
MEQPFWLQSSPVQQLLNLLVDRMDSAEQRGSARTQSVALGERTWPALYKAQRESEKEELWGHAVELVRWGWLTVKPAGAIRSRSGYADSPRVTVANEVEVRRTVGRAQRVKSAAERWREAVRDGLQGAAEVKAAVSEFCIDMPDRTMTEVVERLNELPALAGKPMLLREVSSQLFWGMSKVLDKRQSLVAAVLGVDECPFPESPIQLQVFLPPAGCRGVLFIENLMSFERAIRSTSSAFDGLALVYASGFKGSAQRLRTPDGCSLFYAARGGISQNLRDGFEAWLFGKDVIPAFFWGDLDWSGMRILSAMRASFLGLTAWEPGYSQMLAALIEGKGHSPEAADKQGQKALGTSGCTYADAHLIPALQSYGRFVDQEQINP

SEQ ID NO: 32601 - protein, 499 aa, Ralstonia solanacearum CMR15
MDQDWKQRTYQYVQSRRQHPAWQLLAARSAPLVLSCLQSLFEKSHDGIEVEAAEQGLTALLEQHANSDEFGVDPDADCAALARKELRGWIRRALLIEREGRLYATDALEEALRFVAALDGRLMTSTASRLSIVQREIENLESSLNPDPRSRSRYLERKIQELERELDDVKAGKVHVVTESEAVEGIREIYSLATSLRADFRRVEDSYREADQALRQSIVSERNHRGAIVDKLLNSHDELLETPEGKVFRGFQQQLGRSAELDAMKHRLREILRHPAARSALNSAQQHELRWLIIRLIDESAAVIRARARSERDVKGFLRTGLAAEHHRVGELIGDILQQALALDWQSASVRGMGSSLPPVAISVAGLPLVERIRFKVIEDEAQELLELRAQSMDPQTMDDEFWEAFDGLDRQALYERTLALLEQSGESMGIAELARQLPPTHDLETIALWLSMAREAEAPVSDRRESVDVVGRDGVPLRFSVPEVELSFEQMRGLDMEL

SEQ ID NO: 32602 - protein, 259 aa, Ralstonia solanacearum CMR15
MVSIFDTLTAPKEDGQAATDVTSDVALQPELTHRAEAESGVGAVPEVPGTFIPRDVKDAFQELLKFGFLEAARKPNLYHIAATGTAQINAILEPLDLALRIDDVRGLAFLVVAALFVTDAQDDEWSHPLIRRQRLTLEQSLLVALLRQHYLVHEQEQGIGAQEAPVLVEEVASQLQLYLGNLGSDTRELQRARNLLEKLKPHGLVSEVDQHDQFLIRPIIVHLANPENLQGLLQALKQASADARSDGDVGSTPGEGAAA

SEQ ID NO: 32603 - protein, 1108 aa, Ralstonia solanacearum CMR15
MTSTEAFPVTIEELPPPAPYILTDLDVFNWGPFSGRHHAQIDIEGTAIIGQTGSGKTTLVDALMTLIAAQPRYNLASTGGHESDRDLISYVRGVSGAGREGDSDHIARPGKTVSAIAATFGNDSTRVTIAGLFALEGSGSSAAELDRIWMVLRGNELDLDDVLELHHAGGKRALRQQEREAGFLKVFDSKKAYIGELRRLFEVGENAFTLLNRAAGLKQLNSIDDLFRDLVLDDRSAFQRAVEVASEFDTLAEIRQELEIARKQRDTLLPIEKGWAQRSANIEQRDLHVHLISILPIAGALRAHQLWAQLASDLMRKLELCDQLVEQRTQRRDALDAEALRLRDLYFQYGGSSIELLESKLTTERQRLATIQRYASEYRLVAKRLQFDDTLAETVFQANQTQAQALKDAVDATIEALEVDVYTLGSVQSTTGQSLREQQTALADAKVRPGSNIPSPYQQFRRELADELKLNEDALPFVAELVEVQKAQSQWRGAIERAIGGNRLRIMVPPTQMKSALAWVNGRDNHLHVRLVEVMAPERPAEFLTDGFTQKLNLKNHPYRDALRGLLAQIDRHCVASPEALRNTPHGMTAQGLMSSKSGFFEKQDQTPLNRGWLTGFDNRDILEALEHQVRDTERQLKEQVARFEAAKARVSEARSRNLMLERVLAIQFVDIDEPGAQREVDDSTKHLSALMDPQSDTARAKQAWEGVRAQLTKINEDREKSLKLQHTLQNEVTAAQRDRERAFALTGEGLDAGQMALVQVHFDFSDVQTVDALNARQTQTQRELRAHVDELEKKIAECERQLVRNMGTAHGVDTGALAEVGSEVDDVPHYLERLRVLREEALPEKLDRFLSYLNQSSDEGVTQLLRSIDNEVETIIERIEDLNATMRQVDFQPLRYLRLEPRRVVHESLRTLEQAQRGLRTAMLQDDQGESQFKALAGVVRLLREAGERRSTVGAKALLDPRYRLQFAVSVIDRASGKVLETRTGSQGGSGGEKEIIASYILTASLSYALCPDGKDRPLFGTIVLDEAFSKSSQAVAGRIISALREFGLHPLFVTPNKEMRLLRSHTRSAILIHRKGPHATMTSLSWEELDAIARSRQMSSRDEIPG

SEQ ID NO: 32604 - protein, 381 aa, Ralstonia solanacearum CMR15
MRSPDEIAARLAKAWQSADVREARLLDPESWPLQYAIGRPSPKAIAEQTEHVKAHLDRWRAVEIGRVHWETVIYRAGGGPVEVPHRWELKNPSEWVRATRSATIAAEYRRLGELVQQMSSQFHALVVRRRQLVMERPVPEVIKAAEVALALFPGCAQGRPLRALSVCNIDTKFFERNRALICQMLDVRFEGQVGELGLEHFLGAAEEDERWLLVAPLASGMLPFRQQRVRASELSQLAAVAGHVVIVENERSLHQLPELPCTVAILGAGLSLGWVRDAWLTSKRVAYWGDMDTWGLSMLARVRLAIPSVTALLMNQDCFDQYAQELAVCEPAPVDGGIPDGLTPDEGAFFAYLLTQERGRLEQEFLPKELVSKVMCVWQRA

SEQ ID NO: 32605 - protein, 488 aa, Acinetobacter junii MTCC 11364; identical to SEQ ID NO: 32402

SEQ ID NO: 32606 - protein, 261 aa, Acinetobacter junii MTCC 11364; identical to SEQ ID NO: 32399

SEQ ID NO: 32607 - protein, 1125 aa, Acinetobacter junii MTCC 11364; identical to SEQ ID NO: 32404

SEQ ID NO: 32608 - protein, 404 aa, Acinetobacter junii MTCC 11364; identical to SEQ ID NO: 32405

SEQ ID NO: 32609 - protein, 460 aa, Clostridium bolteae CAG:59
MILMNEIPDRFWSLFRSVNRSTYIEALLKINEEYEYSNYFLSREVCIQLLSEYFSRKKYVIWQDETEDDWDELEPPATRVLNWLLRTGWLRKVDDYASMTVNIVIPDYAAVMIEAFSRLLGDDEDETQVYIQNVYAILFSLKNDPRSSVSLLNTALINTKKLNKSLQDMLHNMDKFFGSLLEQKNYGTLLKEHLEGYVTEIVNKKYHILKTSDNFYLYKTDIKSWIAAMREDSSWINKMCAKSAASTRGQKKAPLTEYDIVEKLDQLERGFDDIEHRISNMDKEHSRYVKATVTRLNYLLNQEDNMKGLVIRLLNHLSEYGCPEEDLTAVSARMNLSQMTILSEKSLYKRRKTKADFTEQLKDEEESEELSMEEVLNLNKVGNRYSQKEIEAFIEGSMTDGKMVVDEQTIHSDQDFEKLILAYDYSTRRKSPYKVEEEDSEMVHCKGYTYPRLVFVRRTR

SEQ ID NO: 32610 - protein, 282 aa, Clostridium bolteae CAG:59; identical to SEQ ID NO: 32469

SEQ ID NO: 32611 - protein, 1130 aa, Clostridium bolteae CAG:59
MEQKIANDRFLALSRICLNNWHYITKRTLSFNDEINFFTGHSGSGKSTVIDAMQIVLYANTDGRGFFNKAAADDSDRSLIEYLRGMVNIGENNEFSYLRNQNFSSTIVLELKRSDTGQCQCVGIVFDVETATNEISRRFFWHKGPMWENGYRGGKRTMSIVEIEDYLQANYSREDYFLTSHNERFRRILYDSYLGGLDSEKFPLLFKRAIPFRMNIKLEDFVKEYICMEQDIHIEDMQESVMQYGRMRKKIEDTCAEIQSLKQIEDRFITYADKEQQIEKCSYFVQKLEILQLQSEVRTLADRAKLAGEDLKKQVQARSSVDEQIGELTRQSDELLRRIASTGYEELKSQLKSLNELLEQLGKSEARWQQTATALKRWEEEDITSNQTLWDMEEFENRTIDLETLERLKKNMVSMRTDTEKQHQETAAAVRELKKQEKQTGDELEKLRSGSKAYPKYLENARSYIQRRLLEKTGKSVDVHVLADLLDVKRDEWRNAVEGYLGNNKLNLVVAPKYARSALEIYGELDKKEYFNVAVLDTEKASQNQPQVQKGALSEEVTVRESYLKPYIDLLLGKVIKCNTIEELRECRIGITSGCMLYHTFRLQHINPDNYTKFAYIGKDSVRRRIRLLEQELASLEEKKKPLDETARESLRILALPWLSAEPAEYMDWLNDINSYKAKEREKKKLIQKLELLKEQNVDQLERDRQAVITLCDGKKRERDSLNVLIRDKEREIEGCRNKSIDSQSLLTSKERELKQNPDYDNELSAYLSSRDTVRYDREKETFIARCSKLYEAREAAFQALLAVRTSYIRTYPNRNFTVNARDNAAYDRLLSDLKCDNLEEYKQKATQQAKSAVEHFRDDFMYKIRSAIREALIRKDELNRIISRLDFGKDKYQFVIGRNKGPDGRFYDMFMDDSLDINPADLNYSYENQMDLFTIEHEKQYGDLMNELISIFIPPENATPEQMDEARRNMDKYSDYRTYLSFDMQQLIQNEDEVIKIRLSKMIKKNSGGEGQNPLYVALLASFAQAYRINLPSKVERNPTIRLVVLDEAFSKMDGEKVASCIELIRGLGFQAIISATNDKIQNYVENVDKTFVFANPNKKSISIQEFERERFVELMQDIEDGDEFAETL

SEQ ID NO: 32612 - protein, 472 aa, Ruminococcus sp. CAG:60
MFHVIPGNFFVPLSSPNRIVYWECISRLFSIMEHQLSFGVEREVLADELEFYFNQENAAQLVEEEFQAYDSRSRANGILRRLEYYGWIEVETDKSYVQRVNFKEYAVKVIKTLLDIADGKQIEYQGYIYTIYSLVTGTMDKPGIVLMQIWENTDLLITGLKNLNSNIKHYIDELTKHSTVAEIMDALFNDYITNIVDKAYHRLLTSDNVSKFRPEIISRLEEKSHEEAFLEEAAREIASIREVSVEEGRELIYRYLHEIIEAFRGMDDILQEINQKNTQYQRAAIGRAKFLLAGNEDVRGQLKEILMGINEEINRENMDLGGIYRIDFLDDLVQIYQCSILEQSSLYLAVEGKREFTPASLDEKEPDEELRREKMRRMAEKIQKVVSVEKIQDYVDQQLGNVDEMNASQLPLANEDDFIKLIYTRLYGQRKNMGYTIETMEEREVNGYRFKDFRIRRRENGISGGNASKREG

SEQ ID NO: 32613 - protein, 205 aa, Ruminococcus sp. CAG:60
MEYLEGMLQKEKDNFGRVCNRLLGTCFLCKGNQNTRPDYYFVLKYRKEFKEYLGVLGYRLEINEEYGVVQLTSPRGINRMNLKLYDSIVLLILRILYDEKKRQLSAVEEVIVTLGDIQDRFLSLNIRDKIIDKTTMRNALSLFRRYQIVELLDRDLGDEESRVLIYDSILMAVRVEDIKAAFEKLETYRKGKNISNEETDEDEAD

SEQ ID NO: 32614 - protein, 1080 aa, Ruminococcus sp. CAG:60
MKLINWHRFNNCTIDFGDSTLLSGENGAGKSTLLDAIQFVIICSTGYFNKAAHENGKRKLTGYIRCKTGKENQPYERTGEISAHVALEFYEESKDKYFIIGAVVDSASEGQETTVRYLMENTRLSDDLFLYGNQVKSIAEFRGSNIDIRQWCKTNVEARKMVTARLGRIEDKFFRLIPKALAFKPIDDIKDFVYSYVLDEKEVNIEVLRENVRTYQDMERTLDNVKKRMKKLEKIQELNQRLQERMERDQMYEYFLKRSDLDLVEGKIRSIDAAKKNEEVRLEQAKVQLEMLQKERAEKQEIATNLRVELRHNQEFVALEEEKKELERQLEKRRNALQDESELKKSVAKAAKDSERLLMGVKDAGGDSQKLISCVREYRTQLQKLDSEANVAALKSLTDDVIHCKQKYFAGLQGELAKLQIQLKQNHAEREKLNKKISKLKRKKLTYPSGVELLTETIQEEFASLGREIQPGVLCEMLEIQDEEWRNAVEGYLNTQRFYVLVEPENFDIALGIYDRLRKEKKVYGVGLINTRDLENYDTAPAGTLASVVTSQNQYARQYSNMILGKVQMCERYEDLKKYPISITKGCMRYQNRVASAIKPEVFRVPFIGKNAFTVQLVQAEEEYQKMNELLENQEKQLAGMNEILGLLSTDSDVDIKYRLDVLHTLGTVDRAIAKCQENIQKLKKNSTLIEKQIQLEELEKVLRGLDASVNSDTEKIGGIRTRIQDLITRKQAFLENEMTEKGKVLSLGEAAGDVLNSWNQEYEEALGKRPVEQFQNEYLGKRRNNSDRWEKIKDQMINAMVEYKTEHDFGATASLEGFSEFQAVYDRLKNSELLDYEEKVQSARHAAETEFQEQFLAKLQENMKLAQGEFKELNKALKGIDFSSERYEFQFMPSKKYRSYYEMIMDDFNVIQGESLFSGMFHEAHKDVIEELFERLSVGGENSTQTLEEFTDYRTYMDYDIKIIHDDGTYSYYSKVCEEKSGGETQTPFYVTVAASFVQLYSNNIGGEAAGLVLFDEAFNNMDDERIGGVLEFLRRLPLQLIIAAPPDKIQYIGPAMDEIMLVMTDQKRSYVEEYHNAV

SEQ ID NO: 32615 - protein, 447 aa, Clostridium sp. CAG:7
MHEIPERFWSLFRSVNRATYIEALLKINEEYEYSNYFLSREMCIQLLSSYFAQKRYVIWQDELEEEEDQLEPPATRVLNWLLKTGWLRKVDDYSTMTVNIVIPDYAAVMIEAFHRLSNEQEDETQIYIQNVYAILFSLKNDSRAGIGLLDTAIINTRKLNKSLQDLLHNMDTFFGSLLEQKDYSQLLKDHLEGYVQEVVNKKYHILKTSDNFYLYKTDIKTWIRSMREDEQWQKRMAEGMAPSMILQKLDQLERGFDDIEHRITNIDREHSRYVKATVTRLGYLLNQEDDMKGLVIQLLNRLSANNGDEDMIQAVGSRMNLSQTGLLSEEALYKQRRPRTDFAKQLPDEKELPELSEEEILNYNKVKNRYSRREIEDFIQDHMENGTMKVDQNTVSSDEDFEKLILAYDYSTRTKSRYKAVESDAKPIKNGPYTYPEFQFVRRNTRE

SEQ ID NO: 32616 - protein, 236 aa, Clostridium sp. CAG:7
MNDTSDLIPENETNWQNDWQIPYFDNLTEEQQKEITDSIRLLLRQTFVLERKYDKKTERLQYTAAYRTISKHFPFIRHYLAVAGIELTENSHLGIIYVQGEDLLGEKLPKLATLYLLALKLIYDEQMENVSTSVNVYTTLGEIQEKLGGYRLFKRQPAPTDIRRTIALLRKYQIIEPLELLDDLNSSSPFMIYPCINVVLLGDDVRALLQDFDNGDTERIEPDLAEEGGNEDGTEE

SEQ ID NO: 32617 - protein, 1123 aa, Clostridium sp. CAG:7
MEQKNNSPFLAFTRICLNNWHYISRKILSLNKEINFFTGHSGSGKSTVIDALQLVLYANTDGRGFFNKAAADDSDRSLIEYLRGMVNIGENNEFSYLRNQNFSSTIVLEMQQTCTEEYQCIGVVFDVNTASNEVSRRFFWHKGPLWENEYRTPSRPMSISEVEQYLREHYSKEDYFSTSHNERFRRILYDSYLGGLDSEKFPLLFKRAIPFRMNIRLEDFVKEYICTEQNIHIEDMQESVMQYGRMQRKIDDTCQEIDKLTAIHDAYGEYRLIHDKLEKYHWFVKKLDLLDTRSKIRMLHEKTEHGKEDLLQLDEAKKSVEQQIGELTANSDELLKRIASTGYEELKQQLTSLNALCEQLGHSEAKWQKTLLALKKWEEEEIVSNQTLWDLEEFETRTITRPVLERLKASLASMAADTEKLRQETVSQINELKKSEKLKKLELEQLKAGNKAYPSYLEEARSYLQRRLLEETGKGVDVYILADLLEVKNDQWRNAIEGYLGGNKLNLVVAPKYAKTALSIYRELDKKKFWNIAVLDTEKAAEYDNDALNGSLAEEVSVREAYLKPYMNLLLGKVIKCNTIEELQANAIGITPDCLLYHTFRLQYINPENYTRLAYIGKDSMRKRVRLLEKELEEVSEKRNPLEETLKDCKRILALETLKEDTEEYFQWLKDIDTRKEQLKEKQKLSERLEKLRQKDVKQLEADRQAVLELSDGKKRERDLLQEQILSKKNELERFSQTILKLETEAAGQGKEVPVNEEHERELNAYLADKDHPRFDQEKEAYASKCQILEQKAVQAKEHVMGLRSEYIRRYPGRNVPVSSNDNAAYDKILNRLSCDDLEVYREQAGKQAKAAVEHFKDDFMYKIRSAIKDALLRKDELNRIISRLDFGKDKYQFVIGRCKGADGRFYDMFMDESLEINPASLKTGVENQMDLFSMEHENRYGDLINELISIFIPPENATAAQLEEARKNMEKYADYRTYLSFDMQQLIKNEDEVIRIGLSRMIRKNSGGEGQNPLYVALLASFAQAYHINLSSAVRQRPSIRLVILDEAFSKMDAEKVASCIELIRGLGFQAIISATNDKIQNYVENVDKTFVFANPSKKSISIQAFEKDRMKDLASEMDEEA

SEQ ID NO: 32618 - protein, 466 aa, Clostridium nexile CAG:348
MSIKNRIPKEFYKLFNSKYVEYFQRILIALYEQSASSYSLLGLTEEECQDTIEMEISTFTMDFSQSDLEEEGELLTRANMESVMLRKLEEWGWLRKDYDESLNCYVVSFPDYSQMFTELFGRLYNEESSMERESLLTIYSHLFTYHSSKEKDNEILKSALQSSKALLQMLSNMQEGIRGFFEEMTKQKTFLGIQEVLVQEMNNTDSQKYAILTTTDSFYRYKEEVKELIDQNLMGNEARKQELLQRRKELEADSFAWRRNERGVQSCDEAMEILFQINREFDGIERRYNRLIDQKRVFAKRAAARIRYILAEGDVEEDHTKALIRLLNMSDRKDEILKKLGERMGMTERFAVLKERSFAKPRDAKKKAFEPQELVKTGQSEEQLDEFVVKPLYTKAQIREFRRQNEVDGAFQVTKDTVHTVEDLEKLLFVWQEATEIAQETEEIVIGEEFTTEEGLQYSGFTIRRK

SEQ ID NO: 32619 - protein, 212 aa, Clostridium nexile CAG:348; identical to SEQ ID NO: 30931

SEQ ID NO: 32620 - protein, 1134 aa, Clostridium nexile CAG:348
MKQAKKIFTRILMNNWGGIDHQVLCLNEYVNLFSGKSGSGKSSVMDAMQVVLYGSVGNDFLNRAADDSANKRSVLSYLRGEQKDGTANRENQDFYAHIVLEIQDTGRKSYTCIGAVFEVGKNDMDLKRFRFFSHAGKFPEDEYVTVSGIPYSIAQIQKLVHEREQSEDAKSRGNINRIYPSREAYLNIVNDIIFGYVDAGRFKTMQKSAIALRMTKGTSQFIKDYMFPKSKEDTITAISEQLAAYREIKGRVEDLEKQITLLEEVQAHDRKLTLAKAEQVKTETLLRILEIENRRVQLLSKTEEFSNTCEKIAQFEEQIKDLEMTLNGKREELIGVRTELRASDFEKKKEDLTKLQETIRLCGNEAREWGELLKRLNRWNETDGVCEYVSNPLCNLLEEIEERNITEENVNGLKKRLKETYESIKSEVEELKAERRRVEADYQEQKEMLEDLQNDKKHYSKEVKVVRRKLQEELSARYGRTISVEVFADLFDITDEAWRNAIEGRLGRIKYGLIVEPRYALDAANIFRGMKKREYETVDLINTAAIQRDEPQAMDETLYDAVKTDIPYVDFCLKRYLGHIKKCETVEELHEVKDGVTQDCYSYSNYMFRHLREKDYRYQTIGRKVSKKQMQELEEGVYRLNVELIRLGGEISELEQAEDFERLQTYDYETMLQKSNAASRLKEYYEEEARLSEEIRELQAGTRVAELQKQEQSLNESIRKLEQEKNGAQKEVTNYSATKGKQEQDIRERTEYLEKLEEGFVPNTELKETVLAVIDKGNEYRFEREQKKTFEQLRSQEEEEFKQRGDAREQFNKAFPSYDFSPFEKDNTAYDELLENCKQNFEPKYKAEFDKQYQLIYQMLRENVIATINSEIKEAKRHRREINAMLSEIRFSDSIYQIDILPTDDENRQFYEMLTAEELNMKVIDRDMEGQLSFGEDAFYQKYEAQIKRLTDKFMPPKEDEPSARERHKRDMEKYADYRTYLKFSMYEQTEDQDGNIKKNYVDDMAGRDSGGEGQNPKYVALLAGFAMLYHQQTNRDTKIRLVLLDEAFSKMDKERSEVCLAYARKLGLQLVVCVPDERLQSLVQNVDCVYAFRRVNNRISMIHIDKGAYLRMIEGEADEEENSDAVTVAHRTE

SEQ ID NO: 32621 - protein, 399 aa, Clostridium nexile CAG:348
MKKKTVTLSQWLIEQNDTEAYRAGKLAGKKHPKVDQKLIDAVGGMQNLIRQARVLEQDEALGKSGMIQFRWRNLGSDISQIDYEVAAIPSLCRKLGVKDVREHQAELITRVQMWKNKVSECEWVENYYDTLLSRLTLGKKVSEAEDEKLFLCLNAVAAQQEFIWERVFSVRVFHNSKTFQNEYKNSIVTILKNYSPYYEEEIDAEMLLAAHNIHSYAQTLEWKGCLEYRLDNSNVVDTDENTYGTVINSQTMEHASVTDLSGCKRIMTIENKANYESMIFSEETLYIYCHGYFTPKEVRFLKKIPELADADCEFLHWGDMDYGGISIFQFIKKNVFPELKPYKMDRTAFEGALKDGAGIVLEHETRKKLEAKDAGLLEELKQVILETGKTIEQELVRGK

SEQ ID NO: 32622 - protein, 543 aa, Bifidobacterium longum CAG:69; identical to SEQ ID NO: 30413

SEQ ID NO: 32623 - protein, 224 aa, Bifidobacterium longum CAG:69
MTVAEEHEEHEEDMDNANPYALFEGDTGDMPAEARMAAIALKRDRYISGPTYDTVLDNRDAVVRSLNNDLLDLVINERYRIMYATPVAGDDVTLRSLKTRVSLKREEAALLAFLRIRVLEYENVHADPADWLVSFEEIRAALATGAGYLAARNDEEGVAKQIGAIVSAMITYGYLVRLDDEAMYQITPLVPVVLDRELADTWLDVAEHGDGDTEDDDDDEKGAE

SEQ ID NO: 32624 - protein, 1181 aa, Bifidobacterium longum CAG:69
MQATDVQMIADRWMLESRRLINWGSYEGYHEFRPSTDHKLPVTLLAGASESGKSTLVDAQISLLYPTGTPFNKASNSGRSERSDYTYLRGMVGVGSTETGDEPLYLRGRDENGAPQPVWGAIVDTYRNQTTGQVLSCAKFLYLMPGDGRGDVRRQYVVWGKPVDPRRMDQYRDAPFTPAQLKATYPDCLTFPSAEAFHTHIWSAMGLSEAACRLLHKIQSADAPSRLDDIFKQGVLGVPEALDLARTTVEDYERYDENFHAMDEKTRRMDTLRGIQQAYGEYAAARGKARAFEPVKPAVDGTVPAVLRDWALARMRGEVAVQLPADRAEQQNSEAEAKLLRRRTEDLRTRLDMIRGQMQGLDGGNLTRLELELDQARRTLEDVQANRTRIKQTFASIGETLPGDEQAWNERRINAVNFKREYNKRDGECEEALTAAINARAGARGDLERLQRDFDRQRSQRTRISQQMDETRAMLCRATGLTPAELPYVAELMDVNEHEEDWRLAMNVAYAPIAQTILVDKRHEQGFAAKVSTIDPRTMSRRTWQFVDTARHYDDTGAHANILTGEQDGDWLSGKLRYRDDSPFADWLRSQTQDERFDALCVTAIDDTDRTNRQVQADGQIKSGARGQHGTKDRAQVIGFVNETYLNALAAQVDAARNALSQADTDYTAAKTQSDNLHRELELANQLAYTSWERIDIAGAQRTITDTQDAIASIKNDPKLAELAKQRDELNAELDRVERQRIESDQAAARAGSAVEAALIWLRDHADTGTTDAAGATADNDDDAASGPLPDEVTAALAESYDNRFAGLADAAMRAHMIIGAGAAGTQAPGESFPERTIAGIGKDMASRINLLNGQADAARTGVESKMSTYIALYAADDDSLTASVEDYRYYLDELASLTQLAAVAATDAEYRRCLEQLLRSFLTIKRAIDTDASDIHDQLDRINAMLKGQQFGPKHGSLSLHADVRRPERTFWAQLIRVIGTLNDWKSADVNDSDASRKAFAACAPMVGLLRAELAQVKDANGVKSYGARNLDPRCRSSFYAIVHHADGPDERITSTGGRSGGALQELTSFVYGAALIYLLGGGLTSEPSYTTLFLDEALIKADGRYTQRALTVLPRLGFQVIVSAPESKTGEILEVSTKAYVTYKDPDTGLTSLREAVLYQNDMDDESSSDILKDDGVAE

SEQ ID NO: 32625 - protein, 394 aa, Bifidobacterium longum CAG:69; identical to SEQ ID NO: 31243

SEQ ID NO: 32626 - protein, 498 aa, Firmicutes bacterium CAG:24
MILKKKIPRDFYKLFRTQNMEYYMQLLTALYEADQEAYALTQLTDSECRSILAETIARVNLVWWEDETEKTEDEGFPGLSPSAVLDRFVKWGWLSKDFDEKLNCYIIGFPEYSRLYVELFDRLEKEDDSMERESILSVYSALYTYDSDPEKNNSILKSALRTSKSLGQMLSNMQDSMRLWFDELSKRKDFIGIQEVLVNEINNRESVKYAILTTTDSFYRYKEAVKELIAKILEENENRREGLTAQKRMLMAAQGSDSNAPEPSESAGGSYAASMQAKALASGASAPALLRLERGIQFCEEAAQLVLLVEREFDLIEKKYNRLIELKTVFARRALARIHYLLQEGAGVEDSTLELIGLLNHGDKKEALLEELRDSMYVTAPFSIVGDASLYNRRPRLENQFVPLALQEEASSEIADFVPKPLYTGRQLEEFRRRHTKNGVFQVLEDTVQSAEDLEKLLFIWQEATQSRQEEDRILLQEEIHQKDGFSYTGFSIDETEN

SEQ ID NO: 32627 - protein, 220 aa, Firmicutes bacterium CAG:24
MFSYLEERTPAEVEAIRRTIQELLRQTCILQVKYDPVTLTARDNGRYQVCLKHREFIADYLSVMGCELVHDPQDHLFRITGDGAAMEKMSLTTTKLLLLLKLIYRDKIMGEGLHATVTTLAEIREYGRNTGLLPGKLNAQDWQAALNLMKTHQMIELPGAILNVEDQTPIYIYGTVNIFCSSLAINELVQRYRDDEEEKTTEGEEERETGEEDLYPDVSE

SEQ ID NO: 32628 - protein, 1117 aa, Firmicutes bacterium CAG:24
MKQAKKIFTRMCLNNWGGINHKILEFHEYVNLFSGKSGSGKSTVMDAIQVILYGSFSPSFLNKAADDAKNRRSVLSYLRGEQKDGTANREGQDFCSQIVLELQDTGTKQYVCMGIAFEVRKNDSEIRKFVYFSHLGKMPEGGYLTAEGYPYSNQEIRALTETRMKETAKGGRAELNRIYPSREAYISTLYDQILGYIDGNRFMTMEKSAIALKMSNGTGQFIRDYMFPKSEGDTIETISEQLGAYRDIKEKIDVLENKIGMLKKVREAGQKLTMTRADIVKQQAVIRCIDIEDLKNRIDALLQDQDRTQERLRELRQQEEELEALSVQLENELILVSADLKSSDLGNRQERLEELEKRSRMLADNAAQWRKILQGLRRWESDEIVADYISNRLLNLIGAFCTGPVTQAQCLELRSRLEEERQNIEEEYETYHEQERQLSKDLKEKQKLLDDMKNNRKSYPEVLTKARAALEQKLSALYGRTIKVWIFADLFDVEDEEWKNAVEGRLGRLKLSLITEPKVAADAAKAFREMGQFEEIDLIHSEAVTKSNPRAEEGSLYEAVRAVEPFADSCLKRYLGRIMKCRTVEELRSAKDGVTPDCYSYSNFIFRHLKKRDYTVGACIGSKVSRARQQDYEVDAQRLKKELEEAKRMADGLKAVREMESLKEEPAYLESLSRAAQELEAVLLETQETKATIEGLRMGAYKELEEKEAELRKKRSELKKRISGMQNEIAQQTGNQERIRTELQSKNAALKEASVGYTQQPEITAMVQEALSKRSSGAVRAQKNAEIEVLCEKEQEQTEELSRARNAYILQYPSSGFSGSEKSNEGYEQLLSQYETDFEPQYRTEFEKQCDFIYRSLRENVIATIHGDIKAAKRHAAEINRLLKKTNFSDSIYQIKIEPAYNENGQFYDMLMAPELDSKNLDNDGFEGQLSLGEDSFYQKYEAKIRLLTDKFMPVKDDDERVLEQHRREMEQYADYRNYLSFSMYEQVTDADGNVIRENFVDDMAGRDSGGEGQNPKYVALLAGFAMLYMQQTNRDSRIKLVLLDEAFSKMDQERSAVCLKYARQMDLQLIVCVPDERLQSLIRNVDCVYGFRRHKNQISMMHIDKGNYLELLEGVE

SEQ ID NO: 32629 - protein, 471 aa, Roseburia inulinivorans CAG:15
MILKKKIPNDFYKLFRTKNREAYMQFVTAIYEENNEVYASLGLTQEECALIIENTIEKSKIVWQEEDDMEEGETPDALFPSDSPSGMLNHLIRWGWLKSDFDEKLNTCVISFPEYSQLYVELFKKLQSDDDSRERESMLSIYSALFTYHSDNEKNNDILKSALRTSKSLGQLLSNMQDGMRSYFDELSSQKHFIGIQQVLVEEINNSDSKKYAILTTTDSFYRYKEAVKELISEILNENDEKKAVLLKEKNSLETGTLLQKRNEYRLQYCEDTSRIVMQLEREFDMIERKYNKLIEQKTVFAKRALARIHYILQEGVSEEDNIIKLINLLDRSEKKDEILVEMRERIRFSSQFKNITDNSFAGRRDRGDGAFTPVMLDEEIDAKEQHMTDFVPKPLYTRNELQSFRRKNTVDGIFVATEETVKSVEDLEKLLFLWQEETEERIAEDTVSVDGEIRSKDGLTYSRLVIGQNQ

SEQ ID NO: 32630 - protein, 207 aa, Roseburia inulinivorans CAG:15
MLQYMETVSQGEAENIRKMIQDLFRQTCILQVKCDPVTLVQRDNPRYQVCLRHREFIADYLSVLDCELVHDPQEHIFRITGDGVMTEHMSLMTTKLVILLKMIYRDKIMGEGLHATTTNLAEIREYGKNTNLITRRLTGQEWNDALVLMKTHQMIELPGAVANLEDFTPIYIYSTVNVFCSAMDINELVRTYQDEVEELLTEEEEEN

SEQ ID NO: 32631 - protein, 766 aa, Roseburia inulinivorans CAG:15
MLTDNSRQWRKIVQGLKQWEEDEVITDYISNPVLNLIEAIENGNVTEENCQELHLKIESAKQDIENEFEDYSEQKREAGKELKEKQKLVDDMKNNRKSYSENLRSARSSLERKLSDRYGRTIKVQILADLFDVADEEWKNAIEGRMGRLKFSMITEPKFAHDAAAVFREMKQFEEVDLINSKAIADSEPRAMENSLYEAVETKEAYVDVCLKRYLGHIIKCHSVEELEQVKDGVTPDCYSYSNFIFRHLRKKDYTTNACIGEKVSKARLAEYEADVERLEKQYQELHYMTERLKAARDFESLKEEKEYYVNLSGAEKELGKVNKKKSTLEETIRTLQEGQYKELQQKEQSLKQQMRELQASIGENQGQMSEKIRRHENLSGANEQRRLQLEEMLQGYMPNEEIGQEVQEQLKKRSGQPLKNQKNAELAALSAGEQEKAETLRTARNRYIFAYPSSQFNGSEKSNEAYEKLLEEYQTDYEPAYEAEFEKQCDFIYKSLRENVIATIHGDIKAAKRHAYEINRLLRETNFSDSTYQIKIEPAKNENGQFFEMLMAEELDSKNLDNAGFDGQLSFGEDTFYQKYEQKIKLLTDKFMPPRDEDEQVRAKKRQEMEQYADYRNYLSFSMFEQVTDEQGNVIRENFVDDMAGRDSGGEGQNPKYVALLAGFAMLYMQQSNRDSKIKLVLLDEAFSKMDQERSAVCLKYARKMDLQLIVCVPDERLQSLIRNVDCVYGFRRHQNQISMMHIDKGDYLKLMEGEHGQGEPETVK

SEQ ID NO: 32632 - protein, 471 aa, Roseburia inulinivorans CAG:15
MDDAQAQQTNPLFGIIPKEFFTPLASPNRLVYWDCLCRLFQAMSAQLSFGIEREILVDELQFYFEQNQAAEFEEDDINGMDSRKKANEMLRLLEKYGWLEVETDKSYVQRVNFYDYAVKVMKTLLEISDGRKVEYQGYIYTIYSLVRTNTDHPAVVLQQIRDNTDMLITGLKNLNSNIKHYIDELTKHKTVAEIMNALFNDYITNIVDKAYHRLLTSDNVSKFRPEIIERLEANGHSSRYIAKTSEELAAIREIPVGQAEELVYQTLHEIVEAFRNMDDILAEINRKNTQYQRAAVNRAKFLLAGTEDVRGQMKEILLYIGEQMEQSQLDLNGIYEIEYLDNLVRLFGSSFIDEKSFYSPIEGKKEFHPQELTEVMPDVELRQEKLRKMTEKMQRILSPERIERFVEEQLGDRAKIYASELPMETMDDFIRLIYVRLYGSRKKMRYRIEKAEGANKISGEFDFPDFAIIKR

SEQ ID NO: 32633 - protein, 204 aa, Roseburia inulinivorans CAG:15
MDLLNGMLQKDQDEFRRICNKLINVCFICRQNQATRSDFYFIQKYKEKFEELLGVLGYRLEINEEYGVVQLTNALNTNRQNLKLYESVILLILRILFDEKKRELSVSDEVIVNLGDIQDKFLSLKIRDKMIDKTTMGNALRLFRRYQLIELLESDLKNEESRVLIYNSILMAVRVEDIKSVYEKVDSYRKGKLKDEEADQTETD

SEQ ID NO: 32634 - protein, 1082 aa, Roseburia inulinivorans CAG:15
MKKLTRLKLINWHRFSDVTIDFGDSTLISGENGAGKSTLLDAIQFVVTCSTNHFNKAAHENGKRKLTGYIRCKTGRENHPYERTGEISAHVALEFYEESKEKYFVIGAVIDSATEGQETVVRYLMDNVMLEDEMFKIGNRPRTITEFRSFNNKNIKLFAKTNAEGKKMMKQRFGRIEDKFFQLIPKALAFKPIDDIKDFVYSYVLDEKEVNIDHLRENVRSYQELEKTLEGVKNRIEKLSEIECHHKAVVDCIQSDRMYEYFMAQSDLDLTKEQIGVLQDEIRRESYRLEQLNAKCSSMKKELENKEEVRTLLLAELNANSDFQTLEKQKKYLKELQEKEEIQYQEKKRLLESGKKAGQKVKRLLEIPDVDECMKQYDELLHRLKDTEDVVSAQELIDRAIAYKKHMSTKLQRKNLEIQSRLNEIAADLQETEQRISNLKQHRFSYPSAVQLLMSRVEQELLKIGRTAKPRILCEMLEITDETWRNAVEGYLNTQRFYVLVEPEHFDIALGIYEKLRREKKAYGVGLINSGKLEEYDIAPAGSLATVVESKSIYAKRYVNMVLGKVHMCKRVDELKQYPVSITPNCMRYQNHVASAIRPEIYTTPFIGKNAFKVQYEQALQKKEDLNRQKIECKDRMTHMEVTLQWLEWDDDTDVKYRITIVSELKRTGLEIEKCETEIRNLQQNTTMIEKQIRADEMRKECEELKSHISKSDRESGACELKISNAKDRLVECEDECIHKNELITDIAQKAENEIVLWKKEYEKQTGDKTLEQFRQNFDRRRKANNTTKENADKKMTSAMYDYKTAFDFGAAATLEAYPEYAAVQERLVNSELLNYEEKVRKAKLSAEEEFREQFLSKLQENMKQAQGEFRELNKALKDITFSNERYEFLYLPSKSYGKYYDMIMDDFNVVQGESIFSGLFHENHKEVIDELFSKLALDQDNGIKALDEFTDYRTYMDYDIKITHEDGSYSLYSKVCEEKSGGETQTPFYVTVAASFVQLYNNNIGGEAIGLVMFDEAFNNMDDERIGAVLEFMNRLPLQIVIAAPPDKIQYIGPKMQETLLVLTDDKVSFVEEYRYASGRK

SEQ ID NO: 32635 - protein, 408 aa, Roseburia inulinivorans CAG:15
MHPVENKILNDLLDKYENSKLSRGENQRAIHIAFPFNKKTMPKYFDESSLEIETIHAAAEQMEREGLVAIAWKNQKPGYIIEKLVLCEDHVEEAYERLGRKPKREAEARTKQILEQFYQKTQGEITRSFLSRMITRLESEQSVKEYLDIMDHRKTEQLIDTLDKVEQNRKECYIREFSIEHFHDSKVFETLIPKICKIFREENEELTGFENEEILAEYQIYKTPGYVYMKGNVQIYSAGKQAADISAFPEGIAVAVGSEEDVPDICPDQTIDKVFTIENLTSFYRFKQEHSLVIYLGGYHNHSRRNLLMQIYQKLPDAQYYHFGDLDAGGFYILEHLKRKTGIPFQMFQMDIETLKKYEDYAKPLTENDKKRLMQLEKMELPDKERKLITYMLQKGIKLEQECISESQ

SEQ ID NO: 32636 - protein, 483 aa, Ruminococcus torques CAG:61; identical to SEQ ID NO: 31158

SEQ ID NO: 32637 - protein, 212 aa, Ruminococcus torques CAG:61; identical to SEQ ID NO: 30881

SEQ ID NO: 32638 - protein, 1121 aa, Ruminococcus torques CAG:61; identical to SEQ ID NO: 30882

SEQ ID NO: 32639 - protein, 410 aa, Ruminococcus torques CAG:61; identical to SEQ ID NO: 30883

SEQ ID NO: 32640 - protein, 457 aa, Eubacterium sp. CAG:274
MELFNIIPEKFFSILASPNKELYIEVLFIIDELFDDRLKIKKSELVSCLEYKLQDRISQYIPTDDEDIEPEEYYTLGAKARLLVNLIEKRGWIAFEYDTVYIEEYVTFPGYSQKFIKLLKELENSQNTESVNYVYETYSSLKSADNDEETGFMKFVALNSAYNKTIELKDSFKRIYHSINSYYQKQIDMVNVNELISDHYNNYRESIVSKYIYPMKCRDSVTRYKRSILNIVNKWTIENEIMEELTKQEFENGSYNSIEDASGEIRRKLFFIRDTYDGAEEDFINEIDYKDKEYVRATTAKIEYLTNTDRSIRGKLIDIINNVKPDKIAEIFNLNINIYSQKYLGNTSLYSKRKRVERPVGAQEKIEVQKDLSEKILESIRTSDSQKYNQSAINSYIENIIDNYGGILTEINNDEDYIKAILSVVHSKDKKAKYKVEVTDETVNSVEYSFPKIIYRR

SEQ ID NO: 32641 - protein, 208 aa, Eubacterium sp. CAG:274
MLEKYESFSTREKEEFRDICNELFDKTFLNEEVISNNGGFVINEKFNFVRRNFELFEEYFMLSGWILERKNNETIYIRNETGSNRVILKLLTTKMLIALRVMYDEKRKTSSNSNRVQFKLSELYNKMLHDFGLIDSMPSKTDRDSSIKIIEKYNIIVKAAVAEDEMDNVYVIMPSITVAVSDDRINMIYNQLKEEDLADEEINKNDVD

SEQ ID NO: 32642 - protein, 1136 aa, Eubacterium sp. CAG:274
MKKLTKMMLTKWHYFEHKIIDFDDINFLTGKNSSGKSTLIDAMQVVLLGETDGTSFNKAADIKANRSFTSYIIGELGDDINGGEKSLRGGKEFTTQLVCEFKDTMNDEYFCIGILVDSYSDMANAKRVFFRLRDRLDESDYIYNNQPRNINQFKSWCREKYGKDDKTIKFMDTNTEYRQNILSMYNVHDRKMFTLLKKSISFKRIDNIENFITENICDVKNEIDIRSMQLNVYEYEKQKEKADQLEKQERELAEINNLYEKYSNKKRNIKVYNYISNRCEEISKTSEIDNIKKEIEAKTLELNTAKTELEIVRKNIAQYNKDNENAIKELDQCEQNRLYDELTKNIDISSQIIDSKNKNINFIIPELRGKSAKINSKLNSLKDSIANKITSYENLVDEKANSFISEIKTVNSGFNSLINIKRENFNAYSLSYFKDLKDKSQNLMKKVYGFKTNTENCYNSLLSEKAETEEELKKLKKGKKHYSKDLLKLRDNICKQLKEKYKKDIEVNILADLIDIDENSEVWRNAVEGYLGNQKFNLIIEPEYFMDAYYIYKNMRKEIYSFGIVDCERILNTKKSNADNSLADVVVTDNKYADAYIKYLLGRVSRCKDDEEIRKYNIGITSECMLYQGFTVRAINPENYKIHYIGNRAIEQQIKYREQQLVNLTDNLTVIKNIFDAYNSLTENTLFMNDEYIQGQLSSLFEDLKTVNIEEDKRSKLIEERSNIDMTTARKIEQKIKKIKENLKELDEEQSVINNTIGGCNNAIESNKDRLNVAENELRNIAYNISREYSDFTEKEKAEERLATDIETNSDILKLKNDYRNKVFRTNRDVNNLNGDIRAKKENYNRNYNISLVINENDNFEFNDEWERIKNISLPQYKDKIAVARKESMEQFQSDFLDKMRDNIMTAQQQIKEINEALKLAEFGSDKYSFEVKPEKAYMEYYNMIMADRMGGDSIFDLNFQQQYGDTCNNLFDKITSVSDQMTEESRKELDNNISLFTDYRTYLKFDLYVTNATGRKESLVNGIKSKSGGERQTPFYVSFLATFAQLYKVNEFNYKGNTARLVIFDEAFNNMDNGRIDESIELLRKLGLQAIICAPDNKIANISTKADKTLVLYREGRDIDVFDFDKEMKKVEASL

SEQ ID NO: 32643 - protein, 414 aa, Eubacterium sp. CAG:274
MRLAYEILNILLDKYERSSQSKGNTCNRRILLKLDNDFIKYRNSDYEDKEECNHTIIQFKEQHIIDFKWEKHRVDMIIEEVWLNKEYIQKAYSVANREYIGDIIQERINIIKKYMSSITTPWILDFLHYHLDYISSEKKLKKPFNKDMPYIEDVLLALDNIDKIKEPIPVRVFSSKCYKNSKTFENKYQNCVLSIIKKYEYTIKDLLDKDPELEISNSEILSQIGIISKPEIFEFSGNCDIFTSEGSVNSYIFKSGMVMNNYFVNSIENIKFNNITDVIFIENRTNYYDYILNQKENEFVIFHGGFYSPQKAKLFRKLIKAVDDNIKVYFWGDIDLGGFNMFVRLKENIIPNLQPLNMGLEEYKKYLYSGLEKNEDYLGILKGLLNDEKYGPFYDVIENIILNRKTIEQENFLI

SEQ ID NO: 32644 - protein, 453 aa, Anaerostipes sp. CAG:276
MRFGYDIPDSFWSLFRSVNRDHYIEALLKISEEYEYNNYFLSREVCIQVLSDWNADKRIWLQREEFESELDVLETPPNRILNWLIKTGWLKKLDDFSTLTSNIVIPDYAAVFLDAFEQLVNPQMEDTEIYIQNVYATLFSFQNDKRINLGMLKTALINTKKLNKALQDLLHNMDKFFGRLLKQQSYGDVLAEHLEGYVEEIVKKKYHMLKTNDNFYLYKMDIKKCLQEMREDAEWIERVRAKAKAEGRDEKEDVLDILDAIERGFDDIEHRIANMDKEHSKYVRATVTRLNYMLSGEADMKGMVVSLLKHLEIDEKREERLSQVAEKMNLSRLEVLSEKSFYRRKKRRDFISRLEPDEDVRELTREEVLRLNKIHTRYSKKEIEEFLESHMEDGSMEMRDVNIGDDESFEKLILAYDYCTRKNSRYQVIERENKMLENGKYRYPDLLFVRRKS

SEQ ID NO: 32645 - protein, 218 aa, Anaerostipes sp. CAG:276; identical to SEQ ID NO: 30892

SEQ ID NO: 32646 - protein, 1127 aa, Anaerostipes sp. CAG:276; identical to SEQ ID NO: 31167

SEQ ID NO: 32647 - protein, 403 aa, Anaerostipes sp. CAG:276; identical to SEQ ID NO: 31168

SEQ ID NO: 32648 - protein, 499 aa, Eubacterium rectale CAG:36
MSMTLKDRIPKEFYSLFRTKNMDAYMQIVVALYEENNEVYASLGLTREECQIIIADTISKTGIVWQTDYNEDESNKDSGSMDNHDDYNPDSEIDVIYDQASFAYTLTPSAILGRLINWGWIRSDFDEKLNTYVIAFPQYSQMYAELFKKLLVDDDSRERESILAVYSALFTYFSDPEKNNDILKNALYTSKNLGQLLSNMQDGMRAYFDELSRMKDFIGIQKVLIKEINNSDSRRYAILTTTDSFYRYKEAVKELISKILNQNDDRRAELEGILSQTTPGTFERKRYEYSVEYCDKASELVYKVEHEFDLIERKYNKLIEQKTIFAKRALARIHYILQEGADDEDNIVKLINLIDKSDKTDEILGALRNRMKFTRQFYNVTDDSFPGRRERGRSEFVPFVIDDASAGEDDMADFVPKPLYTKKELQSFRDKNMRDGMFVTDEQTVESMEDLEKLLFLWQEETNERMGEDTVSLDGEITKSDGVSYSRLVISKSDSKREA

SEQ ID NO: 32649 - protein, 241 aa, Eubacterium rectale CAG:36
MFEYMENVSPNEAENIRKTIQDLLRQTCILQMKCDPVTLIQRDNPRYQVCLRNREFISDYLAVLDCELVHDQQEHLFRITGDGVMLEKMTLLTARIVIIMKMIYRDKIMGEGLNATTTNLAEIREYGRNTNLITRKLNNQEWSDALLLMKTHQMIELPRAIANLEDNTPIYIYGTVNIFCSAMDINELVRMYSDEVELIKYDNESAATLEAAGLNTEGSSVNHTHEFAKNSEMEELPIESV

SEQ ID NO: 32650 - protein, 1121 aa, Eubacterium rectale CAG:36
MSQSKKIFTRMCLNNWGGINHKVLQFNEYVNLFSGKSGSGKSTVMDAIQVILYGSFSPTFLNKAADDAKNRRSVLSYLRGEQKDGSANRGDCDFCSVIALEIEDTGSHTFTCIGIAFEVRKNDSEIKRFVYFSHSGRMPEPSYVTADGFCYSNNDIKKLVNTRSQSADRRARGDVNRIYASKEAYLGTLYDVILGYIDPNRFITMEKSAIALRMTNGTGQFIRDYMFPKSDSGTIETISEQLDAYRQIREKIEDMRKRIELLKEIKESGQELVNIQSDIVMAETMIRCIDIEDMRAKIQAAEDDKKRIEEEQDRLSEKAEDIAGQQADLQQEYIQVCADLKSSDLGSKKDQLRELEKRSLMLTDNSRQWIKITNGLKAWDEDEVITDYVSNAVLNLIEEIVDGDVTEAKCQELHLKLESIKKDIEDELEDNTSQKNEITKELKEKKRLVDDMKNNRKSYSESLRSARAALQRDLSDRFGEPVKVQVFADMFDVQDEEWKNAIEGRMGRLKFSLITEPRYAHTAAVIFRDMKQFEDVDLINSKAIMDSEPKAMDGSLYEAVDTKEKYVDVCLKRYLGHIIKCRSVDELEQVRDGVTPDCYSYSNFIFRHLKKRDYTTNACIGGRVSKARLAEYETDVERLEKDRIQLMGIISSLKAQRDFECLKGEPEYFVGLSEASDELKAVNSQKNELEEIIRTMENGQYKELKEKKRLLEKNIDALKSAFSLNQQQINEKISQHEKIIGANEQRRAQLEDMLQGYVAREELEKQVQDMLQHSSGASVKSKQREKLIELQGADGNGGRQQSCVETLQTARYRYIKEFPSGQFSGAEKSNKAYEELLEKYEKDYEPEYESEFEEQCKVIYKSLRENVIGTIHGDIKAAKRHAYEINRLLRETNFSDSTYQIKIEPAKNENGQFYDMLMAEELDSKNPDNGGIAGQISFGEDDFYKKYEQKIKLLTDKFMPPRDEDEHLRMQKRKEMEQYADYRNYLSFSMYEQVTDENGRVIRENFVDDMAGRDSGGEGQNPKYVALLAGFAMLYMQQSNRDSKIKLVLLDEAFSKMDQERSAVCLKYARKMDLQLIVCVPDERLQSLIRNVDCVYGFRRHNNQISMMHIDKGDYLKLMEG

SEQ ID NO: 32651 - protein, 470 aa, Clostridium sp. CAG:149
MSFFETLNEKFFNPFCCRNRALYFECISQLIEKSKEISVLYEADARNTLILYLQNCTYSIETENIGEEIAGGKTPQENASTILRYFRVCGWIAPQEIGRSGDNIASVSAYCRKLIDAIHKIFDGDANGAITNHIFSMYEILKFSFSKDNARSIRPYQNILIPLVENECDLKNELLILKDSIREIMRAVMKMADANSFGQFLMKDELLNRFFNDYFFIKKSGLIPSYISDIDRMLRKLRHSELYDRMIQEYRKIENTDEIQAKEKIDRLFNELDSFINLEYEQEMSYIDRKINNYYNLYSTRMMMVLSENTNLEHELNRILLFLKNLNEENRAEALSKLSETHRLMSMGYIGRKSFERRKKRNPNQKNAGLVCEELSEEEKQRLTDELLTETPDRYSMDNVEKHFDEIMRGRDQISVEECGVHTRDDATMIAASMIYSGTSGFPYEVEFRKGMVETEAARISNISIKRKKS

SEQ ID NO: 32652 - protein, 214 aa, Clostridium sp. CAG:149; identical to SEQ ID NO: 31286

SEQ ID NO: 32653 - protein, 1105 aa, Clostridium sp. CAG:149
MILLKKVRLINWYGFSNVTAPIGFFTLIAGKNGNGKSVMLDAIKYAAYGDTVFNKSSESKGSRTLSSYTRGLLDATAGTYMRPADQVPNVYSHIVLEYFDDVEDKSFLLGTVIETSASNNCQTYRYVMDRMVMEQVEHTYEENGVTMPCSASFLQKRYRLTLMNREQGLPKFLQMTGLKLNLGQLPVYLRKLRGIMSYDPNARIDRFIRESVLEERNVDFGKLIQAKENIERLNENFEIIQQEINELDGILGEYDAWESEKNRLLADDIRIIYKKRKDLNREIERQTAEQELAQRRKEDLERELEILDRRKKEIDAQLVQARVSLEQLDSTRMIAEERRKLEGLEAEKRTLMTLCRKLEHFQAVVSELMNQFFEKEKRMEDQNVLASLCGRGHTAAEKAAAVSRFKQKINECYDGLVMRAADTERELAELNRSLDVQHRIIEDCKKHRNTFAQIPEYVGLRDEINREFEKRNIRSKAQFACEYVIGLTDEKWRDAIEAFLGPRRYTILVDPQYYDIADDVLNRSEHRYAHLFNTKLLMKKKVHVEEDSAVFKLEIKNPVAKQYFDYQLGRMHAVERNAVKEYENAISREGRVSVAMDSYFLRFDRLRSYYLGQKTFELNRIRAEKEISRLNEERKAKLAEKKELEDQKNRMAQNREMFQEYDYDAHRKYQAASENARASEAQLERLKKAQENNQEYLELNELAGRLSDEQKTVQNEYNAKLQEKSGQDTTISRCGEKIEAKSGELAEQEKRYREYQTGYYTIVQRTVEAYEKYLKNGKKGPGGLLAEDTRRRIGNSITQHERDLTQKQADYNAKHAGRMLPRGTEGRERYAGRRERIWMDNLQEIRQKLEEQTRRYEDIFKNEFVLTILKSCERAREDLRQINGELAKLSFAAKYQFDVHYVKDGSEYAKVIEYARYLDEREQLGGNADGQIAFDILTSVSDEEGERLETEMKQIINRIIEKNSEETIARFADYRNYMNYEILISNQILDRAKLSRQTGFNSGAEVQIPYLLILSSALLLIYNQRINSTRLVFIDEPFAKMDPGNVKLMLKFMREQRLQVIFCSPDKTESIGNECEVILPALRVRADSMQLGIVQFHEEKAYSSR

SEQ ID NO: 32654 - protein, 403 aa, Clostridium sp. CAG:149
MVNYEEKLLAALADKYRKSKKDRGTNVITRRTKLNPSQLYKNYSRNDGDMTQIEAVNQAVFRCSQEGFVTYETEGFSSEIQSIYLVDEKIGEIEDYLETKYGYEPKSAKRKYVEGLIVGYSGRSPAAEQECIKLRQALEKNRIPPRYHQTEDLLKALVFIENNEKDLYLREASLLIYGDSKYLEENVLGSVCRALRDCLGRPCGPAELEDEILEEYHITREKQKLCLKGDMTVCIHGKELELGAFPNGIEFFADELYKIEQITVKTAVFTTVENYTSWLRCDSSKTALFYLGGYATRYQRDFLKKIFSDNPTLVYRHFGDIDAGGLYIHEHLCRVTGIPFQMYRMSRAELEDVRFQSCLHPLTEQDRVRLKSLEKQEMYRELAEYMLERGVKLEQEIVSYYEL

SEQ ID NO: 32655 - protein, 481 aa, Clostridium sp. CAG:149; identical to SEQ ID NO: 30975

SEQ ID NO: 32656 - protein, 231 aa, Clostridium sp. CAG:149
MIPYFNELLQEEREELTQAIRLLERQTYVLERKYDRKTGRYQYSGVYRTLERHMEFLREYLEISGISIYEDIQLGVIYIKGEAVLAEKLPKLATLYLLILKVIYDEQMTEASNSLAVHTTLGELSERLGVFGLTGRTAPTEIRRALSLLKKYQIIEPLDLMDDLDGNMRLILYPTINLILTGNDVRELLSELGEGEGQDRQLTRDTEEAADEEENETDGEENETDGEEDSR

SEQ ID NO: 32657 - protein, 1141 aa, Clostridium sp. CAG:149
MNDKGFKALTRICLNNWHYISHKVLSLNSGINFFTGHSGSGKSTIIDAMQIVLYANTDGRGFFNKAAADDSDRSLIEYLRGMVNIEENNRFAYLRNQNFSTTIALEFTETEGGEAQCVGVAFDVETASNQVNRLFYWHKGRLPEHFYRTADRTMTISEVRDFLKKNFTKEDSFYGPHNERFRSQLYSTYLGGLDKEKFPLLFKRAIPFKMNIRLEDFVKEYICTEDDIHIEDMQESVMQYGRMKKKIDDTVREMEELSELNQAFLQVREAEGEMEGYHALAKEMEILALKGRVRRLGREAEAAREEAKRQSESKAQLEERIQEKEAGREELLKKIASTGYEDLKEKLKTLKELIEQYEKSEARFQKTAAGLKGWEEADCTANQTLWDIEAFEKREISEEGLHSLKQSIEAMRKEADEERKEAESEIRRLKRAQTEARENLKELKQGRKAYPKELLNARTYIQKRFLEEFQKPVQVDILADLLDIRSERWRNAVEGYLGGNKLSLVVEPRYVRSAMRFYNELDRRAYYRVSVVDTEQAVRDSHPVLDHALSEEVSAQTEYVRSYVDFMLGKVIKCEGIDELRQCRIGITDDCLLYHSCRLQYINPENYTRGAYIGALSMKKRIENLEEELREIGEELKPLEETRQTCDQVLSLEPLSLTVSEYGEMFEDLKNLKKKRAEKKRQEQALLELSEGQISAWEKEREELQKEIEKVRGALKALEENLWKLNRDIQGREKQNIELQGELSQRERELSEMKKEMEEKSGTHALEQFEAKKEEALLSAFKAVPDGYSTAEYALERPAQCERLRETFENLERESGERRESRFERLEKQRIEYLRRHPGRRFSPSDRGNEKYDKLLAELSCDRLSEYREKAAEQARTAVEHFKDDFIFKIRSAIKEAYHRRDELNEIISSLDFGKDKYRFVIEKNRGADGKYYDMFMDEALEINPASLSQNMDNQMNFFTMAHEDRYGAMMNELIDIFIPPDQAAAREQEEARRQMEKYADYRTYLSFDMQQIIEGEETMYIPLSRMIKKNSGGEGQNPFYVALLASFAQAYRINLPARFRRNTTIRLVVLDEAFSKMDAEKVASCIRLIRGLGFQAIISATNDKIQNYLENVDKTFVFANPGKKFISIQEFERKEFGELE

SEQ ID NO: 32658 - protein, 436 aa, Dorea formicigenerans CAG:28
MNEQLARMTLDWSEERFDEEGELLTRSNMAMISLRHFEDWGWLRRDYDETLNSYVVSFPEYSQLYVELFRNLYSDEDSKERESVLAVYSHLYTYSSDREKNNDILKSALHTSRSLLQMLANMQEGMRGYFDELSSQRSFLGIQEVLVKEINNSDSQKYAILTTTDSFYRYKEAVKELIEKNLGENETRREGFVEKLMDIQVQLAREEQEKSEERNVQNKLSIQRYRLERAVKLCDEANEMLYRISREFDAIERRYNMLIEQKTVFASRAAARIRYILMEGAVEEDQTIAFVNLLTQSEKRDEILDKLSQKMKLTEPYRVMNEKSLYQRRDRKKEAFVPQAVTEVTEQADSEEMNEYVLKPLYTQKEIREFRKQNEQDGNFIVTKDTVKSMEDLEKLFLVWQDATEVAEGTEEIEVGEELENEIGLRFSKLVIKKSQ

SEQ ID NO: 32659 - protein, 214 aa, Dorea formicigenerans CAG:28
MVNYMEQLSVTETENLKKTISALFRQTCILQVKYDPVTLTPRDNLHYEICVRHRKFIEDYLSVLGCELVYDPQEHIFRLTGEGVAVERLNVTATKIILLIKIIYRDKILGEGLNATVTNLAEIREYGKNTNLIHEKLTMAEWKDALYVMSKHQIIEVPGAIQNVEDQTKIYIYSTINLYCSGVDIQALIKEYVDEEGGAEVEAGEEDIYKNADE

SEQ ID NO: 32660 - protein, 1123 aa, Dorea formicigenerans CAG:28
MQKLKQAKKIFTRMLMNNWGGVSHKVMEFHEYVNLFSGKSGSGKSTVMDAIQVVLYGSISATFLNKAADDAKNRRSVLSYLRGAQKDGSYNRDGQDFCSQIVLEIFDTGTKVSTCIGVAFEVGKNDTDIRKYTFFSHSGKIPEDEYLTEKGVPYTIAALRKLVEKRVDSSDNRGRGDVNRLYPSKEAYLKTVYDVIFGYVEPGRMMTMEKSAIALRMTNGTGQFIRDYMFPKSKEDTVSTISDQLGAYREIKERVEDLENRIHLLDEISRQNLALQTTRADKIHVEQVLKYIDIESFKTKIEARSQDLMDINEKIRTREKQQNENNEKKTQLTNALVEVEAELKSSDYGQKEKELKSLKETIKLLARNSEQWREVVKGLVRWEEDEEISAYVSNPALQRIDEIKSGNVSKEAIEKLKKQLSDALESINEEVDEIGTRISQNRKDLKEKKEMVEDLKNDRKPYRKELKQARQELQNRLSTQYGRTIHVNIFADLFDITDEKWKNAIEGRMGRVKHSLVTAPEYALDAAKVFRKLQYLGGIDEVDLLDTAAIVKSEPKVHDNSIYEAVHAEEPYVDQCLRRYLGRIAKCETEEELRASGNGVTADCYSYNNYIFRHLKKNDYEKYACIGTKVSKAKLHEMEDEVLKLSEEVLQDQQMQQSLKAAQGFERLNQSTDQILHLAGAGEELQAFYEKQDQLEKELRELREGSRTAELNQQKTELEVKIQEIEKISEQLQKEILGYAKTQGQAEQDIVNFQNRMDFLMQGFVLNEELQTEVQEALKIQSEQTYRRKKSKESEELMKQEEEVRDLLTRARNQFNQAYPSYGLTGVEHENVSYDRILNQCRQDFEPKYKDEFQKQYDLIYHTLRENVIATIHGEIKAAYRHRKEINRMLAKIKFSDSIYQIDILPAENENGQFYEMLMAPELDSKVLDDDGFDGQITLGEDTFYQKYEQQILRLTEKFMPPKDEDAKSLSQHRQQMEQYVDYRNYLTFSMYERVEDEDGNVKKNAVDDMAGRDSGGEGQNPKYVALLAGFAMLYMQQTNRDSKIRLVLLDEAFSKMDKERSEVCLHYARELELQLIVCVPDERLQSLIRNVDSVYGFRRYQNQVSMMHIDKGEYLDMIEGKI

SEQ ID NO: 32661 - protein, 487 aa, Bacteroides sp. CAG:702
MALQTEVLSEILRTSPCVELLRLRNRQLIILFLFKMFYHRQTAVPFESLRMQLADYLSAVRLEQDEESGITEFDSFEEKAGKYIQRWTDKGFLRNYQEETGEVFYELSLYTSKTIDWLLSLKREEFVGTESKFMNLFGQLKELVEFTNEDKEERIRMLEEKKREIEHQIQSIRAGGDAQIFEEYQILPRFKQISQSAKELLSDFKEVEENFKSITKDIYRRHADGAYSKGDILGFTFDALANLQQSPQGKSFYAFWDFLLTPSLQHTWDELVEHLYDTLDDKRLEVNDTFLKNMKQYLYSAGKKVYQANDKMAEKLSRIICENGTIPTIATQRVITDIQSSLLALAQKGITPDVSLEVETLPDINMPLERKLTLERNVEVIYRQALEMASSDISEAHSAENLFVQNRIDRRTLKQHIQHALRHKRQTTLGDVIQENGGLQQGLSELFGYISVIRDFRHIIHAERTQTVTFDETQHKAIVIPEIIVVR

SEQ ID NO: 32662 - protein, 191 aa, Bacteroides sp. CAG:702
MNLESYISPYARAVVCLLKGPVNTTDRCWNDLLHYQTEIQKYISQIGLELIVKRDEGFAYLKQMTDESGNTLGLVPRKPLGFECSVLAIILREVLEEFDSNLDELYTTACYITGKELKERIELFLPERFNRVKLLNELDSYIARMVQLGFLIEREQEGRTFYQIHRIIKEKVTLDQLVEFKKKLESYVESV

SEQ ID NO: 32663 - protein, 1134 aa, Bacteroides sp. CAG:702
MLNLFSTSSDTAGFRLDYMEIYNWGTFHERIFRLAPQGNNALLTGANASGKSTIIDALLTLLVPAKKDRFYNQSSGVEKKGNRTEETYVLGHYGNIQKEGERGVTTQALRDKSAYSVLLASFSNTDQRVVTIFQVRWFSGGELRRSFGLAHVPLEIQKDFQPFDGKGVWRRRLEASYKGARTLVEFFDGPVGYAERITQLFGMRSVKALSLFNQIVGVKVLDDLDEFIRINMLEEHDAESQYLQLKDSFTTLIDAKVNIEKARTQIEMLQPIASLASQIESADERLHQLMTDKDTAVYWFAKQLIDLAKEKLDVAMKEKEKLETEIAHLRQREEKLKQEERTLSLAIEKDEVGRKLKELETDIERLSKVRNERMASMDTYNELASKSGFSPNPDEKTFNAQRAQAAQQIEEWTETKETCIRKQVQTENEQKKLAQQVEELVHTVEMLQKNKNNIPLRETEIRDAILAHTGASKEEIPFVGELCRVAEDEKEWEIALEKILHHFALHLIVPDKYYHQVNEYVNTTNLKGRVMFYRYTPSGSLAGMQTYQLSAGEEGQVIDKIEIRPDSEYEEWVRDMILEKYNYTCADTLSAFERYREKVVTREGLVKFAGERHEKDDRPHILRRENFVLGWENKEKIRLLQQELLQLQEQDATLAREIDRIRQEAAEGEARCALHRRLVDLFPDFKKIDWQSFVGEIQRKQEEKEALEKGNDHLHTLQTQLENVHEEQHRLSVTDIPEHTRKMIHAEYRIEQLQREIDENQRVISSIRSLLFTDFEKNYAYLCELSYDQLKQERGKFQAKNERERKKLETEKRGYEDEAKVKITAFKHPDEDILTRFKDWRADVDTLPDATHIELIDAYRQMLERLEKENLPKYEKQFDGYLQKTLTDKVGEFRMFFINWMHTIKSNIDMLNDSLKAIDYRMRPVTYIQLTALTQISEEASEFRRLMDEAVPNVQKINATSDGRRIHFYEHVEPFMSRLADEEWRAKVMDVRFWFTYKAEEFNRQNGHKETTYENMGHLSGGEKAQLTYTILGSAIAYQFGLTKSGLQSDSFRFVAIDEAFKAQDEDKARYLITLCKQLHLQLLVVTPNDNIHIVENDISYVYFVERKEEKTSWLYSMPIEQWKRETHEQPSRT

SEQ ID NO: 32664 - protein, 476 aa, Roseburia sp. CAG:380
MLLFDNPGYDRFFNPLCCQNKRIYYECILQLIEKSKQVSLLYENDARDTLTLYFRNLMYAVEDEDNSGSADENISSKKSEVENASAVLRYFRHCGWISERELGRTGDNIATVMPYCRKMIDAIERIFNRDNSAALTNQIFAIYDVLRSAFTEGHGRNVRPYSNILTPVSDSVADLKNELLILKDSIRSIMRIVIKMTETNELGQFLIRDEMMEKFFNDYFFIKKDGLIPGYIDEIEKMLRSVVKTDVYENMIREYQELHDVTQIQAREAVENQFDEIKSFISYDYVKEMDYIDKKINNYYNLYSTRILMVLSNNVNMQSYLNNLLMTMKNMDPEEKGEALRHISKCFMLESHKYVGRRSIERRKKRNPNTKSAAVVQSTMTDEERARLTEELLHKQPERYGADRAAEYFDRILGAEQSFVPDSETVKTREDAMMVAASIIYSGSAEFPYEVEFLGGTVETSAATISSIRIKRKNNE

SEQ ID NO: 32665 - protein, 207 aa, Roseburia sp. CAG:380
MSDIRLNLSIKEENNILFKRCIRKLLDSTFIVGDKDEKLYSFISRESNRQDISDYLRMIGFDVLVDTNVRVAMLKPHESDEETVGLKRANVVSFTTEQYHILLVLWEIYLENLGYQDENVVLKGDLVDKLKAYEVDADKKDLSVALKIFKKYNLIDYDPKDNSEDAIITLYPSLQFGWNLEQFKTVTEEYMKNNADENDDTDGEEEE

SEQ ID NO: 32666 - protein, 1099 aa, Roseburia sp. CAG:380
MIELSMVRLINWYAFNNITAPFGKFTLVAGRNGNGKSVLLDAIKYALYGDTVFNKSTENKGSRTVTSYTRGLLDATAGSYMRPADKVPNVYTHIVLEMHEKELDRYFILGTVIETNSGNGFVTQRYVIEGKRLSELEHTYAEGSSLLVYSASQLQKKYGFKLMSVTEGLGKFMQRTGLRLNEGQLAAFRRKLRSVMSYDPDAKIDQFIRECVLEEKKVDFSKLIETKNNIDTLTVTFEAIDGEINELENILSLFDESKRKDNIIFADDVKIAYRKFLKYQEQMETAERAMDIAGKQIEEDTKRLKFIEEKEGKTSFALHEAEFNRDQMDCSKAIRDAEDALKEADKRKESLAAEKKMLLEQQNRISELINWCYEEEKKIEDKEILSSLTLDTYTGPQKENSVEHFAAFLREYRDTILGEMTRIRDIIRENDEKQRKCRQIIDDCNAKKTTFSEIPDWVSLKEQINREFQKRGIASEARFACEYVIGLSDEDWRDTIEGYLGQRRYTILVEPEYYDLADDILNASRNRYAHLFNTKLLMEKNISPVEDSVANFIEVRNPVARQYFDYQLGRFHATTIEQVRKFENAMSKEGRVAVAMDGYFIRKDRIRYYYLGQETIELNRRKAEKKLSSLKEEQREHREELEGKTAKKSYLDTQLSLLTTCNYNACQEYETALAEYGKKESELQELVDAQKNNMEYLRLAQTVSDLEQELAAIRKEISDVRADMSHQETEYNTNEKDYQIAEENIGQAQTALQEYRLQNGVICDKAIRDYEQYLENGYSGQGGTLKDRPRAERLQREVRDNLKEAQYRYNAVRTAENQLPVTEDSQASYQGRKDKIWMDDRQEIQEKLKEQTGRYEAIFKNEFVLTVLKSCEAARSDLKLINAELARLDFKSVYEFDVRYIRDGSDYEKILEYARYLKEREELGTADGQMTFDTMTSYSNDRGDELENEMKKIINRIVSSDDKEKIERYADYRNYMNYEILVSNDVLNKAKLSKQSGFNSGAEVQIPYILILLSALLMIYNDKNNSTRLVFIDEPFAKMDPVNVKIMLGFMKEQKLQMVFCAPDKTDVIGDECNVILPVLRKQQDLMEIGIVEMHENKA

SEQ ID NO: 32667 - protein, 417 aa, Roseburia sp. CAG:380
MDYGYEKKLLVGLVEGYRKSKKDTGENRTNRRTKLKPEKLYNKYHSNAGDYEKISAINDTVQKLKDKGFVTSEYESFGTDLTGIYLVDDKIDEIEEYLAEQYGYVSKDTKLQKLETLIREYEDRSPICHEECGKLKIILESRKLPKSIEKSIEMLDDLFRVLSFVENNQKLMYIREVSMLVYGDSKYFENNTLEPLCTLLQKYNTVPIPGQTLSDGEYILSDEILKKYHVFKEPQKISIRGKALIRMCGKDIDISEFDEGIEFTVSELSKIECVQLLATTFMTIENRTSYLRYKKENTVTFYLGGYANRDQRDFIRKIYESNPSVTYLHFGDIDAGGFWIHHHLCQVTGVPFGMFHMSFEELMEPDYRKCQHPLTEGDITRMQELAVMPEYRDVIKYMLEHRVKLEQEIISLKLMEV

SEQ ID NO: 32668 - protein, 450 aa, Coprobacillus sp. CAG:235
MVNIFDTLPRNFFNIFNTADRVVISECICVLYEYIKDDASFASLKENLIYELTKYFSSHLIELEELQSQSPRERAFYVYRRLKECGWLSEEVGENYHVYASFEDYAISIIETLINLEEDRDIEYSSMVYSIYSQFKNFDIENGHKILDAQYSMTKSLMTKLKNLNTNIKRYIKRLVQDNMKNDLNQILDSLLSDYQLKIVDRAFYNLTTKDHPLKYRNSIISQIQKIQDDQATSETIIGNIMLSKDLTYQEAMDLFYKQTSYIIDAFESILDLINEINRKNEKFVASATNRIMFLMNVKEDIGGKINDIIKEGQECPEVFDQVATISINKYLDQNSLYLPRQIKKVKNTDLILDTQLDEQTRLMAIEKLKQNEKYTKTAIEKNVLQCLDQQETILGSNYYDQNKDLSLFILTWLYGYSQNARYKIESQENIIKKDHYQFREFIIRRVEDE

SEQ ID NO: 32669 - protein, 212 aa, Coprobacillus sp. CAG:235
MNKNELMKNMSQAYLLLSEKRKEEFSRILNRLLAVNFICGGRKRDREDYYFISENEQLFKDFLMMLDYDFHLYKADRVIYIHNLNNYNHLNLNQMQTIVLLLLRKLYFQKSQELQDTEFIHISLGELHSEIEATGIYNERLKKTDLKNIYHFLSRYNICERIGDLNEDDTRLIIYPTINYILPIQKIDEINQRIQQYKKGDHDENINESETD

SEQ ID NO: 32670 - protein, 1080 aa, Coprobacillus sp. CAG:235
MKTLTKVKLINWHTFSNEEFEIYKNALITGENGTGKSTILDAIQYVLTAGKCKFNKAASDIGNRTLESYIRCKTGIEGHEFARNGDVTTYIALEFYDEKTEKYQIIGTVIDLPAGGRLNRDFFQIIDCKISDVAFIEERRVLTRKEFKKALIDHQQTGIFKDTIKEGESLFGNALGVKSKYFDLVTRALAFKAIDNVYQFIVDFLLKEDFVDIQNLRDSIKHYKVLEEKLKISKKECESLEGVVSQYDTYLDTHFQMDVLECLKEKLQEKQLQAIIDNSQKKYQKINDQLNFVQQKLTQLNQDEETYQERYHRLDESLRENETYNLKNELQKESEQLKKEKEKKENSYQTLITEIKQEIQLLKKVKIPNSYIQILQNQDYQTETLTHAFRNIVEEVSKRTKDVTEKISHLKIEMTQTVDRFNEYCKEYDSLKENQLYYRKEIQELIQLLNEKLTSHYGKTIEVKPLCEYIEVKDEKWRNALEGYLNSQRFDLIIEPEYFEYALLVYEEYKNKRGIYGVGIVDVAKMSRYEDVDVKDTLASQLDCKNTYARWYVNMLLSKVQCVDDVTQLRNYATAITPTCMLYKNYTARAINPRIYNKPYIGLGAIKIQLATIEQELENLKQEIKLQKANYEDLKNGQALLNQSKADHIFYRLDLIDEYHNLLKEYQEINDRYEKLILDDSLISLQEECDAVKKQLEKTKREKEDSLMKKGSLENNLETFKEQLEQTQEEYQLLHEKIVQFEMEHVDVTQVADQQVVIYLKRFSKDFNGMKNDIEQQGNGYQRKANQIENQIVMKMKDYNDDYNIGFENALTDIESYKQRYHQLKEMDIVSKEEKTRQAKLKCEESFKTSFISGLNEKIENAKKDIAELNKGLAQRDFNGETYEFCVSPTSRDDFKEYYKIIQSGKEYMVNNLLSETLSESQRRIMDDLFIKLSSVENDQETEQMLMEYTDYRNYLDYDIKIKYASGDYAYFSKVNKEKSGGETQTPFYVIMAASFEQVIRNRNQNEDFGCVVIFDEAFNNMDEQRIQEMIKFYNEREIQTFIAVPPSRASTIIPYVNTRLLVIKQGQQSFVEGFKDEQL

SEQ ID NO: 32671 - protein, 405 aa, Coprobacillus sp. CAG:235
MNNYRNEILNEFIDRYEKSSYYKGKSEKPRKISIVLHKKFPEYGHSFHYEETNELENIVFQLQSQGFVEFSKKSILGDRELILNQEENCLDRIYKELKRVPVKEKIIHYVKLLDQYYEETFIKDFVDEMKKRAIHQQSLLPYLKVYDENDLENVMKILKGMIDQKDEISFRRFSEKVLGDTKKLEKYKNKIVHIIKDFYDDTLDNENDIFEAFYIRKNPAYVYLKGNAILQINGQIINLNEMHYYFVLPSICIKDLKIKRIDAKQVMTIENLTSFHDVSLNDTFYIFTNGFHNHAIEAFLKCLYDFLGESVHYFHFGDIDAGGFHIYESLIKKTQIPFQMYKMNIEMLKKYKDYTKPLTQNDRKRLLSFKENQNELIDYMLKNNVKLEQEIIGENENERKDINTY

SEQ ID NO: 32672 - protein, 464 aa, Firmicutes bacterium CAG:631
MFETLPPSFFNLLVSKNRDLYISALFVLRRAIRQDLYLTRDDLVRRITISLEEKIKEAHLDEEDQVDQEDLENTTSKAYFIIRKLRDYGWINIDFNAKNSFEEYIAVPAYASMGINFLYALSEGAETEYNSMVYSVYAALKMADTENNDYYNALQSAYKNTERLNESLSNLYYGVRSIEQRIAENIDINDVVRIHFTEYIEKLHDKFYHPYKTFDSIQRYRMPIIKMLKNWQNDSSIRKKMIELGKTKKPDMNNTELFEYITSLYQYILQTYENIEEKMDIIDKKIFDYTASSIDKMKHLISIDESYKGRITYLIKELNDHKEDSEELVDIIQDFFDLSTLEYAHQEGLYTKREITINPDIPVIEIFTEEKTGEDVNEIFDKIRQGYNLSKIKEFIVSHAENKKIVTMEDLNIKDDEDFILSILAMLRGDEKELPFKVEFDEGYLKIRNYLVPNIKFIMKEGQR

SEQ ID NO: 32673 - protein, 219 aa, Firmicutes bacterium CAG:631
MFEEEFEKLYESEKEEFKRVCNYLLSKTFVLRDVYDKQQKRMITSPEFLFMEKYYDIFENYLSYSGWNLTKDPINGIYKVENIYGYNKAKFDSFTTYILLALMLTYEEQAPITTMGNSVITTPYDIATKMQILGLIQKRPSKESFRISFRRLEQFNLILRLNTSQDLDAWKIMIMPTINHIVTYDKMKELCEYIPTILKEKYEKKSEDQEMLEMEGALS

SEQ ID NO: 32674 - protein, 1126 aa, Firmicutes bacterium CAG:631
MKLLKKVLLINWHSFSKELIEVGNINFLTGKNAVGKSTIVDAIQLVILADTRGTSFNKAASEKSGRTVISYLKGEIGGDEQGNKRYMRDGEFSSYVALEFYDDQKDEPFVIGLQFDVIGDKLVSHQFIYDGAIPEQCFILNNRAMPFKIFKEYVTSEFRNVILPDSLSTYKEEMRKKLGHLSQRFFALFKKAVPFQPIYDIRKFITEFVCDVKYDIKGDLEKMQENIRNYTSLEVESKLIEKKIYHLQRIHEYYESYAADKNKCEQANYLVAKLEIAKKRKDIANLNEEIKKHQRRFDDLGVEEVALTQNVESWSKVRDQLIVERDNSDSKNKHEKYGKQKEDIKKEIDMITDVFSRSATRLINTFQEFIQKAEQIKEYTFDPEVANLAKVDLDLFYAKADQVIEKASVLTKLNADNLNKYNEHQVIELTQNVASLEDDFMKMHNVVEATKQTYIDQRDRCLNTIETLRNGKKSYPTHLIEFKEFIEEKLYEMHHENIELNFVADLMEIKNKKWQQALECYLSAQKFSFVVDSRYFKDAITIYNQNRHLFSDVSIIDTEKIYQRAPFKVLNQSLATEIETDNKYVRAYIDYLIGTLIKVENIEDLNQYDRAITPSCMLYQQFSARQLNVNRSRTPYIGKKATQTQIEAYALEADELVQKIAKEQEKEQIFLSVGKLNNLSIVDINYHFGNLKQIYHIDALQSEIEEIDHKMETIDMSDVYEIEEKINDVDSELRYANNGLRQNSQEKGSILAKIEELKQVKLADAERILQQKEEDLEKKYPAEWIEANVSEELQEMLNYISEDQINKKLVESKRIAETLQTKKRMLDRSRTDYMRTFNVSMEIDDDSNKAFDDDLAKYQEIELPHYQQKIVEAKEKSYDQFKEDLLAKLKSSIESVTEQIEQLNQSLKNFQFGRDRYEFTVKPNLTYIKIYDMIMDDLLMQDSRINAAAFYEKHKDTIDEFFAAITEAPGANDEERREIINKNIARYTDYRTYLDFDLLVHNIETKAVQSLANSMNTKSGGETQTPFYISILASIASEYRIDLDDTGNNTPRLILFDEAFNKMDSERIKESIELLKKFQLQAILVAPPEKVSDIAPLVDRNLCVIRRKNSAFVKWFDKSEISSIAS

SEQ ID NO: 32675 - protein, 456 aa, Dorea sp. CAG:105
MQLRNEIPDTFWSLFRSVNRDIYIEALLCINEEYQYNNYFLTREVCIQVLGDMNARKRFKLQWEENETEFDMLETPSSRILNWLLKTGWLKRIEDYQTLVTNIVIPDYSAVFIEAFERLSSEDMQDTEIYIQNVYATLFSFKNDSRANLGMLRTALVNTKRLNKALQDMLHNMDKFFARLLEQNNYEDLLREHLDGYVEEIVQKKYHILKTSDNFYIYKMDIKKCLRDMREDEEWIEEIRTRAAQMGDTKDDVLDLLDQIERGFDDIEHRIANMDKEHAKYVRATVTRLNYLLSGETDTKGLVVQLLNRMSQTEDAQEQDAMIRETGERMNLSLLEILSEKSLYKRRRPRTDFISKMAPDQALPDLDKDDVLKLNRIQMRYSRSQIEEFIESYMDGEVMDASKISLMDEEAFEKLILAYDYSTRKNSKYMVLEEEPDQIENGSYKYPALKFVRRRL

SEQ ID NO: 32676 - protein, 214 aa, Dorea sp. CAG:105
MIEYFEQLSQEEQEEITEVIQILYRQTFVLERKFDKRQGRMVPVREYRVLSKHLEFIRAYFKVAGITLRENAHMGVIYIQGEQLWGEKLSRLATIYLLVLKLIYDEQMETVSSSSHIVTTVGALNGKAGEFRVLRGLPSPTEMRRTIALLKKYQIIEPLDVLEELNEETRLVIYPCIHTVLLGDDLRALLETFSEEDTIGDETTIQNTVEDLSE

SEQ ID NO: 32677 - protein, 1122 aa, Dorea sp. CAG:105
METKQPFKILSKICLNNWHYIDQKILTFSEGINFFTGHSGSGKSTVIDAMQIVLYANTDGRGFFNKAAADDSDRSLIEYLRGMVNINEHNEFQYLRNQNFSSTIVLELEQSDTKEKQCIGVVFDVDTATNDISRLFFWHMGGLLENNYRTTSRCLTTMEMREYLQRSFSAEQFYCGPSNERFRRQMYDIYLGGLDAEKFPRLFKRAIPFKMNIKLEDFVKEYICMEQDIHIEDLQESVMQYARMRSKIEETLNEIQKLQDIHGRYEAFQEKEKEVLLCTYQIDRLEMLKLEGQIQACMDKEKVRKEGTGEQEAILSLIKKEEVELQKQYEEIILRIANSGYANLEAELAAVNETLEHLQTSQGKWQQISERLEAWKEQDVVSNQMLWDMEKFTKGTIMAEELERLQESFGEVREELEEQRQEAQMSLRKVKKEEKEAREELKELKQGKKAYPKELEEARYELRNRLHEKCGKFVNVQILADLLDVKDETWHNAVEGYLGNNKMLLIVEPKYAKEAMELYEQMDRKKYHRVSILDTEKVVAGAGKDGYAVKDNGLAKEVKAKEAYVQDYIDFFLGNVEKCDSVEQLRNCKIGVTPDCVLYHSFRLQHMNPDQYTRRAYIGETSMRQRVRQLEERCEKLVEERMPLQELLEEIKKTLQLEMLSQPAEEYLTLQADAEKITEREKRKSQLVKQMQQMKEASVDAWEQEKEDIRKKQDAKKAQITEVQEAIWKQTQEMQQLQEERLHAEEALLVQKQKMEQSKWDDAYEREFQEYLAGRRSENYEYLQKQKIASRYPKMDEREEAYQKLVEERSTYLRSYANRTFSATNRDNEAYDRLLDELQCEELETFKDAAKDQARAAVEHFKDDFIFKIRSAIREAYQRQDELNRIISKLDFGKDKYQFVITKNKGPDGKYYKMFMDDSLQIHPASLDDGMENQMNLFTMEHEEQYADLMDELISIFLPPENATPEELEEAKKNMDKYADYRTYLSFDMQQIVHGEKDMKIGLSKMIKKNSGGEGQNPLYVALLASFAQIYRINLSPKMHRNPTIRLVVLDEAFSKMDAEKVASCISLIRGLGFQAIISATNDKIQNYLENVDKTFVYANPNKRHISIQEFEKCDFDELVEE

SEQ ID NO: 32678 - protein, 490 aa, Firmicutes bacterium CAG:345
MNNNLFDKIPENFFSVLSRKYKSVYALALLTLYETLKTYKVSIKKTDYLNMLTSRISDSMSLFSVALDRLDDKDDEKIESAADVNEELTPSKISYIVKKLEKTGWIELEKDVKTNTEYIFLPSYSIKMIELLNSLSSDVSFYLPLVHQTYSELKLEDEKEDEFMFRAVLNARKNADELELNVTLLHHSICVFGHKLTTIFSPNEALHQHFDNFQTEITDKIYHPMKTFDSLNLYALPTIKILTRWMDDDRLINKMVMQARADSQFAGKSHSEIVGFIITNIRDTIDVYRRLQKSFDEIDKTNAEYTAAVQKKVNYLSSSDKTIIGKIKSILVRAAKEIKNNPDKDYDEMEFLQQMGDTISIYQQGYIDQDSLTPPFKRSVKEEFEPESLPDPFSGDMDFDDLGLEELNKYGPESVDNFMSKAFGKKNEITTGDIDFQDFDDFILFILAEVRAELQISFYKMERVKEQEEIIKQGFRLPNFVFTRKELLHV

SEQ ID NO: 32679 - protein, 211 aa, Firmicutes bacterium CAG:345
MFEERYKALSSAEKKLFTSYVDELLFDSFIVRKKYDRVTGVSKISPTYLFIEKYFDIFEEYVKYAGYDLAKDEDSGVIFLFNPEGTNRLRLDSVTTLLVYALRYHYEETLKSNSSRTEILVDSVALKLLIKDLSLNKVSKRISAVSIASSLRFLAQHNVVARCQHNFNDPSYSFYILPSIRYVIDSLHMNNLANSIRESEYENGGSEESDL

SEQ ID NO: 32680 - protein, 1139 aa, Firmicutes bacterium CAG:345
MILLDKLRLINWHYFLNVTADIKKITFLTGANGTGKSTIIDAMQLLLTGDTAGRNFNKAASEKTGRTLKGYLRGDTGETDSGDIICLRHGKFSSYVAMEFTENENEYFTLGIVFDCIDDSYSHQFFYIKDKFPENNFTNVDIIDNAKLRPLSGKELVQFCKQHYRESEYTFFESNLAYQKFIKDRFGGLPDKYFTLFKKAVGFTPISNIAQFITEFVCDLDYHVDITPMQSNIEQYKLLEVQAKAMQERIDKLTGIQQAFTDFRGIKNDMVLSSYIVDRANYEVAKKTYEASKYRLEQAKLEIESLRQQIEETNINIKDLSDDQERYTASKLGLQGYSVASGINSKKNELLNRITALTISYENAITQIKEYVKSYDDIASKLVNKFNENYNLDFLSSNQEKALLHLLEVADEVRDTAFDIRDKIDHKNLTDNDLTNFQSLMSSFNKEGNTLYHQIENELYSKSEELDMISSDLDNMSKGQKPFSPTYLELRSSFYNSLKARHSDAFVDTFCDLIDIKDKTWTRAIEAVLYNTKFNFFVNDEYYEEANEILVGITRRMNIYSVSLVDASRLIDRNFEAKKGSLAEVIYTEDDGARAYVNYLLGNIKRCRTFEEARNSGNGLLPDCTGYHNFSTWYLNREKSKVNYIGTALSDDEIFERKEEFNKLNREYSKFTEVFNYLSELNNLDVMSLNECNGYKEVLASQKEIKALENNIEKYDEELQEGDLDEVNSIDAKIQAISQDISALQQEKEEYLTRIGEKKNEVKQIDEILLPNQLHVMEQASEKLTAYSAEFVENVGIPFFDNALANLSIDRIKEDANRNYIQKSSKLRSARENLINLRARYVNERHLNYDTTNEESNEEFDKELESLSQVELPAYKEKIVAAHDKAVKEFKDDFIYKLRTSIMTVSSQIDELNQALKDVKFGRDSYRFSVAPNRDYQEYYDMITDDLLLSIGDTEDQFLQKYSTLIENLIDLITSANTEGSSAEQKAQVLQNIDKFTDYRTYLTFDLKVKTGDSEVENSLARTFKKKSGGETQTPFYISILASFAQLYRTNKKENNNTIRLVIFDEAFSKMDAARIIESVSLLRYFNLQVILSTPTEKVPNLSTEVDVTLTVHHDDKSKSSYISAHEDLMKNRVRPRNI

SEQ ID NO: 32681 - protein, 458 aa, Clostridium hathewayi CAG:224; identical to SEQ ID NO: 30998

SEQ ID NO: 32682 - protein, 216 aa, Clostridium hathewayi CAG:224
MGYEEQATGTMGIPYYDSLLPEEQQEVTEAVKLLLRQTFVLERKYEKRSGRFTNNREFRICNKHLEFLRKYFAVSGVSVVENSQMGVIYIQGETLVGDKLPKLATLYLLILKLIYDEQMATVSTSVNIYTSLGEIHEKLGNYRLFKKQPSPTDIRRAVTLLKKYQVVEPLDLLEDLNGDSRLIIYPCINVVLFGDDVRVLLESFGEGEDNDDESEI

SEQ ID NO: 32683 - protein, 1123 aa, Clostridium hathewayi CAG:224
MTNQRFEALSRICLNNWHYINRKTLSFNREINFFTGHSGSGKSTVIDAMQIVLYANTDGRGFFNKAAADDSDRNLIEYLRGMVNIGENNEFAYLRNQNFSSTIVLELQRTDTEEYQCVGIVFDVDTSTNEISRRFFWHRGPLLENGYRTARRTMSTLELEGWLQSHYGKEEYFATSHNERFRRQLYDVYLGGLDSEKFPLLFKRAIPFRMNIRLEDFVKEYICMEQDIHIDDMQESVMQYGRMRKKIEDTYTEISILKEMQEKYGLVLEKEETIQKNGYFTGKLEILELMERAGELTDKAALSRDDLQNQERLKDGLDEQIADLTTQGEELLKRISSTGYEDLKTRLESLNELMEHLNKSEVKWHQTAERLNAWIDQETTSNQTIWDIEEFEKNTIDGEKLERLKKSLAEMRKEAEDLKSEASAVLRDLKRQERQLKEELAQLKAGSKAYPKVLEHARSYIQRRLLEETGKAVEVHVMADLLDIRNEEWRNAVEGYLGGNKLALVVPPAYAEDALRIYSELDKNEYFRVAVLDTEKAGKDTPTVLEGAICEELDVRESYLKPYLERLLGQVVKCRSIDELRGCRIGVTPDCMVYHTFRLQQMNPEQYTKSAYIGKDSVRQRIRLLEKSLAEMEKKRAPEEKTVRECEAVLSLEGLNEETGLYLEWQKDMGDLKERQKEKKKLEQKLLKLKEENVDQWEKERSALLALADGKRRERDAVSRRIYELHTRISQMTQAVTAVEQELLAKEREFKLDDILEAEFTEYMAGKEQPRYEKLRDYFTGRLNAAAEARDQAFQTLMDARGEYARKYPNRNFSITAKDNREYEKLMEILECDHLEEYRQIAAEQARSAVEHFKDDFMFKIRSAIREALQRKDELNRIISRLDFGKDKYQFVIGKNKGADGRFYDMFMDDSLEVNPNDLNDTVDNQMNLFTMEHESQYGELIEELIHVFIPPDNASPEQMEEAKRNMDKYADYRTYLSFDMQQLIQNEDEVIKIRLSKMIKKNSGGEGQNPLYVALLASFAQAYRISMPESIRRNPTIRLVVLDEAFSKMDAEKVASCIELIRGLGFQAIISATNDKIQNYVENVDKTFVFANPNKKSISIQEFERESFPQLMKELDEGEDDD

SEQ ID NO: 32684 - protein, 465 aa, Dorea sp. CAG:317
MSLIDKIPTEFYKLFASKYRTYYQKFLLAIYEETSRSYSLLGLTEEECKAVMNEHIADLTLEWSEEQSDEEGEFLTRANMASICLKNLESWGWLRRDYDETLNQYVVSFPEYSQMYVELFQKLFSEEGSKERESVLAVYSHLYTYSSDTEKNNEILKSALHTSQSLVQMLANMQEGMRGYFDELSRQKSFLGIQEVLVKEINNSDSKKYAILTTTDSFYRYKEAVKELIDKNLSENEIRRQEFEEKSVELEKDTPAYYRNERAIKLCEEAMDIICRIEREFDAIERRYNKLIEQKTVFASRAAARIRYILMEGAAEQDRTVEFVNLLNQSSHQEEILQKLASGMRMTERYKAVTDRSLYRRKNTEKERFIPQAVSTKEEAQENLEGFVLKPLYTKKEIRAFRRKNEHDGEFLVTKDTVQTMEDLEKLFFVWQEATELAESDAVVEVQEELQTKGFRYSGLRIKEK

SEQ ID NO: 32685 - protein, 212 aa, Dorea sp. CAG:317
MFEYMEELSVTETENLRKTISNLFRQTCILQVKYDPVTLTPRDNLYYEMCVRHKKFIEDYLEVLGCELLHDPQEHIFRLAGDGVEIEKFSLTTTIIILLIKMIYRDKILGEGLEATVTTLEEIREYGKNTNLLNWKLKVTEWQEALYLLSKHQMIEVPGAVRDVEDQTPIYIYSTVNLYLSSSNINELLEEYREEIAEDEAIEENLYENAAE

SEQ ID NO: 32686 - protein, 1132 aa, Dorea sp. CAG:317
MKQSKKIFTKMLLNNWGGISHKELSFHEHVNLFSGKSGSGKSTVMDAIQVILYGSVASTFLNKAADDAKNRRSVLSYLRGEQKDGTANREGTDFCSQIVLEVEDTATNIVTCIGAIFEVGKNDLNLKRYFFFSHSGRIPEDGYISENGSPYTISRLKKLVEQRKVSEDNRGRGEVNRLYPSKEAYLNTLYDVVLGYIELGRFMTMEKSAIALRMTNGTGQFIRDYMFPKSKEGTVSVISEQLGAYREIKERVEDLEKRIGMLEEINGHNLKLVQLKTDEVRTQSILKVIAIEGLKIQLESKKGDLESAIEAAKRSEEKYRSLETQKNQCAADKLQVESQLLASDYGQKEKQLKELRNTIRILAEYSKQWRSVLHGLKKWEENEEVNNYLSNPALQTMEEMETGDFTDDLLGRLRKYLKDTLENVEEEIRDLEENIRKTRKELKEKKEIVDDLKNDRKPYSKELKKARARLQSELRDRYGHPVPVAVFADLFDITDEKWKDAIEGRLGKIKYSLVTPPEYALEAAKIFRKMAGKEFEEFNLINTAAIKRDEPKAKEHTLYEAVETKESYVDLCLRQYLGRIVKCETIEELHEVREGVTPDCYSYSNYMFRHLREKDYRLYACIGTKVSKAKLQELEDEVYRLENSLLADEQMQSSLAEARTYEQLQNYSTEQLVHMSNAAEELEEYYRKEDALIREMKELDEGTLIPQLKEKKKQLEETMSLLEKEAKETDAERLARIKVQANVETELKNISEKLETELEGYVPNESIEQEVLRELESNPEHTYRRQKLKELEKLRQEIEAEADGRAEARNHFNKEYPAYGFTGVEHGNEVYDKVLEQCRKDFEPKYKEEFEQQYRLVYHTLRENVIATIHGEIKAAFRHKREINRMLAKIRFSDSIYQIDILPAENENRQFYEMLMAPELDSKVLDNHGFEGQLSLGEDEFYQKYEAQILRLTEKFMPPRDEDGGKRALHKEEMERYADYRNYLTFSMYEQVKDEDGNIRKNAVDEMAGRDSGGEGQNPKYVALLAGFAMLYMNQSNRDSKIRLVLLDEAFSKMDKERSEVCLHYARELELQLIVCVPDERLQSLIRNVDSVYGFRRHQNQISMMHIDKGDYLAMIEGEKDEEESDTQSVAD

SEQ ID NO: 32687 - protein, 409 aa, Dorea sp. CAG:317
MKKNLTLSQWLIEKTDGEAYRAGKLSGESSEKSSEKAYVTKHPKVDQQIINQIGSLTKLISQAREMEKDAQLSGFIRFDWRDMGNDIRAIHYSVEIIPLLCDREGIEDPRKRQQRHIKTVGELLQEASQSEADWLKSYYRFLLTRLEQGKLVKEMDDEAWFACLNAIGRLHCPTWKRVFSARVFRDSKRFQTSYEDRVVKVLREYSDMPDKDVMTNEQILKAYGIISYTQTLECKGTVLCRTDTGQTFDTGDFPYGAVLNSQTMEHAKPVNIAKIRRIMTIENKANYENMSYKEDTLYIYCHGFFSPKEVEFLRELTVLAAENVEFLHWGDMDYGGIRIFLFNKDKIFPGLKPYKMDCESFVAAVTLNAGRTLEAEKRKKLEQMNAGELEELRSSILEYGMEIEQEMLV

SEQ ID NO: 32688 - protein, 454 aa, Ruminococcus gnavus CAG:126
MQLRYEILDTFWSLFRSVNREIYMESLLVINEEYQYSNYFLTKEICVQVLSDMNAQKQVLLQREENETDFDMLETTASRILRWLLKTGWLKKIEDYSTMTTNIVIPDYAAVFIEAFERLTSEELEETELYIQNVYATLFSFQNNSRVNLNMLRTALINTRKLNKALQDMLHNMDKFFERLLDQESYGELLREHLDGYVEEIVKKKYHILKTSDNFYIYKMDIKECLRDMRENEEWIESIRQKAKAAGDTKEDVLDLLDLIERGFDDIEHRISNMDREHSKYVRATVSRMNYLLSGETDTKGLVVQLLNKISAQEEPEKLLTEAGKRMNLSLFEMISEKSLYKRRKQRTDFISQMGQDEEYEDLNREDVLKLNRIQMRYSRQEIEDFIEEHMENEVMDAGTLHITEETAFEKLILAYDYSTRKNSKYRVLNEDETVIQSGQYQYPALKFVRRRPQ

SEQ ID NO: 32689 - protein, 214 aa, Ruminococcus gnavus CAG:126
MIEYYEQLSEEEQDDIKHVIQTLYRQTFLLERKFEKRTGRMVPVREYRVCSRHREFLEAYFAVAGITLQENLHMGVMYIQGETLWGEKLSRLVTIYILVLKLIYDEQMAAVSSSSHIVTTLGAVNGKAGEFHVLSGLPSPTEMRRTVAFLKKYQIVEPVDVMEELNENSRLVIYPCINTVLLGDDIRELLETFSEEEDSGDKTGVQSALENLPE

SEQ ID NO: 32690 - protein, 1118 aa, Ruminococcus gnavus CAG:126
METKQAFKALSKICLNNWHYIDRKVLTLNQGINFFTGHSGSGKSTVIDAMQIVLYANTDGRGFFNKAAADDSDRSLIEYLRGMVNIGENNESQYLRNQNFSSTIVLELEQTDTKEKQCVGVVFDVETATNEINRLFFWHKSGLLENQYRADKRCLTTFEVKEYLQRTFSKEEYYCGPSNERFRRQMYDIYLGGLDIEKFPRLFKRAIPFRMNIKLEDFVKEYICMEQDMHIEELQESVMQYGRMRGKIEETMEEIGYLQEIRGSYRQYEEKQEETASCTYQISRLEILHLQSKIQELNDRMKETQTEIAGQEAKKANLEKEQAELQKEYEAIILKIADSGYAAMEKDLESLNEALERLQNSKARWKKTADGLKEWKEKDVTPNQTLWDIDRFVSGKITEGELERLQTSLTQIREELEEERQETDARLRAVKKEEKAAREELKELKQGRKAYPKELEEARYELRNRLHEKCGKFVNVQILADLLDVRDERWHNAIEGYLGNNKLLLVVEPKYAKTAMEIYQDMDKKKFFRAAVLDTEKVQETEWEVKEGALAQELIAKEPYVQAYINFFLGNVIKCESIEELRQNRIGITADCVLYHSFRLQHINPENYTRRAYIGETSMRQRIRRLEEKCESLQEERIPLQEMLEEIRRISQLEGLTQPLEDYRQWLSDLQKIPAKEAEKARLLDTMQKLREESVLVWEQQKQEIQQKQEAKKAEIEAVQKTIWNHQENGKRFQNMQVDFNEQLVQKENEFRQQDREKYEPEFQEYLEGRQSRNYEYLMRERIKKKQPLEDAQEKAYEKLVEARSAYLRKYPNRTYSATIRDNDVYEKQLSNLECDNLEKYREEAQEQARAAVEHFKVDFVSKIRYAIKEAYQKKDELNRIISRLDFGKDKYQFVITKNKGPDGRFYRMFMDDALDINPSQLSDHMENQMNLFTMEHEEEYGDLMNELIEIFIPPENATREELEEARKNMDKYADYRTYLSFDMQQIVQGEKDMRIGLSKMIKKNSGGEGQNPLYIALLASFAQIYRINLSPKIKRPPTLRLVVLDEAFSKMDAEKVASCISLIRGLGFQAIISATNDKIQNYLENVDKTFVYANPNKKHISIQEFERMEFEQLQGEE

SEQ ID NO: 32691 - protein, 296 aa, Ruminococcus gnavus CAG:126; identical to SEQ ID NO: 31382

SEQ ID NO: 32692 - protein, 472 aa, Roseburia sp. CAG:18
MILKKKIPKEFYKLFRTKNRDAYMQFLVAIYEENNEVYTALGLTIEECRVIIADTIAKARIIWEDEEIEEEDEPDTLFPEDSPSGILNTLIRWGWLKSDFDEKLNTYIISFPEYSQLFTELFQKLQTEDDSRERESILSIYSALFTYHSDTEKNNDILKNALQTSRRLGQLLSNMQDGMRSYFEELSQKKNFIGIQKVLVEEINNSDSKKYAILTTTDSFYRYKEAVKELVSQILRENDQKREQLVKERTGLVEGTVTSKRNQYRLEYCESASQLVYQVEREFDLIEKKYNKLIEQKTVFAKRALARIHYILQEGSSDEDHIVKLINLLDHHANSPQVLEQMRDRIRVGTQFKNITDRSFYNRKNAEDAGFHPIAMEKHDEETQMTDFVPKPLYTKKQLQEFRQKNIVDGRFVTDEQTIQSVEDLEKLLFLWQEETDDTKQEETVHIDGELKGEYGFVFSKLVIDAKKGEKK

SEQ ID NO: 32693 - protein, 224 aa, Roseburia sp. CAG:18
MLEYMENISQSEAENIRKTIQDLFRQTCILQTKCDPVTLIQKDNPHYQVCARNREFIADYLQVLDCELVHDPQEHIFRITGDGVLTERMTLLTTKLVILMKLIYRDKIMGEGLHATTTSLAEIRRYGKETNLITRRLTAQEWQEALILMKTHQMIELPSAIGNLEDDSPIYIYSTINIFCSAADINELVEMFKGETGETEEQKEAEYSEKTQDQWETQDEMRSE

SEQ ID NO: 32694 - protein, 1115 aa, Roseburia sp. CAG:18
MSQAKKVFTRMCLNNWGGIDHKVLEFHEYVNLFSGKSGSGKSTVMDAIQVILYGSFSPSFLNKAADDAKNRRSVLSYLRGEQKDGSANRKDCDFCSVIALEIEDTGTHIITCIGIAFEVRKSDSEIKKFVYFSHSGKMPESEYLTEQGVCYSNQEIKKLVSARTKSDDNRGKGEVNRIYGSKEAYLGTLYDVILGYIDQNRFITMEKSAIALKMTNGTGQFIRDYMFPKNTSNTIATISEQLDSYRQIKEKIEDLRKRIELLSEIQASGKELVRLQTDIVRAEAMIRCIGIEDLRARIQAAEDDKRNLAEKQEQCKKKVQELSASREEAQQKLIQVSADLKASDLGGKQQQYEELDERSRMLADNTRQWQKILQGMKNWEEDDVITDYISNPVLNMIAELNQGRVTEELCQNLHLKIESAKQNIEDEVEDYRDQRREIGKQLKEKKRLVDDMKHDRKPYDENLRSARSALSQQLSDRYGQTVKVQIFADLFDVQEEEWKNAIEGRMGRLKHSLITEPQYAHEAAVLFRNMKQYENVDLINSKAIADSKPDCMEGSLYEAVKTQEAYVDVCLKRYLGHIIKCRSVEELEQVRDGVTPDCYSYSNFIFRHLKKKDYTTRACIGRRVSKARLAEYEKDVEELSRQEMQLDDLLRRLKEARDFECLKDEPSHYVKLSRAGEELARVNKKKMELEETIRSLREGAYKELEEKEQSLQKQVKMVQEELDQTQGELARLGSRIGELSGENESRRQQLEEKLQGYVPNEALEQEVWELLKKQSGQAVINRKKAQVADLEEKEQAQAETLRAARNRYIFAYPAGPFNGAETSNEAYEKLLEKYLTDFEPAYEEEFEKKCASIYKSLRENVIATIHGDIKAAKRHAYEINRLLRETNFSDSTYQIKIEPAKNENGQFFDMLMAEELDSKNLDNAGFDGQISFGEDAFYQKYEQKIKLLTDKFMPPKDEDEHLRAQKRKEMEQYADYRNYLSFSMFEQVTDEHGNVIRENFVDDMAGRDSGGEGQNPKYVALLAGFAMLYMQQSKRDSKIKLVLLDEAFSKMDQERSAVCLKYARKMDLQLIVCVPDERLQSLIRNVDCVYGFRRFKNRISMMHIDKGQYLEMMEG

SEQ ID NO: 32695 - protein, 401 aa, Roseburia sp. CAG:18
MGRKKEQEHKTLARWIIDKTNTDHYRAGMLSGWKHPYIDADVMEIVGGRKQLLDQANILENETNAGKMGKFKPDWKDVKTSIKKIDYDVAIIPELCEREQIEDPRERQLRLIARVEKWRRKGQDCAWLCSYYDDLLDLLNRGKEQKELEDETFFVCIDAVAHQKEHVWKRVFSARVLHNSKCFQKNYEDRILSVLKEKSPFYIEEMSDDELLDAHNIHSYAQTLEWKGTLQYIINDEKVIDSSSQIYGTIINTQTMEHARAYALSGCKRIMTIENKANYEDMSYRKDTLYIFCHGFFSPKEVRFLKTICDLVSEECEFYHWGDLDYGGICIFQFIKAQVFPKLLPYKMSQEDFELAVREDAGILLKEDTRNKLIRKNAGLLEPLKEAILKSGLTIEQERLL

SEQ ID NO: 32696 - protein, 468 aa, Firmicutes bacterium CAG:212
MQLRFEIPDKFWGLFRSVNREAYMEALLNINEEYQYSNYFLTREVCIQVLSDMYIKKHFQLKQEEDETEFDLLETPASRTLKWLLRTGWLKKLEDYNTLATNIVIPDYAAIFIDAFERLGSEDMEETEIYIQNVYATLFSFKNDSRVNLSMLRTALVNTRRLNKALQDMLHNMDKFFGRLLDQQSYHDLLKEHLEGYVEEIVRKKYHILKTSDNFYIYKTDIKKCLRDMRENEEWIGLVRERSKAMGDTKDDVVDLLDMIERGFDDIEHRISNMDKEHTKYVRATVTRLNYLLSGETDTKGLVVQLLNQMSAAVTEEQNTQVENRGNGYSYEDMLQLTGERMNMSLLEMLSEKSLYKRRKPREDFISQMAEDETIEDLNREDVLKLNRILQRYSKQEIEAFIEEHMKDDVMDVEKLKIADEESFEKLILAYDYSTRRNSKYIVLEEDTPQIENGCYKYPALKFVRRGI

SEQ ID NO: 32697 - protein, 223 aa, Firmicutes bacterium CAG:212
MIEYYEQLLQEEQEAITEIIQTLFRQTFILEQKFDRRAGRLQYEKDYRVCTRHFEFLKAYFAISGIQLCENVHMGIIYIQGETLWGEKLPKLVTIYLLLLKLIYDEQMATVSSSSHIVTTLGAINGKAGEFRVLKGLPSPTEMKRTIAMLKKYQIVEPLDSLEELNEATRVVIYPSIHAVLLGDDIRELLTTFEEAKELKSQQSVFHKEVESEEEHRGETTAI

SEQ ID NO: 32698 - protein, 1125 aa, Firmicutes bacterium CAG:212
MEKQQPFEALSKICLNNWHYIDRKILTLSEGINFFTGHSGSGKSTVLDAMQIVLYADTDGRRFFNKAAADDSDRSLIEYLRGMVNISENNESQYLRNKNFSSTIVLEFERTDTKDKQCVGVVFDVETATNEISRQFFWHTGGLLENQYRAEKRCLTTVEMKEYLSRTFTKEQYYCGSSNERFRRQLYDVYLGGLDIEKFPRLFKRAIPFKMNIKLEDFVKEYICMEQDIHIEDLQESVMQYGRMQSKIAETMKEIRYLTDIREAYQSYEEKQQAAESCDYQVERLELLQLQRKSKELRERIIDRTEGIKQQQTQQEKLNKELKELQKDYEDILYHIAKSGYDSLQMELGNLNEVLERLENSKARIQKLSKKLNLWKDKEVTPNQTIWDIEKFEKGTITEGELERLQKSLLEIRDSLETERTDTVTTLNRIKKEEKEIKEELRELKQGKKAYPRELEEARFELRKRLHERVGKLVNVQILADLLDVKDERWHNAVEGYLGNNKLLLIVEPKYAKDAMEIYREMDKRKFFRAAVLDTERVNAEEFAVQKGALAEEVEAKESYVQAYIRFVLGNVKKCESIEELRDCKIGITSDCVLYKGFRMQHINPDNYTRRAYIGETSMRKRILQLERKQGELQNERLPLQEMLEEIKRILEFEMLLQPTADYMQWQNEAGQISEKEKRKAHVIEQMKKLREESVDMLEKQKLDIVRRQEEKKESIDSVKKAIWQNEQDIEKFNNMIITTETEWLEREKMLAEENKRRSEERTQMLESQFKQYLEKTKSLNYDYMKRQKQMEQDPLKDQMDRFYQKLVDVRSVYNQQYPNRSFSTSVKDNKMYDKLLDSLTCEDLERYRASAQEQAKSAVEHFKDDFIFKIRSAIREAYQRRDELNRIISRLDFGKDKYQFVITKNKGADGKYYKMFMDDALQIDPHQLSGSMDNQMNMFTMEHEEEYGEMMNELIHIFIPPENATKEEQDEARKNMEKYADYRTYLSFDMQQIVHGEKDMKIGLSKMIKKNSGGEGQNPLYVALLASFAQVYRVNLSPKLRRNPTLRLVVLDEAFSKMDAEKVASCISLIRGLGFQAIISATNDKIQNYLENVDKTFVYANPNKKHISIQEFEKTEFGQLTEEA

SEQ ID NO: 32699 - protein, 452 aa, Lachnospiraceae bacterium CAG:25
MKFAYDIPDSFWSLFRSMNRELYMEALLKINEEYEYNNYYLSKEVCLQVLEDWNESQRIWLSPEEFESETDASQTPPNRILNWLIKTGWLKRIEDFSTLTTNIIIPDYAAVFLTAFEELVNPSTDDTEIYIQNVYATLFSFWHDKKMNLAMLKTALVNTKKLNKALQDMLHNMDHFFSRLLKQKSYEEVLAEHLEGYVEEIVEKKYHILKTNDNFYLYKNDIKRCLREMREDIPWMEQVQKKADKEKGEDVLSIINAIERGFDDIEHRISNMDKEHSKYIRATVTRMNYMLNGESDTRGLMIQLLKTIGDSKDSEEKIKKVGQSMNLSHFEVLSEKSLYKKRKRRDFASQVEEEKQQEELSREDVLRLNKIHTRYQQAEIEDFIEAYMHDDHMEVKDIDIRDEESFEKLILAYDYSTRRNSKYKVIERDDKLIDNGSYRYPALTFVRRKPKS

SEQ ID NO: 32700 - protein, 218 aa, Lachnospiraceae bacterium CAG:25; identical to SEQ ID NO: 31156

SEQ ID NO: 32701 - protein, 1119 aa, Lachnospiraceae bacterium CAG:25
MSLTKTKQPFLALSKICLNNWHYIDQKILSFNDGINFFTGHSGSGKSTVIDAMQIVLYANTDGRGFFNKAAADDSDRNLIEYLRGMVAVGEKDEVTYLRNKNFSTTIVLEFTQTESDEKECLGVVFDVDTARNDTSRLFFWHKGGILENAYRTEEHAMTISELRKYMQKNFKKEDFYFGTSNERFRKQMYDIYLGGLDMEKFPRLFKRAIPFKMNIKLEDFVKEYICMEQDIHIEDMQESVMQYGRMRQRIEDTLKEAKSLEEIKESFVKFKTKKEEQDYCQYRMNKLDVLKLKTDIHLLQQKIEDGEKDLKTQEENETVLEKKLEKLAKEYDALVAQIAGSGYDQIATRKKDVQELLGQLNHSVQRWEQTSKDLKKWCDLDITPNQAIWDIEKFEQGDITEDDLNRLKHTLDILRKETEEERQDNASALRTLKKQEKSISDELKELKKGNKAYPKEVLDARYELQMKLSEKCGDFVKVNVLADLLDMKDERWHKAVEGYLGSNKLTLIVEPKYVKDAMEIYRDMDQKKYWRISIADTQKIDKQDMKVEENALSEEVLAEQSYVKKLIESLIGRVIKCETIDELRNCRTGITPDGMLYKNFQLKRLDPKQYTRNSYIGDNSLRHRIKELEKEKDKIFDKKDPLEKEVLSAAVILDYEYLPQSAEEYLKQQETLERAKERQEEYEDLENQLTKLREGALKGLEEERDQNRLKQEDCKQEINAMKEAIWATQNALKECRQQIIDQNEALIRAQNELPANGEYEQQFAQEIEKTDTEDYERLKKRAARKYYDAGTKKEEEYRKLVEVRTAYLREYPNRTFSAVDENNDVYDKLYKELSSDHMEMYREKAAKQAKTAMEHFKDDFVYKIRSAIREAYQRRDELNRMISGLDFGKDKYQFKITRNTGADGKYYPMFMDDSLNIDPSVLNTTMDDQMNLFSMEHENKYGELMNELIEIFIPPEGATGEELENAKRDMQKYSDYRTYLSFDMEQIVDGDEKLTIGLSKMIKKNSGGEGQNPLYVALLASFAQAYGIHLSPKVRRNPSIRLVVLDEAFSKMDAEKVASCIDLIRNLGFQAIISATNDKIQNYLENVDKTFVYANPNKKNISIQEFEKCEFDNLLTEE

SEQ ID NO: 32702 - protein, 486 aa, Clostridium sp. CAG:568
MTENNNARLFDRLPDGFFAPLSRKYKAVYAYALVTLYHCLKIYRSSITRSSYMDALRENGQDIMSLFSIDTDKDDDREVEEEVDVKDTLSADKFSYVVRKLSRCGWFQIDKDYKTGVDYIYLPSYSIKMLELLDELTSDVSSYMPLVHQTYSELKLEDEKEDDYMFRSLANAVKNTDELELSVTLLHHSIIVFNHKLTNVFNPNEVLKQHFDDYKFEVGDSIYHPMKTYDSLGLYSRPTVEILNKWLRDGRIVAKLASQARMDSTFSSLSVSKATDLVISYLNKVIDVFNRLNKSFDEIDKANADYTEAVQKKVNYLSGSDKSIKGKLEKIISSMASELQKNPNINEENSPLLFKMVDTVDYHRASIFDDRSLFMPFKRTQREEPDPMELSPDISDESDDLMNDFLNNEVSQFSEAAVESFMRRAFGSRKEIKTSEISLVEDNDLILLILALVRAEFNTTFFTMEKIDDKTMNGHYQIPEYVLRIK

SEQ ID NO: 32703 - protein, 239 aa, Clostridium sp. CAG:568
MSFQEDYDKLSTGEKSQFSETMNNLLYHCFIVRKRYDVTTGLEKIQYDYTFIEKHYSLFEEYLDFIDMVISKDDDCGVIFLRNALDKNRERVDTATTFVIYTLRDFYEDSLEKQPNVLQVAMDSTQLRQKLSDLGLSTASKRLSLQTISGAMKTLASFNIIARGRGSFNDNNYSFFILPSIKYIISTSKMNALYKFLTGSEEQNEDSSSSNGETYESTQDKEESKEGVVTADKNEPVGF

SEQ ID NO: 32704 - protein, 1161 aa, Clostridium sp. CAG:568
MIKLTKLRLINWHYFTNTTVDIENITFLTGANGTGKSTIIDALQTVLLGDTTGRNFNKAANEKTGRTLNGYLRGEISETKDGNVVSLRPGRFTTYIALEFADTKKKTQFTLGIVFDCFSDGHDDRHFFYLNTGFPSNNFTNKDLLDAKSSPRPLTYKEFSRFVSENYKSDEARFFDSNEQYRQFLKTIFGNLPDKYFSLFKKSVSFVPISDISKFITEFVCDVQYKVDIVPMQKNIEQYRLLETESLRIQDKISLLKDIHEAYENYHNISTDMASFNYIHARANLEYAKRQLGDYESKVEEHRQRLDYLARQVALIDDQIRELNAEKQDYFAKKTSSSGFSLSNELSQKKANFERQIAALKVSQQNILRELKNYADSLSRQAVDFLSAFKNINLDRLGIDDRDKDELSEFSEFSNEIYDEFNSLSKACDEQSVDVLSLEHLQQEMDSYKSKGYSIYTKLEQYLYNFSNKKTELAVQLKSVHSGAKPFGPRYKQVVDDLQSRLCARHPDAYVKKFCDLVDVNDPNWATAIESCIGGNRFYVFVNPSYYNEAQRILKDLINVYDFNGVNIVDSTKVIEFMNEHPAREDSCAFLVDSKDEGAQAYSDYLLGKTKKCANFEEARESGNGLCADCTGYRGFATWYPKRVTSLFLGTRVSQGSVEGIHDEYVSIDEKISLLSSLVEKITPLTMMAIMSSNEARTYRDDLNEVENVPALEENVRRLTEQMKEGALSSVKEIDDKIHAIDEDIASLNQQKEQFTAEKGEHTSEIRRIQNEVIPEKQMAVKAGEQTISAFDPKAVEETYLPRYDKLASTMDVSQIAEEANRLFARAQSKQKSLRDNLMKTRSAYVTKYNLSYDTTDESSNETFDKELDSLSNVLLPQYTEKIAQAHANAIKEFKDDFIYKLRSLITTVQSQIKELNDALSDVRFGRDRYRFTVEPNKDYIDYYNMMMDPLLLSAGDAEDVFMEKYKDLMNQLFSLISDAQDSTSTNKEAILANIEKFTDYRTYLNFDLLVKRGTDDNAVESSLARTFKRQSGGETQTPFYISILASFAQLYRVTQDSDTLRLVIFDEAFSKMDGVRIKEAVSLLRSFGLQGLISTPAEKLRDLAKLVDEALVAIHDEKHRMSYLDLYEDKRKKIGEIKADMTQEETKVVATDDNTSNSNS

SEQ ID NO: 32705 - protein, 185 aa, Firmicutes bacterium CAG:56
MELIDTRINSYYNLANTRIMQMASSRVRLENLLGDFLDRVSRISKEEQDAAMEKVEKCTRVINQKYVGYKSFEQNRRIRNEGQNIALNTNAMSEEEMQKRTENLFRSAPNRYAPVRVGAYLDEALGLDESMELKEKGVQTKEEALMIAAAMLYAKNAEFPYKVRIKDEKVSTKIADISNVVISRK

SEQ ID NO: 32706 - protein, 214 aa, Firmicutes bacterium CAG:56
MQDLSFISNMSDEDAYLFKRCVRRLLDTTFLVKDKEEKLYQFVASESNRYDMNQYLAVIGYKVVVEEQMGVAMLQPNDDDKETVGLKRLNLYHFDQRHMKLLLVLWLLFLERMGYEEAVYVTVGEIIDKCRLYDIELTPVEFKKAYATFRRFCLIDYSDDITKEDGAVRLYPSLQFCLDIGQLKQVMAEFVEQEDFEAADMADLEEAESEESDE

SEQ ID NO: 32707 - protein, 753 aa, Firmicutes bacterium CAG:56
  MOD_RES (746)..(746): Any amino acid
MSKIVLRNVQLINWYGFTNTVVPVAENLTLISGENECGKSTILDAIKYAYTGDTQFNKATSGYNTGVGKRNLISYTRCLVDASAGVYARPAEKIPVVYTHIALEYYDQINEKSFVLGVIIETAVTDIRGTYWYAMEDKHLSDISYVYEDGSALKPYDASGFQKRYNVKLRKKQDGVALFMQMVGLKLPYQEVFRYQRKLRNIMAYNPAAKIQEFIRESVLEEHDVNFEKLKDAKKNIEQINSRLELIEEEIGDLDAILKDYAEYDERVMQLKVDDIKLKYRNMLSWKEKRCMAEEMIRKNSIEVEAQIKTIKELSTEIDALDRYYMEAKAALRELNVSKAIDNSRQQITAFEKQLEKRKSEREELEQFRKRLLHVAEELNKMECEVSHFETLGKLTAVDLSNSEKQEAIDALRAEIRKKRDSIVRNRAYLDRELKEVQLERSEQSKIVENCDRNKADYSHVQEQTQLIREINKELKKQGIDEEARMACEYVSELKDEAWRDAIEAFLGVHRYAILVSPQAFDVANQVMDRSGHRYVELVNTKRLAERKIKCEEDSVYHYLQIQNETAAKYFQFWLGAIHAVELDEVTKYDNAMSKEGKLGRNMAVTYINTKKIKSYCLGGAAIELNRKRAAKKLDQLEKREKEILSSRHTMQNQDVFLQSSLDYFKDYNLEANRECEHLNAELEAEKVRYRELLEAQKNNAEFMALSQRVTDLEKQLRNKTREKDEESKKRYRLEAEIEQKKKDSXNRKRKTA

SEQ ID NO: 32708 - protein, 477 aa, Faecalibacterium sp. CAG:82
MQLFELVSPKLFRPLAGPNRAYYAELLLLLWEECRHTADYSLSRAEAVSRAEDYFAAVAKPLALDADGAGDEDEQPTRDPHLLALGFLLRLRRTGWLEEQPGSYEEEPTLAFVPEVTPLLEALEEILNPRVVTYTGKLYKAWQLLRGIGEEKSPYENVLHEVASDLEALNRSLRALNASIGHYIDRLTRNRTPQEVLELFDQYEEKVVAAAYHRFKTSDNLFNYRAYLEEGLDECENKYLPQLALDYARVERCAPGEAAPRVRALIQKQRDALEEMSGLIRQIDDSHIRYRKRAVQRAQFLLLSDRSAQGSVTALLRRYAEEIKTPDQLFEPDDGPVAKRLHLYPVQVFGAKPLYPPAAPRGEAPLAPVRQAALDPEQLKKEQKLLLDYARMAVTEENVELLARQALAARPRVTASTLAAEYPDDFARVIGLHTYSQSPRRDYDITLTGEWVERGGFRFEEFVLTPRREDGNDGRTE

SEQ ID NO: 32709 - protein, 201 aa, Faecalibacterium sp. CAG:82
MAEPNKMLEETANYLLNHCFLLGGVEDQRAKYLYVQDHLPEVRAVFAPLGYAVLLYPAPLQAAALVNEHEGSQARLLKYESILLLVLRLLYLQKRESLSASADQVLVTVEEVQAELQKMNLPRRLDQPTLERLLRTLRRYNLARPVGRLSGLDSRVEVFPTVLLALPDADLADAAAESSRTRSELALYERPDGDGAAEVEE

SEQ ID NO: 32710 - protein, 1117 aa, Faecalibacterium sp. CAG:82
MIELKRLRLINWHNFENVTFDCARLTYMIGVNAVGKTTILDAIRYCLTTNRNFNALGNKKSGRTLQGSVHAKQRGENAYRRPGRTVAYIGAEFWDTAKRVPFVIAVRVESEGPMQELHPGDQTWYISEDGCTLEQLPFIDPRTGAPSAKEDFKPATGRLSYTRSPSEARDRICRALGIGRASSPLGKKFNEVFQMGTSMDEIPNFREFLYQYILPQPELDLDALQGDRVELENLHAVLAEAQTRAAALETIVNDGREAAEKETAALVNRGAALLARAAADAGEDATWQGHLEAGNRQLETLNAQYEAAKNAEAEARRAYLAAHSAASASGEGAALDVMTEELARKKSALDAAARRAAGAEAAANKVTALLQSLGRSGFAIGKDLWPEALRAETLPGLTDALSGVEKPLEEQYFAARQAVADLLREQGAKRAELDAVSGGKWVYPHGDAATRVRDAVNAELQSRGMTPDAKIFCELLAVEDESWQDCVEACLGDRRFDILVPPAHYAAAKSAFVALKEKVGPISLLDTPGIRKANRRTDKIAPDSLAAQVTSENPLAAQYAETILGRIVCCDTPDTLEQYPDSATRDLLRHHPFRLERLRAPQRYIGLDARRTRAEALTAELEALAERRRAAEQTEKTLKAAYDQYQNALRGKTLEELGALWDSRAALTAARQAYTAQEQQLADCRENPMLQQLYKEEEAREKAWDAARAAVEQVGGDIRVCQKQLASCEAERKKAVETAQTSADAANAFFAKYPLLEPLARERWAALSGPDKAKPDRAVAQAAEKAQTKLDEALQLYLTGTLEPAQKAYNERYVCDYPLGLAGAEQYRAQYESLVRIDLERYAARLEQAQKDCKDRFRKDILFRMKDDIFNARRQFRELNKVMEQLTYGEEVYRFELEPSRDPQLAAFYQVIVDKGNQQMTDSDSLDNIAATADPVYERQVDELMEKIMADVDENTRARQEGRRPEGVTLSDYVDYRTYLDYDIKVTNTVSGQQAYLSRVSRDSSGGENQAPFYVAICASLLQIYQKSENSIRLVLLDEAFSKMTSDRIRPMMELFRRLQLQVLLISTVEKSTAIQPYCDITYSIVRHGDANAIAPFYRLTPPAPETEEPQKENEDE

SEQ ID NO: 32711 - protein, 129 aa, Clostridium sp. CAG:43
MFLLENNEFIDTDSIRYPRREQMIREATYAELEEMTQEDIDRAREAQEREAENPYSKDKMKNYLEALLGDRTEISSEEVPMKSKRDLLSALSAVAYGSENGYEIQAEDGYLETQQMLLRRFKIERRKEK

SEQ ID NO: 32712 - protein, 228 aa, Clostridium sp. CAG:43
MGFEEIWNEYTSSEKDMFQKSVRRLLKQTFIVRDRDEDSKKAYYFVSKRSEPFSAYLGYIGYDIVIDRENGVIMLQNCRDLGENGKLQINHVTLKKMESVVLCCLWTLYADRVRSGNLSKNIEISVTDLRYEMEKYGIRDQIDKSSFASILTLFTKYQLLQVIGKLGEEDCRICLYPSMQFVLEPQEFGKFVENVNRRMQEKWSREDEWETELTKEEEDGDEESDDHE

SEQ ID NO: 32713 - protein, 1086 aa, Clostridium sp. CAG:43
MKNQTIMNRKSAKKLLMVQWSRFQNVCIELEGSTLVTGVNGSGKSTVLDAMTYLLTGNTQFNKAAKDRDRTVLGYVRGDTRSNGEARYLRNGSVVSYIAMEFSDPTLGVPLTVGVCIESPSESGKPVSSWFICPGAAIDDIDFTRIEGNALRITPKNELTVNGEAMKLSSFMGRDRGTEAVLRALGLRVDAAKYRTKLLKMMAFNPENNIDQFIQDCVLEPGKVQSLEELREQKRQFERLRELYESLRQGKIQLEEVLRQSDEYEKKKRGLRIRELMLSYQALREKEEEEKQTKNRYQALKDQYGRLTERAGELIRQQEAAQERLRIAENNDMVKGMQESLDSLKRQIEEADREKKNWEDKLAQILKLKKKISALIKLLEADLPSLSSENTYLETLEQADGETAKKREAFDAFREKVHRQDGIYEENKIHLQDQCKEREKEIGALQEKIRRLESNILVFPAEVENARNKIQRGLEKQGIQTEVHIFAELVQEVTAPEWRKAVETFLGRKRFYIIVDGAHCHKAMQILQKERIYDGNVVITDKLPETEAVEGSAAEILRIPNVYARRYANYLLNGIHLCENLEELHEYPKGGLMRDGMLAKSYAVAMMDMRRTELCLGADAIRCQLEQSRKELEELQVVQRADKEALLQVIKYRDAIKEIDWDGGHYDFGAAYGLKDCGKRRDSLVKDREEIEANPDFTAVLKELETAGRLAREANESVNQNQSELGGCKNDLKGCEGTLGRISTEIYLCQKAYEEKCLVNMELKEAMLEEYNRESEKRGTIRVTTQLSIDKSKNMLAERERQLEDAQLAYCRLAGIDVGKRGIGYIPWYREEYRNLAHVKVEEAQQKLQEQAGRLESAFMNDFVAEIDENVREAKREMDAINRELRHMPFGNDTYKFVMKEKPDRALFFRICRRLEKYMSSPQVYMNSARDDEEMENDIQEFMSIILAEEDEWEYTDYRRYFSYDMEISSRQGQTEITAELSKKQGSASNGEKQTPYFIILAASLLQCYPANTCCARLAFIDEAFSALSRERIEQMVHYFEENHFQVFYAAPPEKINSIGQFIDSTVSLIVTGRYTNAVEGLVKQA

SEQ ID NO: 32714 - protein, 425 aa, Clostridium sp. CAG:43
MADRKEWKEQLLSKLLDQYEKSVTYAGENKVKQVFSVKPSDIFKGYNKDFLPPEQLFQEKEFERLIRQMESEGLIHVVPPNTGILRQIYAVPERWEDYYACLNRTEKNILKKRLEEVYHRFCQCDLLESYGKEKLQTMKNSRARKLDEKKVEKEITEAEAIWNLVQFLKENQEKQRTTLEREMSEAVLHDSKQWEKIYRKKVCGILEHTGRYDEPLAELEEERERQTALLEEFYIYSNPAYIYLKGDARICLEDGRELRIYHDLPMSIPFETFQKAKSIQIRDAALMTVENLTSFHRLEREHIFYLFLSGYHTRTKQALLQRIARENPGLSWHHFGDLDPDGLAIAGHLIRKTGLPFQLCAMGVQELQRFQTYAKPLEAPDRAKAEAMIKQGSSYAGILRYMLEHNCKLEQEIISWQETRLESFL

SEQ ID NO: 32715 - protein, 487 aa, Roseburia intestinalis CAG:13
MKLIYDIPASFWGLFRSVNRDIYIEALLTINDEYQYNNYFLSREACVQILSDMCSSRRYAFMREDNETEEDVETALPGRILNWLVRTKWLRKIEDYEAMTTNIVIPDYAAVMIEAFEKLAEEPLDDTDLYIQNVYATLFSFKNDHRMNLTMLKTALVNTKKLNKALQDMLHNMDKFFERLLNKQSYDELLKEHLEGYVEEVVRRKYHILKTSDNFYIYKMDIKRWLKEMREDDAWVERIRQKQQMEQKSAENRSSVLDSRRTEEELPFLYTRRNRQEDVLDLIDQIERGFDDIEHRISNMDKEHSKYIRATVSRLNYLLSDETERHGMLILLLNKLGSAETESEQSEMLKEVAEHMNLSSFDVLSDNPLYKRRRRRKFEDDLQEEEEPAELSREDVLRLNKIEHRYTAKQIEEFIDEQMTDGILETDRMDISDDESFEKLILAYDISMRKNSRYRVQVEEEQVQNGNYCYPKMTFSVKQKSIESERN

SEQ ID NO: 32716 - protein, 250 aa, Roseburia intestinalis CAG:13
MFEGYEELNTQDVERMQEVIRTLLAQTFLPERKYDKKYGRMMPDRMYDFSDRHLEFLTEYFAVAGIKLRQDTELGIIYLEGADGIGEKLPKLATIYLLLLKLIYDEKMAAVSSSVNVITTFGELNGKAGEFRLIKGPSSMTEIKRAFAILKKYQMVEFLDVFDEQLENTRIMIYPCINLVLMREDVNGLLGSFSDEVKDNEVDGQENLEWSSEETLSENDMTDEESDLEPEEMNVDEEGETEDGTDESGI

SEQ ID NO: 32717 - protein, 1118 aa, Roseburia intestinalis CAG:13
MEQMNQAYKVFTRICLNNWHYIDRKVLGLNESINFFTGHSGSGKSTVIDAMQIVLYANTDGRGFFNKAAADDSDRSLIEYLRGMINIGENNQAEYKRNKNFSTTIVLEMEQTITKEKECIGVVFDVETATNEINRLFFWHKGELIPGDYRTKSRAMTISEVRSYLQQNFPKDEMFYTSNNERFRRNLYDVYLGGLDMEKFPRLFKRAIPFKMNIRLEDFVKEYICMEQDIHIEDMQEGAMLYGRMCRKIEATMQEIEELKQISAQYQAMEEKKKELLNCHYRMDKLTILQLEQTIEEMQHRVENWKKDVVLQNESLAELLEIKGNYEKEYSEINEQIAGTGYARLEEQLKSLEENLSLLERSKNKWDGICARLNGWEDVDIVSNQILWDIEKFKEGTITGEEIERLKRSLIEVQKEAEKDRQEASAEIRSMNKEADVLEKELAELKLGKKAYPRELELARSEIARKLSEQTGKNIQVRIFADLIDIKDETWRSAIEGYLSWNKLALIVEPAYVKQAMEVYETLDEKRFFRVSLVDTEKLMQEEWRIKDNALAEEVEAKEPYVRAFVDFLLGNVIKCASVDELRQCKIGVTADCLLYQSYQLRRLNPDNYKKHVYIGEKSKKQRQKELAASLEKLEQDRAEYKERETEARNILAQEFLNDTVEEYQNLILDLSEKKEKEKQKIKTEKKMAEIGAGTVETLKKQAEEIHTKQKELEAKIDDLKYQIRKKEDAIEKDGNDFITRNEELLAKKRELRGSIEAEEAFEAYIAGQKNKKYDSMKAATQEDMNQAAVQCTEQKNKLVDVRMNYLQNHPKRDFSASAENNDDYDNLLSELSCNELEEYQKKAAEQAKAAVEHFKEDFVYKIRSAIKEAYVRRDELNRIIRNLNFGKDRYQFKITRNKGADGAFYDMFMDEDLEIDPSSLASPVEHQMNLFSMEHENKYGMLMSELIRIFIPPENASQQELDEAKQNMVKYADYRTYLSFEMEQIVEGDERLVIGLSKMIKKNSGGEGQNPLYIALLASFAQAYHINLSARLTRRPTIRLVVLDEAFSKMDAEKVASCIELIRGLGFQAIISATNDKIQNYIENVDKTFVYANPNKKSISIQEFEKKDFSQLVVEEE

SEQ ID NO: 32718 - protein, 416 aa, Roseburia intestinalis CAG:13
MILDDYEHGDTDWRKYPNQGQNDGKRSIRIVQALYDEIGKTELNRQVLELQARHLLQDGKGQKISGWYTRGSELEQIVYCLSDIPRFYEMDGRVPKYERYFEPFLKLRQELQKLRGRQQTWKPWIDQCIGELENDLEREKIPKICKDEETKEIYFNTLAGLNEIEEPVSRRIFSKKYLKNSKSFQRAVQDKIISDARKFCPDVDADEEVMGNDEVLSEIGIETYHQELSVKGSLQFELAGNKIDTALFAYGTILNAETLKYAKLLPEQTIRKIVTVENKANFMEMSYEEGTLLVYSHGFFSPKERLFLKNLRECLGEQGAEYFHTSDLDYGGIRIFMNIKEKIFPDVKPLAMDEETFFKYQEYGEKRDEKYLQKVRDTNVPAELKELKECILKTGCTIEQESMLFSRRELCRHQQS

SEQ ID NO: 32719 - protein, 457 aa, Clostridium sp. CAG:245
MNLFDKIPKNFFSILVSKNKNLYIDALFVLRDAFKQEMSISKENIISRLINSLEDEINQEDFSEDENVSDLKDNNITGKAYFLLRKLEWAGWIEREMQRDSFEEFIILPDYSIKFINLLYSFTEEKQVEYNSYVFATYTALKFASTEKNETYNAVITAYNNTIQLIDELKSVYNSLGRFHRKMCNQDDVNNIISQHFFEYKEYSDEMIFPRFTRDSVPRYRLPIIELLTEILADEERLQNAINVAYSSKRYKTKEDAENDILNKIRIISEIYENIGTTMNEIETKNNDYVRASVKRIQYLLTNDKELKGKLVNILKNSKNEQVIDKMIDQLQLSRQEYLSNDSVYIRTKNIKKQGKSMPVKQSKPIDSRALYDFAKSLENMYSNKTINEFMEKNFKNKPFISSSEIELNTTEDLILLILSTIKADKSSKSFYYIEDSDETINNNGYLIPNIKFIRRS

SEQ ID NO: 32720 - protein, 214 aa, Clostridium sp. CAG:245
MFEEKYNNLTGAEKENFKRITSLLLNRTFMVNRFYDKNQGTFRSNSDYRFIDRNIDLFREYLEIAGYRLLKDSNYEVIYIENEYEYNKKRLDKNTTIFLYGLRLKFDEDRESVKLNTDTIVSVSDIIKTLIDVGAFNKKPSDMDIKTALSNLAKFNIIQKVDGKFEDPETKIIIFPSILFAVTNEKITALSQTISILEENVEDDENEEEEDSEE

SEQ ID NO: 32721 - protein, 1112 aa, Clostridium sp. CAG:245
MKKLERMLLINWHYISKEMIEFSNINFLTGKNGSGKSTIIDALQLLLLGDTRGNFFNKAANDRTERTLEGYLRGEIGDDGDTGYKYLRSGKFSSYIVCEFYDTVTRKNFCIGVVFDVYNESGFEHKFFMFNGSIPENEFIGENNIPFSFAELKSFLTRKYGNKNLEICTSNTQYQVAVRGKLGGLNQKFFNLFKKAVTFTPINDIEKFIVEYVCDVKNQIDITSMQENIRQYNSLLKQVDVMNTQKNQLQEIENTYNGYLDECMKQREAQYLIWRAEKQQLIDEYENLQKQVQDDKDGKVSLEETTTQLEKTKGEIEKEISDLTVTRANSDIKIKSDKITAKIQEIDSKLNNISEKASKNIATLRNYTLRWNASISKLESAKDKVNYQNINNTRDLIKYIDSINENIFNELDINAITETRNNISDLINWGTSTYFDKKYEIDNKKQTREVLIQDIEKLKNGINPYDSQFINFKAMLEARLKEKFCKDIEVSILADLLEIKDARWQNAIEGYLNTQKKYLIIDPQYFEEASKIYRELARENEKIHSFGIVDIEKIRKDNASNALENSLATEVITENELARTYVDYLLGRVIKCETIEELRSHKQAITSDCMLYQGYVLRKIDPKFYKYPVIGKKALEQQKQIKENELAKLEDDINNFETVINAVDSIRKMANFGEEFLPGLEEDIIEAKKKSEYDEEKQKLQQELDSMDLFWLNTISEKIKEKEVEKTKIEQQIKDNSLKLGILSEAIKNIEEERLPRISLSIEEKTNKINDFYDVEWQQNVGEQKYDIQSLKKTAERIAESYSNIIKGIIKRKDQLHAELIDKRSDFNTKYQYAYNIQDASNEEFSKHLKKLEEVVLPEYTEKIKDSRQKAYEQFRIEFLDKLKSNIDEVKKQIKELNSALGEHRFGTDSYSFKVSPKQEYKRFYDMLQDDLLLGDWAIGQEQFNQKYSQEIKELFEKITTTDVNNNSISSEEYEKNIKEYTDYRTYLNFDLIVKDKLGNEQRLSKTLLKKSGGETQTPFYISILASFAQLYRTKSNDNTIRLIVFDEAFSKMDSERIEESIKLLKKIQFQAIFAAPPEKLQDIQALVDSTLLVLNPEEHEIVVKKYTNKEE

SEQ ID NO: 32722 - protein, 82 aa, Clostridium sp. CAG:245
MDFEKIILNTLLDKYEASKALYETSNRRIILKMKNLTGYNIENYDRKQIIHDVIFELKKEGIIDFSWQKYEKRKHNRRNLVK

SEQ ID NO: 32723 - protein, 505 aa, Bifidobacterium adolescentis CAG:119
MADVRREMERLRPVYETGVLRLLLRGNSMLYVALLRSTFDPLTGELPREIVEERFSRSLTRLAETGDYTPKEGQTSAEAAHTILQQLTKEGEGDYAWLANSLDVASHRYLYRLTARAHRAIEALDRLEDTTKALSGAQANSIIMEIEHARMQLTADPRERIRLLERDIEERQKQIDELKHCDTLDKLTSQQVGDIIGVIHNTLRGVPIDLRELALEERDNGDNLRRSMQSGSISVEQALGTYHDEYHRSFHESDSGRRFEDAFQVIVTDEGRREIDEAVRDIAQNPYLEGEPGILLAQVRAELKRIYEGIEDVRRQIRISDEAVSRLVRQQTDTHYRTMLDKLHRLFVRASDDAKTHPGSDERPYRTDTGTAQFQALPSRPAKSMARAATAGLDDAPSTNVNAPDLKAMVEMCGPRLTHMIGLIRRDPVKTADGRFVDFAASFNRLPREERRESELIGFLSALRTQDGPATVAWHCVSIDGGERVWRTRPILTTEAALDEIIEEG

SEQ ID NO: 32724 - protein, 279 aa, Bifidobacterium adolescentis CAG:119
MTDNTDGFDTGIGIEEETGPESGMPSEGPDMTRDRPGLFDGDTGDMPLEARMAAIALKRERYIDGSLYDRACQYREAVERSLNNDMLRLVDNTKYRIMYASPVTDAETNIRSLKTRVSLTREEAATLAALRIKVLEYENQKTKPGDWLISFDDIRALLATGAGFLTASNDEEGTAKKITSVISRMRTYGYLAETRDENMYVLTPLVPMVLDQKLADRWLGSDDTDGDGMKDADGDGYDDSSIGADGGDTSDSTGTVSSGVEQDAFDFDSADDAFDGGQH

SEQ ID NO: 32725 - protein, 1152 aa, Bifidobacterium adolescentis CAG:119
MEDGMKIVSDRWMLQSRQIVNWGSYGGYHVFRPSMDDAMPVTLLAGASESGKSTLVDAQISLLYPSGTPYNKASNSGRSERNDYTYLRGMIGISDGENGETPIFLRGRDADGTPQNIWGALVDTYANRSDGGLLSCAKFLYLTAGDGPDGLRRQYVTWNQTIDPRLMDRHRDTSFTRGLMEQTYPGCTTHVNAQAFHASIWQDMGLSAEACRLLHKIQSADAPSKLDDIFKQGVLDVPESIRLARETVDDYNRFSENFHSMEDKMERVAILQDIQARYGEYAKQASERREYTPIDPDREQGETTLAAWTWSRMASEVRAGLPSAQRKAKESQDAIDRSQQRIDELDTQIEAVKERMNGIDGGSLQQLGKDFERARQDADEARRQRHAIAERFERVEGRLPADEQTWNAKRAALALSLDTYDKRLEDARSEYQRMVVERHARQGERDLLRQDYRRKIEHRTRISDDMDHARTLIARATGLDETELPYVAELMDVDEGNEQWRLAMDVTYAPIAQTILVDKRHEQGFAAKVSAIDPTRMTRRAWRFVDTDAQYDSACNEGWMSSKLRYKEDSPFVGWLKEQTASQRFDARCVEAIDDMDRAERQVQVDGQIKSGDRGFHGVKGLRQVIGFVNERYLAELERQLDGAERALEDADRRGRQMANAMTLLQDEHELALTVADLPWGKIDVDGLETKAERIRLQIERIESDPELAQLQDELKQLLRQKDDEGKNRYRAEAELENVQHAVQAEQAWLDMHGDSDFDDAALSDMVSNLLADTYETCFDTSRPQERPQRIAGGFDREGTAPFDVRVLRRIGNTVRARLQQIDERAVQLRADTERAMGDYLKHHSTEGDTVMASVEDYPYFLDELKNLNMLVTRAATDEEYANSVEKLYMSFQQLNRAFNTDEENVREQLDRINGMLKGQQFGPRGGRLSLHVDFHPIDRQFKSSLGRIMSKLDDWTRNARSNPMETRKAFAGCETFIGRLQAELGQIRDTNGIKEYGARNLDPRVRSSFYAIVHHNDLPDERISSTGGKSGGALQELTSFVYGAALIYLLGGDLTGKPTYTTLFLDEALIKADGRYTKRALTVLPRLGFQIIVSAPESKTAEILSIADKAYVAYKDPATGNSYLQELDREPATQAETQDATVEQTQPATEA

SEQ ID NO: 32726 - protein, 410 aa, Bifidobacterium adolescentis CAG:119
MAAARDTTGETDIRRKLDEYVDAHLTRHMYDTDESWPLRKTIRLPKQAELEQHYNQIRAQNETIRDWARQHHCETSEKTKIVSSGLIQQKSPLIDSVTIPDLDTALRIATKQTRERYLREHDRMSALAKEFGLEPANAMNVAKTLKDHDDTDFHLVIQAAHYFANHDCHTMTPRMAPIPGFSAKWLGTPNSQRRKAICQLTGQDNLTFQERPNELRLRLMDAEHHDQPDLIVTQPWVRNQPTDIEHAIIIENKDTYQAMPTVEHAICILGNGYAATSHITTLLPWLTTIPNIIYWGDMDANGLDILSKLRATGIPCTSILMDTTAYRTYEQYGTQLDAKNKPLTTQTPQPTPGLTTEERKLYETLCTGTDIQYLRIEQERIPIRDATTILHDQHHWPIDIPGNDIPNNTK

SEQ ID NO: 32727 - protein, 472 aa, Firmicutes bacterium CAG:882
MFSAFDVIPNNFFNPLSSSSNYRTNAAMLKFIYEQYDNEISYRIKRNVLRDELAYFISDHSDELALDGDNMSKSYQDMASDYLRKFAGRDVGWLEEEFDETTFDKYIIMTEQGVMLAELLVRLEHPEREELSSYMYNIYNTLLNREQWNGDPYVGALKNAYKNAKALSKSLKKMSTYIRKTIEKLMKEISYESLTENIIAYCDGDFIKEYSRLTKPQNNIHIYRGKIITMLEQMQNDGEMYELITIGCVNEEDIEEWEANEKIDLMFDTIKKFLKDDYLKIIADIKHKLNLYITMALGRLRYLKNHEVDMRGNVEKTLKYMLDMMNETGMKDELPDEMGELIRINQNKYIDLQSIRMPQNRKKVRQRSVTQIEPLTQEDLENQRKLQEREARNPYSKEITKKYLETLLGKRHEISSNEVPLDKKEDLLMILSAAAYAQENGFKIEPEDGYFEAGNMILKSFKITDDIKKTEF

SEQ ID NO: 32728 - protein, 217 aa, Firmicutes bacterium CAG:882
MNLFEAWDDFISSDKIMFQNSCRKLLRRTFLVRDKQDDRKHYFFVANHIDIFLNYFSFMGFEIKYDKDNGVVMLDNCAGAGDKDKLQSNRYRFTKEETIVLCCLWLIYVSRMREGSLSSVIVIGISDLIYELEKYDARDNVNKTSLDGIFKSLKNYSLIEVDGNIGDVDCKLILYPSLQFALDTDEFERFSKEVVEVVLAGKDNIEEVSDEQSDDDE

SEQ ID NO: 32729 - protein, 1092 aa, Firmicutes bacterium CAG:882
MSKVMMMNENSRKSATKLLLVNWSRFSNVSIALEGSTLFTGVNGSGKSTVLDAMTYMLTGNTQFNKAAQDRDRNVVSYARGDTKSEGKSRFIREGEVTSYIAMEFWAPLEKQFLVVGVCIEYVNETNNSKKWFVFKDTRLEDCRFYTVSGNLVTVYPRQELIVKGKKVMAGEFMNRDKGTEQVLRALGLRCGVEKYRSKLVKMMAFNPENNIDKFIQECVLDEHPIRSMEDIREHRQHYNDAKRVYDELADGKLQLEVIQGKTAEYELTERKYETRRILLLYQEMKWNQEHRAYLEEKIAVDKARLSQLNSRLGDLADKREKALQRKVNAEKNDILCDVEEITKSLENSIANIKKDIAKYQNELKELCSLSELLQKVMLCPEINRELGDRETAVIEGIAATAFSVDEKLAAFIKLKNIAADKKISFNKDNVHIGDDIHRIKDELEELQEKISRLEADNLPFDRKYEDAKRLIKSELEKKNIRTDVRLFAELVSNIDKEWQPAIETFLGKKRFDIIVDGKYCTQVMNIVHDHQLRDIKVVITDKLPKTEITPESAAKMLDIPNEYGRRYANYLLNGIHLCKDIDELHEYPKGGLMIDGTLAKSFTMTCMDIAKTQIYMGKDAIKRQLERAKAGKDILLQDEKREKERLEIVRKYISDIEAVNWDETGYIFDAQTRIDDNTAELRNKNSELEHVSSTPGFAAALEEKNKAEKEYKEADDLYIRTNGEIDVCNNNIKDNTDRYGDSEHQIELSRKEYDAAILQRLELRKEVVELYDKLRAKSDNARVMTTKNVDSFRVDKEKAQKALEEQQRKYWHIMGQSDEKYGIGYIAFFREQLRDIANVKIEDAKQKLEEQQYMLENAFMVDFVAEINEAIREARDEIDEINKALKDIPFGKDTYQFKMLEKPERMVFFNLCKKLESYMNSMNVYRSMNRNDEEMEYNIRQFMDTILDEENEEEYTDYRKYFKYDMRILSRQDGEKTAADLSKKQGSASNGEKQTPYFIILAASLLQCYPKNVSCARLAFIDEAFSALSRERIEQMVKFFEDNKFQVIYAAPPEKIDSIGSHINSTISLCMKGKYTWAVEGLVKQNEFKTE

SEQ ID NO: 32730 - protein, 413 aa, Firmicutes bacterium CAG:882
MNLRLSKMQKAVLNMLLDTYENSATYRGTAAKNQSFSIKPEKVYPDYNGDYTDHDEVNRFNQDMQQLAGMDYIILEYAGKSSVICKIKLKLEALTDIYLSLGREDITGKRSREIELYLKYKGKHYIIDAFCDEQVDRLTHHKNAKFTSDIAVNILELLKYILNNTQDIMERELSIAVLGDTKLFENSYKSRVCKIIEEYGNQEMDLSVPDMNGTSEKEKAILEEYRIFSNPSYVFFKGNVEIFYDDGISIKVMPDKPIAILSETIAEINTIKIYSDRIITVENLTAYNRIKDNTSVFIYLSGYHNTAKQKFLKKIAEHNSSVLWYHFGDIDPDGFFILKNLIEKTGIPFTPLHMDAGQLRIYQKYCRHLEKNDIVKARTLIELGFYKEVMEFMLENDCKLEQEIISLYAGLDV

SEQ ID NO: 32731 - protein, 329 aa, Firmicutes bacterium CAG:238
MEHPYNNILVPMIDNESEFKNELTDLKDSISDIMKAVIAFQDMNCFGQFIMKDQMLDRFFSEYFFIKNNGLIPTQLSFIRGRLRKLKEPEIYQKMTRECAERLQMDMQSAEERVNRYFAELQHFLSIEYEENMELIDTRINNYYNLANTRILLMSSSGEKMESVLHDFLSTVEKLSEKEQETAIEKVADTLNTMQQRYVGYKSFEKKRRMKNSGENIALYKEELTEEEKEAKTEQMFSQAQNRYSVERTGDYLDAQLGIAESIEIGEKPILSKEEVLMYAAAMAYAGNEEFPFEVELGEKTVETETAEISGARIIRKNGQKDTGEKIWD

SEQ ID NO: 32732 - protein, 217 aa, Firmicutes bacterium CAG:238
MGLEIINKMNDEDAYLFKRSIRKLLDTTFIVADKDEKLYDFIAAESNHYDVNTYLSLIGYQVMVDDRLKVAMLQQHDEDVETVGLKRANLYRFDSKQIRLLLVLWMLYLERMGYKEPVFVTVGDIIDKCGIYQISLTPADFKGAYLVFRRFNLIDFGDDIGREDGIVRLYPSLQFCMDIGQLKRVIEEYTGMPDISAESGAEDSADLFIESEEEEYE

SEQ ID NO: 32733 - protein, 1107 aa, Firmicutes bacterium CAG:238
MSKISLREVKLINWYGFINENIPLSENMTLITGENESGKSTILDAIKYAYTGDYKFNEATRKNNTGTGKRNLVSYTRCLLDPSAGIYARPADKMPSVFTHIALEYYDEINQSSFVLGVVLETAAAEIRTTGWYAAEKKTLKDLDFTYEEKGQEKPYDASDFQKKNGLKLKTRKEGITLFMQMTGLKLPYQEVSAYQRKLRNIMAYNPAAKIQEFIKESVLEEHPVKFEKLKDAKENIERINNSLELINQEIQDLDEILENFGELEKQQNRLLVDDIKRKYQKVLEWQEKLQNAEQIIEKNRLQCEELEKKIEEQQEVIRNAQEQHEKVKDSLQKMDASQAIEASRRAIEGYEERFQKLRREAAMLENFQRIIRETVEAAKVSEAEQLLDSGMLEKLVDSKTEAAEKQLFLEKLRRALQEARDAVMQQKYFIEDELEKIQKECVLQNEILEACKKKKADFTFAGEQLAFIKEINREFERLGIDEQAKMACEYVIGIKDEDWRNAIEAFLGIHRYAVIVSPSAFDTANRMLDKSGHRYIELVNTKRLMKKELTCEEDAVFHLLDIQNSYAAAYFKFWLGRIHAVPVEEVPSYDNAMSKEGKLSRNMAVTYINFKKIKSYCLGEEAIELNRIAAQKRLNLLEKEETELLKKQKTQQQKMDSLRSTIDNFREFNLDAHREAAQTETKLREERKHYNELLEAQRNNAEFMALSEQLSRLGRELDDRTKRQKEMSRKKDRLEVDTESKQNDSIEYRRHLQEALDILDEERIMHASVHEKAIEEYDRFRKGEAKIGGLMKQNSRERLQSSIANLQSMLQGRQMNYNNRKPPEERLPLGTDAEGSYQKRKTKIWIDDLQGIQEKMREQTRKYEDIFKHEFVLSIYKHARTALSDIREINKELRKLKFSTQYQFDVKMLRDHSDYAKVLNYAEYLQSTNDLFDDQISFNSSGYGKYEKDEIEKRENEIKNIINKMIDKNDLSEIKRFADYRNYMSYEILVTDDTIKEGKLSKTVGYNSGAGTQIPYTLILSAALSMLYNARVNSVRLIFIDEPFEKMSDHNIKLMLDFFKAQNFQVIFCAPPNRLESIGSECGVIIPLLKLKKEDMRIGKVKFHEQ

SEQ ID NO: 32734 - protein, 414 aa, Firmicutes bacterium CAG:238
MNSETKKLCGEILQKLLKKYDKRSAKQVETNRRITLSPSEIYKAYHANDADMRRKEAINEAIHVLESESFVAVKRLKYSDEIEKIYMPADSASSVRDFLQNQCGITPRNRIKEEVFQLFTAYKHGGALVQAYCESLKQHLNETAEEIEFARIDANLKMIDFLEKNSKSLYVREVSVLVYGDSKWFQENNYEEICSLLRALLDVPQSDYEPADAILERFHVITSEQEILLKGRWKLHWKNFSMDSSQLRGGIAISSADIPFIARIEIGTDKVMTVENKTAFQRMDEANFSYLYLGGYANRHQLAFLKKVIEDNPELKYVHFGDIDAGGFLIHQNLCQATGKQFELHCMGIPELENEKFAIARKPLTSNDVRRLHTLLEKEEYRHTIEYMLANNCKMEQEIVSLFFCRRYQYVSII

SEQ ID NO: 32735 - protein, 471 aa, Clostridium sp. CAG:299
MPFFEAINDKFFNPFCCQNREIYFECISLLIEKSKEIPVLYETDARNCLILYLQNCMYSIETENIGEEVSSRRTPQENASSILRYFRVCGWITSQEIGRSGDNIASVSAYCRKLVDAIHKIFDTNSNSAITNHIFSIYEILKSSFRRDSVRTIRPYSNILLPLIENECDLKNELLILKDSVQEIMRAVTKMSDANSLGQFFLKDELLKRFFNDYFFIKKSGLIPSYIASIERMLRTLRDSELYEQMIKEYRDLKNVDELQAKEKINHQFAELDSFISLEYDQTMGYIDKKINTYYNLYSVRMMMVLNSGANLENVLNQLLLFIKDLDKEERDTVIQQISQSYRQLQVGYISRKSFERRKKVNPNTKNAGIPSDELSMEEKLRLTDELLTATPDQYSMDRVKDYLAEKIPDKGQVSVEEWGVRTREDAMMIASSIIYSGSVGFPYDVVFEEGTVETEVAAISRIKIKRKKYE

SEQ ID NO: 32736 - protein, 222 aa, Clostridium sp. CAG:299
MSDISLHITVKEENGLLFKKCIRKLLESTFILQERDGKLYDFVSRESNWQDMSEYLRIIGFDLLVDDKAGVAMLIASEADMETVGLKRANVVTFTNLQYHLLLVLWKVYLENLGCNEGNFVTKGDLIDKIRDYGVLVVRTELNAAFKLFKKYSLINYSEEEEGEDMKIQLYPSLQFGWDLPQFKTVAGEYLKEDGESEKTAEDEKINEQQDIEPEDFEEEEE

SEQ ID NO: 32737 - protein, 1102 aa, Clostridium sp. CAG:299
MILLKKVRLINWYGFANVTAPIGFFTLIAGKNGNGKSAMLDAVKYAAYGDTVFNKSSEGKGSRTVSSYTRGLLDATAGTYMRPPEKVPNVYSHIVLEFFDQAEEKNFLLGVVIETNASNNYQTYRYVIDRKSMEEINHTYDKEGILMPYSATELQKQYKLTMLNREQGLPKFMQMTGLKLSINQMPVYLRKLRGIMSYDPEAKIDRFIRESVLEEKNVDFSKLIEAKNNIERLNHTFHAVQEEIEELEHILGEYDTFESESNRLLSDDIKIVYKKKKDLKGSIEELTKKQEEAEKKQKEVNQNLQILDEQLNELDNRLVQARVSLRQMDGARIVEEERRRLALLKKEKGEWLAKWRELEDFQTKVSEILHSFMEEGQTAEKKEILSSLCGSGYSVAEKESAADGLKRLVEQAYDEKIREIDRLNLAAEELNRKLNIQEKILEDCKKHRSTYDRIPDYVELRNEINREFEQRKIKSRAQFACEYVISLTDETWRDAIEAFLGPRRYSILVEPQYYDIADDVLNRSSHKYAHLFNTKLLMRKELNPEADSVVHMLEIKNEAAKRYFEFQLGRMHAVELQQVRNFENAISKEGRVSVAMDSYFLRLDRIGVYYLGQKIYELNRIRAEKEIRRIREEKQSVLEKRRELQNRKNRLNGDKAFFRSYAYEAPSKYQEVSRLCRDSEDQLKRLEKALKNNREYLELNQLIEQMQNEQRGMKQARGKLDQENSSLGAEIQLCGARRQQKKIELEAEEGRFRKYEINAYTVVQKAVEAYEKFLAGGTQGGLLAQETRGRIARRIEQHKKELFTLQAAYNTHYSGGELTVGTEGRELYAARKDRIWMDNLQEIRQELDAQTKRYEDIFKNEFVLNIRKYCEKARDDLKQINGELVKLNFSAKYQFDVHYVKDGTEYAKIIEYARYLEEREQLGSSDGQMTFDMFTSVSDEEGEHLEKELRKIINRIIEKNSEETIARFADYRNYMTYEILVSNQILDRAKLSRQTGFNSGAEVQIPYLLILSSALLMIYNQRVNSTRLVFIDEPFAKMDPGNVKLMLNFMRQQKLQVIFCSPDKTETIGNECEVLLPVLRVRPDSMQLGIVQFHEEKAYENI

SEQ ID NO: 32738 - protein, 404 aa, Clostridium sp. CAG:299
MKTYKEKMLILLVEKYRKSRKDNGTNIIYRRTSISPVELYKKYNKNDGDVEEIEAVNQAAEACSRDGFLTFENNGFSSEIAKIYLIDEKVEEIEAYLESACGYEPKSRKRQYVEQMIARYSGISPAADRECERLKEILAQNRIPNRYLQTEEVLKALTFIEKNETPLYVREASMLIYGSSKYLEENTVESVCNLLRAYEKIPCEEGELQDEILRKYHIIPKKQKICLKGDITLKIDGELLELGALKNGIEFCTEDLEALEQVIVHTPKFMTVENKTSFYRCGNQDVSFFYLGGYATRFQRDFLKLVYQNNPRVKYLHFGDLDAGGFYIHENLCRITEIPFGLYRMSAAELQDERFCRCCQPLSERDRGRLKSLVENELYCDTVEYMLKHNVKLEQEIISYCEKM

SEQ ID NO: 32739 - protein, 451 aa, Lachnospiraceae bacterium CAG:215
MQLRFEIPDSFWSLFRSVNREVYIEALLCINEEYQYSNYFLTREICIQALSDLYVKQQIELRREEDETEIDLLETPASRILNWLLRTGWLKKVEDYNTLVTNIVIPDYAAVMIDAFERLTSEDMEETEIYIQNVYATLFSFRHDTRVNLNMLRTALVNTRRLNKALQDMLHNMDKFFARLLEQKTYGELLQEHLEGYVETIVRKKYHILKTSDNFYLYKTDIKRVLQEMREDEAWIENVRAQSKAMGDTGEDVLELLDLIERGFDDIEHRISNMDKEHTKYVRATVSRLNYLLSAETDTKGLVVQLLNRIAEDLETRIRKTGEKMNLSQLEILSERSLYKRRKARKDFISRMAVEEAAEDLDREDVLRLNRIQVRYSRQQIEEFIRSHMVDDVMDVSTLPLEDDETFEKLILAYDYSTRRSSKYRIAEEDALMIENGSYRYPALKFVRRGV

SEQ ID NO: 32740 - protein, 228 aa, Lachnospiraceae bacterium CAG:215
MIDYFEQLIPEEQEEITEVIQTLFRQTFLLERKFDRRLGRMQYTHEYRVCSKHFEFLKLYFAAAGITLNENVQMGLIYIQGETLWGEKLPRLATIYLLILKLIYDEQMASVSSSNHIVTTLGAINGRAGEFGVLRTLPSPTEIRRTVALLKRYQVIEPLDVLEELNESTRLVIYPSIHAVLSGDDIRALLQTFGEADERQERLETEDDMKEITGGTTIGEDTGVSGAL

SEQ ID NO: 32741 - protein, 1125 aa, Lachnospiraceae bacterium CAG:215
MEKTQAFQALSKICLNNWHYIDKKVLTLNEGINFFTGHSGSGKSTVLDALQIVLYADTDGRRFFNKAAADDSDRSLIEYLRGMVNISENNESQYLRNQNFSSTIVLELERTDTREKQCVGVVFDVETATNEISRLFFWHTGGLLENQYRADRRCLTTVEVREYLQRTFAADQFYYGPSNERFRRQLYDIYLGGLDGEKFPRLFKRAIPFKMNIRLEDFVKEYICMEQDIHIEDLQESVMQYGRMRSKIEDTLEEIQKLTEIGEVYQTFDEKQQKAVSCAYQIARLEMLYLEQKIQEYHDRVNGRKEEIGQQKIRQAKLEEEQGHLQKDYEDVLVRIANSGYSGLEKELETLNETLERLAGSKARWQQTSERLKEWKDQDVTPNQTIWDIDRFLKGTISEQEMERLQNSLKEMRQELEEERQENASRLKAVKKEEKEAREELKELKQGRKAYPRELEEARYELRNRLQEYCGKFVNVQILADLLDIKDERWHNAVEGYLGNNKLLLVVEPRYAREALEIYKEMDKRKYCRAAVLDTERVMENEHAVRPGALAEEVTAKTDYAAAYIRFFLGNVMKCESVEELRECRIGITPDCVLYHSYRLQHINPDLYTKRAYIGETSMRKRIRQLELKCEELQNERLPLQEAEVKIRRLLELEMLPQPTDDYMQWIKDADMISDKEKRKKHLQEQMEQLREESVAVLDAQKNELMERMEEKKASVDLVKREIWKNEKDIDGYQRAIIDQEEALAVKTKEVQAMSGKEVHDLETEFQEFLAAKKSVNYDYLRRQKVSEQQPLLEQAEREYQKLVDVRSAYLRTYPNRTFSASARDNTAYEKLLEELQCGDLERYRESAKEQAKSAVEHFKDDFIFKIRAAIRDAYQRKDELNRIISKLDFGKDKYQFVITKNKGADGKYYKMFMDDALQIDPMQLSHTMDNQLNMFTMEHEEEYGEMMNELINIFIPPENATREELDEAKKNMEKYADYRTYLSFDMQQIVSGKTSGEETDMHIGLSRMIRKNSGGEGQNPLYVALLASFAQIYRINQTSRIRRNPTLRLVVLDEAFSKMDAEKVASCISLIRGLGFQAIISATNDKIQNYLENVDKTFVYANPNKKHISIQEFERTEFGALEDE

SEQ ID NO: 32742 - protein, 471 aa, Clostridium sp. CAG:58
MKKLFQMIPSGFFNCLSSGSSSGVYSDCLQIIYDQYDREISYRISRSHIRDSLAVYLLENHVDFVEEDEKGARKNYNDLANGIIRKFCSKEVGWLEEEHDDATYEKYIIMTEQGILLAEFLQQLRAPEREEFSSYIYNIYNVLKNEEQWSGDPYVEGLRNVYRNAKMLSKSLKRLSTFIKKIIERMVQEETLESLTENILEYCEGSFIREYARLTKQQNIHIYRSFIRMKLERMQNDPALFELLVIGCAVEEELEEAEAREYVLDMIQRTKGFLADDYDRIMKEIKHKINVYLQIAVGRARFLRNREMDIRGNVEQTLRYITESMTETGWKSELPEEMAGLFLLDRNEFIDTGSIRFPRKAQSIREGTFAEVEELSQEDLRRAREEHERAAYNPYSKEKMKDYLEHVMGGQKQIQSDELPMESKRDLLCALSAAAYGAENGYTIQLEEGYMETNGMILRRFQISKEEESCR

SEQ ID NO: 32743 - protein, 216 aa, Clostridium sp. CAG:58
MQIEEFWEAYTSSEKELFQRSCRRLLKHTFIVRDKDEENKKAYYFISKRPEPFSAYFRYIGFDIVVDRENGVVMLRNCADAGESGKVQVNRLQLKKAESVVLCCLWTLYADRIRSGSLSRAILVSITEIQFELEKYGVKDQIDKSAMTGILTLFSRFNLIEVNGKIGEKDCLVRLYPSLQFALESEEFGRFAELTRKRMLEKTGEVPGEEDADEYE

SEQ ID NO: 32744 - protein, 1085 aa, Clostridium sp. CAG:58
MSMNRKTATKLLLVQWARFQNECIRLEGSTLLTGVNGSGKSTVLDAMTYLLTGNTQFNKAAKDRDRTVIGYVRGDTKSNGTERYLRTGEVISYIAMEFWSPLDQSFLVVGVCMESDNEIACRSSWFVCRDARIDEINFTSTEGKRIRFTPKNELAVRGEKLRSAEFLGKERGVEQVLRALGLRCNASKYRSRLLKMMAFNPENNIDQFIQDCVLEPGRVDSLKELREQRHQFDHIKEMYENLRSSKAQLETIEQRTGEYERKLRSLRIRELMLLYQDLREKEEEKKQEEIRLEALKTKKERLEIRQKELDKRYKEAGERCRIAENNDIFRGVRESIQALERQIEKLNEEKEKQENGLALLMKLQAQISAILKWADPFIEVEEEDRNCLAHLSEGGRQIEEKLRSYLRFKEQMQGQKQIFWEEEIHCGDRIRELDQELDELETEIKQLKSNQMVFPKNAEAAKRIIYEELKQQGIQTDVRLFAELVQEVKDAEWRAAIETFLGRKRFYIIVDGQYCHKAMEVLERRKLHGVHVVITDKLPETDISAGSAAEMLVIPNVYARRYANYLLNGIHLCGSLEELHEYPRGGLMKNGMLAKSYAVSNMDVDGTEFCLGGDAIRLQLNRKEGAKKQKQEERRSNQKHREQSRRYRSEIEGVDWEAGHYDFDAAKSLEATLGRKERIQQDIDKIQSNPDFLAVLQEQQDAEREYGALGGAIKVIAGDIGSCKKELEQSEAALKKAAGEIYQLNQDYDRQCMQHLELKRPMLEEYEKLLKGKTGTWRAITKKTVMNLSTEVDACVKQMESAQIEYCKLAEIDINRRGTGYIPFYRDEYRNIANIKIEEAHNKLEEQGKRLESAFMNDFVAEINETIQAAKDEIEGINRELKKIPFGNDTYRFVMTEKADRSVFFRICKKLEQYMNSPEVYMNSARDDEEMEHDIQEFMSVILEEEDETEYTDYRKYFTYDMKILSRQGSQEIEADLSKKQGSASNGEKQTPYFIILAASLLQYYPKQVCCARLAFIDEAFSALSRERIEQMVKYFEENQFQVFYAAPPEKISSIGAFIESTVSLVTSGRYTHAVEGLVKEVYGV

SEQ ID NO: 32745 - protein, 414 aa, Clostridium sp. CAG:58
MGYNSVQKQVLEALLDQYERSKTYQGENKVIQSFQIPPEKVFPDYASDYADMDQIRDFEAWMRELEQDGLITIKYGSGEIRKLTADPESWDLYYEVLQRRDKLSLQQDQIMLYQRYLGMSPLLDRFCREQIGRLQQNKNPLYGGKEAEAILELCKFILQNQQDILERELSMAVLKDSKRWEKKYRSKVCGLLRKYGDYESLFLGLTDDRDKEDKRETERILLAEHQIYPNPSYVYFKGNAEFYFSNGPCVRTDPSMPMAFSSDALKGLKALYIGDEAVITVENLTSFNRMQMERAFLIFLSGYHNLAKQAFIKQVAGDNPGKQWHHFGDIDPDGFYIVENLIRGTGIDFHTVYMDTDTLKKYDEYTKPLEERDRRKAENLLAAGRYTDVMSYMLEKGKKLEQEIVSWMEWKGAL

SEQ ID NO: 32746 - protein, 474 aa, Erysipelotrichaceae bacterium CAG:64; identical to SEQ ID NO: 31145

SEQ ID NO: 32747 - protein, 222 aa, Erysipelotrichaceae bacterium CAG:64; identical to SEQ ID NO: 31455

SEQ ID NO: 32748 - protein, 1104 aa, Erysipelotrichaceae bacterium CAG:64
  MOD_RES (351)..(353): Any amino acid
MLLVNWLYYEKTILSFEDIVFLSGKTGEGKSALIDAMQLVILGRTDNSIFNKSANDKTTRDLMGYLKGKYKDGTFKRDKGMFSSHLCMEFEDEQHRIYCFGIVFDVNGPTRGDMEHCYYMMNQPIPEHCFTDEGTVFNIRRMKKLLASFQDRSCRSFTTHMDYKNYFRQRMLIKDQRFFDVFKMAVAYTPMMNISEFIVKNICQEEEDLNLEEMQEEIQDYRQMKEQLETVQQKKAQLSLIHEQYTDICGEQERVANLRVEQKAAVYHGMLVEHDEAAAQYEVYTRNYQKLTKESRETEEQRALLEQNMEALRDARRDNAADILERKIQAHLEQRNTLQRDTTAVQQQLVXXXPAVQQQLVTKGEFLKEQIEQLEEIEDYDGLQLEDFDLSAIKLSIQRSVHAAQRLAAFDLDAYMDIQRQMRDIENTLSTVRQTMQNSLQTCREEQEVLAANRRALEAGKKTYPKKLLVLKQELEERLYQQVGKPVEVCILADLFSIQEEAWTNAIEGYIHNQKLNLVVEAEYFMDAYRIYRSIKEEKKIHTYSIVDIAKAKPGKRPDAKTLYDCVQVEREDVRPYVEYLLGRVVCCEAEETLRSYPVSITSDCMLYSGYAVSHMNPELYKVPFIGADSIEKQLQELIIRQQKLTSTCRKLETVTRTLQAVQLQTVISDDFIRQLEDGLCKAKEVEQLEQKIKELRAAQTPESLQELLLLDQKLDEAKKKKNELYMLQVEQESRRRQLEEDMKLCNARIQELQQQVKEAKKPEQGIPDTIGAITTADGIRRKQKQLEEALRELNSRVEISKQELITKKTHYNDTFRIALNPNFLCDDYEREYEKHSDNIVEDYIDKCRLAQQKAYECFQNNFFSALNSKIENVRMQIDRLNRSIRRHKFGRSSYEFVCTCNEDYREYYNLITNKELNGHNLLNTKVYEENEELIHELFDKISSLSSMQDPKKYQELQKEVQLLSRFTTYLKFDILENGNSLRATIGSSSGGETQTPFYVAVLVSLFSVYDAGNDGLQLAIFDEAFDKMDNERIEECIYLLKSLGFQAIIVTPTDKISNLSKVADATLIATTDEKNGQRVSTVQKWSQKENIAIPDSEMRQEEV

SEQ ID NO: 32749 - protein, 460 aa, Clostridium clostridioforme CAG:132
MILMNEIPDRFWSLFRSVNRSTYIEALLKINEEYEYSNYFLSREVCIQLLSEYFSRKKYVIWQDETEDDWDELEPPATRVLNWLLRTGWLRKVDDYASMTVNIVIPDYAAVMIEAFSRLSNDDEDETQVYIQNVYAILFSLKNDPRSSVSLLNTALVNTKKLNKSLQDMLHNMDKFFSSLLEQKNYGTLLKEHLEGYVTEIVNKKYHILKTSDNFYLYKTDIKSWIAAMREDSSWINKMCAKSAASTRGQKKTPLTEYDIVEKLDHLERGFDDIEHRISNMDKEHTRYVKATVTRLNYLLNQEDNMKGLVIKLLNHMSEYGCPEDELTAVSAGMNLSQMTILSEKSLYKRRKTKADFTEQLKDEEESEELSMEEVLNLNKVRNRYSQKEIEAFIEGSMADGKMVVDEQTIHSDQDFEKLILAYDYSTRRKSPYKVEEEDSEMVHSGGYIYPRLVFVRRTK

SEQ ID NO: 32750 - protein, 249 aa, Clostridium clostridioforme CAG:132
MENMELENSVADIAPAAGYTGNSIPYYDNLMHSEQSEVTEIIRLLWRQTFILEHKYDKRTGRFQYNRDYRVCSKHLEFIKNYFAISGVELRENSQMGIMYIQGENVVGDKLPRLATLYLLVLKLIYDEQMESVSTSVNVYTSLREIHEKLGNYRLFKKQPALTDIRRAVTLLKKYQVIEPLDLLEDLKSESRMIIYPCINVVLMGDDVRQLLSSFDEDTDDSGVQLKAELEEEDADDMTAEEGEPWNRK

SEQ ID NO: 32751 - protein, 1129 aa, Clostridium clostridioforme CAG:132
MEQKIANDRFLALSRICLNNWHYITKRTLSFNDEINFFTGHSGSGKSTVIDAMQIVLYANTDGRGFFNKAAADDSDRSLIEYLRGMVNIGDNNEFSYLRNQNFSSTIVLELKRSDTGQCQCVGIVFDVETATNEISRRFFWHKGPMWDNGYRGGKRTMSIVEIEDYLQANYNREEYFLTSHNERFRRILYDSYLGGLDSEKFPLLFKRAIPFRMNIKLEDFVKEYICMEQDIHIEDMQESVMQYGRMRKKIEDTCAEIQSLKQIEDRFQSYADKEQQLKKSSYFVQKLEILQLQSEVRTLAHKAKLAGEDLEKQIQARSSVDEQIGELTRQSDELLRRIASTGYEELKNQLKSLNELLEQLGKSEARWQQATDALKRWEEEDITSNQTLWDIEEFENRTIDLETLERLKKSMASMRSDTEKQHQEASSALRELKKQEKQTRDELEKLRSGSKAYPKYLENARSYIQRRLLEETGKSVDVHVLADLLDVKRDEWRSAVEGYLGNNKLNLVVAPKYARTALEIYGELDKKEYFNVAVLDTEKASQNQPQVQKGALSEEVTVRESYLRPYMDLLLGRVIKCDTIDELRECRIGITSGCMLYHTFRLQHINPDNYTKFAYIGKDSVRRRIRLLEQELAALDEKKKPLEETVREAHRILALPWLLAEPPEYMDWLKDINSYKAKEREKKKLIQKLELLKEQNVDQLERDRQAVITLCDGKKRERDSLNVLIRDKEREIEGYRNKSIDSQSVLTSKERELTQNPDYDNELTAYLSSRDTVRYDREKETYTVRCSKLSEAREAAFQELLTVRTSYIRTYPNRNFPVNARDNAVYDHLLSALKCDNLEEYKQKATEQAKSAVEHFRDDFMYKIRSAIREALIRKDELNRIISRLDFGKDKYQFIIGRNKGPDGRFYDMFMDDSLDINPADLNYSYENQMDLFTIEHEKQYGDLMNELISIFIPPENAAPDQMDEARRNMDKYSDYRTYLSFDMQQLIQNQDEVIKIRLSKMIKKNSGGEGQNPLYVALLASFAQAYRINLPSKVERNPTIRLVVLDEAFSKMDGEKVASCIELIRGLGFQAIISATNDKIQNYVENVDKTFVFANPNKKSISIQEFERERFVELMQDEEDRNEFADT

SEQ ID NO: 32752 - protein, 113 aa, Clostridium clostridioforme CAG:132
MNAPLECIIRKCEIHLERVLSSIRTSCGTTYLHTGDLDYGGVKIFQYIKKRIFPNLQPYLMDTQTHEQYKAYSEPIETSKLEKLQRTTEPLLQPLIDKICAEKQVIEQESFLF

SEQ ID NO: 32753 - protein, 490 aa, Prevotella sp. CAG:1185
MDKIQLIDILENSPSIKLLKMRTKNLKFFLLFLLDVFDDKTAVSWEYIHQRLVIRFDGMDDGDIEEEDDDKMPNTIETNEEKARRWITNWTNNGYLTNYQNEVGEVMYEISAYTSKVIDWIDNSLRKEKYVGTESKFNSLFGQLKELVEFTNEDRSKRLELLKEKKAEIERQIEQLENGDDVTVFEDYQIVPRYNSLNKLAKELLSDFKEVDNNFKDIIKQIYQQQTENSQKKEILNYTFDAYSKLKNSSQGKSFYAFWDFLLSSNLQNEWKTMTQELFESLDNRHIDVHDFFLKDIILYLFNAGQNVCRTNDRMAEKLSRIIRQNEQSDYSVTKQTINDIKKMLIGISKRRETPDIGFEIEEIKIRLPLERPLTLEPAQEIEYNDRPANADLSIDDLNRIGQLYNAYFIDRETLRNNIDAVLKKKKQATLGEVIEASKGITKGLTEIFGYINVLKGYSTTVNADRTQDIIFDTENRRKIVIPEIIIVRK

SEQ ID NO: 32754 - protein, 195 aa, Prevotella sp. CAG:1185
MSTTDIKPYSKAIVKLLKGIVEYNDPAWNDILQYQADIQAYLGVIGLELIVKKDEGFAFVRQAMLDEGKTINLATRRQLGFEISVILIVLRNMLYEFEMNPTDSQADEKYVTTTQIKEEVEMFLPVGFNQVKFKQDLDSNISKVIDMGFLAEVKKLETDETLYRIHRIIKEKVTLDDLAEFKQKLKEYDTTDESI

SEQ ID NO: 32755 - protein, 1132 aa, Prevotella sp. CAG:1185
MIQQMNLFNTTPEKSGFRLDYMEIYNWGTFNNRVYRISPQRCNSLLTGANASGKSTLVDALLTLLVPLKRQRFYNQSSGIEKKGARTEESYVLGCYGTQQKEGSTETITLKLRDRNARSVLLASFNNADGKVVTLFQIRYFIGQELKTIYGIAKAPLEIGKDFAQFDSRGDWRKQLEKHYNAFSAKKVIDFCNGPYAYAEKMCLMFNMRSNKALTLFNQIVGVKILDDLNSFIRNNMLDEEPAEEQYTELHDNFHNLMEAKINIDKTREQINMLKPINDNADKLHAIDQDIRQLEQNKSIAAYWFASRIVTLSEKKMAENEKELQKQNDKLKDLTAQLEELNRQRRKIEADIDNDEVSRQIASLTEEIKRLTKERDKRTLKAEEYNKIAAALELPPNPLKDDFEKSRKRAGEENLDRQGELEELSEKLRQEKNKADEIKNNLEENAKIIKDLEKNKNNISGRVSEIREEILRHTGATPDDIPFIGELIRVKDSEREWEPSIERILHNFALRLIVPEKYYHTVNEYVNSHNLNGRIVYHRYQGFTPLKEMEINDDDDNRLIRKIEFKPDNRYVEWVEDEISQRYNYACVDSLDEFDDYSEKAVTKEGLIKSVGNKHEKDDRRETRSRDNYVLGWENKEKIAFLTKEICRLQDELKDNGAKIKSIEERQEGCRQRISLLNNLLIGFDDHEAIDWMSCAQAIEELEEQKKKLEAADNKGQALREELKAVEAKVRAMEKDKDITNITIYNIGEEQKDLSGKRLSYQEFVNKIGVIDMLDFEQQHPEMLEIPLYSLENRRNAFYTYLENTLRSKSNEKNDLEKKVIKQIMKFKRPSKELAEKYKDWNSDVSSLPDADNTEFIEEYQKLYSKLKEEDLISYENDFNQYLQDTMNIKVNSYKCFFEHWEADIDKAIDHLNRSLREIVFNKDQGTYIQLTATKKQNAETKEFCSLLRQAIPNVHEVNSTTDGRQRHFEEHIEPFMKKLEDGQWRSKVTDVRSWFTYRAEEFYQATGSKYKTYESMGQLSGGEKAQLTYTILGSAIAYQFGFTESGLESSFRFIAIDEAFKAQDEDKARYLLDLCNQLHLQLLVVTPSDNIHIVENNISFVHYVERKGDESVLYNMPIVEYKEEYKRSKTS

SEQ ID NO: 32756 - protein, 381 aa, Prevotella sp. CAG:1185
MIKAAEIRSKAENRYIRYLQDVASGADFERIVIPCNKKPSDDFAVYQAELNDITDNSKERRGYGYTVIWQTVRHKKLGEQDLPKEIAFDTEADFLKFIRKEAEARQFKHDVSSILSAFPVLAGWVKAHPLKVVANSAAWPGLLKVLRYFSLNPRPCMYIRELPIEVHTKFVEQNMGILRELLDIVIAGHINTDEKRFEPRFSLKYDEELIRVRFLDDSLALSCAAGLKDISLPVSQFCAVSWKVQSVFIVENKVNFLTFPPVANALIIWGHGYGVSSLKAASFLAGTPLYYWGDLDAQGFEILSQFRGYFPQTRSILMDSAIFTRFFENDEGKPSKVSADLNLTDEENSIYQTIKANNWRLEQEKIPQSYVIEYIRELFNQ

SEQ ID NO: 32757 - protein, 452 aa, Coprococcus comes CAG:19
MQLRFEIPESFWSLFRSVNRETYIEALMAINEEYQYSNYFLTREVCIQVLRDLYMKKQIELKREEDETEFDMLETPSARILNWLIRKGWLKKIEDYNTLVTNIVIPDYAAIFVDAFERLSTEDLEETEIYIQNVYATLFSFKNDPRVNLNMLRTALINTRRLNKALQDMLHNMDKFFARLLEQQFYGDLLKEHLDGYVEEIVRKKYHILKTSDNFYIYKTDIKECLRQMRDDEEWIEKIRERARATGDMGEDVLELLDMIERGFDDIEHRISNMDKEHSKYVRATVTRLNYLLSGESDTKGLVIQLLNRMAEDDYEEVIQRTGEKMNLSLVEILSEKSLYKRRKTRKDFVSQMAPEEEVDDLDREDVLRLNRIKRRFSKKQIEEFIEEHIEKDVLDTEKLSLTSEEDFEKLILAYDLSTRKNSKYKTLEEDAETIEKNGYRYPALKFVRRHL

SEQ ID NO: 32758 - protein, 208 aa, Coprococcus comes CAG:19
MIEYFEQLTQEEQEDLTDVIRLLYRQTFLLERKFDKRAGRLQYQREYRICEKHIDFLKMYFQITGITLCENVHLGLIYIQDEMVWGEKLPRLATIYILLLKLIYDEQMASVSSSSQIVTTLGALNGKAGDFRVLRSIPSPTEMKRTIAMLKKYQLIEPLDVLEELNESTRLLIYPCIHAVLQGDAVREVLESFGSSREEEEETLGDIG

SEQ ID NO: 32759 - protein, 1122 aa, Coprococcus comes CAG:19
METLDNRQPFWAISKICLNNWHYIDRKILTLSEGINFFTGHSGSGKSTVIDAIQIVLYANTDGRGFFNKAAADDSDRTLIEYLRGMVNISENNESQYLRNKNFSSTIVIELEQTRTHEKQCVGVVFDVETATNEINRLFFWHRSGLLANAYRGEKRCLSTVEIREYLQRTFGEEAFYCGPSNERFRRQLYDVYLGGLDKEKFPRLFKRAIPFRMNIKLEEFVKEYICMEQDIQIEDLKESIMQYGRMRSKIESTMEEIEELKKIDGIYQDFDDKREKSRECDYRLTRLEMLRLQADIQGLHDKIKTREEGIKVQEHTKAELMRQSGELQKEHEELLLRLNNSGYKALEAELAGLNETLEHLGKSRASLTKTAQRLAAWKEQEITSNQTIWDIDKFEAGTISEGELTRLKENIAQMRAEIEEERRDTDSTLRQIKKEEREAKEELKELKQGRKAYPKELEEARLELQNRLQENCGKFVSVQILADLLEIRDERWHNAVEGYMGNNKLLLIVEPKYAKAAMDIYQEMDKKKFFRAAILDTEKVMEEEHIVRQGALAEEVKAKEKYVQSYINFFLGNVMKCENIEELRECRIGVTPDCMLYHSYRLQHINPENYTRRAYIGEISLCQRIRQLQKHCDELQEKRLPLAALVEEAKKLLELEAMPLPTEDYISQILDAKAIKGKETRKKDLLEKLQKLRVESVDTLEAQMKEVQERRDAKQKEITKTEKEIWKNGEEIEKFRNSITESEFALSGIQKEFQENERFEKQFEEYLEAQKSRNYIYLKEASARQLQQLGKKKEEIYQELVAARSAYTKKYTQRNFSVVEEDNKVYQELLESLSCDNLETYRQAANEQAKAAVEHFKDDFVFKIRSAIREAYQRRDELNRIISRLDFGKDKYQFVITKNKGADGKYYKMFMDDTLQINPAQLSGSIENQMNLFTMEHEENYGDMMNELIGIFIPPENATHEELEEAKKNMDKYADYRTYLSFDMQQIVQGEEDMKIGLGKMIRKNSGGEGQNPLYVALLASFAQIYRINLSPKIHRNPTLRLVVLDEAFSKMDAEKVASCIALIRGLGFQAIISATNDKIQNYLENVDKTFVYANPNKRHISIQEFEKTEFAQLADEEEQG

SEQ ID NO: 32760 - protein, 400 aa, Coprococcus comes CAG:19
MYLVDRIIERCENSSRDWREGATGGRTLRITQEDYDACGKEELIEEVQRLERAGLLTVKKWVVPDSDVELVAYQVEHLPDFYRLADSESGEEYWPKQAKVNYYIRMIDQELSEGFQKEWIENYLEKLKERIAEGDLPKNIEKLEKYLDCYRGLDSLEEPMMKRIFSKRYLKDSKIFEREMERNVVTAARRYCPEITADMDIQTVLEQLLIEENSQELAVKGPLKLKIWKGSEAKRVDLSDFTYGVVLNSQTVKHAMVEVEQPALKKIVTIENKTNYLAMEYDPEILYIYSHGYFSPLEREFLKKLQRVIEGKDVEVFHSGDMDYGGIRIFEYIQKHIFPGIKPLQMDVETYEKYEEYAKTISKETMEKLEKVNVPLLEELKEKLLETGKGIEQESFLIEE

SEQ ID NO: 32761 - protein, 549 aa, Bifidobacterium pseudocatenulatum CAG:263
MGPGSLFHDRKRRRIRTVTAASFPYFRLEWRLAAKASNTWKGVLLAEIRREMERLRPVYETGVLRLLLRNNSMLYVALLRSTFDPLTGELPREIVEERFARSLNRLIETGDYTLKDGQTAREAAHSVLLDLAREGEGDYAWLANSMDVASHRYLYRLTARAHRAIEALDRLEDTTKALSGAQANSIIMEIEHARMQLTADPRERIRLLKRDIEERQKEIDELEHSEALEKLTSEQVGDIIGVIHNTLRGVPIDLRELALSERDNGDALRRRMQAGAMSVESILTAYHDEYRRAFRESDSGRRFEDAFQVIVTDEGRREIDDAVRDIARNPYLDGEPSVLLNQVRSELKRIYEGIEDVRRQIRTSDEAVSRLVRQQTDTSYRTMLAKLNQLFAKTSAEAKAHPNDQSRPYHTDAGQAKFPTLPSRPARSMARAASSSLNDAPAATIEAPDLKNMVEICGPRLTRMIRLIRSNPVTTSDGMFVDLAASFNQLPKAERRESELVGFLSALRTQDDSSYVTWRCISIDGSERVWRTKPILTTETTLDDIIEER

SEQ ID NO: 32762 - protein, 260 aa, Bifidobacterium pseudocatenulatum CAG:263
MTDYIEANIEETILTEGEPVLEEAGSQQASTALFNGDTGDMPVEARMAAIALKRERYIDGSLYDLACENREVVERSLNNDMLRLVDNTKYRIMYASPVTDSETCIRSLKTRMSLTREETATLAALRIKALEYENQNAEPCDWLISFDDIRALLATGAGFLTASNDEEGTAKKITSIISRMRTYGYLAPIEDDDMYVLTPLVPMVLDRGLADQWLGSETTDENASADGRTDAGPDDRPMEDIEQDAFDFNTDDNRFDEEEH

SEQ ID NO: 32763 - protein, 400 aa, Bifidobacterium pseudocatenulatum CAG:263
MATVRSTTNSDIHSQLNGYVTDYLTKHMYDANTSWPLRKTIRLPKQTELEAHYTHIRAQDEAIRNWAQQHHCETSEKTKIISNGIVRQTSQLIDSVTIPDLNTALNITTPQTRKLYQREHQRAHTITNQFNLDSNTSINIAKILKNHDDTDFNLVIQAAHYFANHNTENMTPRMVPIPGFSAKWLGKTTSNRCKAICKLLKREQLALNDRHGEIRLRLLDTQHHNQPDLIVTQPWTDGAPHDITHIIIVENKDTYQAIPTTEHAICIFGSGHAATRIKTLLPWITTTPHIIYWGDIDADGLEILSELRQTGITCDSILMDSTAYKTYEPYGTKLDTKKQPLKTRDPKPTPGLTQHERNLYEQLCTGKNTTYLRIEQERIPINDAMTILHNQHQWNTTHHK

SEQ ID NO: 32764 - protein, 481 aa, Roseburia sp. CAG:100
MILKKQIPEDFYKLFRTRNMDAYMMFLAAIYEENSELYTALGLTLEEGQAIIAETMSRGQIDWQEDEESQEEETQDTDMETDAVYPGTPSAILRRLIRWGWLRSDYDEKLNTYILSFPEYSQMYVELFEKLQKEDETGERESILAIYSALFTYHSDKEKNSEILKSALRTSKNLEQLLSNMQNGMRTYFEELSQSKNFMEIQQVLVDEINNNDSKRYAILTTTDSFYRYKEAVKELISQILNDNEKRKIQIIEQLNEAAPDSMAKFRLEQSLNYYEEATVMVYRIEREFDMIERKYNRLIEQKAVFARRALARIRFIFQEGAHDEDNIPKLLRIMDASEDKEQILDELSSHIRLSAPYKVYDDDSMYTIREESDSQFNPLTTAEQEQHREDEITDFVPKPLYTKRQLHAFRDQNMKDGAFVTTKETVSSIEDLEKMMFLWQEITENQSDEDVVNLGGEFTSPDGYTFSELMIRNMHPETEA

SEQ ID NO: 32765 - protein, 205 aa, Roseburia sp. CAG:100
MLKYMEELSPGEASNIKKTIQDLFKQTCILQVKCDPVTLVQRDNPRYRTCANHREFIAAYLSLLDLELIHDPQEQLFRIQGEGLPTERMNLMTTRIMLLLKIIYRDRIMGDGLRATVTSLREIREYGASTKLIIRKLTSQEWQDALTLLKVHQIIELPGAVGNVEDDTPIYIYSTVNIFCSSVTIEELVKKYRDRTEAAIDGTTE

SEQ ID NO: 32766 - protein, 1108 aa, Roseburia sp. CAG:100
MCLNNWGGISHKILEFNEYVNLFSGKSGSGKSTVMDAIQVLLYGSFSPSFLNKAADDAKNRRSVLSYLRGEQKDGTANRENADFCSNIVLEIEDTGTHNYTCVGVAFEVKHNDSEIRKYVFFSHSGQIPESEYINSKGYVYTNQEIKKLLEVRAQSDSNKGRDVNRTYTSREAYMAALYDVILGYIDGTRFQIMEKSAIALKMTNGTGQFIRDYMFPKSESNVIEKISDQLGSYRDIQDKIKDMRHRIELLQEVREAGSRMLEVSTGIAKANAMIRCIDVVELQDKIMSEEQQIAQHKDELDRLALEMEKDRAILKDIDEELIQVKADLQASDLGAKKNQLEAQNQLAKMLTEKSKQWRKMLEGLRKWEEDEAITDYVSNPMLQRIHAFCSGSITEQQCNDLRRNIQNTLVDIEETLEEYKEQKRESDKELKELRTLVDDMKNDRKPYSAALKEARGALERRLSDLYGRTIKVYIFADMFDVRDKEWKNAIEGRMGRLKLSLVTEPRYAHDAAVAFREMKKYEEVDLINTAAIEKSQPQAEQGSLYEAVETGYPYIDACLKRYLGRIIKCHTTEELEQVKDGVTPDCYSYSNYIFRHLRKRDYDKYACIGSKVSKARLEEYQAELMRLESENAQQMQAINRLGQASAFERLTEEDSYIVSLSASGKELDKVMGKINALKKDIEVLEQGKYKELQERSSRLEEKKEQKQTEIDQNQGVINSIERRKGHLEGEIENNKKALDESLMGYIPNAELEAEVEKLLKTRSGQAIKSQKNREITELEEKEQQELENRQAARNRFNREYPSVGFSGAEKSNDAYVNLLNEYETDYEPKYESEFEKQCNIIYKSLRENVIATIHGDINAAKRHTHEINRLLRKTNFADSTYQIKIEPAKNENGQFYEMLTAPELDSKNVGSGVIDGQISLGEDEFYQKYENKIKLLTDKFMPIKDEDGSHREQRLKEMEQYADYRNYLSFSMYEQVTDAQGNVIRENFVDEMAGRDSGGEGQNPKYVALLAGFAMLYMQQSNRDSKIKLVLLDEAFSKMDQERSAVCLQYARKMDLQLIVCVPDERLQSLIRNVDCVYGFRRYHNQISMMHIDKGDYLKLMEGEEND

SEQ ID NO: 32767 - protein, 470 aa, Ruminococcus sp. CAG:55
MKLVEKVPKDLYKIFGSKYMEFYMQFLVALYEESSQSYSLLGLTERECQMIMNERLAKMALDWSEARVDEEGELITRANMASVSLKHFEDWGWLRRDYDETLNSYVVSFPEYSQLFVELFQKLYSENDGKERESVLTVYSHLYTYSLDKEKNNEILKSALHTSRALLQMLANMQEGMRGYFDELSKQRSFRGIQEVLVKEINNSDSKKYAILTTTDSFYRYKEAVKELIEENLEKTEARKYSFETELLSEEENTRKSYRLRRMIEICEEATDMLYKISREFDAIERRYNKLIEQKTVFASRAAARIRYIMMEGVMEEDQTVALINLINESGKSEEILDKLSSKLRFSEPYKIMTEKSLYQRRENQKEKFSPQAVTPEKSQEENMTEFVLEPLYTQKEIRDFRKKNEQNGKFTVTKDTVKSIEDLEKLFMVWQHATESADSKAKIEVAQEMENEAGFRFSKLTIEGVESDG

SEQ ID NO: 32768 - protein, 231 aa, Ruminococcus sp. CAG:55
MVNYMEELSVTEADNLKKTIAALFRQTCILQMKYDPVTLVPRDNLHYEICTRHRKFIEDYLSVLSCELVHDPQEHIYRLHGDGIAIEKINATVTKVILLVKLIYRDKILGEGLKATVTNLAEIREYGKNTNLINYKLTMGEWKEALYVMSKHQIIEVPGAIQNVEDETPIYIYSTINLYCGSMDITALIKEYQEDQYAEEEITEEVSEQEIQEEAEGGVEDERETVEENIY

SEQ ID NO: 32769 - protein, 1122 aa, Ruminococcus sp. CAG:55
MKEKQSKKIFTRMLMNNWGGISHKVMEFHEYVNLFSGKSGSGKSTVMDAIQVVLYGSISSTFLNKAADDAKNRRSVLSYLRGAQKDGSFNREDQDFCSQIVLEIKDTGKNTHTCIGVSFEVGKADTDIRKYCFFSHSGKIPEDEYLTEEGVPYTIAKLKKLVEARIESADNRGRGDVNRVYPSKEAYLKTVYDAIFGYVEPGRMMTMEKSAIALRMTNGTGQFIKDYMFPKSKEDTVATISDQLGAYREIKERVEDLEQRIKMLDEISQHNLALQKAGADKIYVEQILKYIEIENCKAHLQSKEDDLQDILKKIEEKEEKRKSYLAEKDAYTKEQVEVEAELKASDYGQKEKELKEIENTIQLLATNSEQWRDIVKGLSAWEEDDEVSAYVSNQALHRIDDIRDGVVSEDSIEKLKQYLSDALDNINTELGDVRERIRENQKELQEKREMVEDLKNDRKPYRAELKRARQELQNILSTQYGRTIHVNIFADLFDITDEEWKNAIEGRMGRVKHSLVTAPEYTLDAAKAFRKMKQMKGIEDVELMDTAAIVRDKPKADENTLYECVRAEEAYVDTCLKRYLGRIKKCETVEELHETRDGVTKDCYSYSNYIFRHLRKNDYEKYACIGTKVSKAKLLELEEEAAKLKQEVEEDCRVEMALRAAQKFECLNQSTEQILHLSKAAEQLQDYYEKQEKLRLEVEELKRGDRTVELKKKKQELLELLKKNAEILDSIQSEVVQYAKTQGQIESNIKSFSEKINFLTEGFVVNEQLQNEVTDALKVQSEAAYKRDKTKEKDALETLEETEREELQRSRNKFNNAYPAYGFTGIEHENDVYDKVLNQCRKDFEPKYKEEFDKQYNLVYYTLRENVIASIHGEIKAAYRHKKEINRLLAKIKFSDSIYQIDIIPAQNENGQFYEMLTAPELDSKVFDDYGFEGQLSLGEDEFYQKYEEDIKRLTEKFMPPKEEDARSLSQYRQQMEQYVDYRNYLTFSMYEKVEDENGNIRKNAVDDMAGRDSGGEGQNPKYVALLAGFAMLYMQQTNRDSKIRLVLLDEAFSKMDKERSEVCLHYARELELQLIVCVPDERLQSLIRNVDCVYGFRRHQNQVSMMHIDKGDYLDMVEGNE

SEQ ID NO: 32770 - protein, 454 aa, Dorea longicatena CAG:42
MQLMNEIPDTFWSLFRSVNRDIYIEALLCINEEYEYNNYFLTKEVCIQILSDMNAKKRFELQREENDTDFDMLETPSSRILNWLLRAGWLKRIEDYNTLVTNIVIPDYAAVMIDAFEKLNSEDASETDIYIQNVYATLYAFRNDPRASIGLLRTALVNTRRLNKALQDMLHNMNKFFAKLLQQDSYSGILREHLDSYVEEIVWKKYHILKTSDNFYIYKMDIKKCLREIRDDEAFIMKVQARSKMLGDNQDDVLDLLDLIERGFDDIEHRIANMDKEHTKYVRATVTRMNYLLSGETDTKGLVVQLLNKMSEDPDQMEEIITETGKRMNLSLLEILSEKSLYKRRKSRKDFISQLLPDETTGDLDKDDILRLNRIQMRFSKKQIEEFIENNMEDEVMDASKINIADEEEFEKLILAYDYSTRKNSRYMVLEEEPEMVEKDGYRYPALRFVKRRA

SEQ ID NO: 32771 - protein, 214 aa, Dorea longicatena CAG:42; identical to SEQ ID NO: 30885

SEQ ID NO: 32772 - protein, 1114 aa, Dorea longicatena CAG:42
METKQPFKALSKICLNNWHYIDKKILTLNEGINFFTGHSGSGKSTVLDAIQIVLYANTDGRGFFNKAAADDSDRTLIEYLRGMVNISENNESQYLRNRNFSSTIVLELTQTNTRDKQCVGVVFDVDTSNNDVSRLFFWHTGELLSNHYRSEGRCLTTAEMREYLQRSFTPEQFYCGPSNERFRRQLYDIYLGGLDMEKFPKLFKRAISFRMNIKLEDFVKEYICMEQDIHIEDLQESVMQYGRMRSKIEETMEEIRRLKLICEKYEQYAEKSDEEKVCSYQIDRLEIMNHEVKSQEARDRIKVRQEAIEDLKKQQQVLEQEEKDLQKEYEEIILRIADSGYARLESDLDTLNETLERLNNGKVRWEQTAEHLKVWTEKDITPNQVIWDIEKFADGSISEEELVRLQEGLKDLQEELEDQRQEADADLRRIKKEEKEARAELKELKQGKKAYPRELEEARFELRNRLHERCGKFVNVHILADLLDVKDERWHNAVEGYLGNNKLQLIVEPKYARAAMDIYQEMDTKRFFRAAVLDTEKLTKDKHQVQPGALAEVVKAKEAYVQEYINFFLGNVKKCESLDELRECRIGVTPDCMLYQSYKLQHMNPENYTRRAYIGETSMRQRIRKLEEKCEKLNGERMPVQELLEEIRQAMQMEMLKQPAEDYLGWLADSKAIISKEKKKAQLLEQMQKLKDESVAAWEGKKKEVQAAQDAKKESVSKVQEAIWENKKEIERLNAEVLESEEQMKDVKRKVADKRYEKEFQEYLSGRKSENYEYLRRQMVSRVYTLREEEEDAYRKLVEERSSYIREYPNRTFSTSIRDNAPYEKLLNSLSCDHLETYRESAKTQAKAAVEHFKDDFIFKIRSAILEAYQRRDELNRIISKLDFGKDKYQFVITKNKGADGKYYKMFMDDSLQIRPSDLDDTMDNQLDMFTMEHENQYGEMMNELINIFIPPENATKDEMDEAKRNMDKYADYRTYLSFDMQQIVHGDKEMTIGLSKMIKKNSGGEGQNPLYVALLASFAQLYKINLSPKMHRSPTLRLVVLDEAFSKMDAEKVASCISLIRGLGFQAIISATNDKIQNYLENVDKTFVYANPNKRHISIQEFEKTEFGELAEE

SEQ ID NO: 32773 - protein, 472 aa, Coprobacillus sp. CAG:826
MKLFDMIPDNFFSVLSSKNKDIYAMALLALYRSLQNNELSIKKDDFIRTLKDTASDLVMNFDFSDEEENDIGADSTLPTRAAFIVRRLEETGWIEVQMDTETFDEYIALPEYSITMLTSLNSIVSDAEVAYNSLVHSTYSELKLEDEEQDEYMYATLVRVFENTKRLQTELVTLGHSIRIFQNRLGQLFTTNEVLHAHFDDYKVHVSDKYYHPLKTFDSITKFKRPILAILQKWLKDEDIRHKLTMQAMMWGKAKDIKLSEEEIISKITYVQDTYEKMMLTISEIDESHAEYTKSSATKIIYLNNSDKTMKGHLETIFKAYAKANVEGVGLRGILSRMQDSISLYEQGYINPDSITLPIVRKYREEGEPLPIISNSEEAGDYTMQEFLDQTRNSFTDERIYAFMETAFQGQDEIFIGDIALPDFDAFVLLILASLKKNDDACFYIVEQDEGRVYSQGYVLPNFTFKRKESTK

SEQ ID NO: 32774 - protein, 206 aa, Coprobacillus sp. CAG:826
MFEEEFVKLSSQDQNEFARIVNALMLKSFVVRESFDSREKMMKINPEYRFIERYYEIFEEYLKYSGWHLEKDVTNGVIAIYNEYEQNRLRIDRETSLILFTLRLIYETKKAESNAPGESLYMTTPELLKTMIEYGITMQGKRLTGRLLGRSLRFMAAHNIICKVSGSYDEGNVTFYILPSITFAVDSQKIAAMSDALERLKEGETL

SEQ ID NO: 32775 - protein, 1127 aa, Coprobacillus sp. CAG:826
MKSLKKIKIINWHYFWNETICIEPIVFLTGLNASGKSTLIDAMQVLLLGDTSGRFFNKAATEKSSRTLKGYLRGELGDAEEGGFRYLRNGRFTSYIAMEFYDDLHESSFTFGIVFDSFNDGSEEHRFFLLEDKIPENEFVMNNIPMEYKALNEYFSKNYPGKFKFFDSNRHYQDNLKRKFGGLKDKYFSLFKKAVSFSPITDIETFITEYVCDAQTNINIDSMQANILQYKKLQTEAMVMAGRIERLTEIEKAYKAYVEQKDSLTLYSYIIERAEYQNDLNRLASYHEQGEKAQKRLLEIDDEIHDIEEEIQNFQRKKEKLTSDKLTSDTYRMTDELREEKRKTEERLAALQRETKEVETNLLRYAESFIKKANDLVETLHAFDLSLLDEDKKTDLEDLENNALDVIRLSSQMKDEHLAHIETLTVSTLNEWRDALNAFKNQVSALNVTLGKTIHTLDQKVALLRQQEVDMMNGGKSYERGLSYLRQELAAELRRRHSRDIEVAIFADLIDIKTPLWTNAIEGFLSSQKFNLFVEPQYYLEAHEILRELSKKVGFYGTNLVDQAKIIERHFTCEKGALAEEIITDHEGARGYTNFLIGRLKKCKTVQEARESGNGITAQCDLYRNFALSSLNPRSYTPSYIGRKVGAEQIEQKHKEVAKYRELVELYRNLYRIVGEANSLEMINAYEIQASLSLIDKTGDIEGLKENLDYIEKELEKHDLSQIKTIDQRIKDIEEDIRGLERDRSSLFEEKGTLQAQIRSLNEEKIPEEMKKAEERKARLDENYDGFFVDETAQPAFEQLLNEKMSTIEIVSTYKVKLTKAQYLQQNFFSELVKLRKDYIRDYRLSYDAETKDNTVYDQELTDMRDVKLPQYQVAITDAYEKATKQFKDDFISKLKTAIETVEAQIEDLNAALSASTFGNDSYRFVVRPSQEYRRYYDMIKDELLLEVGEDDSAFVTKYQDVMNDLFRQIVDVGEKGDRQSAVLANVEKFTDYRSYLEFDLIVRNRDGVEQRLSKTLRKKSGGETQTPFYIAVLASFAQLYRVNEKGELGNSFRLIIFDEAFSKMDRGRIKESIRLLRKFGLQAILSAPSDKVSDISELVDETLVVLHDKNTSRVRLYAEEDKITSK

SEQ ID NO: 32776 - protein, 477 aa, Clostridium sp. CAG:411
MSLMKQIPKDFYRVFRTKNREYYFAILVELYKANMEEYYTFGMTKNECRDVVNETMASLKIVWQEDEEEQEETVSQGQQMQMRTPAARCLSNLLKWGWLQEDYDDQLDEEIYSFPEYSQMFVELLWQLGLDSDSQERESILSIYSLLYTYYMDKDRNNDIIKNAWKTSRRLTQLLTNMQDGMRTYFDRLSKQSNFLGIQEVLLQEISNSDSKKYAMLTTTDSFYRYKEQVKELISQIIRENQEESFQLRQQWMQFTPETKEALRVERQMKRNEETNEYMIRIEREFDRIEEKYNGLIEKKTEFAKRALARVQFLLQEGMEQSENTATLIKMIGERPDGEEILNTFQKALRFSTPFTLFTEKGLYQKRGATEKQFTPKAVEMQLEEKENLTEFVPKPLYSVKELQEFREKNTSNGRFAVDETTVEKIEDLEKLMLLWQQFTADTEQDAEEKVTLGGNLKKTIEGENEVAFTQLVIKED

SEQ ID NO: 32777 - protein, 216 aa, Clostridium sp. CAG:411
MFAYMNEVSQAEQDKIKKVIQELFRQTCILKIKYNPETLIAKDNEKYYICNKHREFIADYLEILGCELQHDSQEHIFRIVGEGVPVLRISLHTTKILLLLKLIYREKMLGEGLHASVTNLKEIRTYGANTGLLTGKFTTSEWSETLNLMKRHQILEIPGSVANVEDDTPLYIYSTINIYCPSREINDLIAQYKEETEEGERLENEGEEGIQTVMFD

SEQ ID NO: 32778 - protein, 1125 aa, Clostridium sp. CAG:411
MKAKKVFRRLCLTNWGGVDHTILEFNEYVNLFSGKSGSGKSTAMDALQVILYGSVSSNFLNRAADDKKNKRSVFGYLRGEQKDGTANREKQDFCSVIALEIEDVRTHTKNCVGFNFEVRSKDTELNKFVYFSHTGDMPEGGYLTKEGIPFTNAQMRELIEERERSIGNRGRAEINRIYNTKEAYLATLYQKILGGIDGRRFETMEKSAIALQMSNGTGQFIKDYMFPQGTGEAITQLSEQLGAYRDICERIEDIKKRIGLLENVQKAGIKLSTAKAEQVHYSSLIKCLNIVDAKDHIAAWQAEKETVDGELIQLKQVQEKFQKQEESINEQWTQAKADLQSSDLGHYKEHLEELNRRSEMLAANNRRWRTVTEGLKQWGEDDYINDYLSGQVLKKIDLFLKEQVTTEKCVELRETLLEEKKQLEKELGMLQEDYREIKKQLEERRSIVNDMKQDRKPYGAKLKKAQAELQEHLQYACGKDAKVFVLADLFDIQDAEWKNAVEGCMGKLRFALITEPKYAEEAARQFRKLSRHENIDLINAKALQESQPKSRENSLYETVICEKDYVDDCLKRFLGSIIKCQTEEEMIAAGNAITKDCYSYHNFMFRHLRKKDYEMAFIGTKVSKVKLGEYERELEKMEKRFAALGEQISHMKLMYDYEMLAENPFDYMEFSKAGTELEETMAEIEKLHTVIDNLEKGEFRELQQREEQLHKEYKNLRKQSRDCNIRIQEKTARVAGLAADIKGKEEELKELEIGYTENTKIKEEIRQEREKGISGITLNNRWIRKIKEARETEEEAKQERTIAREEYITNYPNSEFTGWEPDNEKYDRKLVEYQKNYEPQYQEEFEKQCSLIYKSLRDNVIAKIHGDIKAAHRHKEEINRLLRETNFADSCYQIDIEPADNADGQFYDMLMAEELDTKNPDNDGFEGQLSLGENAFYQKYEMQIKALMEKFMPAKNIDEVQLKKYQEEMNKYADYRTYLAFRMNEIVTDSEGKTIRKNYVDEMAGRDSGGEGQNPKYVALLAGFAMLYMSQTNRDSKIKLVLLDEAFSKMDQERSAVCLQYARKMDLQLIVCVPDERLQSLIRNVDSVYGFRRKNNRISMMHIDKGSYLKMMEGEEEHETITGRG

SEQ ID NO: 32779 - protein, 486 aa, Clostridium sp. CAG:288
MKLFDKIPENFFSLLSRKYKSVYAFSLLTLYDTLKLYKTKIKKSDYLMLLRSRGADLMSLFDIALDRQDDKDDEDEDQTTIATDSSDDSTIAKKTNYICNKLVKTGWMEIERDPKTNIDYIFLPSYSIRFLELISELTSDVSIYLPLVHQTYSELKLEDEKEDDFMYRSLANARKNADELELSVTLLHHSICVFGHKLTSLLSPNDVLHQHFDNYRTEISDKIYHPMKTYDSLGLYAMPTITILKKWLHDERIVGKIANQARSDTDNVSLSNNELTNLVIQMLQETIDIFSKLNKAFDEIDKANADYTEAVQRKVNYLSSSDKSIKGKLDAIILAIAKDLTSVEDYDQSEMLNKASETINFYRQGVIDGDSLTMPFKRSEKEEGELLPIEDPLMDDNTLLNDFLDSEVNQFGVEAVEDFMIKAFGKKKEIDISEIELNEMDDVILLILGIVRAEFGDSFFSIDKYSDESIRVGRFLVPKYRFTKKG

SEQ ID NO: 32780 - protein, 212 aa, Clostridium sp. CAG:288
MFQEDYEKLTRGEQRQFEDAVNDLLYTCFIVRKSFDRATNVSKISPTYLFIERHYNLINDFVGFIGLDLVKDDQNGVIYLNSEEGRNRIRIDSVTTLLVYALRSYYEEKVSDNPSLTETYMDSTTLKMILRDKGLMKVNKRLSTNALASGLKTLASYNIIARAQHSFYDSSYSFYILPSIRYVISNSKMNALYDEVTKIAEDNESVASEFGI

SEQ ID NO: 32781 - protein, 1130 aa, Clostridium sp. CAG:288
MKKLTKLRLINWHLFANETTNIDDITFLTGANGTGKSTIIDAIQTVLLGDTSGRNFNKAANDRTGRTLRGYLRGETGETDKGEIMCLRPGRFTSYIALEFYDDLEEAYFTLGIVFDSFEDESEEHHFFYLKHGFPENNFTNSGLIDSVVRPLTYKEFLNYCRQSLNDNDYMFFDSNVAYQQFLKVKLGNLPDKYFTLFKKAVGFSPITNISNFITEFVCDVDYKIDIEPMKKNIEQYKILELEAKKLKVKLDSLQAIKDAYNAFQKGKSDLKLSEYLSDRADYETVKYQLSEYNKKLTSYQNRLSEIAANLDDYQQNIEDFKAQKESLLALKVGSAGYAAMSTLSNQKEKVMSRISAINLTYGSLVTSLKQYCGSFGKGAEQFFNKFKNLDLEFMDDENRRDLEDFLEDSADLFASSREIENAIAINKLEPEMVRNFQAEMNEYKQKALSLKRTFDSELYDLQNELDNLNRQIYEMKSGRKPFNTTYLEVKNSLEAALKERHPNAKVDIYCDLVDITDKRWTKSIEAAIFGQKFNFFVDELFYEEASKLLSEIARKYNFYNVSVIDSEKLIERNFEPKPGSVAEVIKTSHDGARAYTNYLLGGIKRCETFAEARESGSGLLPNCTGYRGFGSWYLNQKNAQVSFIGTRVDENTMFNKREEYNEINKYFEIYASLINSLLELSSLDTMSNNECNTYVSDLIERNEIEALENNASRLDEQMKEGSLGEVKEIDDKISRLDMDIKDLEKEREEMFVERGSISSELDRLTKITIPATENSLKILAQKLASYDPTFVNEVCVPFFENAMKKIPSLDNIKREANSSFIKMQSRLKNLKDKLFNVRSIYTATYKLSYDVTQEDNNAEFDRDYDSLSQVELPSYEQKINEAHQKAIKEFKDDFIYKLRTSIETVKGQIDELNVALKDVRFGRDSYRFSVQPNRDYIEYYYMITDDLLLNVGDAEDQFLVKYKDIMNNLFNLISDSTSDKNADERSQILENVAKFTDYRTYLVFDLLVKRGNVETESSLARTFKRQSGGETQTPFYISILASFAQLYRVTQKDNTSRLVIFDEAFSKMDGTRIKEAVGLLRSFGLQAILSTPSEKLRDLAKDVDLVLVAVHDVKKNRSYLDKYKEIEKR

SEQ ID NO: 32782 - protein, 477 aa, Clostridium sp. CAG:307
MDIFDIIPENFFSILSSKNKRLYASCLIEAFKIYETGSILGTDKKLLADELTNFLENSNLAFDKDEDLDDEDANEASNSKKSLAYYALRKIEEAGWIYVDVNADYEEIVNFTDAGITLCEALLKVAPQYVYNDSDDYVDDLPYLNPNEYNGYIYTIYSLLTNPINRDYPLILEQVYSNTRQLLRAIRRLDSRMKDYIQTVVDTSEIKDLIGRLIDYKNELLDNGYVKLKTGDNINKYRLPIVTKLEEYEQNEAIMYTLIEDYKQKYRTLDDPSHRVYHDLDDMIDVFNSLDSFISEIDYKNKRYIDSTIGKIKFLLTEDDNITGKLNTILKYIKLEGKANHMDLAINTVQQMFTLRQTKTYDQESSLYAPRGRYSRIDNQMLDLSTFDFDESTEEYLREYGLPYEEKEIRAFFNKYQIDGEMLASNVCHPNTDLDTVMMLIYTLIYACEQSWDVTKLDDEVKHYKFTFTNFIIKAGE

SEQ ID NO: 32783 - protein, 195 aa, Clostridium sp. CAG:307
MLDSYERLTNVQKATFKDIANKLLASTFLARDKKDNKDNYYFVVSYKEVFDEFFAILGYEVKLDQGVGSIMLKSDQNTGFLKLRRDETIILLILRILYHERLKETSLNENVVITVLDIHEKYNFLEIKKRINKTDLVSALRLFRRFNLIETIGDITMSNTKVVIMPTILYAINTEEITEVYNTVSRIVSEAGDEE

SEQ ID NO: 32784 - protein, 1086 aa, Clostridium sp. CAG:307
MKKLTKIRLINWHYLANETINVKNNVLLTGPNASGKSTILDAITYVITAGDTQFNLAANEKGKRDLRGYIKCKLGLEDKEYLRDGNVTGDICLEFYDETEDKYFLVGVVMDAFGDLTPVKSLFYLASNTRMNDQYFVSDDNHIYSTVEFRKTNSSFEYFLSKRDAKRGFRTAFGSINEDFFRMIPKALAFKPISDVKEFIYQNILEEKQIDISPIQDSIRSYKNLEETLKVIKAKINDLHDMQELYNQLLSVNEDKKYLSYLLKLFELENYDSKKGDLETQIAIMNERRESKLQEINRQDTYIESLNERSKELYKVLSNNDDFKAEEYVDKQINQVKNELREYDGVEENYLKRASVIKDTINRIRHENDSPLFKEFANVPLSNIDPLMIQNTKQELIKYDKEFQDVINENLISTGKLQSAKDEKVKEMNEVRNAIASLGQNRLNYSPDVLGIRQDIVEGLKRKFNKDISVHIFAELIEIKDKEWARTIEAYLGNRRFDLIVEPTYYDDALEIFARNKGKYRSYGLGLVNTQEMQRFKDYSKNSLAEIMDSINQDARYYINFTCGNVIRCDHEYDLKKYQTSITNDGLIYRGFVVRNMNLNVDRFIGKSALGEQTEYWNSKGNVLKTEYYEINNKLNVLREQNEALRSFDLKSLISSLDKVLRFNELSRQLSELNVKKASIKKLSVSEIEEEYQKTNQLIKQSDAKKMLAVSEIGSIKSTIETFERQIKDLDTNKVLIQKELGELMADNLELEVKAKDEYKDLVAQMAVPRAIDDVNSRMSKCDQNYDNLADGLTNKQMKYINTYASNLALGTSEMPHYLDELNKLEKSTLVEQEEQVRKARETAEIIFKEDFISKLRNNIMTAEAEISKINDTLKSIKFGRDSYEFIFPKSSQYAAFYDMFKADSISDGRSIFNYDFEQQYNEQLDMLFTSLASDELNSNGAISKFTDYRTYMDYDIKIINEFGESMLYSKVFKEKSGGETQVPFYVAIIASFVRIYSQNKTANRDSIGLVIFDEVFDKMDANRMKSMMDFISTMPLQVIIACPPQRTAILQNYADTTLVMMRKNNHASVIPFETNDGYDVGREAN

SEQ ID NO: 32785 - protein, 502 aa, Alteromonas mediterranea MED64
MVARIRWQGKSYEEGALRFHGLQAKYRRLFAEHAAWKLLRADNAPYILAFIADLFSEESEIPYGRARVMLDAEIVRSRELGIWSTETSAATYLNQWIKNGWLREMDDSLTKTDASETAFRFCKGLDERNSGTTASHLRIVQEAVRDLAVAISPNVDERVALLESKKAEIQNEIDALQAGVVPELSGVEQKERIREIYQLASVLTGDFRRVEDEIRVLDKELRVKIIEGDASRGDILLSVMEKEALLSTTESGSAFEGFFQLLCDQNRSMEFREQLRSILNRPVAKQLSGSQQQFLNQLMRELSRESERVFRIRRRTEEGLRSYIESGAAAENQAVDRLLSKLERQAVVLRDEGVDLKTETGLSLPVGPIEIKSPESMRLRNPDDKLDTSGVEEKANSREPSSHVLDCLDAVQVREIAHKTFDSLKEHGPMSIAGLAAKNPLQSGLEELVAYLRVAKAVGATALEQKETVELMDKQGVMLKASIPTYLLTLDLFPEDIDELAL

SEQ ID NO: 32786 - protein, 310 aa, Alteromonas mediterranea MED64
MTNNSSPNSFFSLVMDKEDDNESESKPGAKEGIADNMLVKEEAQNSQVSTNVAGLVESQLSENEALATSVIHSDSAVQSETMPHDARRVLVYLMRQGSVMASQKSKLFELLCRHESAIRKHLSEVYLRLVLDQKTGVAFVAGADYQNDVSDINVEPGSEGNSENQDDPELDESTTLIPKRTLSLYDTLILLVLRKHYQDRESAGEQKITIDIERLESYLTPFLPITDHASKDRKKLLARVKEMVKRKVLSTIRGVEERYEITPIIRYVVSASFLESMLAEYALLAQQIEDAAVQESPLNNNGGEVGENNE

SEQ ID NO: 32787 - protein, 1127 aa, Alteromonas mediterranea MED64
MNDVATTPADLFAQGQIRLAELSVFNWGSFHGLHTASIDSDGTLVTGDNGAGKSTFIDGLMALLLPAGKATFNVAAAQGDRSDRSLLSYMRGSFGSAHDGSSTRVKSKREKGVVTGLRALYQCEDGSSITLAALFWTAASTNTLSDVKRVYLVAKRNMQLKELLDAFGDGNTKQLKQWLREDPAITDCDSNFTDYQELYRKLLYMDNKNAPALLSRALGLKKIDDLTKLIRELVLEPSGVKEDAKQVVEEFSDLVAIHEQLIDAKEQKTHLSKLPELAESIAESKLALEKLHLQKEHLGVYFGEALSILWTNKLNDLNEELESLRRSIARAETEENDAQDSVEKRHEEYLNLGGDKIESLEKDIEHAKDKLNSVIQASSNYQNDCRSLELDAELNEEIFISNKREATLKLEKIEDDTKQSQDYFGEIAAQLSERQKSLNEIKDEIREIEARPDSNIDVRYQQLRDELIESLNLSGDELVFIGELLDVKDDEKAWQGAVERALGGLRTTLLVPQKDYSMVTRWLNVRHTGLHVRAQVVANRSSNFTEFNERGYLRKLVWKEHPYRDWLKAHLNKFDLQCVSGTDELDATPFSMTKEGLVHLDRGRFEKKDQRKIDDRRSWSLGFSNKSRLVLLNSDKKEAEIRLAELAATLSEAREALNNNAETAKLWERIDGYSWEQVDAPYWQKRLETVKADLERLEQSGGNLELAKSRWDAAKKLLLDIQKNKEQLKKDEGALETRKDDAQRQAEKYRLLASIGMSDEVRTLLSDRIGVVTLETADQQSEFEKTLDSELEKVRSSKNTAENSANGIMGSFRGKDKWQPLTADWLTGLDGLPDYLEHYSYIEKEGLPELIDQFKERLNRHATQSLARIKTKLESEREDILERIDTINRVLKRTEFKQGSHLKLGSKREKYPHVQEFERKIRSALSQATSDDHEARFNLLAEVVEILEKASATGTSSNMESLRLLDPRYQMSFFAEEIDSQTFNVRDVLESSSGKSGGEKESFAGTIVAASLAYVLTPDGYDKPIYCTVFLDEAFSNTAEAVSRRVLRVFKELHIHVNLITPYKNLNLARESARSLLIAERDPELHESHLCEVTWEEIDRRMAEKKRSAIGASLHDEITAEIDLVRT

SEQ ID NO: 32788 - protein, 434 aa, Alteromonas mediterranea MED64
MSTSSKATWGLLPEDILIMLKNKHWQNSRNLKSLLSGGDSFPLVVPLKPPRGNAAIQNIGHFQNFISSWKSFSQDSINGADQERGDPKSKGCKVIWEKRNFRSLAEQDVPTHLNISDIGSLACMLGSDEELQLQDWLTKIRYIFESLPSQLNSHKASSQEGSSYYGNSDQQLFQVLIDHLETLNSFEQDDLELLVKLLPQLQKGMGQGCYLRALPVTFVDTKFIEKNLRIIESVACALLDGGVRNTGLMAWLDCKEKPKDWLLVKPLCDESRSKLGGLPLLRLSSDTLQDFELPARNILVIENEQCCLALSNIPNTIAVSGGGKNVSWMKAGWLVDKNVGYWGDIDSEGLAILSDVRSRLSTITPLMMDEVTVKTFAERMVQESDSVSRDPIALTDNELALFKRLRSGYFANKRLEQERLPLEYVTQHIRDWIE

SEQ ID NO: 32789 - protein, 335 aa, Burkholderia pseudomallei MSHR305
MRGCRNALEAALSERGDAHDLVDAYEYAEKVIEDLADGIDYFQELVRHLMQAASAHTQWNEFVDFLDRFQRDYSKQLTADNATLNRQAIRQKLEKLRAVPEAKFNRMDAQLRDIAHWMAKEYTGSSLYDWLLGRIEDIVDAACESKQPGFLKAMETYLKRVNGLALQSMMLRSGQTRHAYLAAVQKVAESPKLEQDRLLKLVGQFLAPAEVRVLDPASFKLKTATQRRRAVTVSIRPRPTREERLAAAMARAEAEVFSIPNEDVAQGLRADLRLFQHPIRVSAMPTASARDVIRAMQAVEAARSAIGGDLIVKKLPTRLENEFYGANDYEIDLKK

SEQ ID NO: 32790 - protein, 223 aa, Burkholderia pseudomallei MSHR305; identical to SEQ ID NO: 30855

SEQ ID NO: 32791 - protein, 1210 aa, Burkholderia pseudomallei MSHR305; identical to SEQ ID NO: 31063

SEQ ID NO: 32792 - protein, 377 aa, Burkholderia pseudomallei MSHR305
MIGASLWLKSMPVQELLNMLVDRLDAAEQRGSTKAKSVQLDERTWPALYMSPVESQKEHLWEHVVAMVRCGWLAVKPETALKSRSGYASSPRVSVVDQRELRAAVGRQERVKSSAERWRDAVSSGLLASDTVKRLVSEYCIDIPGRTMTEVVEQLNRLPALAEKSMLLREVSSQLFWGMSKVLDKRQGLVAAILGMDDCPFPESPIQLHVFLPAGGHRGVLFIENSVSFECAMREPRGVFGELALVYASGFKGSAQRLRTTEGCSLFYAAGGGLERDLRATFEGWLFGRQEIPSYFWGDLDFAGMRILAAMRATFSGLTAWVPGYAPMLTVLKGGGGHPPEAADKQGQKPIASTGCEYADEQLVPALQTFRRFVDQE

SEQ ID NO: 32793 - protein, 467 aa, Salipiger mucosus DSM 16094
MTNTTSSGIEHIFGDLHPDAFKLFSGPQRHFYARLLEHLSEELFEDAGLSPRGEVIAAIKEFCRQHADLDPEAKTDLGVRANATYARLLETGWLLEQRTGFQRFTDIDATARLLLDFLLDVKFGRLRSYGGEVINVLALVESVERDPQARSEALRGAAKASRGFLNHLRGLSASMRKAEELIATRASFADLFESFFTDYVQRHLISDYKLLHTRANPFRFRVRILSLSRRMLEDDFRIREIAEAYVREGKAADAAAGRKAVIEDLRTVIRVFSGIDDYLEVIEETNRRVETKIRNTIRFLDTMTETNTEVLEDVLRKVGATADDVTMPSDEASGTRLPEGSAHLFAASAKRPEIKPTPIQRPRKSDAQRAHEAAILAYQERSRVQPDRIDAYLRAHVEGQGAVEGRELPISSLDDFFVFERLRSLDYLGGRLSDDWEISDCPGTVENDWIVCRNFLIRPRGQQQKVH

SEQ ID NO: 32794 - protein, 215 aa, Salipiger mucosus DSM 16094
MELREFAQVLDKSDDPEALGEAIRIAIQALFFHQVIYDDTHSVPSAAVQAIKEHRGFFEKYFAVAGYDLEMDARTQMIALKPQERDKPPYAWRLMRLKKDETLIRIALRYLFEQGFVDGKMDGTGRVETDTVEISETYQRIAKSAPPGENHLVDTLLRDLTRKGVLRIGDKDRETRVTRMTILPGIRVLVSDGYIERLRDWLESEQATPFLEKAS

SEQ ID NO: 32795 - protein, 1139 aa, Salipiger mucosus DSM 16094
MYELKRISLHNWYLVDVLDIPIRDHAALIGQTGAGKSSVLDAIQTVISGNNRNVLELNAAAGAQRGRSVRDYALGCVSDVNEGKPRRERCETTLALTFHDRDLDRHMVLGLLLKAEQDLSEQTKRFIIEGCDFRIEDFVEGGAVVSHEKMLARIRAEHGEKAISFHQNSTRFVNAYLEKMRPSAPPDAKRFLRSFANALQAREMSDPTDFVRRFVLEPLPLDVAGVRSSISIWREMSAEVERIEGMASDLTTVVRKFENGFQISAMEAEIDVASHAVDQAEQEIELGRMRDEVTQLTAELASVTARQSDLESETGDLQGERDGLRQKLSENDASSELAHLDSERRLLEERKSVFRQKVELGLQPFADLRHLKSAAGIAPVAQRVAEAGAEVSRIVSGKSAEEWVSVAPEISGHLNKIKESSGCLDAIHEELEDARERVMRLRADIREHGDDGRVEPGAVLSRQVRAFLADLKDAGIEARCLPDLVTVSDQSWAFALEAILGPNREAVIVDEARLDAAFDLLYRNRNTYDGVRLIDQRRLTRMQPRVTEGSIVEIVSSGDPVIQNFLEFNVGRYARAETEEELRSLSSGIMRNGKTGSGATLRVFRDRRPILGKTAQKATQGELALEVEEKREQLEDTQATVRDLEGAQQRLRAVLMVDPEEILNSMDSLRSVLVELRSLAQRRSAISAPDTADLDERLRKIDDRLNVLKSETQELEKRRRTLDVQCGILNSKIEESQDRLLEFGRRKSEVEAEAASRVPENVSALIETSGYDVPVTTEELAEILKMPAAEASGKVAVFRERIADLRAEITRDGSANAFLVRGNNGLMAYAQKWMVEDAPLGEDSENADRFVWAHAQLDRLQNHELLQYRERLERARAEMETSLTEGLIGRIGEQFALMEEQLDSLNRRLAKYAFVGQTYQFRSAVSAQFLPIYRLVTAEIPADQSVLDVADDESLQALDALLEGEGDDVRKYEDYRNYFNFELFIEHPDPEDSTRIVSTPFSSVMGKLSGGQRQAPYYVAIAASLVSAYYPKASAGDFEGMGLMVFDEAFNKLDIPNTQRLMDLFRSLGLQVIVAAPEEKRSSLIECVDSVISVSRIPGSADVFIDSVAIGARAKERMFAENPVHQPTEAYEGTLPAGE

SEQ ID NO: 32796 - protein, 483 aa, Phaeospirillum fulvum MGU-K5
MSLFGHLDDTAFLIFSRGNRHLYAEAVLIVYRQFFSGTRIVVPLRDDVVETLARLVRQRPELWQDAEEIEELPSGRGRKPLPLPADEIGRKAQHVYGRLLRCGWIEEEPHGFNAVVEMPSAAMALADQFDAIERGLPQLFGGVVVDVKSSIEAIALNPSANALGLPEAAANAVRFTRRLRAILSSLRAVQRTIMASPDIKTRLDTFFEDFIGRILIADYKATFSYAQHPLRFRADVARMARAHAANSALVEDIAQAYVKNGVSPDVATARREVFTQLDTIAEIFEGMTSFVSRIEEFRVRLERRLRNTIRYMDRSDDSITARLAGTMRRLDRLRTRAEGHDLDLEAPTLLTSRPRLFSPDGLAEPRTAKAPIKPRPVQRAEADPVEDFRDLLVEAFEGMLEPDEATLAAFLDRTVAPGQPTEGRWLTPSDLAGFAAFDTLVERLDEPGAGEIDGRYRLEPAEGRHVSAWTDAPNFTITPAKES

SEQ ID NO: 32797 - protein, 242 aa, Phaeospirillum fulvum MGU-K5
MPAILAELAAFEEKVAAAKGQAAAERAVETLRRALNVLLDRQFIYNGDRGMAPLYESLLRADVRQIVEGVLDAFGYALVVETTDQWIGVVPNEGGELHGARLRIDETIILLLLGLIWQEGMNTGLSEDRATVPTTSEELFARHAAILGRERIPRARFQDILLDLRRRALVEIGEEDPETRDVILRIRSTIRLVSGEAQVQMIERFAQESDRTLDGLDRAQSAREAGLADDDSTGTDDEDGEA

SEQ ID NO: 32798 - protein, 1152 aa, Phaeospirillum fulvum MGU-K5
MYELVNVALIDWFLLGRQDIPMRGAIGVYGENRSGKSTLLDAIQTAMLSNDKNALQLNAAANPEKKRKNRRSVHGYCLGRVGGAGEAPLRETARSHIALAFRDPVDGRAVSTGLIFEARQSETREDTTARWLVTGLTVDSSDLVISGPDGDVARTWPELEAHLEARCTAEGGALRVYMSPSEHIGDMLHFCSQSGQHGGIDQFRRAFANAVSFETIDDESQFVRTYVLDRDPISIRGLRESMRNYREIADTIRRLLQQVKDLDAILDAASTHATLVEEKFNRAWMLRRARVLIALREVRKHRKALRRAQSDVARLKRIIEDGERQTLELREEKQGLERSVRTSEVAGELARIELALEQAKREMAERLVPVQQWELAVTRAATIPGQSGAALDMLRERSPALLTALATLQRLTGADTVPVWPADPKAMVHVIDQLPDLDSLCRMLRDLADESLRGLGNQEVEDLRRRLEAIDKTGAAISLETGAFLLDLEAEGFAPKLVCSEIELLDPDWRDAAEAILGRDREAVVLPPDQARRAILMLRQNRHSGRYRGCRVVNTTRLESGRAQKGTLAAILRAKDPLVGAFILHRVGNVRLVETEAELQEGGRAVTKDCAYCDGLVTEIRQPGERKIGVDASGALRRELESRLRQAQDAQTETRTLVQGLRGLAERLTPLAAARAQPVGLIDAVLDYRDKQRQIDGLRGQVTRLRDYVNPEISSRIEAIDRDLLTLELERSGDPDGLDSDSRKGAKRLLEEALRAEGTAMTGCNSGLPELVVALNSYREERSRVLFAPAMELWRAERARSRGALPPIARACDERLAVLAEKIPSANKAVFGLIFDFRRTSQRDLGFTMESSISEEIVPWATRLRSDIADKDLAQHRRRADEAVDEAQKLLKGNFVNMLRDRFERVTNAIALLNNVLRQHAFHNERYRFDVEPDADFAGLIDLVAAATQDEMILLPLFGGAGIEASLHAESLKMIEAILMEDDLDYSRYEDYRNYFRFNLVMTDIETGKATTFAHRLGVGSGAEKQVPFYVAIGAALASAYHNGIYAASKPGGLGLALFDEAFMKMDPKNQREVLHFYREIGLQPVLAGPKGGKLFMQKYMDTLVKVARPSYRRMTITVTHPGTALKEALMSEDPSEWSRERLERLYASLRP

SEQ ID NO: 32799 - protein, 371 aa, Phaeospirillum fulvum MGU-K5
MAKVEVTSADQAFDHFLSAHERKPDRIRNLHVYPDYHGMGSDLACHRFNQRMEEAETANGGVELTWKPIPAKRYIERVTLRNADALYALLGRQQPDPSALSPAVLTVLAEAAPSSDEERAGWIAIARAVEADWPTEALPALVAELTRIRAEPPDRPAFLVSAAGPLASSKLLDRLPQAALRRIGIRPEAYPAPPVVLLTAGAARPEAVILVENPRAFERAFSITRDLPVAWISTHGLVATSVARALDGAWLGAPVDGTPPPLDALLATPNLFYWGDLDQAGLMIFATARRRLPRIALSALYRPMVDLLAKGGGHPYTEATDKAGQRSWHSDDPLLQSLLEACAISCVDQEWVAPALIRDLCALPYHPAGPV

SEQ ID NO: 32800 - protein, 498 aa, Corynebacterium maris DSM 45190
MSEVQALADVHALLRLSEQSPAWAILRAQNAPVILSVLGNVFPVGNQQLAGTEVMLAADPVLADIREQTGLDLPRSTPAYVNEWVKAGFLVRRSPQGTREEFYELSPDTLGALEYVRQLASPQRSVTRSRLSTLTGRLSNLAVETDPDEATVLKRLEEEKARLQARIDRVREQGAEAITDDEAVEKTREVLALVADLPTDFARVRDDVEQLDRGLRASILEEQISAGEVLDNVFRGVDLISDSEAGKAFNGFYELLFDREQSAQLDATLAAVLSRGFIDRLSADERTQLRGLVQTLESSSDDVHDSMTGLSRSLHRFVQSREAESQQALASAINQAQQLALKTGQVMSDPSRSIGVELELTTRQPRSLSTWRLHDPADYRITADMDVHEPTEIDLAAMRERIRESEIDWAELHESINYALTRQAEPSISEVLGHRPATQGLASVVGLITLAHRFGERSEGTEHLHWVGADGRQLRARYACHRFPDPVSTPRSIHERHH

SEQ ID NO: 32801 - protein, 199 aa, Corynebacterium maris DSM 45190
MSDTTKLYDGDTGTLTGPQRRALAELIRGPYVSSLTKPEIFRTVSDSRAVLAQQLDNLFLTLVVDDAAGVAYTRMWDADVEDRRALLRTMSLSFMDTVVLLHLRRELMNTSPNERAVVDEDEVFEATRPYQGAAGTDHTAQQKKFTASWNKFKNNSIVVKTPTEGRFEISPVLRIIFSAEEIAAVTASYDTLLAEAEEQ

SEQ ID NO: 32802 - protein, 1127 aa, Corynebacterium maris DSM 45190
MNDHTTHDYAGQFRLAEIQVHNWGTFDGLHRVPVARDGFLITGPSGSGKSTLIDAVSTILVPPAQVRFNAAAGASGGQRSGRNLVTYCRGAWRREHAAEVDELTQSFLRTGPVWSGVLLRYDDGAGQSVTALRLMYLSADAHSPADVTNLFVLLPRTADLTEFEELARGGLNITTAKKQLPDALSVQRTHPPFVTTLRRHLGIVDPGALQLLHRTQSAKTLGDLNYLMRHFMLPEPDTFKIAATAVENFTQLQSAHQSVIAAREQVEQLRPVRDADRELTEITRQQTETEADSAGVEQYVLDKRVAFAEAERDEADGEITALTAARHSAQASLESVEAELETVRAQIHGVENAGVIHARAKVDDAEHTVRRVTAQAQRFTDLSREIDAEPPQTAEAFADFRLQVTDHCADLAEQTTTIGDRRPEMYGRMAEANQRLEQERQELQAIRTYRSSMDRRLLTAREKLAELTNLRQDDLPFVADLIHMRDGEHPWQPAAERVLGGFARTLLVPEEHYAQVAAAIDATHLGAKLQYVRFTPELAQARPGRITAETLASKITVRAGRFHDWLQSELSRRFDHLCVDTMDQFHAAQRAVTRQGQVKRDRHRHEKDDRSLIDDRRRWVLSGDVDDKIAELQRSIRGLEEQLTRSTQAKDELESAALAVSAQLTAAKRLLETEEFALIDVASAQRSLAELRRTLDELTDENTELAALKAAERQLVPAVRAQREKLDEINTELGGHQRGRRQAEALLAELGERMADAEPLSEEVRSRLAARFRRHTRKLRADNIDTWQHTVTDELGTERARLTQRASKQENIALNAMAAFLRRWEERKGDLVAEQAWRPDFIRELERLEADDLPRFEERFRDLLREQTRTHLSRLLKNIRQAASGVRSSIEAVNQSLADVEFYPGTYLKIEVRDAQPAETRQFVAKLTEVVDGVLAEESLAGSEQRFLTLKEVVGMLSVSDETSERVHRLRLDTREHVKFLGVETAADGTRGAVYDSAEGLSGGQAQKLSSFCLAAALRYQLTGAGLPAAQARASTVDVDEKVYPKFSTIILDEAFDRADSEFTRAAMDAFRQFGFHMILATPEKLLQTVQDYIGGLVMVDSPDRRHSVTSQLTIEEAGGETADCGR

SEQ ID NO: 32803 - protein, 486 aa, Mycobacterium abscessus V06705; identical to SEQ ID NO: 30761

SEQ ID NO: 32804 - protein, 249 aa, Mycobacterium abscessus V06705; identical to SEQ ID NO: 30762

SEQ ID NO: 32805 - protein, 1115 aa, Mycobacterium abscessus V06705; identical to SEQ ID NO: 30763

SEQ ID NO: 32806 - protein, 495 aa, Corynebacterium glutamicum MB001; identical to SEQ ID NO: 30443

SEQ ID NO: 32807 - protein, 212 aa, Corynebacterium glutamicum MB001; identical to SEQ ID NO: 30444

SEQ ID NO: 32808 - protein, 1111 aa, Corynebacterium glutamicum MB001; identical to SEQ ID NO: 30445

SEQ ID NO: 32809 - protein, 368 aa, Corynebacterium glutamicum MB001; identical to SEQ ID NO: 31239

SEQ ID NO: 32810 - protein, 486 aa, Mycobacterium abscessus subsp. bolletii 50594
MNDLTVEELFAHNDDVQKSRAVRLLAAKNLAPYITLMERHLDRSAKVSEPQLVAKLDRDLSAVGLGEQSGLALIKSWASDGWLHRASDGTGPDAENVCSLTEDARSALAFVRRLRRADTVATGGSIAGIAAGLKRVATQLDGDPSRLRADIEAQIAELQTQLHAIDDGYRPEPDIVDLEDETRAIAYQMEQVITDIVRYGSMQNEITAGLIDAAEDSDSGFRDRARRMFADYDALFDSRERASYSAFTRTIQDPDQRAALRSDIACVAEGLPDLDPGLREVMRNFFKLVSQQIAEVSRIEQRCAQRIRRFFAAGTTEQARGRARQLNDALAAGHALLKMSTADSPIDAELPIGRSAAAAIGALSFTIKDTAPPVLAQDAPSGPLDLSGFSALATQVDMAALADTVNSAIAGGPVSLPDMISHVEAPYLGDVIVLWSLALKQDNTADRESVKVKFRSLDGQDRVMEVPQLMFREPVLATLEEEGSTL

SEQ ID NO: 32811 - protein, 248 aa, Mycobacterium abscessus subsp. bolletii 50594
MTTQASGTALGNINFDDLPGVEPDASAPRTAKGPRFDGDTSELPDKACWALQNLVARRYLSKDGQPELWASMIEHRKVLAARLSELDLRLRVFDDLEVAYAEPAPLENPSVYGARVLRREPLGTYASIVALHLAKIARTAHDEHVLVSRDDIHELFANVSHDIDRDEAMLRDRVDEAIKRLSKAEILQRTRDDEHSYTISPVINALMSAQMIEALQRQYEQLQRGAAPEDADGADPTDEEDGETDDDE

SEQ ID NO: 32812 - protein, 1115 aa, Mycobacterium abscessus subsp. bolletii 50594; identical to SEQ ID NO: 31838

SEQ ID NO: 32813 - protein, 296 aa, Photorhabdus temperata subsp. temperata M1021
MNKDRGTPATLGKSDSDPQKEQQTGFFDQLIKHHTQSEYNPLTDTTGVESAVAANKSSSVEVDDVLVSDHPESSNSGMPPDARRVLVSLLRQGVILSSQKAKLFESLCRYQCAVRKHLSEVYLKLVLDEKAGVAFIAGFQNEEDTESLGIDGEEVVSLISRRTLSLYDTLLLLVLRKHYQDRETSGEQRIIIDIERIESHLTPFLPLTNSTKSDRRKLKGALEKMVTKKILSSVRGSEDRFEITPVIRYVVSAEFLESMLNEYLKMADEKGIELNKNGSNAVDYQDGEEETGDEND

SEQ ID NO: 32814 - protein, 1134 aa, Photorhabdus temperata subsp. temperata M1021
MKMTDQTLSADSLFHVGQIRLAELSVYNWGSFNGLHTALIDPMGTLVTGDNGAGKSTFIDGLMALLLPAGKATFNVAAAQGDRSDRTLLSYMRGSFGSAHDGAGTRVRSKRESGVVTGLRALYQGDDGSKITLAALFWITKSTNVLADVTRVYVVAKRDLTLKEMLDAFGDGNARSFKQWLRDDPALTCCDDNFSDYQELYRKLLYMDNKNAPALLSRALGLKKIDDLTGLIRELVLEPSTVKDDAKKVVEEFADLVAIHSQLVDARAQQVHLSRLPELSSIIEKATKEFEKLTVERNSLPVYFGEIFAQLWSEKIADIEAELEALSLKIKQAEGQKVDADKLVERRHEEYLQFGGDKIESLRKEMGHTQDQLNRVVRNSSQYQTHANELALPSVLEEAVFLKNQSEVSARLASIQRDEEEYQDRFATISAKFSELQANIHDISQEIREIEARPDSNIDVKYQQLRDELVNSLELSKDQCVFIGELIDVEDHEKIWQGAIERALGGLRTTLAVPHHCYSMVTRWLNARHTGLHVRVQVVNDAATNQGQSAEFKPDGYLRKLVWRTHPYREWLKRHLQRFDLQCVSNTEELDQTPFSMTQQGLMHMDKGRFEKKDQHRIDDRRRWCLGFSNKSRLAILNNDKKDLGLKLEETGKKVSQARQDLNAVSDRKILWEKLQSYRWDDINAPYWHEKLSDLQADLKVLEQSGGDLDKARERWESAKEQLAQIQSALNQLNSDSGGIKNTLRNAQEEWNKARAKAEKGLPDAARQLLAIRVGVLNTNDLSRMAELVSKVEEGLDRLLDSSRNNKDRAERSAISIMVSFRSNDKWQVFTVDWQSDIGSLPDYLNHLRQLEEEGLPNLVEQFIERLNKHATQSLARIKTKLESEREDILERIDIINRVLKRTEFRSETHLKLGSKREKFPHVNEFEQHLRKVLSQVTSDDHEARFRQLAKVVEILGKASAPGSSNTLESLRLLDPRYQMSFYAEELDINTGEIRDVLESSSGKSGGEKESFAATIVAASLAYVLTPVGYDRPVYCTVFLDEAFSNTAETVSRRVLRVFRELHIHVNLITPYKNLNLARESARSLLIAERDQENHDSHLCEVTWEEIDRRMGEEKEKKLVAEASGLGIELEKLI

SEQ ID NO: 32815 - protein, 398 aa, Photorhabdus temperata subsp. temperata M1021
MKRELNGVRWGLLPAQVKKLIKQREWDNLSSLKARLLGSKVFPVRVGLKPPRGSSAISDMVHFQRFVEEWKSFPYQDHVEWSSKNFRELSEQRIPTFVVIESMQHLIQFLGNDALSRSKLWERNMKPFLRIDKDLYPALVKCIDIVEKLSLRDAELLAKLLPQLEQGLGEGQYLRALPLIGIDTKFLENHQILIEELTDVIHKGAVSAFGGLTAWLGCLTNPKGWLTIRPLCHTATVAFGGIPILQIPGELLKQHELPASNILVVENLQSGLALPDMPDTVAVIGGGKNIAWMDAAWLKDKRVGYWGDIDSWGLSILSDARDKFVDIKSLMMDVETVKVHEDRMVPEPNPVESNPSSLNEDEAKLFNDLISGRFHSSRLEQERLSSDYIRNKLIDWLS

SEQ ID NO: 32816 - protein, 474 aa, Peptoclostridium difficile P28; identical to SEQ ID NO: 31145

SEQ ID NO: 32817 - protein, 222 aa, Peptoclostridium difficile P28; identical to SEQ ID NO: 31146

SEQ ID NO: 32818 - protein, 1093 aa, Peptoclostridium difficile P28
MLLVNWLYYEKTILSFEDIVFLSGKTGEGKSALIDAMQLVILGRTDNSIFNKSANDKTTRDLMGYLKGKYKDGTFKRDKGMFSSHLCMEFEDEQHRIYCFGIVFDVNGPTRGDMEHCYYMMNQPIPGHCFTDEGTVFNIRRMKKLLASFQDRSCRSFTTHMDYKNYFRQRMLIKDQRFFDVFKMAVAYTPMMNISEFIVKNICQEEEDLNLEEMQEEIQDYRQMKEQLETVQQKKAQLSLIHEQYTDICGEQERVANLRVEQKAAVYHGMLVEHDEAAAQYEVYTKSYQKLTKESRETEEQRALLEQNMEALRDARRDNAADILERKIQAHLEQRNTLQRDTTAVQQQLVTKGEFLKEQIEQLEEIEDYDGLQLEDFDLSGIKLAIQRSVHAAQQLAAFNMEAYMDIQRQMRDIENTLSTVRQTMQNSLQTCREEQEVLAANRRALEAGKKTYPKKLLVLKQELEERLYQQVGKPVEVCILADLFSIQEEAWTNAIEGYIHNQKLNLVVEAEYFMDAYRIYRSIKEEKKIHTYSIVDIAKAKPGKRPDAKTLYDCVQVEREDVRPYVEYLLGRVVCCEAEETLRSYPVSITSDCMLYSGYAVSHMNPELYKVPFIGADSIEKQLQELIIRQQKLTSTCRKLETVTRTLQAVQLQTVISDDFIRQLEDGLCKAKEVEQLEQKIKELRDAQTPESLQELLLLDQKLDEAKKKKNELYMLQVEQESRRRQLEGDMKLCNARIQELQQQVKEAKKPEQGIPDTIGAITTADGIRRKQKQLEEALRELNSRVENSKLELITKKTHYNDTFRIAFNPNFLCDDYEREYEKHSDNIVEDYIDKCRLAQQKAYECFQNNFFSALNSKIENVRMQIDRLNRSIRRHKFGRSSYEFVCTCNEDYREYYNLITNKELNGHNLLNTKVYEENEELIHELFDKISSLSSMQDPKKYQELQKEVQLLSRFTTYLKFDILENGNSLRATIGSSSGGETQTPFYVAVLVSLFSVYDAGNDGLQLAIFDEAFDKMDNERIEECIYLLKSLGFQAIIVTPTDKISNLSKVADATLIATTDEKNGQRVSTVQKWSQKENIAIPDSEMRREEV

SEQ ID NO: 32819 - protein, 489 aa, Stenotrophomonas maltophilia MF89
MKHRERIARYRHLREQPQWKLLAADHAPEIIGLLQGLLMDGERTLPSSVLNERLQRALDQLAGDELSRELPRTAQAYIAHWLAQGWLERRLPEGADQEQYELSTAALQAIRFADGLEQARVAATESRLALVIEQLSQLAAQTESDPDARLSALRDERDRIDAEIARVGAGRVTALDGKRALERARQIIGLADELTEDFRRVRDDFEQLNREFRERIIDDEGERGDVLSQLFEGVDVIGESDAGRSFQAFWRLLNDAEQSAQLDAALEAVLARGFARRLDRNERNFLRGFTSTMLERGGQVHDVLQHFARSLRGFVQSRGYLEQRRLNQLLKQAQSEALALRDEFPAQRGIGRDLQLTTSRLRSWSQWKLHDPRSAQVDGNVEYNDAAAISLESVGDLVASSEIDFRTLRRDLHDLLDAQPRLSIAQALSQREAPQGLGSVIGYLSLGTRFGNVVAGEQELAQWRGGDGQIRRARIPLVWFTQERRHELA

SEQ ID NO: 32820 - protein, 233 aa, Stenotrophomonas maltophilia MF89
MSWHEDPIEAPQADVAEDAYEAEPAATMAQPRRGNDVYYLGDTGRLPLDARRALCQLLIGPSIDQLRHAKLWPALIRSEAAIRSSLADLFLELVLDRDSGVAFTRQADTEDVDAPVLLRTSPLTFIDSVLLLYLRQQLAEADARGNRAVVADAEMAEALAIYEKNLSTDRAGFNRRVASAVQKMKDNHILTRLSGQDDRHEVSPALKLLFSAEDVSQLSAVYRQLRETPAAEA

SEQ ID NO: 32821 - protein, 1126 aa, Stenotrophomonas maltophilia MF89
MAISKHTPALFNEGLPDPRLQQFRMRRLQVHNWGTFNGLTEVPIAERGFLFVGRSGSGKSTLLDAMSALLTPPAIVDFNAAAREAERSGRDRNLVSYVRGAWADQQDSGTGEIATQYLRKGATWTALVLEYRAGDGRVVSLVRLLWISGNGTSAGDVRKHYMIAERPFDIAKDLGGFDLDLRKLKQKLSDLHHFDTFSGYAERFRDLLGIDNEMALRLLHKTQSAKNLGDLNVFLRDFMLDTPKTFDAAERLVSDFAELDGAHQAVVTARRQVETLLPARAYYNDLKEMHRRRGDDEALKLGVDSFRESRRQALIEARLREMDVRDRGLLGEEAQRRAALDNHTERLAELELQRRQQGGERIEELEREQGRAEAERDRRQAKREQARQAAQQLGAELPDDAHGFAELVERAQNELQDRQRASSALDDAISDRLGGKRDDERRFGEVRAELEAMQRTPSNIPAPMQKLRARLAEETGIAEAALPFVGELIQVRAEEQGWQGAIERVLGGFALSLLVDDKHYNDVAEWVNRTHLGMRFTYYRVRRNDDAFAREPSAKSLLHKLELREHVFESWLRRELGKRFDYECVDAKQLRNVDRGITREGQVKHPGDRFEKDDRSAVGDRRRWILGFNNHDKVGAFEREAQELAKRIASCETDIARLRGQRDRDNERRLACHELVSISWNEIDIAAPQQRLSDIEATLRDLREGNADLARLAKQIDAVRADIEQARRTYEDVRVERGQLVKERDRLDRARQQSRALVLPTLAQEQEAGLAERLQEQGPLSLETLEAHMRQVSNALNEQLSSSQQDLNRIENQLIGCFRRFIQQWPEESGDFTVSVASAEDFLARLERLERDGLPQHEERFFDLLQNQSKNNLLALQRHSAEARKSIGQRLDEVNASLEQVPFNRGTLLTIELSDRRLPEVAEFHLQLREVLSQQQTEQRELAESQFTVLRQLVNRLGSQEGEDKRWRELVLDVRMHVEFIGVELDAETRQQVEIYRSGAGKSGGQRQKLATTCLAAALRYQLGGADSQLPSYAAVVLDEAFDKADNEFTALAMNIFDNFGFQMVVATPLKSVMTLEPFIGGACFVEISGRHDSGVLLIEYDEEGKRLKLPERSRQQANEPEEAEA

SEQ ID NO: 32822 - protein, 487 aa, Microbacterium maritypicum MF109
MTGTRAEAAFSRAVTAFSTPTLDLLHGRFAPFVVASLSLLFTADRASIPIADAQAELAEILDELRGAGDDDDDRRVPAGTGRDVARNWVRLGWLVQQIDEDIEVYRLSAHAVEALEIAGRTGGGRTRVSNSRVRTLLDAVEHLSDSAEADPERRLARLRKERAALDAEIDRIEESGRADPLDDEELFEEAENVLHLARELPADFTRVAESLKLMQRDVVAHLRRDERPTGEVLREYLRRAQDVMNSTPEGRAFSGALRLIGDPDRIDALTEQLHGLLRQPFARMLDSTQRAELDAIGRRVELGVEEVLAAQRRASHVITGQVKTHDPLRDRQIDDLLRDVIAALHIWDGAGASDSPVRSLPLADLGHLRQTVSSIRPPAVPAPLADADDVEFADVDSRAWGGPRYAELEEYVSGLGPEFDLAAAFTQGADDTRRPVDLVGLLEIAHRNGMTEGEEVSVVEARRPDGSTRRFAFGAVTARNPKEESHA

SEQ ID NO: 32823 - protein, 220 aa, Microbacterium maritypicum MF109
MPEESLVTETPVEDPFIAPVPMEDDIEEHFAGDRGTLDPEIRRLLAHILQRRFIAAERNRREWALLLDHQHVIESRLNDLYLRLVVDHGRGFAYKQQLRSDEIDMPVLLKDAPYTRAETLVLVHLRTVYQRESAAGEASVRIDIEDLEQTVLSYFSDVDGGTARQQKAIRNAMDRLDREGIVQEETSGRYRISALVEVVLSAETLKELRDWLRSQEAVER

SEQ ID NO: 32824 - protein, 1119 aa, Microbacterium maritypicum MF109
MTMVDTLFGLIPAGSRGQQWVAEELQLINWGGYDGGPHRVRFSPHATLLCGGSGSGKSTLMDAYIALMMPHTTPFNGASNGGVTGRPRGEEQRNILSYGRGKIDESRTEEGTKLRVLRGDGEDTWSAIATTWIDHDGSRFTAVRAWYIPADARVLEDTTRVRATVNGAFDLGLLERAATQRLSDASVRATGLETLATDREFAARLQAVLGIGAAGSGAKAISLLARIQAGQQITTVDDLYKKLVLEEPETMATADAVVAHFDELESTRMRMLTAKQQVNALEPIRGIKDRIVSASERVRVIDEVGVFTDPTSLAALWNAQRRLDLLRDVEVELGDRSRALSLAVREKRALVDAADVEREGLLDVLRQSGGDRLETAQRELRVAERRVDDVRRERAKFDIIVRELGAEVETAAQFDAFAADVRGSAPKSEIRAARAAFADAESTRRTTEAEIRRLREEREKTSRVRGSIPAHLDESRSLLAEAVGLDPADLPFVGELIELRTEFEPWREAFNLALGGFARTLLIDVEHLASFRTAINSVRTPERLNYEGVHTGIPEVRNADPKTLPGRLEYLPTPFTGWLQQRLQDRFGYVCVDSSSQLGAHQKTLTISGQVSQGSRGAHGGQGRSNVLGFTNDRRLREIDEQLRRLTAQHEECASAAHEAEAALDRIEARSTSFAKIEDLTWEQIDVVTVEAERERWLAVEAEVTTASPEIAQLKRQAEELRARAARLRDEEARLGNELAQTQEQWGRVTDDVDSCQSVIDSAAASGLVLADGHASFLDSRFLHAETGGSATAAQRLTHLDTALRTAAQRLLDDRREAAEAHEQQRESMRRLMTGFLERWDTLTILPDPDASVGEFESILEALQTNGLHELETEWRDSLLKLSGNDLTSLDSTLSRSLREIKDRIDPINRIMEELPFFDDDHRLQITPRENQTEARKRFRRELREVRGLIDAAATDAERETVYRKMSRLIARMRRTAPDFAELIDVRNHVRVSAERVTAATREHVALYDHIGEKSGGESQELVAFIVGAALRYQLGDAGAARPRYAPVFMDEALIKADAHFTKRAIGAWRGLGFQLVIGAPNDKYSAIEPHVDVEYDILKDTRGRSWAKAKVGLPEAGV

SEQ ID NO: 32825 - protein, 480 aa, Arthrobacter sp. AK-YN10
MDYYAINALREKHAGWALLRAQNAPLALHFFMSAFTDPNQRNVGRQQLIDVLDDVLFGVRETYGEEKFPRNASEYLDDWAASERAWLRKYYVQGEDEPHYDLTPAAEDVVRWVESLKGREFVATQSRLTSIFAVLKTLVQQSETDPDVRLAELQQQRDQIDAEMQRIREGDLKVMTAPEALDHFQQLTTLAKDLLSDFREVEQNFRKLDRQVREQIATWDGSQGELLDSIFANQQDIGSSLQGRTFQGFWDYLMSPQLRRELNDLLQRATQIEALARMDNLHTITNLHQDWLPAVEQTQATVRQLSQQMRRLLDDKVFLENKRIMQLIRSIEANALDQRDQPPSNFAMEIEASSVDVALPFERPLYEPGSREMVMDDVVTADDQDLDASALFSQFHVDRERLKFNIESVLEEENQATLADITAAHPLSQGLAEIVAYYQLAAESDWASINPETTQRLHWTLEDGSVREAVIDQIIFVRPA

SEQ ID NO: 32826 - protein, 196 aa, Arthrobacter sp. AK-YN10
MNTASETSSPEELPGIVTKLFKGVVYAETDEKVWQSLLALTSQVRDYVAVLGLNLILDESEGYAFLRSREDPEGTLPRLIPRRQLTFDVSLLLVLLRKRLLEFDTNSSELRLIMTEEELKDMVAVFLPESSNEARILDRLGTNIKKVVELGFLRKLRGETGTYEVARILKAYVDAQWLEEFDARLADYRESLTGSK

SEQ ID NO: 32827 - protein, 1141 aa, Arthrobacter sp. AK-YN10
MSTDVQDSLFSLEEPSEEPSDEQANDGGLPPGFRLHRLELLNWGTFHGGVRTFRLDGANSLLTGDIGSGKSTVVDAITTLLLPANRIEYNKAAGAQKRERTLMSYVRGFHKSTRSTGGEYSKPVALRAPGTLTVVLGVFHNAVMDKTITLGITLWTMQEAGQPTRFYSLAEGEQSIADDFSNFGQDPAKLKNKLRAAGVAVHDTFDPYAAAFKRHFGISGNQAMELFHRTVSMKQVENITHFVRTNMLEDDDVQTRINKLISHFDDLKKAHEAVVRAKDQIELLKPIRDGAATHRKLSSEENQARRQRDQLHPWFIDQQLTLSLEHKEELERTGQKLREDSAQLASDVARLRHELAIVQEDIRTSGGGRLAAIDAEVSRLEESAKKQRNRFEDYAAAAVELGLNAPEDRVLFDANRSRLGEVEGNLASKAAKLQEQRTALHSELKELAARRDDLDAELGSLGSRPTLLERPQLELRRRICEGTGIAESALPYAAELLRVREGEAEWEGAAERTLRSFALSLLVSSEHYAAVSSWVDANDLKGRLVYRKVGDSYSSRPPAPGTLGAKIAIKQGTPFREFLLDELSARFDYMCCDTMDEFRRYPKALTINGQIKGARGRHEKDDRKGLMDRRTFVLGWDNHDKIVRIRAERDHIDGKHRSVGTQLAKVDAGLGDMGRLRQLLGNVGSVAEFSDIAWQLTARRVQELKDEKLELQSASSVLQQLTVKELEVSGRIERLQERSDKVQQRIGENTNAAKSIAAAIEECRLTLTEQPLTDDGDVLAAVAQLTAEALGDKALTYRNTGAAESSVRSSLTARIDALTKRIATAGATTIRLMSDFRHKYPNETTDIDATLESAEEFNRLLEQLERDDLPRFEARFKDSLTQNTIHEVVAFNAFLDSRRQDIVNRINEINQSLSEIQYNPGRHIQLEHQSSSDLDVRQFGIDLRACSEGTIGDDEQYSEQKYLQVERLIERFRGREGFTSLDERWTAKVTDVRNWFTFSASERWTETGEEFEHFTDSGGKSGGQKEKLAYTILAAALAFQFGLAAGKGAARGGGSGKGRSFRFVVIDEAFGRGSDESARYGMELFQRMKLQLLIVTPLQKINVIEPFVAHVGFVANTNGNDSQLRNMTITEYREERERRAG

SEQ ID NO: 32828 - protein, 418 aa, Arthrobacter sp. AK-YN10
MPAKSGASRWTSLADLRALSATAWDRGQLLREALDPSGVYPRRRVLKRPSATELRGDYAAAREWAARLFAAEGPFSLETVDVGRTTIGSNRLPAVAVFASVEDEIEFAGKQRETKQFLSLAAELGGLDPALQAWTAKRPKQLLVLGQDALLAARVALWLRDHPSPAVYVRQLRLPGVHTKFIEAHRRTIDEMVESLRPGLAGTLPSDDDSGAADPDLDDSVLGTPIARTPAARFAERHGFLHQPEQVRFRLLDPSIPLLGDARDITVTASAFESLRLPVTHVIITENLVNFLALQDRPGTLAIFGKGYGFSSLRDAAWLQSCQVLYWGDLDTHGFRILDQLRSVHPHVSSVLMDEATLLAHRDAWSVEASPSRAALTRLTPNEALVYEALQAGTYGDKVRLEQELIAWEWALERLESD

SEQ ID NO: 32829 - protein, 165 aa, Arthrobacter sp. AK-YN10
IQSDDVRQSVTLRKVLAEAEQAIRSMPYERDRPGLVPGPVLYNAGFESLAMVKLFDPDEFATPPRLADPIAFTDSDRVKSARTGKARPDVVRAAMAGSATLGEAWENLPAEERHINTVRSLLSMALQTGAAFDRAAWEHIDFEQIDGSIRTAYLPVVTLNEDSDD

SEQ ID NO: 32830 - protein, 298 aa, Arthrobacter sp. AK-YN10
MTEEITTTELAATDNPTMDGGREDGGREEVETHTADPFRVSPRDTFVDGAALFPGDTGVLPMKVRHALVKLLKGPYIDGGRDEKLWTTLLDNQLILRSRLSELFLTLQLDHDRKIAVLRPVDPEIIGASSRSSILRQQRALSRVETIVLLRLRLLLDRHVTAQTDPTVTREEISDLVANYTPAGQQDALRDSDVVNRTITKLLARQLLLATPLDDTYTISNALPLALPFENIGDIPAHIEALVAVAADESGTEPLLDLDPDSHQTSPSDDDMDDDTDDDGPAAVSSAADSTDAEGTTK

SEQ ID NO: 32831 - protein, 1147 aa, Arthrobacter sp. AK-YN10
MTIASMLPLGEQTNPGQMRLALVQVVNWGTFHGAHTMHVDRNGTLLTGNSGVGKSTLFDAMLRVFDARPRSNEAAAQRSGGAVEDKRTTFTYMRGKVGDKAVGDSSASAFQRPGATWSAVALTFDNAAGTKVTISALFDLPKNGTESSVGRFYVIDSKPLDLEAIEGIAQKRFTKGALESIFPEGQVFDVHKAFAERFRRLLGINSDQALPLLRVIQAGKGLGGSVNTFFRDQVLDAPATLAAADDVVEEFSNLMSIRQRLEDVRQQRDQLAPVPGLNKEYAQALLDANRLRELTGEEFEAYKQQLAVSVHAKTLARFRELAQQKAQELAAERTIRDALAKELRELESDYNNRGGNAISAIEQSLENARVGLKLRQQVEESARKALSDAGLNLEWSAEGWDQAHEQAAARSASLQDDSESLKELRFEAFDAHATKKRELAAAQQELLSLRSRKSLLPPSSIENRAAIAAATGVPEERMPFAGELIDLAEGQEQWRPAAERALRNLATTLLVPGEYFAAVTRYLNDNTIRGALRAVDVSKPLAGGALAVEDVSDGDLLTKLSILTSGANAEAGEWVRERIAVDFAYPCVEDPDELASLDKGLSLGGVVKRNRHTVEKDDRFTSRQDYVLGFDNASKLELVAARVGELENELAKAAELAQSREDSHQGMARQLEALRRVAEDERPWEQVSAAVAGEELTRIEQRLADALAAQADLEPLRANIEAVREKHQSSTGAAAVLQSEYKALDHQMTTADGLLDAARLKLEQAPPSSSTVTALEPYFAGAADVTQLYELDNLANSVRNKLLDELHVAESRGQATAERLTRIFEAFVREWGSAISADHGTSIGAAGDFEARYHAIVSDGLPAQEAEFRLFFNQRTHESFSTLLHLLDEERRSITSRILPLNGILSQVNFHEGSYLELDIKQTLPATAKQFKDAIQNALKAKHARPSRGAAPSEVDEDAELTARYKSLETLVKRLGSQTPEDRRWRSEVLDVRGHLFIQCKEHREVAGASGRKKTEVFMHADTGSMSGGERQRFTAFIMAAALSYQLGIAEQGFTTYGTVMMDEAFVLASEEFAGAGIKALHEFGFQLLLAAPENVIDLSRHLGSVTEILRDKRTNRSGVLTAPVISGRDEPGAWRSEANPVDIVLR

SEQ ID NO: 32832 - protein, 234 aa, Xylella fastidiosa subsp. multiplex Griffin-1; identical to SEQ ID NO: 30608

SEQ ID NO: 32833 - protein, 1144 aa, Xylella fastidiosa subsp. multiplex Griffin-1; identical to SEQ ID NO: 30609

SEQ ID NO: 32834 - protein, 405 aa, Xylella fastidiosa subsp. multiplex Griffin-1; identical to SEQ ID NO: 30610

SEQ ID NO: 32835 - protein, 452 aa, Clostridium sp. KLE 1755
MEALLTIDDEYQYNNFFLSREACVQILADMCARRRFQLEKEETETEEEALEAVPKRILNWLLRAKWLRKIEDYTTMTTNIVIPDYAAVFIAAFEQLVNQPMEDTDIYIQNVYATLFSFKNDSRMNIAMLKTALVNTRKLNKALQDMLHNMDKFFDRLLAKQSYGELLEEHLEGYVEEVVKRKYHILKTSDNFYIYKMDIKRCLKEMREDDVWIERIRAKQSASQDKKEKEPEGFFKKRQDDDVLDLIDQIERGFESIEHRITNMDREHSKYIRATVSRLNYLLSDESDRHGLVIQLLNKLGEQEEDGAQLARINRVAEKMNLSAWEVLNDNPLYRRRRRKNFAGDLLPEEENRELSKEEVLQLNKIHHRFTKQQIESFIEEHMKDGVMETGTMALESEEDFEKLILAYDICMRKNSRFEVLTSGEQVEGERFAYPAMIFVKRKGEKEDAGNI

SEQ ID NO: 32836 - protein, 258 aa, Clostridium sp. KLE 1755
MLEIYEQLTQEEQEKLQDVIRQLYRQTFLLERKYDKKAGRLIANKDFYFCDKHMEFLTAYFAVAGVRLNQNTELGTIWLQGEATMGERLPKLATIYLLLLKLIYDEQMAAVSSSVNIVTTFGELNGKVGEFRLAKSLSSLTEIKRALALLKKYQMIELIDVLEELNEHTRIIIYPCINLVLMREDILKLLNSFSEEEAVPDANEEEEGEMPDGDTADTDNAAGEFTDPDAGYTDSGDADAGYTDAGYTDAEYTDTAAD

SEQ ID NO: 32837 - protein, 1126 aa, Clostridium sp. KLE 1755
MPSTQTQQLTEAGRQSFKAITRIALNNWHYIDHKILTLNKSINFFTGHSGSGKSTVIDAMQIVLYANTDGRGFFNKAAADDSDRSLLEYLRGMINIGENNQAEYKRNHNFSTTIVLELEQTGSGEKECVGVIFDVETATNEIGRLFFWHRGGLLENSYRTQERAMAIGELKSYLQHNFARDDWFYTSNNERFRRNLYDVYLGGLDMEKFPRLFKRAIPFRMNIKLEDFVKEYICMEQDIHIEDMQESVVLYGRMRRKIEDAMQEINELTGIKNQFDRFVEGKRNTESCRYRLDKLTILQLTELIGELGLRVEVGKKDLLAQKEALDAQLALKEEYGAAYDEINRQIIGSGYAELEAKQKSLEENLALLERSERRWAALSEKIGSWEEEENISNQTIWDIDKFRKGTISGEELGRLKKSLQEVRTDLEKQHQEAAAECKSLQKEADLIQKDLMEIMLGRKTYPKELEEARREIQKGLYEQFGKNIPVRILADLLDIRDEKWRNAIEGYLAWNKLALIVEPKYVKAAMEIYEQLDAKKFWRVSLVDTEKLIAQEYPVRENALAEEIECKEPYVKSFIQFLLGNVIKCEDVAKLRQCKIGVTADCLLYQNFQLRRLNPENYTRRAFIGEKSMRKRQKELQERLEELNRSREEYEAMAAAAKRLLDFEYLQEPSENYLELFQDMEEKRKKEAQLRKLEKRMEELGAGSVDILRQQRKEIMEKQKVLDGHIDSLKLQIHDREKKIEADNAAYIEKNEELLDRQRQLIGAPAWEEDFDAWFSQVKNPRYDALIRQTLSAITESEERLEAEKNRLVDVRSEYLRRHPNRDFSASAENNGEYQQLLDELACDRIRDYEEKAMEQARVAVEHFKEDFIYKIRSAIKEAYIRRDELNRIIRKLNFGKDRYQFRISKNKGLDGEYYDMFMDESLEIDPATLSGSVEHQINMFSMDHESRYGTLMNDLIHIFIPPENASAREQEEAKKNMEKYADYRTYLSFEMEQIVEGEERLVIGLSKMIKKNSGGEGQNPLYVALLASFAQAYHINLSPKLSRRPTIRLVVLDEAFSKMDAEKVASCIELIRGLGFQAIISATNDKIQNYLENVDKTFVYANPNKRSISIQEFEKKDFSQLIKEE

SEQ ID NO: 32838 - protein, 261 aa, Clostridium sp. KLE 1755
MYEKKEYYLKALAGLNQLNEPIYKRVFSKHFLGKSKVFENEIQGVVISAARRFHPDVDSDPEVMSAEEVLSQIFVETYSQELWIKGPLRLQVCGKVSGFSEFPFGVGLNADMLKNAEICQEQDICKVVTVENKANFMKMPYEEGALLVYTHGFFSPKERFFLKKLETVLKKKRVEYFHTGDLDYGGIRIFQHIQKNIFPKLQPLWMDEETFLKYAEEAAAVEEAYLDKLRKLSVPETLEGLKKCILETGKVIEQECMLWKE

SEQ ID NO: 32839 - protein, 472 aa, Clostridium symbiosum ATCC 14940
MRLMNEIPDRFWSLFRSVNRPVYIEALLKINEEYEYSNYFLSREACIRILGEHFARKKYVIWQDELEDELDTLEPPATRVLGWLLRAGWLRKVDDYASMTANIVIPDYAAVMLEAFRRLHSDEEDETQIYIQNIYAILFSLKNDRRAGLSLLGTALVNTKKLNKTLQDMLHNMDKFFAGLLQQKNYANLLKDHLEGYVEEIVRKKYHILKTSDNFYLYKTDIKHWIGEMRDDEQWLEALVRKSAADSYGLLSAGRTAEEEQKAAETRMMEDILEKLSQIERGFDDIEHRISNMDKEHSRYVRATVTRLNYLLNQEDNTKGLIIRLLNRLADDGEQENMLTETGKRMNLSQMNILSEASLYKRRKVKADFSKNLEPDEEDKELTTEEILNLNRVKNRYSRSEIENFITQRAVSGKMEADADTVSCDEEFEKLILAYDYSTRQKSRYLVEEEEAEMIDNGRYRYPKLVFVRRNE

SEQ ID NO: 32840 - protein, 229 aa, Clostridium symbiosum ATCC 14940; identical to SEQ ID NO: 31186

SEQ ID NO: 32841 - protein, 1124 aa, Clostridium symbiosum ATCC 14940
MMIQQTKTDRERFVALSRICLNNWHYISRKTLSFSEEINFFTGHSGSGKSTVIDAMQIVLYANTDGRGFFNKAAADDSDRSLIEYLRGMVNIGENNEFAYLRNRNFSTTIVLELKQTDTEECQCVGIVFDVETASNEISRKFFWHKGPLWENNYRTEGRAMTIAEVEEELLRSYGKEECFYTSHNERFRRLLYDVYLGGLDQEKFPLLFKRAIPFRMNIKLEDFVKEYICMEQDIHIEDMQESVMQYGRMRQKIEDTCREIEELKELAAQYREVQAQEEQIRANTYFMNKMEIMNLRLQVSEISDRIGQAASDLDKQEVLEKQVVSQAAQLKLRSDELLRQIASTGYDELKDKLLNLNELLEHLSKSADKWQRTAEGLKAWVDEDVTSNQTIWDIEEFEARTIGREALIRLKASVEEMREDVGRQKQEAGSILRELSKREKQACEELSQLKAGNKAYPKNLENARAYIKRRLLEECRRSVEVHVLSDLLDIRNDEWRNAVEGYLAGSKLSLVVAPAYAKTAMEIYGELDRREYWNVAVLDTEKASKAAPPIFENALSKEVEVREDYLRPFIDMLLGKVIKCRGIEELRKNRTGITPDCMLYRNYRLQYINPDHYTKWAYIGKASVKKRIRLLEEEIEQCRAQKKPQEELQKECIRLLGLEKLESSADTYLEWLLDIRQVKEKTREKKRLEDKLLKLREQNIDEWEKEREAVEALRFAKEEGIRETGRQIDRSRDELERYKKEAVWQQGELSDRERSFTKVQELEDRLDEFLSKRENPRLDKLGDYFKGRAAAAAEARDRAFEQLLGRRLEYLKRYPNRSFSPSAKDNAAYDKLLDTLSCDNLEHYREAAAEQAKTAVEHFKDDFMYKIRSAIREAVQRKDELNRIISSLNFGKDKYQFVIGRNRGADGRFYDMFMDEALEVNPSKLSQTFENQMNFFTMEHENQYGEQINELINIFIPPENASAEEMEEARRNMDKYADYRTYLSFDMQQIIKNDDGIMKLQLSKMIKKNSGGEGQNPLYVALLASFAQAYRVGLPPKLRRSPTIRLVVLDEAFSKMDAEKVASCIQLIRDLGFQAIISATNDKIQNYVENVNKTFVFANPNKKAISIREFEREEMPQLMKGLV

SEQ ID NO: 32842 - protein, 499 aa, Bifidobacterium bifidum ATCC 29521 = JCM 1255 = DSM 20456
MERLRPVYETGVLRLLLRQNSMMYVALLRAAFDPLTGELPRETLEESFSQSLSRLVDSGEYQLREDQTIADASRRILADLTREGDDDYAWLANSHDAASHRFLYRLTARAHRAIEALSRLEDDSRTLSGAQANSIIMEIEHARMQLTADPGERVALLNREIKARKHEIRQIRHGQRQAALTESQVEDVIAVIHNTLRGVPIDLRELVLTERDNGDALRRRMQAGDMSVDDILTSYHDEYRRSFSESDSGRRFEDAFQVIITDEGRQQIDAALRDIAHTPYLAGESGVLLDQVRAELSRIYDGIEAVRRQMRVSDEAISRLVRQQTDTRYRTMLGKLNRLYAHVNADAKAHQGDDARPYRTDTAAGRFPPLPSRPARPMVRTTTPGLSVPQTPGDATAPDLRSMIDNGGPRLRRMAALILESPVYADDGNGAIDIVASFNGLPKAERKESELVGFLGELGCGDGAGVAWHCISADGSPRDWITGPVLAQEDELHDIVKED

SEQ ID NO: 32843 - protein, 345 aa, Bifidobacterium bifidum ATCC 29521 = JCM 1255 = DSM 20456
MSDLTNDTAQPDADMDMIDDDMTGTDSADTDSADTDSASTGADDMGAVDVEYDGADAEGAVNPYALFEGDTGDMTADARMVAIMLKRERYISGRFYDLALDNRAAVIRSLNNDLLDLVVNEHYRVMYATAVSGPDMTLRALKTRASLKREEAALLAFLRIRVLEYENAHVAPDEWLVSFEEIRAALATGAGYLASRNDEEGVLRQVGAIVSVMCTYGYLRQLDDDETMYRITPLVPVVLDRQLADSWLAVADRDDDDEPAGDMAPAGSRSAAGDTSNADASGADDDGDSDDAGPDAELFEAPLFDDDADADAAEDIKGADDANGANDSDIDDETASDGGTAREGE

SEQ ID NO: 32844 - protein, 1196 aa, Bifidobacterium bifidum ATCC 29521 = JCM 1255 = DSM 20456
MSGKDMQMIADRWMMESRRLVNWGSYEGYHEFRPSTDSQLPVTLLAGASESGKSTLVDAQISLLYPTGTPFNKASNSGRSERSDYTYLRGMIGVGGSDGVDEPMYLRGRDESGAPRSIWGAIVDTYRNFTTGQILSCGKFLYLMPGDGRGDVRRLYLAWDKPIDPRRMDVFRESSFTPTQLKSTYPGCVTFPNAEAFHTHIWDVMGLSAEACRLLARIQSADAPSRLDDIFKQGVLGVPEALDLARATVEDYERYDANFRSMEEKTRRMGKLRAITASYDDYESARDAVHSFDAVNPATKSGSATIRAWAIRRMIGEVNERQPLDRRLRDERRSEARAAGKRIESLRTRIDAVRERMRGLDGGDLTRLDAEMRQAERALADITAGRQRIGRMFEAAGEEFPKDEHAWDERRIEAVTFMRSYEQRKGLLDDMRNQTYAAHASVKQTLQRLNDDYERQKSQRTRISRQMDETRAMLCRATGLGPSELPYVAELMDVREDQEHWRLAMNAAYGSMAQTILVDKRHERGFAAKVSAIDPHAMARRTWQFVDTERGGAGNGPGGANTGATGGTAGEVWLSSKLRYREDSPFAGWLREQTSSERLDALCVDGIDDSDHAVRQVQADGQIKSGKRGQHGIKDRQQVIGFVNESYLAQLRTRIQDAQRQCDETAQSYASAKEQADRLQRERELADQLAYTAWEKIDENSAKAAIADIERTIASVRNNPKLAELDTLQESLSKELDRSQRQRIDIERQAELADQAVNAAQAWLDEHAAQPQPQPQTRPLDGEAADVSPKAVTNGRTLLTDEVEEALAESYEQRLSGLGDATTRAHMIIGAGAPQRMAQGDTFADRIIAGIGKDLEARVSMLEGRAASARTAVEARMGAYIEMYAGGDDTIAASVDDYRYYQDELESLSKLATVEATAVEYHNCLDKLLMSFLTIKRAIDTDAGDIHDQLERINAMLDGQQFGPHHGSLSLHADVRRPERAFWSALTRVIGTLNDRKAAQTDDDLDGARCAFASCAAMIDMLRREIGQIRDVNGVKSYGARNLDPRCRSSFYALVRHSDGQVERITSTGGRSGGALQELTSFVYGAALIYLLGGGMDNKLKPSYTTLFLDEALIKADGRYTRRALSVLPRLGFQVIVSAPESKTGEILEVSTKAYVTRKDPDTGYTTLHEARLDGIDETEGADEPEGTVESDDAAE

SEQ ID NO: 32845 - protein, 484 aa, Pseudomonas aeruginosa VRFPA03
MSLHEQQARFRRLLSEHAAWRLLRAENASIVLAFINDLFAQDSEVPFGKARVALEAELLIWQEVYGLHDNAGTYLRQWIQAGWLRELDDKLTRTDAFELALRFAQSLDQRDSNATASHLRIVQDAVRDLAVALSPNPEERITLLTARRQELDLEIERLQMGEVPELSAPEQRERIRGLYQLTSVLTGDFRRLEDEIRQLDQRMRIRMIESESGRGEVVKALIEHEGELLQTDAGQAFDGFYQLLCDQNRITEFREQIRSILARPASQYLKSDELRYLSHLVRELGKESERVFQVRRRTEESLRAFVESGVQQERRAVERLLRQLERLAVNFKDQELSLREPVVVDVPTGSLRVRSPSSIHLRLPEERLDTRQVAANTNSHVASLGMLDHLNTVKVLEVAQDVKQLLTEHGPMTVASIVSHRPITGGLEELVAHVRIAKAVSAVVLEHPESLVVVDRTGNWIRANIPSLLMSAEQFPTDLEELAL

SEQ ID NO: 32846 - protein, 251 aa, Pseudomonas aeruginosa VRFPA03
MNEEEQHSQQAPALFDQYRTNRPETPSISGEVETFEDAPVERPVVGGAEVGMPLEARRALVLLLRQGVVMAESKRLAFEALCRHEGLIAEHLGNMFMRMLLDMKAGIAILLQQEVAEQDEETDEASRLINKRTLSLYDTLLLLVLRKYYQERETAGEQKIIIDIERIEALMTPFLPLTYSSRSERRTLNGSLALLKDKRLISAVRGDDERFEITSVIRYVVNADFLERLLKEYERLAGNAGVKTGDEVQDA

SEQ ID NO: 32847 - protein, 954 aa, Pseudomonas aeruginosa VRFPA03
MLEASEVSLSELFSTGQIRLAELSVYNWGSFHGLHSAKIDPEGTLITGDNGAGKSTLIDGLMALLLPSSKASFNIAAAQGDRTDRTLMSYVRGNYGKAHDGSETATLLKRSGATATGLRALYQADDGSKITLAALFWITQASNSLNDLKRLFVVGKRDVGLDELLHLFGEGNARVLKQHLKEDPLVEAFDSFTEYQETYVRLLCMENRNAPALLSRALGLKKIDDLTSLIRDLVLEPSQVKEHARLAVSEFDDLVSVHSELDDARRQRDALIELPETSQALNQAREEMRRISVELAGLPVYFGEQCSRLWQMRLKKYEAELLQLAEEMTRLGALEEQATERVQALFHAYQSQGGERLEGLRKDLKAATQVHHDSVRDARLYQMDVRDLSLPDTLSLDVFKQNQVRAQTELADMPALRQARQDQFASSAANLSREQTQLKELVGEIEDMESRPDSNIEPSYQKLRDQLVESLSLDPAEVVFVGELIDVLEAHRPWQGAIERALGGHRTTLLVPDERYRLVTKWLNTRHTGLHVRVQVVRLNQHPQVAEFLPDGFLKMLDWKPHPYRDWLKKHLSRFDLHCVESTEILDQTDFSMTIQGLVHLDKGRFEKKDQQRIDNPRFWCLGFSNKGRLAALRKDRVELEAEVKKLAQLTADARMAMDDLEKHTRVWERIAQLTWAAIDVQSAQDRMQSLRADLEALERPDSELGVAKARWEQAGAELKEVQGKKELVSKKVGGLESDKLKANQQLELALDAARTGLVDEVRELLSKRVGQLDLDDLEMVSELENRHRSALEEARKGAHNREFRASNKASGIVSEFKTKWPLIANDWLAGVDALEEYVDHLAHLEQEGLPDLVERFRERLNRNATQSLARISQTIQAEREDIQDRIETINDVLERTEFRQGTYLRLGSRPEIFEHVKAFNAQLMRVLARAGSDDPGGAAAAPRSRCESSCKPS

SEQ ID NO: 32848 - protein, 330 aa, Leifsonia aquatica ATCC 14665
AGGVEPAPGEAVRRQLREVLRLTASLPEDFRRLSAMVEQRHREVARRATEDQVGKGALVEQYLRDNDLLEQTPEGRAYRGFASMLSSHGLDGMRADLERVLAQPLAIAEMTERQRLQLETLIGSLLAEEQTVQETYVRWMSSLRRFLSRSGAEKHQRLLSLADQALAAGAHWAQVRPGPVSVPEDVLRLGPWALTDVTQTQVWRGGERPDIAVAVTESRDALPASERAALRLAVGTSPDAVQETIERLLAERAQVSGAEVYAATPPEFRRLGLLVSLLDAAAERDSVLDGVDTVRIAVEGETEREVTFPRTRFGGADDETAATRGGRTER

SEQ ID NO: 32849 - protein, 234 aa, Leifsonia aquatica ATCC 14665
MTDTIADDTDLDDRAEAVTADAFGDAADERLPLPARRALVTLLTSRFITRATHPEAWSGLVDYEEDVRGRLEELFLTLTIDRDHEVAFKRQSAEDGAPVLLRREKPLSRDASLLLILLRQEHAYTDAADDAVTVSRDHIAEFLGRFQTDASNDEVRVDRRIRAAIAAMERLGLLVPESDDPDLYVVSPAVVPLVTTTELAHLTRLFQEASGAELREDAAPEPAHAHVDAPEVDE

SEQ ID NO: 32850 - protein, 370 aa, Leifsonia aquatica ATCC 14665
MTDLMTAEHDELEEDLPLADGLIHSGQFRIEQVQLLNWGSYDDLHTMPVGRGGLAILGPTGRGKSTVLDAMAAVIMPNPQEFNRAARDDTRQRSERTVYSYARGKTDEVREAGSDVTTTHFLRPLGTAFASGAAITWRTELGETITAARLAWLGRDTATQDEVTSSTVYVFVHGEFPLTRLAELRPEPGSSSPLTRGSLGRLVDPVRDLVTGSQPEFRVRLCEELGIGGSDESQLKALTLLRRAQASKGVFSIDELFKQFVLTEPRALSRWETTLSSYREASALYDVFETTRRKLDVLSDVPVRAEQYRAALEDATGKRRLLAPLDGEESSRLWVWLSARVADWVRGEVDRVRDAKREQEALRRAAADEE

SEQ ID NO: 32851 - protein, 480 aa, Oribacterium sp. oral taxon 078 str. F0263
MRIFEIIPERFFSILSAQKKELYVDALMVLRTAFKTELLIRRPELFSMMLDSLEDSFLSADFSEEAMEIGEEGESQDLSGKVHLLLRKLRDCGWIEIEYEPGSFEEIVTVPDYAVAFMDLLYDFSHERIREYNSYVYASYAALKNAGENPDFQLQALLSAHQNTEKLVDELKSLFNGIKRYYQRLAGQQDINILLREHLDQYKEKLFDQIYYPLKTIDSVPRFKGEILRILNAWSMDREVMDRIVGQGIRRRLFSSEEQGREESYAMLNAVINTYENIEELIAGVDAKHNEYVNASIDRIRYIVNADRSARGNLVDLLKNAGREDILNEMRGKLLLSRHRFLDSQSLYHRIKGERREGEKAKPLERRVESPAAVDGFLTELRRQYSDAKIDRYILSIMGERGELYSEEASIRSPEDFILFLLGTLRGEEKRAPFSVEFFQGNVERNGCSLPRLCFREKGRKRADRGEGEGEGEGNAGGAV

SEQ ID NO: 32852 - protein, 223 aa, Oribacterium sp. oral taxon 078 str. F0263
MLEEQFEKLNMTEKEQFRRMVNKLLAHSYLLSRSYDFTDHIARTNPEYLFVERNFELFQEYFSYSAFHLERDNNYGVISLQSEYDENRLRLDKQSTLILYTLRLIYEEEREKLSLSREIFVSVADLVHKMISVGAIRKKPSNLALSSSLRILSHFRLLEKAGGRWEDADTRLLILPTILFVVSNEQITGMHRLLEEGDGNLAGEESESHSEEGEEFSAEDEGK

SEQ ID NO: 32853 - protein, 1139 aa, Oribacterium sp. oral taxon 078 str. F0263
MKKLTRMLMIRWYSYEKELIDFDMINFLTGKTAAGKSTIIDALQLVILGDSSGSYFNKAANQKSVRSLKGYLYGEMGDDGDAGYEYLRTGPFTSYVALEFYDTEKGKYFTVGFAADCGRELSVNYRWFLIPQKGIPENCFIDERTDIPYDLNGLKLFLNRYAGKKGFEFYDTNRRYQEVTEGKFGQIKRKYRLLFKKAVPFTPITDIEKFITESICDVKHEIRVEEMQSGIRQYKSLEDEAKRTTEKVEALTEIRVLSERYEAEKEKLKQQRYIVVRAEKEGYLREEEGLKAQLLETERLFRETEERIQSLRREGEELFWELEKLEEEYHGSDLVKKARELEGRISEAEEEIRALHGSAEEALKKLRSFGENWSLRLKRAEECGFRGGEEQRTLLDRLSRLRLPGEEGGEPEESSDFPFRLAAEKLTALKEDFLLYREELRARRRQLSSRLSELEAKIRDLEKGFKPYPSYVTGLKAVLEKTFFERTAHTVTVSILAELLEVRNPEWRNAVEAYLDRQKFYLLLPEEYYEEALKIYDEVRRERGLYDAGLVDIGKLKRSGSFKARDGSLAEELEAENEDARIFIDYLLGQVMKCERVEELKEHRTSITRSVMLYKNFVARKIDPRRYQDPFIGRKSTKILLKKLKEEQEELQREERILAKNHALMEELSRAEALSSYEAESHAESLRAYRELPKLKERVKILSAELEKLDLSYVDRLREEIQKKRAEQKRREDERERLQKQLGSFQERRRLLSEEQLPRLRKEVERIKEAISENFSPDWIENTGEVRFLKEQARKGARTSLSLRESFQRAAKLTENEIKKKFDERGRLRMRYNSLYRMPFDVNRDSNEDYDRELREKKEILLPEYIGKIRDAKEKAYAQFRDDFIAKLKSNVESVREQIQELNESLRRSVFGTDRYHFVLSPRSEYRDYYNMITDPLLMDTGGWNIASESFNKKYQKQIDELFQLLVISEEQPSAERQREYEKNIAKFTDYKTYLSFDLIVSNEQGEEQRLSKTLLKKSGGETQLPFYISLLASFSQVCRIRMKGSAAANTIRLIILDEAFSKMDGERIRESIVLLRRFGLQAIFSAPPDKIPDIAPIVDRNIAVYREHHHSFTRYFDPREIEEETEPESGYEPGGESR

SEQ ID NO: 32854 - protein, 442 aa, Oribacterium sp. oral taxon 078 str. F0263
MNYREYLLRTLLDRYERSAGFRKGDEGGRRRLLHPMKEAALSQAMENIDEKKSFLSELDQLKEEGILDYSWLRYERGNLVESVWLLSGEKARERAYYLLDRTPLSSQLARLRINIEETLSAIEVEDRASESQEESGAPSAREGRTGEAEQQLGIRRFLLDMLESIEKRQRIPRFFRRGERINGELLQALLFLYKNKTEETERVFSARNYGDSKYFEKILKAPLLSILREIDRNSPYEGQGDETLFENYGLCRWPEVLQFCGGISVWLEEEEPIRFYGECYGAYLNSETFRHIKRLELSGVERVLFIENLANYLWYLKKRSPLELVIWHGGFYSPLRGRWFRKIYEAGKRAGSAISYFHWSDIDLGGFRIFARLKRNIVPELKPYRMDTETLRSYRDRALPLCGESYRRKLEALLGDPEYRIFHSLIEEMLRSGLRLEQEQLL

SEQ ID NO: 32855 - protein, 493 aa, Rhodococcus aetherivorans
MSTADLHRLARLRQEHPAWALLRSDNAAAVLALLGRHFDRGTRRLPAPELFARLDADLQELRDEGFELPRTGQAYCADWVRAGYLLRRASADAREETLEPTEATFAALTFVAGLTTATSSVTESRLTTLSSQLQALARDSDPRSESRLAALRAERDELDRQIAAVESGDFPVLDGNRAVERSAEILALAGEIPGDFARVRAELEALNRELRARILDDEGDRGDTLGEVFRGVDLIGSSDAGRSFAGFYDMIIDPERSSQLDDWIEAVLQRPFAQQLTTEQRNRFRTLLTEMEDAGGEVHATMTSLSRSLRHFVQSRHYEEHRRLQRLLRSAQQQALQVAQRRKPYDLLDLELVRVGMGIDSVAALRLHNPADDLVVEPVVTQPVGEVDLEELRRIVRESEIDMDELAGNVAATLRSRGSATIGDVLRDHPATQGLASAVGLLVLAAEHGHRIDGTEEIAWTSPSGATRVATVRRHLFDPTDTEFTARITEDAS

SEQ ID NO: 32856 - protein, 201 aa, Rhodococcus aetherivorans
MTESTTRTGLYAGDTGELDLDTRRALVQLLKGPLVTADKHPEVWRTVIRDERVLRSRLADVFLDLVVDEDDQLAFTRPADTGDHKAPTVLRTERLTFMDTVMLLALRHRLLRAQPGERVIVDFDEVAGQLEMYRAATSTDPAGFRKRVNASWEKLKKYTLLASTSTEGRMEVSPVLRQLFDADQVAAVEAEFRRIVEEDAP

SEQ ID NO: 32857 - protein, 1099 aa, Rhodococcus aetherivorans
MNAAPIHPGQFRLARVQVVNWGTLHGHHDIPLARKGFLITGASGSGKSTLIDAISTVLMPGGSVRFNAAAQESAAGSGRNFVSYIRGAWRREADADTDALTASYLRTGATWSAVALTYNAGDGTAPVTLVKLMHLRRGANANNEISHLHLILDTDVELTDLEPFVARGIDTRGIRKRWPDAVVNPSYAPFARAFRSKLGISSEAAQRLLHRTLSAKSLNSLDQLLRDYMLDEPPTFAMAERATTQFRELREAHRVVVDARRQVETLEPLVALADTRRSGLQSQRDLQDETDHLDAVHARMTVDLLSDRLDETRAQTGLLQAAADKTADEADRAGDRTLDLRVRAESAGDGRLATLRVHKETAETALERITQQRKRFDIALAHWEAETPATADDFAHLQAQLERELRELDATADTRRAELYEVAGALAERRKTIRELIADREVLARRRSNLDPDLLRARELVCSAAGLGEDALHFAGELIAVRAEHAEWTGPIERVLGGFGRTLLVPDELYPRVAAAVDAHHLGARLVYRRVRTGVGAPDAPTTADGSLVRKLEVRPGPLAAWLQHHLADRFDYACVDTADDLRRVPRGVTRAGQVKHGGDRHEKDDRRRIDDRSRWVLGFDNEAKLADLRRRIGDAETDVDALQRRQEALERAESAIQLRRQAAAVIRESAWSDVDVAAAGNAVDAIEERLREWMQGNTEYATLTADLARAESEERAARQAHAAALAKLEQHRDELTRVQARLDEAQAHAGTAVPDPIFARIRTRFAAAVRRVTVDNIDRALSTVGRAINVEMRSAQHDTADAERRITAILTGYLAEWEARRAEMRSEAEYVDDALAVLARLRSDGLPAYEDEFFRLLREQSHRNIGELARAIRKAPGEIRSRIEPVNESLRRSPFDTDRILRIDVKDRRSPAASEFLAELLQITSGAWKEEDRAAAERRFEQMAAVLERLDSGEPADLRWKRLVLDTRLHVGFIGVEVDPEGNDANYHDSSSGLSGGQAQKLVFFCLAAALRYQLAAAGEELPRYGTVILDEAFDRADPAYTRRALDVFTQFGFHMVLATPLKLLQTLDDYIDGVAAVSIRDKRYSQIALLPIRGDGT

SEQ ID NO: 32858 - protein, 378 aa, Rhodococcus aetherivorans
MSALCVPPSAVAGKAQVAYRSRRTRWITDPTAAESDSLSIGLHPPSERRVAQDPDAVVAWVRAWHGYPGAGRVEWETRRWPSFGTQEVPMRLLLSGASEIAAAAARGPEWRTLTERQARLLDGLGPGTATLATAIAATHARWLELDEPDFARLVAAVRWLAEHPSSGLFIRQLPVPGVDTKWVSRHRGLVETLLDGVRGDRDLGVRSLPRMCEVAVCDRALLAAAPRLFATSLDELAALPVKPARTLILENKEGLHALPELPATVAVHGGGYAVHELADVPWLASSDVVYWGDLDTHGFAILDRLRGRLPHVRSLLMDRGTVERWRDLAVPEASPAPHTPAHLTGPERDALAVVRAEGLRLEQERIPWPYVVAHLEAL

SEQ ID NO: 32859 - protein, 556 aa, Ralstonia pickettii DTP0602
MEQSTAAAAALQTQAGSLAGAVAVQVELIRSACLLVESPTMLPMHHLSQSPLAYNLASVAPAARLAHAGLFQVSLDFETLERLRQVHPAWRLLRSDHASLVAAFLHRVFVQPNQRSAGQSDLAEALEDELFALRERLGQDAFPRSALDYLNDWAANEKGWLRKFYRQGSDEPQFDLTPATEKAIAWLGTLAGRSFVGTESRLLTLFDLLKQMHDGTQTDPRVRMAELQQRRDEIDAEIARVAAGDLSLLDDTALKDRFQQFVALARELLTDFREVEDNFRALDRRVRERIALWEGSKGALLEEIMGERDAIADSDQGRSFRAFWDFLMSSSRQEELSALLEHVLALRPVSELNPDARLRRVHYDWLEAGEHTQRTVAQLSQQLRRFLDDKAWLENRRIMDILRGIEARALAVRDTPPTGYVMAVDDTAADIELPMERPLFTPSAKPRITEADIEAGEAEVDAEALFSQVVIDKAELAAHVRQALQGRAQVTLQELCDMRPLQHGLAELVAYLQLAGDTFRTVVDESATDSVSWIVPTPDAGTLVRQARMPRVIFVR

SEQ ID NO: 32860 - protein, 235 aa, Ralstonia pickettii DTP0602
MAQDDIFDDAAPAATGAVAPVALALSALVIPLLKGVLYRDADANLWHALLNLQPTVRDYVAVLGLELVLDDAEGYAFLRSQPDSDDDSAERPPRLIARRQLSFPVSLTLALLRKKLAEFDATGGETRLVLTLDDIAELLRVFLPAGTNEAKLIDQIELHVNKIVELGFLRRLKADTSTGASARMGGQAGYEVRRILKAFVDAQWLSEFDARLAAYQIQLTGQPGTPVANGGPSDA

SEQ ID NO: 32861 - protein, 1124 aa, Ralstonia pickettii DTP0602
MHEPQTLSLDFADDDTLSGFRLSRLEVFNWGTFGERVWTIRPAGRNALLTGDIGSGKSTLVDAVTTLLVPAQRIAYNKAAGAESRERTLRSYVLGHYKSERNEVSGTARPVALRDQNSYSVILGVFHNAGYDQTVTLAQVFWMKDAHGQPARFYVCAEQDLSVATDFAHFGSDIASLRKKLRGVKAELFDAFPPYGAWFRRRFGIENEQALELFHQTVSMKSVGNLTDFVRSHMLEPFDVAPRIVALLGHFDDLDRAHEAVLKAKRQEAMLTPLVADCERHAELVAASEQLRACREALRPYFARLKLDLLDKRIAGLTDEWERQDTRVRRLQDRRDALRNDEAELRRNIAENGGDRIGRLTEEIRQQNDESAKRRHRSDRYAELVRAVDETPPEQEAAFLVLKSRFAELAERSRSREAEVDNALTEHGVTLRQGKAEHDALSDEIRSLKARRSNIPAAQVAMRSALCEALSLAEDDMPFAGELLQVREDERDWEGAAERLLRNFGLSLLVPDALYPQVSAWVDRTHLKGRLVYFRVREGGRAEPPALHRDSLARKLAIKPDSPFYSWLEREVAVRFDVACCATHEQFRRETRAVTRAGQVKMPGERHEKDDRHRLDDRSRYVLGWSNAAKIAALEGETRALETRLAELAALTAGLVKERDALRERLTALSQLDIFADFEELDWQTPAREAARLAEEKRQLESASDLLRQLTVRLNEVEAEQKETEAQLEDHRDKRSKAEGRKSDALEQRAETQAMLDATGDFAAAVPVETIDALRAEILGQHTLTVEACSGRETDMRNELQARLDAESKRLVRLGESIVKAMSAYKEAFKLETSEVDASVLAGFEYRNMLDKLRADDLPRFEARFKELLNVNTINEIANFNAQLGKEQQTIRERVERINESLTQIDYNTGRYVRLEAQVTPDAEIREFQSELRACTEGALTGSEDSQYSEAKFLQVKRIIERFRGRTGLTDQDRRWTAKVTDVRNWFVFGASERWREDDAEYEHYSDSGGKSGGQKEKLAYTILAASLAYQFGLEWGAVRSRSFRFVVIDEAFGRGSDESAQYGLRLFAKLNLQLLIVTPLQKIHIIEPYVSSVAFVQNEEGRASKVRNLSIDEYRAEKARLTA

SEQ ID NO: 32862 - protein, 392 aa, Ralstonia pickettii DTP0602
MNWSRPADLRAQLQRLWDRGDILGALVSGAALFPRRLTLRVPTSGELTESFEAVRNWLGELKQMPHYRLEMREFRHRTFGTNALPCAVWIDTLDDAAALLGKRREIERFTALLATTREAQPLLVPWLAQRPLRALDLHDAWDRLLEIVGWLQRHPRPGVYLRQVDLPGVHTKFIEAHRGVLAELLDLALAPEAIAAEFTGTSQFPARYGFRDKPERIRFRILDRANRMLPGEAPTHDVTLDAASFAALRPGVSCVFITENETNFLAFPEVADSLVIFGAGYGFGLLAKARWLSHCRLHYWGDIDTHGFAILDQLRSVFGHAESLLMDRATLVAFEAQWGVEDSPTLRDLSRLRPEEQALYDDLRDNRIRKNLRLEQERVGFEWVREAVAGLG

SEQ ID NO: 32863 - protein, 524 aa, Bifidobacterium animalis subsp. lactis ATCC 27673; identical to SEQ ID NO: 30666

SEQ ID NO: 32864 - protein, 269 aa, Bifidobacterium animalis subsp. lactis ATCC 27673; identical to SEQ ID NO: 30689

SEQ ID NO: 32865 - protein, 406 aa, Bifidobacterium animalis subsp. lactis ATCC 27673
MTDTATLKTPADVRGDVARIVQRELFAAESPWPRTIHIPWPKETQLVADVAGVHAANNALKEFAARFGCQTDFISRKMGTAVSLVAHIHVPDEATALAIAGPTLRRPRERVLARAAQLEQRCHVDHALAMDVVRRLNNESDVDFGLFVEAAQWFGRHWVEVPGLTAREIPLPGFSAKWLAGSRSRRRAAICTVLGADRLPLRERPGEVRYRYMDQRFAAEPDRVATSVQCVPERPVSLAVIVENKDTYQAMGPIDGAVCVFGSGFAVNRVPELLPWLAGDGVRVVYWGDIDAAGFEILSGLRASGVACESILMDRMTYAEYERFGTTRDATSHEIRCGEPKHGLHLSPEEYALYRDLCTGELAVPRIEQERIPIAEFMRLISAGRSDGSDGARADQCHSQSLRTPK

SEQ ID NO: 32866 - protein, 478 aa, Alcanivorax sp. PN-3
MFFTEDRHQFFKPLTGKYREQVAECLRLLHERLYSAQADYGESLKREQVLDVFSEALERAPLLEGGDEDGGRFRNNREQAAWILNTLVEHGWLKRDKDEASFQSTYPFSRTGRLFTQTLAEVDGRGIRTRHRNTRNTLNALAAFLDRGEVYDLLDAHEHSERIIADFTDIIAELEERKRELVKEVEAQQLVQQASDQFFEFMEKRFQPDVAIRMSADSVEKHRDRIQNTIERIRRKPKAWKRNAELELRRLAPDLVINPEGSVLWQLLDSIETRMRSAAEIMLPALRRTLQGFTRRADIIIRQLSYLHSQQHSDIVGLCRELSELDDATAAKRLEAAGQAMAHLRLGLVDPAQNRLREQREKRQVQSRMTQLDAPDPATLRDLAIQQLLEKAFSIHGEGLRDYLRQALGASRRIDNRDLPVNSATDLLALSHVIELGSADHRASGFRLRIEPTDPIVGERYFARRDGFLLELEHDDDT

SEQ ID NO: 32867 - protein, 222 aa, Alcanivorax sp. PN-3
MTIRDALAEALEARGVGPDQFSELMIRLLDRGVLCRDESKKETELYDRYLQVADLVEDYLSVLRIRLLHERRFHSLRLFPPGAEVPGLADSEDGFNQGLRERLSQQEVAAILVLRAEYDKALREGQIDEHGQVMLPLEAFNLASKNLLGRPLPEALTERRALFRRLRQLRLIRTANDDGLEDAETWLTIRPDITSLVTDAVLSQLTGDGPDTEAPSPEELPS

SEQ ID NO: 32868 - protein, 1216 aa, Alcanivorax sp. PN-3
MFLKRSITVNWGNLPAEELEYGPINLFSGGNGSGKTTAADALQTLMTAAHDNLFNYNPGQDETTQRGRGGKQVRTLASYILGCDDGAFARPYDSDGYLAGVFHPTKGETAEPFTAVIGVRAHLDRAGVTAQARQNELLLMIVPGEMLSLSHFVHGEGAERQVVEITELPNALRRTFGKKNVETYEKKGAYLARLYGALRGRRDAVSQQEAKNAARTFARFMAYKPVDSIDQFVAGEVLEAQDMGDTLRRIRDMLRTIHGMEQEARQLRASVDYLEQARGLAGQYQETWLERTALAYGAAAQRYRRNQRQYLEKKEEQSQLRQQQQALREEAEQVEQRLEQAHDELVGLEARIQGIPALRDKQQLQAQLESLTQQLQQGARPLLEQDQQRSRNFTALRNLRDLLNRHSIELELPLFASKGWRATSKELLALEQRPIPDLNQMLARDWIDLSPLESGLEQARAEQQLHNYLAEQLHGQVDSASDRENLSLAQRLDRLVTQRAQALEKLDEQQKQIQHRISTLESKRVNYPRDVEEALQAIREQCPQADPRVLCDHVEVQDPEWQMAIEGYLGGARFGILVEPDYEAEAIRVVRRLAGRQRNKARVIQGEQARRDAEKAALPAESIFHVLRFSHRTAEHYLKASYGNVVRVGDAETLRRTRRGITSDGLGSGNYALFRCDLDDSQLVFGETARERNLYAQRNALMDVQESYRHASDDYQAVRQLQQQVLEFKPLDWVATVTHLLQCQRQLSDTEQALANLDLSDHEELERQQQDARQRHKQLSQRQGELKEENGKLGEQQHACERAINALADQSEQLQQDQEDAEEHLHACTRYWPDLDVLSRIDAMDQRLQAAQDDIDFDSEERALLNTLNSNAVTLERLVADYNQQAQPADQILIETAEELHSAPFFGHVHHLHQQLDNLHNRLRNNVLLSKLEQLGGLRDTFNTTFVSDLCNQIQQAIKDGERTLKNLNKELEHHYFGADRERFSFDWEWVQEYKEYWDFFREVTEIPNLGDGASLFESTLSDKATAVRDRLLALLLDGDEQQALRELERISDYRRYRRYDILKHPEGKAPIRLSQYGTGSGGQLETPAYIIRAAAITSAFRFNEGDSHLRMVIVDEAFMHMDETRSRQVIRYLTETLGLQLIFIMPTSKAGPFLDLVSNQFVFSKVPSPVPVGELNTRVLVDRQQLNQERIAELWDQHRRVIRQQGALDFMEGIS

SEQ ID NO: 32869 - protein, 375 aa, Alcanivorax sp. PN-3
MSAPPWLEEEPWLRRLLSWFLDRLERPRTQAITRRVKKTTVPELFRFSEDTRYRWQLVERLAREYRVFSIQYDSRLDPFQERYENAQLRLDPSCEALLRDWLDRPRVDPRRRAWQNALSGHEAHFQDGGAALLDAQPALAGESPEDMVGHFVLAANLLDSDLTLRELSARCFRGDSKFLDGRQDLLARLFGERAQCLRPRPLLLTAWAPAGFDRLLIVENQDSFLRLVEQAPVGHALLYSGGFRASAQRLTSPHTRFAFLPGSDGADFQARWLSDTLPAFFWGDLDFAGLGILAALRHSLPQLTAWRPGYEPMLLALEDAQGHGAEQAGKARQNDPGNTGCPYADQQLLPALRDCRRFLDQEGFLPVLSSPRTPL

SEQ ID NO: 32870 - protein, 295 aa, Marinobacter sp. ES-1
PSAVYAIRQLDKALRIQLIEGGATRGEVLLSVMEKEALLSSTDAGSAFESFFQLLCDQNRQTELRDQLHGILNQPIAEQLSQAQRQFLAHLMRELGRESDRVFQVRRRTEESLRAYVESGAASENRAVDQLLSRLEKVAVALRDGGVNLRTETLLSLSVGPLEIASPETMRLRSPDEKLDTRGVLARENTREPSKQILESLETVRVREVAEKVYQALAANGPMTIAGLLRHYPINAGLEELVAYVRVAKSVNAAQLDDVERVQFTDKNGAKLQATVPTFMLSAELFPTNRDELVL

SEQ ID NO: 32871 - protein, 278 aa, Marinobacter sp. ES-1
MTDNKENSANPSFFDRVRGQSDSHFPSSPSPDLEKGTDSNSDEEAEAIDAPGGDSDGGLELPHEARRVLVYLMRQGAVIGTQKPKVFESLCRYESQIRRHLAEVYLRLILDEKAGVAFVALNETDEDDISIDGEPVSLISKRTLSLYDTLLLLVLRRHYQERESAGEQKITVDLERVESYLTPFLPLTNHAKADRKKLNGAVQKLTQKKILAAARGAEDRYEITPIIRYVVDAAFLESMLNEYLRLAEEENLEVDAALHLDSVSDESRASQDDLLGGL

SEQ ID NO: 32872 - protein, 1122 aa, Marinobacter sp. ES-1
MERYGDTFFRQGQIRLAELSVYNWGSFEGLHTARIDPEGTLITGDNGSGKSTFVDGLMALLLPAGRATFNVAAAQGDRTDRSLLSYMRGSFGAAHEGSGTRVKSKREKAVVTGLRALYRADDDSVITLAALFWATQASNSLSEVKRVYAVSRRNLELKELLEAFGEGSVTALKQMLRNDPLITCCDDRFSDYQELYRKLLFMENKNAPALLSRALGLKKIDDLTKLIRELVLEPSTIREDAKKVVEEFGDLVATHDRLVDTRAQVEHLSPLPDLSQTLRQAEQALQRLRLEKEHLGIYFGEVLAQLWSVQVEALKAEVEKLQEKLESLAGEEQEAEALVERRHGEYLKHGGEKVESLKKDILQSSGKLAEVSQKASAYQQDMGVLGLSDLLSEEAFSSNKKAVATLLGTMAQKTEASQDHFADTSAELGKAQEAIGVLESDIREIKARPDSNIDHPYQRLREELVQSLGLSADELIFVGELIDVQEHERPWQGAIERALGGLRTTLLVPGDSFSMVTRWLNARHTGLHVRAQVVDDKSGNQRPPEFKESGFLKKLDWRQHPYRDWLKHHLSKFDLACVNTTEDLDVTPFSMTREGLIHKERGRFEKKDLSRIDDRRQWSLGFSNKSRLSILNSDLGQLKQRVTELADDVAKARKAMDEVSGRKTLLERVDTLRWEEIDVPRWKGKLEQLKEDLQAIEASQGDLAEAKRRWEDAKLARQRIQHEVGEVKSKLGGVDNQLKISRQTLKQAQEAASPGMTDECRGLLDKRVGPITLDQAYQQGEVEKELDSLINKEQARHSTASNRANNIMGAFRGKDQWLPVVVDWPTGLDALDDYLEYLNQLETEGLPVLVDQFRERLNKHATQSLANINNKLSADREDILERIDTINEVLRRTEFRVGSYLKLGTSKERYPHVVDFERKLRNVLGQVTSDDHEGRFNALSDVVSILDKASSSGTSGSLESLRLLDPRYQMTFFAEEVDATTLEIRDVLRSSSGKSGGEKESFAGMVVAASLAYVLTPDGYDRPVYSTVFLDEAFSNTAESVSRRVLKVFKELHIHVSLITPYKNLNLARESARSLLIAERDAENHESRLCELTWQQIDQKLAEAKRLSVMGDAESLGIGIDE

SEQ ID NO: 32873 - protein, 407 aa, Marinobacter sp. ES-1
MSDRSWGLMPRDVIERLREKEWYQRRALKARLKGERPFPVSVSLKPPRGQEAVSDLEHFHRFVSAWRAFPNQGCVQWESQSFRQLSVQRVPVRFRVADIGTLAELLGEQEQTALGNWERRIGNILAQPFAQDEKIQRGLFSALVDNLEALTSFTEDELGLLVGLVPQLKAGLGGGRYLRALPLTQVDTKFVEQNLHLIECLLDVLWRGEVSASGGLLAWLTCIENPKGWLFVRPLCDSSQTALGGLPILQMDTATLLAVELPASNILVVENVQSGLGLPPLDNTIAVFGGGKNVSWLSAPWLQAKNVGYWGDIDSEGFAILSDARRRCKNIESIMMDEQVVEKFTSRMVDEPNSVDAPPAYLEEQESRLFHKLRQGDFAKPRLEQEKLAADFIFQRLRCWAIKRIEE

SEQ ID NO: 32874 - protein, 484 aa, Alcanivorax sp. P2S70
MFFSDERAQFFKPLTGKYREQVVECLRLLHERLYSAKADYGESLKRDQVLDVFSEALERAPLLDGDEDGGRFRNNREQAGWILNLLVEHGWLKRDKDEASFQSTYPFSRTGRLFTQTLAEVDGRSVRTRHRNTRNTLNALAAFVDRGEVYDLLDAHEHSERIIADFTDIIAELEERKRELVKEVEAQQLVQQASDQFFDFMEKRFQPDVAIRMSADSVEKHRDRIQNTIEQIKRKPKTWKANAEKELRRLAPDLIVSQDASVLFQLLDSIETRMRNASEIMLPALRRTLQGFTRRADIIIRQLSYLHSQKHNDIVGLCKELSELDEETYNARLQHAGDSLASLHLGFVDPAQVRLREQRSQRVVHSRMVELEDPDADTLRELATQQLLEKAFNINGGALRDYLRDALGASRRIDNRDLPINTARDLLALSHVIELGSADHAANGFRLRITPTDPITDEHYFVRRDGFLLELEHDEPSTATTRPE

SEQ ID NO: 32875 - protein, 230 aa, Alcanivorax sp. P2S70
MSQAPLQHALSEALNARGVTQAQFSELMIRLLDHGVLCRSESKKEAELYDRYLQIPELVEDYLSVLHIRLHHERRFTSLRLFPPGAEIPGEADSDDGFNSGLRNRLSQQEVALILVLRAEYDKSLRDGQIDEHGQATLPLEAINLASKNLLGRPLPEGRTERDALFRRMRQLRLIRSDGDNSLEDNETWLTIRPDITSLVTDTVLSQLLGDDNKPASNDDAEDNKEQDQQ

SEQ ID NO: 32876 - protein, 1217 aa, Alcanivorax sp. P2S70
MYLKRSITVNWGNLPPGELEYGPVNLFSGGNGSGKTTAADALQTLMTAAHDNLFNYNPGQDETTQRGRGGKQVRTLASYVLGCDDGAYARPYDSDGYIAGVFHPTKGETAEPFTAVIGVRAHLDKAGSTSQARQQELLLMIVPGEMLNLSHFVREYGGEKATVPITEIANQLRQQFGKKNVETYDKKGQYLARLYGALRGKRDAVSQQEAKNAARTFARFMAYKPVESINQFVASEVLEPHDMGDTLRRIRDLMRTVHGMAEEAEQLQQNVNLLAQAQSHTDTYLDTWLERTTQAYGAAAQQFQRNQKQYLEKKEEQNSLRQQQEGNREEAEQVQQRLDQAHAELVELQARILGIPALRDKQQLEKQLADLTQQLQQGARPLLEQDQQRNKNLEALRNIQSLLARHSIELELPSFASKHWRSTSKALLAEQSNALPDLNQMLARDWIDLSPLEDGLTRVRSEQQLHNQLAEQLHSEREDKPGQEALSVAQRLDRIVSKRGQALETLDQQQKKIEQQIRNLESKRVNYPQDVEIAIHAIRQECPQAEPRVLCDHVEVQAPDWQMAIEGYIGGARFGILVEPNHEAEAIRIVRRLSGKQRNRARVIQGEQARRDAERVQLPDDSLFHALRFSHRTAEHYLKASYGSVVCVEDAEALRRTRRGITADGLGSGGYAMFRCDLPDSDLVFGEAARERNLNAQRNALMELQENYQRAADDYQSVRQLHTQVKAFQPLHWVNAATQLLDVQRQLQETEKALATLDLSDHEELEEKQQQAKTLHQELEAKQKQLTEENGKLSEKLSACSKTISTLADQSEQFQEKQDEAEANLHGCTKYWPGLDVEPRIAAMDERLQNAHGDIDFIAEETALTEQLTKTAVALEKTLNQYNQQAQPADQILADSADALHSAPFFGHVQSLHQQLDNLHNRLRNNVLLEKQEKLTSLRDTFNTTFVSDLCSQIHQAIQDGERILKSLNSELEHHQFGADCERFSFEWQWIPEYKEYWNFFKEVIDIPNLGDGTSLFDTPLSAKAEAVRDRLLNLLLDGDEQQALRELERISDYRRYRQYDILKHPQGKQPISLSQYGTGSGGQLETPAYIIRAAAITSAFRFNEGDSHLRMVIVDEAFMHMDESRSKSVINYLTHTLGLQLIFIMPTSKAGPFLDLISNQFVFSKVPSPMAVGELNTRVLVDRQQLNQERISELWEQHRRVIRQQGALDFMEEVNG

SEQ ID NO: 32877 - protein, 467 aa, Marinobacter sp. EVN1
MSFATLNTNLFKAIAGDNGRLMLDLLLELDAFLDPAQLADEPTPLQVRVFLRDYLANSHLRLEIESGEAATTPQSPEHYVYYRLRDTGWIREELEIGYRYVVWMAQEGRRLLQFLRSMGAEHPSLGVVCLSVRSNLAEVVKDPANGSLIRKAADDMEGFLNRLRALVGNIREIHYVISGGDVSGSGNFNFYFEEYLGELFLPNIEKLALKGNPNLHASKIRKLVSDIRFSLERLEVCAKAYQRDDIANPSIETVEADLDRLSLAFDGIGPLFKKTQDYARRITRRMHERIKYTVHTPSNIGQQIEDLLDLIGRDDSIETLPSPVISEKLISESRLAKPKAKSVPAVATVRRQSKPLWEKRAYNQLKQEHIHFQRYDPDRVVSFIETNMGDRAQMTTDDLTIKTADDMMAALHLRLLAQGVSKTHALYPLLAEYSVTFDEHEWTQLEYMAGRRLIITRQAFSEISRND

SEQ ID NO: 32878 - protein, 220 aa, Marinobacter sp. EVN1
MINDIVLRELKEIASRNSDDYADTLRNTAAYLLQKQWVWKGKRGQKEHFKVCEDNATYFHKLFDALDMDWYYDRNFGYVGVLPRGTGSQLDVTATVFLLILRKMYDTEASMGRTDLGRVTPPTVELLNQYEQVKGERPILTATVEALDTLRKRGIIELGPRDPDTRLPDVTVLPNITRVVGPAFLGSLENFMNSYAPDSEPGDESHLSTDPAEASDDNAE

SEQ ID NO: 32879 - protein, 1165 aa, Marinobacter sp. EVN1
MPAHFLQNFVFAQWYLLDLETLEVGVAASLLSGENGAGKTTIFDAIQFVLMGGDQRRISYNAASDGKASGRSARSYALGEFKENDVTTFERESANTYIFLNWYDHHQQPYSFGVSIHATQQSASIETRGHIIKGRHVSEVDLLSSEDTFLPWREFVDRMKLTAKEYRGSMSYEMIDGARIMREKFAEMMSVDQTRSGKIEPEMLVKTLSSALQLKMDSPIDSFIRDFILPPEPIETEQLREDLLEHRRIEDEITRAESHKLAREALITEADKVTKHRTDAHFELWVSQEAEVARLDERNSGLEDRLDQQQDKLEEAERTIKQQTPRLPELKKRHEEALIAWQYSDAASLSKTVEAAEQNVTQATTRFAELTTSLRNTVGEITRQRFADTLDITSFEQLAERWVECSDLLARADVASLSPSDHENTAKVTADLLDARPVLDEISTRLETADKHVSHELKQITDDGAALQSRVERLKNGLSDIHPSTSLTIELLKQKGIQAVPVCDVCEITNSEWQEAVESYLGPNREALVVATEDFGHALEIYEATQKQSPRIRRARLINPDLALRENKSPTVGMVSTLIETQDPVARGFMNIILDRTKMAATRDELRRERKALMASGLTAGGATIGGTSQIDGLLIGKHAKAQQLERLEKELDSLARRVARLSGPSTTLSKLNRQWAGVCAAVNDGAVALQEQSQSLAACEQTLSHAREQLQPLTSEDERLKSAKEKAEQAHYNCNEKITQARSDKQQAEATIKSLKADLEQVRPFLERAREQRRHTEASELHDMNKALERWEAYEQKYDGAEGRYALIRNEAEGKKNTAREKELRSRGDLHVKVIQFTNDFSEDIANRAELLGAAKPENDDSDAYSVIKTDCTDWVERILEAQLLDHRQAAQEAAEQMEMNFRGIIVGELQNRFDQMRYTFQQLNSVLKRIPFHDNIYSFHFKLRETESLATVYEYITTVDREQAELVGTLFEKDSEHPALELLKEALISGDDLINEIRDYRSFFQYDMKMRNPNTGEERRVTEMQSTGSGGEKQTPAYIALAASFMNVYKIRENSPRGASLVLLDEAFNNMDGGNASGAVAFLKEIGLQLIVAAPPEVTLKIGKEMDQIYTICREGRDVVIDHTKIFEGGHKLIDQRNPVYHPELVIERAAELKAKAETITGV

SEQ ID NO: 32880 - protein, 416 aa, Marinobacter sp. EVN1
MSNHVETFLAQLIKHIDRPDGVVPQARIRITDHAYRWYFALNNSAKTALHRSLEALEHLDIQYQRRVALGAFKHIEAVQITDGCRLMASQGLTPLADDIELAFEQLEAAEFNIPWWETTKRDIAEAWSANKTFNGVKRQQSARLFDAMKVVEWIVQSEDTSPVPEMKTLSTMLFNDSKKLEEKSFANLIRRLMVGQLDDDVANLMDDGPKLLEHYGISKYPMPMRFKANALLFCRGVVDLSALHYGIGVSPDEIKGIEWRQRPPYLLFIENRASFERYVREIDDAGVVIYTAGFPPRAWLHAIEIIIAEVQDEVPVYHWGDRDVGGYRILAFLAKRLNIDIQPYLMGLDASIRSQGDDELKEIPVAGLMQAIESARGYPAISELYEHLGNCQRTSLLWIEQEQIAPLSPLDKTRAL

SEQ ID NO: 32881 - protein, 226 aa, Candidatus Symbiobacter mobilis CR
MDTVEHETPLAPTPTAAQPAVPELSILLVHLLKGVLYREDDERLWASLLRLQARVREQAAVLLLDLVLDESEGFAFLQSRPDPEESDGAPRLPRLVVRRPLSYPVSLMLALLRKRMAEFDAAGSDTRLVLLRDDIVELMRVFLPDGTNEARLIDQVDSTITKVVDLGFLRRLKGAAGTAPDRGRYEVRRILKAFVDAQWLANFDARLEQYRTALSGGAQTKEAADA

SEQ ID NO: 32882 - protein, 974 aa, Candidatus Symbiobacter mobilis CR
MREAPTQGLDFVADDSRVGFRLERLEVLNWGTFDQRVWRLPLHGRNGLLTGDIGSGKSTLVDAVTTLLVSAHRVAYNKAAGAESRERTLRSYVLGHYKSERNEGYDQSVTLAQVFWLKDPQGQPARLLVGADRSLGIAEDFAGFGSDIAALRKKLRGAGCELFDGYQSYGAWFRRRFGIEHDQALELFHQTVSMKSVGNLTDFVRNHMLEPFDSEQRIDVLLQHFDDLDRAHQAVLKAKRQVELLTPLITDGHRHAALSAEIQGLREGRDALRPYFARCKTVLLDRRLELLTQDALKLDAQIERLSVERDTGREEVGRIERALRDNGGDRLEQLAKLEEFTHYPDIDWQAVARDIAQLLDERQRLEAAADALQELGRQLAAARGRLAVTERTLDDARGKRGEVKSKLEAAEALRQQAPAIVDATVLDDGQTTRLDGWRAEALGEHQLSVESCDNREQDVRRWLQERIDSEDKRLARLAERLVKAMAGFQDEFKAETVEMDTALAALPEYERLLTGLQRDDLPRFEARFKDLLNVNTINEIANFNAQLARERETIKERVEFINQSLQAIDYNPGRFIKLVAQPSPDAEIRDFQQDLRACTEGALTGSGDEQYSEAKFLQVKAIIDRFRGREGLSDADRRWTAKVTDVRNWFLFSVSERWRADGVEHEHYSDSGGKSGGQKEKLAYTVLAASLAYQFGLEWGAVRSRSFRFVVIDEAFGRGSDESAQYGLRLFQQLNLQLLIVTPLQKIHVIEPYVASVGFVHNEPRRRISRSSGGSGPIGCKDASVCRLPCGSCRLMKRSHGSARGALRNHCRACGSTPAIHSPPCSRGCANVPCRHWPCPPKPSTRTLPAPRNSPGATGFWTSQCAFASACSTPRYPACRGAWAVRISRLMLQVLRGWRCLWSACSSPRTRPISSRSRPCPVQSSCSGPDMDGRRWPAQTGCIAAPCTTGGTSTPTASPFWTSCAGTFPIPHPC

SEQ ID NO: 32883 - protein, 89 aa, Candidatus Symbiobacter mobilis CR
MDKETLLAHREHWGEEPDQACHDLRRLTPDEASLYDALRCDRFQERLRLEQERIGYHHLLAQLGLAPYPSQPHPFPPVFSRTNLHASAG

SEQ ID NO: 32884 - protein, 483 aa, Leifsonia rubra CMS 76R
MSALSKSHQFRFLVETDATWRLLRTDNAAVIVALLGEHLSGENRRMLAAELYEAIDHDLGMLRANEFELPQTAQAYCAEWRKAGFLIRRPAEDTRGETFELSPGALGALRFVEQLAAPRQTVTESRLSSIATQLSQLAIDTDPDTTRRLEQLHAQRDRLDAQIERINAGEEDIIDPARAAERVHDILAQAEELPSDFARVRAKFEELNRDLRARIVESDASQRAVLDEVFRGVDLISESEEGLSFSGFSTLVLDPAVGTAFDDDIERVLDRDFAGKLRPSDRRFLRRFITTLKDHSGEIHDVITAFARGLRRYVQSQDYQHDRKLRELLREAQASGVEASRHIKPYSPTHLRLELSAVALSSAGAIRLYDPGEQNASTPIVRHEPEAADLEVLRALARATEIDFAELTNTVNEMLEHADNFTVGDVLTRYPATQGVASVVGLLTLAAHQGELADGVETVHWRGVDHQARAATIRTHRFTRRLQ

SEQ ID NO: 32885 - protein, 207 aa, Leifsonia rubra CMS 76R
MNDEPDLEASIRPLWNGDTGVLVEQSRRALLELIKGPYLSGAKTTTLWSALLSDEVAIRSRLHELFLELIVDRVAEFAFVRNVATDELGIPNAVRTAPLTFLDTAMLLVLRRMLLSADSDGRVIVGQEEVYEQLDVYRSTDRDEHDFDRRLNSSWNNMKNKLRVIHQAGEEDRAEISPVLRLIVDAEQISAISAEYQRIAADERLTS

SEQ ID NO: 32886 - protein, 1119 aa, Leifsonia rubra CMS 76R
MTLLEMPDAGPKEHGTDGDNGSLHIGQWRLAHVEVLNWGTFDGLYEVDIARKGHLFTGASGSGKSSLLDAIATVLTPDRWLRFNAAAQESQTRNDDRSLVSYVRGAWSKEADEHLDRAVSTHLRKDATWSGILLRYENERDAPVTVVRLFHLRGSSVDKSNLKDACFIDRGEVKLLDFEELVLSGIEARRIKGTWPDAVVTTNWSHAPFYAKLQRLLGISSHNALHLLHKTQSAKNLGSLDQLFRSFMLDEPATFARAKNAVEQFGELRDAHHHVVELRRQSEHLQELEASIAQYEQASAEAAEAERLGDLIDPFQDRLTLRLADEERGTLRAEQAQSQESARRAYAARDDAVERLRAAERQALQLGGSDVSQLQARLADATAAATTTSSRWERFGEEVGSVGITSPPTTGAEFGELQESSRRELEQPAPELAHDTDDNQQYFSARDELKKIDRELDELRSRKSNLPAPLLVARKQLADELGLGETALPFAGELIEVLPEYTEWTGAIERVLYPLASALLVRDEHLAEVRRKVEQRTLGARLVFEAVPAIVGPTKAAKSDQSLLHRIRVTSGGFGSWLQTRVASEFDYACVEHPDQLDTVERGVTIGGQVKKSARRYEKNDRYAVTDRRQWILGADNEAKIELLLDRRREASQQQDESRLRLERASTKRDATVKRRTVLESIVRHDWAELDRTAANELVHARRRQLDELTTGNTELHDAIAAEGGARERLRSAETIARDATLQLGRVENRLVEVDTLITTLSNRMVDNAIADVDAIALEKRYRSVQRKIDRQSVEGVGRKVAEALHRASISAQATLRSAESTFAKGAIGFRGHWPAAAADLTESIDDREGYRALLADIQARGLPEHESNFLRLLREKSRDLIGHLLSDIRDAPKQVVDRIDPVNASLGRSRFDIERYLRIEVKTRRAPEVTEFMGDLKSVVDGAWNDENLVAAESRFAVLNRVMARLGSSDNADLAWKRRCLDTREHVTFMAHEVDLAGRVVNVHDSSAGLSGGQRQKLVIFCLAAALRYQLAADQDEVPSYATIILDEAFDKADSRYTRMAMDVFVEFGFHMILATPEKLLQTIEPYVGAVSSITNPTRRESLIASLMFKPHDPASGA

SEQ ID NO: 32887 - protein, 398 aa, Leifsonia rubra CMS 76R
MATHSMVTVAEAQQRARKMVEGSQRQWAATGGETVRLEVVLHPPTERTVQLDVVGAIAWTQSWRELASTDPSADVTWTDRQWPSAGRQSVPQRCVLVGADVIAAFAGSGVARSWRTLRDRAARLRAEFSCAADFPSADPEKALDALAAAIRTHAGKLQLLPEKDFETLIPVISWLAEHPTSGWRIRQLPIRGIDTKWLERHRSIVEGLHTAVTGRSSLGLLASPTQLRVRFLDPTMRPGGMSDVSASVDELAALDIVPHVVFVFENLETVLAMPETPGAVVVHGSGYAAPRLGAIPWIRNGEVIYWGDLDSDGFSILHALRSGCPDVTSVLMDDETLFAYRDLWVPETKPAAGVYPSLTPTELRTLEHIRSEGNVRLEQERIDWQFALGKLRDAAGIV

SEQ ID NO: 32888 - protein, 489 aa, Corynebacterium sp. KPL2004
MSVEARALSLRRLLHDSAAVRLLAADNAPVILALIAEYFPRGTRARPAAEVYELMVTDFEVLASEFSMPRTPQSYCNDWVKAGWLVRKSGKSSRGETLEPSEEALSALEAVERWETPVTTVTASRVESIGSALQRLARDTNEDISSRVASLEAERDRIDREIEKAHLGQFERLTAAETQERVQDVLNMAMAVPSDFARVRHELEALNHRLRRQLLDPEGYRGEVLEEIFSGVDHIAESDAGRSFRGFYSYLMDRERSAWLDQWIKQVLESDVGQELAPENRRQLRNLFRDMEETSFEVNQTMTGLARSLRNYVSSEQFAEDRRMIELLREARGMAIDAAQASELKAFHRMETPLQRIGMCIHSVSRIHLANPGREVVEEAPEAFQPGQENAEALYELVRESEIDFEELHGAIRGAVGKAGPCTIGQVLQAYPPTQGLASVVGLVHIADQHPLPALHDAHEKITWTEEDGTIRAAYIPTMYFDSTTVEEL

SEQ ID NO: 32889 - protein, 216 aa, Corynebacterium sp. KPL2004
MSATDNHRVDSAHEPPLWESDKGSLTYNSRRALVQLLKGPLVRAHKEPVLWSAIISDEDNLRARLHEVFLELVVDEAEGFAFTRMVEEETLPIPQVLRTDKLKHIDTAILLNLRQELGLALPGERVIVDVEDLREGIGYVRAVDNRDEAGFNNRFNAAIKRIRNEYSLLSATETEGRYEVSPVLRQLFDAATVTAIRDEYARLAEAESDQEEASDD

SEQ ID NO: 32890 - protein, 1123 aa, Corynebacterium sp. KPL2004
MTNLYPGQFRISRIQLINWGTFHGYFSIPVARKGFLITGGSGSGKSTLLDAMSAVLVPQKDLKFNAASQQDLGRHNGRNLVSYIRGAWRQQENAHTGEIAPEYLREGATNSVVALTYDNGTGTQHTLIAIFRLNGGENSVSQIKRLYGVVQGDEDIDKLSPLLTRSLDTRKIKAMYKGPGASFTPTYTTFADRFRKRLGIKSEQGQVLLHRTQSAKSLSSLDQLFRDYMLDTPSTFERAEESVEQFEDLRQAYLRVEDVKAQIETLAPLPQLHSQRTTAEADKHKAEAMNEALPAVRARLVAEELDYRIRVLTAQQAEAHSAAEALEAEVTHLDDAERRAAVAVSQLSAGELAALEAKIETAEKEIEHRSKEFHHLAAAADQWTDHFELSPHGFAELQANARLRIADFEADSAQLTEQQQEAGVAARDAATASASLESELHSFSSRRTNIDKALVELRTQLAQDTGYAESELPFAGELLDIAPQQAEWEPVIQKLLHGFAATLLVPETAREAINQWVNSRNVGTRLEYRTIPEFAPAPAPARSPQQLIHKLEFQDHPMTPWVRHHISSRFNYECVSSVAALEQVTKTPAVTRDGLESRPKDKDGSTRFIKDDRTRYKGTRWYRVGSTNTAKIELLRSQLNEAKATARAMAKQVHELNRKMDILRTQRDKAQRVLETKFQDIDTASAEARKRDLQEQYDSLASSPEAQALATAHEQAKEKLTAARAQLNEAQKHLGNVEGELNRSTQRRQSIGTVPTVADQGIAKAVEEALHKGRRKLTIDDIDARRDEVQASLQETARRAARRIEETNAKIVSVLHKYLSQWPAEAADLEPQASFAGEGMEKLKFLRADRLADFRAKFLELLNGTTVQNLSHLASSLRHARSDIEQRMEFINKSLERTPFNGDRTLRIDVKDARGQVVQDFQRDLDAATSHSLAEISADDPEAAVARYHALDKILSRLGSSEPEDIRWRNLVLDTRKHVSFIGRECYPDGTTANTYQDSASLSGGQAQKLVFFCLAAALRFRLAEPDQDVPTYGSIILDEAFDRADPAFTRTAMSVFASFGFHMILATPFKLIQTLSPYVDGTIVVNYDEPIIQGRPQARTGYSLIDATTYPHKSPESTDADA

SEQ ID NO: 32891 - protein, 377 aa, Corynebacterium sp. KPL2004
MRMPSDLHTHAAKYLHNHFAEALAAPDSLSIDWPLHPPTAAAAARNVAATQEFIRAWQRWPHQEEIHYEPRNWSRTGLGTNSVPTRAALTGAPRIAAAAGLSAEYSRAHKRAHDIAAIFPDSPAFADAVYRTYAQWKDLCAYDLRCLKPCLIWLRAHPNSGEWERAVPVEGVDGKWIGTHRRLLLALLSPFGITDLGLRRTDARLRLRYLNHAPALSDIEVPLSQAAQLFPTAPPRVLIVENKQTFLALPLLSDAAPPTIAILGSGNAARQLHAIAWLHHTEITYWGDLDAAGFSILNGVRAHFPHTESLLMDTATVTAFRHLAVPDPGDGSAILSHLTTEEQRAYRLLFTEGKLRIEQERIPFAHANDAIQSTFQR

SEQ ID NO: 32892 - protein, 489 aa, Corynebacterium sp. KPL1998; identical to SEQ ID NO: 32888

SEQ ID NO: 32893 - protein, 216 aa, Corynebacterium sp. KPL1998; identical to SEQ ID NO: 32889

SEQ ID NO: 32894 - protein, 1123 aa, Corynebacterium sp. KPL1998; identical to SEQ ID NO: 32890

SEQ ID NO: 32895 - protein, 377 aa, Corynebacterium sp. KPL1998; identical to SEQ ID NO: 32891

SEQ ID NO: 32896 - protein, 489 aa, Corynebacterium sp. KPL1996; identical to SEQ ID NO: 32888

SEQ ID NO: 32897 - protein, 216 aa, Corynebacterium sp. KPL1996; identical to SEQ ID NO: 32889

SEQ ID NO: 32898 - protein, 1123 aa, Corynebacterium sp. KPL1996; identical to SEQ ID NO: 32890

SEQ ID NO: 32899 - protein, 377 aa, Corynebacterium sp. KPL1996; identical to SEQ ID NO: 32891

SEQ ID NO: 32900 - protein, 489 aa, Corynebacterium sp. KPL1986; identical to SEQ ID NO: 32888

SEQ ID NO: 32901 - protein, 216 aa, Corynebacterium sp. KPL1986; identical to SEQ ID NO: 32889

SEQ ID NO: 32902 - protein, 1123 aa, Corynebacterium sp. KPL1986; identical to SEQ ID NO: 32890

SEQ ID NO: 32903 - protein, 377 aa, Corynebacterium sp. KPL1986; identical to SEQ ID NO: 32891

SEQ ID NO: 32904 - protein, 470 aa, Corynebacterium sp. KPL1859
MRLLAAENAPVILALISEYFPRGTRARPAAEIYELMVTDFEVLASEFPMPRTPQSYCNDWVKAGWLVRKSGRSSRGETLEPSEEALSALEAVERWETPVTTVTASRVESIGSALQRLARDTNEDISSRVASLEAERDRIDREIEKAHLGQFERLTAAETQERVQDVLNMAMAVPSDFARVRHELEALNHRLRRQLLDPEGYRGEVLEEIFSGVDHIAESDAGRSFRGFYSYLMDRERSAWLDQWIKQVLESDVGQELAPENRRQLRNLFRDMEETSFEVNQTMTGLARSLRNYVSSEQFAEDRRMIELLREARGMAIDAAQGSELKAFHRMETPLQRIGMSIHSVSRIQLANPGREVVEEAPEAFQPGQENAKALYELVRESEIDFEELHAAIRGAVGKAGPCTIGQVLQAYPPTQGLASVVGLVHIADQHPLPALHDAHEKVTWTEEDGTIRAAYIPTMYFDSTTVEEL

SEQ ID NO: 32905 - protein, 216 aa, Corynebacterium sp. KPL1859
MTATDNHRVDSAHEPPLWENDKGSLTYNSRRALVQLLKGPLVRAHKEPVLWSAIISDEDNLRARLHEVFLELVVDEGEGFAFTRMVEEETLPIPQVLRTDKLKHIDTAILLNLRQELGLALPGERVIVDVEDLREGIGYVRAVDNRDEAGFNNRFNAAIKRIRNEYSLLSVTETEGRYEVSPVLRQLFDAATVTAIRDEYARLAEAEGDQEDASDD

SEQ ID NO: 32906 - protein, 1123 aa, Corynebacterium sp. KPL1859
MTNLYPGQFRISRIQLINWGTFHGYFSIPVARKGFLITGGSGSGKSTLLDAMSAVLVPQKDLKFNAASQQDLGRHNGRTLVSYIRGAWRQQENAHTGEIAPEYLREGATNSVVALTYDNGAGTQHTLIAIFRLNGGENSVSQIKRLYGVVQGDEDIDKLSPLLTRGLDTRKIKAMYKGPGASFTPTYTTFADRFRKRLGIKSEQGQVLLHRTQSAKSLSSLDQLFRDYMLDAPSTFERAEESVEQFEDLRQAYLRVEDVKAQIETLAPLPQLHSQRTTAEADKHKAEAMNEALPAVRARLVAEELDYRIRALTAQQAEAHSAAEALEAEVTHLDDAERRAAVAVSQLSAGELAALEAKIETAEKEIEHRSKEFHHLAAAADQWTDHFELNPHGFAELQANAHLRIADFEADSAQLTEQQQEAGVAARDAATASASLESELHSFSSRRTNIDKALVELRTQLARDTGYAESELPFAGELLDIAPQQAEWEPVIQKLLHGFAATLLVPETAREAINQWVNSRNVGTRLEYRTIPEFAPAPAPARSPQQLIHKLEFQDHPMAQWVRHHISSRFNYECVNSVAALEQVTKTPAVTRDGLESRPKDKDGSTRFIKDDRTRFNGTRWYRVGSTNTAKIELLRAQLEEAKATARAMAKQVHELNRKMDILRTQRDKAQRVLETKFQDIDTASAEARKRDLQEQYDSLASSPEAQALATAHEQAKEKLTAARTQLNQTQKHLGNVEGELNRSTQRRQSIGTVPRVEDQGIAKAVEEALHKGRRKLTIDDIDARRDEVQANLQETARTAARRIEETNTKIVSVLHKYLSQWPAEAADLEPQASFAGEGMEKLKFLRADRLADFRAKFLELLNGTTVQNLSHLASSLRHARSDIEQRMEFINKSLERTPFNGDRTLRIDVKDARGQVVQDFQRDLDAATSHSLAEISADEPEAAVARYHALDKILSRLGSSETEDIRWRNLVLDTRKHVSFIGRECYPDGTTANTYQDSASLSGGQAQKLVFFCLAAALRFRLAEPDQDVPTYGSIILDEAFDRADPAFTRTAMSVFASFGFHMILATPFKLIQTLSPYVDGTIVVNYDEPIIQGRPQARTGYSLIDATSYSQESPESTDADA

SEQ ID NO: 32907 - protein, 380 aa, Corynebacterium sp. KPL1859
MRMPNDLHTHAAKYLRNHFAKALSTPDSLSIDWPLHPPTAANAARDVPATQEFIRVWQRWPHQEEIHYEPRNWSRTGLGTNSVPTRAVLTGAPRIAAAAGLSAEYSRAQQRAHDIAAIFPDSPAFADAVYRTYAQWKELNAYDLRCLTPCLTWLRAHPDSGEWERAVPVEGVDGKWIGTHRRLLLALLSPFGITDLGLRRTDARLRLRYLNHAPALSDIEVPLSQAAQLFPAAPPRVLIVENKQTFLALPLLSDAAPPTIAILGAGHAARQLHALAWLHDAEITYWGDLDAAGFSILNGVRAHFPHTESLLMDTATVTAFRHLAVPDPGDGSAALSHLTTEEQRAYRHLFTEGKLRIEQERIPFAHADDEIQSIFGGHKV

SEQ ID NO: 32908 - protein, 470 aa, Corynebacterium sp. KPL1855; identical to SEQ ID NO: 32904

SEQ ID NO: 32909 - protein, 216 aa, Corynebacterium sp. KPL1855; identical to SEQ ID NO: 32905

SEQ ID NO: 32910 - protein, 1123 aa, Corynebacterium sp. KPL1855; identical to SEQ ID NO: 32906

SEQ ID NO: 32911 - protein, 380 aa, Corynebacterium sp. KPL1855; identical to SEQ ID NO: 32907

SEQ ID NO: 32912 - protein, 489 aa, Corynebacterium sp. KPL1824
MSVEARALSLRRLLHDSAAVRLLAADNAPVILALIAEYFPRGTRARPAAEVYELMVTDFEVLASEFSMPRTPQSYCNDWVKAGWLVRKSGKSSRGETLEPSEEALSALEAVERWETPVTTVTASRVESIGSALQRLARDTNEDISSRVASLEAERDRIDREIEKAHLGQFERLTAAETQERVQDVLNMAMAVPSDFARVRHELEALNHRLRRQLLDPEGYRGEVLEEIFSGVDHIADSDAGRSFRGFYSYLMDRERSAWLDQWIKQVLESDVGQELAPENRRQLRNLFRDMEETSFEVNQTMTGLARSLRNYVSSEQFAEDRRMIELLREARGMAIDAAQASELKAFHRMETPLQRIGMSIHSVSRIQLANPGREVVEEAPEAFQPGQENAEALYELVRESEIDFEELHGAIRGAVGKAGPCTIGQVLQAYPPTQGLASVVGLVHIADQHPLPALHDDHEKVTWTEEDGTIRAAYIPTMYFDSTTVEEL

SEQ ID NO: 32913 - protein, 216 aa, Corynebacterium sp. KPL1824
MSATDNHRVDSAHEPPLWESDKGSLTYNSRRALVQLLKGPLVRAYKEPVLWSAIISDEDNLRARLHEVFLELVVDEAEGFAFTRMVEEETLPIPQVLRTDKLKHIDTAILLNLRQELGLALPGERVIVDVEDLREGIGYVRAVDNRDEAGFNNRFNAAIKRIRNEYSLLSATATEGRYEVSPVLRQLFDAATVTAIRDEYARLAEAESDQEDASDD

SEQ ID NO: 32914 - protein, 1123 aa, Corynebacterium sp. KPL1824
MTNLYPGQFRISRIQLINWGTFHGYFSIPVARKGFLITGGSGSGKSTLLDAMSAVLVPQKDLKFNAASQQDLGRHNGRNLVSYIRGAWRQQENAHTGEIAPEYLREGATNSVVALTYDNGTGTQHTLIAIFRLNGGENSVSQIKRLYGVVQGDEDIDKLSPLLTRSLDTRKIKAMYKGPGASFTPTYTTFADRFRKRLGIKSEQGQVLLHRTQSAKSLSSLDQLFRDYMLDTPSTFERAEESVEQFEDLRQAYLRVEDVKAQIETLAPLPQLHSQRTTAEADKHKAEAMNEALPAVRARLVAEELDYRIRALTAQQAEAQSAAEALQAEVTHLDDAERRAAVAVSQLSAGELAALEAKIETAEKEIEHRSKEFHHLAAAADQWTDHFELNPHGFAELQANARLRIADFEADSAQLTEQQQEAGVAARDAATTSASLESELHSFSSRRTNIDKALVELRTQLARDTGYAESELPFAGELLDIAPQQAEWEPVIQKLLHGFAATLLVPETAREAINQWVNSRNVGTRLEYRTIPEFAPAPAPARSPQQLIHKLEFQDHPMAPWVRHHISSRFNYECVNSVAALEQVTKTPAVTRDGLESRPKDKDGSTRFIKDDRTRFKGTRWYRVGSTNTAKIELLRSQLAEAKATARAMAKQVHELNRKMDILRTQRDKAQRVLETKFQDIDTASAEARKRDLQEQYDSLASSPEAQALATAHEQAKEKLTAARAQLNEAQKHLGNVEGELNRSTQRRQSIGEVPRVEDQGIAKAVEEALHKGRRKLTIDDIDARRDEVQANLQETARRAARRIEETNAKIVSVLHKYLSQWPAEAADLEPQASFAGEGMEKLKFLRADRLADFRAKFLELLNGTTVQNLSHLASSLRHARSDIEQRMEFINKSLERTPFNGDRTLRIDVKDARGQVVQDFQRDLDAATSHSLAEISADDPEAAVARYHALDKILSRLGSSEPEDIRWRNLVLDTRKHVSFIGRECYPDGTTANTYQDSASLSGGQAQKLVFFCLAAALRFRLAEPDQDVPTYGSIILDEAFDRADPAFTRTAMSVFASFGFHMILATPFKLIQTLSPYVDGTIVVNYDEPIIQGRPQARTGYSLIDAATYPQESQESPNADA

SEQ ID NO: 32915 - protein, 377 aa, Corynebacterium sp. KPL1824
MRMPSDLHTHAAKYLRNHFAEALASPDSLSIDWPLHPPTAANAARDVPATQEFIRAWQRWPHQEEIHYEQRNWSRTGLGTNSVPTRAVLTGAPRIAAAAGLSAEYSRALQRSHDIAGIFPDSPAFADAVYRTYAQWKDLCAYDLRCLKPCLIWLRAHPNSGEWERAVPVEGVDGKWIGTHRRLLLALLSPFGITNLGLRRTDARLRLRYLNHAPALSDIEVPLSQAAQLFPTAPPRVLIVENKQTFLALPLLSDAAPPTIAILGAGNAARQLHALDWLHDVEITYWGDLDAAGFSILNGVRAHFPHTESLLMDTATVTAFRHLAVPDPGDGSAMLSHLTTEEQRASRLLFTEGKLRIEQERIPFAHATDAIQSTFQR

SEQ ID NO: 32916 - protein, 378 aa, Corynebacterium sp. KPL1818
MRWEALRGSSPLTRGAPIGSALQRLARDTNEDISSRVASLEAERDRIDREIEKAHLGQFERLTAAETEERVQDVLNMAMAVPSDFARVRHELEALNHRLRRQLLDPEGYRGEVLEEIFSGVDHIAESDAGRSFRGFYSYLMDRERSAWLDQWIKQVLESEVGQELAPENRRQLRNLFRDMEETSFEVNQTMTGLARSLRNYVSSEQFAEDRRMIELLREARGMAIDAAQASELKAFHRMETPLQRIGMSIHSVSRIHLANPGREVVEEAPVAFQPGQENAEALYELVRESEIDFEELHGAIRGAVGKSGPCTIGQVLQACLPTQGLASVVGLVHIADQHPLPALHDDHEKVTWTEEDGTIRAAYIPTMYFDSTTVEEL

SEQ ID NO: 32917 - protein, 216 aa, Corynebacterium sp. KPL1818; identical to SEQ ID NO: 30983

SEQ ID NO: 32918 - protein, 1123 aa, Corynebacterium sp. KPL1818
MTNLYPDQFRISRIQLINWGTFHGYFSIPVARKGFLITGGSGSGKSTLLDAMSAVLVPQKDLKFNAASQQDLGRHNGRNLVSYIRGAWRQQENAHTGEIAPEYLREGATNSVVALTYDNGAGTQHTLIAIFRLNGGENSVSQIKRLYGVVQGDEDIDKLSPLLTRNLDTRKIKAMYKGPGASFTPTYTTFADRFRKRLGIKSEQGQVLLHRTQSAKSLSSLDQLFRDYMLDTPSTFERAEEAVEQFEDLRQAYLRVEDVKAQIETLAPLPQLHSQRTTAEADKYTAEAMNEALPAVRARLVAEELDYRIRALTAQQAEAHSAAEALEAEVTHLDDAERRAAVAVSQLSAGELAALEAKIETAEKEIEHRSKEFHHLAAAADQWTDHFELNPHGFAELQANARLRIADFETDSAQLTEQQQEAGVAARDAATTSASLESELHSFSSRRTNIDKALVELRTQLARDTGYAESELPFAGELLDIAPQQAEWEPVIQKLLHGFAATLLVPETAREAINQWVNSRNVGTRLEYRTIPEFAPAPAPARSPQQLIHKLEFQDHPMAPWVRHHISSRFNYECVNSVAALEQVTKTPAVTRDGLESRPKDKDGSTRFIKDDRTRFKGTRWYRVGSTNTAKIELLRSQLAEAKATARAMAKQVHELNRKMDILRTQRDKAQRVLETKFQDIDTASAEARKRDLQEQYDSLASSPEAQALATAHEQAKEKLTAARAQLNEAQKHLGNVEGELNRSTRRRQSIGTVPTVADQGIAKAVEEALHKGRRKLTIDDIDARRDEVQASLQETARRAARRIEETNAKIVSVLHKYLSQWPAEAADLEPQASFAGEGMEKLKFLRADRLADFRAHFLELLNGTTVQNLSHLASSLRHARSDIEQRMEFINKSLERTPFNGDRTLRIDVKDARGQVVQDFQRDLDAATSHSLAEISADDPEAAVARYHALDKILSRLGSSEPEDIRWRNLVLDTRKHVSFIGRECYPDGTTANTYQDSASLSGGQAQKLVFFCLAAALRFRLAEPDQDVPTYGSIILDEAFDRADPAFTRTAMSVFASFGFHMILATPFKLIQTLSPYVDGTIVVNYDEPIIQGRPQARTGYSLIDATTYPQESPESPNADA

SEQ ID NO: 32919 - protein, 377 aa, Corynebacterium sp. KPL1818
MRMPSDLHTHAEKYLRNHFAEALAAPDSLSIDWPLHPPTAATAARNVAATQEFIRAWQRWPHQEEIHYESRNWSRTGLGTNSVPTRAVLTGAPRIAAAAGLSGEYSRAQQRAYDIAAIFPDSPAFTDTVHRTYPQWKDLTAYDLRCLKPCLTWLRAHPNSGEWERAVPVEGVDGKWIGTHRRLLLALLSPFGITDLGLRRTDARLRLRYLNHAPALSDIEVPLSQAAQLFPTAPPRVLIVENKQTFLALPLLSDATPPTIAILGAGNAARQLHALDWLHDVEITYWGDLDAAGFSILNGVRAHFPHTESLLMDTATVTAFRHLAVPDPGDGSAMLSHLTTEEQRAYSLLFTEGKLRIEQERIPFAHANDAIQSTFQR

SEQ ID NO: 32920 - protein, 470 aa, Corynebacterium sp. KPL1814; identical to SEQ ID NO: 32904

SEQ ID NO: 32921 - protein, 216 aa, Corynebacterium sp. KPL1814; identical to SEQ ID NO: 32905

SEQ ID NO: 32922 - protein, 1123 aa, Corynebacterium sp. KPL1814; identical to SEQ ID NO: 32906

SEQ ID NO: 32923 - protein, 380 aa, Corynebacterium sp. KPL1814; identical to SEQ ID NO: 32907

SEQ ID NO: 32924 - protein, 450 aa, Pseudomonas aeruginosa str. Stone 130
MEDALQALSEMLAAYASQDLYEIDPDATHIQAGRELREWIKRRLVVEREGRIYATDALESAIQFVDSLDSRIMTSTASRLSVVQREIENLETGLNPSPSGRIASLRRRIQDLEHELAQVEAGHVVVLDEAQAIESIREVYNLATSLRADFRRVEDSWREADRALRQSIISEQSHRGEIVDRLLDGQDALLNTPEGRVFESFQQQLRQSAELEVMRERLRTILRHPAVPKALNRPQQRELRWLALRLVRESQAVLQARARSERDVRGFMKTGLAAEHHRVGQLLNDFFNLALSVDWQRQAVRRSTVRLPPVGVAITGVPAIERLRFKTLDDDDTGELDLSLKPAGLEQIDDDFWDAFDGLDREALIHDTLAVLVEQGRPVSLGELASLLPPAHDLETFALWLAMAREAGTEVLTEERQLVELVDEDEQRWRFNLPYVGLDHEALKDIDWEL

SEQ ID NO: 32925 - protein, 249 aa, Pseudomonas aeruginosa str. Stone 130; identical to SEQ ID NO: 32020

SEQ ID NO: 32926 - protein, 1101 aa, Pseudomonas aeruginosa str. Stone 130; identical to SEQ ID NO: 31996

SEQ ID NO: 32927 - protein, 393 aa, Pseudomonas aeruginosa str. Stone 130
MKSPTDIGRSLARQWQRSSVRLDRLLNSASWPQSFNIGKPSARLFSDNIRTVLRHVENWRSVKVGKVDWEPVSYRAGLAPISLPMRWHLRSPSEWIAATDDPSVSQEYAQLEYLVEQVDSSFHALLVAQRSLWLTKPSEEVIATAQLATQLSPGCAQGRPLRLLAEHGVDTKFFERNAILLTKLLDERFEGAASEQGLTTFLDAFEETSHWVLVVPLQPELLPFKRIRLTTSELAETSLPGSRLLVVENEQCVHLLPETLPDTLAVLGAGLDLQWLASAHLAGKQIAYWGDMDTWGLLMLARARHHQPAVEALLMDRELFDQHSLGSAVVEPAKAQELAPEGLMTDEADFYRYLLAQERGRLEQEYLPRRQVEQAISKWFGESVAPAHPERTA

SEQ ID NO: 32928 - protein, 486 aa, Pseudomonas aeruginosa str. Stone 130
MKADKAIATYRRMRAQPLWRLLASTTGPTVIGLLQSHLYESERSLPASIFHERIARDLEELRAQGEDFPQTAQAYVASWLADGYLERRFPAGASEEEYELSTAAVEAIRFVSGLAQPHSAATESRLTLVIEALARLAEDTDTDKFRRIDRLMAEQARIDKEIDAIQKGQMRVLPHTTALERTREIITLADDLAGDFRRVRDQFDQLNRDLRERIMDNDGNRGDVLDSLFAGIDLISESDAGRTFSAFWRLLTDPEQAATLDQALDSVMSREFVGQLEAKERRFLLRLTRTLLEQGGMVHEVLQTFARSLKHFVQSREYLEQRRLNHLLKDAQRAALALKDEVRATETLQYTLELTSSRLRSLSQWVLHDPSLQALPGQMAEGDAPPIDLECVSELVAQSEIDFRTLKANVLAVLEQRSQASIADVLEQFPAAQGLGSVVGLLALGSRHGFKADHNETVDWVGGDDERRSARIPKIFFLRERANELV

SEQ ID NO: 32929 - protein, 235 aa, Pseudomonas aeruginosa str. Stone 130
MNWSENDEAAMPAEAQAPDAAPAPANTLFLGDSGELPLDTRRALVQLLAGPSLDGRRHPKLWPILVRDEAVIRRRLAELFLELVIDRDVQVAFTRQADTGELEVPLLLRRAQLTFIDSILLLHLRQRLTQADSQGDRAVVSTDEITEFLSLYERAANTDRAGFVKRVHASIEKIKKHSILQKIRSSDDRFEISPTLKLLFSAEEIQALTHLYQRMAAAETPAQLVQTDADEEADQ

SEQ ID NO: 32930 - protein, 1124 aa, Pseudomonas aeruginosa str. Stone 130
MISEPQTASLFTREQFRMTRLQVYNWGTFSGLHDVPISERGFLFVGRSGAGKSTLLDAFSALLTPPRWIDFNAAAREADRSGRDRNLVTYIRGAWAEQKDGESGEIATRYLRAGTTWSALALTYQNALGQSVVLVQVFWLRGNANGSTDVKRHYLVMERTFDLRELEDFGQSNFDIRKLKQSFPEAFARDEFRPYCERFCRLLGIESEMALRLLHKTQSAKNLGDLNTFLRDFMLDKPETFEVADRLVSEFGELNAAHQAVVTAREQVQTLAPARDQHQRRDSLMLRRNGLDELRLGVDGYRETRRIELLKEHVASLEVQATGTEGEVIRRQGNLDNHSTTLRNLERQHREAGGDQIEQWEAEKSGLESQRTERLRKRSQAEEACKKLGWSLPDSPQAFAELLGSARQEVENWEQRSNASRTEQFRLDREKKDAETAFSQALKEVQALQRQPSNIPADMLEMRRDIAAAIGISESALPFVGELIEVKPDEVEWQGAIERVLHGFALSLLVDERQYSALANHINNTHLGRRLVYYRTGRPETWQAKPIGANSLVLKLSVKEGTYADWLQAELRQRFDYACVDSIQSFRSTDRAITREGQVKHSKTRHEKDDRRSVGDRRNWVLGFDNREKLALFQAQAQELAATITRLGGEIDTLADQDKNRATRAMQCQTLVNLQWQEIDVIPLLDRISTIDRQIREAREGNTALLQISERIDKQKDLVDQADKDLREAKVAHDSVLKQIKDSTQKLEALLQEVSRVSLTPHQVTGLDERFAKQSDVVRLENLDKVATSIERALNAEIEEVNRGIGVCEKEIEARFADFKRQWPMDAGDMDTSLASAPDFFAKLVRLETDGLPAYEQRFFELLQNQSHQNLAALSTYLNDARKAILERMDLVNDSLGQVPFNQSANQRTYLHIDASDRQLVDVKEFKQEIQQALSHAWTEDREFAEARFLALRRLVDRLASQDPEQKRWRETVLDVRQHVEFIGREIDEGGVEVEIYRSGAGKSGGQRQKLATTCLAAALRYQLGGNDHGVPMYAPVVLDEAFDKADNEFTALAMNIFTNFGFQMVVATPLKSVMTLEPFIGGACFVDISDRRVSGVLLIEYDGDRQRLKLPEHAREEVGVETS

SEQ ID NO: 32931 - protein, 387 aa, Pseudomonas aeruginosa str. Stone 130
MKLPEDVRQFLARRFQSKHREWLVGEASESQWPLEVPLGIPTEQAALRQVDGVRAWVSAWQGWQGVGTLSWCERRWKALGVQRLPEKLALRGPEDVAMWIGASARWVRSLSRYQTLTARWPVLAQQLPRYFDVLADYSDADFRRLAEMLDWISRNPKSNLYPRQIPVAGADSKWLDSRKGIISDLIATLQGDPTGERDFFWRCGLRAQPQLMRMRVLDPDLRARFGGLGDISAPCDEVARISIRPKNVFVVENLQTGLAFDDLPGAVVIMRLGYAVDVLGQLPWLQQAQCIYWGDIDTHGFAILNRARTYIPSLKTVLMDESTLMSHRDLWVEEKDQHSSTELPLLTNTEQKLYQSIKGNAWDQQVRLEQERIRWDVAWNAIQASIR

SEQ ID NO: 32932 - protein, 543 aa, Bifidobacterium longum D2957; identical to SEQ ID NO: 31042

SEQ ID NO: 32933 - protein, 224 aa, Bifidobacterium longum D2957; identical to SEQ ID NO: 31043

SEQ ID NO: 32934 - protein, 1182 aa, Bifidobacterium longum D2957; identical to SEQ ID NO: 31242

SEQ ID NO: 32935 - protein, 394 aa, Bifidobacterium longum D2957; identical to SEQ ID NO: 31243

SEQ ID NO: 32936 - protein, 486 aa, Photorhabdus temperata J3
MNFQGLQAKYRRLFQESAAWKLLRADNSPLILAFLGELFSEDSEVPFSRARVSLDAELVRCRELGLWETETGASTYLNKWIREGWLREMDDALTKTDASEIALRFSQGLDERSSGTTASHLRIVQEAVRDFAVAISPNVDERVTLLEDRKSEIQREIDALRAGVVTELTEVEQRERIREIYQLASVLTGDFRRVEDEIRRLDQEIRIQIIEGDSTRGDILLAVLEKEALLAKTDAGSAFESFFDLLCDQNRTMELRDQLRSILNRPAAKHLVTQQRQFLSQLMRELSRESDRVFQIRRRTEESLRAYIESGTAQENRAVDRLLGQLERLAVELKNADCDLQTTTALSLPVGAASISSPESMLLKSPDEKLDTSGVEEQLNSREPSIQMLDCLDAVQIRLIAEKALETLKAFGPMTIASIAHYHPLNSGLEELVAYLRVAKSVGAASLEEKESIEISDKQGIRLRASIPTFLLSADLFPDSLDELVL

SEQ ID NO: 32937 - protein, 302 aa, Photorhabdus temperata J3
MHKDKKLNKDRGTPATLGKSDSDPQKEQQTGFFDQLIKHHTQSEYNPLTDTTGVESAVAANKSSSVEVDDVLVSDHPESSNSGMPPDARRVLVSLLRQGVILSSQKAKLFESLCRYQCAVRKHLSEVYLKLVLDEKAGVAFIAGFQNEEDTESLGIDGEEVVSLISRRTLSLYDTLLLLVLRKHYQDRETSGEQRIIIDIERIESHLTPFLPLTNSTKSDRRKLKGALEKMVTKKILSSVRGSEDRFEITPVIRYVVSAEFLENMLNEYLKMAGEKGIELTKNGSNAVDYQDEEEETGDEND

SEQ ID NO: 32938 - protein, 113 aa, Photorhabdus temperata J3
MTDQTLSADSLFHVGQIRLAELSVYNWGSFNGVHTAFIDPMGTLVTGDNGAGKSTFIDGLMALLLPAGKATFNVAAAQGDRSDRTLLSYMRGSFGSAMMERVRESKVSVNLAW

SEQ ID NO: 32939 - protein, 484 aa, Pseudomonas aeruginosa CF614; identical to SEQ ID NO: 32845

SEQ ID NO: 32940 - protein, 251 aa, Pseudomonas aeruginosa CF614
MNEEEQHSQQAPALFDQYRTNRPETPSISGEVETFEDAPVEPPVVGGAEVGMPLEARRALVLLLRQGVVMAESKRLAFEALCRHEGLIAEHLGNMFMRMLLDMKAGIAILLQQEVAEQDEETDEASRLINKRTLSLYDTLLLLVLRKYYQERETAGEQKIIIDIERIEALMTPFLPLTYSSRSERRTLNGSLALLKDKRLISAVRGDDERFEITSVIRYVVNADFLERLLKEYERLAGNAGVKTGDEVQDA

SEQ ID NO: 32941 - protein, 1128 aa, Pseudomonas aeruginosa CF614
MLEASEVSLSELFSTGQIRLAELSVYNWGSFHGLHSAKIDPEGTLITGDNGAGKSTLIDGLMALLLPSSKASFNIAAAQGDRTDRTLMSYVRGNYGKAHDGSETATLLKRSGATATGLRALYQADDGSKITLAALFWITQASNSLNDLKRLFVVGKRDVGLDELLHLFGEGNARVLKQHLKEDPLVEAFDSFTEYQETYVRLLCMENRNAPALLSRALGLKKIDDLTSLIRDLVLEPSQVKEHARLAVSEFDDLVSVHSELDDARRQRDALIELPETSQALNQAREEMRRISVELAGLPVYFGEQCSRLWQMRLKKYEAELLQLAEEMTRLGALEEQATERVQALFHAYQSQGGERLEGLRKDLKAATQVHHDSVRDARLYQMDVRDLSLPDTLSLDVFKQNQVRAQTELADMPALRQARQDQFASSAANLSREQTQLKELVGEIEDMESRPDSNIEPSYQKLRDQLVESLSLDPAEVVFVGELIDVLEAHRPWQGAIERALGGHRTTLLVPDERYRLVTKWLNTRHTGLHVRVQVVRLNQHPQVAEFLPDGFLKMLDWKPHPYRDWLKKHLSRFDLHCVESTEILDQTDFSMTIQGLVHLDKGRFEKKDQQRIDNPRFWCLGFSNKGRLAALRKDRVELEAEVKKLAQLTADARMAMDDLEKHTRVWERIAQLTWAAIDVQSAQDRMQSLRADLEALERPDSELGVAKARWEQAGAELKEVQGKKELVSKKVGGLESDKLKANQQLELALDAARTGLVDEVRELLSKRVGQLDLDDLEMVSELENRHRSALEEARKGAHNREFRASNKASGIVSEFKTKWPLIANDWLAGVDALEEYVDHLAHLEQEGLPDLVERFRERLNRNATQSLARISQTIQAEREDIQDRIETINDVLERTEFRQGTYLRLGSRPEIFEHVKAFNAQLMRVLARAGSDDHEARFVELKELIEKLEKATNPATSGNLESLRLLDSRYQLSFFAEEVEKGSKKVRDVLESSSGKSGGEKESFAGTIVAASLAYVLTPDGSDRPLYCTVFLDEAFSNTAEAVSRRVLKVFRELKIHVNLITPYKNLNLARESARSLLIAERDQDKHESRLCEVTWEEIDEQLARHEQQGLQKAASSLGIEVEPDL

SEQ ID NO: 32942 - protein, 397 aa, Pseudomonas aeruginosa CF614
MRDWGRLPDDVVEELRRLEWDHTGRLRERLLGTRPFPIPCLLKPPTGSQALEDLDHFHGYIAAWRKWPWPHQVAWVTKRFRQLGECEVPIRLEIESTQALIAALGAEAVERSRGWAERMEPLLSLDKALFTTLIKQLGELEKLSMTDIHLLACLLPQLQCGMGQRRYLRALPLQKVDTKFVELNQSLIAALLDSMHDQEVSAHGGLEAWLGCRATPSNWLHVKPLCPDVKGRLAGLDLVRLSFEQLMTYPLPARSVLVIENLQAGYGLPELPGTIAVFGGGANTAWLQAEWLKDRRVGYWGDLDTWGLKFLADARLRQPHVEAVMMDRDTLIAHVERGVCEERPAELPDYGLTLTERSLFEELRSGRHGVGRLEQERLSQDYVEQQLDVWLHAIATI

SEQ ID NO: 32943 - protein, 450 aa, Pseudomonas aeruginosa C52
MEDALQALSEMLAAYASQELYEIDPDATHLQAGRELREWIKRRLVVEREGRIYATDALESAIQFVDSLDSRIMTSTASRLSVVQREIENLETGLNPSPTGRIASLRRRIQDLEHELAQVEAGNVIVLDEAQAIEGIREVYNLATSLRADFRRVEDSWREADRALRYSIISEQSHRGEIVDRLLDGQDALLNTPEGRVFESFQQQLRQSAELETMRERLRTILRHPAVPKALNRPQQRELRWLALRLVRESQAVLQARARSERDVRGFMKTGLAAEHHRVGQLLNDFFNLALSVDWQRQSERRKPACLPPVGVAITGIPAIERLRFKTLDDDDTGELDLSLKPAGLEQIDDDFWDAFDGLDREALIQDTLAVLAEQGRPVSLGELASLLPPAHDLETFALWLAMAREAGIEVLKEERQLVELVDEDEQRWRFNLPYVGLDHEALKDIDWEL

SEQ ID NO: 32944 - protein, 249 aa, Pseudomonas aeruginosa C52
MAGIFDRIAGASGADETELTVEPIALDDGMDDEQPLMSAAVQVDERRTPQRVREAVQEMLKYGLLEESHKPNLYRSALANIEAVDTILEPLDLAMGVDEVRGLVFVTVRQGEVAEQDDWSHPLVRRQRLNLEQSLLIAILRQHFIAYEQESGTGATQALVAVDELIPQLQVYLGELGSEAKERNRVITLLDQLKGHGLVSALDAHDRVIIRPIITHLANPENLQALVVWLREQVEGATTPAAAAEEDEA

SEQ ID NO: 32945 - protein, 1101 aa, Pseudomonas aeruginosa C52
MKQALLWRDSETLILSSIELYNWGGFQGYHRAEIDPSGTAVIGPTGSGKTTLVDALMTLLCANPRYNLASTGGHESDRDLVSYVRGVTGPGDGGVEQSHIARQGKTVTAIAATLERDGAQVRLGAVLWFEGTSSSASDLKKLWLLSESPEQTLEHWLSQHHAGGMRALRQMEKDGTGIWPYPSKKAFLARLRDYFEVGENAFTLLNRAAGLKQLNSIDEIFRELVLDDRSAFGRAAEVATSFDDLTDIHRELETARKQQRSLQPVADGWERYKALQEQLQDKQVLEGILPVWFAEQGYRLWLAETNRLEKEHKQAELDREHCERRLDAQKGVVDQHRQRYLRVGGAGLDQLRGRIADWLRECDKRRLKAEQYQRLAKGLGLAEALSAAALEENQQQIAARLEILTQQITDARQTAFDAGLVQQELNGRLQALQQERAEVERRPGSNLPGHFHAFRGDLAQALGVDESALPFVAELVQVKPEELAWRGAIERAIGSHRLRILVPHGASEAALRWVNQRHNRLHVRLLEVKEPSSRPVFFDDGFTRKLTFKEHPYREAVKALLADNDRHCVESPEQLRHTPHAMTAQGLMSGKERFFDKQDQKRLDEGWLTGFDNRDRLAFLTEQIREVNEQLAPAKLALDAAQGDVRKLEDQASLLQRVEELQFEEIDLPGAERQLESLRAQLDTLTRPDSDLALIKAELDEAEALLDSLDRQRQQLIEQCGQLKIQFEQAASATRKAYRGAEKGLSDTQRELALAHFPTLSAADLGDIVELERKHTHELQGQLKALGEKLGDQKSELAKRMSDALKVDTGALSEVGRELVDVPKYLERLRVLTEEALPEKLKRFLEYLNRSSDDGVTQLLSYIDHEVSVIEERLDDLNSTMQRVDFQPGRYLRLVATKVIHASLRTLQQAQRQLNSARFIDDEGESHYKALQELVGLLKDACEHSRNQGAKALLDPRFRLEFAVSVIDRESKSVIETRTGSQGGSGGEKEIIASYVLTASLSYALCPDGSSRPLFGTIVLDEAFSRSSHAVAGRIIAALREFGLHAVFITPNKEMRLLRHHTRSAVVVHRRGVESSLVSLSWEALDEHHQQRSKAMHEVAH

SEQ ID NO: 32946 - protein, 385 aa, Pseudomonas aeruginosa C52
MKSPTDIGRSLARQWQRSSVRLERLLNAASWPQSLNIGKPSPRLFTDNIQAVLLHVENWRSVNVGKVDWEPVSYRAGLVPISLPMRWHLRNPSEWIAATNDPRVCEEYAQLEHLVEQVDSAFHALLVAQRSLWLTKPFEEVVATAQLATRLSPGCARGRPLRLLAEHGVDTKFFERNASLLTRLLDERFEGAASEQGLTTFLDAFEESSHWVLVVPLQPELLPFKRLRLTTAELAETPLPGSRLLVVENEQCVHLLPETLPDTLAVLGAGLDLQWLASAHLAGKQIAYWGDMDTWGLLMLARARLHQPAVEALLMEQELFEQHSPGNAVVEPAKARESAPPGLLADEADFYRYLLVQERGRLEQEYLPKVQVERAIEQWARAVPV

SEQ ID NO: 32947 - protein, 450 aa, Pseudomonas aeruginosa BL23; identical to SEQ ID NO: 32924

SEQ ID NO: 32948 - protein, 249 aa, Pseudomonas aeruginosa BL23; identical to SEQ ID NO: 32020

SEQ ID NO: 32949 - protein, 1101 aa, Pseudomonas aeruginosa BL23; identical to SEQ ID NO: 31996

SEQ ID NO: 32950 - protein, 393 aa, Pseudomonas aeruginosa BL23; identical to SEQ ID NO: 32927

SEQ ID NO: 32951 - protein, 486 aa, Pseudomonas aeruginosa BL22
MKADKAIATYRRMRAQPLWRLLASNTGPTVIGLLQAHLYESERSLPASIFHERIARDLEELRAQGEDFPQTAQAYVASWLADGYLERRFPAGASEEEYELSTAAVEAIRFVSGLEQPHSAATESRLTLVIEALARLAEDTDTDKFRRIDRLMAEQARIDKEIDAIQKGQMRVLPHATALERTREIITLADDLAGDFRRVRDQFDQLNRDLRERIMDNDGNRGDVLDSLFAGIDLISESDAGRTFSAFWRLLTDPEQAATLDQALDSVMSREFVGQLEAKERRFLLRLTRTLLEQGGMVHEVLQTFARSLKHFVQSREYLEQRRLNHLLKDAQRAALALKDEVRATETLQYTLELTSSRLRSLSQWVLYDPSLQALPGQMAEGDAPPIDLESVSELVAQSEIDFRTLKANVLAVLEQRSQASIADVLEQFPAAQGLGSVVGLLALGSRHGFKADHSETVGWVGGDDERRSARIPKIFFLRERANELV

SEQ ID NO: 32952 - protein, 235 aa, Pseudomonas aeruginosa BL22
MNWSENDEAAMPAEAQAPDASQASANTLFMGDSGELALDTRRALVQLLAGPSLDGRRHPKLWPILVRDEAVIRRRLAELFLELVIDRDVQVAFTRQADTGDLEVPLLLRRAQLTFIDSILLLHLRQRLTQADSQGDRAVVSTDEIMEFLTLYERASNTDRAGFVKRVHASIEKIKKHSILQKIRSSEDRFEISPTLKLLFSAEEIQALTHLYQRMAAGETPAQLAQTESDEEADQ

SEQ ID NO: 32953 - protein, 1124 aa, Pseudomonas aeruginosa BL22
MISEPQTASLFAREQFRMTRLQVYNWGTFSDLHDIPISERGFLFVGRSGAGKSTLLDAFSALLVPPRWIDFNAAAREADRSGRDRNLVTYVRGAWAEQKDGESGEIATRYLRSGTTWSALALTYQNALGQSVVLVQVFWLRGNANGSTDVKRHYLVLERAFDLRELEDFGQSNFDIRKLKQSFPEAFARDEFRPYCERFCRLLGIESEMALRLLHKTQSAKNLGDLNTFLRDFMLDKPETFEVADRLVSEFGELNAAHQAVVTAREQVQTLAPAREQYQRRDSLMLQRNGLDELRLGVDGYRETRRIELLKQHVESLEVQASGSEGEVSRRQSILDNHTTTLRNLERQHREAGGDQIEQWEAEKSGLEGQRTDRLRKRGQAEDACKKLGWSLPDSPQAFAELLGNARQEVENWEQRSNENREEQFRLAGQKKDAETAFSQAVKEVQALQRQPSSIPADMLEMRRDIAAAIGISESALPFVGELIEVKSDEAEWQGAIERVLHGFALSLLVDERQYSALANYINNTHLGQRLVYYRTGRSETWQAKPIGANSLVLKLNVKEGTYADWLQAELRQRFDYACVDSIQSFRSADRAITREGQVKHSKTRHEKDDRRSVGDRRNWVLGFDNREKLGLFQAQAQELAATITRLRGEIETLADQDKNRATRAMQCQTLVNLQWQEIDVVPLLDRISTIEQQIREAREGNTALLQISERIDKQKNLVDQADKDLREAKVAHDSVLKQINDSTQKLESLLQDASRVPLTPHQIKGLDERFTKQSDAIRLESLDKVATAVERGLNTEIGEIKDEIGDCEKEIEARFADFKRQWPMDAVDMDTSLASAADFFAKLVRLETDGLPAYEQRFFELLQNQSHQNLAALSTYLNDARKAILERMDLVNDSLGQVPFNQSANQRTYLHIDASDRQLVDVKEFKQEIQQALSHAWTEDREFAEARFLALRRLVDRLASQDPEQKRWRETVLDVRQHVEFIGREIDESGVEVEIYRSGAGKSGGQRQKLATTCLAAALRYQLGGNDHGVPMYAPVVLDEAFDKADNEFTALAMNIFTNFGFQMVVATPLKSVMTLEPFIGGACFVDISDRRVSGVLLIEYDGDRQRLKLPEHAREEASVEAS

SEQ ID NO: 32954 - protein, 387 aa, Pseudomonas aeruginosa BL22
MKLPEDVWQFLARRFQSKHREWLIGDAGESQWPLEVPLGIPTEQAALRQVDGVRAWVSAWQGWQGVGTLSWCERRWKALGVQRLPEKLALRGPEDVALWIGESARWVRAQSRYQTLTARWPVLAQQLPRYFDVLADYGDADFSRLAEMLDWISLNPKSNLYPRQIPVAGADSKWLDSRKGLISDLVATLQGDPTGERDFFRRCGLRAQPQLMRMRVLDPELRARLGGLGDISAPCEEVASIGIRPKNVFVVENLQTGLAFDDLPGAVVIMRLGYAVDVLGQLPWLQQAQCIYWGDIDTHGFSILNRARTYIPSLKTVLMDESTLMSHRDLWVEEKDQHSSTELPLLKSTEQKLYQSIKGNAWGQQVRLEQERIRWDVAWNAIQASIR

SEQ ID NO: 32955 - protein, 450 aa, Pseudomonas aeruginosa BL16; identical to SEQ ID NO: 32527

SEQ ID NO: 32956 - protein, 249 aa, Pseudomonas aeruginosa BL16; identical to SEQ ID NO: 30516

SEQ ID NO: 32957 - protein, 1101 aa, Pseudomonas aeruginosa BL16; identical to SEQ ID NO: 32529

SEQ ID NO: 32958 - protein, 381 aa, Pseudomonas aeruginosa BL16; identical to SEQ ID NO: 30518

SEQ ID NO: 32959 - protein, 472 aa, Pseudomonas aeruginosa BL12
MEPNIPPLFEHLPKELFRPLAAANNLRYWDVLCRLMAAMWGEGGRSPGEEAPKSLVLRTIESFLVADDPWEDMDSSLTVTGRAHLIFTSLHASGWLSQRRKGVVEQVTVRPVVARFFGHLVEFANQTPEFLGIRFHSIYVSLREVRDANAHGLYHEAARQAKQCMAHITNTSCRIQDLMGKLSAKETMGEFVRGFFEEYIENVFIADYSDLRTHNHPLQFRSQIIALVRQLQCDDQQRQGLIGWYAQMKTDDDFLRAELLYERDTHQLLRLREVEEHLQRLDEEVRDANQMAIALFEYKLRSPGNFDELIARALNAVEILGEGHASLPGRSGFYHASEVGLSKPRVTPRVHEPTLVETYSPTTEELAMEALRQRMNANRHVTPLKLAEYVTRHVGSDLRVTSSQLSIESVIDLCCYQRLLLIASREACPPGKRRDDVHLQLVPGIRVEFVPEAMTRNAYMEHQEFMIHVRMP

SEQ ID NO: 32960 - protein, 200 aa, Pseudomonas aeruginosa BL12; identical to SEQ ID NO: 32368

SEQ ID NO: 32961 - protein, 1141 aa, Pseudomonas aeruginosa BL12
MVLLERVNLIQFFLYEARDVDIGRNTAFLGPNGTGKTALLDAIQVVMLAADGNRINFNAASDSKKKRSRSMRDYCLGSIVPGGSSYQRTSANTYVGLVFRNTITGVPFTAGVSLQAHIEDAKAEVNGYFILPGVELSAKQYLQTDGARETVMPWRAFQHVVADLCRLEANSTPYITPHNRDDFIRRLLIDHLAGPGDKPNSQAFRAAFSRSLKLNEDIVDLNETLRQHLIEPMPIRITEFRERLNEVRDMRDLIRRLRGRITQASEVADTYAQVLQARTSEANLTALKHVYATERSAEAVDAIQIKQEALEEALTRAQRELGRACAQAQLANAARDLALTALTSSPDFQQQAGHAGELLLLEKQFDEKQAQLRTQLHAMQRALSDASGLAEIASSRDLFDSGLEQLQSLEKRLESDDMPSSESLQRTLQAVSQAFEVLRRAMAETEGKAEKAANHLRDAEMASARAGQGLAKLSDNTTALLRILANAGIDATPICDLVSVADVAWQAAIESWLGRHVEALLIPEDRELEAIKVYRSAAADGVYRVKLALPSRIRDWHGYDTEPYAAQLVQGQNLLAVRYLQGALGRTILAESNEQLRVGVKALSKDGMVSSGAAVERQSLPKPSELRLGRKDVDAMRQQAEQALQIAQAQSRQHEEAVIRLRNSLQNLTPFANTETLQTSLESIFMAKVQANAHAAHLRERLARTQTAGLVELEARKQLADEAAHTANELVLRWTKDEASFVEQLKLLGEQLGVLTKQLEVESARERESRQHPLYNANEVDRHRKRSDERHGDDASAKVIALEQAIVTVNGVAGSKDREAWNLFANYLKDYNLQNTDICSNDWKGAYGFILEDQQRLVNLELVEQEEKAEEAYQAAVKVFRSDVAQALLAGFDRIEEQIAGLTSILENAPMFSNNERYEFKFKVVEEHRSLYEFLLRVRTHGTEDDLFGGPGEVPEEFRALVEGDSNSPLLNEASPLNDHRRFFSYDVEVYQMSESLGLLSRRFEQASGGEHRTPVYLIFGAALAACYGKSKDSLSGGGIMLLDEAFEKMDPQNIRATVQFLNALGLQLILAGPESDQAKLSSFLNIYYDMSRFGTRNVQMKKNVVHDAARELLQSDNYLLNPVLLQQEINRLKEEQNEPG

SEQ ID NO: 32962 - protein, 388 aa, Pseudomonas aeruginosa BL12
MSLDDATLDRLLVRAERARLSGSTRTIRESFKSLTSPYWQLSLDERDRMHERMRAAASTGAIKLEWARQGGGDRPLDAVVLQDLDRLADHLQRPTSSAILGQAAALLAPWHGQGQVDELLACWAQLKQVRLLGPGSAADFADALRALDAMAGTKEDRIVRQLSTQLFGDSKRLEALSKHLDLLTAETLNAPARHWSEVFGAIGLIKEPQPFLVAGMGKLRLTDQDDCTVIRPYLGVANTVIQGYMGAPAWLLTIENLTTFHQAARELSKNPSGVIIYTAGMPSPSWGQAYVRILSSLEHKPPIYHWGDHDEGGFRIAARIAQFATQSGFRLQPWSMQASRWPDRGQDAKAEQHRAMKRNAARAGWAELADQLAPVLFEQEGQPLNLPT

SEQ ID NO: 32963 - protein, 450 aa, Pseudomonas aeruginosa BL12; identical to SEQ ID NO: 31994

SEQ ID NO: 32964 - protein, 249 aa, Pseudomonas aeruginosa BL12
MAGVFDRLAGASGADETELTVEPMALDDGMDDEQPLMSAAVQVDERRTPQRVREAVQEMLKYGLLEESHKPNLYRSALSNIEAVDRILEPLDLAMGVDEVRGLVFVIVRQGEVAEQDDWSHPLVRRQRLNLEQSLLIAILRQQFIAYEQESGTGASQASVVVDELIPQLQVYLGELGSEAKERNRIITLLDQLKGHGLVSALDAHDRVIIRPIITHLANPENLQALVAWLREQVEGAATPAADGEEDMA

SEQ ID NO: 32965 - protein, 1101 aa, Pseudomonas aeruginosa BL12; identical to SEQ ID NO: 31996

SEQ ID NO: 32966 - protein, 393 aa, Pseudomonas aeruginosa BL12; identical to SEQ ID NO: 32927

SEQ ID NO: 32967 - protein, 484 aa, Pseudomonas aeruginosa BL11; identical to SEQ ID NO: 32845

SEQ ID NO: 32968 - protein, 251 aa, Pseudomonas aeruginosa BL11; identical to SEQ ID NO: 32940

SEQ ID NO: 32969 - protein, 1128 aa, Pseudomonas aeruginosa BL11; identical to SEQ ID NO: 32941

SEQ ID NO: 32970 - protein, 397 aa, Pseudomonas aeruginosa BL11; identical to SEQ ID NO: 32942

SEQ ID NO: 32971 - protein, 450 aa, Pseudomonas aeruginosa BL08; identical to SEQ ID NO: 30847

SEQ ID NO: 32972 - protein, 249 aa, Pseudomonas aeruginosa BL08; identical to SEQ ID NO: 31970

SEQ ID NO: 32973 - protein, 1101 aa, Pseudomonas aeruginosa BL08
MKQALLWRDSETFILSSIELYNWGGFQGYHRAEIDPSGTAVIGPTGSGKTTLVDALMTLLCANPRYNLASTGGHESDRDLVSYVRGVTGPGDGGVEQSHIARQGKTVTAIAATLERDGTQVRLGAVLWFEGTSSSASDLKKLWLLSESPEQTLEHWLSQHHAGGMRALRQMEKDGTGIWPYPSKKAFLARLRDYFEVGENAFTLLNRAAGLKQLNSIDEIFRELVLDDRSAFERAAEVASSFDDLTDIHRELETARKQQRSLQPVADGWERYKALQQQLHDKQTLEGILPVWFAEQGYRLWLAETNRLEKAQKQAELNQEQCRGQFDIQKGVVDQHRQRYLRVGGAEIDLLRARIADWVREFDKRRLKAEQYQRLAKGLGLVVELSAAALEENQQQITARLEVLAEQITEARQKAFDAGIVQKELDGRLQSLQHERAEVERRPGSNLPGHFHAFRGDLAQALCVDESALPFVAELVQVKPEELAWRGAIERAIGSHRLRILVPQGSSEAALRWVNQRHNRLHVRLLEVKEPSSRPVFFDDGYTRKLTFKEHPYREAVKVLLADNDRHCVESTEQLRHTPYAMTAQGLMSGKERFFDKQDQKRLDEDWLTGFDNRDRLAFLTEQIREVNEQLAPAKLALDAAQGDVRKLEDQASLLQRVEELQFEEIDLPGAERQLESLRAQLDTLTRPDSDLALIKSELDEAEALLDSLDRQRQQLIEQCGQLKIQFEQAASATRKAYRGAEKGLSDTQRELALAHFPTLSAADLGDIVELERKHTHELQGQLKALGEKLGDQKSELAKRMSDALKVDTGALSEVGRELVDVPKYLERLRVLTEEALPEKLKRFLEYLNRSSDDGVTQLLSYIDHEVSVIEERLDDLNSTMQRVDFQPGRYLRLVATKVIHASLRTLQQAQRQLNSARFIDDEGESHYKALQELVGLLKDACEHNRNQGAKALLDPRFRLEFAVSVIDRESKSVIETRTGSQGGSGGEKEIIASYVLTASLSYALCPDGSSRPLFGTIVLDEAFSRSSHAVAGRIIAALREFGLHAVFITPNKEMRLLRHHTRSAVVVHRRGVESSLVSLSWEALDEHHQQRIKAMHEVAH

SEQ ID NO: 32974 - protein, 385 aa, Pseudomonas aeruginosa BL08
MKSPTDISRSLAKQWQRSSVRLERLLNPGSWPQCFNIGKPSARVFAENIHAVLQHVENWRSVKVGKVDWESVSYRAGLAPISLPMRWHLRSPSEWIAAANDPTVSREYAQLEYLVEQVDSAFHALLVAQRSLWLTKPSEEVVATAQLATRLSPGCARGRPLRLLAEHGVDTKFFERNASLLTRLLDERFEGAASEQGLTTFLDAFEESSHWVLVVPLQPELLPFKRLRLTTAELAETPLPGSRLLVVENEQCIHLLPEKLPDTLAVLGSGLDLQWLASAHLAGKQIAYWGDMDTWGLLMLARARLHQPAVEALLMEQELFEQYSPVSAVVEPTKALDSAPPGLLADEADFYRYLLVQERGRLEQEYLPKEQVERAIEQWARKIPV

SEQ ID NO: 32975 - protein, 484 aa, Pseudomonas aeruginosa BL06; identical to SEQ ID NO: 32845

SEQ ID NO: 32976 - protein, 251 aa, Pseudomonas aeruginosa BL06; identical to SEQ ID NO: 32940

SEQ ID NO: 32977 - protein, 1128 aa, Pseudomonas aeruginosa BL06; identical to SEQ ID NO: 32941

SEQ ID NO: 32978 - protein, 397 aa, Pseudomonas aeruginosa BL06; identical to SEQ ID NO: 32942

SEQ ID NO: 32979 - protein, 484 aa, Pseudomonas aeruginosa BL04; identical to SEQ ID NO: 32845

SEQ ID NO: 32980 - protein, 251 aa, Pseudomonas aeruginosa BL04
MNEEEQHSQQAPALFDQYRTNRAETPSVSGEVETFEDAPVEPPVVGGSEVGMPLEARRALVLLLRQGVVMAESKRLAFEALCRHEGLIAEHLGNMFMRMLLDMKAGIAILLQQEVAEQDEETDEASRLINKRTLSLYDTLLLLVLRKYYQERETAGEQKIIIDIERIEALMTPFLPLTYSSRSERRTLNGSLALLKDKRLISAVRGDDERFEITSVIRYVVNADFLERLLKEYERLAGNAGVKTGDEVQDA

SEQ ID NO: 32981 - protein, 1128 aa, Pseudomonas aeruginosa BL04
MLEASEVSLSELFSTGQIRLAELSVYNWGSFHGLHSAKIDPEGTLITGDNGAGKSTLIDGLMALLLPSSKASFNIAAAQGDRTDRTLMSYVRGNYGKAHDGSETATLLKRSGATATGLRALYQADDGSKITLAALFWITQASNSLNDLKRLFVVGKRDVGLDELLHLFGEGNARVLKQHLKEDPLVEAFDSFTEYQETYVRLLCMENRNAPALLSRALGLKKIDDLTSLIRDLVLEPSQVKEHARLAVSEFDDLVSVHSELDDARRQRDALIELPETSQALNQAREEMRRISAELAGLPVYFGEQCSRLWQMRLKKYEAELLQLAEEMTRLGALEEQATERVQALFHAYQSQGGERLEGLRKDLKAATQVHHDSVRDARLYQMDVRDLSLPDTLSLDVFKQNQVRAQTELADMPALRQARQDQFASSAANLSREQTQLKELVGEIEDMESRPDSNIEPSYQKLRDQLVESLSLDPAEVVFVGELIDVLEAHRPWQGAIERALGGHRTTLLVPDERYRLVTKWLNTRHTGLHVRVQVVPLNQHPQVAEFLPDGFLKMLDWKPHPYRDWLKKHLSRFDLHCVASTEILDQTDFSMTIQGLVHLDKGRFEKKDQQRIDNPRFWCLGFSNKGRLATLRKDRVELEADVKKLAQLTADARTAMDDLEKHTRVWERITQLTWAAIDVQSAQDRMQSLRADLEALERPDSELGVAKARWEQAGAELKEVQGKKELVSKKVGGLESDKLKANQQLELALDAARTGLVDEVRELLSKRVGQLDLDDLEMVSELENRHRSALEEARKGVHNREFRASNKASGIVSEFKTKWPLIANDWLAGVDALEEYVDHLAHLEQEGLPDLVERFRERLNRNATQSLARISQTIQAEREDIQDRIETINDVLERTEFRQGTYLRLGSRPEIFEHVKAFNAKLMRVLARAGSDDHEARFVELKELIEKLEKATNPATSGNLESLRLLDSRYQLSFFAEEVEKGSKKVRDVLESSSGKSGGEKESFAGTIVAASLAYVLTPDGSDRPLYCTVFLDEAFSNTAEAVSRRVLKVFRELKIHVNLITPYKNLNLARESARSLLIAERDQDKHESRLCEVTWKEIDEQLARHEQQGLQKAASSLGIEVEPDL

SEQ ID NO: 32982 - protein, 397 aa, Pseudomonas aeruginosa BL04
MRDWGRLPDDVVEELRRLEWDHTGRLRERLLGTRPFPIPCLLKPPTGSQALEDLDHFHGYIAAWRKWPWPHQVAWVTKRFRQLGECEVPIRLEIESTQALIAALGAEAVGRSRGWAERMEPLLSLDKALFTTLIKQLGELEKLSMTDIHLLACLLPQLQCGMGQRRYLRALPLQKVDTKFVELNQSLIAALLDSMHDQEVSAHGGLEAWLGCRATPSNWLHVKPLCPDVKGRLAGLDLVRLSFEQLMTYPLPARSVLVIENLQAGYGLPELPGTIAVFGGGANTAWLQAEWLKDRRVGYWGDLDTWGLKFLADARLRQPHVEAVMMDRDTLIAHVERGVCEERPAELPDYGLTLTERSLFEELRSGRHGVGRLEQERLSQDYVEQQLDVWLHAIATI

SEQ ID NO: 32983 - protein, 450 aa, Pseudomonas aeruginosa BWHPSA027; identical to SEQ ID NO: 32527

SEQ ID NO: 32984 - protein, 249 aa, Pseudomonas aeruginosa BWHPSA027; identical to SEQ ID NO: 30516

SEQ ID NO: 32985 - protein, 1101 aa, Pseudomonas aeruginosa BWHPSA027; identical to SEQ ID NO: 32529

SEQ ID NO: 32986 - protein, 381 aa, Pseudomonas aeruginosa BWHPSA027; identical to SEQ ID NO: 30518

SEQ ID NO: 32987 - protein, 499 aa, Pseudomonas aeruginosa BWHPSA006
MEESAQQRSERYVSARSQHPAWLLLASRRAPLVLGCLRTLFERAHDGIPMEDALQALSEMLAAYASQELYEIDPDATHLQAGRELREWIKRRLVVEREDRIYATDALESAIQFVDSLDSRIMTSTASRLSVVQREIENLETGLNPSPTGRIASLRRRIQDLEHELAQVEAGHVVVLDEAQAIEGIREVYNLATSLRADFRRVEDSWREADRALRHSIISEQSHRGEIVDRLLDGQDALLNTPEGRVFESFQQQLRQSAELETMRERLRTILRHPAVPKALNRPQQRELRWLALRLVRESQAVLQARARSERDVRGFMKTGLAAEHHRVGQLLNDFFNLALSVDWQRQSERRKSACLPPVGVAITGIPAIERLRFKTLDDDDTGELDLSLKPAGLEQIDDDFWDAFDGLDREELIHNTLAVLVEQGRPVSLGELASLLPPAHDLETFALWLAMAREAGIEVLTEERQLVELVDEDEQRWRFNLPYVGLDHEALKDIDWEL

SEQ ID NO: 32988 - protein, 249 aa, Pseudomonas aeruginosa BWHPSA006
MAGVFDRIAGASGADETELTVEPMALDDGMDDEQPLMSAAVQVDERRTPQRVREAVQEMLKYGLLEESHKPNLYRSALSNIEAVDRILEPLDLAMGVDEVRGLVFVTVRQGEVAEQDDWSHPLVRRQRLNLEQSLLIAILRQQFIAYEQESGTGASQASVAVDELIPQLQVYLGELGSEAKERNRIITLLDQLKGHGLVSALDAHDRVIIRPIITHLANPENLQALVAWLREQVEGAATPAADGEEDMA

SEQ ID NO: 32989 - protein, 1101 aa, Pseudomonas aeruginosa BWHPSA006
MKQALLWRDSETFILTSIELYNWGGFQGYHRAEIDPSGTAVIGPTGSGKTTLVDALMTLLCANPRYNLASTGGHESDRDLVSYVRGVTGPGDGGVEQSHIARQGKTVTAIAATLERDGAQVRLGAVLWFEGTSSSASDLKKLWLLSESPEQTLEHWLSQHHAGGMRALRQMEKDGTGIWPYPSKKAFLARLRDYFEVGENAFTLLNRAAGLKQLNSIDEIFRELVLDDRSAFERAAEVASSFDDLTDIHRELETARKQQRSLQPVADGWERYRALQEQLQDKQALEGILPVWFAEQGYRLWLAETNRLEKEHKQAELDQAQCRSQLEIQKGVVDQHRQRYLRVGGAGIDQLRGRIADWVRECDRRRLKAEQYQRLAKGLGLADELSAAALEENQQQIAARLEILAQQITGARQKAFDAGLVQQELNGCLQSLQQERAEVERRPGSNLPGNFHAFRSDLAQALGVDESALPFVAELVQVKPEELAWRGAIERAIGSHRLRILVPQGSSQAALRWVNQRHNRLHVRLLEVKEPSSRPVFFDDGFTRKLTFKEHPYREAVKALLVDNDRHCVESPEQLRHTPYAMTAQGLMSGKERFFDKQDQKRLDEDWLTGFDNRDRLAFLTEQIREVNEQLVPAKLALDAAQGDVGQLESQASLLQRVEELQFEEIDRPGAELQLASLCAQMDTLTRPDSDLAMIKAELDEAEALQESLDQQLQQRIKQCVQLKTQFDQAASATRRAYHGAEKGLSDTQRELAQMHFPTLTADDLDDIVELERKHTRELQGQLKTLSEKLGDQKTELAKRMSDALKVDTGALAEVGRELVDVPRYLERLRVLTEEALPEKLKRFLEYLNRSSDDGVTQLLSYIDHEVSMIEERLDDLNSTMQRVDFQPGRYLRLVAKKVIHESLRTLQQAQRQLNSARFIDDEGESHYKALQALVGLLKDACEHSRNQGAKALLDPRFRLEFAVSVIDRAGNNLIETRTGSQGGSGGEKEIIASYVLTASLSYALCPDGSSRPLFGTIVLDEAFSRSSHAVAGRIIAALREFGLHAVFITPNKEMRLLRHHTRSAVVVHRRGVESSLVSLSWEALDEHHQQRIKAMHEVAH

SEQ ID NO: 32990 - protein, 385 aa, Pseudomonas aeruginosa BWHPSA006
MKSPTDICRSLARQWHRSSVRLERLLNPGSWPQCFNIGKPSARVFAENIHAVLQHVENWRSVKVGKVDWESVSYRAGLAPISLPMRWHLRSPSEWIAATNDPTVSREYAQLEYLVEQVDSAFHALLVAQRSLWLTKPSEEVVATAQLATRLSPGCARGRPLRLLAEHGVDTKFFERNASLLTRLLDERFEGAASEQGLTTFLDAFEESSHWVLVVPLQPELLPFKRLRLTTSELAETPLPGSRLLVVENEQCIHLLPETLPDTLAVLGSGLDLQWLASAHLAAKQIAYWGDMDTWGLLMLARARLHQPAVEALLMEQELFEQHSPVSAVVEPTKALESAPPGLLADEADFYRYLLVQERGRLEQEYLPKVQVERAIEQWARKNPV

SEQ ID NO: 32991 - protein, 450 aa, Pseudomonas aeruginosa 6077; identical to SEQ ID NO: 30847

SEQ ID NO: 32992 - protein, 249 aa, Pseudomonas aeruginosa 6077; identical to SEQ ID NO: 31970

SEQ ID NO: 32993 - protein, 1101 aa, Pseudomonas aeruginosa 6077; identical to SEQ ID NO: 32973

SEQ ID NO: 32994 - protein, 385 aa, Pseudomonas aeruginosa 6077; identical to SEQ ID NO: 32974

SEQ ID NO: 32995 - protein, 450 aa, Pseudomonas aeruginosa 19660
MEDALQALSEMLAAYASQELYEIDPDATHLQAGRELREWIKRRLVVEREGRIYATDALESAIQFVDSLDSRIMTSTASRLSVVQREIENLETGLNPSPTGRIASLRRRIQDLEHELARVEAGHVDVLDEAQAIEGMREVYNLATSLRADFRRVEDSWREADRALRHSIISEQSHRGEIVDRLLDGQDALLNTPEGRVFESFQQQLRQSAELEVMRERLRTILRHPAVPKALNRPQQRELRWLALRLVRESQAVLQARARSERDVRGFMKTGLAAENHRVGQLLNDFFNLALSVDWQRQSERRKPACLPPVGVAITGVPAIERLRFKTLDDDDAGELDLSLKPAGLEQIDDDFWDAFDGLDREALIHDTLAVLVEQGRPVSLGELASLLPPAHDLETFALWLAMAREAGIEVLTEERQFVELVDEDEQRWGFNLPYVGLDHEALKDIDWEL

SEQ ID NO: 32996 - protein, 249 aa, Pseudomonas aeruginosa 19660; identical to SEQ ID NO: 30516

SEQ ID NO: 32997 - protein, 1101 aa, Pseudomonas aeruginosa 19660
MKQALLWRDSETFILTSIELYNWGGFQGYHRAEIDPSGTAVIGPTGSGKTTLVDALMTLLCANPRYNLASTGGHESDRDLVSYVRGVTGPGDGGVEQSHIARQGKTVTAIAATLERDGAQVRLGAVLWFEGTSSSASDLKKLWLLSESPEQTLEHWLSQHHAGGMRALRQMEKDGMGIWPYPSKKAFLARLRDYFEVGENAFTLLNRAAGLKQLNSIDEIFRELVLDDRSAFERAAEVASSFDDLTGIHRELETARKQQRSLQPVADGWERYRALQEQLQDKQALEGILPVWFAEQGYRLWLAETNRLEKEHKQAELDQAQCRSQLEIQKGVVDQHRQRYLRVGGAGIDQLRGRIADWVRECDKRRLKAEQYQRLAKGLGLADELSAAALEENQQQIAARLEILAQQTTDARQKAFDAGLVQQELNGRLQSLQQERAEVERRPGSNLPGHFHAFRGDLAQELGVDESALPFVAELVQVKPEELAWRGAIERAIGSHRLRILVPQGSSQAALRWVNQRHNRLHVRLLEVKEPSSRPVFFDDGFTRKLTFKEHPYREAVKALLADNDRHCVESTEQLRHTPHAMTAQGLMSGKERFFDKQDQKRLDEDWLTGFDNRDRLAFLAEQIREVNEQLVPAKLALDAAQGDVGQLESQASLLQRIEELQFDDIDRPGAERQLQSLRTQLDTLTRPDSNLAVIKAELDQAEALRESLDQQLQRLIEQCVQLKTQFDQAASATRKAYRGAEKGLSDTQRELAQAHFPILSTDDLGDIDELERKHTRELQGQLKTLGEKLGDQKTELAKRMSDALKADTGALAEVGRELVDVPRYLERLRVLTEEALPEKLKRFLEYLNRSSDDGVTQLLSYIDHEVSMIEERLDDLNSTMQRVDFQPGRYLRLVAKKVIHESLRTLQHAQRQLNSARFIDDEGESHYKALQALVGLLKDACEHSRNQGAKALLDPRFRLEFAVSVIDREGNNLIETRTGSQGGSGGEKEIIASYVLTASLSYALCPDGSSRPLFGTIVLDEAFSRSSHAVAGRIIAALREFGLHAVFITPNKEMRLLRHHTRSAVVVHRRGVESSLVSLSWEALDEHHQQRIRAMHEVAH

SEQ ID NO: 32998 - protein, 381 aa, Pseudomonas aeruginosa 19660
MKSPTDIGRNLARQWQRSSVRLERLLNPGSWPQSLNIGKPSARLFTDNIQAVLRHVENWRSVNVGKVDWEPVSYRAGLAPISLPMRWHLRSPSEWIAASDDPRVSQEYAQLEYLVEQVDSAFHTLLVAQRSLWLTRTPEEVVATAQLATQLAPGCAQGRPLRLLAEHGVDTKFFERNATLLTKLLDERFEGAASEQGLTTFLDAFEESSHWVLVVPLQPGLLPFKRLRLTTSELAETPLPGSRLLVVENEQCVHLLPEKLPDTLAVLGAGLDLHWLASAHLAGKQIGYWGDMDTWGLLMLARARLHQPAVEALLMEQELFEQHSQGNTVVEPAKALESAPPGLLADEADFYRYLLVQERGRLEQEYLPKAQVELAIRKWAR

SEQ ID NO: 32999 - protein, 450 aa, Pseudomonas aeruginosa X24509; identical to SEQ ID NO: 32505

SEQ ID NO: 33000 - protein, 249 aa, Pseudomonas aeruginosa X24509; identical to SEQ ID NO: 32506

SEQ ID NO: 33001 - protein, 1101 aa, Pseudomonas aeruginosa X24509
MKQALLWRDSETFILTSIELYNWGGFQGYHRAEIDPSGTAVIGPTGSGKTTLVDALMTLLCANPRYNLASTGGHESDRDLVSYVRGVTGPGDGGIEQSHIARQGKTVTAIAATLERDGAQVRLGAVIWFEGTSSSASDLKKLWLLSESPEQTLEHWLSQHHAGGMRALRQMEKDGTGIWPYPSKKAFLARLRDYFEVGENAFTLLNRAAGLKQLNSIDEIFRELVLDDRSAFERAAEVAGSFDDLTDIHRELETARKQQRSLQPVADGWERYQVLQEQLHDKQALEGILPVWFAEQGYRLWLAETNRLEKEYKKAELDQEQCKSQLEAQKGVVDQHRQRYLRVGGAGIDQLRERIADWVRECDKRSLKAEQYQLLAKGLGLADELSAAALKENQQHIAARLEILDQQITDARQKAFDAGLVQQELNGRLQTLQQEGAEVEKRPGSNLPGQFHAFRSDLAQALGVNESALPFVAELVQVKPEELDWRGAIERAIGSHRLRILVPQDSSQAALRWVNQRHNRLHVRLLEVQEPTSRPVFFDDGFTRKLTFKEHPYREAIKALLADNDRHCVESPEQLRHTPHAMTAQGLMSGKERFFDKQDQKRLDEDWLTGFDNRDRLAFLAEQIREVNEQLEPAKLALDAAQGDVRQLETQASLLNRVKELQFEDIDLPGAQSQLESLRTQLATLTRPDSNLAMIKVELDAAEALQESLDQQLRQLIEQYVQLKTQFDQAASATRKAYNSAEKGLNDTQRELAQAHFPTLTADDLGDIVELERKHTRELQGQLKALGEKLGDQKSELAKRMSDALKVDTGALAEVGRELVDVPRYLERLRVLTEEALPEKLKRFLEYLNRSSDDGVTQLLSYIDHEVSMIEERLDDLNSTMQRVDFQPGRYLRLVAGKVIHESLRTLQRAQRQLNSARFIDDEGESHYKALQDLVGLLKDACEHSRNQGAKALLDPRFRLEFAVSVIDRESRNVIETRTGSQGGSGGEKEIIASYVLTASLSYALCPDGSSRPLFGTIVLDEAFSRSSHAVAGRIIAALREFGLHAVFITPNKEMRLLRHHTRSAVVVHRRGLESSLVSLSWEALDEHHQQRIKAMHEVAH

SEQ ID NO: 33002 - protein, 393 aa, Pseudomonas aeruginosa X24509; identical to SEQ ID NO: 32927

SEQ ID NO: 33003 - protein, 198 aa, Pseudomonas aeruginosa CF27
MLQARARSERDVRGFMKTGLAAEHHRVGQLLNDFFNLALSVDWQRQSERRKSACLPPVGVAITGIPAIERLRFKTLDDDDTGELDLSLKPAGLEQIDDDFWDAFDGLDREALIQDTLAVLAEQGRPVSLGELASLLPPAHDLETFALWLAMAREAGIEVLKEERQLVELVDEDEQRWRFNLPYVGLDHEALKDIDWEL

SEQ ID NO: 33004 - protein, 249 aa, Pseudomonas aeruginosa CF27
MAGIFDRIAGGSGADETELTVEPMALDDGMDDEQPLMSAAVQVDERRTPQRVREAVQEMLKYGLLEESHKPNLYRSALSNIEVVDRILEPLDLAMGVDEVRGLVFVTVRQGEVAEQDDWSHPLVRRQRLNLEQSLLIAILRQHFIAYEQESGTGATQALVAVDELIPQLQVYLGELGSEAKERNRIITLLDQLKGHGLVSALDAHDRVMIRPIITHLANPENLQALVAWLREQVEGAATPAAGGEEDEA

SEQ ID NO: 33005 - protein, 1101 aa, Pseudomonas aeruginosa CF27
MKQALLWRDSETFILSSIELYNWGGFQGYHRAEIDPSGTAVIGPTGSGKTTLVDALMTLLCANPRYNLASTGGHESDRDLVSYVRGVTGPGDGGVEQSHIARQGKTVTAIAATLERDGTQVRLGAVLWFEGTSSSASDLKKLWLLSEFPEQTLEHWLSQHHAGGMRALRQMEKDGTGIWPYPSKKAFLARLRDYFEVGENAFTLLNRAAGLKQLNSIDEIFRELVLDDRSAFGRAAEVATSFDDLTDIHRELETARKQQRSLQPVADGWERYKALQEQLQDKQVLEGILPVWFAEQGYRLWLAETNRLEKEHKQAELDREHCESRLDAQKGVVDQQRQRYLRVGGAGIDQLRERIAEWGKVCGRRSLQAEQYRRLAKGLGLSEELSAASLKENQEQITERLEILTQQLDGAREQVFKAGLAQQELNGRLQTLQQERAEVERRPGSNLPGLFHAFRSDLAQELGLDESTLPFVAELVQVKPEELAWRGAIERAIGSHRLRILVPQGSSQAALRWVNQRHNRLHVRLLEVREPASRPVFFDDGFTRKLTFKEHPYREAVKALLADNDRHCVESPEQLRHTPHAMTAQGLMSGKERFFDKQDQKRLDEDWLTGFDNRDRLAFLAEQIHEVNEQLAPAKLALDAAQDDVRQLETQASLLKRVEELQFEDIDLPGAESQLESLRTQLATLTRPDSDLAMVKVELDEAETLLESLDQQLRQLIEQCVQLKTQFDQAASATRKAYNGAEKGLNDTQRELAKEHFPTLAPEDLGDIVELERKHTRELQQQLKSLGEKLGHEQTELAKRMSDALKVDTGALAEVGRELVDVPRYLERLRVLTEEALPEKLKRFLEYLNRSSDDGVTQLLSYIDHEVSMIEERLDDLNSTMQRVDFQPGRYLRLVAKKVIHESLRTLQQAQRQLNSARFIDDEGESHYKALQALVGLLKDACEHSRNQGAKALLDPRFRLEFAVSVIDRESRSVIETRTGSQGGSGGEKEIIASYVLTASLSYALCPDGSSRPLFGTIVLDEAFSRSSHAVAGRIIAALREFGLHAVFITPNKEMRLLRHHTRSAVVVHRRGVESSLVSLSWEALDEHHQQRIKAMHEVAH

SEQ ID NO: 33006 - protein, 385 aa, Pseudomonas aeruginosa CF27
MKSPTDISRSLARQWQRSSVRLERLLNPASWPQSLNIGKPSARLFTDNIQAVLRHVENWRSVNVGKVDWEPVSYRAGLSPISLPMRWHLRSPSEWIAASDDPRVSQEYAQLEYLVEQVDSAFHALLVAQRSLWLTKPSEEVVATARLATRLSPGCARGRPLRLLAEHGVDTKFFERNASLLTWLLDERFGGAASEQGLTTFLDAFEESSHWVLVVPLQPELLPFKRLRLTTAELAETPLPGSRLLVVENEQCIHLLPENLPDTLAVLGSGLDLQWLASAHLAGKQIAYWGDMDTWGLLMLGRARLHQPAVEALLMEQELFEQHSPVSAVVEPTKAQESAPPGLLADEADFYRYLLVQERGRLEQEYLPKEQVERAIEQWARKITV

SEQ ID NO: 33007 - protein, 479 aa, Salmonella enterica subsp. enterica serovar Muenster str. 660
MIAEALSPAIFKPLASNKNARVYTACIWALYDRLVRHQHSLDECHPKEAREIIRRALVQYNLQLDVEDFSENPDSVETDDTHRIYTLLRETGWLHEQATTGYRRICYIPQIPSQLVAALDLIKEGRIDEVGATCKGVYLQLVAAMQDPRENASQIAIARSMGINFLNTLSAMQGQMRDLIYQATENEAGFKIIKLFFEDFLKGILLKGYSHLKNANHPYRYREITIQKAIHIMTDDTLMDNLTLSLCSENKQTSTEKVRQELKTDLSIIIDTFDNIDKLLSRIDDYRRSLTTRTRETIEYMRSSLPGLDQQLVDQIVKVSGMSDTTMLPSPGEQYSSLNEYRLRRPSTLQVKPQATELEMPYKNPLKLAENMAIREYLERRRENPARVYAYLERHLGKKSYITSDELQIETLEDMLAFIQLRRLLHNAVPPKSRYYKLTQHFLVMPIAGEYTENKYLSTPKLKIERRSPLQSKETRYVK

SEQ ID NO: 33008 - protein, 220 aa, Salmonella enterica subsp. enterica serovar Muenster str. 660
MLSDLTKTITRSGEGNIGPEDFRQAARALRKRQFLWADRPHDRKHYELIRRFEEYFSNLFDAFDDELIKDHLFGYIGIIPRSPGDSVMGVLPTLMLLIMARLHDLESRRACTVNGRASPSPELLVDTYVELTGKPKPKLSDLNQALDAIRRHNVIELGEKQESSDMRAITILPNIHKVVNSQYLQTLELFALESGQPLPVVIASQSSDITFSDTDQRIIL

SEQ ID NO: 33009 - protein, 1170 aa, Salmonella enterica subsp. enterica serovar Muenster str. 660
MNTEVSTHRMVRITLMNWYLFGSEDLDVDAASVMISGANGAGKSSIIDAIQTVLSGGNENVLSMNAQSSNNQKSLRSIQTYALGVIDDQEFGGELSACRNESNTYIALTFRRPDGTHYAIGMGFHARSGDRKVEKLWFVTNSFSLSSVDFMDGNRVMTLADFQRRLKAMDPAVLLAKNAKNFRLDYCQSMSREGAGLQINPDAMWHAIKNGIAYHGEMSISDFISRYILPAENVDINRLHNDYLEHERILNLIEKTELEINALRSLLKHYHRYEMLMVDQICYGWVSAEASLQALDLVIEQCASKHQALGEKLEKLIRRQTEMQTKEAGVNRERDEARDLFINSAAARVIEKNDEIIRNAREHIVGIEERLTTAKQSLARFLNLICPPEMTADFRKKYVEYYNSLNDIAALSDNPLIPWPSHERQGKEIVSTLIAFETLRDAISEERDNAKAQLTEVENDLRELLQAVKKLESGEAPLSASTDIVIRMFKLHKITAVPVCELCSISDSSWQEGIERYLGRNREALVIIDGSYSDALKIYRKAIREENNHVSLRGVRLVNPDYDFGYQGTPRKGTAAELIKSDNAVALKFLHGLLWFVNLVNTEEELRKEKRAITPDGMVAANGSISGGNDIKGIMIGAEARRQYAMTMQVQVDEATSRFYAQRTVYDPIDEFNKSFLSELSHVRHLSLQIEPAYKSLLAEQAIIKDKTRIIDEARKNSDTSLENAFNLADEALAKFNEEKTTLAVERNKIEEQIEKIEKERSATEDRIKYVLGKRNEFSEHPLFDQSRASNHIEKLTESKSIELRAEQQNDAIASEIEVNNAVAIAAQRRVDSAENSARIAGDEAREGKIHFMANFEPANRDILRDLDPYESRKSFEKHLKYLEDTELALHRHDAEKACTEMLATFRADVVSTLQDAFQRMRRTFKQLNDQLKDLPFNNNTYRFVYPVVETKTLKDVHNYVIEQSRADTEAVGTLFDFSQKHPAISVIQDVLMEGRVVELSDYRNFFTYDIMAKDLSTGKERRFSNLLGTGSGGEQQSPFYVAFGASFMTAFRVQRRLNQVNAGAVLAIFDEAFSRMDGNNTFAALEFFSQIGLQAFLAAPLDAEVKMGHHVERVITIIRDGLSVFTDSRQISDAGWELLESDNPKRHPELIDAMLTQARKQLHVEKRDA

SEQ ID NO: 33010 - protein, 414 aa, Salmonella enterica subsp. enterica serovar Muenster str. 660
MNKTTRRILEHIARQINHPGMPPKEASITLTSKRFEYYFGLSIKERLTVHEELQVLFERYKCATVLFGPVALGEVASVHAIDITRPRLFLEAAGVQCLYDEIERACKQLALLRTTSDWLQVIIDKAQYGWRQGRQAYGVKPCDIVRLTDAIRLLDWLGNNEQMRIPDIRTLSVVLFNDTKRIEAISGIIVRLYRPRLPEYLLNADNDQILDFLGIRKFSPLIRFKGSFKVVMASGSIDCTDVSPYIGFPPDAIKGIHPVQYPGYILFIENETTFNRYTRDIIDNGWVIYTNGFPSRSWTAIFRELVIQSNPGTPVYHWGDIDIGGYRILVHMQSILGIDLHPFRMLPTAEQFTDDETKLISVNRLHSIISDVDSHSIQNMAKKLLILNKKIEYVPWVEQERLKLVSPQSFENSD

SEQ ID NO: 33011 - protein, 498 aa, Salmonella enterica
  subsp. indica serovar 6,14,25:z10:1,(2),7 str. 1121
MEENARQRTENYISAKNQHPAWILLAIRRAPLVLSCLKTLFEKSHDGIPLEEAIQSLTGILVEHVSQEQYDINQDNPSLQASRELREWIKRRLIVERDGRIFATDALEVAITFVESLDNRFMTSTASRLSTVQREIENLETQLNPNPANRVATLRRRIVELERELQEAEAGHIEVLEAHQAVEHIREVFNLASSLRADFRRVEDSWREADRALRQSIIGEQYHRGDIVERLLNDQDALLNTPEGRVFDSFQQQLRQSSELKAMSERLRVILSHPSASDALNRLQRHDLRWLVKRLVDESQTVLQARARSERDVRGFMKTGLAAEHHRVGHLLNDFLNLALKLDWQRQMIRKQEVPLPAVGVAVTGIPAIERLRFKEVDDEAEQTLDLSNHAADLTQIGDDFWDAFNGLDREALIQQTLQVLAKENRPIGLAELAALLPPAHDLETFAVWIGMAREAGIEVIDSQREFAELSDGEGRRWRFNLPTTGLESQALMDIDWE

SEQ ID NO: 33012 - protein, 249 aa, Salmonella enterica
  subsp. indica serovar 6,14,25:z10:1,(2),7 str. 1121
MAGFFDRLINRNVAANAGSKPEPSDEDVTDELVDDSAASSETRTLKKIREAAQELLKYGLLEEASKPNLYRVVLTHPEEVTRILEPLDLDIGIDEIRGLLYVKVRLDETPEQDEWSHPLVRRQRLNLEQSLLVAILRQHFVAWEQESGTGASQAQIAIDDLLPQLQIYLGDPGSESKERTRLLTLLDQLKGHGLVTSPDAHERIVIRPIIAHLADPMNLQALLAWLREQIAQQTSPDDSSEKESSEEDV

SEQ ID NO: 33013 - protein, 1096 aa, Salmonella enterica
  subsp. indica serovar 6,14,25:z10:1,(2),7 str. 1121
MNQIARLAGKESFILTRIELFNWGGFHGLHQAVIHQEGTAVIGPTGSGKTTLVDALMTLLCANPRYNLASTGGHESDRDLISYVRGVSGPGDGGEGQSHIARPGKTVTGIAATFEREGQLVRLGALLWFDSTSSSAADLKKLWVFSDNPTQTMEHWLNIWHDGGTRSLKQMEKETTGIWIWLNNKKQYLARLRDFFEVGENAFTLLNRAAGLKQLNSIDEIFRELVLDDHSAFDRAMEVANSFDGLTEIHQELETARKQQQSLQPVALSWDKYQKQEQKLADRKALESLLPIWFAQQASQLWREKIEHLDAELGEAEASEERLKSQFELQKKVVADCMQRYYQAGGANIDDLNERIKDWQKTLDSRETQARQYQQLTRNLGLPPDLSQPQLEANQHEAEARREQLGDDIKLKQEEAYQKGALSHRIAEELRERETERAEIARRPDSNLPAHYQAFRSDLAKALNVDESELPFVAELIQVKPEEAQWRGAIERAVGNNRLRILVAPESAQEALRWVNQRNNRLHVRLLEVKLPHSPARFFDDGFTRKLLWKEHPWREAVKALLAESDRHCVDSPEQLRDTPHAMTVQGLMSGKQRFYDKQDQKRLGEDWLTGFDNRDRLSFLAKEITALQEQVKTANEALEFAKGEVGLLQSQEISFQKIQQIDYDSIDVPGAKSQLEALKERLDNLIRPDSDASVAKAKLDEAQAVESGLDKQLRAANKVTNGLDTELTSARAAERKAQQIAQQGMQDEERALCASHFPAVTLEQLPDIRDLERQHERGIQQEIEGVKGELHRLNIELTKRMSEAKRVDTGALVEAGADLDDIPVYLQRLQELTEEALPEKLNRFLDYLNRSSDDGVTQLLSHIDHEVLVIEERLSELNETMFRVDFQPGRYLRLDTRKVFHEKLHTFGKAQRQLNAARFVDDNGESHYKALQALVGHLRDACEKNRTLGAKALLDPRFRLEFAVSVMDRQSGSVIESRTGSQGGSGGEKEIIASYVLTASLSYALCPAGSRYPLFGTIILDEAFSRSSHAVAGRIIAALKEFGLHAVFITPNKEMRLLRDHTRSAIVVHRRGQDSNMASLSWEELEQHYQRREKA

SEQ ID NO: 33014 - protein, 382 aa, Salmonella enterica
  subsp. indica serovar 6,14,25:z10:1,(2),7 str. 1121
MYSPDELRKKLARQWDNAKLRAERLLASGSWPLSLSIGKPSAKVFAEQAQSVLRHVQLWRQVAVGRVEWEDVSYRVSDGPVPMPLRWILNGPSDWINAAVDPVVSREFRLLEGIIEQVDPIFHPLLVSHRSLWRHKDPQDIISAARLACQLTPGCAKGLPLRLLSGQGVDTKFIENNISLLTRLLDVRFSGEASEQGLTTFLDAFDESSHWVLVAPLSPGLLPFKKCRVTTAELAETTLTASRVLVIENEQCLHQLPALSDTIAILGCGLDVQWLSSSVLDDKRVAYWGDMDSWGLLMLARARRCRPTLDVLLMNRELFEQYASHSAVPEPVKAQEAIPDGLLNEEADFYCYLTRSPRGRLEQEFLPAGVVEEALVMWQKGL

SEQ ID NO: 33015 - protein, 465 aa, Firmicutes bacterium ASF500
MKLFDAVPNELFSVLASPNRSLYADALDVLYESYQENLKIPEETLYSMLRGKLEQQLAEATFEGEDIDEEELRDVSGRARFLIRKLNSKGWLEKQRGDDFNEYITVPGYSSRLLELFHQLRDDSPMRGYCYVFGTYSALKVASEGTSVYDRMAAVYSAYDNTQSLIKLLQMVYHNVKHFFQLQINMQQVNTVLASHFDDFGQKVVEAYIRPLKIKDSVPKYRVPIQKILTGWLEDDALLTAMSNAALQDRRGSDLNACRSDLLRKIFWVKERYDNIEHEFLDEIDQQVRRYTRATTQKIENLTNRDHNVRGNLNYLLTALSRNRRASELVEQIQPAFQLYEQSFLSEKSVWYRKRPGKRTKAAPVLIQEGEIDPEMARQAQLLLHSEYGRSEIAAYVEQWLGEAEVCYSEDLNLEDDKAYIMSLLAVLTGGDRSSTYTVRELEGVYSENGYAIPRLQIKRREEKT

SEQ ID NO: 33016 - protein, 209 aa, Firmicutes bacterium ASF500
MNVDWINGATQKELDQFKSVCNQLLSRTYLVKTLCRADKVRINNPDYLFLSSHYAEVREYLALLDWDLRKDDFNGYFYVINTDEANRCQLDKDQTAILLAIRMIYDENQERLGLEHDAICTVRDLLEKVVTDYAILSARPNMKDVKRALTLLDNHCVIQRIEGKYSQGNCKFAILPTVLSVVSSEKLDAVVSVLRKEEDSEEAEEDSAD

SEQ ID NO: 33017 - protein, 1120 aa, Firmicutes bacterium ASF500
MKKLKKILLINWLYFSKQLIEVEYINFLTGKNGAGKSTVIDALQIVLLGETNARNFNQAANEKSQRTLDGYLRADMDSGSPYSRRGRDFSSYIVCEFLDEEEGSRFVTGIVFDCRSDGSRQERFFIYDGGIPENCFLDGQEAMDIPSLRVYLKQQYGLRQKLYDSHKEYRTDMLAKWNVHNEQVSRMLKKAVSFRPIVDIQKFITENICDIPDKPDIEAMQQNIRDYKRHEQLAQRQEEKLEKLMEISRLYRDMQTAIDRWEQQTFLVLWAQKEDLEGRINRHQAEEADCKAEAERAAAGFASVSEEIDLKRRRQDELKAACAQSSVAQEEDRLRSGRERLLKEQRNLLLQLRNTAQEIKREAISLCSLCERISEWQNRQLLAPVFSTAGNIQKAYGIFLNCDEQIFDSSPAPFEQAQEAAAQFMGAVREVSYKLEEMLHSLREEQDRRRAALVDLRKNIKDYPQGLLQLRNQIAAELKQHSGQNVPIDILADVLEIPEAEESWRNAVEGYLNTQKFYLLIPPEHYQRALAFYDQIKRDYNNRSFGLVDIAKLREKEHLAPWDDSLARKVETENNLARTYIDYLLGRVVCCTHVSQLRKHRTAITAEGMVYQGYVARPLRKELMEDAFIGRRAVALRIEKLESELRTAETELSGWEPIGAELAKHKGKDPLFSRFFVHSTVEQRRDDYQRGIEITKEVEQMEEDLSHLDLFWLEEQRRQIGILDQEIKDLDQQKIQYNSEKTQMEVRIHTLEYDVLPGLYQELSEKEDSLSERFSPSFIETVGRPRYRQEFARLKRASAVAKNFGDQMIRTENERNSTQRKLFQARADYVSAFQPCSFRTDAMTNEEFDRERQLLEESELPKYREKIKAARESAMEQFQNDFLAKLKSSIEQVQDQVKSLNKALKQTQFGTDRYQFRADRNPDYAEYYDMIMAPELMEGEGGLFAMPFQQKYGQLIDELFGRLAMSDDTQLNARKQSELQQNIERYTDFRTYLKFDLETTDQNGSKQLLSQTLNTKSGGETQTPFYIAVLASFAQLYQVNNLSPLASNTVRLVVFDEAFNKMDSDRIIESVRLLRKMGLQAIICTPPDKLPDIMPLADKTLLVLKEKYQMHVMPWRKEMG

SEQ ID NO: 33018 - protein, 413 aa, Firmicutes bacterium ASF500
MTEQGIILTRLLDKYEKSKHLLEPGSSNRRVMLRIEKKELPEYRHETASIRDAFNQAVQELEQEQLISAEWLKGRPVLSAVILNLDQVERCYQMTDRTHPRRQAEIVEQMVQSALDRVETAWITAWRDDICANAKDTYTVPGYCRKDTGFLADLLSALVQYDFLRGEPITMRAFSSMCYHNSKTFEREVRDTFLHIAEKYHPGLAEVCEQEKMGIRDKLAYLGIYARPELYELSGNCSFTMLAGTVNIGAAYPYGIALPSTAVDSITKIDLSGVHSIIFIENKTNYDEYLLSELKPNTLAVYHGGFLSPQKRKLFLKIRDAESKGTQTYFWADIDLGGFQMYAHLQEIFPDVQPIRMFGEDVVKHCRNGLKRPVKYLKQLEQMLTEGTYPVFEDAIREILNLGVTIEQESFLT

SEQ ID NO: 33019 - protein, 498 aa, Enterobacter sp. MGH 24
MEENTRQRTEKYISAKNQHPAWILLATRRAPLVLSCLKTLFEKSHDGIPLEEAIHSLTGILVEHASQEQYDINQDNPSLQASRELREWIKRRLIVERDDRVFATDALEVAITFVESLDNRFMTSTASRLSTVQREIENLETRLNPNPANRVSTLRRRIAELERELQEAEAGHIKVLETHQAVEHIREVFNLASSLRADFRRVEDSWREADRALRQSIIGEQYHRGDIVERLLNDQDALLNTPEGRVFDSFQQQLRQSSELKAMSERLRVILSHPSASDALNHLQRHDLRWLVKRLVDESQTVLQARARSERDVRGFMKTGLAAEHHRVGHLLNEFLNQALKLEWQRQIVRKQEVPLPAVGLAVTGVPAIERLRLKEVDDEAEQTLDLSNNAADLTQIGDDFWDAFNGLDREALIQQTLQLLAKENRPVGLAELAALLPPVHDLETFAVWIGMAREAGIEVMDSHREFAELSDGEGRRWRFNLPTTGLESQALMDIDWE

SEQ ID NO: 33020 - protein, 249 aa, Enterobacter sp. MGH 24
MAGFFDKLINRSVAANADSEPETSDEEVTDESVEESAVTSEMRTLKKIREATQELLKYGLLEEVSKPNLYRVVLTHPEEVTRILEPLDLDIGIDEIRGLLYVKVRLDETPEQDEWSHPLVRRQRLNLEQSLLVAILRQHFVAWEQESGTGASQAQIAIDDLLPQLQIYLGDPGSESKERTRLLTLLDQLKGHGLVTSPDAHERIVIRPIIAHLADPMNLQALLAWLREQIAQQTSPDDSSEKENSEEDV

SEQ ID NO: 33021 - protein, 1095 aa, Enterobacter sp. MGH 24
MNQIARLSGKESFILTRIELFNWGGFHGLHQAAINQEGTAVIGPTGSGKTTLVDALMTLLCANPRYNLASTGGHESDRDLISYVRGVSGPGDGGEGQSHIARPGKTVTGIAATLEREGQQVRLGALLWFDSTSSSVTDMKRLWLFSDNPGQTLEHWLNVYHDGGTRLLRQMEKEATGIWTYPNKKQYLARLRDFFEVGENAFTLLNRAAGLKQLNSIDEIFRELVLDDRSAFDRATEVANSFDGLTEIHQELETARKQQQSLQPVALSWDKYQKQERQLADRQALESLLPIWFAQQASQLWREKVSHLEVELGEAQTREEQIQSQLELQKKVVADCMQLYYQAGGANIDDLNERIKDWQKTLGSREALARQYQQLTHNLGLPTDLSQPQLEANQHQAEARCKQLANDIKLKQEETYQKGALSHNITVELRERETERAEIARRPDSNLPAHYQAFRSELAKALNVDESELPFIAELIQVKPEEAQWRGAIERAVGSNRLRILVSPESAPEALRWVNQRNNRLNVRLLEVKLTHAPVRFFDDGFTRKLLWKDHPWRDVVKALLAENDRHCVDSPEQLRDTPHAMTVQGLMSGKQRFYDKQDQKRLDEDWLTGFDNRDRLNFLAKEIAVLQERVKAANEAFEFAKGEVGLLQNQAVLLQKIQQIDYDSIDVPGAKSQLDALKARLDNLIRPDSDASVAKAKLDAAQTVESELDKQLRAANKVTNGLDTELTSARTAERKAQQTAQQGMQDEERELCASHFPAVTLEQLPDIRDLERQHERGIQQEIEGIKGELHRLNIELTKRMSEAKRVDTGALVEAGADLDDIPVYLQRLQELTEEALPEKLNRFLDYLNRSSDDGVTQLLSHIEHEVLVIEARLSELNETMFRVDFQPGRYLRLDTKKVVHESLRTLEKAQRQLTAARFVDDNGESHYKALQVLVVQLRDACERNRTLGAKALLDPRFRLEFAVSVMDRQSKSVIESRTGSQGGSGGEKEIIASYVLTASLSYALCPAGSRYPLFGTIVLDEAFSRSSHAVAGRIIAALREFGLHAVFITPNKEMRLLRDHTRSAIVVHRRGQNSNMASLSWEELEQHSQRRGNA

SEQ ID NO: 33022 - protein, 380 aa, Enterobacter sp. MGH 24
MYSPYELSKKLARQWDNAKLRAERLLPPGNWPLCLPIGKPSAKIFAEQPQRVLQHVQLWRQVAVGRVDWEEVSYRASDGAVSMPLRWILNGPSDWISAAADLAVSREFRLLEGIIEQVNPLFHPLLVSHRSLWRHKDPQDIVSAARLACRLEPGCASGLPLRLLSGLGVDTKFIEKNNSLLTRLLDVRFSGEASEQGLTTFLDAFDEASHWVLVAPLSPGLLPFNKCRVTTAELAETILPASRVLVIENEQCLHQLPALSDTIAILGCGLDVQWLSSSVLDEKRIAYWGDMDSWGLLMLARARRCRPTLDVLLMNRELFEQYANQSAVPEPVKVQQAIPDGLLNEEADFYRYLTDLPRGRLEQEFLPAGIVEEALCRWGK

SEQ ID NO: 33023 - protein, 498 aa, Klebsiella pneumoniae MGH 19; identical to SEQ ID NO: 31022

SEQ ID NO: 33024 - protein, 249 aa, Klebsiella pneumoniae MGH 19; identical to SEQ ID NO: 31023

SEQ ID NO: 33025 - protein, 1096 aa, Klebsiella pneumoniae MGH 19
MNQIARLAGKESFILTRIELFNWGGFHGLHQAAIHQEGTAVIGPTGSGKTTLVDALMTLLCANPRYNLASTGGHESDRDLISYVRGVSGPGDGGEGQSHIARPGKTVTGIAATLEREGQQVRLGALLWFDSTSSSAADLKKLWMFSDNPTQTLDHWLNIWHDGGARSLKQMEKETTGIWIWLNNKKQYLARLRDFFEVGENAFTLLNRAAGLKQLNSIDEIFRELVLDDHSAFDRATEVANSFDGLTEIHQELETARKQQQSLQPVALSWDKYQKQEQQLADRKALESLLPIWFAQQASQLWREKVSHIEVELGESQTREEQIQSQLELQKKVVTDCLQRYLQVGGANIDELNERIKDWQKTLGSRETLAHQYQQLTRNLGLPPDLSQPQLEANQHEAEARCEQFADDIKLKQEEVYQKGVLSHRMTEELRERETERAEIARRPDSNLPAHYQAFRSELAEALNVDESELPFVAELIQVKPEEAQWRGAIERAVGSNRLRILVAPESAQEALRWVNQRNNRLHVRLLEVKLPHSPARFFDDGFTRKLLWKDHPWREAVKALLAENDRHCVDSPEQLRDTPHAMTVQGLMSGKQRFYDKHDQKRLDEDWLTGFDNRDRLNFLAKEIAALQEQVKTANAAFEFAKGEVGVLQNQAISFQKIQQIDYDSIDVPGAKSQLDALRERLENLIRPDSDASVAKAKLDEAQTVESELDKQLRAANKVTNGLDTELTSARAAERKAQQTAQKGMQDEERELCASHFPVVALVQLPDIRDLERQHERGIQQEIEGIKGELHRLNIELTKRMSEAKRVDTGALVEAGADLDDIPVYLQRLQELTEEALPEKLNRFLDYLNRSSDDGVTQLLSHIDHEVLVIEARLSELNETMFRVDFQPDRYLRLDTKKVVHESLRTLEKAQRQLNAARFVDDNGESHYKALQVLVAQLRDACERNRTLGAKALLDPRFRLEFAVSVMDRQSGNVIESRTGSQGGSGGEKEIIASYVLTASLSYALCPAGSRYPLFGTIVLDEAFSRSSHAVAGRIIAALREFGLHAVFITPNKEMRLLRDHTRSAIVVHRRGQDSNMASLSWEELEQHSRRRENA

SEQ ID NO: 33026 - protein, 382 aa, Klebsiella pneumoniae MGH 19; identical to SEQ ID NO: 31025

SEQ ID NO: 33027 - protein, 335 aa, Burkholderia pseudomallei NCTC 13179
MRGCRNALEAALSERGDAHDLVDAYEYAEKVIEDLADGIDYFQELVRHLMQAASAHTQWNEFVDFLDRFQRDYSKQLTADNATLNRQAIRQKLEKLRAVPEAKFNRMDAQLRDIAHWMAKEYTGSSLYDWLLGRIEDIVDAACESKQPGFLKAMETYLKRVNGLALQSMMLRSGQTRHAYLAAVQKVAESPKLEQDRLLKLVGQFLAPAEVRVLDPASFKLKTATQRRKAVTVSIRPRPTREERLAAAMARAEAEVFSIPNEDVAQGLRADLRLFQHPIRVSAMPTASARDVIRAMQAVEAARSAIGGDLIVKKLPTRLENEFYGANDYEIDLKK

SEQ ID NO: 33028 - protein, 223 aa, Burkholderia pseudomallei NCTC 13179; identical to SEQ ID NO: 30855

SEQ ID NO: 33029 - protein, 1210 aa, Burkholderia pseudomallei NCTC 13179; identical to SEQ ID NO: 30856

SEQ ID NO: 33030 - protein, 377 aa, Burkholderia pseudomallei NCTC 13179; identical to SEQ ID NO: 32792

SEQ ID NO: 33031 - protein, 486 aa, Pseudomonas chloritidismutans AW-1; identical to SEQ ID NO: 32951

SEQ ID NO: 33032 - protein, 235 aa, Pseudomonas chloritidismutans AW-1; identical to SEQ ID NO: 32952

SEQ ID NO: 33033 - protein, 1124 aa, Pseudomonas chloritidismutans AW-1
MISEPQTASLFAREQFRMTRLQVYNWGTFSDLHDIPISERGFLFVGRSGAGKSTLLDAFSALLVPPRWIDFNAAAREADRSGRDRNLVTYVRGAWAEQKDGESGEIATRYLRSGTTWSALALTYQNALGQSVVLVQVFWLRGNANGSTDVKRHYLVLERAFDLRELEDFGQSNFDIRKLKQSFPEAFARDEFRPYCERFCRLLGIESEMALRLLHKTQSAKNLGDLNTFLRDFMLDKPETFEVADRLVSEFGELNAAHQAVVTAREQVQTLAPAREQYQRRDSLMLQRNGLDELRLGVDGYRETRRIELLKQHVESLEVQASGSEGEVSRRQSILDNHTTTLRNLERQHREAGGDQIEQWEAEKSGLEGQRTDRLRKRGQAEDACKKLGWSLPDSPQAFAELLGNARQEVENWEQRSNENREEQFRLAGQKKDAETAFSQAVKEVQALQRQPSSIPADMLEMRRDIAAAIGISESALPFVGELIEVKSDEAEWQGAIERVLHGFALSLLVDERQYSALANYINNTHLGQRLVYYRTGRSETWQAKPIGANSLVLKLNVKEGTYADWLQAELRQRFDYACVDSIQSFRSADRAITREGQVKHSKTRHEKDDRRSVGDRRNWVLGFDNREKLGLFQAQAQELAATITRLGGEIETLADQDKNRATRAIQCQTLVNLQWQEIDVVPLLDRISTIEQQIREAREGNTALLQISERIDKQKNLVDQADKDLREAKVAHDSVLKQINDSTQKLESLLQDASRVPLTPHQIKGLDERFTKQSDAIRLESLDKVATAVERGLNTEIGEIKDEIGDCEKEIEARFADFKRQWPMDAVDMDTSLASAADFFAKLVRLETDGLPAYEQRFFELLQNQSHQNLAALSTYLNDARKAILERMDLVNDSLGQVPFNQSANQRTYLHIDASDRQLVDVKEFKQEIQQALSHAWTEDREFAEARFLALRRLVDRLASQDPEQKRWRETVLDVRQHVEFIGREIDESGVEVEIYRSGAGKSGGQRQKLATTCLAAALRYQLGGNDHGVPMYAPVVLDEAFDKADNEFTALAMNIFTNFGFQMVVATPLKSVMTLEPFIGGACFVDISDRRVSGVLLIEYDGDRQRLKLPEHAREEASVEAS

SEQ ID NO: 33034 - protein, 387 aa, Pseudomonas chloritidismutans AW-1; identical to SEQ ID NO: 32954

SEQ ID NO: 33035 - protein, 450 aa, Pseudomonas aeruginosa PA1; identical to SEQ ID NO: 32505

SEQ ID NO: 33036 - protein, 220 aa, Pseudomonas aeruginosa PA1
MDDEQPLMSAAVQVDERRTPQRVREAVQEMLKYGLLEESHKPNLYRSALSNIEAVDRILEPLDLAMGVDEVRGLLFVIVRQGEVAEQDDWSHPLVRRQRLNLEQSLLIAILRQQFIAYEQESGTGASQASVVVDELIPQLQVYLGELGSEAKERNRIITLLDQLKGHGLVSALDAHDRVIIRPIITHLANPENLQALVAWLREQVEGAATPAADGEEDMA

SEQ ID NO: 33037 - protein, 979 aa, Pseudomonas aeruginosa PA1
MGAVIWFEGTSSSASDLKKLWLLSESPEQTLEHWLSQHHAGGMRALRQMEKDGTGIWPYPSKKAFLARLRDYFEVGENAFTLLNRAAGLKQLNSIDEIFRELVLDDRSAFERAAEVAGSFDDLTDIHRELETARKQQRSLQPVADGWERYQVLQEQLHDKQALEGILPVWFAEQGYRLWLAETNRLEKEYKKAELDQEQCKSQLEAQKGVVDQHRQRYLRVGGAGIDQLRERIADWVRECDKRSLKAEQYQLLAKGLGLADELSAAALKENQQHIAARLEILDQQITDARQKAFDAGLVQQELNGRLQTLQQEGAEVEKRPGSNLPGQFHAFRSDLAQALGVNESALPFVAELVQVKPEELDWRGAIERAIGSHRLRILVPQDSSQAALRWVNQRHNRLHVRLLEVQEPTSRPVFFDDGFTRKLTFKEHPYREAIKALLADNDRHCVESPEQLRHTPHAMTAQGLMSGKERFFDKQDQKRLDEDWLTGFDNRDRLAFLAEQIREVNEQLEPAKLALDAAQGDVRQLETQASLLNRVKELQFEDIDLPGAQSQLESLRTQLATLTRPDSNLAMIKVELDAAEALQESLDQQLRQLIEQYVQLKTQFDQAASATRKAYNSAEKGLNDTQRELAQAHFPTLTADDLGDIVELERKHTRELQGQLKALGEKLGDQKSELAKRMSDALKVDTGALAEVGRELVDVPRYLERLRVLTEEALPEKLKRFLEYLNRSSDDGVTQLLSYIDHEVSMIEERLDDLNSTMQRVDFQPGRYLRLVAGKVIHESLRTLQRAQRQLNSARFIDDEGESHYKALQDLVGLLKDACEHSRNQGAKALLDPRFRLEFAVSVIDRESRNVIETRTGSQGGSGGEKEIIASYVLTASLSYALCPDGSSRPLFGTIVLDEAFSRSSHAVAGRIIAALREFGLHAVFITPNKEMRLLRHHTRSAVVVHRRGLESSLVSLSWEALDEHHQQRIKAMHEVAH

SEQ ID NO: 33038 - protein, 393 aa, Pseudomonas aeruginosa PA1; identical to SEQ ID NO: 32927

SEQ ID NO: 33039 - protein, 450 aa, Pseudomonas aeruginosa PA1R; identical to SEQ ID NO: 32505

SEQ ID NO: 33040 - protein, 213 aa, Pseudomonas aeruginosa PA1R
MSAAVQVDERRTPQRVREAVQEMLKYGLLEESHKPNLYRSALSNIEAVDRILEPLDLAMGVDEVRGLLFVIVRQGEVAEQDDWSHPLVRRQRLNLEQSLLIAILRQQFIAYEQESGTGASQASVVVDELIPQLQVYLGELGSEAKERNRIITLLDQLKGHGLVSALDAHDRVIIRPIITHLANPENLQALVAWLREQVEGAATPAADGEEDMA

SEQ ID NO: 33041 - protein, 914 aa, Pseudomonas aeruginosa PA1R
MARLRDYFEVGENAFTLLNRAAGLKQLNSIDEIFRELVLDDRSAFERAAEVAGSFDDLTDIHRELETARKQQRSLQPVADGWERYQVLQEQLHDKQALEGILPVWFAEQGYRLWLAETNRLEKEYKKAELDQEQCKSQLEAQKGVVDQHRQRYLRVGGAGIDQLRERIADWVRECDKRSLKAEQYQLLAKGLGLADELSAAALKENQQHIAARLEILDQQITDARQKAFDAGLVQQELNGRLQTLQQEGAEVEKRPGSNLPGQFHAFRSDLAQALGVNESALPFVAELVQVKPEELDWRGAIERAIGSHRLRILVPQDSSQAALRWVNQRHNRLHVRLLEVQEPTSRPVFFDDGFTRKLTFKEHPYREAIKALLADNDRHCVESPEQLRHTPHAMTAQGLMSGKERFFDKQDQKRLDEDWLTGFDNRDRLAFLAEQIREVNEQLEPAKLALDAAQGDVRQLETQASLLNRVKELQFEDIDLPGAQSQLESLRTQLATLTRPDSNLAMIKVELDAAEALQESLDQQLRQLIEQYVQLKTQFDQAASATRKAYNSAEKGLNDTQRELAQAHFPTLTADDLGDIVELERKHTRELQGQLKALGEKLGDQKSELAKRMSDALKVDTGALAEVGRELVDVPRYLERLRVLTEEALPEKLKRFLEYLNRSSDDGVTQLLSYIDHEVSMIEERLDDLNSTMQRVDFQPGRYLRLVAGKVIHESLRTLQRAQRQLNSARFIDDEGESHYKALQDLVGLLKDACEHSRNQGAKALLDPRFRLEFAVSVIDRESRNVIETRTGSQGGSGGEKEIIASYVLTASLSYALCPDGSSRPLFGTIVLDEAFSRSSHAVAGRIIAALREFGLHAVFITPNKEMRLLRHHTRSAVVVHRRGLESSLVSLSWEALDEHHQQRIKAMHEVAH

SEQ ID NO: 33042 - protein, 486 aa, Mycobacterium abscessus subsp. bolletii CCUG 48898 = JCM 15300; identical to SEQ ID NO: 31556

SEQ ID NO: 33043 - protein, 249 aa, Mycobacterium abscessus subsp. bolletii CCUG 48898 = JCM 15300; identical to SEQ ID NO: 31486

SEQ ID NO: 33044 - protein, 1115 aa, Mycobacterium abscessus subsp. bolletii CCUG 48898 = JCM 15300; identical to SEQ ID NO: 31487

SEQ ID NO: 33045 - protein, 539 aa, Bifidobacterium longum E18
MRELERLRPVYETGVLRLLLRQNAMLYVSLLRSTFDPLTGELPRETVEERFAQSLSSLADAGEYAPREDQTFAEAAHQILADLTREGEGDYAWLANSHDAASHRFLYRLTARAHRAIEALSRLEDESRALSGAQANSIIMEIEHARMQLTADPGERIKLLNREIKERKHEIKRIQQGKQHATLSEAQVEDVIAVIHNTLRGVPIDLRELVLDERDNGDALRRRMQAGDISVDENLTRYHDEYRRSFRESDSGRRFEDAFQVIITDEGRQQIDEALRAIAKTPYLAGESGVLLGQIRDELARIYDGIEAVRRQMRVSDEAISRLVRQQTDTRYRTMLTRLNRLYARLNADAKTHMGDASRPYDTATSDALFAPLPMRPAKSMTRATAPGLSDLAAEAPQSTPVADLRDMVNSGGPRLLRMVSLIRRNPVTVDRSDDRPGATLVDIAASFNRLPESERRESEIVGFLGGLGAVSGNAIADEPSTDGVGVGVDSDIATEPAPAQRGDTATWHCVSIDGEPRNWITRPVLADMDELSIIVEEG

SEQ ID NO: 33046 - protein, 227 aa, Bifidobacterium longum E18; identical to SEQ ID NO: 31245

SEQ ID NO: 33047 - protein, 1182 aa, Bifidobacterium longum E18
MMQATDVQMIADRWMLESRRLINWGSYEGYHEFRPSTDHKLPVTLLAGASESGKSTLVDAQISLLYPTGTPFNKASNSGRSERSDYTYLRGMVGVGSTETGDEPLYLRGRDENGAPQPVWGAIVDTYRNQTTGQVLSCAKFLYLMPGDGRGDVRRQYVVWGKPVDPRRMDQYRDAPFTPAQLKATYPDCLTFPSAEAFHTHIWSAMGLSEAACRLLHKIQSADAPSRLDDIFKQGVLGVPEALDLARTTVEDYERYDENFHAMDEKTRRMDTLRGIQQAYGEYAAARGKARAFEPVKPAVDGTVPAVLRDWALARMRGEVAVQLPADRAEQQNSEAEAKLLRRRTEDLHTRLDMIRGQMQGLDGGNLTRLELELDQARRTLEDVQANRTRIEQTFASIGETLPGDEQAWNERRINAVNFKREYNKRDGECEEALTAAINARAGARGDLERLQRDFDRQRSQRTRISQQMDETRAMLCRATGLTPAELPYVAELMDVNEHEEDWRLAMNVAYAPIAQTILVDKRHEQGFAAKVSTIDPRTMPRRTWQFVDTARHYDDTGAHANILTGEQDGDWLSGKLRYRDDSPFADWLRSQTQDERFDALCVTAIDDTGRTNRQVQADGQIKSGARGQHGTKDRAQVIGFVNETYLNALAAQVDAARNALSQADTDYTAAKTQSDNLHRELELANQLAYTSWERIDIAGAQRTITDTQDAIASIKNDPKLAELAKQRDELNAELDRVERQRIESDQAAARAGSAVEAALIWLRDHADTGTTDAAGATADNDDDAASGPLPDEVTAALAESYDNRFAGLADAAMRAHMIIGAGAAGTQAPGESFPERTIAGIGKDMASRINLLNGQADAARTGVESKMSTYIALYAADDDSLTASVEDYRYYLDELASLTQLAAVAATDAEYRRCLEQLLRSFLTIKRAIDTDASDIHDQLDRINAMLKGQQFGPKHGSLSLHADVRRPERTFWAQLIRVIGTLNDWKSADVNDSDASRKAFAACAPMVGLLRAELAQVKDANGVKSYGARNLDPRCRSSFYAIVHHADGPDERITSTGGRSGGALQELTSFVYGAALIYLLGGGLTSEPSYTTLFLDEALIKADGRYTQRALTVLPRLGFQVIVSAPESKTGEILEVSTKAYVTYKDPDTGLTSLREAVLHQNDMDDESSSDILKDDGVAE

SEQ ID NO: 33048 - protein, 397 aa, Bifidobacterium longum E18
MGTVAGMKDIAAITTCVKKHMRSHMYDIEPAWPFPVPVGLPDQAFLETNAIAVHDNNNEIRQWASKNGCEIITKHRTIGTSVELISKVVVPDESIAMRVVGRTLAAECREARRRIACLVAACDVAPETIESAARMTGHEQPDDFDLLVSAVRYFRHHDVTGMTPRQIPLTGFSGKWLNESKTNRRKAICRLLGVETLGLSKRPTELRFRYLDPVRDDAELERIIWCPWEGEALSGIKYAVIVENKDTYQTMPPIAQGICIWGSGRAVSDAVPAVPALRDMRIVYWGDMDADGLEILSTLRESGIECDSILMDCDAYDRYHRFGTDRTERSAKIAMREPKPTPGLQSAERRLYERLCADKTIAYRRIEQERIPMRDAVDELRKLGIPVESIENQDLPI

SEQ ID NO: 33049 - protein, 486 aa, Mycobacterium abscessus MAB_082312_2258; identical to SEQ ID NO: 31485

SEQ ID NO: 33050 - protein, 249 aa, Mycobacterium abscessus MAB_082312_2258; identical to SEQ ID NO: 31486

SEQ ID NO: 33051 - protein, 1115 aa, Mycobacterium abscessus MAB_082312_2258; identical to SEQ ID NO: 31487

SEQ ID NO: 33052 - protein, 486 aa, Mycobacterium abscessus MAB_091912_2446; identical to SEQ ID NO: 31485

SEQ ID NO: 33053 - protein, 249 aa, Mycobacterium abscessus MAB_091912_2446; identical to SEQ ID NO: 31486

SEQ ID NO: 33054 - protein, 1115 aa, Mycobacterium abscessus MAB_091912_2446; identical to SEQ ID NO: 31487

SEQ ID NO: 33055 - protein, 223 aa, Burkholderia pseudomallei MSHR6137; identical to SEQ ID NO: 30855

SEQ ID NO: 33056 - protein, 1210 aa, Burkholderia pseudomallei MSHR6137
MKLDRIVLVNWGQLRPGDYDLGNMTLLTGPTGAGKSTMLDGLQTIMTAAYQGIVAYNPGQEEVQQGQRSGKSKRTLESFVVGAEYSRFSRPHGAHGYMAAVFRPGPDEDSAKTFTALVAASAQVDGIGERRVPKLERLELVIVDDAALTVDDFLKDAEQSEWVAVEEIVKRLKARYSKVVTYDGHKRDYLCALYGRFRGRISITWDEAQNAAKAWCQSIAYKKIGSVHDLVRDDILEYDGKQLQESITRISDLMRQVTNLKQEGQRLEATVGRLRGLKTAIAQTTSAFEEQVQYDLLLAKMLVAADDERIAQEQKRINDDSALVTRCEQKVKAEERLKAGVDRSRIDIAAKLSGIAANAEKERLDQQLELANSAARHKLAELNTGLQEAAQIVNAATGLLRKPIPEQFPKLKASVDAVGRVTASTDVARLDGLLGAVLDASSDAQLNVEKLFRLTPAFDGVEEGLAALHSYLVGTEDSVLMAVASETSELTQRVEATRKARKELADRKELLASGASDYNRDTRMALPRIRECLPEAGVQVLCDLVEPVSDEWQEAIEGYLDNARFNLIVKPEWEARTIDLLHSWGSRCKVIQGKRCLQRADAGRVPSDSIIHELRTDHPIARAYLIEQYGAVVKVRDSEQLRDTARGLTKDGKGSGSRTMFVGERRDLVLGRKAREQALRATIEKLDAADRGIREFEQLQDTLSSVKRLLGNLREPVFDAMPLGQAAGEIDSTRRSLAQLDLTEVEQLRAERAKLELLIAGHDAEITAVNKEITLASQRITDAQGAIERINGGRDARFREREDQIRRLGQMCETNSEKTYTVIAEEVEGLLKSRRFDVHSVQVRLNTLRAQPDKLLGDVREMLAEYNANARQEERFQSALPHLHDATMFDPYYGPLVALGRAVGALHSELEGIGLYNNRAKVEEAERSFHDVFTKQFCVEIKSKVDDGVRLLRQLNMELERLKFGTDRFSIDWSKWEPEFQEYYSFFSAVTDLADSVETVDLFGETELTPKHVEVRDRLVKLLLDSDQERAGRELLRIADYRNYRRYEIWNDSDSGGRIALSTWGTGSGGQLETPAYIVRAAVVTNRLKFFEKGPSLKMLVSDESFSTMDEPRARAVLQYLRESLDIQVISAMPTRGAGGLRPEFDREYSYSRVPVDANGELDFILEYDERIFKKDKMRELWEKQRAAARAQAELAFGAAEAAQQAEALK

SEQ ID NO: 33057 - protein, 230 aa, Burkholderia pseudomallei MSHR6137
MTEVVEQLNRLPALAEKSMLLREVSSQLFWGMSKVLDKRQGLVAAILGMDDCPFPESPIQLHVFLPAGGHRGVLFIENSVSFECAMREPRGVFGELALVYASGFKGSAQRLRTTEGCSLFYAAGGGLERDLRATFEGWLFGRQEIPSYFWGDLDFAGMRILAAMRATFSGLTAWVPGYAPMLTVLKGGGGHPPEAADKQGQKPIASTGCEYADEQLVPALQTFRRFVDQE

SEQ ID NO: 33058 - protein, 488 aa, Mesorhizobium sp. LNJC405B00
MPAMNQMRREAVMPDVTCESLLRVTSRRCSHRIKVPGEHAELWREDEAPIVLDQLATRRGRRIRRRKFGSGRSAGDKRSDIRARHIYNRLIATGWIEESRYGLKVTVDMPAGAMRLAEFLCDLREGLTEQLSGLVIQVKNELDALLLNARENAPGLHKAARDAATFGRYLRSVLSALREIDKQVLASDSVGRRLRHYFEDFVERILLQDYAAISTTSHPYRFRHRIFTALDSIEDSIADVGAIAEAYCEVRLAPDITAARDLVYDDLHKVRRVFDQIEEAFERIQQHRSRLETRLRNTVRYAGRRGGTFLQRSKPIMLRLDKLLGGHRADYSLSGLLESRQTYWSPLLLARARNYRTTVTGGVLVLPPPDPLREIRKQLERGYLNRLAVTPEKVSRFLEKRVPPFGASDASHFWIDNVDDFLAFETLRLSVLAADQDGRGNAIADHLASAFGFSPALGHWVDNAWLSCTGFTVTRRGDSITLEGSHAQ

SEQ ID NO: 33059 - protein, 171 aa, Mesorhizobium sp. LNJC405B00
MSNGLLPTTLTLPAIDIVRESEGWAGILPDTEQISHPRMRIDETLVLLLFRRLWEEGVQEGDVERYGSVLVTLNAAYDAYQDMVARARRPTLSIADFKALVATLERRAIIRLGELDDELEDIPLTIRALVATVAGDEFLAHLEELLSRPDFQDTDLEPVNNNTDANEEDEA

SEQ ID NO: 33060 - protein, 92 aa, Mesorhizobium sp. LNJC405B00
MMQLVHIALVQWHLFDREDLAIAGDTAILGQNRSGKSTLIDLIQAVMTGGGPGVGTNSTARRAKPATANRSGPCAATAWVNSTSMSFCEKRL

SEQ ID NO: 33061 - protein, 472 aa, Brevibacillus panacihumi W25
MMNLFDVVPEGLFHLLTGSNRKIYAEALLLLYEHSQRERFGIRYEVMRDLLQELLETQQETGMVISADEDEPVGAGREDQLTLEDVSRAQANALLRRLERAKWIDVETRSQFEAYIVLPHYASRLIAVFQELCEARTVEYQRFAFVTYQLLTGEEAKMRPCFAVMEAAQVTRQFRHELIGLYNNMKHHMETVVQKTSIREVLDHHFETYKSQIVDKSYHRLKTSDHVARYRFQILHTVQKWLLDRGLLQEAAMDGVKSELYETVEQAEYAVKEALFFIEETFVGLEEIFYQIDVRHNQYLRSSYDRARYLSQQHEGLDRRLTRLLELLGQQKQDAEYSLFAINQVRGWSEQSLLPPRRRRMAHQPETHVTVPIPAHVMEELRQRNVEKMRKAITRKKVDDYVMTRLGDRKRMELIELAPSSAEEFLMLGYVYLYGSDGGSRFSLDRQGKRQTVSVGRYRFHNHDIVRKERGG

SEQ ID NO: 33062 - protein, 202 aa, Brevibacillus panacihumi W25
MMFQDLSDSEQSKVKEVIQRLMEVNLLIKDKDRELYATIRRYRTALEGYYRFLGWELVVDERHECVYLHIPDGRLRRRLDREQTLWLLVLRLLYEEKRQGLSLADYPMITLYEIRSKYETFRLEWVNRTALDRLVRLCVQAQLIEPLDSDIRSDDARFKLFHTWIYMIQTDEMQSLLDKLELYLTNAEGGLLDEMDEAAASD

SEQ ID NO: 33063 - protein, 1151 aa, Brevibacillus panacihumi W25
MKWMKRLRLINWHYFKDEELEFGKQTLITGQNAAGKSTIIDALQVLFVADHRMIKFNAAAHDDAKRSFINYLRGKIGSDERSFLRDGDFTTYIAAEFRDEDRKEWFVVGVAIDVYRGSTTGEEEYFILSDRRLDDLQFVKSNGQLLNRDEFRKRYGGESVRVSGLSGKKALFERNKTNYQKALLARMGQLHDRFFTIFTKALSFKPIQNIRAFVNDYILDRKELQLDLMRQNFEIHERYRQELEHLQEKKLHLQSIRECYAQYAKYKETAIEQDYVIRRLKADYESENLEQTERDNVRLEEELRQLADDIDLAARLQAEARDKQQDAYQRWQNHAAEKRKKELHEDIARLTAQQSEGERLLLTYRRQIERELQLLANLYDWPDNPYWTWKPGERETLRSYQESLARLDAVARCGIIEVHEEEEWTRDLAEIGEGLTAWRDRMLVQHNQLQEKLGETDARIEELRTIIRDLEQQKRSYAEPVRQLKGILEERLRGRSAVWVFCEHMELKEELWRNAVEGYLNTQRFDLLVEPECFAEALSIYEREKRTYRLEGVGLVDTEKEKRYLGTAVTGSLALELQAEHPVIQAHVEHLLGKVMKAANEQELRHHRTAVTQSCMVYNNLVARQMRKEQYEVPFIGAKAIARQLEIRRSELVSAQDERRMLYAWGEHLSEWIGKLKETGCTKLADHLGLMRHIHECSEMLLQKTEELNGLDFSEAERLQAEYEQWKKDEQKWQQKWGSLLQKQTETESKKSEAEGKLHLLRIKVQEYEAAWRNWINEHGSEREAGAMQRYEEACNSSASTWQKIQNWEGSWKGQQTLRDSQFNKLQLMRQKYNIDQNFIADIQKVTNEDYDRLLETIEHLNIPEYQDKVAAALKESEEEFKSHFIFRLREAIEMARREFHELNYALRHFPFSDDKYHFEVSPSERYKRFYDAVMDPMLLEKGSLFELPDNDRTEVLHELFDLLVKGEAGQLEEFSDYRQYLDFDIIVTSGNGKYRFSQVLKEKSGGETQTPFYIAILASFHHLYSGKSTRLVIFDEAFNKMDEQRIQSSLRLIKQMGLQLIAAVPDEKMQHMAPEVSTTLFVSKHNYQCYVDMIDKWDNGAEDEMARAGAVEIAEYEAEAAATSNLSNVDNGKSPSADDADEGNGQGFLF

SEQ ID NO: 33064 - protein, 424 aa, Brevibacillus panacihumi W25
MEIHETPYKSKFVSQLLNLLLDKYELSQSFVTGQPSKQRPQLSLNKSPFWQDYTDEVDFRKRIWINEAASELERLGLVELNWARFRTGEQLERIYLRWSELKTAYRVAGRMPKRDKLERLRHILTPLSRHPWEWVRVWSEQADVSLAEGKTAHLEVDDPEGYKDLVCVLLELPRLERAVPIRLLSQKLFKDSKHMERNVQRRLLSLAKQASGEERETEEEWLDFLGVAKNPQIVLVSGPLSFRTTDSRKVDIGVFAGGVGLSDKTGEEMYQVQTVATRIVTIENLATYHLWLEHASELRETELVLYTGGFPHRSLQSFLCRLAEHLASASEKNIEVYHWGDIDLGGIRIFEYLRKKFFSNLRPMLMDAETLLRYESSAASISDEYAGKLEEALKDTRLTHWRQVLQTMLDRRIRLEQESIVELD

SEQ ID NO: 33065 - protein, 490 aa, Gordonia alkanivorans CGMCC 6845
MPPESVQVTLGDALDANRSLQKSAAVKLFAANNSALYVTLMERHLDYGTKMSEVELTMRLERDLAELDLTDDQPTGLELVKLWARQGWLHRVTDTTDPDAPNLCHLTSEARSVLDFMRRQRREDSIATGGSITGIAAELRRVAGQVSNDPETIRLELEAQMSDLDAELADLEAGRRPPVDLRVAEDSARAIGYQMEQIISDIGQYGTMLDRITTALLDDPGDSDLAYRDRQRQLFDDYEALLQSSQSASYQAFSQMIQDPERRARLKVDIDTIIENFPGMDAGLRSVMDNFFGLVTQQMAEVGRTRQRCARRIRRFVASGTLEQSRGLARQLNDALATANDLLKTSLADRRLGYELPLAAPTLNSIGRLAFEIREHVPPAPALPAGGADADLTAFASMTGQVDTVELTETVNNAVAAGPVALTDVIEGLDEPYLAHVIVLWSWAQKQAAAGEKVPMTTVRFRSLLGEDHAIEVPDLTFTEPIPTAEVDAE

SEQ ID NO: 33066 - protein, 308 aa, Gordonia alkanivorans CGMCC 6845
MTSLPPETEPSLPEVRAEADPSLPEVRAQRATKGDPEVRAEADPSLPEVRAQRATKGAETDLPDEFAGFDDLPTVANRAASHAPSAPRFDGDVSEMPDRACWALQNLLARRYVSGDRQPQLWSWVSEYQDVLRIRLSELDLRLRLVDELQVAFVEQAGYDSRWGRRILKRETVHTYDAILALHLAKYIRAARDEDALITREEIHELFAGVTNTIDRDLALFDKRIERAIDKMEELEFLRKQRDDADTFTVSPVISAVMTASVITDLQRQFEQFIGSGDTGEEPPESAADEPKEPDAEDGFGDDEGDDW

SEQ ID NO: 33067 - protein, 1114 aa, Gordonia alkanivorans CGMCC 6845
MSGQVDQYHLSRLQLINWGVFDGYHSIPFSSNGSLITGSSGSGKSSLLDAISLAFLPDHRRNFNASGDATAAGSSSGKRTVGKYVRGAWGERRDGTNAHREIMYLRGTGPAWAAIAVTYTSTSGTAITGLVLKWLAAGKMTDAHSSYFIYDGDADIVDACNEWAASNYNSAKFRDRGWRGGPGEGKYLSTLYSLIGIRGSDAAQQLLGKAKSLKSVGGLAQFVREFMLDAPTSIVGISDALEQIDPLVEARELLDVARRKRTILGNIEEVHERYAAESATFSVLDTIDSTTIRSYVNNLRIRNAQPEVADLDDQITRLDSDLAALTTQHDQLRQDHSLLLARIATSTGDLAPLREQLGGAQKLSTEVTARRNAYEDKVSALGFSAPTNAEGFWSLREELIEEATKIDGQLDAGRAHYAEALAREVAARSRRDTAQEELGRVEQAGSALPRTEHEMRRVIAHALQIDESELKYVAELVELDPDEERWRLSVEKVLRNAGLRLLVPDKHFRSALRFVNSHDMRGRIQLHQAETRPMPDVEPGTLASKLRPVDPGHPCAAEAMTILARLGNHMCVDNPGEFSQYAKAVTDQGLRKDSAKLAVKDDRQQLRRSQYIFVGDVESKITALRDELAYEERAFEDAREDCAELDRERSAKERRRDAYRRVCEQFTQWNEIDVDSVDDRVDQLTDQYDLLMEEHPDVEALQRKAEDLWEQVRNAISQAALVKDKIARQDERRTQLLDLIDRLKPEDVPAQAEKTLDGFREDLSATLDVLNPEPYRQEIVKAAGRERDRMRSDARRSRDELARILDTYDEEFPDAIPNDSDDFDERIHDYVAVCRRIDERELPSAYERMRRLITEQAPGAILGLHMAADAEERRIVEQIERVNTGLGAVAFNRGTRLRLVPGRKKLAAVEELTEKARQISNRATAVSFGDEQAILEQYSDILLLRERLAGNTPEDRQWTRDALDVRNRFDFYCEEHDAESGETIRTYSNAGDNSGGEQEKLMAFCLAGALSFNLASPHGNDNRPIFAQLMLDEAFSKSDPQFAQQALSAFRKFGFQLIIVATVQNTSTIQPYVDNVVMVSKTEVGPELRPVATATSTTIKAFSELRRSGSQLSV

SEQ ID NO: 33068 - protein, 480 aa, Gordonia alkanivorans CGMCC 6845
MDFHAFTGLWERHPAWRLLRAHHSPLILTFLGNYFVEGNRGASSANDLAAALDDLLYDLNTAAAAEDGQARFPKEPRAYLEDWAATEAGFLRRFYPPGDDEVHYEVTPAFEKAYSWVVSLQGRAFVGTESRLHTVVELLRQIVHGVESDPGVRLAELRRRRAEIDAEIDAVESGHIAVLDQTGVRDRYQQLSSTARELLSDFREVEDNFRLLDRAAREKIAAWDGPKGELLAELVGSRSEIASSDQGRSFQSFFEFLLSDSRQTELSALLDKVSSLDFVKVDHRIRGIHHDWSEAADRTQRTVRQISEQLRRFLDDQVWLENRRVFDLVRAVESTALELRGDTLDFGLDVDQPGIEIALPFERPLYQQPASATVESHIEHATEDLDAELLFTQTFVDQARLAANIRAILPERSSALLSDVVGMYPIEQGAAEIVGYLALDDGDVSIDIDASDETLLEYPDPNDPDTIRRARLPRVTVRRR

SEQ ID NO: 33069 - protein, 195 aa, Gordonia alkanivorans CGMCC 6845
MTDERAVASTIIRLMQGVVYRESDADAWATLERSGAGVRDHFATIGVDVVVDDSEGYAYLRSRPEQAEQEPLPRLVRRRALTYNVSLLLVLLRKRLLEFEITGGEGRLVLSTDQIVEMLRLFQAESTNEARLVDQAESTIKKTVELGFLRQLRGHTDQWEVRRIIKAYIDAQTLSDFAGKLREYAGRPADDGGSR

SEQ ID NO: 33070 - protein, 781 aa, Gordonia alkanivorans CGMCC 6845
RAGGDRVGELERLAAAARDDLQKRRHGRALFDATIADAGFDPVTSAEQFSALRGLIDDERSRLLATKRALDTTIADAIGREKDTVRRADAIRDELDDLRNRTSNLPPDQVQLRDQLTTDLGLTHTDLPYAGELLDVAAEHGEWRGAAERVLRGFALSLLVPQQHYDSVAEWVNGRRLTFRGAGGRNVGARLVYERVPGRQIPLQRQPSDVPVLAECLEIKDGPFEDYLRAEVFKRADHRRTENIAEFRAATRAVTREGQVRSGGRHEKDDRHRVDDPRRWVLGWANERKIAALRDDLDEFERLQSAAATEITTMSEQRDVVQKRSEALARLEGFHSWTELDVDEARHRVEAHDAERARLESGSSRLQEITVALERNAEHAEALNATINELTGKLATTAAARHQAEQLRAGTDAFIAQHAEADLTTARASYDALAQRLDVMPTTADDCPAAESTLSSVLHQRIERLTRELGGHGQNLAQYMAEVLRRWPDLRADMDADVGSRADFVAFRERVATDDLPRFEAEFKDQLNKNAIQELAGFNNWLNRQAASIDERIARINEALGAVPYNPGRCIRLEREATTNQEVVQFRSDLRNLTNDSLAVDGDQYSEQRFLDVKRIIERFRGRDGHADSDKNWTRRVTDVRNWFVFSASERDVETDIEWEHYSDSDGKSGGQKEKLAYTILAASLAYQFGLEWGVQKSRDFRFAVIDEAFGRGSDVSTRYALDLFAKLGLQLLIVTPLQKVHVIEPYVKAIGFVDNPTGTFSRLQTMTIEEYRSRRDGQLR

SEQ ID NO: 33071 - protein, 398 aa, Gordonia alkanivorans CGMCC 6845
MSGRWTSPDDIVARVRRRWIDGTLLRAYASDGLFEPIEIPLRGPTPSQIAEDLGAAREWVFALDRGRCHDGHYTLCWQSIGGRQVGRNELPVRAVIDSFEQAWSLLGVASDVAQFDDVMRLSADTPAVSAWVLRHPLRAVELSSEFPRLIAAYEWLDAQRGSGRYLREITAPGVDTKFAERYRSVLASMLGVSSTAAGFLAGLGLRAKPEFVRFRPSSTLGLPELLTELSVRADELAQVALRPRRVLVVENEITYLSVDVPEDGMVLWGKGFEVDRIGRLPWLTDVPVLYWGDIDTHGFAILDRLRAWLPQTESILMDRDTLLAHRGRWVTEDRPATSALTRLTPAERALYTDLVEDSLGTRVRLEQERVAWEWVLARFSSTSLRCAESAGRASGRFR

SEQ ID NO: 33072 - protein, 489 aa, Xanthomonas hortorum pv. carotae str. M081
MKHQARIAGYRQLREQPVWKLLAADHAPELIGLLQTVLMDGERRLPSAVLHERLQRQLDVLRADELSRELPRTAQAYLAHWLAQGWLERRLPEGAAEEEYELSRAATQAIRFIVGLRESSSSATESRLSLVIQQLVQLAGQTEADPELRLAALREERARIDAEIERVASGRVAALDGKRALERARDLIHLSDELAEDFHRVRDDFEQLNRQFRERIIDDEGARGDVLEQLFNGVDVIADSEAGRTFEAFWSLLNDTQQSSQLDQALDALLARGFARKLDRRERAFLRGLTGTLLERGGEVHTVMQHFARSLRGFVQSRGYLEQRRLNQLLKQAQGEALQLRDSLHATAATGYTQALSAARLRSLSQWRLHDPRLTQVDGRVQAADAADISLDSVGDLVAQSEIDVRSLRRDLHELLGQRPRLTIGDALQQRPATQGLGSVIGYLSLGTRHGVVIDGQMETVQWEGGDGALRRARIPLVWFTREKRNELV

SEQ ID NO: 33073 - protein, 233 aa, Xanthomonas hortorum pv. carotae str. M081
MNWSEDTRLDADEDSGASADAGRIPLTETSLAQPRGELFLGDTGTLPFDARRALCQLLAGPSIDAQRHGALWPALLRNEAAIRQVLCELFLELVLDREGGVAFTRQADTAELESPTLLRSAPLTFIESVLLLFLRQQLAEADTRGERAVVDEAQLVEALSVYEKNVSTDRAGFARRVLTAIGKMRENQLLSRLRGSEERYEVSPVLKLLFSAEDVQALVVAYRGLREGDVALD

SEQ ID NO: 33074 - protein, 1353 aa, Xanthomonas hortorum pv. carotae str. M081
MNSQSNLSPAQPDASLFTDSLAEQRAQQFRMRRLQVHNWGTFNGLTEVPIAEKGFLFVGRSGSGKSTLLDAMSALLTPPSIVDFNAAAREAERSGRDRSLVSYVRGAWADQQDSASGEIATQYLRKGATWSALVLEYRNAHGETVSLIRLFWIAGSGNAAADVRRHYMVAPRSFNVASELDGFDLDLRKLKARLGEEVAHFDGFAGYAERFRHVLGIGNEMALRLLHKTQSAKNLGDLNVFLRGFMLDEPRTFEAADRLVEDFAELDGAHHAVVTARRQVETLSPAREHHAALMALRHSVGELRELQLGVDSYREQQRLALLETRLHELDSQDRGLAGEEGQRRESLDNHEQKLAGLEREQRAAGGEQIEELERERTRVERERDERLRRRVQIEQACRQLGTALAAGASGFAEQIAHAQTVLENGKHDASALDEAIAERMGARRDDERRFAEIRAELDALKRAPSSMPAPMQALRARLCEDTGIAEAALPFVGELVQVREDQAAWRGAIERVLSGFAQSLLVDERHYAQVSEWVNRTHIGTRLVYFRVRRNDALHARAPDARALPGKLQLREHAFTEWLRNELMRRFDYECVDNAAALRNADRAITREGQVKHPGDRYEKDDRHAVNDRKRWLLGHDNRDKLKVFEREAQTLAQRIAGCDADVAALRKQREQDQERQLAAHTLVERDWDEIDVGPKLQRLSDIDEQLQQLREGNSGLRALGQAIETARTLRDQAKRTYEEVRLERAQLARERVRLEQQHAACASRAGTAALTPTQLQGLRERLAALAPLSLDNLEAHFRVVERGLAEQLAESQGRDSRLSAQLLDCFRKYCQQWPEDSGDFTVSLASADDFLARLDRLESDGLPRHEHRFFDLLQTQSKNNLLALQRHTAEAHKGIKQRMDEVNASLEQVPFNRGTLLTIEVSDRRLSEVQEFQQQLRAVLSHQQTEDRALAEAQFSTLRELVARLGAQEPEARRWREQVLDVRLHVEFIGVELDAQTRAQVEIYRSGAGKSGGQRQKLATTCLAAALRYQLGGEDGELPRYCAVVLDEAFDKADNEFTALAMNIFENFGFQMVVATPLKSVMTLEPFIGGACFVEISGRHNSGVLLIEYDEQAQRLKLPERSRADEAGPAIAEQSASVTQREDAARSTRGETRMDSTGPVSGAEGAALQDVPAQDDLAAKASKRASKVTPALAPAVQAAPKTSKTAASSARAGSGKSASAKTAAGKAASAKTAPAKPASARRASPAAGTARKPATPTKPSKTQADTGKASRRTTASAKPTAKPTKATAVPKTPAAKSAVATRRGNTSLGGATKATKATAARSTARPAPAKATVAKERPASTRGSASKPRGKR

SEQ ID NO: 33075 - protein, 508 aa, Williamsia sp. D3
MARPTAAQLYAAYGDNADSDVTLRLLRSRNAVPYLAIMAARLADGQVDGDHLAAGIDRDLADLAVHWTERGWELPTADDLLDRWVRAGYLARTLHADSQRERYQLTRGATQAIAQVQAVRRNRTVATETVLELVMSRLSNIAVSINPDPGEHIRDIDQKIAELTRRREELAAGAIPAVDSRRVLDDIRMVTSLAERMPADIIGYGEKMRENSRALLTSGLDAEHGSHADVLNRMFDGHDALADSDEGKAFDTFYTLIADHRLRDDLESSIRQIAEGIPNLPHDILDTLTGFIDRMWDEVQSVDEVRGQVYRRINTFVKDGDFLHYRALRSQIADAQRAAAAAFVHAGPGKDLGIAVPMSAAVSNSVGALIFHDGIVDSPGAVADTVGEINIDPADLVGAESIDWHALTDAVNEAVADGPAEIDDVLALLPTARTGDVIGIWSLAQRHGAAEHGRDEVTVLAHTARGMREIRLPAVRFTHMLPDPITAQPHEVMHLLDEPAEPVRGATR

SEQ ID NO: 33076 - protein, 256 aa, Williamsia sp. D3
MSTPEDDVVVQEGDDLFVDSPEAITEPSVDLSHFAFDGSEPVGTISEARIDARFDGDTSALPAPVCYALQELVAAAHVSARSRNWKTIEVHEEIIRSRLSELNLQLEINREHKYAFTRQVSENDPRQRNILRAQTLTLAASVLALFLRQKYLTSADESVVTERGEIIDHMLTYKPVSDTDEAGFIKRIDAAINQLESRKIIRALPGTDRFVVHGVIASLLGPEQVAAYTEAYRRLAGEHTEEGTDLTELDDQERTS

SEQ ID NO: 33077 - protein, 1152 aa, Williamsia sp. D3
MTEILEVDAAGGSRPVDRDTPSPLAAPAGKRTLNIGQFRLTRLQLVNWGTFDGYKDYPIDERGVMLTGPSGSGKSSMMDGHSVVLLPTYDQVFNASADLSAKGAKKAARSMADYVRGAWAENDDRYNQSQVQYLRADGATWSAIAATYDNGAGSATTAVAIKWFPGSGTDGSSLRSWYQLHDGHFDLLGLNTWAQNGFDIRRYRSANPTVECFDVQSAYQEALRRRVGIGQSSAALSLMGKAKAMKNVGDLNLFIRTYMLDRPDTYAKAERLVENFTQLDEAYQAAARANAQEQVLRPIPAAWETYCSAEESTTRAGTLLGPPMRAFMREHRLTLLQQRLDQIDADRMRLDNEVANWENLADEREERHSSLRDQLTAEKGELTTLESELKSFEAQVTARNRAYERYATLVGGLGEQTPETQDEFAALRMRAPEIARAAREAADRLATTAHSFFAAETDARREFEAVVEELASLNTRRSLLPREVLAQRDGIAQATGVPYAELPFAAELIDVDPAAKDRWAGAAERVLRGLGMTMLVPARHRTTIGEFVNRTNIGGVLEYRVYQEDSAVAADPVRGSLAEKLIVDRKHPAGAWLATVVAHGAEHICVDLPSQLDEHTLAVTPQGLVKSGRDRFRKDDRRSVSDRTQWILGSNTDGKRTALEELKAELELRYQQARQAAQDKRDLLEQNRERAKNADALTGYASWAELNWWSSRRDADELNARIDRVRENRVDLAELEEQVEIARADWREAVARVGALGDQLGHIGSDWDRWFAEFEQVKNEGTKLDDSDREYLAEVLAETLADGGKTLTLDNYGEVRSDLRNSLEAVVGKANAERDGAENRIVRAAEAFLREWPEAASNLSATVEYASDLVSIHQSLVEHGLASTQQRFRQLITTDISHSVSNLYKEIGDTNKRITQGIAEVNIGLRRVDFNEGTYLQIAQLHNPTDESREFGKIVDAMIRDAPAAKSGDGAVLARQFYRIRGLVGRLTGTDAESRRWCDNVLDVRNSYTFYGKELSFDAAPDDPPVHTYRNTASNSGGEQEKLVAFCLAAALSFSLSHGEDHRPGFAPLMLDEAFSKSDETFSSQSLRAFEQFGFQLIIAAPIRMVGIVEPFIGQVILVDKQIGDTGARSDARAATFGELAKARASSGRRKS

SEQ ID NO: 33078 - protein, 513 aa, Xylella fastidiosa 32
MTEMDHATLTTLRERHPAWRLLTSPHAPLVASFLHRVFVAPNARMISETKITQALEDTLYALREHEGPEAYPKGALDYLNDWAAPDKGWLRKFYTPGTDEAQFDLTPATEKAILWLLSLTERSFVGTESRLLTLFALLEQMSTGTETDPIKRLDELRKKRNALDIEIAHVLEGHTPLLDDTAVKDRFQQFQQLARELLFDFRQVQDNFRQLDRKVREKIALWEGTKGALLDEIMGERDAISDSDQGRSFRAFWDFLLSSRRREELSERLDQVLALPAVAALHPEPRTRYVHYDWIDAGEQTQRTISQLSQQLRHFVESRAFLENRRILDLLHSIERNALGLRDITPSDTVMYLDAIGADIQLPLERPLFTPRAKPRLADLVLVAGTDDIDTTPLFNQIVMDKARLRLAIQRALRTQSQISLRTLLQTEPLQQGLAELVAYLELAHASNSSDPDGLRGIVDETVEEPIRWQANNTVGETVTREARLPRIIFARRALSDHQKSSQGDRDHEGHAV

SEQ ID NO: 33079 - protein, 234 aa, Xylella fastidiosa 32
MKDTLYENDVVETPRNALPTVPELSYLMVYLLKGVLYRNQEERLWSSLLRLQTQVREHTAVLWLDLVLDQAEGYAFLKSRPDPDAAEGSARPPRLIARHALPYPVSLMLALLRKRMAESDARGGDPRLVLTREEIAELMRVFLPDATNEARLIDQLNTTINKVVDLGFLRPLPSPSSSTPNHGNYEVSRILKAFVDAQWLAEFDARLEAYHAWLSSDQDEPDTRPEAERESGDA

SEQ ID NO: 33080 - protein, 405 aa, Xylella fastidiosa 32
MSWATPASLCAQVERLWKRGDLLRALVTDTHAMTWPHRLTLQTPRAADLSNRFQAVRDWVQTISDTPQIRIQWGEWNHRVQGTQRFPEAVYLDTLQDALAFIGKTHEAQQFEAVWQQTAATQPVLLAWLLRRPTQALEVAERWERLLAVVAWLQTHPRPGVYLRQVDAPKVDSKFIEVHKSVLTELLDLALPPESIETAASGVSQFTRRFGFLDKPVLIRFRLLDATQPSLPGCAGLPDITLDAAHFAALTLPITRVFITENEINFLTFPKVAGAIVIFGAGYGWEQLARAAWLHACQLHYWGDMDTHGFVILNRLRGYFGHVTSVLMDQDTLLAHRVHWDEESKPTRQALEHLTAEEAAVYDDLRYDRHQPRLRLEQERIGFRWVCDRLACLLSTAHVAPPQDA

SEQ ID NO: 33081 - protein, 463 aa, Clostridium pasteurianum NRRL B-598
MKEINIFEIVPENFFIPLSSQGKTLYIKIISLIYRLVQNGLSYGIDKEILVDEIEEYLGLINYDIENDEDEQLNNNREKANYLIRKLISYGWIYPEQTNNYKQIINFHDYTIVILEAFVKIVSKESLEYQGNIISIHSMLYSNEKAGVVIKQVFENTKGIISGLKNLNSNIKKYMDRLTKQKTPEEIMQEFFGNYTKEVIDKAYHRLKTSENVSKYRPKIIERLNESLKSSEFLNEAGEFYREDEELGSLDEGIEKVKDIIHNIINAFSELDDIMHDIDSKNAKYIRAAVTRAKFLLNNSKDMTGLVKGILEYISNEYKELELSLSADYLEEVTDLFTLYSYGYIDETSLYIANEGKKSFNPGKISTDNLSKEERQRKIDEFKKRQEKQYSPKKVNEIVDELLKEKKMILASDIEINGVDDFIKIIYIRLYGNHILAKYSINRKDGIVSSKGFTFKNFEIWRK

SEQ ID NO: 33082 - protein, 201 aa, Clostridium pasteurianum NRRL B-598
MIYDSLSIKDKEEFKRVCNKLLSYCLICKQKEDTKKDYYFVEGHKDAINEYFEPLGFELEINKSIKAAQLINKFGNNKISLKLIDSIALLILRILYQEKMQELSLSQVVIVDIEEIQSRFMALGFKDRLMDKTLLRQALRTLKKFNIIETLDRDITLSDSRIIVYPTIQMIVRSENITSIYEKLETYKRKGVKDDEEVNGD

SEQ ID NO: 33083 - protein, 1084 aa, Clostridium pasteurianum NRRL B-598
MMKRLTGIRLINWHAFKDETIEIKNSTLLSGENGAGKSTILDAIQFVLTCSKNNFNKAANENSKRSLSGYVRFKTGREDNEFERSGDISAHVALEFYEESKKNHFIIGAVIDSASETSEKVLWYRLEKCRFEDVTFIVNNEPTDISNFRTYGKEVNMPFSSTRIVDAKKDFSHRLGRLNEKFFELLPKALAFKPISNVKEFVYTYILEEKSVNIDELRENIRTFKEFEDILNEVKVKIKKLQEIKVKYSSYESIRRTISIHEFMVLKAEEELLKEEIEQKIKEITAFNVNIDTLINKNNVIYDEITDKTKIANNIQADLYSNSEYNALKAMKNSLEQAEKDYRHEKENKNGFLKQFSEQKSYIKELSRLLLDADTISDFYNKMISLDENSIEEYKTTSINTENVIDKTKQDKEKYRAGNEYELKQKEDNRKDIEKQISELEKRNLQYPKEVILLKEEIIKETRKLGREIVPKILCELLEVTNPVWKNAVEGYLNTQRFYLIVDEEDFDSVLKIYERLSKAQGLHSVGVINTRGLEKYDNPLENSLAEVVVSKSIDAKRYINMILGNVIRCTHVSELKEHKTSITPTCMMYKNNVARAINPRIYKTPYIGEDAYKYQLEQAKDNLNILLSEINILKKDINIVTNIIKTINKLRLENLREKCDVLKRIVDISNKVSTLKDEILELEKNNSYMALQIKLNEVQEEIESLNLSKKNIEYELINKKGNLSSINNSVDEKRRVLSIKKGHVEETINKIGFLAKEAEERFIKETESKSFEVIKNNFNVSKEGNKTKLSKTEEDLKNLQGSYNITYDFGAEVGINGINTFLDELDNLVKSKVIEYEEQVKASRKNAEEEFKEHFLSKIQENINTAKSEFKGLNKGLKDVKFGNEEYEFKIGKSKENKEYYDMIMDNENIGEGFTLFSTSYENKHKELLNELFDKLTLDNESNEAELIKLTDYRNYMSYDIEIKYNDNTTSLFSKVCREKSGGETQTPFYVAMAASFLQLYKGVSSSSESIGIILFDEAFDKMDDARIMSMMEFYDKFNSQLQLLIGAPPQKIEPITPYVNTVLLAIKADKFSIIEDMINEKL

SEQ ID NO: 33084 - protein, 393 aa, Clostridium pasteurianum NRRL B-598
MKNYKKILLNKLIDSYESSVIYKGDALRDTQIYLKFNLKSIKEYFDELNYKYKEEIDVACNQLEIEKFIKVYKGKGYKSHIIEKIQLNLENIEAAYLYLNRKEKKQKEDEVSLLLESYKEREDVLGNFAKYITYRLKSNGSVKKYLDIENSLECKDILKGIDEVLKQDDEIFRRNFSVKVYGDSKRYEAIESKVIKIIKDFSSDEVLNDYNILKNYTYVYFKGDISLRLKESKINANDFLGGIAVSSKDIENIKEIKVSGSKLVTIENLTSFNNYTGDGGVIYLGGYHNSVRQNLLIKIYSENPNTNYYHSGDIDAGGFKILVHLIKKTKIPFKTLNMDSETLRENINYAKELTANDVNEINRLLESEEYKDYTDVLSTIIKLNKKLEQEIIF

SEQ ID NO: 33085 - protein, 510 aa, Xylella fastidiosa 6c
MDHATLTTLRERHPAWRLLTSPHAPLVASFLHRVFVAPNARMISETKITQALEDTLYALREHEGPEAYPKGALDYLNDWAAPDKGWLRKFYTPGTDEAQFDLTPATEKAILWLLSLTERSFVGTESRLLTLFALLEQMSTGTETDPIKRLDELRKKRNALDIEIAHVLAGDAPLLDDTAVKDRFQQFQQLARELLFDFRQVQDNFRQLDRKVREKIALWEGTKGALLDEIMGERDAISDSDQGRSFRAFWDFLLSSRRREELSERLDQVLALPAVAALHPEPRTRYVHYDWIDAGAQTQRTISQLSQQLRHFVESRAFLENRRILDLLHSIERNALGLRDITPSDTVMYLDAIGADIQLPLERPLFTPRAKPRLADLVLVAGTDDIDTTPLFNQIVMDKARLRLAIQRALHTQSQISLRTLLQTEPLQQGLAELVAYLELAHTSNSSDPDGLRGIVDETVEEPIRWQANNTVGETVTRQARLPRIIFARRALSDHQKSSQGDRDHEGHAV

SEQ ID NO: 33086 - protein, 240 aa, Xylella fastidiosa 6c
MKDTLYENDVVETPRNALPTVPELSYLMVYLLKGVLYRNQEERLWSSLLRLQTQVREHTAVLWLDLVLDQAEGYAFLKSRPDPDAAEGSARPPRLIARHALPYPVSLMLALLRKRMAESDARGGDPRLVLTREEIAELMRVFLPDATNEARLIDQLNTTINKVVDLGFLRPLPSPSSSTPNHDNYEVGRILKAFVDAQWLAEFDARLETYRPVLSGDQDDQDDQDEPDTRPKTERESGDA

SEQ ID NO: 33087 - protein, 1144 aa, Xylella fastidiosa 6c
MRETSTLGLNFVADDKRVGFRLQHLEVVNWGTFNTRVWCYTLGGRSGLLTGDIGSGKSTLIDAITTLLVPAQRVAYNKAAGADARERSLRSYVLGYYKSERNDATGTAKPVALRGTSNYSVILGVFHNVGYDKVITLAQVFWLKDSQSQPARLFVVAERALGIAADFNNLGGDIKTLRKKLRDAGCALFDSFPPYGAWFRRRFGIQHEQALELFHQTVSMKSVGNLTDFVCSHMLEPCDMGSRIEDLICHFDDLDRAHHAVLTAKQQVKLLVPLVDDGQKHQTQLGNIQTLEAGRDTLRPYFAQLKGELLKHRLDALAAEAAQLTVKIQHLEEQRKTADSKVTQLQQDLRDNGGDRLEKLAAEIEQLEQTKAQRHKKSDRYQTLLTKIDETAPADAIGFFTQQQRFAQHTEELNAAIATLHNDKSEKDRALYDAREKHTTLLAEINSLQQRQSNISAAQIRIRHALCVALSIDAEALPFAGELIQMREDARDWEGAAERLLHGFGLTLLVPDAYYKAVATWVNHKQLDGRLVYFHMRPRNTTQEAALHAQALVHKLIIKPESPHYPWLQQELQRRCNVVCCDTIEQFHREVRAITQAGQIKDPSGRHEKDDRHRIDDRSRYVLGWSNADKLHTLNAQRQHLEDSMGMLGQDIGTIQRECQKQQERLDALNKLGEYTDFVDIDWMSLVRQIAGRKEEQEQLQATSNILQILQQQLTAAQTQVSVLERKCKNAWHEQGEVKSQQKTAQQMWNQAVSAWDDAPLSQAQIALLAGWRQQALGEHVLSVESCDNHEQQVRQWLQKRIDAENAHLRQLNDRITGAMHRFKDQFKAETVEMDADLAALPEYARMLNDLQKDDLPRFEARFKALLNVNTINEIASFNAQLNRERETITERIKDINQSLHGIDYNQDRYINQLLHGIDSQKGRYITLLAQPSPDAEIRDFQQDLRACTEGTLTGSDDEQYSDAKFLQVKRIIDRFRGREGLSDADRRWTAKVTDVRHWFVFSASERWRADESEYEHYADSGGKSGGQKEKLAYTVLAASLAYQFGLKWDEVRSESFRFVIIDEAFGRGSDESAEYGLRLFEKLNLQLLIVTPLQKIHIIEPFVSSVGFVHNKGGCDSQLRCLSIEEYQAEKANGSATGGAAAP

SEQ ID NO: 33088 - protein, 401 aa, Xylella fastidiosa 6c
MSWATPASLCAQVERLWKRGDLLRALVTDTHAMTWPHRLTLQTPRAADLSNRFQAVRDWVQTIADTPQIRIQWREWNHRVQGTQRFPEAVYLDTLQAALAFIGKTHQAQQFEALWQQTAAAQPMLLAWLLRRPTQALEVADRWERLLAVVAWLQAHPRPGVYLRQVDVPGVDSKFIEAHKSVLTALLDLALPPESIDTAASGVRQFTRRFGFLDKPVPIRFRLLDAALPGLPGWAGLPDISLDAAHFAALTLPITRVFITENEISFLTFPKVAGAIVIFGAGYGWEPLARAAWLHACQLHYWGDMDTHGFTILNRLRGYFGHVTSVLMDQDTLLAHRVHWDEESKPTRQALEHLTTEEAAVYDDLRYDRHQPRLRLEQERIGFHWVCDRLACLLSAPPQDA

SEQ ID NO: 33089 - protein, 483 aa, Salinispira pacifica
MTYDDLRYYHKNNAAWKLLAATTAPLILGFFQRIIDKYSRNPVSRTDYLYELESYLGLLERDYPEESFQTPEKYLTQWSSGDRGWLDSFYPRGKDEPHYRMTAGIDSALQFLQAQLNPSYTATDTKLATLLRELENLVTQSEEDPTLRRKALRTQIKALQNQMNDIGENRMKMMDDRTVQDTYRHISSIANSLVTDIRSVTREFEELNKSIREQVAQAGENRAEIIRDILQFRGSIDNSPQGQSFHAFGRLLMNANQNASLQEHIGKIHSLAAVQKLDTSILDNFYFELLEANETAQKTLSYVAQSLRRFLEEQSTRESRRMHQLLNDIERLAITLAKHPPREFVLELEHRKLDISVPFDRPLFSPAAELKVEGVTDTAVDLPDLVDIIPETQMNLELLTRHIAIQLSKESQTSLQRLVEAYPVAGLEEIVGYFALVDSQFQGIILTEDGVDISWYDQAGNRRVARSVPNIIFYKPEDEETAP

SEQ ID NO: 33090 - protein, 208 aa, Salinispira pacifica
MSIMDETNSELSDVLITLLKGTWILRHGDQKQQRLWAILKKRLKAVSNHLELLRLKLIVDEVEGFAHLRGMDIEEGGEGPRLTMRTQLPYRVSYLLVMLRKMLDEYDASDGSHRCVVSTEVIFDRIRLANKDGTNKARMKDEFSADLKKVKDMGFISPIPGDKERVEISRVIKAYVDAALVSSMAEQLEIYAEYANKRYGDSEGAPSE

SEQ ID NO: 33091 - protein, 393 aa, Salinispira pacifica
MNQELFRAIARSYESGSAFQDMYSDSVYPLQIVLKRPFPLSQIARRMDEFLRWKHEIEEDCGRFSLSLNYREEGSRAYGRQRIPESVLISDAGTHADILGRSTEYSRVRSILEQIDREAPELLRWDGENYPVLLEIAPDLDALLCVYRWRVNHPDQTPFLRELHLHGVHTKLIEKHKRVLAAWFRIGMDPEWLEQRKHFKDFPRRYGFARERRRFRFRFLHPDDSPLQGILDFEIFLHEMKDNLLKHIQNIIIIENHLSFLCLEPRNGVLAIDGMGYAAVDLVKQDWISSKTILYFGDCDAHGLDILSRLRAVRPDIISVCMSVSTFQDFFSFATIDSTPAIPLPEHLNSDEVRLFTNLHENSLKGNPNRLEQERISIQYVMSEMDLKLADPS

SEQ ID NO: 33092 - protein, 456 aa, Ruminococcus lactaris CC59_002D
MQSHYEIPDTFWSLFRSVNREIYIESLLCINQEYEYSNYFLTREVCLQILSDRNTQKRIRLEREESETELDLLETTSSRILNWLVKTGWLKKIEDYTSLTTNIVIPDYAAIFIEAFEKLSSQELEETDIYIQNVYATLYSFQNNPKVNLNMLRTALVNTKKLNKALQDMLHNMDKFFERLLDKKTYGELLREHLDGYVEEVVRKKYHILKTSDNFYIYKMDIKKCLREMRENDEWIESVRARAKAAGDEKEDVLEILDQIERGFDDIEHRIANMDKEHTKYVRATVTRLNYLLSGETDTKGLVVQLLNRISAEENGVKKEEKLRKTAERMNLSYLEILSEKSLYKRRKNRTDFISKMETEEETEDLNREEVLKMNRIQMRYSRAEIEEFIQAHMTGDIMDAGAMKDMTDEDFEKLILAYDYSTRRNSKYAALNEEDRMVENGRYRYPDLKFIQRRP

SEQ ID NO: 33093 - protein, 214 aa, Ruminococcus lactaris CC59_002D; identical to SEQ ID NO: 30914

SEQ ID NO: 33094 - protein, 1116 aa, Ruminococcus lactaris CC59_002D
METRQQFKALSKICLNNWHYIDRKILSFHEGINFFTGHSGSGKSTVIDAMQLVLYANTDGRGFFNKAAADDSDRSLIEYLRGMVNIGENNESQYLRNKNFSSTIVLEFTETESRQSQCVGVVFDVETATNEISRLFFWHKGGLLENDYRADKRCLTTGEIREYLQRNFSTTDFYCGPSNERFRKQLYDIYLGGLDMEKFPRLFKRAIPFKMNIKLEDFVKEYICMEQDIHIEDLQESVMQYGRMRSKIEETLKEIRHLEEIRDRYAVYQTQVKEVENDQYQIDRLEILRLEAKLQELLDKIKESQEDIGRQEQAKAELETKQQTVQGQYEEVLLRIANSGYSALEQKLGNVNEMLEHLQLSRAKWQRTAAGLAAWKSKDVTPNQTLWDIEKFETVALDEETLKRLQTSLVQIREELGEDLKDAEAKLRVIKKEEKDAREELKELKQGRKAYPKEVEEAKYELRTRLQERCGRLVPVQILADLLDVRDEKWHNAIEGYMGNNKLLLVVEPNYVKDAMEIYQGMDKKRFSRAAVLDTEKVLSSDKKAKAGSLAEEVLAKEEYVRAYIDFFLGNVIKCDGIDELREQTIGITADCMLYQGYRLQHINPESYTRRAYIGETSMRQRIRRLEERCDALQQERLPLQEMKEEIQRVLTLEALSQPAEEYMSWKKEIDEIQKKEREKRQIQEEMKKLQDGEVSALKAQKEDLLRQQAQLKQELEELIGKISESRGNAQRNQNFYQTVETELQDRQKEFHEDPQKEEGFRAYLDTKRSVNYEYLRQQRSKELDAVEVEKDKAYSQLVDRRTIYLKLYPNRTFSPTIEENTPYEKLLSELQCDELEDFRLAAKEQAKSAVEHFKEDFIYKIRSAIKEAYQRRDELNRIISRLDFGKDKYQFVITKNKGPDGRYYKMFMDDSLSINPSQLSDSMENQMNLFTMEHDEEYGDMMNELINIFIPPEDATREELDTAKKNMEKYADYRTYLSFDMQQIIHGEKDMKIGLSKMIKKNSGGEGQNPLYIALLASFAQVYRINLSPKIRRPSTIRLVVLDEAFSKMDAEKVASCISLIRGLGFQAIISATNDKIQNYLENVDKTFVYANPNKKHISIQEFEKVEYDQLKVEE

SEQ ID NO: 33095 - protein, 407 aa, Ruminococcus lactaris CC59_002D; identical to SEQ ID NO: 30916

SEQ ID NO: 33096 - protein, 454 aa, Ruminococcus gnavus CC55_001C
MQLRYEIPDTFWSLFRSVNREIYMESLLVINEEYQYSNYFLTKEICVQVLSDMNAQKQVLLQREENETDFDMLETTASRILRWLLKTGWLKKIEDYSTMTTNIVIPDYAAVFIEAFERLTSEELEETELYIQNVYATLFSFQNNSRVNLNMLRTALINTRKLNKALQDMLHNMDKFFERLLDQESYGELLREHLDGYVEEIVKKKYHILKTSDNFYIYKMDIKKCLRDMRENEEWIESIRQKAKAAGDTKEDVLDLLDLIERGFDDIEHRISNMDREHSKYVRATVSRMNYLLSGETDTKGLVVQLLNKISAQEEPEKLLTEAGKRMNLSLFEMISEKSLYKRRKQRTDFISQMGQDEEYEDLNREDVLKLNRIQMRYSRQEIEDFIEEHMENEVMDAGTLHITEETAFEKLILAYDYSTRKNSKYRVLNEEETVIQSGQYQYPALKFVRRRPQ

SEQ ID NO: 33097 - protein, 214 aa, Ruminococcus gnavus CC55_001C; identical to SEQ ID NO: 31058

SEQ ID NO: 33098 - protein, 1118 aa, Ruminococcus gnavus CC55_001C; identical to SEQ ID NO: 31381

SEQ ID NO: 33099 - protein, 296 aa, Ruminococcus gnavus CC55_001C; identical to SEQ ID NO: 31382

SEQ ID NO: 33100 - protein, 463 aa, Marinomonas profundimaris
MLFKHLPDEIFQALSGSNRALIEAVLHDLADVFYDHAEDPIKDKSTIIESIEDTLHKLDTLAWHDDQKESFDSPKTIHDYALRIYHRLVNTGWLVEEQELYRVSVLMTPQISMLLRSLVEIGRHGKRNYGATVLSILSNLEAVAKQPKERGVTLRQSAEASREFSAHLNQILLGIRSLQRELFASRDPKAIVAGFFDLFVEGILIADYKTIKTSNNPFRFRRQILELTQDFLANPDTMGLVAQCYVDQQLITMAEAQAMVEKDCRDIIQTFSNIEQRLERIDEYRYRLEKRAADTARYMDSSRPGMANKVAGIITDVAKYNHLPILKEVVGARFVGMASAAQPTKRREPPPPRVMTPAEVSADAIKVRDQQRRFHEARQVTIPKMQSYLEKQMSSGNNKHILDFTIESVEDFVCFDHLRYIGSLGVSAKKLEDAFEIHFTNQYLDVHEFVECREFNVIRRSKA

SEQ ID NO: 33101 - protein, 215 aa, Marinomonas profundimaris
MLRELKKVVEESGKDAQEFQQTANFVIANQFASAYKHGQRKHYLLLESYQEYFDRLFDALGMKLYINENERLAGVLPIQKEAFVRLKTDETLFLLVLRQIYEEKIENFEVDNGFVATNTHTILDRFVQLVKREIPNETRFKDILALFSRHGIVIRGKSYEEDSKNQMINITPVVRLIVTEAYLRQLESFNGTDPEEDDVSDSDIETEATPETTQD

SEQ ID NO: 33102 - protein, 1138 aa, Marinomonas profundimaris
MKKLNRIVLVNWYLLGAEEINIRGNTAIVGPTGSGKSSLLDAIQTVLTGASKRHLNYNASANDGKASGRSIRSYILGMIDSGQANVKSLGTQPRQDATSYLALVFEDSVTGKESTVGLTLSASLASPEEDVLGRFVLPNFGARKLDFIDAMEGKSYKAKPWIEVRESMKKVCLDPYIKSGSASATQYINRYLEELSPSADQLITLDSFLKNFKNALKFVPIASPTRFVQDFVLAEAPLQVGAYQKSLNEYRHLEAKTLEVSKRIDDLKLIQLDCEKKHQQEQSAINYQWIATEARFDELGSKQDDIQDQYELQKEREEEIEEELATQGSLLKQLQGQLLRFEQQYEHSDVGLKLQQLEQNKKLLVLQGQQDQKAILQVRQLTLLLSALNSFEDLLSKETTTLVKEFSEFNGLITEDGRIEGNLKPLTQKLVALNDLLDKEKSQVFAQRSELNRNILNLKDECKQLESDVSSLKGGVSPLSQNTKRLIALLKDANITATPLSHLAEVTDRKWQDAIEGYLGAQREALIVEPEDAEEAIRIFRAHRRQLMGCRVIDTTQTRLWLNRGDNNSALRFIRCNNDHAQAYINRRLGGIKPVETERELLREDSAMTADGMLKLAGTISTIRFVPHMMVGINTEGMRDSREKQLASLSGELMNFLKADQRLEQADSLLGRVIANNQFDVESLGNASHTVTRLTQELEAVEVEISQLQKHDDTELQERIEELKSRITNVELEQKKLDRERQQIAEQFGSLNTQKSQLSSALSALDEERNRLTSNPRYDAEFASERYSLLESSMVNGAAIYKEAISRADKASEKARSFDQKVRKEVADHYGKFHQANLDNDVQLDYLESKFEEFEHYVSYQIDILSETELAKYAKRAELARKEAEETFRSDYVSKLKDSLDQVAHIIRELNHSLKRRPFNQEIYQFRYYPNGDMKDILDLVERFSAQDQANVGGLFDPHLSDDPEHARAIASIQELISDEEKQQDLADYRKFYNFEVDILDSEGNKKTTLSQRIQTGSGGEHQIPFYLAIAAALSTTYRLHETMEGDIVGGFSLAMFDEAFNKIDMVKTSTCMGFMKDIGLQVIAAAPDDKRAVMAANMDTIISVWREGGAVSIDVAYPKEKGQVLLNGQSDTMLTSA

SEQ ID NO: 33103 - protein, 518 aa, Sphingobium sp. C100
MAGSATTSIPDAQRPQLFAQLPPDIFAVFSGGNRALYELAILAVYDGLYRSELLYPTEAEVVGVIYDCIAREPGVWTEDEAPVDLDRLVTRSGRRVRRRRGVGVDDQATGSVISRSRHIYNRMLQTGWLDLTSYGLKVTVEMTAGPMRLAEFLCTLKEGGAEQLGGLVVEVRNAIRAVREKPAENALGLNKAAQDAARFGRYLRSVLSALREVDRQVLSSETLADRLRHYFEDFVEKVLLRDYTSIATTAHPYRHRRAIVASLDELEDSEIDLAAVADAYLDARLVQDRKAARDLVHEDLFRIRRVFERIEESFEAIQQHRSRLETRLRNVVRYAGRRTSFLQRSEQVIHALDEALSAGTALAIEGMIEAKVSVLAPDLMAKPRGARPAIADADLDLPADDPISEFRRQLERDYLDRLTISPAKVSRFLERKVPPFGETSAAYISIETIDDFLAFEAVRVLLAGGLGTDGASRLSKALEGRFVLEVSEEPVSNDWLDCTGFRVKRLDDIITLEDGYAR

SEQ ID NO: 33104 - protein, 216 aa, Sphingobium sp. C100
MLVEFGNLEANNPRGFQRVTQLIAQLMRHQFVHAEDRGAAVLLETLNRPELARLVEGYFDVAGYRLVHRESEGWAGILPDPERTSLPRMRIDETIALLVMRRLWEEALQLGEIYANGTVRTTLNEAYAAYQGTVAGSRRAALSPNDFRDVLRQIERRSVVRLGDLDPDAQDMDLDIRALVTSVAGDDFVASLEQILTRPVASATETEDAPEVERDV

SEQ ID NO: 33105 - protein, 1143 aa, Sphingobium sp. C100
MELRRIALVNWHMMPRADLELAGDAAILGQNRSGKSTIIDLIQAVMAGGSSRLYRFNRSAGEGGGRSDRTLGGYCLGQLNEDTFLRNQARTHVALVFEDADGGRKPVSVGLSIEAARGQQTEVVGHFVAEGVAVDTSMMLDAGEGTLRPTAWPAVRRRLEQACTGAGGQLLTPDDARTFIREYMRALFTGRRASDPDRFVRTFVAALSFTDIPSVEQFVHRYLLEPKPIDIAELRDSIGRYREIQKTISDLNRRLEALRAIQVQIEEFDRLLAEELACRAIERTALLVEGVGGLLANLTEQRTKVRELEEAQDELKRVEDEIEREKETLASVQRQLAATGAQGQRTMVEQEIKGWERDHASVMGRLQVRHLGAARAMQLLELRDRLGVINPGELFRALERIEEASRGLAPPNWPRDPAAMDALLETVAGAAADRVPKATERRDDAIVWTSRLEAEQAADREQLANARKGQITLNSATTKLMDALRREGMAPRTLCEVADVVDERWRNALESLLIRDREAIIVEPEHASRATEILRYGRDAYPGCRVVNTRKLQSRSAVPQAGTLASMIRSEDQLATAFVVFRIGNVSLAEDQEELLSGGRAVMADGAYYDGLITEMRRPDGLKIGRAAAPLMEATLGERIASRAENLNAHAERKRFFEDVIRRLEDCSRPVGDADRLDALALALGDLADKRADAHRRLDRISAQVDPELLDSERRSQTLLASLTIDRDELIDARGSLRTKVAEIRGRLEAGEQSVGSYLCLAVRRRQFRGSVTSAAHLRSLRERYAKHPARTPARIAADMAKVAIDALQGHRALDHDIRAALGRYAIDFPDPLEGYAEVPIIGTAKPWVVEGIATLEGNELIRYREHADEAANRVSRLFKTTFIHELNSRFGQLHSDMEKLSSALRTRPLHGETYRLIELVKPEFDDLYHLAKASETDESVLDALFGRAEPRDERHGRALRQIEQLLSDDSFDFTVFQDYRSYFSYDLRMRDEKAGRTYSFDKRRGVASGAERQVPFYVVIGAALASAYHGTRQATTPGATGMGLAVFDEAFSKMDGPNQRTLLDFYRAIGLQVVIAAPTEKRAVVYENLDCIIDVFRSGDLSLAESIRIKGHAREEMRAANPQHATDEELAKRLGLEAKAAE

SEQ ID NO: 33106 - protein, 401 aa, Sphingobium sp. C100
MSRRGFSSIATLVEDLLARHERSPEARGLIAAIDDDGFANMDLRDAFDEALSDLERDGGVELIRKGPKTDRRVTGARLKSSEVLYGFVGRRPAVHVALQSVASLRSRPDLPHGAVDLIDAVAAAWGRGVSHIGVRPGEVSTLSDVIGLAIAVQSRLSGEFQADQDFRTFSRLSVADSKALERNLRSVAAALQRIYGADDRLIGMEPDEILATAGITRLPQPILVHGDVDLHGAPFPSMPYVGIPADIVGGLRLRSGPDYVLTIENFTSFVRYAREIARLDNALIIYAGGFPSRPALATIRRLAEQALAPTYHWGDMDSGGVRIFRHIERELAKGGVRLQPHMMDAQLLAAVGRPSDGATSAPGDVTGSAIAALAEALRTTGFVHEQEELDPRRPVVGGAAE

SEQ ID NO: 33107 - protein, 450 aa, Pseudomonas sp. FH1
MEDALQALSEMLAAYASQELYEIDPDATHLQAGRELREWIKRRLVVEREGRIYATDALESAIQFVDSLDSRIMTSTASRLSVVQREIENLETGLNPSPTGRIASLRRRIQDLEHELAQVEAGNVIVLDEAQAIEGIREVYNLATSLRADFRRVEDSWREADRALRHSIISEQSHRGEIVDRLLDGQDALLNTPEGRVFESFQQQLRQSAELETMRERLRTILRHPAVPKALNRPQQRELRWLALRLVRESQAVLQARARSERDVRGFMKTGLAAEHHRVGQLLNDFFNLALSVDWQRQSERRKPACLPPVGVAITGIPAIERLRFKTLDDDDTGELDLSLKPAGLEQIDDDFWDAFDGLDRESLIQDTLAVLAEQGRPVSLGELASLLPPAHDLETFALWLAMAREAGIEVLKEERQLVELVDEDEQRWRFNLPYVGLDHEALKDIDWEL

SEQ ID NO: 33108 - protein, 249 aa, Pseudomonas sp. FH1; identical to SEQ ID NO: 32944

SEQ ID NO: 33109 - protein, 1101 aa, Pseudomonas sp. FH1
MKQALLWRDSETLILSSIELYNWGGFQGYHRAEIDPSGTAVIGPTGSGKTTLVDALMTLLCANPRYNLASTGGHESDRDLVSYVRGVTGPGDGGVEQSHIARQGKTVTAIAATLERDGAQVRLGAVLWFEGTSSSASDLKKLWLLSESPEQTLEHWLSQHHAGGMRALRQMEKDGTGIWPYPSKKAFLARLRDYFEVGENAFTLLNRAAGLKQLNSIDEIFRELVLDDRSAFGRAAEVATSFDDLTDIHRELETARKQQRSLQPVADGWERYKALQEQLQDKQVLEGILPVWFAEQGYRLWLAETNRLEKEHKQAELDREHCERRLDAQKGVVDQHRQRYLRVGGAGLDQLRGRIADWLRECDKRRLKAEQYQRLAKGLGLAEALSAAALEENQQQIAARLEILTQQITDARQTAFDAGLVQQELNGRLQALQQERAEVERRPGSNLPGHFHAFRGDLAQALGVDESALPFVAELVQVKPEELAWRGAIERAIGSHRLRILVPHGASEAALRWVNQRHNRLHVRLLEVKEPSSRPVFFDDGFTRKLTFKEHPYREAVKALLADNDRHCVESPEQLRHTPHAMTAQGLMSGKERFFDKQDQKRLDEGWLTGFDNRDRLAFLTEQIREVNEQLAPAKLALDAAQGDVRKLEDQASLLQRVEELQFEEIDLPGAERQLESLRAQLDTLTRPDSDLALIKAELDEAEALLDSLDRQRQQLIEQCGQLKIQFEQAASATRKAYRGAEKGLSDTQRELALAHFPTLSAADLGDIVELERKHTHELQGQLKALGEKLGDQKSELAKRMSDALKVDTGALSEVGRELVDVPKYLERLRVLTEEALPEKLKRFLEYLNRSSDDGVTQLLSYIDHEVSVIEERLDDLNSTMQRVDFQPGRYLRLVATKVIHASLRTLQQAQRQLNSARFIDDEGESHYKALQALVGLLKDACEHSRNQGAKALLDPRFRLEFAVSVVDRESRNVIETRTGSQGGSGGEKEIIASYVLTASLSYALCPDGSSRPLFGTIVLDEAFSRSSHAVAGRIIAALREFGLHAVFITPNKEMRLLRHHTRSAVVVHRRGVESSLVSLSWEALDEHHQQRIKAMHEVAH

SEQ ID NO: 33110 - protein, 385 aa, Pseudomonas sp. FH1
MKSPTDISRSLAKQWQRSSVRLERLLNPGSWPQCFNIGKPSARVFAENIHAVLQHVENWRSVKVGKVDWESVSYRAGLAPISLPMRWHLRSPSEWIAAANDPTVSREYAQLEYLVEQVDSAFHALLVAQRGLWLTKPPEEVVATAQLATRLSLGCARGRPLRLLAEHGVDTKFFERNASLLTRLLDERFEGAASEQGLTTFLDAFEESSHWVLVVPLQPELLPFKRLRLTTAELAETPLPGSRLLVVENEQCVHLLPETLPDTLAVLGAGLDLQWLASAHLAGKQIAYWGDMDTWGLLMLARARLHQPAVEALLMEQELFEQHSPGNAVVEPAKARESAPPGLLADEADFYRYLLVQERGRLEQEYLPKVQVERAIEQWARAVPV

SEQ ID NO: 33111 - protein, 335 aa, Burkholderia pseudomallei NCTC 13178; identical to SEQ ID NO: 33027

SEQ ID NO: 33112 - protein, 223 aa, Burkholderia pseudomallei NCTC 13178; identical to SEQ ID NO: 30855

SEQ ID NO: 33113 - protein, 1210 aa, Burkholderia pseudomallei NCTC 13178; identical to SEQ ID NO: 33056

SEQ ID NO: 33114 - protein, 377 aa, Burkholderia pseudomallei NCTC 13178
MSGASLWLKSMPVQELLNMLVDRLDAAEQRGSTKAKSVQLDERTWPALYMSPVESQKEHLWEHVVAMVRCGWLAVKPETALKSRSGYASSPRVSVVDQRELRAAVGRQERVKSSAERWRDAVSSGLLASDTVKRLVSEYCIDIPGRTMTEVVEQLNRLPALAEKSMLLREVSSQLFWGMSKVLDKRQGLVAAILGMDDCPFPESPIQLHVFLPAGGHRGVLFIENSVSFECAMREPRGVFGELALVYASGFKGSAQRLRTTEGCSLFYAAGGGLERDLRATFEGWLFGRQEIPSYFWGDLDFAGMRILAAMRATFSGLTAWVPGYAPMLTVLKGGGGHPPEAADKQGQKPIASTGCEYADEQLVPALQTFRRFVDQE

SEQ ID NO: 33115 - protein, 468 aa, Lachnoanaerobaculum sp. MSX33
MNIFDEVDENLFRPLTGTNKRKYVDILALIWEKCKRMPMYAIEKSTIFDMAEEYLLGLDEKVEPDMEEQEYASGNIADMRTISGSFIRRLRDTGWLLEKPGEYEDEDNLAIHYKVVPILKSFQEIISPTIITYKGKLFKIYSMFEHISEQGSPYEGVLKEASEDFDNLNQALRTLAASIEDHINDLTLGKSPEEILDFFEKYEEKIVVGSYHRFKTNDNLFYYRSSLYESLDRCEDNLFDALVLDYMDTERVERDEAGVKIKELIQKLRMDIEEMEAIMRTIDDRHILYRTRAVQRAQFLLLSDGSSKSKINNILKFYASQINTKEDVYEEDDSIASDIFQIFVQNFFDCNSLSTPVKKRKPTAIEFMDIIEELDQELIDEKNRKMMEYIKNALTSENVNRFARDILNGNHAVQISSIFENNPDTLIKIIGLYTYSKTSEREYDIRLRDNVVESNGVRFKDFIVEERR

SEQ ID NO: 33116 - protein, 191 aa, Lachnoanaerobaculum sp. MSX33
MATDIKEEIANYLLNNCFLMGTVDTTREKYYYVINHEESFRQIFLPIGYTLVIHRNLRVVQLINNHGSGRIALRKYESIILLIFRLLYVEKRESLSTNEDRIYATVEEIKNEYEKLNLPRKFDRAFLEDSIRNIKRYNLVQVADKLVDMDAKIQIYPSVMLAMPDTDISKAYDETVKLLSQYENSEEEDEE

SEQ ID NO: 33117 - protein, 1109 aa, Lachnoanaerobaculum sp. MSX33
MIRMTRLHLINWHNFQDDIIDFKNITYLLGVNAVGKTTIMDAVRYCLTTNKDFNTAGNKKSGRTLLGSVHQKQRAEDSYLRPGHTVSYIGIEFLDEAIKKTFVIIARVESETPKQDLRGVYQDWYITKPGYSLLDIPFFAKSKEGKSPASREAFKLDNKGMDRASNQADARRRICRMLGIGEADSPIGKKFNEVFHMGTSLEDIKDIREFIYTYILPEPEVNIDFLQKDMIELERLQEILQEASDREALLKEINEKIKSARELLVKVKINEILVAYANLQGNIEETNERKYLIEEWEVSVSLMEEKLTDLSGRESKASEFLYEAQRAAENNAENKEMLSLESENKNNKVEEKRLTEEAAKFDNVAKDLFELKDKLNKLGFIFDIDSCIRDENCFEETKIAEIKRIAKIFADMEEQIKNYDAKIRTDIAKLNEEGNGLSSKIKSLESGVMCYPKEAIFVRNKINEALSEQSKKADARLLCELLYMTDRSWQDAVESYLNTQRFNIIVEPDNYILAKKVFISLGDKVNGIGLIDTRKIKNVEYKTEKDSYLGDKIESENIYAKAYARFVMKDVICCESSDDLEKFSKSVTKDRLRFQSFCLQRMAKREHFIGVDAIEKQLKAAKKELLDIQNSLKELEDAKKNFDLVYNGYTKFRAGEGFSKLEKYCESGKKAKELGIKIADIAKKIEEFKQNPILLAMYDRVKECKKNVNDIRDEITDTKAKKKNIIDNIRKSNLLIEELKKNLEELKIVYENSIKGYSEFALDVEKKYLNERKSKKASAIAYNFSNRMAHDNIALNSYLNQELIPLQQKYTATYTCDYAIGLEGANRYMQEYLTLQNIELERHKNELAKAQIRCKDRFRKEVLFRMKDDILRARQQFKQINRVMENLEYGEESYRFGIDKSKDKELGLFYDIIMDKDNQQIDRENDMLAYMAEVNKSEVFESQIDDFMSRIMIDVEEHAKQNLTGQKSKAKSMGMYVDYRTYLDYDIIIKNSVTEKEVALSKVSGEGSGGENQAPFYVAICSSLLQIYEQSKEESMRLILLDEAFNNMTSDRIEPMMNMFKKLNLQLVLIATAEKATSILPYCDITYSIVKSGNRNAIRAFERLEDGLR

SEQ ID NO: 33118 - protein, 403 aa, Lachnoanaerobaculum sp. MSX33
MDYGKDILNSLVDMYERREGYIKEPSSLRAIQIDIKKNYPAYVDRYDHNAYKDINAAIEKLISEDVIISKLESTGVYSKVRLNIDRISDCYKRLNRKSIPEQCEYIKQILSSFADSKYRLLNNIISDWMNLAVNYRKLPYDLKYDGKRLKYVLTILEAVFKIEQESYIRNFSTAVFKDSKRFQKEFKSCIESILFDYTDDPIEKDKILEYYNLYENPTYVYIKGDVIISFENSTIYASELPDGIALSNASLKRIKNIKVLTKAVITVENLTTYHDENKKEAVYIYLGGYHNKSKKELLEKIYKDNKYCEYLHEGDIDIYGFLILENLKEKTGIPFRPLLMDVNTLKRFYEAGIYKELNVSDIRMIEKNRENLKEYSEVLDFMFLNHCKVEQESLRAVRLLENS

SEQ ID NO: 33119 - protein, 510 aa, Bifidobacterium sp. MSTE12
MEGESPLADVRREMERLRPVYETGVLRLLLRGNSMLYVALLRSSFDPLTGELPRDVLEERISRSLSRLAETGDYTVKDDQTVRQAAHAILLELSREGDDDYAWLANSLDVASHRYLYRLTARAHRAIEALHRLEDTTQALSGAQANSIIMEIEHARMQLTADPRERIKLLRKDIEERQKEIDELERNETIERLTSEQVGDIINVIHNTLRGVPIDLRELALAERDNGDALRRRMQSGTMSVEDILTAYHDEYRKSFRESDSGRRFEDAFQVIVTDEGRQEIDDAVRDIAKNPYLDGEPGALLGQVRAELERIYSGIEDVRRQTRASDEAISRLVRQQTDTRYRTMLATLNRLFAKTNAEAKANPNATDRPYHTDTGLSQIAVLPTKPAKAMVRNATAALNDSAPTVGLPDLKAMIEVCGPRLRHMVDLIHRNPVMSHDGTRVDFAASFNRLPASERRESEIIGFLSALRTENDMACATWNCVSLDGTPRTWRTRPILATAQTLDDIIREG

SEQ ID NO: 33120 - protein, 235 aa, Bifidobacterium sp. MSTE12
MTDEHSETVGIERSLPTVEQPALFDGDTGDMTADARMAAIALKRERYISGELFDLVKDNVEAVERSLNNDMLRLVSNDKYHVMYAAPVSGIESNIRSLKTRASLSREDAAMLAFLRIHVLEYENQKTPVADWQVSRDEIRAALATGAGYLAGGNDEEGTTKKIAAAISRMTTYGYLEPTDDDEMLAITPLVPIVLDRQLADEWLDMTTPSMTHDTDAGMLDPISEENEMTDEEER

SEQ ID NO: 33121 - protein, 1168 aa, Bifidobacterium sp. MSTE12
MAGDDMKIIADRWMMESRQIVNWGSYDGYQEFRPSIDAESPVTLLAGASESGKSTLVDAQISLLYPNGTPYNKASNAGRSERNDYTYLRGMIGISDGDNGETPIFLRGRDANGTPQAIWGAIVDTYVNRTTGSTLSCGKFLYLPAGDGKDEVRRRYIAWNRKIDPQIMDRYRDTPFTPSMFKKAYPDCSIFPNASAFHAYIWQEMGLSAEACRLLHKIQSADAPSRLDDIFKQGVLDVPEALRLAQDTVDDYDRFNANFHSMEDKARRVAKLQDIQTQYDAYAKHLTQVREYEAVNPESQQGLETLTLWMRSRMASEVRAGLPAAERKVKQQECDLHEAQERISDVNRQREAIVERIKGIDGGTLQRLSDDLERARRDMQDVRSQRQSIVEKFEGVEGALPSDETSWNAKRDALARSMETFDERMGDLESKRDRLIGERTAASQECAQLRRDYDRKRRQRTRITQAMDEARALIAKAVGLSPDELPYAAELMDVSESDERWRTAMNVTYAPIAQTILVDSRHERGFAAKISAIDPALMIRRTWQFVDVDKSYDCTRNDGWMSSKLQYREDSPFAGWLKEQTASARLDALCVETIDDAAHERRQVQADGQIKSGVHGFHGIKGMNPIIGFVNEGYLTELKKQLDEAHHRLSDTERRCGMVRKSIDLMHAEKNLADLVANMTWNKIDVVGAETLVENLKRRIEQIEDNPEMTRLAERREEIDRLLDEANARFYHAKSEMQSTQAAVDAEHAWLEAYEGIEFDDDALSGDVSNMLADVYEGCFGGVVHAEDRPKLIAGGNDEIGGHSFETRVGHAMERAMREQNAALGKRAGELRTVVEQSMASYLERYAPDDDSATGGVEDYRFYLEELHSLQMLVTREATDEEYANSLDKLTKNFLQLNRALNTDQENVKDQLERINGMLAGQKFGPRGGRLSIDVEFRPIERAFVSSLKATLNKLDEWFRNDKDDPDATRKAFTSCATFIERVRRELEQVRDVNGIRSYGARNLDPRARSTFYAIVHHDDGPDERISSTGGKSGGALQELTSFIYGAALIYLLGGDVTGSPTYTTLFLDEALIKADGRYTQRALNVLPRLGFQVIVSAPESKTAEILGVSTKAYVAYKDPSVGRSFLQELTSEDIARQEAELHDAIDDMPAAPNDIGPTTATILEQVF

SEQ ID NO: 33122 - protein, 486 aa, Photorhabdus temperata subsp. khanii NC19
MNFQGLQAKYRRLFQESAAWKLLRADNSPLILAFLGELFSEDSEVPFSRARVSLDAELVRCRELGLWETETGAGTYLNKWIREGWLREMDDTLTKTDASEIALRFSQGLDERRSGTTASHLRIVQEAVRDFAVAISPNVDERVTLLEDRKSEIQREIDALKAGIVTELTEVEQRERIREIYQLASVLTGDFRRVEDEIRRLDQEIRIQIIEGDSTRGDVLLAVLEKEALLAKTDAGSAFESFFDLLCDQNRTMELRDQLRSILNRPVAEHLSTPQRQFLSQLMRELSRESDRVFQIRRRTEESLRAYIESGTAQENRAVDRLLGQLERLAVELRNADCDLQTTTALSLPVGAASISSPESMLLKSPDEKLDTSGVEERFNSREPSIQMLDCLDTVQIRLIAERALETLKEFGPMTIASIAHYHPLNSGLEELVAYLRVAKSVGAALLEEKESIEISDKQGVRLRASIPTFLLSADLFPDSLDELVL

SEQ ID NO: 33123 - protein, 302 aa, Photorhabdus temperata subsp. khanii NC19
MHKDKKLNKDNGTPATLEKSDSDPQKEQQTGFFDQLIKHHTQSGYNPLTGTSAVESDVAANKSSSVEVDDVLASDHSESSSSSMPPDARRVLVSLLRQGVILSSQKAKLFESLCRYQCAVRKHLSEVYLKLVLDEKAGVAFIAGFQNEEDTESLGIDDEEVVSLISRRTLSLYDTLLLLVLRKHYQDRETSGEQRIIIDIERIESHLTPFLPLTNSTKSDRRKLKGALEKMVTKKILSSVRGSEDRFEITPVIRYVVSAEFLESMLNEYLKMADEKGIELNKNGSNAVDYQNGEEETGDEND

SEQ ID NO: 33124 - protein, 1134 aa, Photorhabdus temperata subsp. khanii NC19
MKMTDQTLSADSLFHVGQIRLAELSVYNWGSFNGLHTALIDPMGTLVTGDNGAGKSTFIDGLMALLLPAGRATFNVAAAQGDRSDRTLLSYMRGSFGSAHDGAGTRVRSKREFGVVTGLRALYQGNDGSKITLAALFWITKSTNVLADVTRVYIVAKRDLTLKEMLDAFGDGNARSFKQWLRDDPAMTCCDDNFSDYQELYRKLLYMDNKNAPALLSRALGLKKIDDLTGLIRELVLEPSTVKDDAKKVVEEFADLVAIHSQLVDARAQKEHLSRLPELSSIIEKKTKEFEELTAEKNSLPVYFGEIFAQLWSEKIADIEAELEALSLGIKQAEGQKVDADNLVERRHEEYLQFGGDKIESLRKEMGHTQDQLNRVVRNSSQYQTHANELALPSVLEEAVFLKNQSEASARLASIQRDEEEYQDRFATISAKFSELQANIHDISQEIREIEARPDSNIDVKYQQLRDELVNSLELSKDQCIFIGELIDVEDHEKRWQGAIERALGGLRTTLAVPHHCYSMVTRWLNARHTGLHVRVQVVNDAATNLGQSAEFKPDGYLRKLVWRTHPYREWLKHHLQRFDLQCVSNTEELDQTPFSMTQQGLMHMDKGRFDKKDQHRIDDRRHWCLGFSNKSRLAILNNDKKELTLQLAETGKNVSQARQDLNSVSDRKILWEKIQSYRWDDINAPYWHEKLSDLQADLKVLEQSGGDLDKARERWESAKEQLAQIQSALNQLNSDSGGVKNTLKNAQEEWSKAQAKASRGLPDSARQLLAIRVGVLNTNDLSRMAELVSKVEEDLDRLLDSSRNNKDRAERSAISIMVSFRSNDKWQVFTVDWQSDIGSLPDYLNHLRQLEEEGLPNLVEQFIERLNKHATQSLARIKTKLESEREDILERIDIINRVLKRTEFRSETHLKLGSKREKFPHVNEFEQHLRKVLSQVTSDDHEARFRQLAKVVEILGKASAPGSSNTLESLRLLDSRYQMSFYAEELDINTGEIRDVLESSSGKSGGEKESFAATIVAASLAYVLTPNGYDRPVYCTVFLDEAFSNTAETVSRRVLRVFRELHIHVNLITPYKNLNLARESARSLLIAERDQENHDSHLCEVTWEEIDRRMREEKGKKLAAEVAGLGIELEKLI

SEQ ID NO: 33125 - protein, 398 aa, Photorhabdus temperata subsp. khanii NC19
MKKGLCETRWGLLPAQVKSIIRQREWDNLSSLKARLLGIKAFPVRVGLKPPRGSSAISDMVHFQRFVDEWKSFPYQDHVEWSSKNFRELSEQRIPTFVAIESMQHLIQFLGNDALSRSKVWERNMKPFLRVDKDLYPALVKCIDIVEKLSLRDAELLAKLLPQLKPGLGEGQYLRALPLIGIDTKFLENHQILIEELTDVIHKGAVSAFGGLTAWLGCLTNPKGWLTIRPLCHTAMAALGGIPILQIPGELLKQHELPASNILVVENLQSGLALPDMPDTVAVIGGGKNVAWMDATWLRSKRVGYWGDIDTWGLSILSDARDKFVDIESLMMDVETVKVHEDRMVPEPNPVESNPSSLNEDETKLFNNLISGRFQSSRLEQERLSSDYIRNKLIDWLS

SEQ ID NO: 33126 - protein, 493 aa, Rhodococcus rhodochrous ATCC 21198
MSTADLHRLARLRQEHPAWALLRSDNAAAVLALLGRHFDRGTRRLPAPELFARLDADLQELRDEGFELPRTGQAYCADWVRAGYLLRRASADAREETLEPTEATFAALTFVAGLTTATSSVTESRLTTLSSQLQALARDSDPRSESRLAALRAERDELDRQIAAVESGDFPVLDGNRAVERSAEILALAGEIPGDFARVRAELEALNRELRARILDDEGDRGDTLGEVFRGVDLIGSSDAGRSFAGFYDMIIDPERSSQLDDWIEAVLQRPFAQQLTTEQRNRFRTLLTEMEDAGGEVHVTMTSLSRSLRHFVQSRHYEEHRRLQRLLRSAQQQALQVAQRRKPYDLLDLELVRVGMGIDSVAALRLHNPADDLVAEPVVTQPVGEVDLAELRRIVRESEIDMDELAGNVAATLRSRGSATIGDVLRDHPATQGLASAVGLLVLAAEHGHRVDGTEEIAWTSPSGATRVATVRRHLFDPTDTEFTARITEDAS

SEQ ID NO: 33127 - protein, 201 aa, Rhodococcus rhodochrous ATCC 21198
MTESTTRTGLYPGDTGELDLDTRRALVQLLKGPLVTADKHPEVWRTVIRDERVLRSRLADVFLDLVVDEDDQLAFTRPADTGDHKAPTVLRTERLTFMDTVMLLALRHRLLRAQPGERVIVDFDEVAGQLEMYRAATSTDPAGFRKRVNASWEKLKKYTLLAATSTEGRMEVSPVLRQLFDADQVAAVEAEFRRIVEEDAP

SEQ ID NO: 33128 - protein, 1099 aa, Rhodococcus rhodochrous ATCC 21198
MSAAPIHPGQFRLARVQVVNWGTLHGHHDIPVARKGFLITGASGSGKSTLIDAISTVLMPGGSVRFNAAAQESAAGSGRNFVSYIRGAWRREADADTDALTASYLRTGATWSAVALTYNAADGTAPVTLVKLMHLRRGANANNEISHLHLLLDTDVELTDLEPFVTRGIDTRGIRKRWPDAVVNPSYAPFARAFRSKLGISSEAAQRLLHRTLSAKSLNSLDQLLRDYMLDEPPTFAMAERATTQFRELREAHRVVVDARRQVETLEPLVALADTRRSGLQSQRDLQDETDHLDAVHTRMTVDLLSDRLDETRAQTGLLQAAADKTADEADRAGERTLDLRVRAESAGDGRLATLRVHKETAETALERITQQRKRFDIALAHWEAETPATADDFAHLQAQLERELRELDATADTRRAELYEVAGALAERRKTIRELIADREVLARRRSNLDPDLLRARELVCSAAGLGEDALHFAGELIAVRAEHAEWTGPIERVLAGFGRTLLVPDELYPRVAAAVDAHHLGARLVYRRVRTGVGAPDAPTTADGSLVRKLEVRPGPLAAWLQHHLADRFDYTCVDTADDLRRVPRGVTRAGQVKHGGDRHEKDDRRRIDDRSRWVLGFDNEAKLADLRRRIGDAETDVDALQRRQEALERAESAIQQRRQAAAVIRESAWSDVDVAAAENAVDAIEERLREWMQGNTEYATLTADLARAESEERAARQAHTAALAKLEQHRDELTRVQARLDEAQAHAGTAVPDPIAARIRTRFAAAVRRVTVDNIDRALSTVGRAINEEMRSAQHDTADAERRITAILTGYLAEWEARRAEMRSEAEYVDDALAVLARLRSDGLPAYEDEFFRLLREQSHRNIGELARAIRKAPGEIRSRIEPVNESLRRSPFDTDRILRIDVKDRRSPAASEFLAELLQITSGAWKEEDRAAAERRFEQMAAVLERLDSGEPADLRWKRLVLDTRLHVGFIGVEVDPEGNDANYHDSSSGLSGGQAQKLVFFCLAAALRYQLAAAGEELPRYGTVILDEAFDRADPAYTRRALDVFTQFGFHMVLATPLKLLQTLDDYIDGVAAVSIRDKRYSQIALLPIRGDGT

SEQ ID NO: 33129 - protein, 378 aa, Rhodococcus rhodochrous ATCC 21198
MSALCVPPSAVAGKAQVAYRSRRTRWITDPTAAESDSLSIGLHPPSERRVAQDPDAVVAWVRAWHRYPGAGRVEWETRRWPSFGTQEVPMRLLLSGATEIAAAAARAPEWRTLTERQARLLDGLGPGTATLATAIAATHARWLELDEPDFARLVAAVRWLAEHPSSGLFVRQLPVPGVDTKWVSRHRGLVETLLDGVRGDRDLGVRSLPRMCEVAVCDRALLAGAPRIFATSLDELAALPVKPARTLILENKEGLHALPELPATVAVHGGGYAVHELADVPWLAASDVVYWGDLDTHGFAILDRLRGRLPHMRSLLMDRGTVELWRDLAVPETSPAPHTPAHLTGPERDALAVVRTEGLRLEQERIPWPYVVAHLEAL

SEQ ID NO: 33130 - protein, 468 aa, Paenibacillus sp. FSL H8-237
MKLFSIVPEEFFKPLNSKYKSIYIDCMGIIYNTYKAELSFGVDKEIILSELGNYFDNESKMELIFDEDQEIARDSRAKANGILRRLKDSGWIEYELSNDYIVKVNLFDYAATMIESFNKIIKNEEMEYQSLVSQIHATLINREAYAKPYEYIIKRVAENTEELMVGLKKLNTNIKKYIDAITNEKTAGEIVQDFFVYHKDIGSKAYHRIKTSDNISYFRTTIIDNLYTLLNDKHIFDRAVLGYMDVEQVEDRGQAEDSLRGRIMSIISAFRNYDEIVSEIDNKNSKYINSAVARAKFLLTNTNNAEGKISKILADLSDEFNKDDTLNLYDEVDDSLFKVFNIFPQGFMDSDSLYVVPISKKTATPEELDDQLGMSEEERKLHKLALQEKNRNRFSRKNINAYVDEQLKDKKSVLASTLPLENKRDLIKIIFISLYGKDKKSMYKTTEIKEIISVNDFRFCDFLIERCE

SEQ ID NO: 33131 - protein, 207 aa, Paenibacillus sp. FSL H8-237
MEVFRESLVQKEKFRVAANKLLNNCFIIKKKEDTRSDYIFIIQNKDLFIEYFDLLGYKIEINDIHGVVSLTSINGTGRLRMRKIESVILLIVRLLYIEKRKELSLNEDVVVLVDEIQQKYNMLKIDVKSYLDKTILKDTVRLLKRYNIISNLDTDVTMSDSRIKIFPSVLFAVPNDNITAMYDAINEKLNRYMNGGEQIDDEEAMQD

SEQ ID NO: 33132 - protein, 1067 aa, Paenibacillus sp. FSL H8-237
MMKKLCRIRLINWHYFVNETVNVNGSFLISGENTAGKSTILDAIQLVLTTNNRKFNTAANEKSNRDLKGYVRCKIGNEDRTYIRTGSVITYVALEFYEEKGAKCFTLGVKIDSPDEESKLTTKWFREEGRLEELSFLTGGRPSIAEEFRKNDKKVQLISQISEAKSKFGQRLGNLEERFFDMIPKSLAFKPMDNVKDFINKFILSEKVIEVATLKNNIAALSELEDLMEVTKEKILELHTMLTKNSDITAKEREIKTNEILIKKADIEAKKLDCEQLEKNLHTCEQRLKAEQDSEDALRKMLNNERERLTNLHISIHQNETTLLINETKHRIDMLAMDLRTYELNNKKLQNMLNIVAVALNLLKKYDVFILSKEDLINVGSADCGTEDKSQIVYQLKKEIQRLVGDFNSDIFRTSELLKQYKNSKVTIENEIKNLKNRKFTYPENTLRLKSAIEKEFSNLEINSEVRIFSDLLDITDLRWQNAVEGYLNSQRFYIIVEPQHYKVALEVYNRIKREVHTVGLVNTSKLDINSVADINSLAYVIKCEHRYAKAYAIYLLNRVIRCDSVQSMKDHKVAITSDAMLYQNYAVRKIDEKIYNTPFIGTFALEIQLKKNQEDLEILIDDIKDSNQKLTIFLQLLDHLNTCKIDVLEENLNAPEELKKIQELIANENIELKKAEANPGYIEIQFQIDECNRVVDNLEEQHTASNKKIGELEKTLKINNNDIENMIGTISSLEKNFNSLCEKEAEATDLGLHKYNEQIKIKSPVTIVQNFSPRKAGLENERTKYCDELVKLQANYCSKYDCDLGSGYEQMDEYIKEHHRLDSSDIIKYGEDLKKAKDNCQLEFKESFLARLKENIENAKLEFKNLNAALRDIYYGEDSYKFELTHNKKKESIYQMIISKNNEAGFNLWSSSFEDEYKEEMEDLFAKLTAHDDKGEKVLAEYTDYRSYLDYDIIVEKKDGTVQRFSKIYGEKSGGETQTPYYVAIAASFVQLYKLGDTIRIIMLDEAFDKMDDNRIISMMDFFNSQNFQIILATPPSKIEIIGEKVDTILMAMRDGTTSIVEEYDL

SEQ ID NO: 33133 - protein, 390 aa, Paenibacillus sp. FSL H8-237
MINGYEKEIINILLDKYEKSKSFIGENKMNQKFSVKVSSLFPNYIDHSNYEVFQEVNEAIDIIARKNFVTAKANSAKVYHNVVLKVDELEAIYRYVGRRPKKDINMSVLELMENYKGRNEILERYCKMQYERIHSNRSIQFFNNDLAELENILIAVDELLKVDSETFVRDFSIRVFKGSKVFEGISSKVINLLFEYGDFPEKEQLLGNLNIIKNPTYINFKGAGSITIKGQRIDLTNLSSDIAISSGMLSDIDKIEVVGEAVITIENLTSFHTFKDKNMFSIYLGGYHNSLRREFIKKIYQQNPKSSYFHFGDIDAGGFYILEHLKKQTGVDFKPYKMDIKTLETYRNYTKNLTDNDRDRLMKLKDSEYCKVIKYMLDNDCKLEQEAIGK

SEQ ID NO: 33134 - protein, 477 aa, Paenibacillus sp. FSL R7-277
MKLFEVVPESFFRLLSGINKQLNVEAVQLLYEHAKRERFGIRIELMRDLYQELIESWEELDTQLEWDEEPRSLSPGQVDLEEVSRAKANSLIRRLETLGWIELETRDRYEIYIVLPHYTIRMLSLIQELCEGRAIEYQRYAFATYGMLSGEEARERPAMAVREALSNTLQFDRELFTLYNNMKHHMEQVVSKKTIQEVLDHHFDRYQKDIVENSYHRLKTSDHVARYRHQILDIVQQWQLDSDWMEQAVQDGISGGLYESSEEAKSHLRQSLRDIEAIYLGLDDTFYRIDLRHNQYLRSSYDRARYLSQHHQGIDQKLALLLEMLGNSSFPLPDEELIPLSRLQNIQSLNEGSLLPVRKKRIPHQPEEHYVIPIPEEVREQLRKERLERMRKAVTRKKVDDFVLSRLQNKDSMEIAELAPQNVEEVLLLTYVYLYGQDGGSPYQIERSKDRLILHAAPYRFYNHKIKPRISGGRQQT

SEQ ID NO: 33135 - protein, 201 aa, Paenibacillus sp. FSL R7-277
MWEEISEQERQKIKAVLNHLLAVNYLVREKDRDSYTIVRRHKRAIEEYLQMLDWEVIVDERHECVFLQSPDSSFRRSLDRDLSIWMLILRLLYQEKRQGLTISAFPTTTIHEIRTKYETFHLSWLGKTKLDQAIKLCTRYQLVEALDADIRSDDCRIVLYHTWLYVIDLEQLDAIQSRIEQYRVEEEKGITNEMVKEAAFD

SEQ ID NO: 33136 - protein, 1112 aa, Paenibacillus sp. FSL R7-277
MKWLKKLRLINWHYFADEVMDFGKQTLITGKNAAGKSTIIDAMQVLFVANQRMIKFNPAAHEDAKRTLLDYLKGKIGSDERGYVRDGDFNTYLLAEFEDQEKRESFVVGMVADVFSSLEHAEEFFILAPMNLDMLELIKPDGRLRSRDEFRGYYQGNSSIKSVFEQNKSQYQKALLSRMGHVHERFFQTFTRALSFKPIQNIRDFVYQNILDRQELQLGLMKENFAVHERYQFELQELQKRKNKLGQIQERFQNVEKYRHLVIEQDYVIRSLRVLKEKETFDQLVLELQGINLKLEQTRSELELAKQKKEEATRQKDELSRKLYENSEEKRKNELDLNIESGKKSLIDLEERFSVWKRSMQKQAEFLANLGIWNGNSIWGFSDNDRKQLQNAADVLSGLSANFSNYEGDIEPEKERLRRMGDQLEEVQERMSETRTRSSDNLRELEQQIRETEGVIHNLEQHKRPYHEGVMKLKTLLEERLGTRSPVWIFCEEMELMDETWRNAIEGYLNTQRFDLLVEPSVFREALSIYEREKRSRRIEGIGLVNTAAEQKYLNTSQDGSLAESIDTSNSVIQAHMEHLLGRVMKAVDDQDLLRYRTAVTASCMGYSNLVARQIPERLYSPPYIGAQAVTRQLELKREELVQLRRQHALLSVDLEQLQAWLDQLKGKQSLLVMLADQLELQRDVANCMAELQRWEEERKTIDLSEADRLREQIGSWEKTEKHWEENRDSLNRKIGSLEEGVKEVETRRFLQINFIKDKEAIVEQWKAAWPERLQFAQGRLEDPIRSTIATETKLINWESSRKGNETKRDEESQQLAQLRAEYNATYTFTTNIDAENNEVYSHLLEQIEGLDIPDYQKKVEAALRVSEEEFKSHFVFKLREAIEMAKREFRELNYALDNFPFSSDKYHFHVVPSEKYRRYYDAVMDPRLMERGTLFDVIDDERADALQELFEQLVQNEAEDMEEFTDYRRYLDYDILVRQGDNQYRFSQVLKEKSGGETQTPFYVAILASFYHLYRSERTLRIVVFDEAFNKMDEQRIQTSLKLIKKMNLQLIAAVPDEKIQHMAPEVTTTLIVTNQDYRCFVDMIDRWEDEETQVIEPRETEADWQQETLF

SEQ ID NO: 33137 - protein, 425 aa, Paenibacillus sp. FSL R7-277
MNEQEFKGEFKNKLLNHLLNKYERSKAFIIGEETKQRPQLLLIEEPFKADFEDEMNFRKREWMHQVIEVCLAEGIVDVRRERSSHVIQKVYLKWEKIEFVYKQVGRQPKRDKLAELRSILGELNDHPWDWLAKWAQGTVMVLGGQRSGGMDLNDLKSYVDAVRVLKELPSISGDIPKRMLSMRVFGNSKYFERYVERRLLSIIKQGMGEASELGEGELDLIGIVPHPKPVLLGGCGQFTLNGKPLSLELFPDGMALYPETLKVFQWVELNAERIVMIENLSTYHQWFRVRQPVSELVIYTGGFPHRILQSFLRRLWDELQITNASFSVFHWGDIDLGGLQIYRFLQRDCPFDIRPLFMDEGTLTQFGEAGGEHLERYCQKANDLLQNDSYANWHILLETMAKTGLRLEQEAVPDELVQKVFNSSK

SEQ ID NO: 33138 - protein, 450 aa, Pseudomonas aeruginosa BWHPSA044; identical to SEQ ID NO: 32527

SEQ ID NO: 33139 - protein, 249 aa, Pseudomonas aeruginosa BWHPSA044; identical to SEQ ID NO: 30516

SEQ ID NO: 33140 - protein, 1101 aa, Pseudomonas aeruginosa BWHPSA044; identical to SEQ ID NO: 32529

SEQ ID NO: 33141 - protein, 381 aa, Pseudomonas aeruginosa BWHPSA044; identical to SEQ ID NO: 30518

SEQ ID NO: 33142 - protein, 480 aa, Mycobacterium gastri 'Wayne'
MDYATIDALRERHPAWRLLRAGNATLILSFLGVFFVEGNRGACPASQVAAALDDHLYALNAEIPTENGQERFPKDARSYLEDWAATDAAYLRRFYPAGDDEVHYEVTPAFEKAYAWVMGLKGRSFVGTESRLHTVVELLRQIVHGTESKPDVRLAELRRRRDELDAEIAAVEAGVVHVLDATGVRDRYQQLATTARELLSDFREVEENFRLLDRAAREKIAAWDGSKGELLAELVGSRSQIAGSDQGRSFQAFYDFLLSESRQAELAKLLAKVSALKLIEADHRIRGIHHDWSEAADRAQRTVRQISEQLRRFLDDQVWLENRRVLDLVRAVESTALEVRGNPPSFGLELDQPGIEIALPFERPLYQPPAAVGVESHIPPETEEIDTDLLFTQTFIDQARLIETIRDVLPENSSALLTDIVAAHPIEQGAAEIVGYLALNDQEVTVDMDDADETLLDYCDPADPDVTKRARLPKVTVRRR

SEQ ID NO: 33143 - protein, 192 aa, Mycobacterium gastri 'Wayne'
MSNEHAIASAIIRLMQGVVYRDSDEDTWLTLERLSAGVRDHFATIGVDVVVDDAEGYAYLRSRSEQDGDEALPRLVRRRALTYNVSLLLVLLRKRLVEFETTGGEGRLVLATEQIVEILRLFQAESTNDARVVDQAETTIKKAAELGFLRQLRGQRDHWEVRRILKAYVDAQTLSDFAAKLREYAGAVTSDE

SEQ ID NO: 33144 - protein, 943 aa, Mycobacterium gastri 'Wayne'
MSETISATGDLGNTRRAGYRLQHAELLNWGTFDTHVWRFTPGTDTALLTGDIGSGKSTIVDALTTLLVPSHKAAYNKAAGAEARERTLRSYVEGHYKSERNEATGKSRAKGLRENRRTYSVILGVFTNHGYDETVTLAQVFQQRESTGQPYRFLVTATKELSIATDFADFGSDLRDLRKRLRAAGADIFDEFPKYATSLRRLLGIRSEQALELFHQTVSLKSVGNLNDFVRDHMLEPSDASPRVCDIIGHFEDLTRAHDAVKRAREQLEALEPVVATAAKYDDALAERDARERERSAVRLFIAELRSNLLASEIAQLETDGDALWQEQDIAKARQQTLTRERESLIEERAKAGGDRIGELERLAREARDQAETRRRTRTLFDAAVSSAGLKAVTGSQEFTALSALVFAERPRLAAEKRDLDAASAEAIGREKVLQRKCGHITDEVTSLQQRTSNLPVEQVELRAELCAALGLTPEDLPYAGELLDVFDEHAQWRGAAERVLRGFALSLLVPQLHYDAVAAWVNSRQLTFHGRGGKVAGAKLVYERVPRQRVRLQPPEHSGLLLADCIDVKDGPFREYLINELTKRADFRCAASLEEFRGQRRAVTREGQVRSGERHEKDDRYRVDDPRRWVLGWANERKIAALRTELAELETEREAAASEQARLSGLRDALQERLDALLRIEGFRSWSDLDVDEAQSRANDYDAERVRLQAGSSRLAEIARALEDNAKQADAVANSIEQLTGKLATTAAKANQAKRDKNRDDELVANQPEAQLAAARQSYPALTERLGKNCPTRSADCAETENALAVDLHQRIDRLNKELGGYAQSLIQSMLKVLIRWPELRADMDANVEARQEFLAFRDRIATDDLPRFESEFKEQLNKNAIQELAGFNNWLHRQASGIDERVDRINEALGAVPYNPGRFIRLEKEPTTNQDIAQFRADLRN

SEQ ID NO: 33145 - protein, 201 aa, Xanthomonas arboricola pv. pruni MAFF 301420
MTGTLLERGGEVHTVMQHFARSLRGFVQSRGYLEQRRLNQLLKQAQGEALQLRDSLHATTATGYTQALSAARLRSLSQWRLHDPRLTQVDGRVQAADAADISLDSVGDLVAQSEIDVRSLRRDLHELLGQRPRLTIGDALQQRPAAQGLGSVIGYLSLGTRHGVVIDGQMETVQWEGGDGALRRARIPLVWFTREKRNELD

SEQ ID NO: 33146 - protein, 233 aa, Xanthomonas arboricola pv. pruni MAFF 301420
MNWTEDTRLDADEGSGASADAGRTPLTETSPAQPRGELFLGDTGTLPFDARRALCQLLAGPSIDAQRHGALWPALLRNEAAIRQVLCELFLELVLDREGGVAFTRQADTAELESPTLLRSAPLTFIESVLLLFLRQQLAEADTRGERAVVDEAQLVEALSVYEKNVSTDRAGFARRVLTAIGKMRENQLLSRLRGSEERYEVSPVLKLLFSAEDVQALVVAYRGLREGDVALD

SEQ ID NO: 33147 - protein, 1355 aa, Xanthomonas arboricola pv. pruni MAFF 301420
MNSQSNLSPAQPGASLFTDSLAEQRAQQFRMRRLQVHNWGTFNGLTEVPIAEKGFLFVGRSGSGKSTLLDAMSALLTPPSIVDFNAAAREAERSGRDRSLVSYVRGAWADQQDSASGEIATQYLRKGATWSALVLEYRNAHGETVSLIRLFWIAGSGNAAADVRRHYMVAPRSFDVASELDGFDLDLRRLKARLGEEVAHFDGFAGYAERFRHALGIGNEMALRLLHKTQSAKNLGDLNVFLRGFMLDEPRTFEAADRLVEDFAELDGAHHAVVTARRQVETLSPAREHHAALMALRHSVGELRELQLGVDSYREQQRLALLETRLHELDSQDRGLAGEEGQRRESLDNHEQKLAGLEREQRAAGGEQIEELERERARVERERDERLRRRVQIEQACRQLGTALAAGASGFAEQIAYAQTVLENGKHDASALDEAIAERMGARRDDERRFAEIRAELDALKRAPSSMPAPMQALRARLCEDTGIAEAALPFVGELVQVREDQSAWRGAIERVLSGFAQSLLVDDRHYAQVSEWVNRTQLGTRLVYFRVRRNDALHARTPDARALPGKLQLREHAFTEWLRNELMRRFDYECVDNAAALRNADRAITREGQVKHPGDRYEKDDRHAVNDRKRWLLGHDNRDKLKVFEREAQTLAQRIAGCDADVAALRKQREQDQERQLAAHTLVERDWDEIDVGPKLQRLSDIDEQLQQLREGNSGLRALGQAIETARTLRDQAKRTYEDVRLERAQLARERVRLEQQHAACASRAGTAALTPTQLQGLRERLAALVPLSLDNLEAHFRVVERGLAEQLAESQGRDSRLSAQLLDCFRKYCQQWPEDSGDFTVSLASADDFLARLDRLESDGLPRHEHRFFDLLQTQSKNNLLALQRHTAEAHKGIKQRMDEVNASLEQVPFNRGTLLTIEVSDRRLGEVQEFQQQLRAVLSHQQTEDRALAEAQFSTLRALVARLGAQEPDARRWREQVLDVRQHVEFIGVELDAQTRAQVEIYRSGAGKSGGQRQKLATTCLAAALRYQLGGEDGELPRYCAVVLDEAFDKADNEFTALAMNIFENFGFQMVVATPLKSVMTLEPFIGGACFVEISGRHNSGVLLIEYDEQAQRLQLPERSRGDEAAAAVTEQAVSAAQGEDAARSTQGETRMDSTAAVSGAEGAALQDVPAQDDVAAKAGRRASKVAPASTPAVRAAPKPAKTAAASARAGSGKSAAAKTAGGKAASAKPASARRASPAAGKPRKPATPTKPARTPANTGTASRRTTASAKPTARPNKAATTAAAPKKPAAKSALATRRATTSLGGATKATKTTAARSAARPVPTKPAPAKPVAKARAASTRGSAGKPRGKR

SEQ ID NO: 33148 - protein, 463 aa, Marinomonas ushuaiensis DSM 15871
MLFKHLPDEIFQALSGSNRALIEAVLTDLAEIFYDHAEDPIKDKSTIIESIEDTLHKVDTFAWHDDQKESFESPKTIHDYALRIYHRLVNTGWLVEEQELYRVSVLMTPQISMLLRSLVEISRHGKRNYGATVLSILSNLEAVAKQPKERGVTLRQSAEASRDFSAHLNQILLGIRSLQKELFASRDPKAIVAGFFDLFVEGILIADYKTIKTSNNPFRFRRQILELTQDFLANPETLGQVAQCYVDQQLITMAEAQAMVEKDCRDIMQTFGNIEQRLERIDEYRYRLEKRAADTARYMDSSRPGMANKIAGIISDVAKYEKLPILKEVVGARFVGVSSAAQPTKRREPPPPRIMTPTEVSADAIKIRDRQRRFHEARQVTIPKMQSYLEKQMSLDKNKHILDFTIESVEDFVCFDHLRYIGSLGVTAKKLEDYFEIHFTNQYLDVHGFVECREFNVVRRSKA

SEQ ID NO: 33149 - protein, 214 aa, Marinomonas ushuaiensis DSM 15871
MLKELKKVVEESGKDAQEFQQTANFIIANQFASAFKHGQRKHYLLLEAYQDYFDQLFDALGMRLYINENERLAGVLPVQKEAFVRLKTDETLFLLVLRQIYEEKIENFEVDNGFVATNTHIILDRFVNLVKREIPSETRFKDILALFNRHGILIRGKSYEEDSKNQIINITPVVRLIVTEAYLRQLESFNGADPDEDDIESDLDVETTSETNQD

SEQ ID NO: 33150 - protein, 1137 aa, Marinomonas ushuaiensis DSM 15871
MKKLNRIVLVNWYLLGAEEINIRGNTAIVGPTGSGKSSLLDAIQTVLTGASKRHLNYNASANDGKASGRSIRSYILGMIDSGQASAKVFGTQPRQDATSYLALVFEDSISGNESTVGLALSASLASPEEDVLGRFVLPNYGAKKSDFIDAMEGKSYKAKPWIEVRESLKKICLDPYIKSGSASATQYINRYLDELSPSSDKLITLDSFLKNFKNALKFVPIASPTRFVQDFVLAEAPLQVGAYQKSLNEYRHLEAKTLEVSKRIDDLKLIQVDCEKKHQQEQAAVNYQWIATEARFDELGSKQDDIQDQYELQKEREEEIEEELATQASLLKQLQSQLLRFEQQYEHSDVGLKLQQLEQSKKLLVLQGQQDQKAIIQVRQLTLLLSSLTSFQDLVSKETMSLVKEFSAFDGLITEEGRVEGNLKPLTQKLNDLNALLDKEKAQVFGQRSELNRTILNLKDECKQLESDVSSLKGGVSPLSQNTKRLIALLKDANITATPLSHLAEVTDRKWQDAIEGYLGAQREALIVEPEDAEEAIRVFRAHRRQLMGCRVVDTTQTRLWLNRGDQNSALRFIRCNNDHAQAYLNRRLGGIKPVETERELLREDSAMTADGMLKLSGTISTIRSVPHMMVGINTDGMRESRETQLAKLSGELMSFLKADQRLEQADSLLGRIMANNQFDTESIGNASHTVTRLTQELDSVETEIAQLQKHDDTDLQEKIEELKVRISNVELEQKKRDRERQQISEQFGALNTQKSQLSSALAALDEERNRLTSNPRYNAQFASERYALLESSMVNGAAIYKESISRADKASEKARSFDQKVRKEVADHYSKYHQANLDNDTQLDYLESKFEEFEHYVSYQIDVLSETELAKYAKRAELARREAEETFRSDYVSKLKDSLDQVAHIIKELNHSLKRRPFNHEIYQFRYYPNGDMKDILDLVKRFSDQDQANVGGLFDPHLSDDPEHVRAITSIQELISDEEKQQDLADYRKFYNFEVDILDGEGNKKTTLSQRIQTGSGGEHQIPFYLAIAAALSTTYRLHETMDGDIVGGFSLAMFDEAFNKIDMVKTSTCMGFMKDIGLQVIAAAPDDKRAVMAANMDTIISVWREGGAVSIDVAYPKEKGQVLLNGQLDTLPTI

SEQ ID NO: 33151 - protein, 494 aa, Candidatus Entotheonella sp. TSY1
MTHDELQATFKQAYSVKLLVSPNASLILSFLYAQFKQPGRVVIAHHELREALEDQLLALRTQDARRYPSDAQSYLRQWCDEDHRFLRKYFAVGQDDPVYELTSHTERAIEWMISLHKTDFIGTESRFLRILDLLKEIVINCTPDVAVRLQYLEAQRAMIDAQIDALNTAVEAAEDDEPDISLYSETQVKERLFEASDGARRLLADFREVEENFRAIARSVHEQQFRLGTRKGEILRYFLNAEDAIKESDQGRSFYAFWQFLMSQSQQDELREWLDTIEAMPAFEIDSEQPPVLRHLKRYLLEAGTQVVASNRRLIQQLRQVLDEQQAGQMQRVHDLITDIGKLALELSPDFPEDEAFIDLEGAPGVEMPLERQLWEPPVTSRFDHRPLAQGEANLAEADLQALSNQVYVNEQQLRRNIDTLLKRSQSVTLADVVKSYPIERGLTEVITYLSIAAKSRQHRIDTDVHDTIAVGQQAEVRDMTLPRIVFARASVSD

SEQ ID NO: 33152 - protein, 206 aa, Candidatus Entotheonella sp. TSY1
MSETLLPYAAAILKLLRGVVYFDDKEWETLLSYEKAIHLHMAGIGLQLHVDEADGYAYLSQPDDDDPLEGQEPGRASESVAARELPRLVRRIPLNFEATLLCVVLREELLKFEMREPDLERMVLSKQQIQEAMQIFYPEPADMTRLMGRIDRVIGQVERAGFLRPIKHHDEDVYEVKRIIKAKISADKLVEIRDQLRQYADSRRAE

SEQ ID NO: 33153 - protein, 1046 aa, Candidatus Entotheonella sp. TSY1
MIRSVSDQQGDIAPHLAGQENGTALVQGALGLNDAVRSGSRLFRLEVFNWGTFHGRVWSIKPRGDTALLTGENGSGKSTLVDALLTLLVPNQKRNYNQASGAAARRERNELSYVRGAYAKLQGQGDHAAQTQYLRDQDSYSVLLAYFRNEAQGRDVTLAQVFWYQDGIKKFYVVSDQELDIASGFSQFANIRALKERLRSHGAEVYDQFERYSRRFRALLGLQSAKSLDVLNQTVMIKDIDRLSDFVRQHMLDPTDVHEKIRQLLEHYDNLTTAYDALRNAEYQYKLLVPLEEEAGQYAKCETEIAELDTWMGMVPAYFAGVRTHLIQTAMTQTQIELEQTHEQYQQTADQLNTLREQDKRLTLALNQERSGPQLQALEQQMTYVRQELARKQRQAEHYDILAHSQELQTYGHEADFYANRRQAEQLQPMLRTQRQQVEARLSTLQLEREQLLLQCRTLQQELDSMARWKNQIPGQQLTLRSRLLEPLGMREDEIPFVGELLRVLESESLWEGAIERVLRNFALDMLVPESHYHEFSSYINRTHLRGRIVYHRIRDLDGFTAPRHIPDNALIHKIEIKPDSMYHDWLRHELHRRFDYECCDDMDGFAVARKAMTPEGLIKSGYTRHEKDDRYDIRDRRNYILGWDNAAKRLALEQELDALTHKQQQNESQLSTSQQALDALMARQEQLSTLLSFDDFEAIDWQREAAKVEQLQAQKAQLTLNSDRLMQLQDELEELQGQIRQVETQLQNLNKTTGGLEHQYQQWQQELASYETEQQHVQADLLAKAVPHLEALMNGDLTLDNAAAQQRQVEGHLRTARGVAERQRQGAVGTLIRTMQRYKSTFPETTQHLDASLQALPLFEQILDDLRTDDLPRYRERFKNLLNEKVLEHIAFLYGDLHKQIEAIDERLTTLNIALQGLDYTPSTYIQLQAEPTRDAEVRAFREQLQACLPDVAATLTHEDYEASFQRIQELITRFQEDTRWTGKVIDVRQWLDFAASERYRSNGQEKHYYSDSAGKSGGQKAKLAYTILASAIAYQYGLQAGVGT

SEQ ID NO: 33154 - protein, 490 aa, Candidatus Entotheonella sp. TSY2
MTHDELQTTFKHAYSVKLLVSPNAPLILSFLYAQFKQPGRVVIAHHELSEALEDQLLELHAQDARRYPSDAQSYLRQWCDEDHRFLRKYFATGQDDPVYELTSHTERAIEWVISLHKTEFIGTESRFLRILDLLKEIVINCTPDVTVRLQHLEAQRAVIDAQIDALNTAVEVAEDDEPEIALYSETQVKERLFEASEGARRLLADFREVEENFRAIARSVHEQQFQLGARKGDILRYFLNAEDAIKESDQGRSFYAFWQFLMSQSQQDELREWLDTIEAMPAFEIDSASPPVLRHLKRYLLEAGTQVVASNRRLIQQLRQVLDEQQAGKMQRLHDLITDIGKLALELSPDFPEDEAFIHLEGAPGVEMPLERQLWEPPVTSRFDRRPLTQGEANLAEADFNALSNQVYVNEQQLRRNIDTLLERRQSVTLADVVKSYPIERGLTEVITYLSIAAKSRQHRIDTDVHDTIVVGQQAEMRDMTLPRIVFARA

SEQ ID NO: 33155 - protein, 200 aa, Candidatus Entotheonella sp. TSY2
MSEPLLPYAAAIIKLLRGVVYFDDKEWETLLSYEKAIELHMAGIGLRLHVDEADGYAYLSQPDDDEGESENETAVARELPRLVRRIPLNFEATLLCVVLREELLKFEMREPGLERMVLSKQQIQEAMQIFYPEPADMTRLMGRIDRVIGQVERAGFLRPIKHGDEDVYEVKRIIKAKISADKLVEIRDQLRQYADSRRAV

SEQ ID NO: 33156 - protein, 1128 aa, Candidatus Entotheonella sp. TSY2
MIRSVSDQQGDIAPHLASQENGVPLVQGALGLNDAVRSGSRLFRLEVFNWGTFHGRVWSIKPRGNTALLTGENGSGKSTLVDALLTLLVPNQKRNYNQASGAAARRERNELSYVRGAYAKLQGQGDHAAQTQYLRDQDSYSVLLAYFRNEAQGRDVTLAQVFWYQDGVKKFYVVSPQELDIASGFSQFTNIRALKERLRSHGAEVYEQFERYSRRFRALLGLQSAKSLDVLNQTVMIKDIDRLSDFVRQHMLDPTDVHEKIRQLLEHYDNLTTAYDALRNAEYQYKLLVPLEEEAGQYAKCETEIAELDTWTSMVPVYFAGVRAHLIQTAMARTQVELDGAHEQYQQTTDQLNALREQDKRLTLALNQEQAGPQLQALEQQMTYVRQELARKQRQAEQYDTFAQSQDLQTYGNEAGFYANRRQAEQLQPMLRTQRQQVEARLSTLQLEREQLSLQRRTLQQELESMARWKNQIPGQQLTLRSRLLEPLGMREEEIPFVGELLRVLESESLWEGAIERVLRNFALDMLVPESHYHEFSSYINRTHLRGRIVYHRIRELDGFTAPRHVPDNALIDKIEIKPDSIYHDWLRHELHRRFDYECCDNMDAFAVARKAMTPEGLIKSGYTRHEKDDRYDIRDRRNYILGWDNAAKRHALEQELDALTHKQQQNESQLNTSQQTLEALTARQEQLSTLLSFDDFEAIDWQREVAKIEQLQVQKAQLTLNSDRLMQLQDELEDIQSQIRQVETQLQNLNKTTGGLEHQYQQWQQELAGYETERQHVQADLLTKAVPHLEALINDDSTLDNVAAQQRQVEGHLRTARGVAERQRQGAAGTLIRTMQRYKSTFPETTQHLDASLQALPMFEQILDDLRTDDLPRYRERFKNLLNEKVLEHIAFLYGDLHKQIEAIDERLTTLNTALQGLDYTPSTYIQLQAEPTRDAEVRAFREQLQACLPDVAAALTNEDYEASFQRIQELITRFQEDARWTGKVIDVRHWLDFAASERYRSNGQEKHYYSDSAGKSGGQKAKLAYTILASAIAYQYGLQDESNGADTFRFVMIDEIFSRSDHENSRYAMELFKELGLQLLVVTPMTALHVVEPYISACHFVFNDGEGRNSQVENMTLGQLRQQPPV

SEQ ID NO: 33157 - protein, 122 aa, Candidatus Entotheonella sp. TSY2
MPEGQLDTRHVQAQANATAPNEAMLDHLHSVKLIAVATQIRDTLTHYGPLTIAGLLKHHPLTAGLEELVAYLRVAQAVGATQLEVKESVVVRDRQGEVLLASIPGYLLQATQFPRQLEELAL

SEQ ID NO: 33158 - protein, 271 aa, Candidatus Entotheonella sp. TSY2
MTRDPNTDLSAPTLFDQLRYVRDDASEPIVHDAPNEQPNPDSSTEVLGIQEELEIPGPEEPSNGRLPPEARRALVNLMRQGVILADGKRVLFEALCRYEALIQDHLADMYLRLLIDRQGGVAILLQREVTGDEPDGDDDDDDDEVTSLISRRTLSLYDTLLLLVLRKHYQEREAAGAQRVFVDIDRIEAQLTPFLPLTNSSRSDRRQLNGALQTMKDRRVLTAVRGDAERFEITPVIRYVVNAAFLEEMLDAYHHLAEQAGLSECEEPRDD

SEQ ID NO: 33159 - protein, 705 aa, Candidatus Entotheonella sp. TSY2
MTDRQAVTYADLFSSGQIKLAELSVYNWGSFHGLHRARIDPDGTLLTGDNGAGKSTLADGLMALLLPPGRATFNVAAAQGDRHDRSLISYIRGNNSSAHDGSQTLTKSKREGPVVTALQGLYQAEDGARMTLAALFWMTSASHALADLKRLYLVAKRQLDLEELLHAFGQGNVRALKQHLRNDPFVIACDDRFGEYQETYRRLLCMENRNAPALLSRALGLKKIDDLTTLIRELVLEPSTVREDARTAVAEFDDLVATHDQLLDARQQRDALASLPEIERELSSTQGELQQLIAEQDGLPVYVAEQSHRLWTRKATELSQAVVEAEIELKRIEQAEMDGAQRVEQRHADYLQAGGVRLEIIKKELQQAREQLTAVNQKASEYQQTARVLGLDIRLTETAFLANRQLADAAQDDLEQEKLAARDRLIEAGTQYSELQKQLRALRDEIEEIEARPDSNIDPRFQRLRDDMTEMLGIDREQLMFIGELVDVQERHRDWQGAIERACSSLSTILAVPENRFSLVTRWLNQRHTGLHVRAQVVYAVQGQASFKSDGYLRKLQWREHPYREWVKHYLAKFDLHCVETTDELDRTPFSMTQQGLMHLHQGRFDKQDQHRLDDRRKWALGFSNKARLSLLRQDTVQLEADLSACSEKRTATRSDLEAVDQRARDWEKLTTYQWQEINVPYWQERVQTVEQDLAALEGQENHLA

SEQ ID NO: 33160 - protein, 504 aa, Bifidobacterium moukalabense DSM 27321
MADVRRELERLRPIYETGVLRLLLRNNSMLYVALLRSSFDPLTGELPRDVLEERISRSLSRLIETGDYMLKDDQTPRQASHAIVLELTREGDDEYAWLANSLDVASHRYLYRLTARAHRAIEALNRLEDTTQALSGAQANSIIMEIEHARMQLTADPRERIKLLKKDIRERQRQIDELEHDETIERLTSEQVGDIINVIHNTLRGVPIDLRELALAERDNGDALRRRMQAGAMSVEGILTAYHDEYRKSFRESDSGRRFEDAFQVIVTDEGRQEIDDAVRDIARNPYLDGEPGALLGQVRAELERIYSGIEDVRRQTRASDEAISRLVRQQTDTRYRTMLATLNQLFAKASAEAKTNPNATDRPYHTDTGLAQIATLPTKPAKPMVRNTIAELVDGRPTVEMPDLKAMIEVCGPRLRHMAGLINRNPVMTADGTRVDFAASFNQLPENERRESEIIGFLSALRTENDTAYATWNCISLDGTARTWRTQPILTTTATLDDIIGEK

SEQ ID NO: 33161 - protein, 235 aa, Bifidobacterium moukalabense DSM 27321
MTDEANETTEIERSFPPVEQPALFDGDTGDMSSDARMAAIALKRERYISGELFNLVKDNLEAVERSLNNDMLRLVSNERYHVMYAAPVGGVETNIRSLKTRASLSREDAAMLAFLRIHVLEYENQKTPVADWQVSRDEIRAALATGAGYLAGGNDEEGTTKKIAAAISRMTTYGYLEPTDDDEMLAITPLVPIVLDRRLADEWLGVTAEAMTDDAHAETSESIFDEDTTIDEEER

SEQ ID NO: 33162 - protein, 1162 aa, Bifidobacterium moukalabense DSM 27321
MTGNDMRIVADCWMMESRQIVNWGSYDGYQEFRPSIDAESPITLLAGASESGKSTLVDAQISLLYPTGTPYNKASNSGRSERNDYTYLRGMIGISDGEHGETPIFLRGRDATGTPQAVWGAIVDTYVNRTDGGMLSCGKFLYLSAGDGKDEVRRRYIAWNRKIDPRNMDQYRDTPFTPNMFRKAYPDCSIFPNASAFHAYIWQEMGLSAEACRLLHKIQSADAPSRLDDIFKQGVLDVPEALRLAQDTVDDYDRFNANFHSMEDKAKRVARLQDIQTQYDAYAKHLTQVREYEAVNPNSRQGLETLTLWTRSRMASEVRAGLPAAERKVKQQERDLHEAQERIADLNGQREAVVERIKGIDGGTLQRLNDDLERARRDMRDVRSQRQSIAVKFEGVEGALPSDEASWNAKRDALAQSMETFDERMEELESKRDRLIGERAAANQECAQLRRDYDRKRRQRTRITQAMDEARALIAKAVGLDPTELPYVAELMDVRECDEQWRTAMNVTYAPIAQTILVDGRHERGFAAKVSAIDPSLMTRRTWRFVDVDKSYEFAGNDGWMSSKLQYREDSPFSGWLKKQTASTRLDALCVETIDDAAHERRQVQVDGQIKSGAHGFHGTKGMNPIIGFVNEDYLTELKQQLDKADRRLSDTERRCDMARKSIDLMHAEKNLADLVANMTWSKIDVVGAETLVENLKRRIEQIEGNPELTQLTERRKEIDRLLDEANARFYHAKNEMKLAQATVDAEHAWLDAYEDIEFDDDALSGDVSNTLADAYEGCFGGVVHAEDRPKLIAGGNDEAGEHSFGTRVGHAMERAMRERNAALGKRAGELRTVVEQSMASYLERYAPDDDSVTGGIEDYRFYLEELRSLQMLVTREATDEEYVNSLDKLTKNFLQLNRALTTDQEDVKDQLERINGMLAEQKFGPRGGRLSIDVEFRPIERAFASSLKATLNKLDEWFRNDKDNPDATRKAFASCATLIERIRQELEQVRDVNGIRSYGARNLDPRARSTFYAIVHHDDGPDERISSTGGKSGGALQELTSFIYGAALIYLLGGDMTGRPTYTTLFLDEALIKADGRYTQRALNVLPRLGFQVIVSAPESKTAEILGVSTKAYVAYKDPETSRSFLQELTSENIADQEAELQTETAAGPDQRFRTDVLMQS

SEQ ID NO: 33163 - protein, 484 aa, Paraburkholderia caribensis MBA4
MNLDHSTLDALRIHHPAWRLLRSDHAPLVASFLNRVFIVPNVRAISAADLSEALEDELFALRDRLGADAYPKRALDYLNDWAAAEKGWLRKFYRPGSDDPYFDLTPSTEKAIVWLGSLTERGFVGTESRLLTLFELLRQMSEGSESDPEKRVAELLKRRDEIDADIARVQSGELGLLDDTAIKDRFQQFVQLARELLTDFREVEQNFRILDRRVRERIALWEGSKGALLEDIMGERDAISDSDQGKSFRAFWDFLMSSTRQEELTELLARVLALPAIAGLNPDTRTARVHYDWLEAGEHTQRTVAQLSQQLRRFLDDQVWLENRRIMDILHGIEAKALAVRDEPPGGEMMQLSEAGADIELPMERPLYTPTQKPVIQDIELESGDVDLDAAVLYSQVVVDRMQLAGHIRQALQDRAQVTLRELIESHPLQQGLAELVAYLQLGSDAFKTVVDEGMQDVIVWQTARDEEGPTARRARLQRVIFVR

SEQ ID NO: 33164 - protein, 215 aa, Paraburkholderia caribensis MBA4
MTMEEELQEKTASVDLSTLAVTLLKGVIYREGDERLWGALLDLQVRVRDYMSVLSLELVLDEAEGYAFLRSRAEPAEADTAPKPPRLIARRPISFPVSLLLALLRKKLAESDASGGDSRLILSRDEIVELIRVFLPDTNNEAKLIDQIETHINKVIELGFLRRLKIASGPSSFEVRRILKAFVDAQWLSDFDTRLAAYREQLGGASAGKGGEADE

SEQ ID NO: 33165 - protein, 1125 aa, Paraburkholderia caribensis MBA4
MNERNGAIPQLLELDYLGDDTLAGFRLTRLEVFNWGTFDARVWTLQLDGRNGLLTGDIGSGKSTLVDAITTLLVPAQRIAYNKAAGADLKERTLRSYVLGHYKSERNELTGAARPVSLRDHNSYSVILGVFHNAGYDQTVSLAQVFWIKEGHSQPVRFYVAAERDLSIAADFTHFGSDIAQLRKKLRGAGAEIEDAFPKYGAWFRRRFGIENEQALELFHQTVSMKSVGNLTDFVRSHMLEPFDIAPRIAALISHFDDLNRAHESVLKAKRQVELLVPLVADCDQHGALAAEQERSRVCRDALKPYFAGLKLSLLQRRLQLLADDHARLSVHRERRIEQCDQERTQADRLKLAIVEQGGDRLEQLAAAIHDEERERDRRQRRADRYAQLLAAIGESPAVEESSFIAQRQQVADLREGAGVREADLQNQITEWGVALREGKREHDALAGEVASLKARRSNIPRDQVAMRAAMCAALGLDEDTMPFAGELIQVRKEAHEWEGAIERVLHNFGVSLLVHDTHYADVAAWVDRTHLAGRLVYFRVRPARDPNTAELHRESLVRNVAVKPDSPFYDWLERMLAQRFDYACCQTQEQFRREARALTRTGQVKAPGERHEKDDRHRLDDRGRYVLGWSNAAKIAALEQQMHVLATRLGTLAGQIAQAQGDQAKLRQQLEAFAALNEFNDFREIDWQTTSANIARLIDEKARLEAASNALLELAAQLEAVKAALKESEHALSEVNRELGGIDAKREAAEALREQTEASLTDVDGDTRERLDMLRAEILGEHQLSVESCDNRERELREALQARMDAETKRLERLTERILRNMSTFKDAYKLDTADFDASVEAAFEYREFLARLNTDDLPRFEARFKELLNINTINEIANFTAQLARERETIKERIGLINESLAQIDYNPGRYIVLESQASPDVDIRDFQGELRACTEGTLTGSDNAQYSEAKFLQVKAIIDRFRGREGLSDQDRRWTTKVTDVRNWFLFAASERWREDNTEYEHYSDSGGKSGGQKEKLAYTILAASLAYQFGLEWGAVRSRTFRFVVIDEAFGRGSDESAQYGLKLFRQLNLQLLIVTPLQKIHIIEPFVASVGFVQNEGGRASKLRNLSIEEHLARKVEGTA

SEQ ID NO: 33166 - protein, 331 aa, Paraburkholderia caribensis MBA4
MVGVPHVRIEWREFNHRVLGLQRVPQAVWLDDLDSALGMIGKRADAARFRRLLDQVGLRQPALSPWFRQRPLQALELAEECACLLAAVEWIAQHPRPGIYLRQVDIAGVHSKFIERRRGVLTEWLDLVLPVEAISADRSGSAQFAARYGFLEKPVRIRFRALDASLPILPGTALPDITLDAGSFAALNLPVRRVFITENETNFLAFPPIADAIVVFGAGYGWDALSKAAWLSRCCIHYWGDIDTHGFAILDQLRSRFGHVKSLLMDRATLMEHEAVWGEESDQVRRDLPRLDHAERALFDELRDNRLRNKLRLEQEHVRFRWVETALAVFA

SEQ ID NO: 33167 - protein, 486 aa, Mycobacterium abscessus MAB_030201_1075; identical to SEQ ID NO: 31694

SEQ ID NO: 33168 - protein, 249 aa, Mycobacterium abscessus MAB_030201_1075; identical to SEQ ID NO: 30762

SEQ ID NO: 33169 - protein, 1037 aa, Mycobacterium abscessus MAB_030201_1075; identical to SEQ ID NO: 31871

SEQ ID NO: 33170 - protein, 480 aa, Mycobacterium kansasii 662; identical to SEQ ID NO: 30957

SEQ ID NO: 33171 - protein, 192 aa, Mycobacterium kansasii 662; identical to SEQ ID NO: 30958

SEQ ID NO: 33172 - protein, 1132 aa, Mycobacterium kansasii 662; identical to SEQ ID NO: 30959

SEQ ID NO: 33173 - protein, 386 aa, Mycobacterium kansasii 662; identical to SEQ ID NO: 30960

SEQ ID NO: 33174 - protein, 486 aa, Mycobacterium abscessus MAB_082312_2272; identical to SEQ ID NO: 31485

SEQ ID NO: 33175 - protein, 249 aa, Mycobacterium abscessus MAB_082312_2272; identical to SEQ ID NO: 31486

SEQ ID NO: 33176 - protein, 1115 aa, Mycobacterium abscessus MAB_082312_2272; identical to SEQ ID NO: 31487

SEQ ID NO: 33177 - protein, 486 aa, Mycobacterium abscessus MAB_030201_1061; identical to SEQ ID NO: 31694

SEQ ID NO: 33178 - protein, 249 aa, Mycobacterium abscessus MAB_030201_1061; identical to SEQ ID NO: 30762

SEQ ID NO: 33179 - protein, 1037 aa, Mycobacterium abscessus MAB_030201_1061; identical to SEQ ID NO: 31871

SEQ ID NO: 33180 - protein, 486 aa, Mycobacterium abscessus 21; identical to SEQ ID NO: 31694

SEQ ID NO: 33181 - protein, 372 aa, Mycobacterium abscessus 21
MTTQASGTALGNINFDDLPGVEPDASAPRTAKGPRFDGDTSELPDKACWALQNLVARRYLSKDGQPELWASMIEHRKVLAARLSELDLRLRVFDDLEVAYAEPAPLENPSVYGARVLRREPLGTYASIVALHLAKIARTAHDEHVLVSRDDIHELFANVSHDIDRDEAMLRDRVDEAIKRLSKAEILQRTRDDEHSYTISPVINALMSAQMIEALQRQYEQLQRGGAAPKTPTAQTPPTKKMARPMTTSDAATQQFWLSRLQVINWGVFDGYHSIEFSRRGTLITGSSGSGKSSLLDAISLAFLSSNRRNFNASSDTTAAGSSMGKRTVDKYVRGLWGELKNPGSAPSRCSCAARVGPGRLSPSPTPAPTVG

SEQ ID NO: 33182 - protein, 988 aa, Mycobacterium abscessus 21
MITGLVLKWLAPGSDSDSSSRYYLIDADADIRDLCNAWASKGYAGSVFEGAGWRGHKSERWYLEQLYAAVGIQGSSAAQQLLGKAKSLKSVGGLEQFVREYMLDEPESMAAISEALGQITPLVDARAALAIAQRQRQTLGDIEQIQQTYASDAAQLATVDVVDHHTVRDYVDQQRLALAGPEIDLLDTEITRLGGECDEIQSRQDILTGERDKLLGRIAAADSNLAPLKSELAHARARAEEVSRRRTAYDSALWDLGHEDDIESAEEFEAMRVESLRAVTRINAELEAGHDAYVMAAGALSTARDQLRAASAEFKRVEHLGTPVPPDEDRMRGEIAAALGLTAKDLPYVCELMDLRPGQERWRKSVEKVLRSTGLCLLVPDQHHRQVLRYVNENPMRGYLQMERVIPSGTPRRAEPGTLADCLRLTNPNHECASAAMNLVAGVGDYVLVDSPDEFSKHRRAVTDQGLRKDGDRRAVKDDRRELRASQYIYQGNAGDKRAALSDDVVEAQQAVSDAEKFIGEMDTKREELRSEVVRWSKLHSQYEYWSQIDTDSAEAAVARLQDQYDAMLEANPDLTGLQQQADSYLDEIKRLSERIGALRKQESEHDSRRTRLLDLLDNLSPREVGGHTRSGIEAYVPQLSSSLDVLEPDAYRLELWRQIEKDQSVLRESVTRSRNELNRILNAYDRDFPDSIPNDSENFDEKIHDYVALCRRIDERDLPAAYERMLRLITEQAPTAVLRLHQLAEEEAHRITDQIDRVNSGLGSVEFNRGTRLTLRAEPKALEAVGELNERARRISGRAVAVSMGDEKAIHDQYQDILQLRNLLAAETPEARQWTRDALDVRNRFVLYCEERDARTGEPIRTYSNAGANSGGEQEKLMAFCLAGALSFNLANPETGDNRPVFAQLMLDEAFSKSDPQFAQQALSAFRKFGFQLVIVATVQNTTTIQPYIDSVVMVSKPDGPGVRPVASTRTVPIGELGDVRKAVSAR

SEQ ID NO: 33183 - protein, 486 aa, Mycobacterium abscessus 1948; identical to SEQ ID NO: 30761

SEQ ID NO: 33184 - protein, 249 aa, Mycobacterium abscessus 1948; identical to SEQ ID NO: 30762

SEQ ID NO: 33185 - protein, 1061 aa, Mycobacterium abscessus 1948
MTTSDAATQQFWLSRLQVINWGVFDGYHSIEFSRRGTLITGSSGSGKSSLLDAISLAFLSSNRRNFNASSDTTAAGSSMGKRTVDKYVRGLWGELKNPGERPKQMFLRGKGGAWSAIAVTYSGTDGRVITGLVLKWLAPGSDSDSSSRYYLIDADADIRDLCNAWASKGYAGSVFEGAGWRGHKSERWYLEQLYAAVGIQGSSAAQQLLGKAKSLKSVGGLEQFVREYMLDEPESMAAISEALGQITPLVDARAALAIAQRQRQTLGDIEQIQQTYASDAAQLATVDVVDHHTVRDYVDQQRLALAGPEIDLLDTEITRLGGECDEIQSRQDILTGERDKLLGRIAAADSNLAPLKSELAHARARAEEVSRRRTAYDSALWDLGHEDDIESAEEFEAMRVESLRAVTRINAELEAGHDAYVMAAGALSTARDQLRAASAEFKRVEHLGTPVPPDEDRMRGEIAAALGLTAKDLPYVCELMDLRPGQERWRKSVEKVLRSTGLCLLVPDQHHRQVLRYVNENPMRGYLQMERVIPSGTPRRAEPGTLADCLRLTNPNHECASAAMNLVAGVGDYVLVDSPDEFSKHRRAVTDQGLRKDGDRRAVKDDRRELRASQYIYQGNAGDKRAALSDDVVEAQQAVSDAEKFIGEMDTKREELRSEVVRWSKLHSQYEYWSQIDTDSAEAAVARLQDQYDAMLEANPDLTGLQQQADSYLDEIKRLSERIGALRKQESEHDSRRTRLLDLLDNLSPREVGGHTRSGIEAYVPQLSSSLDVLEPDAYRLELWRQIEKDQSVLRESVTRSRNELNRILNAYDRDFPDSIPNDSENFDEKIHDYVALCRRIDERDLPAAYERMLRLITEQAPTAVLRLHQLAEEEAHRITDQIDRVNSGLGSVEFNRGTRLTLRAEPKALEAVGELNERARRISGRAVAVSMGDEKAIHDQYQDILQLRNLLAAETPEARQWTRDALDVRNRFVLYCEERDARTGEPIRTYSNAGANSGGEQEKLMAFCLAGALSFNLANPETGTTGRSSRSLCSTRRSRNRIRSSPSRRCPRSVSSDSSW

SEQ ID NO: 33186 - protein, 486 aa, Mycobacterium abscessus subsp. bolletii 1513; identical to SEQ ID NO: 31556

SEQ ID NO: 33187 - protein, 249 aa, Mycobacterium abscessus subsp. bolletii 1513; identical to SEQ ID NO: 31486

SEQ ID NO: 33188 - protein, 1115 aa, Mycobacterium abscessus subsp. bolletii 1513; identical to SEQ ID NO: 31838

SEQ ID NO: 33189 - protein, 486 aa, Mycobacterium chelonae 1518; identical to SEQ ID NO: 30761

SEQ ID NO: 33190 - protein, 249 aa, Mycobacterium chelonae 1518; identical to SEQ ID NO: 30762

SEQ ID NO: 33191 - protein, 1115 aa, Mycobacterium chelonae 1518; identical to SEQ ID NO: 30763

SEQ ID NO: 33192 - protein, 486 aa, Mycobacterium abscessus MAB_091912_2455; identical to SEQ ID NO: 31485

SEQ ID NO: 33193 - protein, 249 aa, Mycobacterium abscessus MAB_091912_2455; identical to SEQ ID NO: 31486

SEQ ID NO: 33194 - protein, 1115 aa, Mycobacterium abscessus MAB_091912_2455; identical to SEQ ID NO: 31487

SEQ ID NO: 33195 - protein, 486 aa, Mycobacterium abscessus MAB_110811_2726; identical to SEQ ID NO: 30761

SEQ ID NO: 33196 - protein, 249 aa, Mycobacterium abscessus MAB_110811_2726; identical to SEQ ID NO: 30762

SEQ ID NO: 33197 - protein, 1037 aa, Mycobacterium abscessus MAB_110811_2726; identical to SEQ ID NO: 31871

SEQ ID NO: 33198 - protein, 486 aa, Mycobacterium abscessus MAB_110811_1470; identical to SEQ ID NO: 31694

SEQ ID NO: 33199 - protein, 249 aa, Mycobacterium abscessus MAB_110811_1470; identical to SEQ ID NO: 30762

SEQ ID NO: 33200 - protein, 1115 aa, Mycobacterium abscessus MAB_110811_1470; identical to SEQ ID NO: 30763

SEQ ID NO: 33201 - protein, 353 aa, Mycobacterium ulcerans str. Harvey
MRRQDTIATGGSITGIAARLKQVAVKVDNDPARIRKHIEAEIAALHEELDQLDAGQRPQTDVTDCYDEARAIALQMERLITDIGQYGTMIERATSALDEPIDSNAEYRDRQRQMYSDYQAAWDSQGRDSHRAFLRMINDPDQRAEFEADVAAVAEALPRLDPALCKVMAGFFELVGHQIDEVERIQQRCAQRVKRFTAFGTMEQSRGVARQLNEAIAAAAPCSSRRSPTHAWTSRSRWRGTRSVPSVPSASGSATCPTPSPPNPATPRSTSPASPPSPPRSTRPRCPTCSTTRSPRGLSRYPTPSPCSTPPTWATSSCCGPGPSNSPTPTPPSRPPSASAPWTAVTSKSRYLV

SEQ ID NO: 33202 - protein, 231 aa, Mycobacterium ulcerans str. Harvey
MTLQDDEVDIDFSSLPQVDQNARPPVQRRPRFDGDVSELPDRACWALQHRLTRRYISAEADADVYSWVLEYRKDLAVRLSELDLLLRIVDAADVAFVEQARYESARGIKLLRREPLGTYDSILALHLAQMMRASGGQTVLISREEIHGLFSGVLNDTDRDAVSFAGRIDGAIARLTGLEILRKTRDDEDSYTISPVITAVMTASVITELQQQFEQLLNGGAPAEEEEPEGD

SEQ ID NO: 33203 - protein, 1097 aa, Mycobacterium ulcerans str. Harvey
MFDGYHSIPFSVGGALIAGASGSGKSSLLDAISLGFLPFNRRNFNASGDNTAAGSSAGRRTVDKYVRGAWGQRSDGGTSRVMYLRGDGTAWSAVAVTYASDSGRTVTGLVLKWLTGESRNDSSSRFVLGDGDLDIEEVCNRWASGRFDAGVFKEDWRFSTKVESQYLAQLYAAIGIRASDAAQQLLGKAKSLKSVGGLEQFVREFMLDEPDSLARLPEALKQIDPLVEARELLAVAQKKRKILGDIEQIQQRYASESSDLGIIDLVDAPMVRAYTDHARLAQCPAQIATLDGTVDQLENEYEDVTRSLNLAKAEADSLNAQISGSSANIAPLQSQVTAAETQAEQVERRRTTYEDMLAAQGIEIPDTADEFWNLREELLAQATELLAKVERNREASTDAEYAQKATRIARDDVAKELKRVEHVGSALPEFALAMRDHICAAIKVDAAELPYIAELLDLRPGQTRWRLAVEKVLRGVGLRLLVPDQHWEKVLRFVNETDMRGRLQLHHVRAKFLGAEPAEPEPNTLAGKLFPVDPKHLCAAEAVDVITGAGDHVCVDTPDVFSRFRRAVTDTGLYKDSDRLAVKDDRRPVKLSEYLYQGDVTAKINALTVELTAAEEAYQKARRTADDIAAQRQQWRDRAAACKAICEQYPQWSQIDTETADGHAERLREQYELLMADNPDIEALNARADECWSQIQKLMTRRDSLDERRTRLLELQERLSPAFVSEPLTELLQRYAAQLPVALELLDPEPHRDALFAAIKKEREQLRESRRRSYDELARILNTFDTSFPDAIPNDSDDFDERVHDYVALCRLIDERELPEAYERMMRLVTEQAPDAILTLHRVAEQEERRISGQIDRVNTGLAAVEFNRGTRLTLRATPRHLVAVDELTQIVRSISRRIAAVGLGDKQAILDQYAEILRLRNRLASTAPEDKAWTRDALDVRNRFTFDCAEWDVDTEELIRTHSNAGDNSGGEQEKLMAFCLAGALSFNLASPESDNNKPVFAQLMLDEAFSKSDPQFAQQALHAFRKFGFQLVIVATVQNATTIEPYIDSVVMVSKTEPTGGNARPVASVATRTISEFTSLRQEMRKTAERVPAGV

SEQ ID NO: 33204 - protein, 480 aa, Mycobacterium kansasii 732
MEYEAINSLRERHPAWRLLRAGNATLILSFLGVFFVEDNRGACPASQVAAALDDYVYALNTEIPTENGQQRFPKDARSYLEDWAAPDAAFLRRFYPAGDDEVHYEVTPAFEKAHAWVMGLKGRSFVGTESRLHTVVELLRQIVHGTEVEPDVRLAELRRRRNELDAEIAAVEAGVVQLLDATGVRDRYQQLATTARELLSDFREVEENFRLLDRAAREKIAAWDGSKGELLAELVGSRSQIAGSDQGRSFQAFYDFLLSETRQAELAELLAKVSTLETIEADHRIRGIHHDWSEAADRAQRTVRQISEQLRRFLDDQIWLENRRVLNLVRAVESSALELRDNPPPFGLELDQPGLEIALPFERPLYQVPAAVAVESHLPPATEEVDTDLLFAQTFIDQARLIETIRDVLPENSSALLSDIIAAHPIEQGAAEIVGYLALNDEEVSVDMDDTDETLLEYCDPADPEIAKRARLPKVTVRRR

SEQ ID NO: 33205 - protein, 192 aa, Mycobacterium kansasii 732
MSNEHATASAIIRLMQGVVYRESDEDTWLTLERLGAGVRDHFATIGVDVVVDDAEGYAYLRSRPSEDGDEALPRLVRRRALTYNVSLLLVLLRKRLVEFETTGSEGRLVLTTDQIVEMLRLFQAESSNDARVVDQAETTIKKAAELGFLRPLRGQRDHWEVRRILKAYVDAQTLSDFAAKLREYAGASTSDE

SEQ ID NO: 33206 - protein, 394 aa, Mycobacterium kansasii 732
MLNWGTFDTQVWRFSPATDTALLTGDIGSGKSTIVDALTTLLVPSHKAAYNKAAGAEARERTLRSYVEGHYKSERNEATGKSRAKGLRENRGTYSVILGVFTNHGYDETVTLAQVFQQRESTGQPHRFFVVATKQLSIATDFADFGSDLRDLRKRLRAAGAEIFDEFPKYATSLRRLLGIRSEQALELFHQTVSLKSVGNLNDFVRDHMLEPSDSTERVRDIIAHFDDLTKAHDAVKRAREQLEALEPVVATTAKYDDALTQRDARERSDPQSGSSSQSFGQICWPAKLPSWNRGRGPVAGAGQRQSPASDAHVRTRIPHRRARKSGWRSHRRAGTPRPRGARSGRKTPSCKDFVRRRRLCRWTGSGRRQRGVRSPIRSGIRRASAAGGRETRP

SEQ ID NO: 33207 - protein, 486 aa, Mycobacterium abscessus subsp. bolletii 103; identical to SEQ ID NO: 30761

SEQ ID NO: 33208 - protein, 249 aa, Mycobacterium abscessus subsp. bolletii 103; identical to SEQ ID NO: 30762

SEQ ID NO: 33209 - protein, 1115 aa, Mycobacterium abscessus subsp. bolletii 103; identical to SEQ ID NO: 30763

SEQ ID NO: 33210 - protein, 425 aa, Mycobacterium kansasii 824
MYALNTEIPTENGQQRFPRDARSYLEDWAATDAAYLRRFYPAGDDEVHYEVTPAFEKAYAWVMGLKGRSFVGTESRLHTVVELLRQIVHGTEVEPDVRLAELRRRRNELDAEIAAVEAGVVQVLDATGVRDRYQQLATTARELLSDFREVEENFRLLDRAAREKIAAWDGSKGELLAELVGSRSQIAGSDQGRSFQAFYDFLLSETRQAELAELLAKVCTLETIEADHRIRGIHHDWSEAADRAQRTVRQISEQLRRFLDDQIWLENRRVLNLVRAVESSALELRDNPPPFGLELDQPGIEIALPFERPLYQVPAAVAVESTIPPASEEIDTDLLFAQTFIDQARLMETIRDVLPENSSALLSDIIAAHPIEQGAAEIVGYLALNDEEVSVEMDDTDETLLEYCDPADPEIAKRARLPKVTVRRR

SEQ ID NO: 33211 - protein, 192 aa, Mycobacterium kansasii 824; identical to SEQ ID NO: 30958

SEQ ID NO: 33212 - protein, 1132 aa, Mycobacterium kansasii 824
MSETPSATAALGDTRRVGYRLQHAEVLNWGTFDTQVWRFSPATDTALLTGDIGSGKSTIVDALTTLLVPSHKAAYNKAAGAEARERTLRSYVEGHYKSERNEATGKSRAKGLRENRGTYSVILGVFTNHGYDETVTLAQVFQQRESTGQPHRFFVVATKQLSIATDFADFGSDLRDLRKRLRAAGADIFDEFPKYATSLRRLLGIRSEQALELFHQTVSLKSVGNLNDFVRDHMLEPSDSTERVRDIIAHFDDLTKAHDAVKRAREQLEALEPVVATTAKYDDAQTQRDARERERSAVRLFIAELRSNLLAGEISQLETEGAALWREQDSAKARQQMLTRERESLIEERAKAGGDRIGELERLAREARDQAETRRRARTLFDVAVATAGLGEIAGSAEFAALSALVSTERPRLAAEKRDLDTACADAIGREKELQRKCDHIAQELTSLQQRTSNLPVEQVEVRAELCAALGLTPDDLPYAGELLDVFDEHAQWRGAAERVLRGFALSLLVPPQHYDAVAGWVNGRRLTFHGSGGKVTGAKLVYERVARQRVRLQRSEHDGLLLADCIDVKDGQFREYLINELTKRVDFRCAASLEEFGSQRRAVTREGQVRSGERHEKDDRYRIDDPRRWVLGWANERKIAALRAELAELEAERDATACEQARLSGLREALQERLDALLRLEGFRDWADIDVDEAQSRASDLEAERVRLQAGSSRLEEIARALEDNAKQAEAVANSIEQLTGRLATTAARAKQAELDKNRDDELVANQPHGALAAARESYPALDERLGKNRPKRAAECAETENALAADLHQRIDRLNKELGGYAQSLIQSMLKVLTRWPELRGDMDANVDARQEFLAYRDRIATDDLPRFESEFKEQLNKNAIQELAGFNNWLHRQASVIDERVERINEALGAVPYNPGRFIRLEKEPTNNQDVAQFRSDLRNLTNDSLALDGDQYSEQRFLDVKRIIERFRGRDGYAESDKNWTRRVTDVRNWFVFSASERDVETGAEWEHYSDSDGKSGGQKEKLAYTILAASLAYQFGLEWGAQRSRDFRFAVIDEAFGRGSDVSTRYALDLFATLGLQLLIVTPLQKVHVIEPYVKAIGFVDNPTGTFSRLQTMTIEEYRTRRDGRRP

SEQ ID NO: 33213 - protein, 245 aa, Mycobacterium kansasii 824
MSAGWTTPNDIAARVRRRWDDGSLLRAYANGDRFDPIEVALRGPKPSQVGDDLAAAREWVGALDAGRRDDSRYTLQWQSIGGRQIGRNRLPVRAVVSMDQAWALLGVTTLVRCFDELLVLAQQHPQVRKWIVDNPHRALALAHEMPQLIAAYTWLDTHRNSNRYLREISAPGVDTKFAERHRPVLAAMLAVSSTATGFLAGIGLRCKPGLVRLRPAPSLGLPPRSPSWRCVPRSWRNSRCNHAQR

SEQ ID NO: 33214 - protein, 489 aa, Xanthomonas arboricola pv. pruni str. MAFF 311562
MKHQARIAGYRQLREQPVWKLLAADHAPELIGLLQTVLLDGERRLPSAVLHERLQRQLDALRADELSRELPRTAQAYLAHWLAQGWLERRLPEGAAEEEYELSRAATQAIRFIVGLRESSSSATESRLSLVIQQLVQLAGQTEADPELRLAALREERARIDAEIERVASGRVAALDGKRALERARDLIHLSDELAEDFHRVRDDFEQLNRQFRERIIDDEGARGDVLEQLFNGVDVIADSEAGRTFEAFWSLLNDTQQSSQLDQALDALLARGFARKLDRRERAFLRGLTGTLLERGGEVHTVMQHFARSLRGFVQSRGYLEQRRLNQLLKQAQGEALQLRDSLHATTATGYTQALSAARLRSLSQWRLHDPRLTQVDGRVQAADAADISLDSVGDLVAQSEIDVRSLRRDLHELLGQRPRLTIGDALQQRPAAQGLGSVIGYLSLGTRHGVVIDGQMETVQWEGGDGALRRARIPLVWFTREKRNELD

SEQ ID NO: 33215 - protein, 233 aa, Xanthomonas arboricola pv. pruni str. MAFF 311562; identical to SEQ ID NO: 33146

SEQ ID NO: 33216 - protein, 1355 aa, Xanthomonas arboricola pv. pruni str. MAFF 311562; identical to SEQ ID NO: 33147

SEQ ID NO: 33217 - protein, 489 aa, Xanthomonas arboricola pv. pruni MAFF 301427; identical to SEQ ID NO: 33214

SEQ ID NO: 33218 - protein, 233 aa, Xanthomonas arboricola pv. pruni MAFF 301427; identical to SEQ ID NO: 33146

SEQ ID NO: 33219 - protein, 1221 aa, Xanthomonas arboricola pv. pruni MAFF 301427
MRRHYMVAPRSFDVASELDGFDLDLRRLKARLGEEVAHFDGFAGYAERFRHALGIGNEMALRLLHKTQSAKNLGDLNVFLRGFMLDEPRTFEAADRLVEDFAELDGAHHAVVTARRQVETLSPAREHHAALMALRHSVGELRELQLGVDSYREQQRLALLETRLHELDSQDRGLAGEEGQRRESLDNHEQKLAGLEREQRAAGGEQIEELERERARVERERDERLRRRVQIEQACRQLGTALAAGASGFAEQIAYAQTVLENGKHDASALDEAIAERMGARRDDERRFAEIRAELDALKRAPSSMPAPMQALRARLCEDTGIAEAALPFVGELVQVREDQSAWRGAIERVLSGFAQSLLVDDRHYAQVSEWVNRTQLGTRLVYFRVRRNDALHARTPDARALPGKLQLREHAFTEWLRNELMRRFDYECVDNAAALRNADRAITREGQVKHPGDRYEKDDRHAVNDRKRWLLGHDNRDKLKVFEREAQTLAQRIAGCDADVAALRKQREQDQERQLAAHTLVERDWDEIDVGPKLQRLSDIDEQLQQLREGNSGLRALGQAIETARTLRDQAKRTYEDVRLERAQLARERVRLEQQHAACASRAGTAALTPTQLQGLRERLAALVPLSLDNLEAHFRVVERGLAEQLAESQGRDSRLSAQLLDCFRKYCQQWPEDSGDFTVSLASADDFLARLDRLESDGLPRHEHRFFDLLQTQSKNNLLALQRHTAEAHKGIKQRMDEVNASLEQVPFNRGTLLTIEVSDRRLGEVQEFQQQLRAVLSHQQTEDRALAEAQFSTLRALVARLGAQEPDARRWREQVLDVRQHVEFIGVELDAQTRAQVEIYRSGAGKSGGQRQKLATTCLAAALRYQLGGEDGELPRYCAVVLDEAFDKADNEFTALAMNIFENFGFQMVVATPLKSVMTLEPFIGGACFVEISGRHNSGVLLIEYDEQAQRLQLPERSRGDEAAAAVTEQAVSAAQGEDAARSTQGETRMDSTAAVSGAEGAALQDVPAQDDVAAKAGRRASKVAPASTPAVRAAPKPAKTAAASARAGSGKSQRRRPQGARPRPPNLHQPGVHRLQRANRASRQRRPNRPGRQRTPERHPGARPRPPNRLPGRTRPRQQRQRRKSPLPSRRWRPGAPPHRWVAQPRQPRQLRRVARPGPYQPSPRQPNPWPRRVLRPRADLQASRAENAERATWMPASPRCGRRRPGQQRSKAGARR

SEQ ID NO: 33220 - protein, 504 aa, Corynebacterium falsenii DSM 44353
MSVEARALSAKRICEESPVVRLLRADNAPIVLAVLGEIFPHGSVQVPASTTYEYMAGAFDVLRNAGFTIRRTPAEYAAEWIKAGWLIRRAGSPSTGETLEPTREGLQALQLVEEVDAGRSTVTASRIQSITTALAQLDRETDPDIETRRASLLRQREAIDRQLEQLDSNVVDVLPQSAARERVQDILNQAAGIPADFARVRQELERLNLDLRRSLLDSDGGRGTVLEQIFEGVDLISQSEAGRSFNGFFEVLVDNETIAYVEHYIDNVAKRVAAELSAQERERFVTLLTTFESEAYSVNSAITSLARNLRHYVASEQFAEDRRLIELIRTARKYASEAVEAADLKAFQKMATPLMRMGMEVRSVGALQLRNPGAEVVEEPLVEYSSGSETLEGLLEAVRESEIDFAELESCVAEVLEEQPEASIADVLERHPATQGLASVVGLIILVRKAAHHAEMEELGEVGMLGGVGEKNTETVSWDEEGTTRRAVIPRLVFVRERRGDERE

SEQ ID NO: 33221 - protein, 207 aa, Corynebacterium falsenii DSM 44353
MSESNSPEQQIFEGDTGTLSLDSRRALARLLKGPLLTAQGEPHLWNAVVTDTAAITSALHNVFLDLVLDETDQIAFTRMVEPAEGVTIPRVLRTETLKHIDTLILLQLRQELALNNPGERVIVDADELRQQIWSMRNPDNRDEAGFNKRFDAAMKRISDTFSLLKKTETPQRYEISRALRHVFDVKTTTSIIEEYRRLAEQGRGVDL

SEQ ID NO: 33222 - protein, 1108 aa, Corynebacterium falsenii DSM 44353
MYGQFRLEKIQLINWGTFNGHFDIPVTRRGFLINGESGTGKSTLVDAMSTVLVPPGHVRFNAATQYEGRKKDGRNLIGYVRGAWKTIEDAQTGDIRDMFLRPRATYSVVGLTYRSIEEGGKECTYTLMAIYYVRAGVMRDDEIVKNFAVAPGAVDLRRLVAHLGHGVDKKGLKEELEEARWFTTYSPFAAYFRSLLGLYSEEAQLLLHRTQSAKSLGSLDQLFRDYMLPKPQTFDLADVAVEQFGDLREAYRRVDEVKQQIDVLEPLRAQFNARSAAVGKKDYASKLRENVTSVRDLRVHEALTAAIEITETALRDQKEALAQADAELARVRDTERRLYARMTATQTDDTARLQLAIDSIKEKLVTVRANRARAQGYCETLGTVELTDGASYREILAGVAAFLQDYPAELEAMVAGGDELASTIRTLQEQGAGLHQDITSLASRRSNIARPMIELRTRMCEELGLSPSLLPFAGELIDIKREEANWEPVIQRLLRPLGSTLLVPENYRRDVIAWVNSHHIGQRLTLRSVPQDQVEPQKVSNRRSLSLKLQVVDHPMQQWLRAHIQDYWQYICVDSVEDLEDHRIRAVTMEGMVRYPEDRTRSRRYDKDDRFALGDRRQYCLGSSNDEKLELLRSQLNEVTAEIQSLQGQRERLSAERSQLQNRQNAGNELQMLRWADIDVRSVEEQLSRLNEEYDEALSDPEHAQLRAQHERASEQLRQAEVARDGELTRRSSLEDHLQKLHGERDRITLTEDIDQDVRRAISERIDAKGRNRSAENIRTYAEEVDKDLETEIARAEQRIDTANVAISRILSEFLRRWPSELADLAAEPTFAGEALALLDHLTSERLGEFRRKFLELMNDTATRNLSQINADIRRAKAAIDRRLEPINASLSKSQFAPGRFLAIETRERRGAEVIQFLADLNEAVSGGLNTTDEALALKRYHVLAKLLERLGSRESGDRRWRSAVLDTRRHVSFVGNEVSPEGETVSTHVNSASLSGGQAQKLVFFCLAAALRYRLADAGAQYPTYATVVLDEAFDRADAAFTRMAMDIFVAFGFHMILVTPGKQVQTLSRYVDGVAIVSLDTRDDKPQSLITNVTMTTDKDGGDEDA

SEQ ID NO: 33223 - protein, 420 aa, Corynebacterium falsenii DSM 44353
MRMPSSPRPAGSVNSAGSMLLPSEIRERCRRHIERHLRLFIADATPDSASSIDFSAPTPVPAPERTVTVGLKPPNQKEAVEDLEAVRQFVASWQGYPGVEWGQRRWNRVGLGTQELPVRITLVGDEIVEVAGATEEIHRLREAARLLAQVSPDPTFRAHVEATVKQWRRADINPLVRVCRWALENPYDDVPFRQWDVPGVDTKWIERNTRAVRALVNIPAAARPSVRVSVRLLDPELQPEGGRLPQYLRDINVPLADAARMFPEPVRVIVVENQLPFQLLPQAKPGSRVVAVWGSGYQAPALVAGLPWCREALLWSDLDADGFAIVNGIRAVLPDAPSICMDSETWDAFEKFSVESVTSGERGETLVASRAVNPDRILDRLTPAEQATYQRIGTLRLEQERLPVRHVLAEIARHWPDIFE

SEQ ID NO: 33224 - protein, 450 aa, Pseudomonas aeruginosa PA38182; identical to SEQ ID NO: 32505

SEQ ID NO: 33225 - protein, 249 aa, Pseudomonas aeruginosa PA38182; identical to SEQ ID NO: 32506

SEQ ID NO: 33226 - protein, 1101 aa, Pseudomonas aeruginosa PA38182; identical to SEQ ID NO: 32507

SEQ ID NO: 33227 - protein, 393 aa, Pseudomonas aeruginosa PA38182; identical to SEQ ID NO: 32927

SEQ ID NO: 33228 - protein, 486 aa, Xenorhabdus cabanillasii JM26
MNFRGLQAKYSRLFRDNEAWKLLRADNAPYILAFLSDLFSENSEVPFSQARISLDEELIRFRELDIWKTERSAGTYLNKWIKEGWLREMDDVLTKTDASEIAVRFVQELDEHNSGTTASHLRIVQDAVRDFAVAINSNVNERITLLKSRISEIQREIDALHSGVVTELTVAEQRERIREIYHLASILTGDFRRVEDEVRRLDQDIRIQIIEEDSTKGNILLSVLEKENLLSQTDAGSAFESFFLLLCDQHRTTELREQLHSILSRPVAKHLTAQQQQFLNRLMRELNRESERVFQIRRRIEESLRAYIESGYAQENRAVERLLNRLEKLAVELKNAGCNLQTETTLSLPTGTATINSPDSMQLKLPDEKLNTSGVEENLNSKVPSTQMLDCLDTVQVRLIAEKILITLKKYGPMTIASIVVHNPISTGLEELVAYLRVAKSIGVVSLEENESVEIKDKQGVHLRASIPTFILSADLFPDNLDELVL

SEQ ID NO: 33229 - protein, 283 aa, Xenorhabdus cabanillasii JM26
MDEYKKETGFFDQLIKNHTQSERSSNTPDTELNADFSFEEVLPDDHILREDNRHSDILNDTVNNKGMPVEARQVLVTLLRHGVILSSQKIKLFASLCRYQNDIREYLSEIYLKLILDERAGVAFIANINDEEDKKSLGMDDDEETLSIISRRTLSLYDTLLLLVLRKHYQDRESSGEQKIIIDIERIESNLTPFLPLTNSTKSDRKKLNGALNKMVNKKILSSVRGSDDRFEITPIIRYVVNAEFLEKMLADYLNMANEKGITSGKKSSGINDDGETGHDYVN

SEQ ID NO: 33230 - protein, 1131 aa, Xenorhabdus cabanillasii JM26
MMMVKQVMTMLTNSLMHTNQIRLAELSVYNWGSFNGLHTARIDEVGTLVTGDNGSGKSTFIDGLMALLLPAGRATFNVAAAQGDRTDRTLISYMRGSFGSAHDGASTRVRSKRESAVVTGLRALYRSDDGTEITLAALFWNSKSTNSLSDVTRVYAIARRNLTLKEVLDAFGEGNVRALKQWLRTDPAITCCDDRFSEYQELYRKLLYMDNKNAPALLSRALGLKKIDDLTELIRELVLEPSTVKDDARKIVGEFSDLVAIHSQLVDARAQRDHLAKLPELNASLEKSIKDLENLTTEKNELPAYLGEIFAQLWNEKIIEIEAQLQNIHQQIEQAEIQERDTHGLVERRHEEYLQLGGTKIESLRKEIQHTKDQLKRIIRESLQYQDNVKALDLPSTLEHTVFVQNQSTIASRSANIQAEQEEYEQQFGAISGEFSQLQGKIKHISQEISEIESRPNSNIDVRYQQLRDELVNSLELNKDDCIFIGELIDVQEHEKAWQGAIERALGGLRTTLAIPQHCYPMVTHWLNARHTGLHVRVQVVNDIQDNVVEFKPNGYLRKLVWREHLYREWLKHYLLRFDLQCVDNTEELDKTRYSMTQQGLMHMDKGRFEKKDQHRIDDRRRWYLGFSNKSRLAILNHDKNNFIQQLSAIEKQVKEAREALNSIVNTKILLEKVQNYRWDDINAPYWHDKLLTLEKDLEVLEQSSDSLEKAMERWKLAKEQLFQIQSMLKGLNEQSGAVNSTLNVAKGELRKAQAKASKGISDTTRQWLTTRVGKLYADVLDRESELVSQIEEKLEYQLESSRNNKNRAEKSSVSIMASFRSHEKWQIYAVDWQTDISSLPDYLNHLQQLESEGLPNLADKFIERLNKHATQSMATIKTKLESEREDILERIDIINQVLKRTEFRSGTHLRLGSKREKYPHVQEFDRLLLKVLSKVTSDDHEERFRELSNVVFILDKASASGTFTTLESLRLLDPRYQIAFYAEEIDAKTGEVRDVLESSSGKSGGEKESFAATIVAASLAYVLTPDGYDRPVYCTVFLDEAFSNTAEPVSRRVLRVFRELYIHVNLITPYKNLNSARESARSLLIAERNQENHDSHLCEVTWEEIDRIMDEEKRNKLEAEMHEFGIKIEN

SEQ ID NO: 33231 - protein, 399 aa, Xenorhabdus cabanillasii JM26
MQKTPHTYSWGLLPTQVKEIVRKREWNNLSSLKARLLGAKPFPIRIGLKPPSGAFALSDLTHFQRVVSEWKSFPYQEMVLWSSKKFRELSEQVIPILVVLESMQQLIKFLGRDAIRRSVIWERNMRPFLHIDEVLYPALVKNIDIVEKITLKEAELLAKLLPQLKQGLGKGQYLRALPIIGIDTKFLENHLLLLEELVDTLHGGAVSEVGGLVDWLGCQTNPKGWLTIRPLCPHVINALGGLPILQLPYELLKQYELPASNILVVENLQSGLALPDMPDTVAVIGGGKNIAWMDALWLKKKHVGYWGDIDTWGLTTLSDARGKCTRLESIMMDINTVKIHEDRMGIEDTPTQIVPDFLSEGETNLFNGLISGRFQSSRLEQERLSSDYIKHQLSVWLTK

SEQ ID NO: 33232 - protein, 489 aa, Stenotrophomonas maltophilia 5BA-I-2
MKHRERITRYRHLREQPQWKLLAADHAPEIIGLLQGLLMDGDRTLPASVLNERLQRALDQLNGDELSRELPRTAQAYVAHWLAQGWLERRLPEGADQEQYELSTQALQAIRFADSMEQARVAATESRLALVIEQLSQLAAQTEADPDARLSALRDERDRIDAEIARVSAGRVTALDGKRALERTRQIIGLADELTEDFRRVRDDFEQLNRDFRERIIDDEGERGDVLSKLFEGVDVIGESDAGRSFQAFWRLLNDAEQSAQLDAALETLLARGFARRLDRNERNFLRGFTSTMLERGGQVHDVLQNFARSLRGFVQSRGYLEQRRLNQLLKQAQSEALALRDDFPAQRAIGRDLQLTTSRLRSWSQWKLHDPRSAQVDGNVEYNDAASISLESVGDLVASSEIDFRTLRRDLHDLLDRQPKLSIAQALSQREAPQGLGSVIGYLSLGTRFGSVIAGEQELAEWRGGDGQIRRARIPLVWFTQERRHELA

SEQ ID NO: 33233 - protein, 233 aa, Stenotrophomonas maltophilia 5BA-I-2
MSWHEDPIDAPHADLAEDAYQAEPVATVAQPRRGNDVYYMGDTGRLPLDARRALCQLLIGPSIDQLRHAKLWPALIRSEAGIRSALSDLFLELVLDRDSGVAFTRQADTEDVDAPVLLRTSPLTFIDSVLLLYLRQQLGEADARGNRAVVADAEMAEALAIYEKNLSTDRAGFNRRVASAVQKMKDNHILTRLGGQEDRHEVSPALKLLFSAEDVSQLSAVYRQLRETPAAEA

SEQ ID NO: 33234 - protein, 1126 aa, Stenotrophomonas maltophilia 5BA-I-2
MAISKHTPALFNEGLPDPRLQQFRMRRLQVHNWGTFNGLTEVPIAERGFLFVGRSGSGKSTLLDAMSALLTPPAIVDFNAAAREAERSGRDRNLVSYVRGAWADQQDSGTGEIATQYLRKGATWTALVLEYRAGDGRVVSLVRLLWIAGSSTSAGDVRKHYMIAERPFDIAKDLGGFDLDLRKLKQKLADVHHFDTFSGYAERFRHLLGIDNEMALRLLHKTQSAKNLGDLNVFLRDFMLDTPKTFDAAERLVSDFAELDGAHQAVVTARRQVETLQPAREHYGDLQAMSRRRGDDEALKLGIDSFRESRRQLLIEARLREMDTRDRGLLGEEAQRRAALDNHTERLAELELQRRQQGGERIEELEREQGRAEAERDRRLAKQAQARDAAQKLQAALPEDAHGFAELVEQAQSELEDRQRASSALDDAISERLGGKRDDERRFSEVRGELEAMQRTPSSIPAPMQKLRARLAEETGISEAALPFVGELIQVRSEEQSWQGAIERVLGGFAQSLLVDDKHYNDVAEWVNRTHLGMRFTYYRVRRNDDAFAREPSAKSLLHKLELRDHVFESWLRRELGKRFDYECVDAKQLRNVDRGITREGQVKHPGDRFEKDDRSAVNDRRRWLLGFSNRDKLAVFEKEAQELAARIASCDTDIARLRSQRDRDNERRLACHQLVGISWNEIDVAAPQQRLADIEASLHALREGNADLARIAQQIDATRADIEQARRTYEDTRVERGQLVRERDRLDRARQQSRALVLPALAEDQEAGLAERLQEQGPLSLETLEAHMRQVSNALNEQLSSSQQDVNRIENLLLGCFRRFIQQWPEESGDFTVSVASAEDFLARLERLERDGLPQHEERFFDLLQNQSKNNLLALQRHSAEARKSIGQRLDEVNASLEQVPFNRGTLLTIELNDRRLPEVQEFHQQLREVLSQQQTEQRDLAETQFTVLRQLVNRLGSQEGEDKRWREVVLDVRLHVEFIGVELDVETRQQVEIYRSGAGKSGGQRQKLATTCLAAALRYQLGGADSQLPSYAAVVLDEAFDKADNEFTALAMNIFDNFGFQMVVATPLKSVMTLEPFIGGACFVEISGRHDSGVLLIEYDEEGKRLKLPERSRQQADEPEEAEA

SEQ ID NO: 33235 - protein, 493 aa, Mycobacterium aromaticivorans JS19b1 = JCM 16368
MDDDSTLSAVDLLDINREIQGSPTIRLLATLNLGGYATLMERHLSGGEISETELVVRLERDLDELGRPGGEQSGLGLIKSWASQGWLHRVADQRSGVERNLCYLTQDARRALDFLRGLRREDTIATGGSINGIAARLKQIALRVGNDPIRIRAGIQAEIAALHAELDALERGEELDRSADVDMTDMYDEAHAIALQMERLITDIGQYGTMIERATAALDEPIDSNLAYRDRQRQMYADYQAAWDSQGRDSHRAFLRMINDPDQRAEFEADVADVAHALPALDPALRRVMAGFFELVGQQIDEVERIQQRCAQRVKRFTAFGTLEQSRGVARQLSDAIGAARALLKSSLTDSRLDIELPLARHAISSVGALSFRIGDLSSPRPAQASEGELDLTSFAALTTQVDAPAMSEMINTALDAGRSVSLPDAVQMLDAAYLGHVIVLWSWALKQPSQTDPASNTPVTVRFQSLDGRDREMEVPHLVFTEPISSLLGASA

SEQ ID NO: 33236 - protein, 239 aa, Mycobacterium aromaticivorans JS19b1 = JCM 16368
MTNDISDVDITAFSSLPQVDQTARTPNQRRPRFDGDVSELPDRACWALQQLLTRRYISAEGDADLYSWVLEYRALLSVRLSELDLMLRVVEGGYEMGGVAFVEQARYESARGAKLLRREPLGTYDSILALHLAQMSRAAGGQAVLISREEVHGLFSGVLNDVDRDTVTFSARIDAAIARLAGLEILRKTRDDEDSYTVSPVINAVMTASVIAELQQQFEMLLSGGTSPDRNEQETALDG

SEQ ID NO: 33237 - protein, 1123 aa, Mycobacterium aromaticivorans JS19b1 = JCM 16368
MAEQFHLSRLQVINWGVFDGYHDIPFSEGGALIAGASGSGKSSLLDAISLGFLPFNRRNFNASGDNTAAGSSAGRRTVDKYVRGAWGQRSDGGASKVMYLRGDGTAWSAIAVSYRSNTGRTVTGLVLKWLTGESRSDSSSRFVLADGDRDIEDVCNRWAAGRFDSGVFKDDEWRFSTKVESQYLAQLYATIGIRASDAAQQLLGKAKSLKSVGGLEQFVREFMLDEPSSLTRLPEALKQIDPLVEARELLAVAQKKRKILGDIEKIQQRYASESSDLGIIDLVDQPMVRAYTDHVRLTQCGPQIQSLDATIDQLGNEYEDVTRQLNLAKAEGDSLNAQISGSSASLGPLQSQVAGAEAQAEQVSRRRAAYETMLAAQDIDIPDTADEFWNLREELATEVTELLAKLDRGREASTDAEYAQKAARIARDDAAKELKRVEHVGSALPEFAITMREHICAAVGVDAGELPYIAELMDLRPDQSRWRVAVEKVLRGVGLRLLVPDDRYSAVLRFVNETNMGGRLQLHHVRASLVGAEPVDAEPNTLAGKLFVVDPTHPCAAEAADVIAAAGDHICVDTPDVFSRFRRAVTDTGLYKDSDRLAIKDDRRPLKQADYIYQGDVRAKIDALTVDLANAEELYQQARRKADDIAAQRQQWRDRAAACKAICEQFPQWNQVDSDTADGHADRLREQFELLLADNPDIEALTARADECWEEIQTLMTRRGAIQTRRDDLDARRTQLLELQDRLAPAFVSEPLTELLNRYAALVPVALEVLNPEPHREAVFNTIRREREQLRESRRRSYDELARILNTFDTAFPDAIPNDSDVFDERVHDYVALCRHIDERELPDAYERMMRLVTEQAPDAILTLHRVAEQEARRISEQIDRVNTGLGAVEFNSGTRLTLRATPRSLTAVAELTEIVRAISRRIAEVGLGDKQAILDQYADILRLRNRLASTAPEDKAWTRDALDVRNRFTFDCAEWDVRTEELIRTHSNAGDNSGGEQEKLMAFCLAGALSFNLASPESSDNKPVFAQLMLDEAFSKSDPQFAQQALQAFRKFGFQLVIVATVQNATTIQPYIDSVIMVSKTEASSRNARPVATVVSKTISDFTTLRAEMRSSAARDRVPAGV

SEQ ID NO: 33238 - protein, 300 aa, Xanthomonas axonopodis pv. glycines str. 8ra
MTREALAQKVAWNEFNDFIEKRFAREYAVRLVADSAERHRGQINEALEQVRALDGEQRALVDAHLLQRAPWLEQTTQGRSPMLWLADRIESMVEAACGLKLPMLRSEMNNYVRRFTSLLRQALSLDYGAESPLGRTMTWLKERPEPGREGLLDVLALRLATSEIRIPGGVLRWSVRDRETEAVAQAPLVVDETSRLNALLRRAEAEAFAFSDQQVLQGLLPHLREGPITLAALPVDTAEDAVLLLHAVGAARSTQGRRLLQARKTAGQVCTPYFQADDYELCAEPINGIGMSPGHTSEEH

SEQ ID NO: 33239 - protein, 159 aa, Xanthomonas axonopodis pv. glycines str. 8ra
MLVHDSDARLLRLYPPGEGGGDDEEDGVRRLRARLSRDFVAAVIALRFLYTEALTGRRTLVDERLAISLEELSQTVVSLLAHKLPNAVSERMALLRELRKHRVLYFVEGDDAGDMQMGLAVLRPVMSFVSDEALEEALRTVGRKIPAAPAIQAALEDGA

SEQ ID NO: 33240 - protein, 1253 aa, Xanthomonas axonopodis pv. glycines str. 8ra
MKIAKLLTWHWGSLEDREWPFADAVLLTGESGSGKSTLLDAIQTVLTAAHQHVVQFNIGQDESTQSRRGGKEPRTLAAYALGQQADGVYLRTRSTSYAGIVFEASEHAGEQVEPFTALVGVEAFEDGRRAVLQGTPQFFIVRRTLSLDHLARRVGEALAPSPLPLKELYVQLQHRLQAHAEKAVAVVQRFPDKGGYLQHLYGALTGKTAVGEHDATRAAKSLVKAMAYKELGNVNDLVRDEILEPHDFSKDLDKMRELMRSIASLKLEAERLALNLERLGAASASADQALDEARRFVTTTIAHALRTRSEAQDELASVQRQIAAQGRKQAQLQEKLASLGAQEDQLREQLRVVDKRLDDSDVAGEKQALENQIRLHSDQFRLHWGRVQEVVRGISAMATQLEQLMALDLSVVPALAVAVEVLRPAALRILQSWPAMADAYGRSATLDVVLPAFELEAFDAQLAALRQGIHDDDASVQGAVLQALTDVNMQLNQLKDDIEQCDAELRRLQSGRVQGPKDAHDAVALIEREIPSAHPHLLAQLVEPSPGTRWQNAIEGYMGGDRFAIIVEAGMEAQCARLVKQHYRIRSPKVVQGRKAMEDTEGRQLEARSVLHELICQHSVAYAFLLAQYGRVRKVNTEEELARTPQGLMEEGLGSRGYGMFACRAPDGELAFGEAARQRRRQWCEDELKRLASQTRVLDALRQSLLAITRMFNGAVFSPLTPLVLAVLESQVQHAHADQALKALDLSAIDALLAEQSELKARISGVTRQRDEELKQVGATDKEIAELRRREKVLIERLPDLEIACTNATVWASRFVGAVPALATEAQLLEESWKLAGELEISVDALRHRVQSLRDGLPRTLRELAQAVGVYLSGARDDSERVVWVDAPRSVDRLEELLPLVERTRAAIFEQTQRQRAIGLADNARALREAEGQFNHVFTSSFCFKVRDDVKQGALTLQRLNRHLQDIRFGSDTFRLEWDWVPRMQKVQEFFEAVEGAVEGLEHDGGSIFNSSMLTDEQHATAKEIRGLLLANDQGASERALRELADYRNYRRYDILRTSPVGTTRLSTWGTGSGGELETPFYVVRSAVLAHALGHFGRDRREAPALRLMLSDEAFSKMDETRSRNVLQFLSQTLGLQLVVAMPTSKSGAVKPEFDKEFTFSKVMARRAGEGLQELFISEAQEKTFNRPALARLWGTHAEQAREAARAHWQAAKLVAQVPQPTMPLASPSMELQVPDPVAEESEAHQANSGPRP

SEQ ID NO: 33241 - protein, 393 aa, Xanthomonas axonopodis pv. glycines str. 8ra
MLLAKVERSTGQGPVRLLVDRKVAPELHDAVDADQVQLLSMQIDDLCATGWVVLLLEAPRAFAGFCDRRPRLELRDFDALAAWADYTPQAQRWRQQWRTHLAAHWAAYPQEAPVEPASVLDYLTRNPLIPVEGLPVEEATYSLTVLIELCRLGQTMALREASARAFQGRSKVLDHREELLRLLGSSAGQFTEAPIQLLLAPPSSRKLTDAIDGETRALTEVLFIENLVTFEHMADARIPGWESSLLVYAAGFRGSARRLRSRIGCRLYLREPAFAAWLPVIEAWLFGSRDDDRNLPTVSVHFFGDLDYSGMQILASLREVFPKARAWHPGYVQLSSLLVVGGGHLPEMATKAQQVDPGHTGCAYADDELLPLLRSKGRFIDQEALDFSDIKLK

SEQ ID NO: 33242 - protein, 489 aa, Xanthomonas axonopodis pv. glycines str. 8ra
MKHQARIAGYRQLREQPVWKLLAADHAPELIGLLQTVLMDGERRLPSAVLHERLQRQLDALRADELSRELPRTAQAYLAHWLAQGWLERRLPEGAAEEEYELSRAATQAIRFIVGLRESSSSATESRLSLVIQQLVQLAGQTEADPELRLAALRDERARIDAEIERVASGRVAALDGKRALERARDLIHLSDELAEDFHRVRDDFEQLNRQFRERIIDDEGARGDVLEQLFDGVDVIADSEAGRTFEAFWSLLNDTQQSSQLDQALDALLARGFARKLDRRERAFLRGLTGTLLERGGEVHTVMQHFARSLRGFVQSRGYLEQRRLNQLLKQAQGEALQLRDSLHATTATGYTQPLSSSRLRSLSQWRLHDPRLTQVDGRVQAADAAEISLDSVGDLVAQSEIDVRSLRNDLHELLGQRPRLTIGDALQQRPAVQGLGSVIGYLSLGTRHGMVIEGQMETVQWEGSDGAVRRARIPLVWFTREKRNELV

SEQ ID NO: 33243 - protein, 233 aa, Xanthomonas axonopodis pv. glycines str. 8ra; identical to SEQ ID NO: 31977

SEQ ID NO: 33244 - protein, 1340 aa, Xanthomonas axonopodis pv. glycines str. 8ra
MNSQSNLSPAQPGASLFAETLAEQRSQQFRMRRLQVHNWGTFNGLTEVPIAQKGFLFVGRSGSGKSTLLDAMSALLTPPSIVDFNAAAREAERSGRDRSLVSYVRGAWADQQDSASGEIATQYLRKGATWTALVLEYANAHGQTVSLIRLFWIAGSGNAAADVRRHYMVAPRRFDVATELDGFDLDLRKLKARLGDEVAHFDGFAGYAERFRHALGIGNEMALRLLHKTQSAKNLGDLNAFLRGFMLDEPRTFEAADRLVEDFAELDGAHHAVVTARRQVETLTPAREHHAALMALRHSVGELRELQLGVDSYREQQRLALLEERLQELDNQDRGLAGEEGQRRESLDNHEQKLVGLEREQRAAGGEQVEELERERARVERERDERLRRRAQIEQACRQLGTALAAGASGFAAQIAHAQTVLDNGKHDASALDDAIAERMGARRDDERRFAEIRAELEALKRAPSSMPAPMQALRARLCEDTGIAEAALPFVGELVQVREDQTAWRGAIERVLHGFAQSLLVDERHYAQVSEWVNRTHIGTRLVYFRVRRNDELHSRRVDPGALPGKLQLREHAFTEWLRNELTRRFDYACVDNAAALRNADRAITREGQVKHPGDRYEKDDRHAVNDRKRWLLGHDNRDKLKVFEREAQTLAQRIASCDADVAALRKQREQDQERQLAAHTLVERDWDEIDVGPKLQRLSDIDEQLVQLREGNSGLRALGQAIDTARTLREQAKRTYEDVRLERAQLARERVRLEQQQAACAGRAGSATLTPTQLQGLRERLAALTPLSLDNLEAHFRVVERGLAEQLADSQGRDSRLSAQLLECFRKYCQQWPEDSGDFTVSLASADDFLARLDRLESDGLPRHEHRFFDLLQTQSKNNLLALQRHTAEAHKGIKQRMDEVNASLEQVPFNRDTVLTIEVGDRRLAEVQEFQQQLRAVLSHQQTEDRALAEAQFSTLRALVARLGAQEPEARRWREQVLDVRLHVEFIGVELDAQTRAQVEIYRSGAGKSGGQRQKLATTCLAAALRYQLGGEDGELPRYCAVVLDEAFDKADNEFTALAMNIFENFGFQMVVATPLKSVMTLEPFIGGACFVEISGRHNSGVLLIEYDEQAQRLKLPERSRGDEPAVADATDAAPSIEAAAESAGVQGAASADGMATNGVPMHTASPATEETPPAAQETQTGQRKPAVATTSKQNKTAKTASSTRAAAQPQAKRPKKSPSRTPALASKPASDKRSAGVPAVSSGVASRSTVGKTTRSSKTPGKPIAATSASNATSRKVAAASAALKTAAAKPRATAASTGQPARGAGKTTSTRAVAKPSPATTRGAKAGAPRSRGKR

SEQ ID NO: 33245 - protein, 450 aa, Pseudomonas aeruginosa VRFPA06; identical to SEQ ID NO: 31994

SEQ ID NO: 33246 - protein, 249 aa, Pseudomonas aeruginosa VRFPA06; identical to SEQ ID NO: 32020

SEQ ID NO: 33247 - protein, 1101 aa, Pseudomonas aeruginosa VRFPA06
MKQALLWRDSETFILTSIELYNWGGFQGYHRAEIDPSGTAVIGPTGSGKTTLVDALMTLLCANPRYNLASTGGHESDRDLVSYVRGVTGPGDGGIEQSHIARQGKTVTAIAATLERDGAQVRLGAVLWFEGTSSSASDLKKLWLLSESPEQTLEHWLSQHHAGGMRALRQMEKDGTGIWPYPSKKAFLARLRDYFEVGENAFTLLNRAAGLKQLNSIDEIFRELVLDDRSAFERAAEVAGSFDDLTDIHRELETARKQQRSLQPVSDGWERYQVLQEQLHDKQALEGILPVWFAEQGYRLWLAETNRLEKEYKKAELDQEQCKSQLEAQKGVVDQHRQRYLRVGGAGIDQLRERIADWVRECDKRSLKAEQYQLLAKGLGLADELSAAALKENQQHIAARLEILDQQITDARQKAFDAGLVQQELNGRLQTLQQEGAEVEKRPGSNLPGQFHAFRSDLAQALGVNESALPFVAELVQVKPEELDWRGAIERAIGSHRLRILVPQDSSQAALRWVNQRHNRLHVRLLEVQEPTSRPVFFDDGFTRKLTFKEHPYREAIKALLADNDRHCVESPEQLRHTPHAMTAQGLMSGKERFFDKQDQKRLDEDWLTGFDNRDRLAFLAEQIREVNEQLEPAKLALDAAQGDVRQLETQASLLNRVKELQFEDIDLPGAQSQLESLRTQLATLTRPDSNLAMIKVELDAAEALQESLDQQLRQLIEQYVQLKTQFDQAASATRKAYNSAEKGLNDTQRELAQAHFPTLTADDLGDIVELERKHTRELQGQLKALGEKLGDQKSELAKRMSDALKVDTGALAEVGRELVDVPRYLERLRVLTEEALPEKLKRFLEYLNRSSDDGVTQLLSYIDHEVSMIEERLDDLNSTMQRVDFQPGRYLRLVAGKVIHESLRTLQRAQRQLNSARFIDDEGESHYKALQDLVGLLKDACEHSRNQGAKALLDPRFRLEFAVSVIDRESRNVIETRTGSQGGSGGEKEIIASYVLTASLSYALCPDGSSRPLFGTIVLDEAFSRSSHAVAGRIIAALREFGLHAVFITPNKEMRLLRHHTRSAVVVHRRGLESSLVSLSWEALDEHHQQRIKAMHEVAH

SEQ ID NO: 33248 - protein, 309 aa, Pseudomonas aeruginosa VRFPA06
MRWHLRSPSEWIAATDDPSVSQEYAQLEYLVEQVDSSFHALLVAQRSLWLTKPSEEVIATAQLATQLSPGCAQGRPLRLLAEHGVDTKFFERNAILLTKLLDERFEGAASEQGLTTFLDAFEETSHWVLVVPLQPELLPFKRIRLTTSELAETSLPGSRLLVVENEQCVHLLPETLPDTLAVLGAGLDLQWLASAHLAGKQIAYWGDMDTWGLLMLARARHHQPAVEALLMDRELFDQHSLGSAVVEPAKAQELAPEGLMTDEADFYRYLLAQERGRLEQEYLPRRQVEQAISKWFGESVAPAHPERTA

SEQ ID NO: 33249 - protein, 487 aa, Kutzneria sp. 744
MDFEGLDQLRRNDAAWRLLRADNAPLVLGFLGKVFVDDNVRSISATELIGRLDDELYALNERLGDGTFPKTAKAYLDDWAAPANGWLRKYYPAGSDEVHFDATVAVEKALTWVDSLRERSFVGTESRLNTIFELLRQMAYGAETDPDTRLAELRRRRSEIDAEINRVAGGDFAVLDTSAQRDRYQQFAATARELLADFREVEANFRGLDRALRERIAGWQGSKGQLLDEVVGNRTTIADSDQGRSFQAFYDFLLSHERQLELAELLAKVQSLEAVGEPDPRMRHVHHDWLDAAERTQATVRLLSEQLRRFLDDQVWLENRRVMDILHSIESSALKLREHPTPTITCDLDGTAPTVALPMERPLYTPKVKVPLNSADITAADEDLDASPLFEQVYVDRERLSGIVRGELRERAQVGLGEVLGRRPLEQGMAELVGYLSLGDPAFQVVFDETAREQVEWVDETGAARVATIPRVTFTRVAGRGLVGGTP

SEQ ID NO: 33250 - protein, 202 aa, Kutzneria sp. 744
MSGVTTSIRRDELDLPLVVTHLMKGVVYADSHEKVWRHLLPLQAQVRDYVGVMGLTVVIDEAEGYAFLRSKLDNEEDGPLPRLIPRRALSFHVSLVLALLRKKLAEFDASGAETRLVLTREQLVEMVRMFLPESSNEARLVDQIDTHLTKIVELGFLRRIIGQDAAYEVRRILKSFVDGQWLSEFDQRLADYTALLDGEGED

SEQ ID NO: 33251 - protein, 1124 aa, Kutzneria sp. 744
MPGLDAEGADLAGYRLDRLEVYNWGTFDQRVWTFHPEGRNSLLTGDIGSGKSTIVDAITTLLLPAHRISYNKAAGAEAKERHLRSYVLGYYKAERNEATGASRPVGLRDRRAFSVVLGVFVNRGYDSTVTLAQVFWFRDASVGQPDRFFVTAERGLTIAGDFTEFGGDIAALKRRLRKQDVRVHDHFPAYSKDFCRRLGIDSEQAMELFHQTVSMKSVGNLNDFVRSHMLEPFDAADWTDRLVRHFEDLTRAHEAVLKARTQLTQLEPLLADCDAYDEFDRRIGAAKAERDALRFYCADRKATLLDARVAALTIEIGAHQTELDSTKGELDRLRRKETDLTVRRAGSGGDRIAQLEADIATEEQERDRRQARHARYHELLASAALPAVTEPAQFTARQRDIAELAGSLDQAQAELQNQLTDLTVEQRELDGEARELNAELLSLRERRSNIPKRSLDVRDTLCAELNVDPAALPFTGELIQVRADCAEWEGAAERLLHGFGLSMLVDSEHYDAVSDWINDRHLGVKLVYYRVPRRQGPTAPSPLTERSLRTKLEIKESPFSDWLDRELAHRADYECVDTMLEFRRAPKAITKAGQIKGARGRHEKDDARRIDDRRHYVLGWDNQAKMDTLLDQANRLQLRLRELAVLAAGVGKDLEDRRRLATTLTLLAEFGSFTEVDWQSSVNRIAELDGEKCGLEQQSDELKRLTQELAAVGAQIKKAETAQSAAQTRLGKLSGQCEDAERQLRDTRSTLDEPACESARAFFPMVDKRVAARSLATPEDCDACRVDVNEDITTEIDRLTGRQNKVANRVTGKMSDFRKAYPLETEDFDNSVQSAGEYRALHGRIALDDLPRFESEFKTYLNTNTIRDIAGFHSQLTKQADLIKRRIETINDSLVDIDYNPGRFIRLEPHPTVSVEIRDFRRELRDCTSGSLHGDESDQYSEQKFLQVKALIERFRGREGQTEPDRLWTRRVTDVRNWFTFAASERWRADDTEHENYTDSGGKSGGQKEKLAYTILAASLAYQFKLDWGAPKSKTFRFVVIDEAFGRGSDESTRFALDLFRRLGLQLLIVTPLQKIHVIEPYVAAVGFVDNQTGDCSRVQTLTIEEYHRRQLAHALGSTSARGD

SEQ ID NO: 33252 - protein, 398 aa, Kutzneria sp. 744
MAAASAWTVPGDVVSRLRRRWDRGELLSRLASGAPWEPLAVGLRGPSAQDTAARFDEARAWIDQWRRARHLRVETRTVGGRVLGANELPARAWVDSYEQLWAALGVHAEVRTFMGLLDTTRRRAPAIADWMVVKPMEVLGHQGGWTRLVNTVLWIDAHARPDMYLRQVDVPGVDTKFIERHRTILAALLDRQLPEHRVDRTRPPSDFAGRYQFRAKPAYVRFRRLSDGDGFSELAVRVPELADRPPTARTVFVVENEVSYLAFPPVADAVVIFGEGYAASRLEPLRWLAGKNLVYWGDIDTHGFAILNRVRQTFGHCRSMLMDRATLLAHESHWVDEPSPVSGYLEALLPNEAALYNDLVEDALGRAVRLEQERVSYAAVEHAAAAHGSTMQDSPKRP

SEQ ID NO: 33253 - protein, 348 aa, Paenibacillus pini JCM 16418
MNIFDTIPEKFFSVLSSGNKEIYVDALMLLHQMFKYELNIRVDDYISSLIAQIEDKSFMLEEDDEVTEVNLTSNVKARLILNRLIKTGWVDKEFLDGSFIEIITPRDYAIKVMKLLSELSDQTLHEYNSLVFATYSGLKQAKNEHQGQMYEAVLSAKTNTEQLTYELKRLYHGIRSYLRRIQEQSEVNVLLKNHFEEYKRMSDSIYHPIKTMDSIHRYMAPIQEILSDILADEELMDGMRSRAMTIRKYENDDEAGQEIISSIDYVLDVYQSIGGIVNEIDRKHSAYTKISIEKIQYLMTADQSIKGKLVELLKEYSKSSDTKRTVIIEMLEKNIRVNRQEFIDGKSL

SEQ ID NO: 33254 - protein, 213 aa, Paenibacillus pini JCM 16418
MWNEKYIGLTTYEKGEFKRLANYLLSHTYMVRYEYQSSQQMTLPNYDYQIASRLFGILQDYFAVTGWRLEKDDNYGIMSLINIFDHNRLRIDRFTTLFLYTCRLIYEEEREQVNSFHTVKTDTQAVVEKMRMLGLLDKGKTTQKERIEAQRTLAHHNIIQKMESSAWNNEGNQILILPSILSIISNQGINDMITELDELGVDDDTSTTGEKEE

SEQ ID NO: 33255 - protein, 1133 aa, Paenibacillus pini JCM 16418
MKRMTKLLLIHWHYFVHEVIELDKVNFLTGKNASGKSTVMDALQLLLLADTSGSFFNKAASGRGNRTLSGYLRGELGDDEDSGFKYLRNGRFTSYIALEFFDEEKKKYFTAGCCFDTYSENDMQKLFFRFDGAMPSNEFVINRKPMDITTLRAHIKEHYSIGRSYTTDVNRDFRQDLYGKLGGLRDRFGQLLRKAVSFNPDVDIQKFISEFVCDTQQTVDVSRMQENIRSYKSLEQEADVLKDRITLLEHIVTDHQTFETHRQNEILYSYLIDRAQVDIKLTTSAGEKEKVTAYSAQLTVLKDTVAKETERQSKLQGERNIMQANLLSNKEAQVLENLQSQISEKEQLISTLHGDFGRTSALLSRSIASWRMNINGFIQNIQGTDTSSLDPILTTRVHDLVDEGRQFYAKLEILGNSDAAAILTVGEKGLIHYAARADAIRMQCNGLVSRFSEEQQKVADNRKGLQTEQQSLENGIYRFPQDVLDLKEAVIGRLHTQTGSSVKVVVVSEAAELRNKRWRNVIEGYLNTQKFYLIVPPEHFDTALRVYDDIKRQRNIYNTGIVDIEKLRRINPIAEPGSLAEELETDDPNVRLFLDFTLGRVKKCDRVSDLRRHRTAITDDGMLYQNFVVRAMNPDRWAKPAIGQGAIQQRLEDVKREIKELTDKIAVCASVKIAFQSGNALMILSESDAKQTVTAAVNVGQIPEIEQEVILLNKSMESIDKSAVEAMQERIESLDQQLGALYKHIDIYKHEFSTIEERLRVCLEETIPRLSKELETMELELSRKYEAEWLQSTGNTRYQRELLSRGNAVDIERAFPRELSRSVNAKNALWDGLRTLRRQYNDKYIMGYDIDVVSNDAYDNAWIELSDIKLPEYLTRIADARSKAFEQFQEDFLSRLQYNIKDARRQIDGLNSALSGSSFGEDTYRFLIIPKQEYKRYYDMIVDPMLLEGGYNLLSDQFNAKYKDEIAELFAIITNEGTGSKAQERDDYEKRVQAFTDYRTYLSFDLEVINREGESQRLSKTLGKKSGGETQTPFYIAVLASFAQLYRIGRDKTANTSRIILFDEAFSKMDGERIVRSVELLREFNFQVVLSAPPDKIGDIATLVDRNLCVLRVGKQACVRSFDPRKLEELEYE

SEQ ID NO: 33256 - protein, 400 aa, Paenibacillus pini JCM 16418
MSVAVFFTRKRPTRRIMLKLYDGGQTEFPQYDIEQYEKRSMINLAVQALYEAQLLSYRWMKGEESHIIAEVWLNFENISSAYSLIGRQPKGDVVDEVCLELLNSIDKVRSGWAKQFLSDAYDIISRKRSIGNRLPIDRSERSDLLRAICFIDQMGELEMLERVFSLQCFGDSKRFEKAIRARLLGILSKYLDYEYDNTDEEILRQVGITKYPEQLEFCGQVTMSFDSGTIDFSHLIFGGVVNSKDFQRGQLRLSPTIERVISIENRANYIEYIYKQKNDHELVVFHGGQFSPAKRKFLMAVAASIPTTSHWYHWGDIDFGGFSMLARLRREIKNDVIPYRMDKSELIRYSLLTASVQPKYIEKLCSLKRHSELVDCLPCIDHMIENRVKLEQEAMLTDLI

SEQ ID NO: 33257 - protein, 490 aa, Brachybacterium phenoliresistens
MTGLSRALQNRELMEDSGPLRLLRTEHAPYTLGLLAEHLGGERRVRTAAELYDLLDADLEELRLHGVDLPRTAQQYCATWVAQGFLTRRAARTERTEEFSLTEHAHAALRILDQVHAPRDAVTRSRLALLTDRLRALAQETDPDTARRIAALEAERQRIDQLIDSIRERGAEPLPQAQAVEAAEELYSLALDVPSDFTRVRGELERLHRKLRLDLVEHDGPQGEILDQLFLGVDAIEDSDAGRSFAAFHALLIDPVQEARFHEAVDALASRPFAATLGPERVLFLQSYLTRLQRDSHQVRQAMIDLSRSLREFVRSRQFEEFRALADRLRRPQRLGLAIAPHVRPHTRLGMELTLSTFTPRSVGQFRLLSPGESTAADPLDLAPTATLDLEALRATIRESEIDLAELEAAVDAVLAEQPSATIGEVLAAHPATQGLASVVGLVVLAQRHGEPVPEEGATELVTWQTRHVTRAARLPTLRFTHPLRENVHD

SEQ ID NO: 33258 - protein, 235 aa, Brachybacterium phenoliresistens
MTDAEAGSADGRVQLWPGDPGTLPLDVRRVLVALLKGPYVSHQKDPLLWSALLAHEGVVRRRLGDLLLDLAIDADAEVAFSRNLVPDPDFDSPVPSVLRTAPLSFIDSALLLHLRHLLLQGAARQERVVIGRDEIDAHMQAYVASSGNDEAQFRKRLDASVKRMSEYSILLRTETEDRWEISSILALILTAEEIGGIEEEYERLREAAGRDPDDRDDAPDPDRTEGEDHDEEELR

SEQ ID NO: 33259 - protein, 1104 aa, Brachybacterium phenoliresistens
MSADPLRPGQMRLSHVQLHNWGTFHGGHDLPVPRGGLLLTGESGSGKSSILDALSAVLMRPGETRFNAAAQDGPAGDRDRTPMSYVRGAYRKQADDDTGEVTSGYLRPATTVSGIALTFEDGRDRTVTAVRVLHVSGRSAAAADLRTAFVLFDRPIELADVLAPCRSGIDRRRLKRTLSPLLAEESYTKFGVQLRRLTGIGSEGAQKLLHRTQSAKSLTSLDELLRDFMLEEPETFSLAQQAVEQFQALQDAHATVLDARTQVDVLLPQREHWQVHRRASEERDRLQQLLDAVTPYQHTVLAELASADLASLRARVKVATVDQENAETARSDAAQRERELQAQRDARGGAALQLIDRDLADARAQAEGIAAAVERLRPVLERLGAPQPTGPEELAAAHALAEREQERIATVTAELAQGARPHYAALEDADQRRKTAEKEILSLRSRRSNLSADLVAVRDQLAEAAGEAPGSLPFVAELMDVRDPAWQGAVERLLGSLSVTILVPERLYARVSRSVEGRHWGQRIAYERVREAARRDTGGIPPGGERTVLSVLQLADSPFRDWLRARIGRSYPHVLVDDISDLHRHDRALTIAGQIKNRDHHVKDDRHRIEDRSRWIIGTDNSALLELRRQQLQEAQQDIGRAQAALAGLEKQRRALQERQQALGRLLETEWADLDLAGAQERTRALEARRTVLLADADLESLDRALAEATADHAEARSGHDDARLTLQTLKREAGQAQADLERARAELEGIDPDPELRQELDRRIRARRRAALDRAALPDAVLHLERGIREDLEARRETIRRAESALGTARGTYLRRWPDRSANLVDDIDATEDFLRILAQLETDRLPEFEHRFRDLLRSQSQNNIGQLRAVISQAIRDVHQRLAPVNRSLAATAFDTERRTWLTLVAQQKHTEEVRDFLTALLEITQGAFGQGEENIDQAEARYARMDALMRRLGSAEAADVSWRRRVLDTRRHVEFVARELDESGEVVDIYRGAGGRSGGQRQRLVTFCLAAALRYQLTDSADGDPPYGLVVLDEAFGNSDMHYTRAGLEVFRSFGFQMLLATPLKMLQTIEEYVGGAVVVAKGTDSRSSLAAVTFTAQDAR

SEQ ID NO: 33260 - protein, 393 aa, Brachybacterium phenoliresistens
MRGPGEIRERLQRAWSRSTSAWLADPEGASADVPLHPPTGADALSDPAAVHAWITGWADAGPMAEHVAWEERRWTHLGAQRVPVRFQAQEAGLLCRLAGAGPAREWVLLSARCQDAVAALATSSSHEPSALRDRTAAAIARRRTQWLQMPPVDAELCIRAAAWLLAHPDSGLRIRQVPLPGMHTKWLQAHRSAVEGLVGAARTDGSTALGLRPSPVFHDLVVLDPALRAAAAALPRASRLDVLGLGETGLEPSAVIVCENSETVQVLPDLPGAVAVSGEGYNLAELLAVPWIRAVPVLYWGDLDADGLRILDRARHHHARVVSVLMNRETLEAHRELAGSGGERSPAALTRLTPAESDLHVELSATGERLEQERIELGYAVERLRAAVRELDA

SEQ ID NO: 33261 - protein, 479 aa, Intrasporangium chromatireducens Q5-1
MSHDDLSRLREQHPAWRLLRAANAPLIVSFLGRTFVEENVRVLTQSELVSRLDDELYALRERLGDGAYPKSASAYVADWASQESGWLRLYYLEGSDEPHVDATPALERAVAWVGMLQERAFVGTESRLHTLVGLLRQIVTGSDTDPEHRLEHLRAERARLDEQIARAEAGEIDVLDPTGQRDRYQQFASTALELLSDFREVEGKFRALDRQMRETIAGWDGSKGELLDQLLGDRNAISESDQGRSFQAFYDFLLSAERQDELSALLDEVHRLEAIAADDRVRRIDRDWLAAADRTQATVRTLSDQLRRFLDDTVWLENRRVIELLRSIESSAVVLRDEREPVEMELESARPEIALPFERPLYSPPAAPQIDSTVAEAVDAAETTALFHVDHVDHARLVGQVRAALRHRTQVSLGEIVDEHPPEQGLAELMAYFALHEDGIDLVIDDTARQRVGWTDDDTRREADIPTLLYVRPDGKDRS

SEQ ID NO: 33262 - protein, 224 aa, Intrasporangium chromatireducens Q5-1
MTTIPTTSTPGATDDALDLSRVVIPLLRGVVYQADNAALWALLRRHQTRVKDHMAVMGLELVVDEAEGYAHLRQMDYDDIDVPRLIPRHRLSFRVSLLLALLRKRLAEFDASSSDPRLILTRDQIADLLRVHLPESTNEVRLTSEVDALITKVAALGFLRPITGQDRTYEVRRILKAYVDAQWLNEFDERLRDYLATLEPGAAEGSGDPAADRDAPNGWEPSDG

SEQ ID NO: 33263 - protein, 1127 aa, Intrasporangium chromatireducens Q5-1
MDELPLDDSLGTAGYRLDHVEVLGWGTFDRAVWRFDLGGHTSLLTGDIGSGKSTLVDAITTLLLPAHRISYNKAAGAETRERSLRSYVLGYWKSERSETTGVSRPVGLRDHTSHSAILAVFRNERLDSAVTLAQVFWMPDDHAGQPNRFYLVADRELGIVGDLSDFGTDVTALKKRLRGAGITPHGTFPDYERAYRRALGIPSSQAMELFHQTVSMKSVGNLTDFVRAHMLEPFDAAADVRKLVAHFEDLTAAHDAVIKARSQLALLDPIVNGCDEVARVRTDLAEATAAQQALRYAAAEVTLKLLAHEVTETQAQLAHERELHARAQGTVQSLRAEHQGLRDARAGHAGGRVGALEEARERHTEERKTRAKRHRAWSEDLAAAGLEPLADPTEFERVRGEADAAQAAVDDESKRVADQLTEHAVDRRQLRGESDEIRAELISLRERRSSIPRELLALRDRLCEETGVADERVPFVGELVQVRPGEDRWRGAAERVLRGFALSLIVDDADYGRVADWVDGHHLGTRLVYHRVRVGERHQPAPPTAGTLAAKLELRDSPYAAWLAAELAARAAHECVESLEDFRRVSRAVTVRGQVKSGSRHEKDDRHRVDDPSRYVLGWDNKAKQDALIGRGTRVQEELNRVDEAIRRAEAQQRELRARREALTRVLVVDDARDIDWWASARALQEVERELALLVEASRELAAIDERLAVVEAELATADEQRASHERAIGALDGRRTGLETDQARNTAVLAGVDEADRPAVDRAVRALRSRGVSRVDAVQGLVEELRAELVERSAALSRRLNTATSRTERLMDAFRRDYPAETTDMDASIEAAGEFREFRDRVARDDLPRFEADFKRYLNQNTIREIAGFQSRLIQQSKEITERIRTINASLRDIDYNTDRFIRLDAVPTPLTEIREFRADLRACTEGALLGGEADDLYSEQKFEQVRSLIARFRGREGFAEQDRQWTTRVTDVRNWFVFNASERWRESDEEHETYADSDGKSGGQKEKLAYTILAASLAYQFRLDAPGGSARTFRFAVIDEAFGRGSDESTRYALRLFDRLGLQLLVVTPLQKVHTIEPFVRRVGFVDNPSGRSSRLHNLTIEEYQQQRSDAALARVGGAVRPERA

SEQ ID NO: 33264 - protein, 395 aa, Intrasporangium chromatireducens Q5-1
MTRQPWSTVDDIRSALQRQWDKGELLRVAAQGAWEPVRVPLRAPSARELAAAFGPVQDWAGALHRAADGGRQPAFGLEVRPVGGRLVGANVVPSAAWFDEPEQVWRLLRVADQVATFQRVLRLGAEAHPALADWVVAHPLRALSHAAVWPKVVATVLWLRATVGTAAYLRQIDVPGVDTKFIEGHRGLLAELLDAVAPGVADETRSPGKDFARRYGFRDKPAMTRLRSLDGTSLFGGLTDVSVRVEELAATTVSARHILVVENEVTFLALPALPGVVAFFGSGFDVLRLGRLPWLLDRDVLYWGDLDTDGFVILDRLRSQLPAVRSVLMDLETLTMHSSQWTTDPKPSRLSLARLTPGEAAVYRTLRDNELGTSVRLEQERVNYAHVASALEQAL

SEQ ID NO: 33265 - protein, 450 aa, Yersinia similis
MEDALQALAGILSAHASQELYEIEPDNTHLQAGRELREWIKRRLVVEREGRIFATDALEVAIQFVESLDSRIMTSTASRLSVVQREIENLETSLNPNPESRINKLRSRIKALEEELSLAEAGHIVVLDEAQAVEGIREVYNLATSLRADFRRVEDSWREADRALRQSIISEQYHRGEIIDRLLDDQDSLLNTPEGRVFDSFQQQLRQTIELDNMRHRLRTILRHPVVPKALPWSQQRDLHFLVKRLVQETKVVLQARSRSERDVKGFMKTGLAAEHHRVGQLLNDIFSLALNLDWQRLAIRRQEIPLPPLGMAVTGVPAVERLRFKTLDEDIEPELDLSTTSVGLEQVGDDFWDAFDGLDREALIQGTLRVLAEQNRPISLGELAVLLPPAHDLETFALWLGMAHEAGITIQNEQREAVELIDDEQRIWRFYLPYAGLESQALKDIDWEL

SEQ ID NO: 33266 - protein, 252 aa, Yersinia similis
MTGIFDRLVNTGNGELTQDVLSHIERDDMTTDALPDTDSESTEEKRTHKRVREAAQELLKYGLLEESHKPNLYRIALIHTEEMASILEPLDLSMGIDEVRGLLFVMVRQQETSEQDDWTHPLVRRQRLNLEQSLLIAILRQHFIAYEQENGIGASQALVVVDDLIPQLQVYLGDLGSDARERTRVINLLDQLKGHGLVSAPDAHERVIVRPIIAHLANPENLQALLAWLRDQVERSELPGDASELMGGEEMP

SEQ ID NO: 33267 - protein, 1096 aa, Yersinia similis
MKQSPLWCDSETFILTHLDLFNWGGFKGVHRAVIDPAGTAVIGPTGSGKTTLVDALMTLLCANPRYNLASTGGHESDRDLVSYVRGVSGPGDGGAGQSHIARQGKTITGVVATLACDTQQIRLGVLLWFEGTSSAATDMKKLWLFSDAPGHTLEHWLNVHHEGGMRALRQMEKEGTGIWTYPSKKSYLARLRDYFDVGENAFTLLNRAAGLKQLNSIDEIFRELVLDDHSAFERAAEVANSFDDLTEIYQELQIARKQIRSLQPIADSWGRYQVQSRLLEERQALEVILPIWFAEQAHGLWLVQTHRLEKEISETESTVKELQRQQAEQKKQVNEQLKRYWDVEGGSVDVLKDRITDWQKTCHQREMQAANYQRLAINLDLSQELTAAGLQANQQKAETRLMALSEEISAAERSAFSKGITDHELTEQLQQLCQEKIDVERRPESNLPSQFQAFRSALATELGLDDTTLPFVAELVQVKQEEKSWRGAIERAIGSHRLRILVPHASADAALNWVNQRHNQLHVRLLEVKSPASQPLFFHDGFTKKLTYKEHTSRETVKALLADIDRHCVENTDQLRHTPHAMTAQGLMSGKARFFDKQDQKRLDEGWLTGFDNRDRLAFLAEQIQQKEQQLQIATQALRLAQAAVGKLQEQANALAHIQALNFESIDLPTAQRQLEELQARLDRLTHPQSDIAIAKAALDEAEARQKELERQYQQEVTACAGLKKDLERAAMLSRKVHNIAKQGMTGALQALGAAHFPQVAPEQLDDIQDIEREHARQLQGRLNEVNDRLQRLRDELIKRMSDAKKEDTGALSEVGRELDDIPNYLARLQTLTEEALPEKLKRFQEYLNRSSDDGVTQLLSHIDHEVALIEERLEELNDTMRRVDFQSGRYLCLIAKPVVHDSMRTLLRTQRQLNSARFVDDDGESQYKALQALVGLLKDACERNRTQGARALLDPRFRLEFAVSVIERETGSVIETRTGSQGGSGGEKEIIASYVLTASLSYALCPDGRTKPLFGTIILDEAFSRSSHVVAGRIIAALREFGLHAVFITPNKEMRLLRHHTRSAIVVHRRGPDSSLVSLSWEDLNEHHQQRNKPI

SEQ ID NO: 33268 - protein, 384 aa, Yersinia similis
MKSPIDIGKQLARQWHQSKVRSERLLTPGCWPLQLPIGKPSAKIFTANTQAVQRHVEVWRQVSIGLVEWESVSYRASLTPVSIPVRWCLRTPSEWINAASNLQVSQEFQQLEQLVAQVDKSFHALLINQRALWLHKDPHEVITAANLACKLTPGCAQGRPLRLLSESGVDTKFFERNYSLLTKLLDERFEGEASGQGLATFLDAFEESSHWVLVTPLAPGILPFNMSKVTTTELASVDLPCSRILIVENEHCIHQLPQLPDTIAILGSGLDLQWLISPNLKSKSIGYWGDMDTWGLLMLARARAFQPAITALLMGRLLFEHYASGSAVAEPVNAQQAVPEGLHHHEADFYRYLLSQPRGRLEQEYLPRGVVEMALTEWVGHISL

SEQ ID NO: 33269 - protein, 473 aa, Thalassolituus oleivorans R6-15
MTGKYRAQIMECLRELYQRLYSSSSADYGQAIQRDTVVEVFQEALVRAPVLADGSEEADDTPDGRFRNSREQAGWVLNQLLEHGWLEKQVDEATLQSTFAFTRYGRLFTEPFITESRSMARTRHRNTRNTRNSLESFLERGDIYDLLDAYEYSERIISDFTDVIAELEERKRDLVREMEDQLLIQRASEAFFDFMENRFQPDLSVRLSADNVEKHRDTIQKIINAIRKKDVAFKAKTERRLRELLPELGQEGQSVFWTLLDGIEMRLRNASDIMLPALRRALQSFTKRADIIIRQMSYLASQSKNDVLTVCKHLASKTEKEQNSILERAGELMAVPQVRLVDPGQVRMAAPRTRRQIEAHLDDGQGDFDIEARRDIYVQQVLDQAFLVNQQALKNYMQRQLATGKPVSTRDMPIESAQDFLAVAHAIGLGAADGLSSEFTFLIDYDENPAREQGDVYFTKKDHFTFELVQKES

SEQ ID NO: 33270 - protein, 305 aa, Thalassolituus oleivorans R6-15
MLQSIEKELEKEGLSQRDYSELLIRLLDYGVICRDESQIEQTLYDRYVRLEELVGEYLSLIGVRIQHDRRFQFVRLFPPGSQVPGMDEDQEFGGQQSFRTRLNQAEVALTLVLRAQYDKALREGAVDDQGCVMTSLEALSIAMKNLLKRNLPDNLTDRKQLFRRLKQLRLVQIANEETLGDGDMWLRIRPMIMSYVSDQVLTELMDGEDDSDDVEITALDTAPALEKEAEVAAELTDSEDEEAVEDVVVADAESEAEITAEAADSDPAEEADLVENTEQTAAVKADEDTNNEPQRSHQPASLFGE

SEQ ID NO: 33271 - protein, 1220 aa, Thalassolituus oleivorans R6-15
MFLKKFIYVNWGNIPATEFEFGPINLLSGGNGSGKTTAADAIQTIMTAAHDTLFHYNPGQDEATQRGRGKNVRTLASYVLGCDDGSYARPGGAVGYLAAVFHPTANSADGTGGESGEPFTAIIGVSASIDRAGSQPVARQNDLQFFIIAGEQLTLNDFLLDQADGQRNVVELNKLGKNLARRIEPHNIEKYDTKKQYLRRLYGALRGRNDAVPEREAMNAARTFSRFMAYKPVKSINGFVANEILEAKDMGDAIRSVSDLMKTIYAMESDANTLAETIAILNSTKGATGRYIDQWIDYNVLEYTAARSRFLNDQRGYLGAKEQQQNFREQLNKTQKERDVAQDRRKQLREQLITMEARRRGIDALQDKDAAESALADGKKKLQQQAIPLLEQEQLLQASLRATELVHGALQKTSVAAEIPSLGSKRILDQAKQVLAIKDQDAVDFRKLLGKDWVDLSPLEAHLDEAREQQSLMNQWRDRFHNVELESSGISLRDQIARNVDRREQKFQQVQARMNQKQGDIDSLEARQLNYPGFVRQALEAILRECPQADPRVLADYVEVTDPAWQSAIEGYIGGARFSIIVEAAFEAEAAHILRSIPGGSRARVIQGQKAKKDCERLKLPSNSILNVMSFEHATARYYLEASYGTVEQVEDLHTLRLTRRGVTKEGLGSGAYSIYRCDLDDTELVFGLGARERALSAKRGELETLAEQANEANHQFRQAQQLLDAVNLLRHVTFADQMQGMLDTQYQMDQAEKALNQVDVSDFSNMEDEFTGLKEKADELDAVIKELDGELGRLQQMLNDSEKFCKNLSDMQEKTSEIADKKEENLRAIVSVWPDFDSEARLAAADAEANDSPAEAIENMRKSVSQELNATAYEIERNINEHNLRCQTADAIVYAPDYREEHSAHFFKGVCGLQREIERVHNRLKNNILVEKQDKLAQLRESFNNVFITNLCHSIYQAINDGKRILEDLNKELAHHQFGADRETYWFDWEWVPEYKEYWQFFDEVIKNPSLGDGATLFTADISAASKKVRDHLMAMLLDDDEQKAMRELERISDYRNYRAYEIYKQPANKEPIALSQYGTGSGGQLETPAYIIRSAAITSAFRFNEGDTHLRVVLVDEAFSKMDETRSKEVINYLTESLGLQLLFIMPTSKSGPFMDLVSNQFVFSKVPLVGGQSKGELQTRVLVDRQECNQDKVKELWANHRRTIRHQAALDFMEEFA

SEQ ID NO: 33272 - protein, 335 aa, Burkholderia pseudomallei MSHR520; identical to SEQ ID NO: 32789

SEQ ID NO: 33273 - protein, 223 aa, Burkholderia pseudomallei MSHR520; identical to SEQ ID NO: 30855

SEQ ID NO: 33274 - protein, 1210 aa, Burkholderia pseudomallei MSHR520; identical to SEQ ID NO: 31063

SEQ ID NO: 33275 - protein, 377 aa, Burkholderia pseudomallei MSHR520; identical to SEQ ID NO: 32792

SEQ ID NO: 33276 - protein, 486 aa, Candidatus Accumulibacter sp. SK-01
MKADKAIATYRRMRAQPLWRLLASTTGPTVIGLLQSHLYESERSLPASIFHERIARDLEELRAQGEDFPQTAQAYVASWLAEGFLERRFPAGASEEEYELSTAAVEAIRFVSGLAQPHSAATESRLTLVIEALARLAEDTDTDKFRRIDRLMAEQVRIDKEIDAIQKGQMRVLPQTTALERTREIITLADDLAGDFRRVRDQFDQLNRDLRERIMDNDGNRGDVLDSLFAGIDLISESDAGRTFSAFWRLLTDPEQAATLDQALDSVMSREFVGQLEAKERRFLLRLTRTLLEQGGMVHEVLQTFARSLKHFVQSREYLEQRRLNHLLKDAQRAALALKNEVRATETLQYTLELTSSRLRSLSQWVLHDPSLQALPGQMAEGDAPPIDLESVSELVAQSEIDFRTLKANVLAVLEQRSQASIADVLEQFPAAQGLGSVVGLLALGSRHGFKADHSETVGWVGGDEKRRCARIPKIFFLRERANELV

SEQ ID NO: 33277 - protein, 235 aa, Candidatus Accumulibacter sp. SK-01
MNWSENDESAIPAEAQAPDAAQAPANTLFMGDSGELALDTRRALVQLLAGPSLDGRRHPKLWPILARDEAVIRRRLAELFLELVIDRDVQVAFTRQADTGDLEVPLLLRRAQLTFIDSILLLHLRQRLTQADSQGDRAVVSTDEITEFLSLYERAANTDRAGFVKRVHASIEKIKKHSILQKIRSSEDRFEISPTLKLLFSAEEIQALTHLYQRMAAGETPAQLVQTDADEDADQ

SEQ ID NO: 33278 - protein, 1124 aa, Candidatus Accumulibacter sp. SK-01
MISEPKTASLFAREQFRMTRLQVYNWGTFSGLHDVPISERGFLFVGRSGAGKSTLLDAFSALLTPPRWIDFNAAAREADRSGRDRNLVTYIRGAWAEQKDGESGEIATRYLRSGTTWSALALSYQNALGQSVVLVQVFWLRGNANGSTDVKRHYLVMERAFDLRELEDFGQSNFDIRKLKQSFPEAFARDEFRPYCERFCRLLGIESEMALRLLHKTQSAKNLGDLNTFLRDFMLDKPETFEVADRLVSEFGELNAAHQSVVTAREQVQTLAPARDQHLRRDSLMLQRNGLDELRLGVDGYRETRRIELLKEHVASLEVQANGSEGEVGRRQSTLDNHAAILRDLERQHREAGGDQIEQWEAEKSGLEGQRTDRLRKRGQAEEASKKLGWSLPDSPQAFAELLGNARQEVENWEQRSNANREEQFRLAGEKRDAEAAFSQALKEVQALQRQPSNIPADMLEMRRNIAAAVGISESALPFVGELIEVKPDEAEWQGAIERVLHGFALSLLVDERQYSALANHINTTHLGQRLVYYRTGRPETWQAKPIGANSLVLKLKVKDGTYADWLQAELRQRFDYACVDSIQSFRSADRAITREGQVKHSKTRHEKDDRRSVGDRRNWVLGFDNREKLGLFQAQAQEQADAIARLGGEIDKLSDQDKNRATRAMQCQTLVNLQWQEIDVFPLLDRISTIERQIREAREGNATLLQISEQIEKQKKFVEDADKELRQATRAHDSIVDQIKTSTQKLESLLQDASIVPLTPHQVSGLDERFAKQSDAVRLDNLDKVTTSVERTLNAEIEEVNRGIGVCEKEIEARFADFKRQWPMDAGDMDTSLASAPDFFAKLVRLETDGLPAYEQRFFELLQNQSHQNLAALSTYLNDARKAILERMDLVNDSLGQVPFNQSANQRTYLHIDASDRQLVDVKEFKQEIQQTLSHAWTEDREFAEARFLALRRLVDRLASQDPEQKRWRETVLDVRQHVEFIGREIDESGVEVEIYRSGAGKSGGQRQKLATTCLAAALRYQLGGNDHGVPMYAPVVLDEAFDKADNEFTALAMNIFTNFGFQMVVATPLKSVMTLEPFIGGACFVDISDRRVSGVLLIEYDGDRQRLKLPEHAREEASVEAS

SEQ ID NO: 33279 - protein, 387 aa, Candidatus Accumulibacter sp. SK-01
MKLPEDVRQFLARRFQSKHREWLIGDPGEGQWPLEVTLGVPTEQAALRQVDGVRAWVSAWQSWQGVGTLSWCERRWKALGVQRLPEKLVLRGPEDVALWIGASARWVRALSRYQTLTARWPLLAQQLPRYFDVLADYSDSDFRRLAEMLDWINRNPKSNLYPRQIPVAGADSKWLDSRTGIISDLIATLQGDPTGARDFFWRCGLRAQPQLMRMRVLDPDLRASLGGLGDISAPCEEVASICIRPNNVFVVENLQTGLAFDDLPGAVVIMRLGYAVDVLGQLSWLQQAQCIYWGDIDTHGFAILNRARTYIPSLKTVLMDESTLMSHRDLWVEEKDQHSSTELPLLTNTEQKLYQSIKGNAWDQQVRLEQERIRWDVAWNAIQASIR

SEQ ID NO: 33280 - protein, 485 aa, Candidatus Accumulibacter sp. SK-01
MSALDFATLDALRTHHPAWRLLRSDHAPLVASFLQRVFVAPNVRVMAAADLAEALEDELYALRLQLGETALPKPALDYLNDWAAPDKGWLRKFYKPGTDEAQFDLTPATEKAIAWLAQLSERQFIGTESRLLTLFDLLKQMSEGSEADPARRMAELRKKRDDIDAEMARVLSGDVPLLDDTALKDRFQQFMQGARELLTDFREVEHNFRQLDRRVRERIALWEGSKGALLEEIMGEREAIADSDQGKSFRAFWDFLLSSRRQEELTELLDCVLQLPAVTDLKPDSRMRRVHYDWMEAGEHTQRTVAALSQQLRRFLDDRAWLENRRIMDILHGIESKALALRGSPPAGTVMEMAEARADIELAMERPLFTPATKPVIADLALQAGDQDIDPSALFDQVVVDKARLIRHIRHALQDRAQITLSELVLTQPLQQGLAELVAYLQLGSGTFSTVVDEDTPEPIRWQSRAIDGQEITRSARLPRVLFMR

SEQ ID NO: 33281 - protein, 225 aa, Candidatus Accumulibacter sp. SK-01
MEEPHSRTDEARAVAPAPVADLSMLLISLLKSVLYRDGDERQWAALLNLQVQVRDYAAVLNLDLVLDEAEGYAFFRSRPEPADDDPAPRLPRLVARRPLSFPVSLLLALLRKKLAEFDAGGGDTRLVLGRDDIVELVRVFLPDGPNEARLVDQIETTINKVVELGFLHKLKPASGASAGATSYEVRRILKAFVDAQWLAEFDARLASYQSQLAGVTPAGEGADHE

SEQ ID NO: 33282 - protein, 1122 aa, Candidatus Accumulibacter sp. SK-01
MNEPPSLGLDFVADDTLSGFRLTRLEVFNWGTFDSRVWTLQLDGKNGLLTGDIGSGKSTLVDAITTLLVPANRIAYNKAAGADSKERTLRSYVLGHYKSERNEVTGAARPVSLRDQNSYSVILGVFHNAGYDQTVTLAQVFWMKDAQGQPARFFLGAERGLSIASDFAHFGSDIAQLRKRLRRLGAELSDSFPPYAAWFRRRFGIDNEQALELFHQTVSMKSVGNLTDFVRNHMLEPFEVAPRIQALIGHFDDLNRAHQAVLKTRQQVERLTPLVADCGRHSTLVTEIEALRGCRESLRSHFAGLKLGLIDKRLGLLAEEWDRVDGQRRRLELIHEEQGRQVDELKQAINDNGGDRLERLAAEIRKRELLRDARKAKAGRYQELASVLGEPVAVDASTFAAQRGKYQSWREEARNRDADLQNALTEHGVTLRQGKQEHDRQSTEIESLKRRRSNIDDPQIQIRAALCAALGIDVDEMPFAGELIQVRVEERDWEGAAERLLRGFGLALLVPDAHYKAVAEWVDAAHLRGRLVYFHVRPRKAGELPDLHRDSLLRKLAIKPDSPHYDWLERELAHRFDVVCCATQEQFRRETRAITRAGQIKDPSGRHEKDDRHRIDDRSRYVLGWSNSAKIAALESRRRQLETQLGDVGSRIGEIQKERNGLTSRLDALIRLEEFTAFEELDWASVATEIAQLTDERSRLESASDVLKQLNENLRELQRAQKETGTELQGSREKRAKLEQRRSDTQELRQQTELLLAGAVVDEALAATLEVMRAEALGEHQLTVESCDNREQDVRGWLQTRIDNETKIANRLAERIIKAMASFKDAFKLETAEMDASLDAAFEYENLLTQLNRDDLPRFVARFKELLNVNTINEIANFNAQLARERGTIKERIAHINKSLGEIDYNPGRYIVLESQPSPDAEIRDFQQELRACTEGAVTGSDDAQYSEAKFLQVKAIIDRFRGREGLSEQDRRWTAKVSDVRNWFLFAASERWREDDSEHEHYSDSGGKSGGQKEKLAYTILAASLAYQFGLEWGAVRSRSFRFVVIDEAFGRGSDESTQYGLKLFRQLNLQLLIVTPLQKIHIIEPYVSSVGFVHNEGGRASKLRNLSIEEYRVQKAVLAQ

SEQ ID NO: 33283 - protein, 399 aa, Candidatus Accumulibacter sp. SK-01
MTWTGAKELKAQLARLWERGELLRDAVTGNARFPLRLALKSPSSADITDRFEAVRAWAAELAATDSVCLEWQEVRHRVQGVQKLPATAWIETLEEALTWLGKRREWARFSAQVSATRQTHPALLPWLEKRPLQALALSAEWPRLLAVVAWLVEHPRPGIYLRQVDLPGVHSKFIEAHRSVLAELLDLALPGDAVDLGKTGVGQFAARYGFLEKPARIRFRVLDPANHAVPGSVCPDVTLDADNFSRMEFAVRRMFITENEINFLAFPRVRDAMVIFGAGYGWDALARSHWLQNCSIHYWGDIDTHGFGILDQLRGYFGHVESFLMDRETLDAHAPVWGCEEQPLLVDLHRLTPEESALYDELRDNRIRARLRLEQEHIGFHWLGDRLEQLLHGRRGANS

SEQ ID NO: 33284 - protein, 482 aa, Candidatus Accumulibacter sp. SK-02
MDFATLDALRTHHPAWRLLRSDHAPLVASFLQRVFVAPNVRVMAAADLAEALEDELYALRLHLGETAFPKPAPDYLNDWAAPDKGWLRKFYKPGTDEAQFDLTPATEKAIAWLAQLSERQFIGTESRLLTLFDLLKQMSEGSEADPARRVAELHRKRDDIDAEMARVLSGDVPLLDDTALKDRFQQFMQGARELLTDFREVEHNFRQLDRRVRERIALWEGSKGALLEEIMGEREAIADSDQGKSFRAFWDFLLSSRRQEELTELLDRVLQLPAVTDLKPDSRMRRVHYDWMEAGEHTQRTVAALSQQLRRFLDDRAWLENRRIMDILHGIESKALALRGSPPAGTVMEMAEARADIELAMERPLFTPATKPVIADLALQAGDQDIDPSVLFDQVVVDKARLTRHIRHALQDRAQITLSELVLTQPLQQGLAELVAYLQLGSGTFSTVVDEDTPEPIRWQSWATDGQEITRIARLPRVLFMR

SEQ ID NO: 33285 - protein, 225 aa, Candidatus Accumulibacter sp. SK-02
MEEQHSGSDEARAAAPAPVADLSVLLISLLKSVLYRDGDERQWAALLNLQVQVRDYAAVLNLDLVLDEAEGHAFLRSRPEPADDDSAPRLPRLVARRPLSFPVSLLLALLRKKLAEFDAGGGDTRLVLSRDDIVELVRVFLPDGPNEARLIDQIETTINKVVELGFLHKLKAASGASAGATSYEVRRILKAFVDAQWLAEFDARLASYQSQLAGVTPAREETGHE

SEQ ID NO: 33286 - protein, 1130 aa, Candidatus Accumulibacter sp. SK-02
MNEPPSLGLDFVADDTLSGFRLTRLEVFNWGTFDRRVWTLQLDGKNGLLTGDIGSGKSTLVDAITTLLVPANRITYNKAAGADSKERTLRSYVLGHYKSERNEVTGAARPVSLRDQNSYSVILGVFHNAGYDQTVTLAQVFWMKDAQGQPARFFLGAERGLSIAADFSHFGSDLAQLRKRLRRLGAELSDSFPPYAAWFRRRFGIDNEQALELFHQTVSMKSVGNLTDFVRNHMLEPFEVAPRIQALIGHFDDLNRAHQAVLKTRQQVERLTPLVADCGRHSTLVAEVEALRGCRESLRSHFAGLKLGLIDKRLGLLAEEWDRVDGQRRRLELIHEEQGRQVDELKQAINDNGGDRLERLAAEIRKRELLRDGRKAKAERYQELASVLGEPVAVDISTFAAQRGKYQSWREEARNREADLQNALTEHGVTLRQGKQEHDRQSTEIESLKRRRSNIDDPQIQIRAALCAALDIDVDEMPFAGELIQVRVEERDWEGAAERLLRGFGLALLVPDAHYKVVAEWVDAAHLRGRLVYFHVRPRKAGELPDLHRDSLLRKLAIKPDSPHYDWLERELAHRFDVVCCATQEQFRREARAITRAGQIKDPSGRHEKDDRHRIDDRSRYVLGWSNSAKIAALESRRRQLETQLGDVGSRIGEIQKERNGLTSRLDALIRLEEFTAFEELDWASVASEIAQLTDERSRLESASDVLKQLNENLRELQRAQKDTGTELQGSREKRAKLEQRRSDAQELRQQTERLLAGAVVDEALAATLEVMRAEALGEHQLTVESCDNREQDVRGWLQTRIDNETRSMNRLAERIIKAMASFKEAFKLETAEIDASLEAAFEYENLLTQLNRDDLPRFVARFKELLNVNTINEIANFNAQLARERETIKERIAHINRSLGEIDYNPGRYIVLESQPSPDAEIRDFQQELRACTEGAVTGSEDAQYSEAKFLQVKAIIDRFRGREGLSEQDRRWTAKVSDVRNWFLFAASERWREDGSEHEHYSDSGGKSGGQKEKLAYTILAASLAYQFGLEWGAVRSRSFRFVVIDEAFGRGSDESTQYGLKLFRQLNLQLLIVTPLQKIHIIEPYVSSVGFVHNEGGRASRLRNLSIEEYRVQKAMMALQTTQVLAQ

SEQ ID NO: 33287 - protein, 401 aa, Candidatus Accumulibacter sp. SK-02
MTWTGAKELKAQLARLWERGELLRDAVTGNARFPLRLTLKSPSSADITDRFEAVRAWAAELAATDSVSLEWQEVRHRVQGVQKLPATACIQTLEEVLTWLGKRREWARFSAQVSATRQTHPALLPWLEKRPLQALALSAEWPRLLAVVAWLVEHPRPGIYLRQVDLPGVHSKFIEAHRGVLAELLDLALPVDAVDLGKTGVGQFAARYGFLEKPARIRFRVLDPANHAVPGSVCPDVTLDAENFSRMEFAARRMFITENETNFLAFPQVRDAMVIFGAGYGWDALARSHWLQNCSIHYWGDIDTHGFGILDQLRGYFGHVESFLMDRETLDAHAPVWGCEDKPLLVDLHRLTPEESALYDELRDNRIRARLRLEQEHIGFHWLGDRLEQLLQGRRGASPCP

SEQ ID NO: 33288 - protein, 241 aa, Candidatus Accumulibacter sp. BA-93
MAANKNLEAQLDLDSSAAATSTPESLDLSALVIPLLKGVLYQEAGPAQWNALLSLQARVRDYVAVLDLELVLDEAEGYAFLRSRPEAAAEEGDAGRLPRLVPRRPLSFPVSLLLALLRKKLAEFDAGGGDTRLVLSRDEVAELLRVFLHEGSNEARLIDQIDFYLGKVVELGFVRRLKVQSGQTATFEVRRILKSFVDAQWLSEFDQRLSAYRSLLAAESGEAGKSTKSTKTTKRKAAPDE

SEQ ID NO: 33289 - protein, 1125 aa, Candidatus Accumulibacter sp. BA-93
MNEPQSLGLDFVADDTLSGFRLQRLEVFNWGTFDGRVWTLNPGGQNSLLTGDIGSGKSTLVDAVTTLLVPAQRIAYNKAAGADSRERTLRSYVLGHYKSERNEVSGTARPVALRDHNNYSVILGVFYNAGYDQTVTLAQVFWIRDAQGQPARFFVAAERELSIAGDFAHFGSDIAALRKRLRRPAAEVFDSFPPYGAWFRRRFGIDNEQALDLFHQTVSMKSVGNLTDFVRSHMLEPFDVAPRITALIGHFDDLNRAHEAVLKAKRQVALLSPLVADGERHALLGAQIDDLRACREALKAYFAGLKLGLLDKRLAGLGEDWRRQDAQLRRIDEQRLAQRAEEGELKRSIAENGGDRLERLAADIHRLELERQARARKAQRYGELVGAIGEQAAPDEAGFLDQCQRFAALAEAARERDASLQNDLTELSVSMRQGRQEHDELAAEINSLKARRSNVPAAQVAMRSALCQALGFAEETMPFAGELLQVRDDERDWEGAGERLLHNFGLSLLIPDDDYAPVAEWVDRTQLRGRLVYFRVRKTRIKTTPGDLPSLHRDSLVRKLAVKPDSPYYDWLERELAQRFDVACCATHEQFRRETKAITRAGQIKAPGERHEKDDRHRLDDRSRYVLGWSNAAKISALEAKARQLETRLAELGSRISRIMGEQNALKERLSALSKLGEYGDFSELDWQSSATEVARLQDEKRLLETTSDVLQDLSARLQRLQGELTESEAALAAKTRELGATQAKREAAEALRSDTLLLVGDPQQSAWFERLDAIRSEALGEHQLSVESCENREHDMRTWLQSRIENEDGKLKRLRDKIIDAMRAYCSAFPLDTQEVDVAIDAVGEYRTMLDKLQADDLPRFELRFKELLNENTIREVANFNAQLAMWRETIRERIARINGSLTQIDYNTGRYIALEAQATPDADIRDFQSELRACTEGSITGSDDAQYSEAKFLQVKHIIERLRGREGLSEQDRRWSAKVTDVRTWFVFAASERWREDDSEHEHYSDSGGKSGGQKEKLAYTILAASLAYQFGLEWGAVRSRSFRFVVIDEAFGRGSDESAQYGLRLFAQLNLQLLIVTPLQKIHIIEPFVASVGFVHNEEGRTSKLRNLSIEEYRAEKARAVG

SEQ ID NO: 33290 - protein, 401 aa, Candidatus Accumulibacter sp. BA-93
MSWTRPAGLRAQVQKLWDRGEVLASLVSGESPFPRRLVLKGPTSAEMAERFDAVRAWVAELRAMPNCRIEMREFRHRVFGANAVPHEAWIDSLDDALALLGKRRDVARFNALLELTRQRQPQLLAWLSKRPLRALELAGEWSRLLAIVAWVAERAQQVPRPGVYLRQVDIPGVHSKFIEAHRGVLAEWLDLVLPPAAIDTSATGVSGFARRYGFRDRPVRIRLRILDPAHSRLPTTFGDDISLDAASFARLDPGVARVFITENEINFLAFPAVRDSLIVFGAGYGFEMLAQAQWLSRCRIHYWGDIDTHGFAILDQLRAHFAHVDSFLMDRATLLAFRTQCGEEDRQTLRELPRLSEEERALYDDLRDNRLGRNLRLEQERIGFGWVEERIGAIATIATLP

SEQ ID NO: 33291 - protein, 464 aa, Nitrincola nitratireducens
MLFNKLPDDIFLPLSGQNRQVYQAVLLELADLFFDEDLIDPFIAKDLVRSTIENAVVRLGVRRWVTEADEDGDPPRSSVDYTNRIYRRLVQCGWLEEEQKVYRTYVLLSPSVSYLLRSLVSIAKLEKRSYGGAVLNVLSSLEAAVNDPVGRGITLSEASQTAADFSAHLTDMLLGLREIKISLSEINNPQDIVRGFFDRFVEHILVSDYKTLKTRNNPFRYRRQILSMLRDLQFDLLKLEQLTQHYQLQYELDFDAAEALVHQHINRIIRIFESVDQRLAAIDDFRYQLEKRVADTVRYMDKTTPGMAARLSRLIAELAKKKDDEIPTLTTLDETGFISPMSIRSPIRKRVEAKPRVITQSEIDPRVLELRRLFKEYKERREVRVDRIEQYLDRHFLDRTRMSATEFTIESVEDYICFSYVRHLPSLGKKARKTTEKYRIEFDDTYVCVADVVECRGFVIHRNA

SEQ ID NO: 33292 - protein, 229 aa, Nitrincola nitratireducens
MLGDLQKIVSRTEHHQAEDFIHAANLLLVSQFLYADRPIHRDSYFLIAANIDYYRNLFAAIGWTLVYQPDEAYLGVLPQGEERVLKLKLDESLLLLCLRQIYEQKLENFEVENGKAITTTDALLRLYSNLTAKEIPNETRLKEIVSLFSRHGVIERGKADETDPKNLPLRINPTIRHVVVEDYIGQLEALCDIESSRSSTQDADEADEASAVSQEKAQAEDGENTNETA

SEQ ID NO: 33293 - protein, 1141 aa, Nitrincola nitratireducens
MKQLNRIVLVNWYVLGAIEIPIKGNVAIVGPNGSGKSSLLDAIQTILMGGHKRHLSFNASAGEKSERSLRTYCLGFLDDLGKKVNAREDSLTYMALSFFDTETAKESCVGIAISASTANAEEDILGRFILPDFSVTLDDFSVKQGAGRLPRPWAEVRDSLLKQCPDMILEKRATRFIREMVTHLSHDPQMPNDDEKFIKNFKNALKFVPIDSPTRFIREFVLDENIVHVGAFRKSLDEYRAMEQKTREVANRIAELEKVQEMCKGISRNLKNAIEYEWVVHEARFEHTDLKKEAAAERLETFTEQEQLLQADLEKNSEQLNEAMQRLANTRAELNNTDSAHKVSALESRISARQHEASVVKEKIQQVYNLMRTTVGFAANPDLLPDAFRPVVEQSVALWRSGENTLAGQWPEAPVEVDNALTQLRAQIDPVRKAIAKRYEESVIRINELRTQIQSQKSAVEQLQQGRAPVRHATRELIDLLKEYGIDSTPICELVDINDDKWRIAIESFLGARREALVVAPDRVKEAITLYRRKGRHLKGCRIINTTKSGEWLTRTKAGSLAQFVDSDNEHAQAYMNRALGAVMAVETETELLRHERALTYDCMLQSEGSTTSINELSPIMGIRRRGDQLALQGKQVDELIAEFTTLGKQHESLEKLRDGLIQMASGLLQVNERVFDLVNQREQLASEIEGYQQGITDLRNHDDSGIQQRIAEYAEQQKSLEVRQKALMDKLQKTRTGMIKDNASLEVLERELTEHAMARGRCQEKPEFDAQSAQEKRDYLDDSCDSDLERIIFEAAKKAQTELQLHEKKKNGVRDAVAQYKARYHAGGLSHQGLDNISPDSSHEDLEGYVNETVVTLQESELAQYTQKAERARLEAETAFRSDFVAHLNDQINKIKDLIRELNSHLKNRPFHKEMYSFEMMPNPELRDILELVEAYTRMDQANVGSLFDIHHETDTGHRDALAKIHEVLKNEGESELLQDYRNFYNFELVVKDLDGNRKTTLTQRIKTGSGGEHQVPFYVAMAAALGATYRLKEGSDGQPVGGLSLSVFDEAFNKLDSENTVTSLGFMTDLGLQTIIAAPDEKYSLLSSCMDTIINVCRDGRVVDIDVEFPTEKGKELLASDHPYKIMAADALETADESL

SEQ ID NO: 33294 - protein, 453 aa, Clostridium sp. ASBs410
MILMNEIPDRFWGLFRSINRSTYIEALLKINEEYEYSNYFLSREVCIQVLEEYFTAKRLVIWQDELEDEADALEPTAVRVLNWLLRAGWLRKVDDYASMTVNIVIPDYAAVMIEAFFKLASDEEDETQIYIQNVYAILFSLKNDPRAGVSLLNTAYINTKRLNKTLQDMLHNMDKFFASLLEKRAYGELLKEHLEGYVEEIVKKKYHMLKTSDNFYLYKNDIKRWISSMREDTEWIEQMSRRSGQKVTAGNIVEKLDQIERGFDDIEHRIANMDKEHSRYIRATVTRLNYLLNQEDSMKGLVIRLLNHLSETEDPDEAIKEVGGLMNLSQVSILSEKSLYKKRRTRTGFKENLMPEEEPAELTMEEILNLNRLKSRYSRKEIESYIEAHLENGRMEVKEDTVSSPEEFEKLILAYDYSTRRKSMYQVEEQETELIDNGRYRYPKLVFVRRKES

SEQ ID NO: 33295 - protein, 216 aa, Clostridium sp. ASBs410
MTYEESAGIISQIPYFDALGQGEKEEVRAGLRLLLQQTFVLEHKYDKRTNRFAYNPEFKICNKHLEFIRAYLAVSGVSVLENSHLGIIYIQGESTVGDKLPKLATLYLLILKLIYDEQMAAVSTSVNIYTTLSEIHEKLGNYRLFKKQPTPTEIRRAITLLKKYQILEPLDILEDLDGDSRMIIYPSINVVLFGDDVRALLEALGEGDDDDDESEI

SEQ ID NO: 33296 - protein, 1127 aa, Clostridium sp. ASBs410
MTNQKFEALSRILLNNWHYISRKTLSFNQGINFFTGHSGSGKSTVIDAMQILLYANTDGRGFFNKAAADDSDRSLIEYLRGMVNIGENNEFAYLRNQNFSTTIVLELKQTDTGECQCVGIVFDVDTTTNEISRKFFWHKGPLWENGYRTGSRTMTTQEVSAYLQTLYAKEDYFTTSHNERFRRQLYDVYLGGLDSEKFPLLFKRAIPFRMNIKLEDFVKEYICMEQDIHIEDMQESVMQYGRMRKKIEDTGVEIAYLKEMRETFSALREKEEEIGENTYFFRKMEILDYQARIQALTDKSGLAREDLSRQEEQKAALERQMEDLTLQGNELLRRISSTGYEDLKNQLDSAMELLSHLNKSSVKWAQTGERLKEWVDEEVTSNQTIWDIEEFKKNTIDEEKLNRLKKSIAEMRKETEETQKEAEGILRDIRKKERQTSEELAQLKAGNKAYPKYLERARSLIQQRLLEETGKAVEVHVLADLLDIRDETWRNAVEGYLGNNKLSLVVAPAYSEAAMAVYEELERSEYFNVAILDTEKVGQNSYEVLKDGLAEEIVVREAYLQPYIDLLLGKVVKCRNLEELRRCRIGVTPDCMLYHTFRLQHMNPDNYTKYAYIGKDSVRRRIRLLEKNLSSMEEEKKPQEQVLKECRRILSIEGLSEEVGVYLEWQQDMAAFKEKEKEIRRLEQKLEKLKAQDVEEWVKEREAVLQLCDRKREEQRAVDKLIFGINSETERFRRESLQLQEELVLKEQEFEPDEELEIKVKEFLGSKETHRYDQLKNKFWGKCREAEEARDQVFQVLVGARGDYARKYPNRNFSLTTKENGEYERLLETMECGNLEEYKQMAAEQAKSAVLHFKDDFMFKIRSAIRDALLRKDELNKIISRLDFGKDKYQFVIGRNKGPDGRYYDMFMDDSLEVNPAYLTDSLDDQMNLFTMEHENQYGEIINDLINIFIPPENATPEQMEEAKRNMDKYADYRTYLSFDMQQIIQNEDEVIKIRLSKMIKKNSGGEGQNPLYVALLASFAQAYRISLSPKIQRNPTLRLVVLDEAFSKMDAEKVASCIELIRGLGFQAIISATNDKIQNYVENVDKTFVFANPNKKSISIQEFERESFPELMRELDEEEAYPDADS

SEQ ID NO: 33297 - protein, 483 aa, Microbacterium sp. MRS-1
MPAVAQVLELAQLAERDAAWKLLRADSAPVVAGLLGTHLGGDERRVDAEELYERIDADLERLRAQGLILPLTAKGYCGEWRSAGFLVRRPSSEARGETLELSPDAIAGIRFLQGRAAPRSSVTESRLASLAAQVRRLAIDTDPDVSARIALLEEEIESIERRIESLRSGDESAIDEDRAIERVRDVLAQAADVPDDFARVRAEFEMLNASLRAKIVESDVSQAAVVDEVFRGIDHISDSDAGRSFAAFSQLVLDPALGAAFEADIRRILDRGFARDLTSDERRALRAFLTTLKGRSAEIHDVITLFARALRRYVQSQDYQRDRVLRTLLREAQHAGVEAAAHTRPWHPTFLTLDLSAVALSSVGGIDLHDPAEFAATEEIVTQTTSLASLEELRAIARETEIDFDELTRNVNDLLAEVPSCTVADVLARYPATQGVGSVIGLLSIAAEQGTVDDEPEVLAWQGADGVPRAAIVAAHRFTGAVV

SEQ ID NO: 33298 - protein, 219 aa, Microbacterium sp. MRS-1
MTESTTADVAPDEHTGLWRGDAGELPDRTRRVLLRLVRGPYLSGAREAQLWAVLLTDEAVLRSRLADLFLELVIDRDNEFAFVRNAPSEDAPKAVRSEALTFLDTAMLLVLRQTLLSEEGRGRVIVGQAEVFEQLAVFRTPDRDEKDFASRVNSSWNKMQNKLRVLHAVGDARAEISPVLRLLVDADQIRAITSEYHRIAREGGGESAAPSTDAEDDTE

SEQ ID NO: 33299 - protein, 1117 aa, Microbacterium sp. MRS-1
MTMLSFPTDEPEVDPTGPGQWRLAQIELVNWGTFAGHVAVDVARVGHLFTGASGSGKSSLLDAIAAVLTPDRWLRLNAAAQDGASRQSDRTLMSYVRGAWSKEADETADRATTTYLRSRATWSGILLRYENLRDEPVVLLRVFHAPGTRTEPTALKDARIFTRGHMELLDVKPHVEGGIDARRMSKAFPEALITTGGRHGRFHERVIRQFGFRGDATLQLLHKTQSAKNLGTLDALFRGFMLDQPGTFARAETAVEQFMELDAAHKHVVDLRKQADALRKVDEAITAFDLAGAEMAGISDLHDGVEPFTAGLKLRLAKEAAGPARAALARAESDLSDVAREQRLAAEALETAKARVRDEGGARVELLQERVDSAQRAEDVTRQYRAQLTAELVRIGAPMPEDPEQFAELLAAAVTEVARDIPAVSYEVRDAASQARKALDEVTRQIQALRDHRSNLDEKLLSARRFLADAVGVPASAFPFAGELISVTEQHSAWRGAAERVLALFASTLLVRDEHLVAARRAADSRTLGVRLVIEAVPHAVDEPRRPKDARSLVHRLAVSDGPFASYVRRRMASEFDYTCVSHPDELDDVERGVTIGGLVKRNSRRYEKDDRHEAGDATRWVLGGDTHARLEALLERRREAMAAMEEASARDDEADSFRQDAVSRRDVFTRVSTFSWDQVDLASAMAVTAAQRDDLRVLTSESGTLREAQEAAERATQRLDETNAKHARALGAHAVARNHVESIEAHVAELEATPYIPVEERIADALVGRFRAERRSVSLETVDEVARKVQSALSKEKDAAASRAADAEASFAGRAAEFRLGWPAASAELTADIRDRYGYRELRDGILARGLPEKESEFRKLLRERSQDVVAHLLSDLRDAPGLIRERILPVNASLGRSPFEGADRFLEIDVKTTRTPEVEEFLTDLRRIVEGNWADESAAGAEQRFAVLQRVIGRLGSKDRVDIDWRNRVLDTRLHVSFLAREKDVAGRVVRVYDSAEGLSGGQRQKLVIFCLAAALRYQLTEEEDEVPRFGSIVLDEAFDKADSRYTRNAMEVFREFGFHMILATPQKLLQTLEPYVGAITSVSNPDRNASQLANVVFSVDEPEVATPPHAESRA

SEQ ID NO: 33300 - protein, 373 aa, Microbacterium sp. MRS-1
MTTLVTPSDLRARAKKLFDRDARTWAAEQQTDVVLDVPLRPPTEREALDDLNRVRQWVDAWRGVSEDSGIELEWVVRNWSRIGSQEVPVRAVLRGTDSIARAAGETDGWRLLVARLDELRGLAGSDASSVLRAHAGAIADLDGADFDRLVHVLAWLRENPESGHLVRELPIRGIHTKWIESRRGLVEALHRAGTGAPGLGLREPSPLIRIRALDASLSFQGLTDLSAPVDDLAASTIRPERVFVFENLATLLAMPDVPQAVAVHGGGHRVDLVARLPWAQTVTYWGDLDSHGFAILNRLRARGVNATSALMDMDTLFDHRDLWGTDPDPNVGVFELLTPDERATLQSLSAEGNIRLEQERIPWSYALARLGVS

SEQ ID NO: 33301 - protein, 498 aa, Rhodococcus opacus PD630
MSITADVHRLLRLRQDHAAWTLLRADSAPAILALLGRHFEHGTRRLPAPELFARLDSDLQTMRDEGLDFPRTGQAYCTEWVRSGYLLRRAAAGTREETLEPTEGAFAAMAFVASLTSQASSATESRLTTLSTQLQALARDSDPRAETRLAALLTERASIDEQVAAVESGVFPVLDGERAVERSAEILALASEVPADFARVRAELEELNRDLRARILDDDGDRGDTLGDVFRGVDLIGDSDAGRSFTAFYDMILDPARSSQIDEWIDAVLQRPFASQLTHDQKRRFRALLTEMETAGSEVHSTMTSLSRSLRHFVQSRHYEEHRRLQRSLRTAQQSAVAVATRRRPYDLLDLELVRVGMSIESVTALRLHNPADNLVTEPVLTHDAGTVDLDELRKLVRESEIDMDELSDNVAATLRAHGRATIGDVLREYPATQGLASAVGLMVLATHHGHAIDGTEDIHWISGAGVSRRATIRRRLFDPASDEFTARPAFAPTGSST

SEQ ID NO: 33302 - protein, 201 aa, Rhodococcus opacus PD630; identical to SEQ ID NO: 31517

SEQ ID NO: 33303 - protein, 1095 aa, Rhodococcus opacus PD630; identical to SEQ ID NO: 31518

SEQ ID NO: 33304 - protein, 397 aa, Rhodococcus opacus PD630; identical to SEQ ID NO: 31519

SEQ ID NO: 33305 - protein, 483 aa, Snodgrassella alvi wkB2
MNFSHSLAKYRRLYEENKVWKLLRATTAPLILAFIEQVFSSGQNEISYSQARILLDAELEKNHWYADTPAAIYINQWVKDGWLREMDNKLTKTDTCEIALRFCQSFDERNINTSASHLRIVQEAVRELVIALNENPEERIALLNQRKAELEKEITIIQTRGINTLSDQQRRERLREIYQLASVLTNDFRYVEDEIRRLDQEIRIKMIEKDNNRGEVLQATMDQEALLAQSDAGSAFESFFQLLCDSNRSTEFKEQLDIILNQISDNYLQPRQRKFLKRLLQELTQESEHIFQIRRRTEENLKTYIKSGAAQEKRTVDRLIIQLEQLAVNFSKNNINLKQATNLILPTGNIEINSPDSICLKEPIAAIQITDITEHTNSVVPSETVLTLLDTIQIKEVADSIYHNLCTFGPLTIAGLVEKKPINFGLEELVAYLRIAQHIQATDLNEKESIIIQDKQGIQIKATLPKYLLSASLFPDNLEELSL

SEQ ID NO: 33306 - protein, 264 aa, Snodgrassella alvi wkB2
MNEEKNNKSTSGGEFFDQFCEKMVTSDPISPTIDESIQNQVEIETTQSPLLQSDNNPQPESSLLPKEAKHALVALLKNGVILASQKNNLFSIISHYHVQIDSYLANIYLKLILDPTTGVAYVAQMSETLEENDEISPLIHRRQLTVHDTLILLVLRKYFQDRETVGESKIIISFEHIEELLKPFSPITNHSTIERKSLNAALNRMKERHILANVRGSDDRYEITPIIRYVVNANFLENMLLEYKKLSEKVQSDKADTVKEESNE

SEQ ID NO: 33307 - protein, 1127 aa, Snodgrassella alvi wkB2
MNKSIIDNEPFNVGQIRLNELSVYNWGSFHGLHTAKIDPIGTLVTGDNGSGKTTFIDGLMALLLPAGRASFNVAAAQGDSKDRTLLSYMRGNFGSAHDGSKTKVKSKRDQSVITGLRACYKADNGNYITLAVLFWAEPTATSSADIYRHYVIANRNLQLKELLEHFKDGKRHTLKQYLSNDATIIYSNNIFDGYQAMYRKLLHIDNKNAPALLSRALGLKKIDDLTTLIRELVLESSQIKEEARNVVKEFSALEATHNELIDVKKQYIHLGQLPEHNQSFIKCIQILDKLEQEKNGLIPYFGELKSKLYTNKLQELQQQIDFLQQQINEQEQNKLNINQQIESYHAAYLKAGGDSIESLKRELVKAKEDYSRINQQASIYQRETKTLGLNSELIQINFENNQKKATDKLQNLDQNKENALVNFAQIRAQLNNLMSEYHQTEEQINQIKLRPDSNIAFRFQQLRDEMITDLNLTIEQCRFIGELINVKESENIWQGAIERALGGLRTTMIVPYNVFSQVTRWLNTRHTGLHVRVQVVPESFQKLKSQIEFKPEGYLHKLIWRDHPYRDWLKKHLERFDLTCVDSTEQLDKTPFSITQAGLVHLEKGRFEKKDQNKINDKKSWQLGFSNKARLAILEQELSSLTEDIAKQNTLTQKKRNDLQTIEQEIELWKNLQKYSWESINLPRCIAEVDSIQKKLTELQNGDDLEQAELRWKEAKNAYENLQDEIKKLYKEQGSHNTQKDNLNVLLQQAQKDSDQGIEHDIRLMLNHRIGQYKDDTLPLVIEQQDFYYKQIDESLKKTNQKKENIGKEIVKIMSSFQQQWPIIANDWIPDISYIEDYINHLFKLEQEGLPQLQERFKERLNKHATESLARIQQQLEAEKDEIRERIQIINTVLKRTEFRKNTYLKLNIKIEQYTNVIEFSKLLKNALSLFTSDDHERRFNILKEIVSQLDKASNLAAHTLESLRLLDPRYQMSFFAEELDNQTGAVIDVLESSSGKSGGEKESFAGTIVAASLAYALTPDGYDKPVYCTVFLDEAFSNTAESVSRRVLRVFKALHIHVNLITPYKNLNLARETARSLLIAERNQQTHESSLSEVTWEEIDAQRELIKNSEIMKQAKSLGIEITSTQ

SEQ ID NO: 33308 - protein, 400 aa, Snodgrassella alvi wkB2
MTQLNENWGKLPDEVYSHIKKLEWDKQKNLKERLMHKRKFPIEISLGTPTGDQILDNMMYFKNFINQWKDFPQQHWIKWQDKKYNTLGLQRIPVTLILNNLKELFEFLGPDIEKKIEKLSKIIEPLTTYDQRFYPILIQHLSIVEQLTPQESINITSLLQQLTPSMGKGLYLRSLPLKGIDTKFLENNKILVSALLDVLYNNAIAQAGNLLKWLGCLDNPKGWLIVKPLCKKTQESLAGLPILQMDQHTLTHYELPANNILVVENIQSGLSLPELPDTIAVIGGGNNVNWLSAQWLKNKRVAYWGDIDSWGLKILSLSKTFCPHIQTLMMDEETLKLYKNNMVTESESYSDIPVNLDLSEKDLFIVLQSNKYNANRLEQEKLPNDYIHKKLKEWKNNQNF

SEQ ID NO: 33309 - protein, 489 aa, Stenotrophomonas maltophilia M30
MKHRERISRYRHLREQPQWKLLAADHAPEIIGLLQGLLMDGERTLPSSVLNERLQRALDQLNGDELSRELPRTAQAYIAHWLAQGWLERRLPEGADQEQYELSTAALQAIRFADGLEQARVAATESRLALVIEQLSQLAAQTESDPDARLSALRDERDRIDAEIARVGAGRVVALDGKRALERARQIIGLADELTEDFRRVRDDFEQLNRDFRERIIDDEGERGDVLSQLFEGVDVIGESDAGRSFQAFWRLLNDAEQSAQLDAALEAVLARGFARRLDRNERNFLRGFTSTMLERGGQVHDVLQNFARSLRGFVQSRGYLEQRRLNQLLKQAQSEALALRDEFPAQRGIGRDLQLTTSRLRSWSQWKLHDPRSAQVDGNVEYNDAAAISLESVGDLVASSEIDFRTLRRDLHDLLDAQPRLSIAQALSQREAPQGLGSVIGYLSLGTRFGNVIAGEQELAEWRGGDGQVRRARIPLVWFTQERRHELA

SEQ ID NO: 33310 - protein, 233 aa, Stenotrophomonas maltophilia M30; identical to SEQ ID NO: 31708

SEQ ID NO: 33311 - protein, 1126 aa, Stenotrophomonas maltophilia M30
MAISKHTPALFNEGLPDPRLQQFRMRRLQVHNWGTFNGLTEVPIAERGFLFVGRSGSGKSTLLDAMSALLTPPAIVDFNAAAREAERSGRDRNLVSYVRGAWADQQDSGTGEIATQYLRKGATWTALVLEYRAGDGRVVSLVRLLWISGNGTSAGDVRKHYMIAERPFDIAKDLGGFDLDLRKLKQKLSDLHHFDTFSGYAERFRDLLGIDNEMALRLLHKTQSAKNLGDLNVFLRDFMLDTPKTFDAAERLVSDFAELDGAHQAVVTARRQVETLLPARAYYNDLKEMHRRRGDDEALKLGVDSFRESRRQALIEARLREMDVRDRGLLGEEAQRRAALDNHTERLAELELQRRQQGGERIEELEREQGRAEAERDRRQAKREQASLAAQQLGAELPDDAHGFAELVERAQNELQDRQRASSALDDAISDRLGGKRDDERRFGEVRAELEAMQRTPSNIPAPMQKLRARLAEETGIAEAALPFVGELIQVRSEEQGWQGAIERVLGGFALSLLVDDKHYNDVAEWVNRTHLGMRFTYYRVRRNDDAFAREPSAKSLLHKLELREHVFESWLRRELGKRFDYECVDAKQLRNVDRGITREGQVKHPGDRFEKDDRSAVGDRRRWILGFNNHDKVGAFEREAQELAKRIASCETDIARLRGQRDRDNERRLACHELVSISWNEIDIAAPQQRLTDIEATLRDLREGNADLAKLAKQIDAVRADIEQARRTYEDVRVERGQLVKERDRLDRARQQSRALVLPSLAQEQEAGLAERLQEQGPLSLETLEAHMRQVSNALNEQLSTSQQDLNRIENQLIGCFRRFIQQWPEESGDFTVSVASAEDFLARLERLERDGLPQHEERFFDLLQNQSKNNLLALQRHSAEARKSIGQRLDEVNASLEQVPFNRGTLLTIELSDRRLPEVGEFHLQLREVLAQQQTEQRELAESQFTVLRQLVNRLGSQEGEDKRWRELVLDVRMHVEFIGVELDAETRQQVEIYRSGAGKSGGQRQKLATTCLAAALRYQLGGADSQLPSYAAVVLDEAFDKADNEFTALAMNIFDNFGFQMVVATPLKSVMTLEPFIGGACFVEISGRHDSGVLLIEYDEEGKRLKLPERSRQQANEPEEAEA

SEQ ID NO: 33312 - protein, 450 aa, Pseudomonas aeruginosa PA99; identical to SEQ ID NO: 32505

SEQ ID NO: 33313 - protein, 249 aa, Pseudomonas aeruginosa PA99
MAGVFDRIAGASGADETELTVEPMALDDGMDDEQPLMSAAVQVDERRTPQRVREAVQEMLKYGLLEESHKPNLYRSALSNIEAVDRILEPLDLAMGVDEVRGLLFVIVRQGEVTEQDDWSHPLVRRQRLNLEQSLLIAILRQQFIAYEQESGTGASQASVVVDELIPQLQVYLGELGSEAKERNRIITLLDQLKGHGLVSALDAHDRVIIRPIITHLANPENLQALVAWLREQVEGAATPAADGEEDMA

SEQ ID NO: 33314 - protein, 914 aa, Pseudomonas aeruginosa PA99
MARLRDYFEVGENAFTLLNRAAGLKQLNSIDEIFRELVLDDRSAFERAAEVAGSFDDLTDIHRELETARKQQRSLQPVADGWERYQVLQEQLHDKQALEGILPVWFAEQGYRLWLAETNRLEKEYKKAELDQEQCKSQLEAQKGVVDQHRQRYLRVGGAGIDQLRERIADWVRECDKRSLKAEQYQLLAKGLGLADELSAAALKENQQHIAARLEILDQQITDARQKAFDAGLVQQELNGRLQTLQQEGAEVEKRPGSNLPGQFHAFRSDLAQALGVNESALPFVAELVQVKPEELDWRGAIERAIGSHRLRILVPQGSSQAALRWVNQRHNRLHVRLLEVQEPTSRPVFFDDGFTRKLTFKEHPYREAIKALLADNDRHCVESPEQLRHTPHAMTAQGLMSGKERFFDKQDQKRLDEDWLTGFDNRDRLAFLAEQIREVNERLEPAKLALDAAQGDVRQLETQASLLNRVKELQFEDIDLPGAQSQLESLRTQLATLTRPDSNLAMIKVELDAAEALQESLDQQLRQLIEQYVQLKTQFDQAASATRKAYNSAEKGLNDTQRELAQAHFPTLTADDLGDIVELERKHTRELQGQLKALGEKLGDQKSELAKRMSDALKVDTGALAEVGRELVDVPRYLERLRVLTEEALPEKLKRFLEYLNRSSDDGVTQLLSYIDHEVSMIEERLDDLNSTMQRVDFQPGRYLRLVAGKVIHESLRTLQRAQRQLNSARFIDDEGESHYKALQDLVGLLKDACEHSRNQGAKALLDPRFRLEFAVSVIDRESRNVIETRTGSQGGSGGEKEIIASYVLTASLSYALCPDGSSRPLFGTIVLDEAFSRSSHAVAGRIIAALREFGLHAVFITPNKEMRLLRHHTRSAVVVHRRGLESSLVSLSWEALDEHHQQRIKAMHEVAH

SEQ ID NO: 33315 - protein, 486 aa, Photorhabdus luminescens BA1
MNFQGLQAKYRRLFQESAAWKLLRADNSPLILAFLGELFSEESEVPFSRARVSLDAELVRCRELGLWETETGAGTYLNKWIREGWLREMDDMLTKTDASEVALRFSQGLDERSTGTTASHLRIVQEAVREFAVAISPNIDERVTLLEHRKAEIQREIDALRAGVVLELTELEQRERIREIYQLASVLTGDFRRVEDEIRQLDQEIRIQIIEGDSTRGDVLLSVLEKEALLAKTDAGSAFESFFDLLCDQNRTMELRDQLRSILNRPAAEHLTTQQRQFLNQLMRELSRESDRVFQIRRRTEESLRAYIESGTAQENRAVDRLLGQLERLAVELRNSGYDLQTATTLSLPVGAASISSPESMLLKSPDEKLDTSGAEEQINSREPSMQMLDCLDVVQIRLIAERTLATLKEFGPMTIASVANYHPLNSGLEELVAYLRVAKSVGAASLEGKESIEISDKRGVRLRASIPTFLLSADLFPDSLDELVL

SEQ ID NO: 33316 - protein, 298 aa, Photorhabdus luminescens BA1
MHKGKKLNKDNGILATLGKSNSDPQEEQKTGFFDQLIKHHTQSEYNPLTDTAGVESDVAFSVVNQSPSCDVDNVLVSEQAENSNSDMPPDARRVLVSLLRQGVILSSQKAKLFELLCRYQSAVRKHLSEVYLKLVLDEKAGVAFIAGFQNEEDTESLGIDDDEVVSLISRRTLSLYDTLLLLVLRKHYQDRETSGEQRIIIDIERIESHLTPFLPLTNSTKSDRRKLKGALDKMVTKKILSSVRGSEDRFEITPVIRYVVSAEFLESMLNEYLKMAREKGIELNKNGGDAVDYQDEEE

SEQ ID NO: 33317 - protein, 1132 aa, Photorhabdus luminescens BA1
MTDQTLSANSLFHVGQIRLAELSVYNWGSFNGLHTALIDPMGTLVTGDNGAGKSTFIDGLMALLLPAGKATFNVAAAQGDRSDRTLLSYMRGSFGSAHDGAGTRVRSKREFGVVTGLRALYQGDDGSKITLAALFWITKSTNVLADVTRVYVVAKRDLTLKEMLNAFGDGNARAFKQWLRDDPAITCCDDNFSDYQELYRKLLYMDNKNAPALLSRALGLKKIDDLTGLIRELVLEPSTVKDDAKKVVEEFADLVAIHSQLVDARAQKMHLSKLPELSSIIEKTMREFEELTAEKNSLPVYFGEVFAQLWSEKIADIESELEALLFEIKQAEEQKTDADKLVERRHEEYLQFGGDKIESLRKEIGHTQTQLNRVVRNSSQYQTHVNELSLPSVLEEAVFLKNQSAASARLASIQRDEEEYQDKFAAISAKFSELQANIHDISQEIREIEARPDSNIDVKYQQLRDELVNSLELSKDQCVFIGELIDVEDSEKIWQGAIERALGGLRTTLAVPHHCYSMVTRWLNVRHTGLHVRVQVVNDSAINRGHSAEFKPNGYLKKLVWRTHPYQEWLKHYLQRFDLQCVSNTEELDKTPFSMTQQGLMHMDKGRFEKKDQHRIDDRRRWCLGFSNKSRLAILNNDKKELTLQLAETEKKVSQARQDLNTVSDRKILWEKIQSYCWDDINAPYWHEKLSDLQADLKVLEQSGGDLDKARERWESAKEQLVQIQSVLNQLNSDSGGVKNTLKNAKEEWSKAQAKASKGLPDSARQLLALRVGVLSTNDLSQMSELVSKVEEDLERLLDISRNSKDRAERSAISIMVSFRSNDKWQVFTVDWQSNIGSLPDYLNHLRQLEEEGLPNLVEQFIERLNKHATQSLARIKTKLESEREDILERIDIINRVLKRTEFRSGTHLKLGSKREKFPHVNEFEQHLRKVLSQVTSDDHEARFRQLAKVVEILGKASAPGSSNTLESLRLLDPRYQMSFYAEELDSNTGEIRDVLESSSGKSGGEKESFAATIVAASLAYVLTPDGYDRPVYCTVFLDEAFSNTAETVSRRVLRVFRELHIHVNLITPYKNLNLARESARSLLIAERDQENHDSHLCEVTWEEIDRRMGEEKEKKLSDEAADLGIEFEKLT

SEQ ID NO: 33318 - protein, 398 aa, Photorhabdus luminescens BA1
MKKGQYEVRWGLLPAQVKSIIRQREWDNRSSLKDRLLGNRAFPIRVGLKPPKGNSAILDIAHFQRFIDEWRSFPYQDVVEWSSKNFRELSEQRIPTFVVIESMQHLIQFLGNDALSRSKVWERNMKPFLRIDKDLYPALVKCIDIVEKLSLRDAELLAKLLPQLKQGLGEGQYLRALPLIGIDTKFLENHQILIEELADIIHKGAVSVSGGLIAWLGCSINPKGWLTIRPLCRAATVALGGMPILQIPSELLRRHELPASNILIVENLQSGLALPEMSDTIAVIGGGKNIAWMDAAWLKGKRVGYWGDIDTWGLSILSDARNKFMDIEPLMMDVKTVKAHEDRMVPEPNPVESNPTLLNEDEAKLFNDLISGRFQSSRLEQERLSSDYIRNKLTNWLS

SEQ ID NO: 33319 - protein, 524 aa, Bifidobacterium animalis subsp. lactis CECT 8145; identical to SEQ ID NO: 30666

SEQ ID NO: 33320 - protein, 269 aa, Bifidobacterium animalis subsp. lactis CECT 8145; identical to SEQ ID NO: 30689

SEQ ID NO: 33321 - protein, 1165 aa, Bifidobacterium animalis subsp. lactis CECT 8145; identical to SEQ ID NO: 30668

SEQ ID NO: 33322 - protein, 406 aa, Bifidobacterium animalis subsp. lactis CECT 8145; identical to SEQ ID NO: 30669

SEQ ID NO: 33323 - protein, 481 aa, Mycobacterium mageritense DSM 44476
MDDNAVMSAAELLELNRDVQGSRAVRLLATLNLGVYATLMERHLAGGMIAETELVVRLERDLEALGESGEQSGLALIKTWASQGWLHRVVDHRAEHERNICYLTQDARRALDFVRGLRRNDTIATGGSINGIASRLKQVAVRVGNDPDRIRAGIEAEIAALHAELDELDAGLRPEPDVTAMYDEARAIAMQMERLITDIGLYGTMIEQATHALDDPIDSNIEYRDRQRQMYADYQAAWDSAGRDSHRAFLRMINDPQQRAEFEADIATVAATLPELDPELRKVMAGFFELVGHQIDEVERIQQRCAQRIKRFTAFGTLEQTRGVARQLNDAIGAARALLKVSLTDSRLPIDVPLARHAISSVGALSFKINDLSAPKPAQIAEGEVDLSTFAALTTQVDAPAMSEMINTALRDAPLSLPDAVAKLDSAYLGHVIVLWSWALKQPGAQHAEPATVRFRSLDGRDREIEVPNLMFTEPVLGGAS

SEQ ID NO: 33324 - protein, 228 aa, Mycobacterium mageritense DSM 44476
MTTENTAEPQDAAIDFASLPEVDRNGRAPQQRRPRFDGDVSAMPDRACWALQHLLTRRYISSESDRDVYSWILEYRSDLAVRLSELDLQLRIAENVDIAYVEQARYESARGIKLLRREPLGTYDSILALHLAQMMRAAGDQSFMITRDEIHGLFAGVLNDTDRDAVTFTARIDGAIARLAGLDILRKTRDDEDSYTVSPVISAIMTASVITELQQQFEALMKGGSDDE

SEQ ID NO: 33325 - protein, 1117 aa, Mycobacterium mageritense DSM 44476
MTSEQFHLSRLQIINWGVFDGYHSIPFSAGGSLIAGASGSGKSSLLDAISLGFLPFNRRNFNASGDNTAAGSSAGRRTVDKYVRGAWGQRSDAGSSQVMYLRGDGTTWSAVAVTYRSNSGRTITGLVLKWLTGESRSDSSSRFVIGDGDLDIEDVCNRWAAGRFDGNVFKGDGWRFSTKVESQYLAQLYASIGIRASDAAQQLLGKAKSLKSVGGLEQFVRDFMLDEPDSLARLPEALKQIDPLVEARELLAVAQRKRKILGDIEAIQQRYASESTDLGIIDLIDMPIVRAYTDHVRLQQCPAQIESLDTEVNQLDNEYADLTRQLNLAKVEGDSINAQINGASANVAPLQAQVTAAEAQAEEVSRRRAAYEELVTAQGVAAPDNADEFWNLREEFTRQAAEMLTNLDLGREASTDAEYAQKSARIARDHAMKELKRVEHVGSALPESAVAMREHICAAIGVDSDELPYVAELLDLQPDQTRWRVAVEKVLRSVGLRLLVPDRHYAKVLRFVNETNMRGRLALHHVRSTASGREPEPNTLAGKLFVVRPEHPCAAEALDVIAAAGDHLCVDTPDVFSRFRRAVTDTGLYKDSDRLAIKDDRRPLKPSEYIYQGDITAKLDALNVELAEAEEAFEQARRAADEIAAQRQQWRDRASACKAIYEQFPQWSHIDTETADGHAERLREQYELLLADNPDIEALSARAEQCWTDIQTLMTRRGAIQTRRDDLDGRRTRLLELQERLSPPAVSEPVTELLRRYAAEIPVDLELLNPEPHRDALFTAIRRERDQLTESRRRSYDELARIISTFDTSFPDAIPNDSDDFDERVHDYVAVCRHIDERELPDAYDRMMRLITEQAPDAILTLHRVAEQETRRISEQIDRVNTGLGAVEFNTGTRLTLRATPRHLAAVAELTDIVKAISRRIAEVGLGDKKAILEQYADILRLRNRLASTAPEDRAWTRDALDVRNRFTFDCAEWDVRSDELIRTHSNAGDNSGGEQEKLMAFCLAGALSFNLANPESRDNTPVFAQLMLDEAFSKSDPQFASQALQAFRKFGFQLIIVATVQNATTIQPYIDSVVMVSKTEATGRNARPVASVASKTISDFTALRKGLAEVKVPEPV

SEQ ID NO: 33326 - protein, 483 aa, Mycobacterium vulneris
MSGLSLDQLYQLNREVADSRSARLLATNNLATYLTLMERHLDRGAKLTEIELVVRLERDLADLGSETDQSGLSLIKYWASQGWLHRITEQSGDTERNVCYLTYEARAVLDFARRMRREDTIATGGSITGIAAGLRRVAGQVSNDPERIRADIEAEIAKLRDELDALEQGQRPEPDLVDVEDEARAIALQMEQIVSDIGQYGSMLNRITTRLLDASADTDLGYRERQRQLFDDYESLFASRESASYTAFTRMIQDPEQRAALVADIEAVTRELPHLDPGLREVMTGFFSLVSAQTAEVGRTRQRCARRIKRFVASGTLEHSRGVTRQLNDALTSAHELLSVSLADSRIGVEVPLVRTDFNSIGAVAFKIRDAIPPSQAEPSEGEVNLSAFSALASQVDAAELAELINGAVAAGPLSLPDAIGMLDSAYLGHVIVLWSWALKQQTAGEAESVRVRFRSLEGADREIEIPRLVFTEPIPTVSESML

SEQ ID NO: 33327 - protein, 255 aa, Mycobacterium vulneris
MTDTPNTETGSDSVPVSDSAIDFDALPTIDAVERSTDQRRAPRFDGDVSELPDRACWALQHLLSRRYVSKDNHSELWSWVTRYRTELTVRLSELDMRLCISDDHDIAYVEQADYESQWRRRLLRRETLNTYDSILALHLAKLMRAAARDENVLISRDEIHELFAGVNNDTDRDTASFDKRIDNAIERLTDIDMLARNREDEDSFTISPVVNAIMTASMITELQQQFEQLKRAANGTVDDSDDVAARLEDEVDAHG

SEQ ID NO: 33328 - protein, 1120 aa, Mycobacterium vulneris
MAEPTNQFSLSRLQVINWGVFDGYHSIPFSRHGTLITGSSGSGKSSLLDAISLAFLPSHRRNFNASGDTTAAGSGTGKRTVDKYVRGAWGERREGTSRQIMYLRGTGPAWSAVAVTYSDRTGRSVTGLVLKWLAAEKTSDPGSRYYLIDDDRDIFGLCNRWAANGYDAAVFRDDGWTGGRSESQYLAQLYSSIGIRASEAAQQLLGKAKSLKSVGGLEQFVREFMLDEPASLSGVEEALEQINPLVEARGLLDVARRKRNTLGNIAAVQARYADEAAKFGVIDTIDNAMIRDYVDHVRLAQAGPEIANLDDQITQLGAQRDEFGTQQRQLKNEHNSLMAQINTVTVDLVPLQQRLTEAERISEEVSRRRSGYEDKVTSLGLTPPDNGEEFWSLRETLMEEADRLHRELFTGNQPYVEASAKEVRAREARESIEAELERVQRLGSPLPRTEYEMRARIARALDISERDLVYVAELMELKPDESRWRLAVEKVLRGAGLRLLVPDAHMERALRFVNENDMRGRIQLQHVQHGAQLRTPPAGTLATKLQLADPTHDSAVEALNVIAAVGDYVCVDDPGEFTEQSRAVTDQGLRKDSGRLSIKDDRSRLRPSDYIFLGGTAAKVEALQDDLTAAQEVYQVARTARERLDEHRGQLQSRERACRALCDQYMQWSDIDTDSVDEMLERLQGEHDLLVSDNPDAERLQQRADDCWERVEKVIQQIGSLNERETTLDRRRTALLELSEALTERLGSSEFPSHARDTIDGYAADIALSLELLEPEPYRNELIRVISRERDRLRADRNRSHDELAGIMAAYDSSFPDAIPNDSDVFDERVHDYVALCRRIDERELPDAYERMQRLITEQAPGAILNLHMIADNEARRITEQIARVNTGLGAVEFNRGTRLTLHAGTRHLAAVDELNEKAQRISARVSLVSFGDETAMFEQYTDILQLRKLLAGNTPEDRQWTRDALDVRNRFVLYCEERDAETGEVIRTYSNSGDNSGGEQEKLMAFCLAGALSFNLASPDSNDTRPLFAQLMLDEAFSKSDPQFAQQALSAFRKFGFQLVIVSTVQNSTTIQPYIDNVVMVSKSDASAPNARPVASVTSASISEFADLRKTSGDAVPSA

SEQ ID NO: 33329 - protein, 477 aa, Mycobacterium cosmeticum
MHELLQLNRDVQSTRAVRLLATQNLAIYATLMERHLLEGVVPETDLVVRLDRDLEDLDEIEQSGLTLIKTWASQGWLHRVVKGDRNVCYLTQDARRALDFVRGMRRNDTIATGGSINGIASRLKQVAVRVDNDPARIRAGIEAEIAALHRELEELDAGLRPEPDVTSMYDEARAIALQMERLITDIGLYGTMIEQATAALDDPIETNTEYRDRQRQMYADYQEAWESAGRDSHRAFLRMINDPEQRMAFEGDIAAVAGALPDLDPALRKVMAGFFELVGHQIDEVERIQQRCAQRVKRFTAFGTLEQSRGIARQLNEAIGAARALLKVSLTDSRLDIDVPLARHTISSVGALSFRINDLSAPKPAAIAEGDVDLSTFAALTTQVDAPAMSAMVNAALRDAPLSLPDAVSMLDTPYLGHVIVLWSWALKQPAAGGGNPDTGKTDTEPARVRFHSLDGRDREMEVPHLMFTEPIAGVAS

SEQ ID NO: 33330 - protein, 222 aa, Mycobacterium cosmeticum
MTDTPVDFASLPEVDRTGRTAPQQPRRPRFEGDVSALPDRACWALQHLLTRRYISNESDSDIYSWIKEYRADLAVRLSELDLQLQIAEGVEIAFIEQARYESARGVKLLRREPLGTYDSILALHLAQMMRAGGDASFVISRDEIHGLFAGVLNDTDRDAVTFTARIDAAVARLAGLEILRKTRDDEDSYTVSPVISAIMTASVITELQQQFEALLKGGAGDE

SEQ ID NO: 33331 - protein, 1142 aa, Mycobacterium cosmeticum
MSEQFHLSRLQVINWGVFDGYHDIGFGPGGALIAGASGSGKSSLLDAISLGFLPFNRRNFNASGDNTAAGSSAGRRTVDKYVRGAWGQRSDGGTSQVMYLRGEGTTWSAVAVTYRSNTGRAITGLVLKWLTGESRSDSSSRYVLGDGDLSIEDVCNRWAAGRFDASVFKDTGGERSDGKYTRGERSDGEYGGWRFSTKVESQYLAQLYSSIGIRSSDAAQQLLGKAKSLKSVGGLEQFVRDFMLDEPDSLARLPEALKQIDPLVEARELLAVAQRKRKILGDIEAIQVRYASESSDLGIIDLVDPPMVRAYTDHVRLRECPAQIEALDATITQLDNEYADLTRQLNLAKAEGDSLNAQISGASANVGPLQAQVTAAEAQAEEVSRRRAAFEELVTAQGIDVPDSADEFWELREALTKQATEMLGKLEWGREASTDAEYAQKSARILRDNAAKELKRVEQVGSALPEFAVAMRDHICTAIGVDPGELPYVAELFDLRPDQQRWRVAVEKVLRGVGLRLLVPDRHHAKVLRFVNETNMRGRLALHHVRNSAGGTEPEPNTVSARSVSDSSRTLAGKLFLVNPDHACAAEALDVITAAGDHICVDTPDVFARFRRAVTDSGLYKESDRVAVKDDRRPLKPSEYIYQGDISAKLEALHTELAEAEESFARARKAADDIAAQRQQWRDRAAACRAIYEQFPQWSQIDIETADGHADRLREQYELLLADHPDIEALSARAEECWTDIQTLMTRRGAIQTRRDDLDSRRTQLLELADRLSPPAVSEPATELLRRFAAELPVTLELLNPEPHRDALFAAVRRERDQLTESRRRSHEELSRIIATFDTSFPDAIPNDSDDLDERVHDYVAVCRHIDERELPDAYDRMMRLITEQAPDAILTLHRVAEQETRRISEQIDRVNGGLSAVEFNRGTRLTLRATPRSLAAVSELTEIVKAISRRVAEVSMGDKKAILEQYADILRLRNRLASTAPEDRNWTRDALDVRNRFTFDCAEWDVRTDELIRTHSNAGDNSGGEQEKLMAFCLAGALSFNLANPDSGDNTPVFAQLMLDEAFSKSDPQFASQALEAFRKFGFQLVIVATVQNATTIQPYIDGVVMVSKTEATGRNARPVASVATKTITDFTALRKDLACV

SEQ ID NO: 33332 - protein, 462 aa, Draconibacterium orientale
MIIEFLLNTFSNEQSSISTENIHNQLADFLEYKQIENDDESEINAFDTYEEKAKKYILNWTNKGFLANYPDEQGEVFYELSANSSKAIDWLASLKKEEFIGTESKFNNIFNQLKELVEFTNEDAEKRIELLEEKKLEIEQQIQRIKIGEDVKVFEEFEIVPRFNQLNQSAKELLSDFKEVEDNFKEITKGIYQKHADGSLTKSDILEFTFDALEALKESQQGKSFYAFWSFILNPELQNRWESLTRELYKTLEEKSIPVNDPFLKGMKKHLHGSGQKVYKANDKMAEKLSRIIRESESSKSEATKKIIQEIKKQLVEISKTKKKLKPDISFELETETEINILFERKLTLEQKEEISYTDKPQVANEDITSSNHLNKLFSQSNIDKELLRKRIKSILKEKSQTTLLDVIENYGGLEKGLPELFGYIGIVKEFKHSINLEKTQNVAFDVENKKQIKIPEIILTK

SEQ ID NO: 33333 - protein, 192 aa, Draconibacterium orientale
MNSLEQNIKPYSKAIVKLLKGVIDRNSNEWEDLILYQNEIQEYISQIGLELILKKDDGFAFVKQFEDNEGKTLGLVTRRQIGFETSIVLVVLRQSLEEFDSNPTQLATEKFITDTEIKDELELFLQEGYNKLKFQKDLESYIKKAVELGYLKEIGKKDNETKYQIHRIIKEKITLDILQDFKIKLQEYVESV

SEQ ID NO: 33334 - protein, 382 aa, Draconibacterium orientale
MITPPEIKKKAERKYVSFLQSLVLNTPFEKLVIRGDKTYTKSSLPEFEKEIQLIITQSKEKKGFGYTLEFQQVKTKYLGTQDLPTSIYFDTEIDFLKFLKREKEVELFRESIIKIIKTFPELKEWIIKNPIRIIQNQTEWESILKVCQYFTQNPNPNLFIRELPINIHTKFIERNQSVIKDLLDILISEHINKEEKQFEKRFNLKYAEPQVRFKILDREISRKFFLGIDDVAIPKSQFEALDLPVEKVIVSENKTTFYTTLTLPKLEKAIAIFGSGFSVSNLKNVSWLEDKELLYWGDIDVQGFEILSQFRGYFPQTKSILMDRHTFDKFFENDNGTPSGISAQLNLTDKEKQLYDILKLNNWRLEQEKIPFDYVNKYFENE

SEQ ID NO: 33335 - protein, 506 aa, Corynebacterium glyciniphilum AJ 3170
MVIMRAEAAYQRTAAAFKNPTLDLLHGRYAPFVVAALSLIFTPDRPTVAISDAHVEVGDVVEELRAAGYDEDDRGSRGLPSGNGREICRYWVRVGWLVPQIEDDVEVYRLSAQAVGALEIVGRSGLGRARVSRSRVRTLLDAVEHLAHEAETDPQERIATLRAERAAIDEEIDKLERGEVDPVDDDQLLEEAENVVHLSRELPADFARVAESINAMQRDVVADLRRDVRPTGEVLREYLHRGQHVMEATPEGRAFSGALNLIGDPENIDHLTDQLSMLMALPFSRHMSADQRRELLAIARRVEQGVQEVLTAQRRASHVITAQVRTHDPVRDREVDDLLRNVMSGLQTWMQETAADARAHDAVAPLRSFPTAHLGHLRQTLNDLHPPGAPEPLRREDEEGWDNPDIEFLHADTRAWGGPHYPELEQFVADLDGPFDLATAFGTVPDDTRRPVDLLGLLEIAHRNGMEEGDDVSVVETLRPDGTVRRFAFGAVTARAAANTVKGSTE

SEQ ID NO: 33336 - protein, 218 aa, Corynebacterium glyciniphilum AJ 3170
MTEPTDPPTDPFIDTVSMEQDPDECFAGDRGVLDPEVRRVLVRLLQRRFLQADRNRDDWKVLMDNQQVIESRLHDLFVRLVVDSDRGVAYKQQVRSDELDVPILLRDEAYTRAETLVLVYLRTIYQRESTAGELAARVDVEEVEQTVMTYFTEANGDIARRQKLIRNALGRLRQEGIIDEETEGRYRISPLVEIVLSADRLRELDDWLQEQIQGGSEQ

SEQ ID NO: 33337 - protein, 1113 aa, Corynebacterium glyciniphilum AJ 3170
MTMLDTLFGLVPAESRGQQWLADELHLVNWGGYEGAHRVKFSPEATLLCGGSGSGKSTLMDAYIALMMPHTTPFNGASNGGVTGRPRGEDQRNILSYSRGKIDESRTDDGTQVTVLRGDGCDTWTAVSMTWTDHDGSRFTAVRAWYVPASARVLEDTVKVRGVVEGDFDPASLETAASQRLADSAVKAAGLETMATDREFLARVHSVLGIGAAGAGAKAMSLLARIQAGQQITTVDELYKRMVLEEPETMVTADAVVAHFDELESTRTRMVTAQKQVRVLQPIRGIRSKIEESAERLRLLDEIGRFSDPASLTALWRTGRRLELLHEAETEVRKQKQAADADVRAQMALAEAAETERDGLLDVLRHSGGDRLDTAERELAQVERRLSTVQQARARFDENIACLNQDVDTEADFTALAERARAALADPGAKTSARDDYAESRVELKKLRRQLAELETEQRWTEQRRDNIPERLHVARRLLADAAGLSTEDLPFVGELIDVSTEYEPWREAFNLALGGFATTMLIDADDLARFRAAVDAVRTDVRLRYEGVHTGFAQRDRLDPQRLPGRLDYRETAFTGWLQDRLERQFGFFCVDSTDGLSARQPALTITGQVSQGDRGAHGGHGGRNVLGFSSRRRLAELEGDVADLREKIRVAEDAERRAGAELDDLDARHAAYARVTDVSWNQIDVATVEQERERWAGIIADITDGNPEIADLQQQIATLKTKVTRLQESTGRAKGDQERLARQWADTVDEVDAAQAALDEAEGAERSLSDAQTSYLNERFDPAGGGASGSRLARFDAALDTASRRLEDDRAAAQSTVSEQRETLRRTLETFLDTWPNPTLRADPDTSLKDFERILEDLETSGLHELEAEWRNSLLTLSGNDLTNLDSTLGRSLREIRERIEPINRIMENLPFYDDDHRLQIVPRENQSEVRRRFRKDLRDVRRLIEDAASDAEREQAYERMARLINRIRRTAPDFADLVDVRNHVRVSAEKIHAESKEHAALYDHIGEKSGGESQELIAFIVGAALRYQLGDADAERPRYAPVFLDEALIKADAHFTKRAIGAWRGLGFQLVIGAPNDKYSAIEPHVDVEYDILKDTQGRSWAKPKVALLD

SEQ ID NO: 33338 - protein, 499 aa, Pseudomonas aeruginosa BWH033
MEESTQHLTERYVSSRSQHPAWLLLASRRAPLVLSCLRTLFERANDGIVVEDALQGLSELLSSYASQELFEIDADNVQLQAGRELREWIKRRLIVEREGRVYATDALEVAIQFVESLDSRMMTSTASRLSVVQREIENLETNLNPSPAGRIASLRRRIHDLELELKQVEAGHIVVLDEAQAIEGIREVYSLATSLRADFRRVEDSWRDADRALRQSIISEQYHRGDIVDLLLDGQDSLLSTPEGRVFDSFQQQLRQSIELDDMRARVRTILRHPAASKALQRSQQKEMRWLVLRLVQESQSVLQARARSERDVKGFMKTGLALEHHRVGQLLHDIFNAALGLDWQRQSQRRKAVPLPPIGIPISGIPSVERLRFKDVSTGADAELNLDVVSAGLDEIDADFWDAFDGLDRNALIRETLSVLAQQGRPLSLGELAALLPPTHDLETFSLWLGMAREAGLHVYEDEAESVELVDSDQQRWRFHLPLVGMDSVALKDIDWEL

SEQ ID NO: 33339 - protein, 245 aa, Pseudomonas aeruginosa BWH033
MAGIFDQLANSAGDDQRPAELPADESEQAAPPQPHEPSDDSGRTHGRIRETVQELLKYGLLEDSHKPNLYRLAVTHVAEIASVLEPLDLGVSIDEIRGLAFVTVRQDVRAEPDEWSHPLVRRQRLNLEQSLLIAILRQHFIVSEQESGIGTTVAQVAVDDLIPQLQVYLGDLGSDAKERNRVLTLLDQLKGHGLVSTPDAHDNIIIRPIIAHLANPENLQALLAWIQDQQRLESDPIDAAMEVEE

SEQ ID NO: 33340 - protein, 1101 aa, Pseudomonas aeruginosa BWH033
MKQEALWRDSETFVLTSVEMFNWGGFQGLHRAPIDGAGTAVIGPTGSGKTTLVDALMTLICASPRYNLASTGGHDSDRDLASYVRGVTGPGDGSAGQSHIARSGKTVTGISATLNRESGMVRLGALLWFEGTSSSAADMKKLWIFSTSPDHTLEHWLSVQHEGGMAALNKMGSSEAGIWTYQSKKQYLARLRDFFEVGENAFNLLNRASGLKQLNSIDEIFRELVLDDRAAFDRAAEVADSFDDLTEIHRELDVARRQQRTLEPIAELWSRYQSLESQASEKAALERLVPVWYAEQGHRLWLAETERLRIESRQAEAEVASAHELLEAQRQRTDELRQLYLLKGGTNIDQLRARVNDWSKIASKRAIDSKQYQSLARNLGLSDDLDSLVLQENQATAESRLVALRSDLEQAKLTSFQLGVAESEQSSLLARLKTERQEVERRPGSNLRPDFQSLRSDLAAELGLDDSALPFVAELVQVKSEEHRWRGAVERAIGGHRLRILVPPQSIEHALRWINNRHNRLHVRLLEVKHPESPAVFMPDGFTRKLTYKDHPYREALKALLAENDRHCVDSPEVLRSTPHAMTAEGLMSGKARFYDKQDQLRLEDDWLTGFDNRDRLAQLASQIQEVTERQAQAAQELKNALAAVSLLEGQIRAFEQISHVDFADIDLPGAQKQLDELNQGIQELLQPDTDLAAAKQAADQAAELVGTLDKQHQQAIAKKALVDTRFEHAATSTRKAFSRSEVGMSDQERELAIRYFPEVAPKYLAEIGELELQFTRSLQGEISGLKDRLSKLQTELAKKMSDALKEDTGALVDAGRELDDVHKYLDRLRVLTEEALPEKLKRFRDYLNRSSDDGVTQLLSYIEQQVALIEERLDDLNSTMCRVDFQAGRYLRLIANKVSHDSIRALQRAQRALNSARFIDDEGESHYKALRELVDILREACERNRTQAARTLLDPRFRLEFAVSVIDRNTGNTIETRTGSQGGSGGEKEIIASHVLTASLSYALCPDGSSRPLFGSIILDEAFSRSSHAVAARIIGALREFGLHAIFITPNKEMRLLRHHTRSAIVVHRRGMDSSLVSLSWEALDEHYQQRMKVQSEATT

SEQ ID NO: 33341 - protein, 352 aa, Pseudomonas aeruginosa BWH033
MRIGVPSAREFSQNPGAVQRHAESWKKVAIGLVDWEPVSYRAGAEPILLPSQWCLRTPSEWIAATMDAAVCREYADLEHIVESVDVAFRALLVTQRSLWLKKKPEEVIAAADLALRLQPGCAMGRPLRLLAEHGVDTKFFERNAGLLTRLLDERFQGEPSEMGLNTFLGALEENEHWVLVAPLCDGLLPFKKLRLTTAQLKESRLPGSRLIVVENEKCLHQLPALDDAVAVLGCGLDLQWMAASWLREKQLAYWGDIDSWGFLMLSSVRVLCPDISALLMSRDVYELYAPGSAVEEPVTAQVYPPSGLCSEEKELYSHLLGQKKGRLEQEYLPSAAVEAAIDLWIDRTSNDV

SEQ ID NO: 33342 - protein, 450 aa, Pseudomonas aeruginosa BWH058; identical to SEQ ID NO: 32527

SEQ ID NO: 33343 - protein, 249 aa, Pseudomonas aeruginosa BWH058; identical to SEQ ID NO: 30516

SEQ ID NO: 33344 - protein, 1101 aa, Pseudomonas aeruginosa BWH058; identical to SEQ ID NO: 32529

SEQ ID NO: 33345 - protein, 381 aa, Pseudomonas aeruginosa BWH058; identical to SEQ ID NO: 30518

SEQ ID NO: 33346 - protein, 484 aa, Pseudomonas aeruginosa BWH058; identical to SEQ ID NO: 32845

SEQ ID NO: 33347 - protein, 251 aa, Pseudomonas aeruginosa BWH058; identical to SEQ ID NO: 32980

SEQ ID NO: 33348 - protein, 1128 aa, Pseudomonas aeruginosa BWH058
MLEASEVSLSELFSTGQIRLAELSVYNWGSFHGLHSAKIDPEGTLITGDNGAGKSTLIDGLMALLLPSSKASFNIAAAQGDRTDRTLMSYVRGNYGKAHDGSETATLLKRSGATATGLRALYQADDGSKITLAALFWITQASNSLNDLKRLFVVGKRDVGLDELLHLFGEGNARVLKQHLKEDPLVEAFDSFTEYQETYVRLLCMENRNAPALLSRALGLKKIDDLTSLIRDLVLEPSQVKEHARLAVSEFDDLVSVHSELDDARRQRDALIELPETSQALNQAREEMRRISAELAGLPVYFGEQCSRLWQMRLKKYEAELLQLAEEMTRLGALEEQATERVQALFHAYQSQGGERLEGLRKDLKAATQVHHDSVRDARLYQMDVRDLSLPDTLSLDVFKQNQVRAQTELADMPALRQARQDQFASSAANLSREQTQLKELVGEIEDMESRPDSNIEPSYQKLRDQLVESLSLDPAEVVFVGELIDVLEAHRPWQGAIERALGGHRTTLLVPDERYRLVTKWLNTRHTGLHVRVQVVPLNQHPQVAEFLPDGFLKMLDWKPHPYRDWLKKHLSRFDLHCVASTEILDQTDFSMTIQGLVHLDKGRFEKKDQQRIDNPRFWCLGFSNKGRLATLRKDRVELEADVKKLAQLTADARMAMDDLEKHTRVWERIAQLTWAAIDVQSAQDRMQSLRADLEALERPDSELGVAKARWEQAGAELKEVQGKKELVSKKVGGLESDKLKANQQLELALDAARTGLVDEVRELLSKRVGQLDLDDLEMVSELENRHRSALEEARKGAHNREFRASNKASGIVSEFKTKWPLIANDWLAGVDALEEYVDHLAHLEQEGLPDLVERFRERLNRNATQSLARISQTIQAEREDIQDRIETINDVLERTEFRQGTYLRLGSRPEIFEHVKAFNAQLMRVLARAGSDDHEARFVELKELIEKLEKATNPATSGNLESLRLLDSRYQLSFFAEEVEKGSKKVRDVLESSSGKSGGEKESFAGTIVAASLAYVLTPDGSDRPLYCTVFLDEAFSNTAEAVSRRVLKVFRELKIHVNLITPYKNLNLARESARSLLIAERDQDKHESRLCEVTWEEIDEQLARHEQQGLQKAASSLGIEVEPDL

SEQ ID NO: 33349 - protein, 397 aa, Pseudomonas aeruginosa BWH058; identical to SEQ ID NO: 32942

SEQ ID NO: 33350 - protein, 450 aa, Pseudomonas aeruginosa BWH055; identical to SEQ ID NO: 32505

SEQ ID NO: 33351 - protein, 249 aa, Pseudomonas aeruginosa BWH055; identical to SEQ ID NO: 32506

SEQ ID NO: 33352 - protein, 1101 aa, Pseudomonas aeruginosa BWH055; identical to SEQ ID NO: 31996

SEQ ID NO: 33353 - protein, 393 aa, Pseudomonas aeruginosa BWH055; identical to SEQ ID NO: 32927

SEQ ID NO: 33354 - protein, 484 aa, Pseudomonas aeruginosa BWH054; identical to SEQ ID NO: 32845

SEQ ID NO: 33355 - protein, 251 aa, Pseudomonas aeruginosa BWH054; identical to SEQ ID NO: 32980

SEQ ID NO: 33356 - protein, 1128 aa, Pseudomonas aeruginosa BWH054; identical to SEQ ID NO: 32981

SEQ ID NO: 33357 - protein, 397 aa, Pseudomonas aeruginosa BWH054; identical to SEQ ID NO: 32982

SEQ ID NO: 33358 - protein, 489 aa, Stenotrophomonas sp. RIT309; identical to SEQ ID NO: 33232

SEQ ID NO: 33359 - protein, 233 aa, Stenotrophomonas sp. RIT309; identical to SEQ ID NO: 33233

SEQ ID NO: 33360 - protein, 1126 aa, Stenotrophomonas sp. RIT309; identical to SEQ ID NO: 33234

SEQ ID NO: 33361 - protein, 487 aa, Micrococcus luteus
MSSLAQALRVHRLVQDDVALRMLRMDSLPLVAGVLATHLGAPNASLPTHELHDALDAELDTLRDHLDLSGRTAKAYCEDWRQAGLLERRIADEAREEVYELTPAARQGLRVVEQLLAPRASVTESRLVSLLTALHQLALETDPDTSRRLAALRAEQQALAERIERIASGEDTVLDERRAVERLDDVLTQAADLPVDFARVRARFGELNQELRRRILTDEGLPGDVLENVFRGVDLIESSDEGQTFAAFSRMVRDPAMSAAFQADIRAVLKRDFAADLPPATRRAVRGLARTLQDGSSAVQDTLTEFARGLRRYVLSQEYHRDRRLHVALREALSAAADAAPATRPYRQTGRDLDLTGMSLRSVGEISLHDPREFDVGPALEDAAVATVDMAALRALARETEIDFTELRENVNRTLEGKDGAPASATVADVLELHPATQGVASVVGLLSLAAQHGQVDPDAVDLLRWPAAAGMHSAHVIRHRFTERLP

SEQ ID NO: 33362 - protein, 226 aa, Micrococcus luteus; identical to SEQ ID NO: 30705

SEQ ID NO: 33363 - protein, 1118 aa, Micrococcus luteus; identical to SEQ ID NO: 30706

SEQ ID NO: 33364 - protein, 487 aa, Micrococcus luteus; identical to SEQ ID NO: 33361

SEQ ID NO: 33365 - protein, 226 aa, Micrococcus luteus; identical to SEQ ID NO: 30705

SEQ ID NO: 33366 - protein, 1118 aa, Micrococcus luteus; identical to SEQ ID NO: 30706

SEQ ID NO: 33367 - protein, 479 aa, Pseudomonas bauzanensis
MFFADQRLQFFKPLTSKYREQIVECLRLLHDRLYSASADYGESLKREQVLDIFSEALERAPLLEGDDDDQGRFRNNREQAGWVLNSLVDHGWLERQVDQANFQSTYPFSRLGRLFTQSLVEAVGHSVRTRHRNTRNTLNALSAFAERGEVYDLLDAYEYSERIIADFTDIIAELEERKRQLVREVEAQQLVQQASDQFFDFMERRFQPDVSIRLSADSVEKHRDRIHDVLRRIRHKPREWKANAERELRRLAPDLIVDDSASVLWQLLDTIDNRLRNASEIMLPALRRTLQSFTKRADILIRQLSYLQTQQHNDIVGLCRELSALDPASYEQRMNAAGDAMARLRVELIDPAQVRLRERQNRQPVQSQMDDPGLPDDQTLRSLAVSQLLERAFHINASGMRDYLRSALGDGRRINSGDLPIRDASDLLAVSHVIALGSADQAAAGFRVKIEPTGQPVTGDTYFNRRDGFIIELEQDTHA

SEQ ID NO: 33368 - protein, 226 aa, Pseudomonas bauzanensis
MRDALEEQLQQHGISADDFSDLMIRLLDRGVLCRDESKREAELYDRFLQVQPLVEDYLWVLRIRLLHESRFSMVRIFPPGAEVPGLADSEDSFNNGLRERLNQQEVSLVLVLRAEYDKALRDGQVDELGQVMLSLEALSLSHRNLLGRPLPEQASERQALLRRMRQLRLLRSPGDGSMEDGESWLIIRPGIISLVTDTALSQLAGGVVLDDEDPIDEPADLAEGAN

SEQ ID NO: 33369 - protein, 1209 aa, Pseudomonas bauzanensis
MYLKRSITANWGNLPVEEMEYGPINLFSGGNGSGKTTAADALQTLMTAAHDNLFNYNPGQDETTQRGRGGKQVRTLASYVLGCDDGAFARPWTTDGYIAGVFHPTQGETAEPFTAVIGVRAHLDTAGSSRQARQDELLLMIVPGEMLALSDFVRDSDDGRHVIPLTELPNLLRKQFGKQGVETYDRKSAYLARLYGALRGKGDAVSIREAKNAARTFANFMAYKPVRSIDQFVAGEVLEAREFGDTIKRIRDLLRTVHGMEQEAARVRGAVGLLEQSRQLTEDYQNSWLERIGLDYAAAAQNWGHNRKQYVAAKDKQQEISARIDDLTDEQQLNDERTQQAHRDLVQLEARRQGIPALQGKDDLENRQQLLTTRLQQGVAPLLEQAHQRDLNLEAVRTVQHLVSTGVGVEIPELTTRNWKNLADEILAAEQQPVAELHQLLSNDWIDLSPLHHGLDNVRQQQQTHNRLATLLAQPGTDGISLLQRVDRLSQERAGTLANLERQITISERQIKTLQQSRVIYPIYVEDALAAIRQQCPEADPRVLCDHVEVTDPDWQMSIEGYLGGSRFGILVEPAHEAEAIRIVRQLSARDRNRARVIQGDKARQDAERLSLPKDSVVHVLRFSHRVAEHYVRASYASLVRVNDAAGLRQARRGITREGMGSGNYSMFRCDIDDSQLVFGVAARERNLRAQQKQLEELQLQRHALRQFVEQLKHLAAALQRIKPLDYLSQASQLLEQRQQLQDIEQQLASLDLSAFHDVEQELDRVNERHAELVARQSELQKELGGLNVQLTQINQRIRTLSDQGDALQEQREEAEQYLLEAAARVTGLDPQQRLTQIDEMLTRTGDDFDFAADSKSLTDSLYQLAVALDRGLKEYNQQAQPADNLIHDTAAEVHSLAFFEHVCGLRQQLDNLHNRLRNNVLLEKQEQLIKLRDSFNSTFITDLCHEIHQAINDGGRTLEGLNTELQHHRFGADRESFQFEWSWVPEYKEYWEFFREVTQMPNLGDGASLFDAHLSGKGAAVRDQLLGLLLDGDEQQALRELERISDYRRYRRYDILKHPEGKAPIRLSEYGTGSGGQLETPAYIIRAAAVTSAFRFNEGDSHLRMVIVDEAFMHMDETRSREVINYLTETLGLQLIFIMPTSKAGPFLELISNQFVFSKVPSPRAVGELNTRVLLDRQQLNRERITELWANHRRVIRQQGALDFMEMV

SEQ ID NO: 33370 - protein, 450 aa, Pseudomonas aeruginosa IGB83; identical to SEQ ID NO: 32505

SEQ ID NO: 33371 - protein, 249 aa, Pseudomonas aeruginosa IGB83; identical to SEQ ID NO: 32506

SEQ ID NO: 33372 - protein, 1101 aa, Pseudomonas aeruginosa IGB83; identical to SEQ ID NO: 31996

SEQ ID NO: 33373 - protein, 309 aa, Pseudomonas aeruginosa IGB83; identical to SEQ ID NO: 33248

SEQ ID NO: 33374 - protein, 507 aa, Bradyrhizobium diazoefficiens SEMIA 5080
MFRHLHDDAFLAFSRDHKHLYAACLLDLHERFFSGAPSFPTPQQVVHAIYDVMRANPVLWNEGDDFGSLPEMISARRRRIRKADVALASEKGDKALGLARQLYARLLVWGWLEEEEYGLRVTVDMAMGPLLVLQRLASLNKDLSQRFGGLIVQIRLNLEAVEKLRPEITDRKQREAALAVREARNQADQFTKSLRAILADLKRVRRTVMESKTVATRLEAFFEEFIEQLLLKDFESILTVNHPYRFRDAIVDLARRISYSPETMQVLAEEYIASSMAADIEDGRMAAADDLLAIESIFDQIGEMFDRIEAFRRQLEARVRNTIKYAERGGQGLVGRAGGLVRRLDALLRDGRHHKATIEWSIEPLRSPWSEHHQAPARQPRRPVEARELAEPPSDPLYELRKKLRLEYIARIAPRPEDVRRFLEGQVPPFATREARFMEIDTVDDFLAFDCARRYALTGEVPAQVAAGFELEPCPDTPPHDSEWLRCANFLVKRSGALRKARAAHAQ

SEQ ID NO: 33375 - protein, 212 aa, Bradyrhizobium diazoefficiens SEMIA 5080; identical to SEQ ID NO: 30452

SEQ ID NO: 33376 - protein, 1143 aa, Bradyrhizobium diazoefficiens SEMIA 5080
MELRHLTMVNWHLFDVADIDVRGHVGVLGENRSGKSTILDMAQVVLTGGSRRFLRLNAVAGDSGKSRSGSKRSVVDYCLGTLGEDQRRRDEARTYIALGFEDTEGARSPVTIGMALEARKSDSRETVLALFVAVGTVLSSKDFIEQRGKSQFPAQWEDVRARIVAAVGEGNFVNHRDRASDYVREYMRHLLPHSSFGEQNASALQKSIVNAMTLDHNQTATQFVRNYILEDSPIGIKELRESIQTYRNISETIRKMRLRLEALRALRGVLAALEEALETKFREEWVAKRATWLAARATNLDFKTKRRTEMARRDAAAKELEFIDDDVKAIDKEIERLTAAIAEHDAKTGRKSLQQTADVAGQAAHRASADFKARMENIRRLEPLRAMCADGFEDFVPALERLLTATAGADIGGVSDEVTAAEKSFAASGAKWLPKIDEARQRIIAELSGLRGRRDEVLERIRQHAAGGARAYLGDDTELLCRRLRQGGMVPRVLCDIIEVAEPEWVGAAEALLGRDREAVFVDRADISAATSIFKEGRREFRHASLVSLNKLEQFRAKPERGTFPSIFRSQDPDAMAFIMRRYGNVRLADTLDQFNRPGRAIMKDGLYDDGLVRSHRWIESSQYKIGKAAQANALRSLQDQAEELGRILIDKGKEAHAAEQAFAALKNICEGRNDLGACAAAFAAAQTEVAEAQARLDALDGAGDGGLRDKKRAQQKLKEKRLEERKTQQKAFGEHDGEVRSAERRLGEGENVPGSELNLRVARSIYRKFFPLYSTAKGRAVYRDRLDAAAQKGFAEKHRAIAEKALKDANVSDNERARIERRVRELLYDYFDQFGMSSQVGAESEPLREVKPWMEQLISDIESNELRQYERQARDAAEKASTLLRGEFINALTARIGKMERELQSLNRSLYAHPFHNERYSFHRTQMVEFQPILKIIEIAKTSPEALDMLFRGDVPDDFPHKDTIVALEALLEDPDKDFTQFEDYRNFYTFEIHMEDVATGRSTRWEQRRGTGSGAEQQVPIYVAIGASLAAVYGSAERRAGKPAGFALAMFDEAFSKMDGKNQRQMMSFYKNLGLQFVIAAPFEKRVAVLEHMDTIVEVDRIGEQSRATVVELKEKAKRELMAIDPDLMSEDELATRLAAE

SEQ ID NO: 33377 - protein, 389 aa, Bradyrhizobium diazoefficiens SEMIA 5080; identical to SEQ ID NO: 30454

SEQ ID NO: 33378 - protein, 190 aa, Bradyrhizobium diazoefficiens SEMIA 5080
MDKIEDFRDRLERRIRTTVHYMDVMGEGSAERIVRLIEQLSKIGRDEVEIRLGSPDVGLPITSLALYTPPPPKAPPERTRFKVPKQDPYLRAYVEATTEFDRMVRVSDQRLLEFARRQMQGRDAVSSAEIEIESIPDLFAYRALPNLAAVGRSVRLGEFTIRLDEGRSANDWIDVTAFRIERTRTTADAA

SEQ ID NO: 33379 - protein, 213 aa, Bradyrhizobium diazoefficiens SEMIA 5080; identical to SEQ ID NO: 30448

SEQ ID NO: 33380 - protein, 1166 aa, Bradyrhizobium diazoefficiens SEMIA 5080
MIELRRIILIDWYLFRAQQVDLRGMTAIIGPNGAGKSAIIDAVQTVLSGASMASIRFNPSAQSNVRSKRTLRDYCLGVVSLDEKGERSEPTRQHAYTYIILVFEDLADGSAVSLGVAFSASASRSDESCEARFIAKGAMAKDDILAAVGDDEVETLQWHAVRTALRARHIEVDDAFSSATDFVAESLRALSPAGFPLDPRRFQKAFRNALLLKPVDNPTDFVRNYVLDVQPLQVDRLRLGIEHWRSLTRRIEELRAQSASLAGILRIVGRAVENEKVIATNSWQIARLEWEKFCREARRQEEVIAQFRSVAGKAEVEAAAAAARHAALEAEHKTVELSIRTSDAEQLAQMYESDKAAALSQRANAMAPLKDIEGLIASIKKAVELNLLVRRDDLLHALLSAVVVARGRAPLSEWDKTLPGDWKDSASHLDAALGAVDQERLAAVRKSFSDAHFTARVATKDLQDRIDQIDSNLKRMDQGLSPIERGTRNLIDQLRSHGIEAEPLCDLVEIRDDKWRMAAEAVLGRSREALIVEPSRAVRALEIYRQGGEYSFQHAEVINTTKTDGTRPAEKGSLAQIISTENRHARAFLNYRLGRLMMVETMDRMVAAENAITPDRMMQGGRTVRRLPKPEHLKLGRATQGQMRQQLETERKDLTMQLAERAREVGLLEEEARLFEDMFARFQKTIEAGLTCSECGADLAAFDRKLAEIGKNIEDAKRNRDPKLVADLERLAGEVVTAGRRKLETQKAFDAAKSARDKAEGAYDDYMQKNSTTARGARRDRARQMRQDFPQSTAMRDYRPEVARMATEAIPNLIDGLTADRETRSTTRRSSLMREMTNAMNKHGQDFHVVPSFTAEEATPTAVEQWAATEKERLDGHELVQYEEQCRNAATEMTSAFRDDLLHRLDDAFMGIRNTLKELNRHLEDRQFHGRDYYSFKALDAPTHVDMIELVEESRKPEFNLPLFGDRSGDANSPMMRAVRQIEEILSNPEARTEDIEDPRKYFNFELYIKDAQGTIRSSLTSRAGTGSGGEGQLPFYIAIGASLAATYQNRRTGESGLSLAIFDEAFNRLDTKAIGQCSDFMRALGLQVVLATPDEKRHVFMEVVDTVVNVNRLGNQVMIDTEFLTEKARDAIVAIDPYRKGFDVFKSERIAAEKAEAIPRDQAAE

SEQ ID NO: 33381 - protein, 401 aa, Bradyrhizobium diazoefficiens SEMIA 5080
MTDVRMTDAGVELLERLLERSERNPYRSWSASAAPDYDRLSTAQQMSRFHDQITAAERFGSVEVKWGKRDQGHLIERVVVRDAELLARHLGRPTAPATAQRVRDELLPVAATGESWVITLLDDMTARWARSEAAYRLTAGQVDAAKEFFSLLASISREEARGLDARTFSKKATNDTKAFDRHASRLAAVLGVRIGQPGAAADVVWTHIGLERFSHPIHLRGPVAVGEADGRLVDGRARPFASIHPEMLQQLSVLERPTTILTIENYASFNRQVREIEDGSLIVYTGGFPAAGVVEFLAKVLTAVAAEVPFLHWGDVDAGGVRIFRYLEENLPRGPRPHLMTKDLAVKSGQPADADPSLASIARSDSALRELADWLAFGSDVRHLEQEALDPERPWADVTAS

SEQ ID NO: 33382 - protein, 490 aa, Bordetella hinzii 5132
MALDHLTLTTYRDRHPAWRLLASPHAPLVASFLYRVFVAPNVRLTSEADLAEMLEDELFALREQLGAEVYPKAATEYLNDWCAPDKGWLRKFYKPGTDEAQFDLTPATEKAIAWLVSLTERPFVGTESRLLTLFALLEQISTGSEADPARRLEELRRKRDEIDAEIGRVLSGDVPLMDDTAIKDRFLQFQQLARELLSDFRQVEHNFRQLDRSVREKIALWDGSKGALLDEVMGERDAIGDSDQGRSFRAFWDFLMSSRRQEELSARLDQILGLPAVAALKPEPRTRRVHHDWLEAGEHTQRTVAQLSQQLRRFLDDRAFQENRRILELLHGIETQALALRDMPPAGDVMRLDEMGADIALPQERPLFALHAKPRLAELVLEDGDDDIDTARLFDQHVVDKTRLREALRQALRQQSQISLRALLETQPLQQGLAELVTWLELAHAGSRWLDGLRATVDDDVQEIIEWAMQDSDGSTVRRRARMPRVIFAR

SEQ ID NO: 33383 - protein, 198 aa, Bordetella hinzii 5132
MVHLLKGVLYRQDDERLWASLLSLQARVREQAAVLLLDLVLDEAEGYAFLKSQPEPEDVDATPRPPRLIARRPLSYPVSLMLALLRKRLAESDASGGDTRLVLSREDIAELMRVFLPDGTNEARLVDQVDSTITKVVELGYLRKLKPVAGAAQQAPRYEVRRILKAFVDAQWLADFDARLEGYRTALSGADRDKEAGR

SEQ ID NO: 33384 - protein, 1125 aa, Bordetella hinzii 5132
MNDFSLQELDFVADDSRVGFRLQRLEVLNWGTFDRRVWRYELDGRNGLLTGDIGSGKSTLVDAVTTLLVPAQRIAYNKAAGAETRERSLRSYVLGHYKSERNETTGSARPVALRDTTSYSVILGVFRNEGYGQAVTLAQVFWFREPQGQPARLFVTVERELSITEHFSGFGSDINGLRKKLRAMGCELNDSFPPYGAWFRRRFGIEHEQALELFHQTVSMKSVGNLTDFVRSHMLEPFDVGGRIEALLGHFDDLDRAHQSVLKAKRQIELLTPLVEDGLRHGQIAAEIQALREGRDALRPYFAGLKAALLERRLELLTQDATRWDARIKQLGEQRDNARIEQGKLEGALRENGGDRLQQLAAAIQQQEAEKQQRQEKADAYTTLLTRIGEAAPGDEAAFMTQRSTIGEHAEALRTSIADHDTQINEDGYALRRGQEEHKALSDEIDSLARRKSNIDAAQVRIRDALCAALSIAEEGLPFAGELIQVREDERDWEGAAERLLHGFGLSLLVPDAHYKDVADWVERQHLGTRLVYFHVRARKPTQAISLHPQSLVRKLLIKPDTPYYDWLERELHHRFDLACCDNTEQFRRETRAITRAGQIKDPSGRHEKDDRRRIDDRSRYVLGWSNADKLRTLRDEREGLEQRLGDIGLRIANTQRLRGQCQAQLEALAKLEVFTRYSEIDWQAPAREIARLTEERDRLKAASDTLRELESQLAQVVERLKEIEGDLGEAQGKRGEIRSKHETAQAQHAQALEIQTQAALDDMLLQSLEGWRAEVLGDHQLTVESCDNREQDVRNGLQARIDAEDKRLSRLTERIINAMRGFKEAFKAETAEIDISLAALPEFERLMKDLQHDDLPRFEARFKELLNVNTINEIANFNAQLARERETIKERVDVINQSLQVIDYNPGRYIRLLAQPSPDAEIRDFLQDLRACTEGALSGSEDEQYSETKFLQVKAIIDRFRGREGLAEIDRRWMQKVTDVRNGFLFSASERWREDDAEHEHYSDSGGKSGGQKEKLAYTVLAASLAYQFGLEWGAVRSRSFRFVVIDEAFGRGSDESAQYGLELFRQLNLQLLIITPLQKIHIIEPYVSSVGFVHNEGGRESRLRNLSIEEYRAQKAAATGAAP

SEQ ID NO: 33385 - protein, 401 aa, Bordetella hinzii 5132
MTWSQPTDLRTQVERLWQRGELLRTVVGGDTLNWPLRLSLKSPSAADLSNRFDAVRGWVREISAMPRVRIEWREWMHRVQGRQRLPDTLWIDTLDDALAMIGKTGDARRFQALWQQTAEAQPTLLAWLQRSPLQTLALAEHWPRLLAVVAWVQAHPRPGVYLRQVDAPGVDSKFIEAHRGTLAQWLDLALPTEAIDHAATGMAGFARRYGFLEKPVRIRLRLLDPQLPQLPGCTGLTDITLDEDSFATLTLPAQRVFITENEVNFLAFPPVSSAIVVFGAGYGWGALARANWLHRASLHYWGDIDTHGFAILDSLRKYFPLAASFLMDRSTLMAHALQWGDEPLDKRHTLPLSRLVDEEAALYDDLRHDRIRPQLRLEQERISYRWLCAALATTVQDDSRP

SEQ ID NO: 33386 - protein, 492 aa, Mycobacterium tuberculosis TKK-01-0051
MLDDDTTLSPADLLELNRGLQGSPTVRLLATLNLNLYATLMERQLSGGVVPETDLVVRLERDLAELDQAGEQSGLALIKSWASQGWLHRVADQRSGVERNLCYLTQEARRALDFLRGMRRQDTIATGGSINGIAARLKQVALRVGNDPERIRAGIAAEIAALQTELDALDHDAGPGEHSQDVDLTDAYDEAHAIALQMERLITDIGQYGIMIERATAALDEPIESNVEYRDRQRRMYADYEAAWDSQGRDSHRAFLRMINDPDQRAEFEADVAAVAEALPALDPALRKVMAGFFELVGHQIDEVERIQQRCAQRVKRFTAFGTLEQSRGVARQLNEAIGAARNLLKASLTDSRLDIELPLARHAFSSVGALSFRIGDLSNPKPAEVAEGEVDLTSFAALTTQVDAPAMSEMINTAISSGAPLSLPDAVAMLDSAYLGHVIVLWSWALKQPESAQGSESVTVRFQSLDGRDREMEVPHLMFTEPVSTLLGATA

SEQ ID NO: 33387 - protein, 236 aa, Mycobacterium tuberculosis TKK-01-0051
MTVEETVDYSGFSALPQVDQTARVPQQRRPRFDGDVSELPDRACWALQQLLTRRYISAEADRDVYTWVLEYRAQLSVRLSELDLLLRIVEGADVAFVEQARYESARGVKLLRREPLGTYDSILALHLAQMMRASGDQAVVISRDEMHGLFSGVLNDVDRDAVTFTARIDGAIARLTSLEILRKTRDDEDSYTVSPVINAVMTASVITELRQQFEILLRGGVPDERGHDDEEDREDD

SEQ ID NO: 33388 - protein, 1120 aa, Mycobacterium tuberculosis TKK-01-0051
MTEQFHLSRLQVINWGVFDGYHSIAFSEGGALIAGASGSGKSSLLDAISLGFLPFNRRNFNASGDNTAAGSSAGRRTVDKYVRGAWGQRSDAGTSKVMYLRGDGTAWSAIAVTYRSNTGRTVTGLVLKWLTGESRSDSSSRFVLADGDRDIENVCNRWAAGRFDASVFKDDWRFSTKVESQYLAQLYATIGIRASDAAQQLLGKAKSLKSVGGLEQFVREFMLDEPGSLSRLPEALKQIDPLVDARELLAVAQRKRKILGDIEKIQQRYASESSDLGIIDLVDQPMVRAYTDHVRLAQCPAQIESLDATIDQLGNEYEDVTRQLNLAKAEGDSLNAQISGSSTSLGPLQSQVAAADAHAEQVSRRRTAYESMLTTHGLDIPDTADEFWNLREELSTRATELLAKLDRGREASTDAEYAQKVARIARDDAAKELKRVERVGSALPEFALTMREHICAAVGIDPGELPYIAELMDLRPEQSRWRVAVEKVLRGVGLRLLVPDSHYAAVLRFVNETNMGGRLQLHHVRARFVGAEVAEAEPNTLAGKLFVVDPTHACAAEAADVIAAAGDHICVDTPDVFPRFRRAVTDTGLYKDSERLAIKDDRRPLKQADYIYQGDVAAKVDALTVDLANAEEAFRRARGVADQIAAERQQWRDRAAAFKAICDQFEQWTHVDTETADGHADRLREQFELLLADNPDIEALAARAEECWEQIQALMTRRGAIQTRRDDLDGRRTQLLELQERLAPAFVSEPLTDLLNRYAVDVPVALDLLNPEPHRDAVFTAIRREREQLRESRRRSYDELARILNTFDTAFPDAIPNDSDVFDERVHDYVALCRHIDERELPEAYERMMRLVTEQAPDAILTLHRVAEQEARRISEQIERVNTGLGAVEFNRGTRLTLRATSRSLTAVAELTEIVRAISRRIAEVGLGDKQAILDQYADILRLRNRLASTAPEDKAWTRDALDVRNRFTFDCAEWDVSTDELIRTHSNAGDNSGGEQEKLMAFCLAGALSFNLANPESADNKPVFAQLMLDEAFSKSDPQFAQQALQAFRKFGFQLVIVATVQNATTIQPYIDSVVMVSKREATGRNARPVATVSTKTITDFTALRHEMRTSAALVPAGV

SEQ ID NO: 33389 - protein, 507 aa, Bradyrhizobium japonicum SEMIA 5079
MFRHLHDDAFLAFSRDHKHLYAACLLDLHERFFSGAPSFPTPQQVVHAIYDVMRANPVLWNEGDDFGSLPEMISARRRRIRKADVALASEKGDKALGLARQLYARLLVWGWLEEEEYGLRVTVDMAMGPLLVLQRLASLNKDLSQRFGGLIVQIRLNLEAVEKLRPEITDRKQREAALAVREARNQADQFTKSLRAILADLKRVRRTVMESKTVATRLEAFFEEFIEQLLLKDFESILTVNHPYRFRDAIVDLARRISYSPETMQVLAEEYIASSMAADIEDGRMAAADDLLAIESIFDQIGEMFDRIEAFRRQLEARVRNTIKYAERGGQGLVGRAGDLVRRLDALLRDGRHHKATIEWSIEPLRSPWSEHHQAPARQPRRPVEARELAEPPSDPLYELRKKLRLEYIARIAPRPEDVRRFLEGQVPPFATREARFMEIDTVDDFLAFDCARRYALTGEVPAQVAAGFELEPCPDTPPHDSEWLRCANFLVKRSGALRKARAAHAQ

SEQ ID NO: 33390 - protein, 212 aa, Bradyrhizobium japonicum SEMIA 5079; identical to SEQ ID NO: 30452

SEQ ID NO: 33391 - protein, 600 aa, Bradyrhizobium japonicum SEMIA 5079
MELRHLTMVNWHLFDVADIDVRGHVGVLGENRSGKSTILDMAQVVLTGGSRRFLRLNAVAGDSGKSRSGSKRSVVDYCLGTLGEDQRRRDEARTYIALGFEDTEGARSPVTIGMALEARKSDSRETVLALFVAVGTVLSSKDFIEQRGKSQFPAQWEDVRARIVAAVGEGNFVNHRDRASDYVREYMRHLLPHSSFGEQNASALQKSIVNAMTLDHNQTATQFVRNYILEDSPIGIKELRESIQTYRNISETIRKMRLRLEALRALRGVLAALEEALETKFREEWVAKRATWLAARATNLDFKTKRRTEMARRDAAAKELEFIDDDVKAIDKEIERLTAAIAEHDAKTGRKSLQQTADVAGQAAHRASADFKARMENIRRLEPLRAMCADGFEDFVPALERLLTTTAGADIGGVSDEVTAAEKSFAASGAKWLPKIDEARQRIIAELSGLRGRRDEVLERIRQHAAGGARAYLGDDTELLCRRLRQGGMVPRVLCDIIEVAEPQWVGAAEALLGRDREAVFVDRADISAAVQGQAGARHFPLDLPEPGSGRDGLHHAPLRQRPSRRHARPVQQARPGDNEGRPLRRRTRPEPSLDRILAV

SEQ ID NO: 33392 - protein, 478 aa, Candidatus Methanoperedens nitroreducens
MDHDIIKYLRDHNPTVRLLRLDNAPLIISFLFQEFKKNNRIVISNTQLITGLSDYLYNLKQSYGEDAYPGTAQNYLDKWSNDGFLRKYYTPNSDEPVFELTPATEKALDWIKDLDKKEFVGTESRLLKIFDILKEIVYKSSDDPDIRLEELERQKQDIEREIEKIQSGNIDRLNETQIKERFFDFHDTARKLLSDFRQIEYNFRELDRSVREKQVNSNLKKGKLLEDIFKVQDLIWDTDQGRSFKAFWEFLMSRHKQDELSELIEAVVNLPEIQKVKQDDFIERIKVNLIDAGDKVNKTNHHLIEQLRKYLDDRTYLENKRIVEIIVGIKSLAIQVKDNPPKNRDFLLLDDRPGIELIMERPLFNVRKNTEIKNIEFEEGYAGSIDTDALYKQLYIDQEELKIKIREMLKFNSQVTLKQITEIYPVEKGLSEIITYLNIASKDKKSFIDDTVIEKITISNKETNKYFEIQVPQVIFCK

SEQ ID NO: 33393 - protein, 193 aa, Candidatus Methanoperedens nitroreducens
MTENNMIPPYAPVIIKLLQGVIYNDDKEPWDNLVSYQVQIKEYFELIGIDVHIYESEGFAFLKQKQFDEGQEINLPNLIEKRQLSYPVTLLCVLLVEKLVEFDVTGGDSTRLIVDKEELKEMLRIFLPERTNEAKLFDNIDAHINKLVDYGFLRKLNNAESKYEVKRILKAKIPADTLQEIKNRLEEYAKSIA

SEQ ID NO: 33394 - protein, 1121 aa, Candidatus Methanoperedens nitroreducens
MQNLLLDLAADNTRTGFRLQRLEVLNWGTFNQKIWRIEPCGYNSLLTGDIGSGKSTLVDAIITLLVPYQKIVYNKAAGAESKERTLLSYVRGEYKNQKNELDNSSKPVFLRDESDYSVLLACFYNEGYGQKITLAQVFWNRNEKIEKFFVLSGQDLNIIEHFKIKNQEKDIFPLKKRLKNFPDTEVFENFSDYSSKFRNIFGIKSEKALELFYQTVSMKSVGNLTEFVQNHMLEKSDVKEKIDELKRNYENLRKSYEAVQKARRQLQQLQPLVQEIDEFEKTSIEIQELQNCLGSLPVYFAIQKARLLQNEIKSLNEELGIINNQIEEIRIDLLRLRNKESEVKVSIDNNKEGQRLKEIEDEIKRFEEIKQAKLNKENQYSKLSELLGFPKATDDRVFYQSFHKAINIQEEIKGEVSELIENRDNLKIHLNKINETYNSDRVELESLKQRETQIPETNLKIRELILRDLVLDEDELPFIGELLKVKDKEKLWEGAIERVLHNFGLSVLVAEEHYRRVSSYVDKTNLKGRLVYFKVPESIKYRTQKEILENSLLNKIEIKSDTPFYDWLENELTEGFDYNCCETIEQFQRESKAITRNGQIKGGKARHEKDDRRSIFDRKHYILGWSNHEKIKAIEKEVLNLENQIKDVKTKIKSIESQQKQLQTKGFNLHDFIKFKDYAEINWQKEAVEIERLKKEKEELEKSSDQLQSLKKQLETTQKEINDKDNQQGLKQRDKGKIETTITNYEEQLKDCNQISDKLSIEEQETFFPGIQDFLQEKDFKIKTIDKLQNETRKSIEDIKEDKNKTEKRLRDGIISKMQKYKNEYIEETVEVDASIEAIPEFRQFLRKIEEEDLPRHEKKFKNLLNEGTINDIAIFKNQLESFAKDIIDKIKQINKSLIEIEYNPGTYIELLADKVQDIDIREFQIQLRNCLENTFGETNLYNEEKFNQVKLILDRFNSGSHVDINWTNKVTDVRNWFTFTASEKWLEDKSEKEFYSDSSGKSGGQKEKLAYTILASALAYQFGLEWNRTKSRSFRFVVIDEAFGRGSDESTRYGLELFKKLNLQLLIITPLQKINIIENYIRSVHFVLNENGNNSLVKNLTIQEYQRDKEKYMNRTESQQ

SEQ ID NO: 33395 - protein, 398 aa, Candidatus Methanoperedens nitroreducens
MITPEEIKKQAERWYKDFLIASINGESFFPKEIRFGRIRSSETLESFSKINQEIQNLKKKSKEQSGYGYLIEFIKRKDQKIGEQLFPDRIYFEDESDYLKFIKKEKEYQEFKRAVDQITNTVPELHEWILLNPLKIIDHLGKWTDLIKVCKFFITNPRPNLYIRELPLELHTKFIEENKAIIRHLLDFLIDEYINKEEVEFERRFNLKYSEPLIRLRILDEEIAKEYFSGLTDLSILQSDFNILNISCKKIFILENKTNFSNIFNFLTLPLLKDSMAIFGKGFQLNLLKEARWLSDKQIIYWGDIDTHGFQILSQLRSYFPKTQSLMMDFETFNEFKQFAVTGTETNINQLINLTAEENQLFEYLLDLKEKNRLEQEKINHSFALRKIEKLIVSRSGL

SEQ ID NO: 33396 - protein, 489 aa, Xanthomonas arboricola pv. pruni; identical to SEQ ID NO: 33214

SEQ ID NO: 33397 - protein, 233 aa, Xanthomonas arboricola pv. pruni; identical to SEQ ID NO: 33146

SEQ ID NO: 33398 - protein, 1355 aa, Xanthomonas arboricola pv. pruni; identical to SEQ ID NO: 33147

SEQ ID NO: 33399 - protein, 499 aa, Pseudomonas aeruginosa MH38
MEESAQQCSERYVSTRSQHPAWLLLASRRAPLVLGCLRTLFERAHDGIPMEDALQALSEMLAAYASQDLYEIDPDATHIQAGRELREWIKRRLVVEREGRIYATDALESAIQFVDSLDSRIMTSTASRLSVVQREIENLETGLNPSPSGRIASLRRRIQDLEHELAQVEAGHVVVLDEAQAIEGIREVYNLATSLRADFRRVEDSWREADRALRQSIISEQSHRGEIVDRLLDGQDALLNTPEGRVFESFQQQLRQSAELEVMRERLRTILRHPAVPKALNRPQQRELRWLALRLVRESQAVLQARARSERDVRGFMKTGLAAEHHRVGQLLNDFFNLALSVDWQRQAVRRSTVRLPPVGVAITGVPAIERLRFKTLDDDDTGELDLSLKPAGLEQIDDDFWDAFDGLDREALIHDTLAVLVEQGRPVSLGELASLLPPAHDLETFALWLAMAREAGIEVLTEERQLVELVDEDEQRWRFNLPYVGLDHEALKDIDWEL

SEQ ID NO: 33400 - protein, 249 aa, Pseudomonas aeruginosa MH38
MAGVFDRIAGASGADETELTVEPMALDDGMDDEQPLMSAAVQVDERRTPQRVREAVQEMLKYGLLEESHKPNLYRSALSNIEAVDRILEPLDLAMGLDEVRGLLFVIVRQGEVAEQDDWSHPLVRRQRLNLEQSLLIAILRQQFIAYEQESGTGASQASVVVDELIPQLQVYLGELGSEAKERNRIITLLDQLKGHGLVSALDAHDRVIIRPIITHLANPENLQALVAWLREQVEGAATPAADGEEDMA

SEQ ID NO: 33401 - protein, 937 aa, Pseudomonas aeruginosa MH38
MRALRQMEKDGTGIWPYPSKKAFLARLRDYFEVGEIAFTLLNRAAGLKQLNSIDEIFRELVLDDRSAFERAAEVAGSFDDLTDIHRELETARKQQRSLQPVADGWERYQVLQEQLHDKQALEGILPVWFAEQGYRLWLAETNRLEKEYKKAELDQEQCKSQLEAQKGVVDQHRQRYLRVGAAGIDQLRERIADWVRECDKRSLKAEQYQLLAKGLGLADELSAAALKENQQHIAARLEILDQQITDARQKAFDAGLVQQELNGRLQTLQQEGAEVEKRPGSNLPGQFHAFRSDLAQALGVNESALPFVAELVQVKPEELDWRGAIERAIGSHRLRILVPQDSSQAALRWVNQRHNRLHVRLLEVQEPTSRPVFFDDGFTRKLTFKEHPYREAIKALLADNDRHCVESPEQLRHTPHAMTAQGLMSGKERFFDKQDQKRLDEDWLTGFDNRDRLAFLAEQIREVNERLEPAKLALDAAQGDVRQLETQASLLNRVKELQFEDIDLPGAQSQLESLRTQLATLTRPDSNLAMIKVELDAAEALQESLDQQLRQLIEQYVQLKSQFDQAASATRKAYNSAEKGLNDTQRELAQAHFPTLTADDLGDIVELERKHTRELQGQLKALGEKLGDQKSELAKRMSDALKVDTGALAEVGRELVDVPRYLERLRVLTEEALPEKLKRFLEYLNRSSDDGVTQLLSYIDHEVSMIEERLDDLNSTMQRVDFQPGRYLRLVAGKVIHESLRTLQRAQRQLNSARFIDDEGESHYKALQDLVGLLKDACEHSRNQGAKALLDPRFRLEFAVSVIDRESRNVIETRTGSQGGSGGEKEIIASYVLTASLSYALCPDGSSRPLFGTIVLDEAFSRSSHAVAGRIIAALREFGLHAVFITPNKEMRLLRHHTRSAVVVHRRGLESSLVSLSWEALDEHHQQRIKAMHEVAH

SEQ ID NO: 33402 - protein, 464 aa, Nitrincola lacisaponensis
MLFNKLPDAIFLPLSGQNRQIYQVVLLELADLFFDEDLIDPFIPRDLVRSSIENAVVRIGVRRWEAEGDDDAEPPRSSADYTNRIYRRLVECGWLEEEQRIYRQYVLLSPSVSYMLRALVSIARLEKRSYGGAVLNVLSSLEAAINDPVGRGITLAEAAQTAAEFSAHLTDMLLGLREMKITLSESKNPQEIVRGFFDRFVEQILVSDYKTLKTRNNPFRYRRQIISMLRDLQFDLLRIEQLSQHYQLQYELDYDSAEAMVHQHINRIIRIFESVDQRLAAIDDFRYQLEKRVADTVRYMDKTTPGMAARLSRLIAELGQRKRGKLPLPKTLEEVAFISPSSVRSPIRRRVEAKPRVITRTSIDPKVLELRRLFKEYKERREVKIDRIEAYLSRHFDGRQTLKATEFSIDSVEDYICFSYIRHLPSLGKKARQVASQYRIEFDDTYVCVADVVECRGFEIHRNS

SEQ ID NO: 33403 - protein, 234 aa, Nitrincola lacisaponensis
MLGDLQKALSRAEKYEAEDFTRAANLLLVSQFLYADRPLHRDSYFLISAHVDYFRNLFEAIGWSLIYQPDEAYLGVVPQGDERVLKLRLDESLLLLCLRQMYEQKLEEFEIQDGKAFITTDALLRLYENLTGKEIPNETRMKEILSLFTRHGIVERGKADETDPKNIPLKISPVIRQVVVEDYIGQLEALCDIDSSDDLSDDTADAEPEVEDTSAASASTETDTGTKENSHETA

SEQ ID NO: 33404 - protein, 1143 aa, Nitrincola lacisaponensis
MKQLNRIVLVNWYVLGAIEIPIKGNVAIVGPNGSGKSSLLDAIQTILMGGHKRNLSFNASAGEKSERSLRTYCLGFLDDLGKKVNAREDSLTYMALSFFDTETAKESCVGIAISASTASADEDILGRFILPDFSVTLDDFSVKQGEGRMPKPWPEVRENLLKQCPDMVLEKRASRFVKEMVTHLSHDAQMPNDDEKFVKNFKNALKFVPIDSPTRFIREFVLDENIVHVGAFRKSLDEYRAMEQKTREVANRIAELEKVQELCQGIARNVKNSVEYEWVVHEGRFEHADLKKEEAAERLESFTEQESTLQAELEANSEALNNTLQDLANARAELNNTDSAHKVNALESRIAARQHEVSVVREKIQQVYNLMRTTVGFSEQMAVLPDNFRPVVEQSVQLWRSGENTLSGMWPESPVEVDNALGKLREMVDPVRKAIARRYEESVIRINELRTQIQSQKSAVEQLQQGRAPVRHATRELISLLQEYGIESTPICELVDITEDKWRIAIESFLGARREALVVSPDRVKEAITLYRRKGRHLKGCRIINTTKTDEWLNRAKRGTLVEFIETDNEHARAYMNRALGGVMAVETENELLRHERALTYDCMLQSEGSTTAINELSPIMGIRRRGDQLAQQGKQVDEMIAEFTTLGKQHETLEKLRDALIQLGSGLLQVNERVFDLVNQRDQLNSEIEGYHQAIVDMRNHDDSGIQTRIAELAEQQKTTEARQKSLMDKLQKVRTGMIKDNASLEVLDRELSEHAQARSRCEENPNFDAQSAQEKRDYLDESCDGELERVIFEAAKKAQSELQLHEKKKNAVRDAVAQYKARYHGGGMTHQGLDNISADSTHEDLERYVNETVTALQESELALYTQKAERARLEAETAFRSDFVAHLNDQIDKIKELIRELNSHLKNRPFHKEMYSFEMMPNPELKDILELVEAYTRMDQANVGSLFDIHHEQDSGHRDALAKIHEVLKNEGESTLLQDYRNFYNFELVVKDLQGNRKTTLTQRIKTGSGGEHQVPFYVAMAAALGATYRLKEGSDGKPVGGMSLSVFDEAFNKLDSENTVTSLGFMTDLGLQTIIAAPDEKYSLLSSCMDTIINVCRDGRVVDLDVEFPTEKGKQLLASDHPYKMMAAAEEIEAEAEALL

SEQ ID NO: 33405 - protein, 491 aa, Fusobacterium necrophorum BL
MKNDLIEHMSYHSLHSLRRFHPAWKLMAADNAPFFLSFFFKEFIFTNEREIPEHILMNHLDDFMEEIPYIRDNKKKAKEYLVEWSDDSSGWLRRFYPRNSDEIHYDLTSSTQEAIDWIISLKSEQFIGTESRLMMIFGLFHEILSGTETDPELKIQELERKKLEIEREIELVKQGKMKNLESTQIKERFLQASSMSREILSDFRAVEQNFRNLNRTMQEKIASWEGSKGELIEEYFSEQDDIYKSDQGKSFEAFFKFIMSNDAKINFEESIEKLKNLEEIRELVIKSGIERIVDDWLNASIYVWNNVEVMSEQLKRYVDNNYREEERRINQIIKNIELNALKIRGKLSKELFFEIEEVSPALKLPFDRKLFTPPKQIELRDEDIEYGESLDSDEVLYSHIYINKDILIENIKEEVDEKGERTLSQIIEQHPLQYGLEELSVYLGIESYKLENVEICVEKQVEYIEFKNKEGKKLRAKLPKIIYIPKEKIHG

SEQ ID NO: 33406 - protein, 193 aa, Fusobacterium necrophorum BL
MDKNIYEFSVAVVTLLKGVVNESTQTKIWNTIIENQIQIEDYISKMGLTLMVQTQDGYAYVKQREYKDDEMEIPRLISRRQLKYNTSLLLVLLRKEYAESNKEESIGRSIFSKKQILEKMRTFLKDTNDEAKQKKEIEQEIKRVEELGFIRALKNSEEQFEILPLIRGFVDAQWLENFDEKLEEYANYGLGIK

SEQ ID NO: 33407 - protein, 1117 aa, Fusobacterium necrophorum BL
MNHFLGIRLHNLEVYNWGTFHKKAWNFSLEGYTSLLTGTSGSGKSTLVDALITLLVPPRKVAYNKAADASSKERSVKSYVLGYYGRKYSLEGRGKPEALRDTSNYSVILATFRDLDRKQTTSLAIFFWFKDNETEPNRMYVISNQELFINEDFVNFHSDIRFLRNQLKKKGAKIYDSFPQYGEYYRKQLGNISEQAIELFQQMISVKQVDSLNTFVRTSMLEKEDTEEQIGKLLKHYANLNAAYEAVLKAKKQIDMLNPIQEKGREYEIKIQEKNQIELADKSLEIWFALQRQIEILEGMKKLKEQISKIEQKIEFEKKREEQIAEELKQIARAILENGGQELNRLEDEVSRKKEELDRKNVALEKYNTLAKKLGLSAIRSLEGFQKNYIKIPKIQKDIYEKDDEIQNELITITIQIKQYEEEKKKLEEEIQSLKERTSNLPYHLVSLRNHICKELNIKIEELPFSGELIEVKDSEMKWEGAIERLVHSFAISILVPEKHYSSVSDWVDNEHLGRKLVYFKVDSKKNRSSSTLEENSVAKKLLIKKDTLFTEWMKGEVSKRFPHICCEKMELFRKEIKAITKNGQIKTEKRHEKDDNFNIYDRKKYVLGFSNAKKRKILSEEKIEIENQLTTFLIREREWSKKKKEIGQLLSAVASLSEYTDYHELDIVTTEEAIQNCQNRILEIKENKSILETLEKQQKEKEEEKNKCREQQNQLMNERGKREGKYKTYEEQQKNNEEKINQETEKDREMYPFIKNDFSIFLEKNGMKQNYSVDYERKYSSDLHSRLSKLQESINRLSSHIQNQMTAFKYSYPNETLELSNHIESLNEYKIILSELLYHNLPKFQENFKNELQGKVIQHISLFHNELYQHRKNILARIQEINDSLKEIDYNLGRYICLNYEETPEADIKIFKNQLRACTEGMTNLEEEVLESKFLQIKEIIEKFKGRKDFSDADKKWTQKVTDIRNWFVFSATERFRENDEEYEHYSDSDGKSGGQKEKLAYTILAAGLSYNYKLNQKERQGSSFRLVVIDEAFLKSSDDSAKFGLQLFEQLRFQLMLVTPLLKISTIEPFISRLGFVTHSEITHESSIKNVSIEEYHEKRQKWEANGFEKMDQDK

SEQ ID NO: 33408 - protein, 399 aa, Fusobacterium necrophorum BL
MDLKKWTKINDIKAKIESKWNKGEILRNSLEENNLFPLKIALKVPTSQEFSLYFMESLEWIQSLKREAKKKNSYELLEKEINFRIVGKNKIPTHVIIPTKEVALHLIQKEAEEKLFLMIADEFINIWPQNEDLRNWIYKYPFKIINHVGKNFSKLIAIIRWFEKNPRPNLYIRQLDIPEIDTKFMESHKPILEELFKILLPEESMDLSKKEFEDKFYLKRRETTVRFRILDETYQEQKFKELSIPFTEFKQWNPKIENIFFTENEVNFLAFPNYKNSIVIFGRGYGITLLREVEWLSRKKLYYWGDLDTHGFNILSTARAFFPHLKSFAMTEEILLGYKELWVEEERQWSFDIKYLTKEESDLAIKLQNNFFGKKIRLEQERIPFHVIKKHIEKCLHEI

SEQ ID NO: 33409 - protein, 491 aa, Fusobacterium necrophorum BFTR-1; identical to SEQ ID NO: 33405

SEQ ID NO: 33410 - protein, 193 aa, Fusobacterium necrophorum BFTR-1
MDKNIYEFSVAVVTLLKGVVNESTQTKIWNTIIENQIQIEDYISKMGLTLMVQTQDGYAYVKQREYKDDEMEIPRLISRRQLKYNTSLLLVLLRKEYAESNKEESIGRSIFSKKQILEKMRTFLKDTNDEAKQKKEIEQEIKRVEELGFIRALKNSEEQFEILPLIRGFVDVQWLENFDEKLEEYANYGLGIK

SEQ ID NO: 33411 - protein, 896 aa, Fusobacterium necrophorum BFTR-1
MNHFLGIRLHNLEVYNWGTFHKKAWNFSLEGYTSLLTGTSGSGKSTLVDALITLLVPPRKVAYNKAADASSKERSVKSYVLGYYGRKYSLEGRGKPEALRDTSNYSVILATFRDLDRKQTTSLAIFFWFKDNETEPNRMYVISNQELFINEDFVNFHSDIRFLRNQLKKKGAKIYDSFPQYGEYYRKQLGNISEQAIELFQQMISVKQVDSLNTFVRTSMLEKEDTEEQIGKLLKHYANLNAAYEAVLKAKKQIDMLNPIQEKGREYEIKIQEKNQIELADKSLEIWFALQRQIEILEGMKKLKEQISKIEQKIEFEKKREEQIAEELKQIARAILENGGQELNRLEDEVSRKKEELDRKNVALEKYNTLAKKLGLSAIRSLEGFQKNYIKIPKIQKDIYEKDDEIQNELITITIQIKQYEEEKKKLEEEIQSLKERTSNLPYHLVSLRNHICKELNIKIEELPFSGELIEVKDSEMKWEGAIERLVHSFAISILVPEKHYSSVSDWVDNEHLGRKLVYFKVDSKKNRSSSTLEENSVAKKLLIKKDTLFTEWMKGEVSKRFPHICCEKMELFRKEIKAITKNGQIKTEKRHEKDDNFNIYDRKKYVLGFSNAKKRKILSEEKIEIENQLTTFLIREREWSKKKKEIGQLLSAVASLSEYTDYHELDIVTTEEAIQNCQNRILEIKENKSILETLEKQQKEKEEEKNKCREQQNQLMNERGKREGKYKTYEEQQKNNEEKINQETEKDREMYPFIKNDFSIFLEKNGMKQNYSVDYERKYSSDLHSRLSKLQESINRLSSHIQNQMTAFKYSYPNETLELSNHIESLNEYKIILSELLYHNLPKFQENFKNELQGKVIQHISLFHNELYQHRKNILARIQEINDSLKEIDYNLGRY

SEQ ID NO: 33412 - protein, 283 aa, Fusobacterium necrophorum DAB
NFRNLNRTMQEKIASWEGSKGELIEEYFSEQDDIYKSDQGKSFEAFFKFIMSNDAKINFEESIEKLKNLEEIRELVIKSGIERIVDDWLNASIYVWNNVEVMSEQLKRYVDNNYREEERRINQIIKNIELNALKIRGKLSKELFFEIEEVSPALKLPFDRKLFTPPKQIELRDEDIEYGESLDSDEVLYSHIYINKDILIENIKEEVDEKGERTLSQIIEQHPLQYGLEELSVYLGIESYKLENVEICVEKQVEYIEFKNKEGKKLRAKLPKIIYIPKEKIHG

SEQ ID NO: 33413 - protein, 193 aa, Fusobacterium necrophorum DAB
MDKNIYEFSVAVVTLLKGVVNESTQTKIWNTIIENQIQIEDYISKMGLTLMVQTQDGYAYVKQREYKDDEMEIPRLISRRQLKYNTSLLLVLLRKEYAESNKEESIGRSIFSKKQILEKMRTFLKDTNDEAKQKKEIEQEIKRIEELGFIRALKNSEEQFEILPLIRGFVDAQWLENFDEKLEEYANYGLGIK

SEQ ID NO: 33414 - protein, 1117 aa, Fusobacterium necrophorum DAB
MNHFLGIRLHNLEVYNWGTFHKKAWNFSLEGYTSLLTGTSGSGKSTLVDALITLLVPPRKVAYNKAADASSKERSVKSYVLGYYGRKYSLEGRGKPEALRDTSNYSVILATFRDLDRKQTTSLAIFFWFKDNETEPNRMYVISNQELFINEDFVNFHSDIRFLRNQLKKKGAKIYDSFPQYGEYYRKQLGNISEQAIELFQQMISVKQVDSLNTFVRTSMLEKEDTEEQIGKLLKHYANLNAAYEAVLKAKKQIDMLNPIQEKGREYEIKIQEKNQIELADKSLEIWFALQRQIEILEGMKKLKEQISKIEQKIEFEKKREEQIAEELKQIARAILENGGQELNRLEDEVSRKKEELDRKNVALEKYNTLAKKLGLSAIRSLEGFQKNYIKIPKIQKDIYEKDDEIQNELITITIQIKQYEEEKKKLEEEIQSLKERTSNLPYHLVSLRNHICKELNIKIEELPFSGELIEVKDSEMKWEGAIERLVHSFAISILVPEKHYSSVSDWVDNEHLGRKLVYFKVDSKKNRSSSTLEENSVAKKLLIKKDTLFTEWMKGEVSKRFPHICCEKMELFRKEIKAITKNGQIKTEKRHEKDDNFNIYDRKKYVLGFSNAKKRKILSEEKIEIENQLTTFLIREREWSKKKKEIGQLLSAVASLSEYTDYHELDIVTTEEAIQNCQNRILEIKENKSILETLEKQQKEKEEEKNKCREQQNQLMNERGKREGKYKTYEEQQKNNEEKISQETEKDREMYPFIKNDFSIFLEKNGMKQNYSVDYERKYSSDLHSRLSKLQESINRLSSHIQNQMTAFKYSYPNETLELSNHIESLNEYKIILSELLYHNLPKFQENFKNELQGKVIQHISLFHNELYQHRKNILARIQEINDSLKEIDYNLGRYICLNYEETPEADIKIFKNQLRACTEGMTNLEEEVLESKFLQIKEIIEKFKGRKDFSDADKKWTQKVTDIRNWFVFSATERFRENDEEYEHYSDSDGKSGGQKEKLAYTILAAGLSYNYKLNQKERQGSSFRLVVIDEAFLKSSDDSAKFGLQLFEQLRFQLMLVTPLLKISTIEPFISRLGFVTHSEITHESSIKNVSIEEYHEKRQKWEANGFEKMDQDK

SEQ ID NO: 33415 - protein, 399 aa, Fusobacterium necrophorum DAB
MDLKKWTKINDIKAKIESKWNKGEILRNSLEENNLFPLKIALKVPTSQEFSLYFMESLEWIQSLKREAKKKNSYELLEKEINFRIVGKNKIPTHVIIPTKEVALHLIQKEAEEKLFLMIADEFINIWPQNEDLRNWIYKYPFKIINHVGKNFSKLIAIIRWFEKNPRPNLYIRQLDIPEIDTKFMESHKPILEELFKILLPEESMDLSKKEFEDKFYLKRRETIVRFRILDETYQEQKFKELSIPFTEFKQWNPKIENIFFTENEVNFLAFPNYKNSIVIFGRGYGITLLREVEWLSRKKLYYWGDLDTHGFNILSTARAFFPHLKSFAMTEEILLGYKELWVEEERQWSFDIKYLTKEESDLAIKLQNNFFGKKIRLEQERIPFHVIKKHIEKCLHEI

SEQ ID NO: 33416 - protein, 175 aa, Fusobacterium necrophorum BFTR-2
YVDNNYREEERRINQIIKNIELNALKIRGKLSKELFFEIEEVSPALKLPFDRKLFTPPKQIELRDEDIEYGESLDSDEVLYSHIYINKDILIENIKEEVDEKGERTLSQIIEQHPLQYGLEELSVYLGIESYKLENVEICVEKQVEYIEFKNKEGKKLRAKLPKIIYIPKEKIHG

SEQ ID NO: 33417 - protein, 193 aa, Fusobacterium necrophorum BFTR-2; identical to SEQ ID NO: 33413

SEQ ID NO: 33418 - protein, 491 aa, Fusobacterium necrophorum BFTR-2
MNHFLGIRLHNLEVYNWGTFHKKAWNFSLEGYTSLLTGTSGSGKSTLVDALITLLVPPRKVAYNKAADASSKERSVKSYVLGYYGRKYSLEGRGKPEALRDTSNYSVILATFRDLDRKQTTSLAIFFWFKDNETEPNRMYVISNQELFINEDFVNFHSDIRFLRNQLKKKGAKIYDSFPQYGEYYRKQLGNISEQAIELFQQMISVKQVDSLNTFVRTSMLEKEDTEEQIGKLLKHYANLNAAYEAVLKAKKQIDMLNPIQEKGREYEIKIQEKNQIELADKSLEIWFALQRQIEILEGMKKLKEQISKIEQKIEFEKKREEQIAEELKQIARAILENGGQELNRLEDEVSRKKEELDRKNVALEKYNTLAKKLGLSVIRSLEGFQKNYIKIPKIQKDIYEKDDEIQNELITITIQIKQYEEEKKKLEEEIQSLKERTSNLPYHLVSLRNHICKELNIKIEELPFSGELIEVKDSEMKWEGAIERLVHSFA

SEQ ID NO: 33419 - protein, 491 aa, Fusobacterium necrophorum DJ-2; identical to SEQ ID NO: 33405

SEQ ID NO: 33420 - protein, 193 aa, Fusobacterium necrophorum DJ-2; identical to SEQ ID NO: 33406

SEQ ID NO: 33421 - protein, 1117 aa, Fusobacterium necrophorum DJ-2; identical to SEQ ID NO: 33407

SEQ ID NO: 33422 - protein, 399 aa, Fusobacterium necrophorum DJ-2; identical to SEQ ID NO: 33408

SEQ ID NO: 33423 - protein, 487 aa, Enterobacter cloacae BWH 43
MDFDTLDTMRTNHPAWKLLRADSAALIASFLWHAFALPNARSITQEALTEKLEDTLYVLRQQYGDELYPRAARDYLNDWAAPERGWLRKFYLPGDDRPWFDLTPATEKALSWLDKLGDSSFIGTESRLVTLFELLKQVISGSEHNPELRIQELEQQRNEIDAEIMAIRNGKLSLLDSTAQKERFQQIVQLSRELLSDFRQVEHNFRQLDRNVRERIALWNGAKGDLLMQVLGERDAITESDQGRSFRAFWDFLMSQSRQEEFSRLLEKLLSLDAIAETQPDSRIKRIHYDWLEAGEYTQRTVAQLSQQLRRFLDDQAWLENKRIMEILHNIEHHAIALKKAPPEGDIMDISDAQPQIMLPCERPLYTPPVKAQIIQQILEQGDESIDIDILFSQITVDKSRLVRNIRKELQTRSQITLHELVSLYPLQQGLAELVTYIQLASESATATFDECSSESIYWFTATGEEKMARINTVIFTRAQEIINGTE

SEQ ID NO: 33424 - protein, 201 aa, Enterobacter cloacae BWH 43
MEQNDASFSPDSALSTLIISLLKGVIYQENDPHLWGALLRLQIQIRDYCRVMNLELHLDEAEGYAFLRSDPDNADDESAARLISRRPLSFPVSLLLALLRKKMAEFDASGSETRLILTQEQIVDLLRVFMAESTNEARLVDQIGRHINKIVEMGFLRPLRNQNQTWEVRRILKAFVDAQWLSDFDTRLQAYSQHLRKENND

SEQ ID NO: 33425 - protein, 1126 aa, Enterobacter cloacae BWH 43
MTNALELDFSSDESSAGFRLERLEIFNWGTFNNQVWTFNLEGKNALLTGDIGSGKSTLVDAITTLLVPSHRIAYNKAAGAENKERSLRSYVLGYYKSERLENSMGGKPVALRDHRNYSVILGVFRNEGFGQTVTLAQVFSLKEPAGKPVAFYVVTDNDLSIAQDFSGFGSDINNLRQKLRKNSAEIFDSFPPYGTWFRRRFGINNEQALELFHQTVSMKSVGNLTEFVRSHMLEPFDVAQRITHLIEHFDDLNRAHESILKARRQVDQLRPLVDECDRHALLIQETETMRACRDALAGWFASLKQTLLEKRLLNLKDELQRYQNTLAVTAEQLYEKRSQERQLRADIAANGGDRLEQLRLNISHREQEKNRRLKAADNYNELLGKVNLSAVKDHDEWLATRQLLQIHSDELTDREAELQQQKHELHFKFTRKREIHQQLSAEINNLRSRRSNIDARQITLRAAICEALGLNEEHLPFVGELIAIREEEKAWEGAAERLLHGFGLSILVSDEHYPQVSQWVENHHLNGRLSYFRVNAGMHHAALSPLPGAISEKLQIKPDTLWYDWLERRLLQFNHICCDTLEQFRRETKAITRSGQIKSPGDRHEKDDRHNINDRSRYILGWSNLEKIAVLEKQAGDLEQELAELGKEITSIDVNLKNLQQQRDIYNRLSEHNDYQAMDWQPLAQEIARLEIEKRELEATSDHLAVLSQQLNKILTEIQTLETTHADKIDLRGRTQEKIDRAEESLKEAQAVQITANEQNMPRYYPQLEHWRGEALPSRQINVESCDNCQQEMRNWLQDKIDNEDKKIGRSRDKIINSMTGYNHQYPLETQEIDANIESAHEYRQMLNALQADDLPRFEARFKQLLNENTINDIASFQSHLNRERETIKERIEKINDSLVPIDYNPGRYISLVAQLSADADIRDFQNELRVCTEGALTGSEDEQYSEDKFLQVKRIIERFRGREGLSDHDKRWTTKVTDVRNWFIFSASERWREDDTEHEHYSDSGGKSGGQKEKLAYTILAASLAYQFGLEWGEKRSRSFRFVVIDEAFGRGSDESAEYGLELFKRLNLQLLIVTPLQKIHIIEPYVANVGFVHNEAGKISRLRNISIDVYQQEKAEKKHELDNA

SEQ ID NO: 33426 - protein, 383 aa, Enterobacter cloacae BWH 43
MSWTTPEALKKQLQKLWEKGVLLRELVEDSGYFPRQLTCKKPTSDDLSSRFNEVRQWISLLSESAEKGYHLEWREVRHRVIGMNRLPAKIWVDSAFDAVKILGLRKTSERYLHLFQYIVVAQPVLRSWLIKYPLRVLEQDWTKLLSIIGWLQLNPRPGIYLRQLDLPDINSKFIEQHRGILTELLDLTLPPETIDPSARGILQFNRRFGFRDKPQRVRYRFARQDREIDSHEFSSLSLPVTSVFVIENEINFLTFSGPVGSMAVFGRGYGFDMLSSARWLCRQKLFYWGDIDTHGFAILSQFRQLYPHTQSFLMDENTLLTHRASWVKEDKPCSRLLSHLTEHEQQLYQALVHDRFGEKIRLEQEYISMAVIQQALEKLYPSS

SEQ ID NO: 33427 - protein, 498 aa, Klebsiella pneumoniae MGH 68
MEENTRQRTENYISAKNQHPAWILLASRRAPLVLSCLKTLFEKAHDGIPLEDAIQSLSGMLIEHVSQEQYDINQDNPSLQASRELREWIKRRLIVERDGRIFATDALEVAITFVESLDNRFMTSTASRLSTVQREIENLETRLNPNPANRVATLRRRIAELERELQEAEAGHIEVLETHQAVEHIREVFNLASSLRADFRRVEDSWREADRALRQSIIGEQYHRGDIVERLLNDQDALLNTPEGRVFDSFQQQLRQSVELTAMSERLRVILSHPSASNALNRLQRHDLRWLVKRLVDESQTVLQARARSERDVRGFMKTGLAAEHHRVGHLLNEFLNLALKLDWQRQMIRKQEVPLPAVGVAVTGVPAIERLRFKEVDDEAEQTLDLSNHATDLTQIGDDFWDAFNGLDREALIQQTLQLLTKENRPVGLAELAALLPPAHDLETFAVWIGMAREAGIEVIDSQREFAELSDGEGRRWRFNLPTTGLESQALMDIDWE

SEQ ID NO: 33428 - protein, 249 aa, Klebsiella pneumoniae MGH 68; identical to SEQ ID NO: 31023

SEQ ID NO: 33429 - protein, 1096 aa, Klebsiella pneumoniae MGH 68
MNQIARLAEKESFILTRIELFNWGGFHGLHQAAIHQEGTAVIGPTGSGKTTLVDALMTLLCANPRYNLASTGGHESDRDLISYVRGVSGPGDGGEGQSHIARPGKTVTGIAATLEREGQQVRLGALLWFDSTSSSAADLKKLWMFSDNPTQTLDHWLNIWHDGGARSLKQMEKETTGIWIWLNNKKQYLARLRDFFEVGENAFTLLNRAAGLKQLNSIDEIFRELVLDDHSAFDRATEVANSFDGLTEIHQELETARKQQQSLQPVALSWDKYQKQEQQLADRKALESLLPIWFAQQASQLWREKVSHIEVELGESQTREEQIQSQLELQKKVVTDCLQRYLQVGGANIDELNERIKDWQKTLGSREILAHQYQQLTRNLGLPPDLSQPQLEANQHEAEARCEQFADDIKLKQEDVYQKGVLSHRMTEELRERETERAEIARRPDSNLPAHYQAFRSELAEALNVDESELPFVAELIQVKPEEAQWRGAIERAVGSNRLRILVAPESAQEALRWVNQRNNRLHVRLLEVKLPHSPARFFDDGFTRKLLWKDHPWREAVKALLAENDRHCVDSPEQLRDTPHAMTVQGLMSGKQRFYDKHDQKRLDEDWLTGFDNRDRLNFLAKEIAALQEQVKTANAAFEFAKGEVGVLQNQAISFQKIQQIDYDSIDVPGAKSQLDALRERLENLIRPDSDASVAKAKLDEAQTVESELDKQLRAANKVTNGLDTELTSARAAERKAQQTAQKGMQDEERELCASHFPVVALVQLPDIRDLERQHERGIQQEIEGIKGELHRLNIELTKRMSEAKRVDTGALVEAGADLDDIPVYLQRLQELTEEALPEKLNRFLDYLNRSSDDGVTQLLSHIDHEVLVIEARLSELNETMFRVDFQPDRYLRLDTKKVVHESLRTLEKAQRQLNAARFVDDNGESHYKALQVLVAQLRDACERNRTLGAKALLDPRFRLEFAVSVMDRQSGNVIESRTGSQGGSGGEKEIIASYVLTASLSYALCPAGSRYPLFGTIVLDEAFSRSSHAVAGRIIAALREFGLHAVFITPNKEMRLLRDHTRSAIVVHRRGQDSNMASLSWEELEQHSRRRENA

SEQ ID NO: 33430 - protein, 382 aa, Klebsiella pneumoniae MGH 68
MYSPDELREKLARQWDNAKLRAERLLPPGNWPLCLTIGKPSAKIFAEQPQRVLQHVQLWRQVAVGRVEWEEVSYRASDGPVSMPLRWIMNGPSDWINAAADATVSREFRLLEGIIEQVDPIFHPLLISHRSLWRNKGSQDIISAARLASRLEPGCAKGLPLRLLSGQGVDTKFIENNISLLTRLLDMRFSGEASEQGLTTFLDAFDESSHWVLVVPLSPGLLPFKKCRVTTAELAETTLPASRVLMIENEQCLHQLPELSDTIAVLGCGLDVQWLSSVVLDKKRVAYWGDMDSWGLLMLARARRCRPTLDVLLMNRELFEQYASQSAVPEPVKAQEAIPDGLLNEEGDFYRYLTCLPRGRLEQEFLPSGVVGEELVRWRKES

SEQ ID NO: 33431 - protein, 524 aa, Bifidobacterium animalis; identical to SEQ ID NO: 30666

SEQ ID NO: 33432 - protein, 269 aa, Bifidobacterium animalis; identical to SEQ ID NO: 30689

SEQ ID NO: 33433 - protein, 1165 aa, Bifidobacterium animalis; identical to SEQ ID NO: 30668

SEQ ID NO: 33434 - protein, 406 aa, Bifidobacterium animalis; identical to SEQ ID NO: 30669

SEQ ID NO: 33435 - protein, 489 aa, Kitasatospora cheerisanensis KCTC 2395
MEFDDVTGLFDHPAWRLLRADNAALVLAFCGTVFVDENARGVPEGVLISRLDDQLYDLNERQMGSFPRAASAYLTEWTNNGWLRKYYPPGEDEPHFDATSAVEKAVAWVRALPARSFIGTESRLSTIIDLLHQMAFGTETDPQARIDELSRERDLIDAQIEQLRTGEVEVLSQFALLDRYQQVESTATELLRDFREVEANLRELDRRLRQDVATAEGSKGELLASFLMDREMIAESDQGRSFQAFFDYLLSPRRQEELRELLEQVNQLPQLDGKINKGLLKVPRAWLEAAESTQNTVRQLTEQLRRFLADRGREEDRRVLALVRSVQRHVAVLDDRRDLPGMALEVPQVELVLPMERRLYKPVERVELDSTASEAFDEADVDVSELFAGVHVDEEALAAQVLAVLGESPSGQASLAAVVDCHPLALGLAELLTYFQLDRPGLDVVINPEHGHDLVYERVDTPGRTVATVPQVTFVLNEGGTAAGEVGQA

SEQ ID NO: 33436 - protein, 1141 aa, Kitasatospora cheerisanensis KCTC 2395
MSITAPGTSLVPRQSGPGDSTLGVGPGFRLARLEVLNWGTFHRSIWAFDVDGRNALLTGGVGSGKSTLVDAMTTLLLPANKIAYNKAAGAESKERNLRSYVLGHYKSERVEATNSTRPVALRSASSHSVILGVFTNYTLGVHVTLAQVFWVPDVNTGQPDRFYVTADTPMSIGADFIDFGTDINDLRQRLRRGGATIHNTYPPYGKTLRRGLGIPSDQALDLFHQTVSMKAVGSLDEFVRERMLEPFDAQAEVDKIVAHFNALTASHDEVVRAKSMIEALGPIVEACDTCDGIQREIETLQRRREALPVFFAQHRHHVLSRRGRELGARFRELTELQEGRETRLEQLRETADILRRRIDGAGGEKLVRLDARIEDLRRERDRRRERAAGYTGWLGKAGLDPVSDAVSFYERSGQISEVRAQVTQQEQRARDELDALAVDRHNNTKESDELRREITSLQSQRSSIPSRLLELRQNLATAVDVSVDELPFAGELIQVRDDEAVWAGAAERVLRSFALSLLVPEAQYEQASAWVNGRHLGLRLVYFKVPARAEAAELPPDRDLLLGKLELKDDSWARDWLAAQLRTRADYVCATDLDAFTRSTRPAVTRQGLVKSGGGRHEKNDTSRVDDRSSWVLGWSNQAKLDALLVKAAQLTKESASITTRTRALKQQQTDRAGIGEALTLLASVGSYSELDWQESSGEIEKTDLQKKALAAEAGLDKLTADLDATDAEIKRSRAAADNGREELGGVRHDSEKVEFQLAETSAFLEQSELAAVAEHEQALTAFLPASALGVHHLDLLQSAETQAFAKLSRGVESQGRALQSATGQATVKMAAFRTDFPQYAKDLDHTLGSGKGYRALHGQLVSDDLPRFEEQFRQYLRTNVIRDIASFQARLRAQEQEIGERIGVINGSLAAIDYNPGRYVRLNAIPTANVEIRDFRRELLECTSDALATETDGAYTEEKFLQVKRLLDRFKGRSGQSDKDAEWTARVTDVRRWFTFSASEYSRADDTEYEVYSDSGGKSGGQKEKLAYTILAASLAYQFRIDPEAKKAKTFRFVVIDEAFGRGDDEAAHFGLDLFHRLGLQLLVVTPLQKLHVIEPHVSSVGYVYKPDKVHSHMATLTIQEFRERQAAARQPLPHTEGRS

SEQ ID NO: 33437 - protein, 253 aa, Kitasatospora cheerisanensis KCTC 2395
MKALQAHAQWQQLVDTVSWIGNHATGPIYLRQVDVPGVDTKFIETNKGILGELLDHTLPADRIHTGVARGDFAARYGFLTKPPYVRLRYLGNQPGPFSEITVRASELTAPPSGVHTVFVLENEVTYLSLPDVPGAIAILGSGYAAVLLRYLPWLANVDLRYWGDIDTHGFAILSQVRRHFPHTRSFLMDRSTLLDHKAHWGEEKTQTPEQPAHLTLDEAEVERDLRLGTYKPHLRLEQERIPIRTVLRALAGS

SEQ ID NO: 33438 - protein, 513 aa, Xylella fastidiosa subsp. sandyi Ann-1
MTEMDHATLTTLRERHPAWRLLTSPHAPLVASFLHRVFVATNARLLSETKITQALEDTLYALREHEGPEAYPKGALDYLNDWSAPDKGWLRKFYTPDTDEAQFDLTPATEKAILWLLSLTERSFVGTESRLLTLFALLEQMSTGTETDPKKRVEELQKKRDALDIEIAHVLEGHTPLLDDTAIKDRFQQFQQLARELLSDFRQVQDNFRQLDRKVREKIALWEGTKGTLLDEIMGERDAISDSDQGRSFRAFWNFLLSSRRREELSERLGQVLALPAVAALHPEPRTRRIHDDWIEAGEQTLRTISQLSQQLRHFVESRAFLENRRIMDLLHGIERNALGLRDMTPSGTVMHLDAIGADIQLPLERPLFTPRAKPRLADLVLAAGTDDIDTTPLFNQIVMDKARLRLAIQRALRTQSQISLRTLLQTEPLQQGLAELVAYLELAHTSNSSDPDGLRGIVDETVEEPIRWQANNTVGETVTREARLPRIIFTRRALSDHQESSQGDRAHEGHAV

SEQ ID NO: 33439 - protein, 237 aa, Xylella fastidiosa subsp. sandyi Ann-1
MKDTLYESDVVATPRNALPTVPELSHLMVYLLKGVLYRNQEERLWSSLLRLQTQVREHTAVLWLDLVLDEAEGYAFLKSRPDPDAAEGSARPPRLIVRRALPYKVSLMLALLRKRMAESDARGGAPRLVLTREEIAELMRVFLPDATNEARLIDQLDTTIKRVVELGFLRPLPSPSSSTPNHNNYEVSRILKAFVDAQWLAEFDARLEAYHAVPSDDQDDQDEPDTTPEAQGESGDA

SEQ ID NO: 33440 - protein, 1143 aa, Xylella fastidiosa subsp. sandyi Ann-1
MRETSTLGLNFVADDKRVGFRLQHLEVVNWGTFNTRVWCYTLGGRSGLLTGDIGSGKSTLIDAITTLLVPAQRVAYNKAAGADARERSLRSYVLGYYKSERNDATGTAKPVALRGTSDYSVILGVFHNVGYDKVITLAQVFWLKDSQSQPARLFVVAERALGIAADFNNLGGDIKTLRKKLRGAGCELFDSFPPYGACFRRRFGIQHEQALELFHQTVSMKSVGNLTDFVCSHMLEPCDMGSRIEALICHFDDLDQAHQAVLTAKQQVKLLAPLVEDGKKHQTQLGNIQTLEAGRDTLRPYFAQLKGELLKHRLDALAAEAAQLTVEIQHLEEQRKAADSKVTQLQQDMRDNGGDRLEALAAEIEQLEQTKAQRQKKSDRYQTLLTKIDETAPADAIGFFTQQQRFAQHTEELNAAIATLHNDKSEKDFALRNARKDHTTLLAEINSLQQRQSNISAAQIGIRHDLCMALSIDAEALPFAGELIQVREDARDWEGAAERLLHSFGLTLLVPDAYYKAVAEWVNREQLQRRLMYFHMRPRNTTQEAALHAQSLVHKLIIKPESPHYTWLQQELQRRCNVVCCDTMEQFHREVRAITQAGQIKDPSGRHEKDDRHRIDDRSRYVLGWSNADKLHTLNAQRQHLEDSIRMLEQDLETIQRECQKQQERLDALNKLGEYTDFADIDWMSLVRQIAGLKEEHAELQTTSNILQTLQQQLTEAKTQVNVLQGKWRNALGEQGEVKSKQKTAQQMWNQARSAWDDAPLSQAQIALLAGWRQQALGEHVLSVESCDNHEQQVRQWLQKRIDAENAHLRQLNDRITGAMHRFKDQFKAETVEMDADLAALPEYERMLNGLQKDDLPRFEARFKALLNVNTINEIASFNAQLNRERETITERIKDINQSLHGIDYNQDHYINQSLHGIDYKRGRYITLLAQPSPDAEIRDFQQDLRACTEGTLTGSDDEQYSDAKFLQVKHIIDRFRGREGLSDADRRWTAKVTDVRNWFVFSASERWRADESEYEHYADSGGKSGGQKEKLAYTVLAASLAYQFGLKWDEVRSESFRFVIIDEAFGRGSDESAEYGLRLFQKLNLQLLIVTPLQKIHIIEPFVSSVGFVHNKGGCDSQLRCLSIEEYQAEKTNGSGPRGDAR

SEQ ID NO: 33441 - protein, 405 aa, Xylella fastidiosa subsp. sandyi Ann-1
MSWATPASLCAQVERLWKRGDLLRALVTDTHAMTWPHRLKLRAPNAADLSNRFQAVRDWVQAIVGTPQIRIQSREWKHRVQGTQQVPAAVYLDTLQDALAFIGKTHEALQFEAVWQQTAAAQPVLLAWLLRRPTQALEVADRWERLLAVVAWLQAHPRPGVYLRQVDVPGVDSKFIEAHKSVLTALLDLALPPESIETAASGVLQFTRRFGFLDKPVPIRFRLLDATLPSLPGCTGLPDISLDAAHFAALTLPITRVFITENEINFLTFPKVAGAIVIFGAGYGWEPLARAAWLHACQLYYWGDMDTHGFTILNRLRGYFGHVTSVLMDQDTLLAHRLYWDEESEPTRQALEHLTAEEAAVYDDLRYDRHQPRLRLEQERIGFRWVCDRLACLLSTAHVAPPQDA

SEQ ID NO: 33442 - protein, 249 aa, Escherichia coli O128:H2 str. 2011C-3317
MTGFFDRLINRSVTANAGCEPEPSDEEVTDESVEESLASSETRTLKKIREATQELLKYGLLEEASKPNLYRIVLSHPEEVTRILEPLDLDIGIDEIRGLLYVKVRLDETPAQDEWAHPLVRRQRLNLEQSLLVAILRQHFVAWEQESGTGASQTQIAIDDLLPQLQIYLGDPGSESKERTRLLTLLDQLKGHGLVTSPDAHERIVIRPIIAHLADPINLQALLAWLREQIAQQTSPNDAREKDSSEEDV

SEQ ID NO: 33443 - protein, 1095 aa, Escherichia coli O128:H2 str. 2011C-3317; identical to SEQ ID NO: 31336

SEQ ID NO: 33444 - protein, 382 aa, Escherichia coli O128:H2 str. 2011C-3317
MYSPDELREKLARQWDSAKLRAERLLSPGNWPLCLPIGKPSTKIFAEQTQRVLQHVQRWRQVAVGHVEWEAVSYRASDTPVLMPLRWILNSPSEWINAAADPVVSREFRLLEGIIEQVNPIFHPLLVKHRSLWRHKDPQGVISAATLACRLEPGCAKGLPLRLLSGQGVDTKFIENNISLLTRLLDVRFSGEASEQGLTTFLDAFDESSHWVLVVPLSPGLLPFKKCRVTTAELAETTLPASQVLVVENEQCLHHLPALSDTIAILGCGLDVQWLSSSVLDEKRVAYWGDMDSWGLLMLARARRCRPTLDALLMNRELFEQYASHSAVPEPVIAKEAVPDGLLNEEADFYRYLTRLPCGRLEQEFLPVGIAEEVLLRWGKES

SEQ ID NO: 33445 - protein, 450 aa, Pseudomonas aeruginosa C1913C; identical to SEQ ID NO: 32505

SEQ ID NO: 33446 - protein, 249 aa, Pseudomonas aeruginosa C1913C; identical to SEQ ID NO: 32506

SEQ ID NO: 33447 - protein, 1101 aa, Pseudomonas aeruginosa C1913C; identical to SEQ ID NO: 33001

SEQ ID NO: 33448 - protein, 393 aa, Pseudomonas aeruginosa C1913C; identical to SEQ ID NO: 32927

SEQ ID NO: 33449 - protein, 493 aa, Burkholderia cenocepacia
MKTALALHALKAMREGPMWRLLASYQAPVTVSLLQSLFPETSTQLTSASLMERLSVEVDGLRARGEEINKTPQMIIADWVHQKWLARSFPEGASEEQYELAADVVPAMRLVMGLLEPRQTATESGLAVVIDSVLRLAADTDPDPESRLRALHEESRRITEEIRRVMQHGVSPLDPTRASERGRHVVATTEAIAADFRRVREAFEILNRDLRRQLVAHDGPRGEVLDKVFLDSDVIAESDEGKSFLAFWRLLTDPSQLEGLQAALEALESRPFIRLLSLEERKRLFRVTEMLLVEGTMVQDVMTTLGRSLRTFVQSREFQEQRRIKNLIRKAITESLELKDTLTNGRTIDFSLTLSTSSLRSVAQLTLTDPRERPGETSVDDAEAPEIDLEAMREMIDNADIDMPLLKANIRAALAERPQVSVRDLTIMFEVAQGLASIVGYMSLGQRVGIVLHNRDREFHPTELVSWVGQDGIVRQARIAQLLFTRECLDELD

SEQ ID NO: 33450 - protein, 270 aa, Burkholderia cenocepacia
MGSQADARPDDPNPADEIPEVDDEGPGELLDDDSESTARMDGGVEMPLFEGDTSTLPHEVRRAYALLLRGPSLDERHSKLWPVLIDHELRLRQLLHAAFLDLVIDREQKIAFARPAHIPDEDVPQLLREVRLTFVDSALVLHLRMMLVQAEAEGRRATVSRFEMIDHLKAYEASDNVDQTRFNRQVDGAIEKAKKYNFLRLIRNSGERFEISPVLKLVFSHDQIEELRRTYQDIRNQLGGRPLEGDGDLTNRSDSQSSGDPDDDHDIDEV

SEQ ID NO: 33451 - protein, 1119 aa, Burkholderia cenocepacia
MEEAGQDQFRLQQIQVMNWGTFNKLHVFDISPRGHLLVGPSGSGKSTILDAHSALMAPPNSEFNAAARGNDKVARDRTMVTYIRGAWATRETDLGVIAAQYLRPDTTLSAVAEVYANSRGQTLTLVGMWWIKGKSTLAKDVRHSFFVIERAFKLKELSFFMQTDYNLRSFPKHLPEVKLFETHASFRERFKARLGIDHDLALRLLHRTQSSKNLGDINTFMRDNMLDEPQTFSLAKALCEEFNTLAAAHRDVVDARKQRDLLRDAKSHEEQYQEHHAKVDRIETLLKQVDHHSKYLQYTLRRGRANELTIELERLRQQVEALGRRANSEQAELERLITLRGGMNDGNVAGLTAQLETTATRLNQVGRERTRVTGWLKTLGWPEPEDAAHFGEYLGKANILREHGHPHEEEAKEYALRNDLSVAQTQLSELLQEIRSMELRKSNLPWQLVDVRDQIATALKLDPGILPFGGELLDVPKKFERWQGALERLLGPLTRSFLVPEAHYRDVVDWLESNHTGQHVLYLRMRTHQRRTDDGPKSPIRMLDTADDKYGDWLRDEISQHYGDFVCAETMDEFREAARAISLQGQIKRGGTRHEKNDRTRLDNRKDWLIGFSNEQKKLELLDELHAQQTKISESKQVLDDLVASRKREEKKLAAAQELSQVMWADIDTVSVALQLQRLQVQLEDAQRAHPEVRELDTQIEAQRQTVSEAQGARGSESDKYDRSVEQMATLSRELEATPAELQVPPPDAGELQELFGKADRLTLDNLESRRERARGDLKEQRGQADKDRSNARKDLEEALRTFRRNHPLAAADMGETLDDWPDYARVLVRIEQDDLPRFEERFFRLLNEQSDRHIAKLRQRLVTEKEEIRGRMNIVNDALSQSQFNPGTYLRLENRPRTLPEVTTFLADLTACLERNIKPDATRDEREEQFKALSKLVERLHSDKSEDERWKAQVLDVRQHVEFVAKEFDAEGSVRDIFQSGAGKSGGQRQKLAATCLAAALRYQLAGTDRPLPQFCTVLMDEAFDKADSEFTAMTLNIFHTFGFQMLMATPMKAVRTLEPFIGGAHVFSNKSRDSSGAVSIEYDMTHHRLIGLGAPRPDDPSRAANDDSDEGGARAVD

SEQ ID NO: 33452 - protein, 312 aa, Burkholderia cenocepacia
MLGQVTLPEKVCFEDADAVADCAGLRTQWATLKARWQTLCMQHPTMIGMPECAKVLVSAADWSDDDFMRLLEFLSWGKRHPASGLYLRQLPLKGIDTKWVERRLGVVVPLLKTILGRDGDLHQLLGLRRAPPTIRMRLLDPRVREQLRGADYLEMPVDQWNTVLRRPPVRLLVVENLDSGLAAPDIQDAAVVMGHGNGITVLQQVAWSHAAEILYWGDIDTWGLHILSRMRGIYPQLESILMTEEVLESHRHFWVDEETQDMRPAEHHTIKEAKLLRDLQQRRWGRPIRLEQERVHWPMAVEALTRRWGGVA

SEQ ID NO: 33453 - protein, 466 aa, Marinobacterium sp. AK27
MLFNKLPDDIFLPLSGQNRRIYEVVLLELADLFFDEDLIDPFIPKDLVRSTIENAVVRYGIRRWAVESDDENDGDLPLSSADYTNRIYRRLVQTGWLEEEQRIYRTYVLMSPANSYLLRSLASISKLEKRSYGGAVLNVLSSLESAVSDPVGRGIALEEAAQTAADFSAHLTDMLLGLRELKISLADSLTPQEVVRSFFDRFVEHILVSDYKTLKTKNNPFRFRRQILSMMRDLQFDPLKLDQLAEHYQMQYELDVEEAEALVQQHINRVIRIFESVDQRLAAIDDFRYQLEKRVADTVRYMDKTTPGMAARLSRLIAELAKKDESDIPLVDSLEQVGFISPSSVRSPIRRRIETKPRIITQAEIDPKVLALRQLFKEWKERREVKVDKIEAYLEEQFAGRDQLNATEFRIDSIEDYICFSYVRHLNSLGKKARKTATRYQIQFEDRYVNVADMVECRGFVIHRTQ

SEQ ID NO: 33454 - protein, 253 aa, Marinobacterium sp. AK27
MLGDLQKVVSRNEQHQPDDFIRAANLLLTSQFLYADRPVHREHYFLIAGNVDYFRNLFAAIGWSLIYQPDEAYLGILPQGEERVLRLRLDESLLLLCLRQIYEAKLESFEVEDGKAFSSSDDLLRLYDTLTGKEIPNETRLKEILSLFTRHGVIERGKSDETDPKNVPIRINPTIRQVVVEDYIGQLEALCDIDNREQTDEPVEDEAEHNRRAEDKAGEGESVETPPEPAADQSAAEDVSEEETAGERSNETA

SEQ ID NO: 33455 - protein, 1145 aa, Marinobacterium sp. AK27
MKQLNRMVLVNWYVLGAMEIPIKGNVAIVGPNGSGKSSLLDAMQTVLMGGHKRHLSFNASAGEKSERSLRTYCLGFLDDMGKKGNAREDSISYLAMSFFDTETAQESCVGIAISASTASADEEILGRFILPNFSVTLDDFTVKQGSGRMPRAWNEVRDGLLKQCPEMILEKRAARFVKEMVTHLSHDPQMPNDDDKFVKNFKNALKFVPIDSPTRFVREFVLDENIVHVGAFRKSLDEYRAMEQKTQEVANRITELEKVQEMCRGISRNLRNSVEYEWVVHESRFEQADLKKEEAAERLETSQEQEETLQVELAETSEALNKAIQDLANARAELNTSDSAHQINALESSIRAHQHELNVVKDRIQSVYSLLRTTVSFSDHTDMLPEAFRPVVAQSVELWRSGENVLAEAWPISPVEVDNTLEQLRGNIDSVRKAVSRRYEESVIRINELRSTIQNQKSAVEQLQQGRAPIRHNTRELMELLEGYGIKSTPICELVDINDDKWRIAIESFLGARREALVVAPDRVKEAITLYRRKGRHLKGCRIINTTKSGDWLNRTKNGSLAQFIDTDNDDARAYMNRALGGVMAVETENELLRHERALTYDCMLQSEGSTTAINELSPIMGIRRRGDQLQVQGRQVDELIKEFTTLGKKHETLEKLRDSLISLANGLMGVNERVYDLCTQREQLSGEVRGFEQAITDLRNHDDSGIQARIAELAEHQKAVESKQKSLMDKLQKVRTNIIKDNALVEALDGELVEHVQRRTVCEEKGEFDAQSAQEKRDYLDEACDGELERIIFEAAKKAQSELQLHEKKKNGVRDAVAQYKARYHGGGMSHQELDKIGPDSTHEDLEKFVDSTVEALRESELAQYAQKAERARLEAETAFRSDFVAHLNDQINKIRDLIRELNSHLKNRPFHKEMYSFEMSPNPELKDILELVEAYTRMDQANVGSLFDLQHSGDSTHRNALAKIHDVLKDEGESSLLQDYRNFYNFELVVKDLQGNRKTTLTQRIKTGSGGEHQVPFYVAMAAALGATYRLKEGSDGKPVGGFSLSVFDEAFNKLDSENTVTSLGFMSDLGLQTIIAAPDEKYSLLSSCMDTIINVCRDGRVVDIDVEFPTERGKELLASDHPYKLMPREELESEDEDQAELV

SEQ ID NO: 33456 - protein, 505 aa, Bifidobacterium pseudocatenulatum IPLA36007
MAEIRREMERLRPVYETGVLRLLLRNNSMLYVALLRSTFDPLTGELPREIVEERFARSLNRLIETGDYTLKDGQTAREAAHSVLLDLAREGEGDYAWLANSMDVASHRYLYRLTARAHRAIEALDRLEDTTKALSGAQANSIIMEIEHARMQLTADPRERIRLLKRDIEERQKEIDELEHSEALEKLTSEQVGDIIGVIHNTLRGVPIDLRELALSERDNGDALRRRMQAGAMSVESILTAYHDEYRRAFRESDSGRRFEDAFQVIVTDEGRREIDDAVRDIARNPYLDGEPSVLLNQVRSELKRIYEGIEDVRRQIRTSDEAVSRLVRQQTDTSYRTMLAKLNQLFAKTSAEAKAHPNDQSRPYHTDAGQAKFPTLPSRPARSMARAASSSLNDAPAATIEAPDLKNMVEICGPRLTRMIRLIRSNPVTTSDGMFVDLAASFNQLPKAERRESELVGFLSALRTQDDSSYVTWRCISIDGSERVWRTKPILITETTLDDIIEER

SEQ ID NO: 33457 - protein, 260 aa, Bifidobacterium pseudocatenulatum IPLA36007; identical to SEQ ID NO: 31084

SEQ ID NO: 33458 - protein, 1152 aa, Bifidobacterium pseudocatenulatum IPLA36007
MADGMKIVSDKWMLQSRQIVNWGSYGGWHEFRPSMDETMPVTLLAGASESGKSTLVDAQISLLYPSGTPYNKASNSGRSERNDYTYLRGMIGVSDSENGETPIFLRGKDADGTPQNIWGAIVDTYVNKTDGGLLSCGKFLYLNAGDGQDGLRRRYITWNRTIDPRLMDQYRNTPFTRSMFEKTYPECTTHTNAAAFHASIWQDMGLSADACRLLHKIQSADAPSKLDDIFKQGVLDIPESIRLAHETVDDYNRFNENFHSMEDKMARVAILQNIQTRYGEYAKQTTERREYEPINPDSEHGNATLSAWARSRMASEVRAGLPAAQRKVKESQEAIDRAMQRVGELNTRIDAVKERIQGIDGGSLQQLGKDLQRVRQDIDEASRQRHAIAERFEQVEGRLPDSEQTWDAKRAMLAETLDTYEERLKDANARFQQLVGERHDRQRDRDSLRRDYQRKLTHRTRISDDMDDARTLIMRATGLDASELPYVAELMDVNEQDEQWRLAMNVTYAPIAQTILVDKRHEQGFAAKISAIDPKLMTRRTWRFIDTGMQYESSASEGWMSSKLQYREDSPFAGWLKNQTTSPRFDARCVHAIDDMNHDERQVQADGQIKSGDRGFHGSKGLHQVIGFMNEQYLAELKNQLDKAEQALQNADRRSEQMSNAISLLQDEHELARIVADMPWSKIDVNGLREQETRIRRQIERIENDPELGQLQTELKQLNQQATAENRNQYQAEDDLDKAQHAVQAEQAWLDAYGNDDFDDATLSSMVSNLLADAYENCFGASVRAQDRPKLIAGLFDHESETPFHTRALRNIARIARTRIQEIDARSNQLRADTERIMDDYLKNHSTDDNTVMASVEDYRYFLDELDELNMLVTRAATDEEYANSVKKLYMSFQQLNRALRTDEENIKEQLNRINSMLKGQQFGPQGGRLSLDVTFSPIDRQFETTLSRILSKLEDWTRNASDNPTETRKAFNNCETFVNRLHNELDKIHDTNGIKAYGARNLDPRVRSSFYAIVHHDNAPDERISSTGGKSGGALQELTSFVYGAALIYLLGGDLTARPTYTTLFLDEALIKADGRYTKRALAVLPRLGFQIIVSAPESKTAEILNVANRAYVAYKDPSTGNSYLQELDSETITQDETQPTTAPAKPTTEA

SEQ ID NO: 33459 - protein, 400 aa, Bifidobacterium pseudocatenulatum IPLA36007
MATARSTTNSDIHSQLNGYVTDYLTKHMYDANTSWPLRKTIRLPKQAELEAHYTHIRAQDEAIRNWAQQHHCETSEKTKIISNGIVRQTSQLIDSVTIPDLNTALNITTPQTRKLYQREHQRAHTITNQFNLDSNTSINIAKILKNHDDTDFNLVIQAAHYFANHNTENMTPRMVPIPGFSAKWLGKTTSNRCKAICKLLKREQLALNDRHGEIRLRLLDTQHHNQPDLIVTQPWTDGAPHDITHIIIVENKDTYQAIPTTEHAICIFGSGHAATRIKTLLPWITTTPHIIYWGDIDADGLEILSELRQTGITCDSILMDSTAYKTYEPYGTKLDTKKQPLKTRDPKPTPGLTQHERNLYEQLCTGKNTTYLRIEQERIPINDAMTILHNQHQWNTTHHK

SEQ ID NO: 33460 - protein, 498 aa, Endozoicomonas elysicola
MLSSDIELSRNLVLARTQNPAWRLLASPRAPLMISCLKTLFYQDHETVSEDAALHVLAEILGQFANHDEFSIDTEDLLSLAKKEMREWRQRNLIVEREGQLFATDALQQAMQFIDGMDNRMMTSTASRLATVQREIDSLEAKLNPDQTSRANNLTRKIESLKHELEQVNRGEFKVLEGPSAVENIREVYNLSMTLKSDFRRVEDSYREADKQLRQTIISEQHHRGEIVDRLLDSHDHLLTTPEGQVFHGFYEQLSHSIELDNMKHRLRNILSSPSCREALTQQQSMELRWLTSSLVRESEYVIRARARSERDVKGFLKSGLAVEHHRVGQMLNEILECALNLDWHSQKLRRSPAPLKPLAFPVSGLPLIERLTFKPVEQLESQKLVLSQESVDLDELDDDFWNAFDGLDRETLIRETIALLKTQGTPMTIAQLAEYLPPTHDLETLALWLSMAREAGLIVADDTEQLDIQDRDGQWLRFYLPKTYLHTEALTTIDWEL

SEQ ID NO: 33461 - protein, 252 aa, Endozoicomonas elysicola
MSDVFDQLVTSGAAPSSSPQTTLKDFSEIEEVQTDNTQTQDSPTLTARKVKQAVQELMKSGYLEASRKPNLYQQSVLSQEQINRILEPLDLRLTIDDIRGLAFLVVSDTWQEEGSAESDEWSHPLVRRQRITMEQSLLIAILRQQYIAHEQEAGIGATDARVDIDDLLSQLQVYLGDIGSDSRERKRLDNLLDKLANHGLVQVDDKQHTLTIRPIITHLANPESLQTLLNHFKHLSQQPDVDSPVDQQEAEQ

SEQ ID NO: 33462 - protein, 1141 aa, Endozoicomonas elysicola
MSNHTGHQNTLTNITSKSDNERQLTGSIDLFQPSELANTAFVLKELSLYNWGPFQGNNQATFDLEGTAIIGPTGSGKTTLVDALMTLIVPLPKYNLASTGGHESDRDLISYVRGVTGAGNNSGDNHHIARPGKTITGLAARFESHDQVVQIGGLFWIDVPGNASADLKKLWLFTQREDQTLEHWLTLLHEGGKRAIKQFERHTTDLKVFDSKKSYLDKIQRFFEVGTNAFPLLNRAAGLKQLNSVDEIFRELVLDDRSMFARAGEVATEFDDLAIIHEELNTARRQQNSLQPLISLNKNHQKLGEQLAEQQALSEIIPIWFAIAGHQLWGTKVKDVKTAIDDLQEIIVASQEKKDQLKDQADRLNEVYLRAGGSSIESLRREIGQQEKLTADCRQRARDYQTLARNLDLDDTLSSKMLAANQLQVGKQTSELEAKAREQTTNVDQLSFERITRSQALEQVTQEYEAVKARPGSNIKGALQNFRSDLAEALSLEEDSLPFIAELVEVKTAEKPWRGAIERAIGSHRERILVPSQHMKAALNWINNRHNRVHVRLQDAMAPAAQPQFYNDGFTRKLNFKEHPHREALKALLASIDRHCVESPEQLKVTPHGMTQQGLMSGVNGRYEKQDQRSLNDNWMTGFDNRDRLATLEDEIRTLRQEEKTFQQQYDDAKKREQITRQKLNLLARLSEITFEDINLPDYEKKLRDLEQQLSALLAPDSDATKAKEALDVVKQEIKRIEHDIYENIQKKGESANQLKSAEQKREKAFAVIGDGLKDEQAQLADRLLPSLSDTNPDDLPDKEKLYQNKTISSIKTLQSSIKTAEGQLIRQMNEAQKQDTGSLSEAGTELRDIPQYLERLNTLTKEALPEKQKRFKNYLNQSSDQGVTQLLNAIDNEVSQVEERIEDLNRTLLRVDFKPGQYLQLRPQRVIHESLRNLESARRHLRAASLKEDDGESHYRALVNMVELLRQANDNRRTVGARALLDPRYRLQFTVEVCERNSHSVIERLKGSQSGSGGEKEILASYILTASLSYALCPAGASHPLFGTIVLDEAFSKSSQAVAGRIISALNEFGLHPLFVTPNKEIRLLRSHTRSAILVHRKGMKATLTPMRWETLEKHASRKSQIIVPASSTFTESENHEITP

SEQ ID NO: 33463 - protein, 381 aa, Endozoicomonas elysicola
MKSPHDIADELARQWKSADTREKRLLMKDSWPLKVSIGKPASGDINHHPEKIRQHFQQWRQVNTGEVIWNSASYRGMAESIEIPGHWLLSKPSEWIEASRCKTVKDEYQRLGTIIQQTSPIFHPYLIRQRRWFDKPVNEVIKTTELAMLLEPGFAQGVPLRSLGLANTDTKFFERNASLLRQLLDIRFDGLPSKLGLEAFLNAPESHHWLLIADLDGSFLPFQQLRVRDYELSTTPLPAANILIVENEQCLHLIPSLKNTIAILGAGLNLSWMKASWLHSKSIAYWGDMDSWGLTMLARARNHQPSLSALLMNQSVFDMFQEDRAVEEPVPSIHEDCTALKEEEQQFLNTLRALKRGRLEQEFLTAEVVHSELKHWCDSIQ

SEQ ID NO: 33464 - protein, 480 aa, Mycobacterium kansasii; identical to SEQ ID NO: 30957

SEQ ID NO: 33465 - protein, 192 aa, Mycobacterium kansasii; identical to SEQ ID NO: 30958

SEQ ID NO: 33466 - protein, 1132 aa, Mycobacterium kansasii; identical to SEQ ID NO: 30959

SEQ ID NO: 33467 - protein, 386 aa, Mycobacterium kansasii; identical to SEQ ID NO: 30960

SEQ ID NO: 33468 - protein, 483 aa, Snodgrassella alvi SCGC AB-598-J21
MNFSHSLAKYRRLYEENKVWKLLRATTAPLILAFIEQVFSSGQNEISYSQARILLDAELEKNHWYADTPAAIYINQWVKDGWLREMDNKLTKTDTCEIALRFCQSFDERNINTSASHLRIVQEAVRELVIALNENPEERIALLNQRKAELEKEITNIQTKGINTLSDQQRRERLREIYQLASVLTNDFRYVEDEIRRLDQEIRIKMIEKDNNRGEVLQATMDQEALLAQSDAGSAFESFFQLLCDSNRSTEFKEQLDIILNQISDNYLQPRQRKFLKRLLQELTQESEHIFQIRRRTEENLKTYIKSGAAQEKRTVDRLIIQLEQLAVNFSKNNINLKQAIHLILPTGNIEINSPDSICLKEPIAAIQITDITEHTNSVVPSETVLTLLDTIQIKEVADSIYHNLCTFGPLTIAGLVEKKPINFGLEELVAYLRIAQHIQATDLNEKESIIIQDKQGIQIKATLPKYLLSASLFPDNLEELSL

SEQ ID NO: 33469 - protein, 264 aa, Snodgrassella alvi SCGC AB-598-J21
MNEEKNNKSTSGGEFFDQFCAKMVTSDPISPTIDESIHNQVEIETTQSSLLQSDNNPQPESNLLPKEAKHALVALLKNGVILASQKNNLFSIISHYHVQIDSYLANIYLKLILDPTTGVAYVAQMSETLEENDEISPLIHRRQLTVHDTLILLVLRKYFQDRETVGESKIIISFEHIEELLKPFAPITNHSTIERKSLNAALNRMKERHILANVRGSNDRYEITPIIRYVVNANFLENMLLEYKKLSEKVQSDKADTVKEESNE

SEQ ID NO: 33470 - protein, 1127 aa, Snodgrassella alvi SCGC AB-598-J21
MNKSIIDNEPFNDGQIRLNELSVYNWGSFHGLHTAKIDPIGTLVTGDNGSGKTTFIDGLMALLLPAGRASFNVAAAQGDSKDRTLLSYMRGNFGSAHDGSKTKVKSKRDQSVITGLRACYKADNGNYITLAVLFWATPTATSSADIYRHYVIANRNLQLKELLENFKDGERRTLKQYLSNDATIVYSNNIFDDYQAMYRKLLHIDNKNAPALLSRALGLKKIDDLTALIRELVLESSQIKEEARNVVKEFSALEATHNELIDVKKQYIHLGQLPEHNQDFIRCIQTLDKLEQEKNGLIPYFGELKSQLYTNQLQELQQKIDFLQQQLNEQEQNKLNINQQIESYHAAYLKAGGDSIESLKRELVKAKEDYSRINQQASIYQQETETLGLNSELIQINFENNQKKATDKLQNLNQNKENALVNFAQIRAQLNNLKSEYLQTEKQIKQIKLRSDSNIAFRFQQLRDEMITDLNLTIEQCRFIGELINVKESENIWQGAIERALGGLRTTMIVPHNVFSQVTRWLNTRHTGLHVRVQVVPESFQKLKSQIKFKPEGYLHKLIWRDHPYRDWLKKHLERFDLTCVDSTEQLDKTPFSITQAGLVHLEKGRFEKKDQNKINDKKSWQLGFSNKARLTILEEELSTISENIAKQETLDQKNCNDRQTIDQQIELWKNLQKYSWENINLPRCKDEIDSIEKKLTELQNGDDLEQAESRWKEAKNAYENLQDEIKKLYKEQGSHNTQKDNLNILLQQAQKDSEQGIEHDIRLMLNHRIGQYKDDTLPLVIEQQDFYYKQIDESQKKTNQKKENIGKEIVKIMSSFQQQWPIIANDWIPDISYIEDYINHLFKLEQEGLPQLQERFKERLNKHATESLARIQQQLEAEKDEIRERIQIINTVLKRTEFRKNTYLKLNIKIEQYTNVIEFSKLLKNALSLFTSDDHERRFNILKEIVSQLDKASNLAAHTLESLRLLDPRYQMSFFAEELDNQTGAVIDVLESSSGKSGGEKESFAGTIVAASLAYALTPDGYDKPVYCTVFLDEAFSNTAESVSRRVLRVFKALHIHVNLITPYKNLNLARETARSLLIAERNQQTHESSLSEVTWEEIDAQRELIKNSEIMKQAKSLGIEITSTQ

SEQ ID NO: 33471 - protein, 400 aa, Snodgrassella alvi SCGC AB-598-J21
MTKLNENWGRLPDEVYSHIKKLEWDKQKNLKERLMHKRKFPIEISLGTPTADQILDNMMYFKNFINQWKDFPQQHWIKWQDKKYNTLGLQRIPVTLILNNLKELFEFLGPDIEKRIEKLSKIIEPLTTYDQRFYPILIQHLSIVEQLTPQESINITSLLQQLTPNMGKGLYLRSLPLKGIDTKFLENNKILVSALLDVLYNNAIAQAGNLLKWLGCLDYPKGWLIVKPLCKKTQESLAGLPILQMDQHTLTHYELPANNILVVENIQSGLSLPELPDTIAVIGGGNNVNWLSAQWLKNKRVAYWGDIDSWGLKILSLSKTFCPHIQTLMMDEETLKLYKNNMVTESESYSDIPVNLDSSEKDLFIVLQSNKYNANRLEQEKLPNDYIQKKLKEWKNNQNF

SEQ ID NO: 33472 - protein, 479 aa, Endozoicomonas montiporae
MDFNRLVGLRTHPSWRLLQADSAPLIISFLYKSFILTNKRSIAAEILATQLDDYLHHLRESTGENRFPRKGREYLSDWASGEQGYLRKYYPAAAVGDEPLYDLTPSTEKAIEWVSSFEHKQFVGTESRLLTVFRLLSEVARDTETDPQQRIDRLEQEKARLEREIASLKSGHVAPHDPTRVKEKFLQAEDTARQLLSDFRQVEENFRNLDRGVRERITTASSGKGQMLDDIFSEQDAISESDQGRSFKAFWTWLMSPASQDELQQTLEKVLALPEIQSLQHDELLGKIRFRLLEAGEKVNSTCAQLVEQLRRYLDDQAWLENRRIMEIVREIEQSAIAVRQSPPPDKLFTTLSLNKPAVELPMSRGLFRPAVRPVISETPEEGEADFDTSALYTQHYVDERALQARIRFALQNRKQISLAELVKLHPVEKGLSEVVAYLHIASESDHAVVNSDETEIIVWHDTGGHQKEAAMPLVIFTH

SEQ ID NO: 33473 - protein, 200 aa, Endozoicomonas montiporae
MSTNVESNDSSGNDPVLGTVVVNLMKGVVYRDQNPDVWQQLEELYARVIDYLAVMGLDLIVDEAEGYAFLKQLNDEERDVPKLVARRPLSFPISLLCVLLRKKMVEQDAGGGEARLILTREQIVEMMRVFLPDRANEARLFDQIDTYINKVTEFGFLKKLNTNPPAWEVRRIIKALVDADWLADFNEKLKVYQDHAESIA

SEQ ID NO: 33474 - protein, 388 aa, Endozoicomonas montiporae
MITQKELLKKAMRPWSTGGFLREWLANETVFPLEIPFKTPSGRTLTSDFGKIRDWIATLSSHSKSEKGTGYQLEYKTINHNQLGQQRLPHKIVFEDRNDWLDFIGRKTAFRQFDEIAGMTRRQLPDAMQFLSRKPLKALEYAESWHQLIKVCRYFQIRPRPDRYIRQLDIQGVDTKFIENHKGILTELLTLVLEEEDFDDSVTGLSENGFERRYGLRFDESLIRFRLLDSDQPVTDMSVPLSQFVEQPVSTVYITENKVNGLTFPAVTDAMVIFGLGYGIRSLGSVEWLKDKQITYWGDVDTHGFSILSVVRSMFPQTQSLLMDQTTLDEHKHLCVQEAESKRFNGSPDNLTQPESQLLDDLQNNRQGENLRLEQERIGYSYVMQSLR

SEQ ID NO: 33475 - protein, 479 aa, Endozoicomonas numazuensis
MDFHRLVGLRSHPAWRLLQADSAPLIISFLHRSFIATNQRSIAAEELVTRLDDYLHHLRESSGENKYPRKGRDYLNDWASGEQGYLRKYYPAASVGDEPLFDLTPATEKVIEWLSGFEQKQFVGTESRLLTVFRLLNEIAHETEVDPQLRIDRLEQEKAELELEIARLKSGQMAPHDPTRVKEKFLQAEDTARQLLSDFRQVEENFRSLDRGVRERITISNSGKGQMLDDIFSEQDAITESDQGRSFKAFWSWLMSPSSQDELQTILEKVLALPEVQSLQHDELLGRIRFRLLEAGEKVNSTCAQLVEQLRHYLADQAWLENRRIMEIVREIEQSAIAVRQSPPPDKLFTTLQPCKPEIELPMSRGLFRPAVRPVIDEVPEEGQAEFDSTALYSQHYVDERELRARIRHALQNRQQISLSELVKQYPVRKGLSEVVAYLHIASESDHALVNAEQDEVIVWLDDKGHQKEASMPEVVFTR

SEQ ID NO: 33476 - protein, 198 aa, Endozoicomonas numazuensis
MFVNDDVETAQDASLGVVVIHLMKGVLYRDTNPAVWQQLQDLHARVIDYVKVIGLDLVLDEAEGYAFLKQVNDEDLALPKLVARRPLSFPVSLLCVLLRKKMVEQDAGGGESRLILSREQIVEMMRVFLPDRANEARLFDQIDTHLNKVAEFGFLKKLNSNPPAWEVRRIIKALVDADWLADFNDKLKVYREYAESNV

SEQ ID NO: 33477 - protein, 392 aa, Endozoicomonas numazuensis
MISQKELQKKALRPWASGAFLKSWLNDEVFFPFEIPFKTPSGRTLSSEFIQVRDWIAEMHRHSRAVTGSGYQLEYRTISHQQLGQQRLPRKILFESRDDWLAFIGQQSTFKQFQALADQTRRQLPQVMPLVNSKPVKVLDYADVWPQLIKVCRYFQLNSQPDRYIRQLDIQGVDTKFIESHKGVLSELLMLALEPEEFDDSVSGIAENGFERRFGLRYDEPLIRFRLLDSTAPVTDMSVPLSQFVDPGVSRVFITENKINGLTFPSVKDSIVIFGLGYGIRSLFSLNWLEGKQINYWGDIDTHGFSMLSQLRGRFRKTRSLLMDQATLELHLPLCVEEPENKRFLADLANLTSSEQSLFDALRQNKLSKNLRLEQERIAFSCLREALAAGAC

SEQ ID NO: 33478 - protein, 486 aa, Photorhabdus temperata subsp. temperata Meg1
MNFQGLQAKYRRLFQESAAWKLLRADNSPLILAFLGELFSEDSEVPFSRARVSLDAELVRCRELGLWETETGASTYLNKWIREGWLREMDDALTKTDASEIALRFSQGLDERSSGTTASHLRIVQEAVRDFAVAISPNVDERVTLLEDRKSEIQREIDALRAGVVTELTEVEQRERIREIYQLASVLTGDFRRVEDEIRRLDQEIRIQIIEGDSTRGDILLAVLEKEAFLAKTDAGSAFESFFDLLCDQNRTMELRDQLRSILNRPAAKHLVTQQRQFLSQLMRELSRESDRVFQIRRRTEESLRAYIESGTAQENRAVDRLLGQLERLAVELKNADCDLQTTTALSLPVGAASISSPESMLLKSPDEKLDTSGVEEQLNSREPSIQMLDCLDAVQIRLIAEKALETLKAFGPMTIASIAHYHPLNSGLEELVAYLRVAKSVGAASLEEKESIEISDKQGIRLRASIPTFLLSADLFPDSLDELVL

SEQ ID NO: 33479 - protein, 302 aa, Photorhabdus temperata subsp. temperata Meg1
MHKDKKLNKDRGTPATLGKSDSDPQKEQQTGFFDQLIKHRTQSEYNPLTDTTGVESAVAANKSSSVEVDDVLVSDHPESSNSGMPPDARRVLVSLLRQGVILSSQKAKLFESLCRYQCAVRKHLSEVYLKLVLDEKAGVAFIAGFQNEEDTESLGIDGEEVVSLISRRTLSLYDTLLLLVLRKHYQDRETSGEQRIIIDIERIESHLTPFLPLTNSTKSDRRKLKGALEKMVTKKILSSVRGSEDRFEITPVIRYVVSAEFLESMLNEYLKMADEKGIELNKNGSNAVDYQDGEEETGDEND

SEQ ID NO: 33480 - protein, 1134 aa, Photorhabdus temperata subsp. temperata Meg1
MKMTDQTLSADSLFHVGQIRLAELSVYNWGSFNGLHTALIDPMGTLVTGDNGAGKSTFIDGLMALLLPAGKATFNVAAAQGDRSDRTLLSYMRGSFGSAHDGAGTRVRSKRESGVVTGLRALYQGDDGSKITLAALFWITKSTNVLADVTRVYIVAKRDLTLKEMLDAFGDGNARSFKQWLRDDPALTCCDDNFSDYQELYRKLLYMDNKNAPALLSRALGLKKIDDLTGLIRELVLEPSAVKDDAKKVVEEFADLVAIHSQLVDARAQQVHLSRLPELSSIIEKATKEFEKLTVERNSLPVYFGEIFAQLWSEKIADIEAELEALSLKIKQAEGQKVDADKLVERRHEEYLQFGGDKIESLRKEMGHTQDQLNRVVRNSSQYQTHANELALPSVLEEAVFLKNQSEVSARLASIQRDEEEYQDRFATISAKFSELQANIHDISQEIREIEARPDSNIDVKYQQLRDELVNSLELSKDQCVFIGELIDVEDHEKIWQGAIERALGGLRTTLAVPHHCYSMVTRWLNARHTGLHVRVQVVNDAATNQGQSAEFKPDGYLRKLVWRTHPYREWLKRHLQRFDLQCVSNTEELDQTPFSMTQQGLMHMDKGRFEKKDQHRIDDRRRWCLGFSNKSRLAILNNDKKDLGLKLEETGKKVSQARQDLNSVSDRKILWEKLQSYRWDDINAPYWHEKLSDLQADLKVLEQSGGDLDKARERWESAKEQLAQIQSALNQLNSDSGGIKNTLRNAQEEWNKARAKAEKGLPDAARQLLAIRVGVLNTNDLSRMAELVSKVEEGLDRLLDSSRNNKDRAERSAISIMVSFRSNDKWQVFTVDWQSDIGSLPDYLNHLRQLEEEGLPNLVEQFIERLNKHATQSLARIKTKLESEREDILERIDIINRVLKRTEFRSETHLKLGSKREKFPHVNEFEQHLRKVLSQVTSDDHEARFRQLAKVVEILGKASAPSSSNTLESLRLLDPRYQMSFYAEELDINTGEIRDVLESSSGKSGGEKESFAATIVAASLAYVLTPVGYDRPVYCTVFLDEAFSNTAETVSRRVLRVFRELHIHVNLITPYKNLNLARESARSLLIAERDQENHDSHLCEVTWEEIDRRMGEEKEKKLAAEASGLGIELEKLI

SEQ ID NO: 33481 - protein, 398 aa, Photorhabdus temperata subsp. temperata Meg1
MKRELNGVRWGLLPAQVKKLIKQREWDNLSSLKARLLGSKVFPVRVGLKPPRGSSAISDMVHFQRFVEEWKLFPYQNHVEWSSKNFRELSEQRIPTFVVIESMQHLIQFLGNDALSRSKLWERNMKPFLRIDKDLYPALVKCIDIVEKLSLRDAELLAKLLPQLKQGLGEGQYLRALPLIGIDTKFLENHQILIEELTDVIHKGAVSAFGGLTAWLGCLTNPKGWLTIRPLCHTATVAFGGIPILQIPGELLKQHELPASNILVVENLQSGLALPDMPDTVAVIGGGKNIAWMDAAWLKDKRVGYWGDIDSWGLSILSDARDKFVDIKSLMMDVETVKVHEDRMVPEPNPVESNPSSLNEDEAKLFNDLISGRFHSSRLEQERLSSDYIRNKLIDWLS

SEQ ID NO: 33482 - protein, 491 aa, Mycobacterium farcinogenes
MPEPGMSGPSLDQLYQLNREVADSRSARLLVTNNLATYLTLMERHLDRGAKLTEMELVVRLERDLADLGTETEQSGLALIKYWASQGWLHRITEQSGDTERNVCYLTYEARAVLDFARRMRREDTLATGGSITGIAAGLRRVAGQVSNDPERIRADIEAEIAKLRDELDALDQGQRPEPDLVDVEDEARAIALQMEQIISDIGQYGSMLNRITTRLLDASADTDLGYRERQRQLFDDYESLFASRESASYTAFTRMIQDPEQRAALVADIDAVTRELPHLDPGLREVMTGFFSLVSAQTAEVGRTRQRCARRIKRFVASGTLEHSRGVTRQLNDALASAHDLLSVSLADSRIGIEVPLVRTDFNSIGAVAFKIRDAIPPSQAEPSEGEVNLSAFSALASQVDAAELAQLVNGALARGPLPLPDAIGMLDSAYLGHVIVLWSWALKQQPAVGTESGNSVRVRFRSLEGADREIEIPRLVFTEPIPTVSESLL

SEQ ID NO: 33483 - protein, 251 aa, Mycobacterium farcinogenes
MTDNPDPSPVKDGVIDFDALPSIDAVERSTDQRRAPRFDGDVSELPDRACWALQHLLSRRYISKDNHSELWSWVTRYRAELTVRLSELDMRLCISDDHDIAYVEQADYESQWRRRLLRRETLNTYDSILALHLAKLMRAAARDENVLISRDEIHELFAGVNNDTDRDTASFDKRIDNAIERLTDIEMLARNREDEDSFTISPVVNAIMTASMITELQQQFEQLKRAANGTVDDPDDPDVSDRLSDDVDAHG

SEQ ID NO: 33484 - protein, 1138 aa, Mycobacterium farcinogenes
MIPTTPMYPTGSPTMWTLMAEPTNQFSLSRLQVINWGVFDGYHSIPFSPHGTLITGSSGSGKSSLLDAISLAFLPSHRRNFNASGDTTAAGSGTGKRTVDKYVRGAWGERREGTSRQIMYLRGTGPAWSAVAVTYSDRTGRSVTGLVLKWLAAEKNSDPGSRYYLIDADRDIFGLCNRWAANGYDAAVFRDDGWTGGRSESQYLAQLYSSIGIRASDAAQQLLGKAKSLKSVGGLEQFVREFMLDEPASLSGVEEALEQINPLVEARGLLDVARRKRNTLGNIAAVQARYADEAAKFGVIDTIDNAMIRDYVDHVRLAQAGPEIANLDDQITQLGAQRDEFGTQQRQLKNEHNSLMAQINTVTVDLVPLQQRLTEAERISEEVSRRRSAYEDKVTSLGLTPPDNGEEFWSLRETLMEEADRLHRELFTGNQPYVEASAKEVRAREARESVEAELERVQRLGSPLPKTEYEMRARIARALDISERDLVYVAELMELKPDETRWRLAVEKVLRGAGLRLLVPDAYMERALRFVNENDMRGRIQLQHVQHGAQLRTPAPGTLATKLQLADPTHDSAVEALNVVAAVGDYVCVDGPGEFTEQSRAVTDQGLRKDSGRLSIKDDRSRLRPSDYIFLGGTAAKVEALQDDLAAAHDVYQVARTARERLDEHRGQLQSRERACRALCDQYMQWSDIDTDSVDEMLERLQDEHDLLVSDNPDAERLQQRADECWERVEKVIQQIGSLNERETALDRRRTALLELSEALTERLGSSEFPSHARDTIDGYAADIALTLELLEPEPYRNELIRVISRERDRLRADRNRSHDELAGIMAAYDSSFPDAIPNDSDVFDERVHDYVALCRRIDERELPDAYERMQRLITEQAPGAILNLHMIADNEARRITEQIARVNTGLGAVEFNRGTRLTLHAGTRHLAAVDELNEKAQRISARVSLVSFGDETAMFEQYTDILQLRKLLAGNTPEDRQWTRDALDVRNRFVLYCEERDAETGEVIRTYSNSGDNSGGEQEKLMAFCLAGALSFNLASPDSNDTRPLFAQLMLDEAFSKSDPQFAQQALSAFRKFGFQLVIVSTVQNSTTIQPYIDNVVMVSKSDASAPNARPVASVTSASISEFADLRRTSGDAVPSA

SEQ ID NO: 33485 - protein, 481 aa, Mycobacterium marinum E11
MHDDNAGLSATELLDLNRDLQGSRAIRLLATTNLSLYAMLMERHLSDGALSETELVVQLERDLEDVNDPQPGLALIKSWAAQGWLHRIVDERHDQNVCYLTQDARRALDFLRGLRRQDTIATGGSITGIAARLKQVAVKVDNDPARIRKHIEAEIAALHEELDQLDAGQRPQTDVTDCYDEARAIALQMERLITDIGQYGTMIERATSALDEPIDSNAEYRDRQRQMYSDYQAAWDSQGRDSHRAFLRMINDPDQRAEFEADVAAVADALPTLDPALRKVMAGFFELVGHQIDEVERIQQRCAQRVKRFTAFGTMEQSRGVARQLNEAIAAARALLKSSFTDSRLDIEVPLARHAISSVGALGFRIGDLSNPKPAKPGDTEVDLTSFAAFTTQVDAPAMSDMLNHAITAGPVALPDAVAMLDTAYLGHVIVLWSWALKQPNPDTAESTAVRFRSLDGRDLEIAVPRLTFTEPINTIAGAST

SEQ ID NO: 33486 - protein, 231 aa, Mycobacterium marinum E11; identical to SEQ ID NO: 30759

SEQ ID NO: 33487 - protein, 1120 aa, Mycobacterium marinum E11; identical to SEQ ID NO: 32585

SEQ ID NO: 33488 - protein, 489 aa, Xanthomonas campestris pv. viticola; identical to SEQ ID NO: 33242

SEQ ID NO: 33489 - protein, 233 aa, Xanthomonas campestris pv. viticola
MNWSEDTGLYADEETGAPAIDDRMPMAQTSSAEPRGELFLGDTGTLSFDARRALCQLLAGPSIDAQRHGALWPALLRNEVAIRQVLCELFLELVLDREGGVAFTRQADTAELESPTLLRSAPLTFIESVLLLFLRQQLAEADTRGERAVVDEAQLVEALSVYEKNVSTDRAGFARRVMTAIGKMRDNQLLSRLRGSEERYEVSPVLKLLFSAEDVQALVVAYRELREGEVALD

SEQ ID NO: 33490 - protein, 1340 aa, Xanthomonas campestris pv. viticola
MNSQSNLSPAQPGASLFAETLAEQRAQQFRMRRLQVHNWGTFNGLTEVPIAQKGFLFVGRSGSGKSTLLDAMSALLTPPSIVDFNAAAREAERSGRDRSLVSYVRGAWADQQDSASGEIATQYLRKGATWTALVLEYANAHGQTVSLIRLFWIAGSGNAAADVRRHYMVAPRRFDVATELDGFDLDLRKLKARLGDEVAHFDGFAGYAERFRHALGIGNEMALRLLHKTQSAKNLGDLNAFLRGFMLDEPRTFEAADRLVEDFAELDGAHHAVVTARRQVETLTPAREHHAALMALRHSVGELRELQLGVDSYREQQRLALLEERLQELDNQDRGLAGEEGQRRESLDNHEQKLVGLEREQRAAGGEQVEELERERARVERERDERLRRRAQIEQACRQLGTALAAGASGFAAQIAHAQTVLDNGKHDASALDDAIAERMGARRDDERRFAEIRAELEALKRAPSSMPAPMQALRARLCEDTGIAEAALPFVGELVQVREDQTAWRGAIERVLHGFAQSLLVDERHYAQVSEWVNRTHIGTRLVYFRVRRNDELHSRRVDPGALPGKLQLREHAFTEWLRNELTRRFDYACVDNAAALRNADRAITREGQVKHPGDRYEKDDRHAVNDRKRWLLGHDNRDKLKVFEREAQTLAQRIASCDADVAALRKQREQDQERQLAAHTLVERDWDEIDVGPKLQRLSDIDEQLVQLREGNSGLRALGQAIDTARTLREQAKRTYEDVRLERAQLARERVRLEQQQAACAGRAGSATLTPTQLQGLRERLAALTPLSLDNLEAHFRVVERGLAEQLTDSQGRDSRLSAQLLECFRKYCQQWPEDSGDFTVSLASADDFLARLDRLESDGLPRHEHRFFDLLQTQSKNNLLALQRHTAEAHKGIKQRMDEVNASLEQVPFNRDTVLTIEVGDRRLAEVQEFQQQLRAVLSHQQTEDRALAEAQFSTLRALVARLGAQEPEARRWREQVLDVRLHVEFIGVELDAQTRAQVEIYRSGAGKSGGQRQKLATTCLAAALRYQLGGEDGELPRYCAVVLDEAFDKADNEFTALAMNIFENFGFQMVVATPLKSVMTLEPFIGGACFVEISGRHNSGVLLIEYDEQAQRLKLPERSRGDEPAVADATDAAPSIEAAAESARVQGAASADGMATNGVPMHTASPVTEETPPAAQETQTGQRKPAVATTSKQNKTAKTASSTRAAAQPQAKRPKKSPSRTPALAGKPASDKRPAGVPAVSSGVASRSNVGKTTRSSKTPGKPIAATSASNATSRKVAAASAALKTAAAKPRATAASTGQPARGAGKTTSTRAVAKPSPATTRGAKAGAPQARRKR

SEQ ID NO: 33491 - protein, 470 aa, Mycobacterium neoaurum
MRELLDANREVQASRALRLLATSNLAVYATLMERHLFDGLVGETELVVRLERDLETLHEVGEQSGLALIKSWASQGWLHRVASQHAGVERNVCYLTQDARRALDFVRGVRRNDTIATGGSIHGIAARLKQVATRAGDDPDRIRAGIEAEIAALHAELDELDAGTRPEPDTVAMYDEARAIAMQMERLITDIGLYGNMIEQATAALDDPIDTNLEYRDRQRQMYADYQAAWDSAGRDSHRAFLHMINDPQQRAEFEADIATVASQLPELDPALRKVMANFFELVGHQIDEVERIQQRCAQRVKRFTAFGTLEQSRGVARQLNEAIGAARTLLKESLTDSRLDIEVPLARHAISSIGALSFRINDLSSPKPAEIAQGEVDLTTFSSLTTQVDAPALTKMLNSALPVSLPDACAMLDAPYLGHVIVLWSWALKQPAPAVTESVTVRFHSLDGHDREMEVPHLMFTEPVTEVAS

SEQ ID NO: 33492 - protein, 223 aa, Mycobacterium neoaurum
MTDATTSTPEVDFASLPEVDRSGRSTGTRKPRFDGDVSALPDRACWALQHLLTRRYVSGEADPDIYSWILEYRNDLAVRLSELDLQLQISAQVDIAYIEQARYEPTRGAKLLRREPLGTYDSILALHLAQMMRAGGDVSFLITRDEVHGLFAGVLNDTDRDTVTFTARIDAAIARLAGLDILRRTRDDEDSYTVSPVITAIMTASVITELQQQFEQLLKGGAE

SEQ ID NO: 33493 - protein, 1123 aa, Mycobacterium neoaurum
MSEQFHLSRLQVINWGVFDGYHSIPINAGGSLIAGSSGSGKSSLLDAISLGFLPFNRRNFNASGDNTAAGSSAGRRTVDKYVRGAWGQRSDGGTSQVMYLRGDGTTWSAVAVTYTSNTGRTITGLVLKWLTGESRSDSSSRFVLGDGDLDIEGVCNRWAAGRFDSKVFTDSRGERSDGASYGWRFSTKVESQYLAQLYAAIGIRASEAAQQLLGKAKSLKSVGGLEQFVRDFMLDEPDSLSRLPEALKQIDPLVEARELLAVAQRKRKVLGDIEAIQLRYASESSDLGIIDLVDMPMVRAHTDHQRLQQCPAQIESLDGTIDQLENEYGDITRQLNLAKAEGDALNAQISGASASIGPLQSQVAAAEAQAEEVTRRYAAYAEMVRAHGVEVPETADEFWNLREELSKQAAGLAVQLDRGRESSTDAEYAQKAARMARDHAAKELKRVEHVGSALPEFAVAMREHICTTLGIDPSALPYVAELMDLRPEENRWRAAVEKVLRSVGLRLLVPDQHYAKVLRFVNENNMRGRLALHQVRVNAPDRRPEPNTLAGKLFVVNPSHPCAAEALDVLAAAGDHICVDSPDLFARFRRAVTDTGLYKDSDRLAIKDDRRPLKPSEYIYQGDITAKLDALTAELTEAEEVFAAARTAADEIAAGRQHWRDQAAACKAICEQFPQWSHIDTETADGHADRLREQYELLLADNPDVEALSARAEECWNDIQVLMTRRGAIQTRRDDLDSRRTRLLDLQDRLDPAAVSEQATELLNRYAAQIPVSLELLNPEPYREALFNAIRRERDRLTESRRRSHDELARIIATYDSSFPDAIPNDSDDLDERVHDYVAVCRHIDERELPDAYERMMRLITEQAPDAILTLHRIAEQEARRIAEQIERVNTGLGAVEFNRGTRLTLRATPRSLTAVTELTDIVKAISRRIAEVGLGDKKAILEQYADILRLRNRLAGNTPEDRVWTRDALDVRNRFTFDCAEWDMRTEELIRTHSNAGDNSGGEQEKLMAFCLAGALSFNLANPDSGDNKPVFAQLMLDEAFSKSDPQFAQQALQAFRKFGFQLVIVATVQNATTIQPYIDGVVMVSKTEASGRNARPVAHVTTKTISDFTALKRELKVPEPV

SEQ ID NO: 33494 - protein, 489 aa, Xanthomonas axonopodis pv. vasculorum
MKHQARISGYRQLREQPVWKLLAADHAPELIGLLQTVLMDGERRLPSVVLHERLQRQLDALRADELSRELPRTAQAYLAHWLAQGWLERRLPEGAAEEEYELSCAAIQAIRFIAGLRESSSSATESRLSLVIQQLVQLAGQTEADPEVRLAALRDERARIDAEIERVASGRVAALDGKRALERARDLIHLSDELAEDFHRVRDDFEQLNRQFRERIIDDEGARGDVLEQLFNGVDVIADSEAGRTFEAFWSLLNDTQQTSQLDQALDALLARGFARKLDRRERAFLRGLTGTLLERGGEVHTVMQHFARSLRGFVQSRGYLEQRRLNQLLKQAQGEALQLRDSLHATASTGYTQALSSSRLRSLSQWRLHDPRLTQVDGRVQAADAAEISLDSVGDLVAQSEIDVRTLRNDLHELLGQRPRLTIGDALQQRPAVQGLGSVIGYLSLGTRHGMVIEGQMETVQWEGSDGAVRRARIPLVWFTREKRNELV

SEQ ID NO: 33495 - protein, 233 aa, Xanthomonas axonopodis pv. vasculorum
MNWSEDTRLDADEDTGASATDERMPMTQASSAEPRGELFLGDTGTLPFDARRALCQLLAGPSIDAQRHGALWPALLRNEAAIRQVLCELFLELVLDREGGVAFTRQADTAELESPILLRSAPLTFIESVLLLFLRQQLAEADTRGERAVVDEAQLVEALSVYEKNVSTDRAGFARRVMTAIGKMRDNQLLSRLRGSEERYEVSPVLKLLFSAEDVQALVMAYRGLREGEVALD

SEQ ID NO: 33496 - protein, 1343 aa, Xanthomonas axonopodis pv. vasculorum
MNSQPNLSPAQPGASLFAETLAEQRAQQFRMRRLQVHNWGTFNGLTEVPIAEKGFLFVGRSGSGKSTLLDAMSALLTPPNIVDFNAAAREAERSGRDRSLVSYVRGAWADQQDSASGEIATQYLRKGATWTALVLEYANAHGEAVSLIRLFWIAGSGNAAADVRRHYIVAPRRFDVATELDGFDLDLRKLKARLGEEVAHFDGFAGYAERFRHALGIGNEMALRLLHKTQSAKNLGDLNAFLRGFMLDEPRTFEAADRLVEDFAELDGAHHAVVTARRQVETLTPAREHHAALMALRHSVGELRELQLGVDSYREQQRLALLDERLQELDNQDRGLAGEEGQRRESLDNHEQKLVGLEREQRAAGGEQIEELERERARVERERDERLRRRAQIEQACRQLGTALAAGASGFAAQVAHAQTVLDNGKHDASALDEAIADRMGARRDDERRFAGIRAELEALKKAPSSIPAPMQALRARLCEDTGIAEAALPFVGELVQVREDQSAWRGAIERVLHGFAQSLLVDERHYAQVSEWVNRTYIGTRLVYFRVRRNDELHSRRVDPGALPGKLQLREHAFSEWLRNELTRRFDYACVDNAAALRNADRAITREGQVKHPGDRYEKDDRHAVNDRKRWLLGHDNRDKLKVFEREAQALAQRIAGCDADVAALRKQREQDQERQLAAHTLVERDWDEIDVGPKLQRLSDIDEQLVQLREGNSGLRALGQAIDTARTLRDQAKRTYEDVRLERAQLARERVRLEQQHAACAGRAGTATLTPTQLQGLRERLAALTPLSLDNLEAHFRVVERGLAEQLADSQGRDSRLSAQLLECFRKYCQQWPEDSGDFTVSLASADDFLARLDRLESDGLPRHEHRFFDLLQTQSKNNLLALQRHTAEAHKGIKQRMDEVNASLEQVPFNRDTILTIEVGDRRLAEVHEFQQQLRAVLSHQQTEDRALAEAQFSTLRALVARLGAQEPEARRWREQVLDVRLHVEFIGVELDAQTRAQVEIYRSGAGKSGGQRQKLATTCLAAALRYQLGGEDGELPRYCAVVLDEAFDKADSEFTALAMNIFENFGFQMVVATPLKSVMTLEPFIGGACFVEISGRHNSGVLLIEYDEQAQRLKLPERSRGDEPAVADAADAAPSIEAAGESAGVRGTASADGMAIDGAALHTAWPAAAGTPSAAQKTQTGKRKPAVATANTQNKNAKTAKTAPATRAAAQPRSKQTKKSPSRISADAGKPASDKRAAGVPAVSSAAASRSNVGKTARPSKPPGKPIAATDASSATTRKVAAASAAVKTAAAKPRATAASTGQPVRGAGKTTSKRVATNSSPSKTCGAEPGTAQPRGKR

SEQ ID NO: 33497 - protein, 489 aa, Xanthomonas arboricola pv. celebensis; identical to SEQ ID NO: 33214

SEQ ID NO: 33498 - protein, 233 aa, Xanthomonas arboricola pv. celebensis
MNWTEDTRLDADEDSGASADAGRTPLTETSPAQPRGELFLGDTGTLPFDARRALCQLLAGPSIDAQRHGALWPALLRNEAAIRQVLCELFLELVLDREGGVAFTRQADTAELESPTLLRSAPLTFIESVLLLFLRQQLAEADTRGERAVVDEAQLVEALSVYEKNVSTDRAGFARRVLTAIGKMRENQLLSRLRGSEERYEVSPVLKLLFSAEDVQALVVAYRGLREGDVALD

SEQ ID NO: 33499 - protein, 1355 aa, Xanthomonas arboricola pv. celebensis
MNSQSNLSPAQPGASLFTDSLAEQRAQQFRMRRLQVHNWGTFNGLTEVPIAEKGFLFVGRSGSGKSTLLDAMSALLTPPSIVDFNAAAREAERSGRDRSLVSYVRGAWADQQDSASGEIATQYLRKGATWSALVLEYRNAHGETVSLIRLFWIAGSGNAAADVRRHYMIAPRSFDVASELDGFDLDLRRLKARLGEEVAHFDGFAGYAERFRHALGIGNEMALRLLHKTQSAKNLGDLNVFLRGFMLDEPRTFEAADRLVEDFAELDGAHHAVVTARRQVETLSPAREHHAALMALRHSVGELRELQLGVDSYREQQRLALLETRLHELDSQDRGLAGEEGQRRESLDNHEQKLAGLEREQRAAGGEQIEELERERARVERERDERLRRRVQIEQACRQLGTALAAGASGFAEQIAYAQTVLENGKHDASALDEAIAERMGARRDDERRFAEIRAELDALKRAPSSMPAPMQALRARLCEDTGIAEAALPFVGELVQVREDQSAWRGAIERVLSGFAQSLLVDDRHYAQVSEWVNRTQLGTRLVYFRVRRNDALHARTPDARALPGKLQLREHAFTEWLRNELMRRFDYECVDNAAALRNADRAITREGQVKHPGDRYEKDDRHAVNDRKRWLLGHDNRDKLKVFEREAQTLAQRIASCDADVAALRKQREQDQERQLAAHTLVERDWDEIDVGPKLQRLSDIDEQLQQLREGNSGLRALGQAIETARTLRDQAKRTYEDVRLERAQLARERVRLEQQHAACASRAGTAALTPTQLQGLRERLAALAPLSLDNLEAHFRVVERGLAEQLAESQGRDSRLSAQLLDCFRKYCQQWPEDSGDFTVSLASADDFLARLDRLESDGLPRHEHRFFDLLQTQSKNNLLALQRHTAEAHKGIKQRMDEVNASLEQVPFNRGTLLTIEVSDRRLGEVQEFQQQLRAVLSHQQTEDRALAEAQFSTLRALVARLGAQEPDARRWREQVLDVRQHVEFIGVELDAQTRAQVEIYRSGAGKSGGQRQKLATTCLAAALRYQLGGEDGELPRYCAVVLDEAFDKADNEFTALAMNIFENFGFQMVVATPLKSVMTLEPFIGGACFVEISGRHNSGVLLIEYDEQAQRLQLPERSRGDEAAAAVTEQAVSAAQREDAPRSTQGETRMDSTAAVSAAEGAALQDLPAQDDVAAKAGRRASKVAPASTPAVQAAPKPSKTAAASARAGSGKSAAAKTAAGKAASAKTAPAKPASARRASPAAGTARKPATPAKPAKTPANTGAASRRTTASVKPTARPNKAATTAAAPKKPAAKSTVATRRATTSLGGATKATRATAARTAARPAPTKPVAKARAASTRGSAGKPRGKR

SEQ ID NO: 33500 - protein, 489 aa, Xanthomonas arboricola pv. celebensis; identical to SEQ ID NO: 33214

SEQ ID NO: 33501 - protein, 233 aa, Xanthomonas arboricola pv. celebensis
MNWTEDTRLDADEDSGASADAGRTPLTETSPAQPRGELFLGDTGTLPFDARRALCQLLAGPSIDAQRHGALWPALLRNEAAIRQVLCELFLELVLDREGGVAFTRQADTAELESPTLLRSAPLTFIESVLLLFLRQQLAEADTRGERAVVDEAQLVEALSVYEKNVSTDRAGFARRVLTAIGKMRENQLLSRLRGSVERYEVSPVLKLLFSAEDVQALVVAYRGLREGDVALD

SEQ ID NO: 33502 - protein, 1358 aa, Xanthomonas arboricola pv. celebensis
MNSQSNLSPAQPGASLFTDSLAEQRAQQFRMRRLQVHNWGTFNGLTEVPIAEKGFLFVGRSGSGKSTLLDAMSALLTPPSIVDFNAAAREAERSGRDRSLVSYVRGAWADQQDSASGEIATQYLRKGATWSALVLEYRNAHGETVSLIRLFWIAGSGNAAADVRRHYMVAPRSFDVASELDGFDLDLRRLKARLGEEVAHFDGFAGYAERFRHALGIGNEMALRLLHKTQSAKNLGDLNVFLRGFMLDEPRTFEAADRLVEDFAELDGAHHAVVTARRQVETLSPAREHHAALMALRHSVGEVRELQLGVDSYREQQRLALLETRLHELDSQDRGLAGEEGQRRESLDNHEQKLAGLEREQRAAGGEQIEELERERARVERERDERLRRRVQIEQACRQLGTALAAGASGFAEQIAYAQTVLENGKHDASALDEAIAERMGVRRDDERRFAEIRAELDALKRAPSSMPAPMQALRARLCEDTGIAEAALPFVGELVQVREDQSAWRGAIERVLSGFAQSLLVDDRHYMQVSEWVNRTQLGTRLVYFRVRRNDALHARTPDARALPGKLQLREHAFTEWLRNELMRRFDYECVDNAAALRNADRAITREGQVKHPGDRYEKDDRHAVNDRKRWLLGHDNRDKLKVFEREAQTLAQRIASCDADVAALRKQREQDQERQLAAHTLVERDWDEIDVGPKLQRLSDIDEQLQQLREGNSGLRALGQAIETARTLRDQAKRTYEDVRLERAQLARERVRLEQQHAACASRAGTAALTPTQLQGLRERLAALAPLTLDNLEAHFRVVERGLAEQLAESQGRDSRLSAQLLDCFRKYCQQWPEDSGDFTVSLASADDFLARLDRLESDGLPRHEHRFFDLLQTQSKNNLLALQRHTAEAHKGIKQRMDEVNASLEQVPFNRGTLLTIEVSDRRLGEVQEFQQQLRAVLSHQQTEDRALAEAQFSTLRALVARLGAQEPDARRWREQVLDVRQHVEFIGVELDAQTRAQVEIYRSGAGKSGGQRQKLATTCLAAALRYQLGGEDGELPRYCAVVLDEAFDKADNEFTALAMNIFENFGFQMVVATPLKSVMTLEPFIGGACFVEISGRHNSGVLLIEYDEQAQRLQLPERSRGDEAAAAVTEQAVSAAQREDAPRSTQGETRMDSTGPVSGAEGAALQDVPAQDDVAAKASRRASKVAPASTPAVQAAPKPSKTAAASARAGSGTSAAAKPAAGKAASVKTAPAKPASARRASPAAGTARKPATPTKPARTPANTGTAPRRATASAKPTARPNKAATTAAAPKKPAAKSTVATRRATTSLGGATKATKTTKTTPARSTARPAPAKPVPKARPASTRGSAGKPRGKR

SEQ ID NO: 33503 - protein, 493 aa, Burkholderia cepacia
MKTALALHELSAMREKPMWMLLGSHQAPLTMALLQSLFPESSTQLGAASLMEKLSIELDGLRARGEDIEKAPQILVAEWVQSKWVARGFPEGASEEMYELAADVVPALQLVRRQLEPRQTATESGLAVVIDSVLRLASDTDPDPASRLEALHEESRRIADEIRHVMKHGVSPLDPARAGERGRYIVALTEAIAVDFRRVREAFERLNRDLRRQLVEHEGSRGEVLEKVFLGSDVIAESDEGKSFLAFWRLLTDPSQFEGLKAALEALESRPFIRSLGLEERRRLFRVTETLLVEGGMVQDVMATLSRSLKTFVQSREFQEQRKIQRLIRTAIAESLVLKDQLTNGRTLDFTLTLSTSSLRSVAQLVLADPQERPGETSVDEAEAPEIDLEVMREMIDNADIDIPLLKQNVRSALAERNQVSVGELTRMFEVTQGLASIVGYMSLGQRYGIVLQNSEREFHPWERVSWAGQDGVVRHARIAQILFTRDCLNDLD

SEQ ID NO: 33504 - protein, 1149 aa, Burkholderia cepacia
METAQLFEDPELSPAAADETTHGEEGPRPTWSDRDLEEAGQQQFRLRQMQVMNWGTFSKLHVFDISPRGHLLVGPSGSGKSTILDAHSALMAPPNSEFNAAARGNDKVTRDRTMVTYVRGAWATQESEEGIIAAQYLRPDTTLSAVAEVYANAQGQMLTLVGMWWIKGKSTLAKDVRHCFFVIEREFSLKELSFFMQADYNLRSFAKHLPEVKPFDTHASFRERFKARLGIDHDLALRLLHRTQSSKNLGDINAFMRDNMLDEPQTFSLAKALCEDFNTLAAAHQDVVEARKQRDLLNLARSHHDLYQQHHAEVARADELLKQLDHHREYLQYTLRGRRVDELKIALEGLHQSVDALARKANDEQTELQRLMRQRAGMNDGNVAGLQAQLATKEAQLKQVRRARARVAGWLQTLGWPESQDAGHFGEYVGRATVLRDHGLGEESEAKAEELRQKRFEAERQLKELLADVASLELRKSNLPRKLVDVRDQIALALNLDPAALPFGGELLDVPEKFKQWQGALERLLAPLTRSFLVPEEHYSGVVNWLESNHTGQHVLYLRMRPHQKRFDNGSRAPGRMLDSSADEYGDWLRDEIAVHYGEFVCAETTEEFRNSPRAISLHGQIKRGGARHEKNDRTRLDDRRDWAIGFSNEQKKLELLDEIHAQQKAESEASRELAELLARQNKEREKLNAAAELTQVVWEDIDDVSVADEVQRLLNQIEEAQRSHPEIQELDGQIKAQGAKASQAGSAHETEKKKYADTEQQINGLIRDLENTRDDVRMPPVDGDELQSLFGHLDSLTLDNLEPRRLSARSELKDRKNDADKAQANERSLLEEVLRTFQREHKMAAADMAATLDDWPDYARLLAKIEEDDLPRFEERFFRLLNEQSDRHLARLRQRLITEKDEIRGRMNIVNDALSQSEFNAGTYLVLENRPRTLPDVTAFLAELRNCLERNIKPDATREEREEQFKALNAIVQRLHSDKPEDERWKALVLDVRQHVEFVAKEFDADGRVRDIFQSGAGKSGGQRQKLAATCLAAALRYQLAGTQRPLPQFCTVLMDEAFDKADSEFTAMTLNIFNTFGFQMLMATPMKAVRTLEPFIGGAHVFSNKLRNSSGAVAIEYDMAHRRLVGLSHQRPEDKGNADDGIPQSDD

SEQ ID NO: 33505 - protein, 287 aa, Burkholderia cepacia
MRRNWDTLNARWQTLVGRYPVLTGQRDCANAVIRAAEWSDDDFRRLMELLGWCQHNPESGLYLRQLPLVDIDTKWVEGRRGVVEPLLRIVMGRDGDIHQVMGLRRSPDTVRMRLLNVRLREQLLGMGDLQMPVEQWSYVFQSPPKRLLIVENLESGLALPDIEGVAVVMALGNNVTVLREIEWAHAADILYWGDIDTWGLHILSRARGIFPHLKSVLMTDGVVESHRHLLTEESTQDKRPAANLTKEEAQLLSDLQTGRWGARRRLEQERIHWPSVTDELRRQWAHS

SEQ ID NO: 33506 - protein, 488 aa, Pseudomonas sp. AAC
MDHLTLTTYRDRHPAWRLLASPHAPLVASFLYRVFVAPNVRLTSEADLAEMLEDELFALREQLGAEAYPKAATEYLNDWCAPDKGWLRKFYKPGTDEAQFDLTPATEKAIAWLVSLTERPFVGTESRLLTLFALLEQISTGSEADPAKRLEELRRKRDEIDAEIGRVLSGDVPLMDDTAIKDRFLQFQQLARELLSDFRQVEHNFRQLDRSVREKIALWDGSKGALLDEVMGERDAIGDSDQGRSFRAFWDFLMSSRRQEELSARLDQILGLPAVVALKPEPRTRRVHHDWLEAGEHTQRTVAQLSQQLRRFLDDRAFQENRRILELLHGIETKALALRDMPPAGDVIRLDEMGADIALPQERPLFALHAKPRLAELVLEDGDDDIDTARLFDQHVVDKTRLRQALRQALRQQSQISLRALLETQPLQQGLAELVTWLELAHAGSRGLDGLRATVDDDVQEIVEWAMQDSDGSTVRRRARMPRVIFAR

SEQ ID NO: 33507 - protein, 224 aa, Pseudomonas sp. AAC
MNDMHQDDPEGSTESRPPVVAELSQLMVHLLKGVLYLQDDERLWASLLSLQARVREQAAVLLLDLVLDEAEGYAFLKSQPEPEHADATPRPPRLIARRPLSYPVSLMLALLRKRMAESDASGGDTRLVLSREEIAELMRVFLPDGTNEARLIDQVDSTITKVVELGYLRKLKPAAGAAQQATRYEVRRILKAFVDAQWLADFDARLEGYRTALSGADRDKEAGR

SEQ ID NO: 33508 - protein, 1125 aa, Pseudomonas sp. AAC
MNDFSPQELDFVADDSRVGFRLQRLEVLNWGTFDRRVWRYELDGRNGLLTGDIGSGKSTLVDAVTTLLVPAQRIAYNKAAGAETRERSLRSYVLGHYKSERNETTGSTRPVALRDTTSYSVILGVFRNEGYGQAVTLAQVFWFREPQGQPARLFVAVERELSITEHFSGFGSDINGLRKKLRAMGCELNDSFPPYGAWFRRRFGIEHEQALELFHQTVSMKSVGNLTDFVRSHMLEPFDVGRRIEALLGHFDDLDRAHQSVLKAKRQIELLAPLVEDGLRHGQITGEIQALRQGRDALRPYFAGLKAALLERRLELLTQDATRWDARIKQLGEQRDNARIEQGKLEGALRENGGDRLQQLAAAIQQQEAEKQQRQEKADAYTTLLTCIGEAAPGDEAAFMTQRSTIGEHAEALRTSIADHDTQINEDGYALRRGQEEHKALSDEIDSLARRKSNIDAAQVRIREALCTALSIAEEDLPFAGELIQVREDERDWEGAAERLLHGFGLSLLVPDVHYKDVADWVERQHLGTRLVYFHVRARKSTQAVSLPPQSLVRKLLIKPDTQHYDWLERELHHRFDLACCDNTEQFRRETRAITRAGQIKDPSGRHEKDDRRRIDDRSRYVLGWSNADKLRILRDEREGLEQQLGDIGLRIANTQRLRGQCQAQLEALAKLEVFTRYSEIDWQAPAREIARLTEERDRLKAASDTLRELESQLAQVVERLKEIEDDLGEAQGKRGEIRSKHETAQAQHAQALEIQTQAALDDMLLQSLEGWRAEVLGDHQLTVESCDNREQDVRNGLQARIDAEDKRLSRLTERIINAMRGFKEAFKAETAEIDISLAALPEFERLMKDLQHDDLPRFEARFKELLNVNTINEIANFNAQLARERETIKERVDVINQSLQVIDYNPGRYIRLLAQPSPDAEIRDFLQDLRACTEGALSGSEDEQYSETKFLQVKAIIDRFRGREGLAEIDRRWMQKVTDVRNGFLFSASERWREDDAEHEHYSDSGGKSGGQKEKLAYTVLAASLAYQFGLEWGAVRSRSFRFVVIDEAFGRGSDESAQYGLELFRQLNLQLLIITPLQKIHIIEPYVSSVGFVHNEGGRESRLRSLSIEEYRAQKAAARGGAV

SEQ ID NO: 33509 - protein, 401 aa, Pseudomonas sp. AAC
MTWSQPADLRAQIERLWQRGELLRAVVGDGTLGWPLRLSLKSPSAADLSNRFDAVRGWVRDISAMPLVRIEWREWTHRVQGRQRLPDTLWIDTLEDALAMIGKTGDTHRFQALWQQTAEAQPALLPWLHRAPLQTLALAEHWPRLLAVVAWVQTHPRPGVYLRQVDAPGVDSKFIEAHRGTLAQWLDLALPTEAIEPAATGMTGFARRYGFLEKPVRIRLRLLDPQLPQLPGCTGLTDITLDEDSFAALALPAQRVFITENEVNFLAFPPVSGAIVVFGAGYGWGALARADWLHRASLHYWGDIDTHGFAILDSLRKYFPLAASFLMDRSTLMAHALQWGEEPLDKRHTLPLSRLVDDEPALYDDLRGDRIRPQLRLEQERIGYRWLCAALVATVRDDFRP

SEQ ID NO: 33510 - protein, 543 aa, Bifidobacterium longum subsp. longum EK5; identical to SEQ ID NO: 31042

SEQ ID NO: 33511 - protein, 224 aa, Bifidobacterium longum subsp. longum EK5; identical to SEQ ID NO: 31043

SEQ ID NO: 33512 - protein, 1182 aa, Bifidobacterium longum subsp. longum EK5; identical to SEQ ID NO: 31044

SEQ ID NO: 33513 - protein, 543 aa, Bifidobacterium longum subsp. longum 17-1B; identical to SEQ ID NO: 30420

SEQ ID NO: 33514 - protein, 224 aa, Bifidobacterium longum subsp. longum 17-1B; identical to SEQ ID NO: 30393

SEQ ID NO: 33515 - protein, 1182 aa, Bifidobacterium longum subsp. longum 17-1B
MMQATDVQMIADRWMLESRRLINWGSYEGYHEFRPSTDHKLPVTLLAGASESGKSTLVDAQISLLYPTGTPFNKASNSGRSERSDYTYLRGMVGVGSTETGDEPLYLRGRDENGAPQPVWGAIVDTYRNQTTGQVLSCAKFLYLMPGDGRGDVRRQYVVWGKPVDPRRMDQYRDAPFTPAQLKATYPDCLTFPSAEAFHTHIWSAMGLSEAACRLLHKIQSADAPSRLDDIFKQGVLGVPEALDLARTTVEDYERYDENFHAMDEKTRRMDTLRGIQQAYGEYAAARGKARAFEPVKPAVDGTVPAVLRDWALARMRGEVAVQLPADRAEQQNSEAEAKLLRRRTEDLRTRLDMIRGQMQGLDGGNLTRLELELDQARRTLEDVQANRTRIEQTFASIGETLPGDEQAWNERRINAVNFKREYNKRDGECEEALTAAINARAGARGDLERLQRDFDRQRSQRTRISQQMDETRAMLCRATGLAPAELPYVAELMDVNEHEEDWRLAMNVAYAPIAQTILVDKRHEQGFAAKVSTIDPRTMPRRTWQFVDTARHYDDTGAHANILTGEQDGDWLSGKLRYRDDSPFADWLRSQTQDERFDALCVTAIDDTDRTNRQVQADGQIKSGARGQHGTKDRAQVIGFVNETYLNALAAQVDAARNALSQADTDYTAAKTQSDNLHRELELANQLAYTSWERIDIAGAQRTITDTQDAIASIKNDPKLAELAKQRDELNAELDRVERQRIESDQAAARAGSAVEAALIWLRDHADTGTTDAAGATADNDDDAASGPLPDEVTAALAESYDNRFAGLADAAMRAHMIIGAGAAGTQAPGESFPERTIAGIGKDMASRINLLNGQADAARTGVESKMSTYIALYAADDDSLTASVEDYRYYLDELASLTQLAAVAATDAEYRRCLEQLLRSFLTIKRAIDTDASDIHDQLDRINAMLKGQQFGPKHGSLSLHADVRRPERTFWAQLIRVIGTLNDWKSADVNDSDASRKAFAACAPMVGLLRAELAQVKDANGVKSYGARNLDPRCRSSFYAIVHHADGPDERITSTGGRSGGALQELTSFVYGAALIYLLGGGLTSDPSYTTLFLDEALIKADGRYTQRALTVLPRLGFQVIVSAPESKTGEILEVSTKAYVTYKDPDTGLTSLREAVLHQNDMDDESSSDILKDDGVAE

SEQ ID NO: 33516 - protein, 394 aa, Bifidobacterium longum subsp. longum 17-1B; identical to SEQ ID NO: 30423

SEQ ID NO: 33517 - protein, 543 aa, Bifidobacterium longum subsp. longum 72B; identical to SEQ ID NO: 30413

SEQ ID NO: 33518 - protein, 224 aa, Bifidobacterium longum subsp. longum 72B; identical to SEQ ID NO: 30393

SEQ ID NO: 33519 - protein, 1182 aa, Bifidobacterium longum subsp. longum 72B
MMQATDVQMIADRWMLESRRLINWGSYEGYHEFRPSTDHKLPVTLLAGASESGKSTLVDAQISLLYPTGTPFNKASNSGRSERSDYTYLRGMVGVGSTETGDEPLYLRGRDENGAPQPVWGAIVDTYRNQTTGQVLSCAKFLYLMPGDGRGDVRRQYVVWGKPVDPRRMDQYRDAPFTPAQLKATYPDCLTFPSAEAFHTHIWSAMGLSEAACRLLHKIQSADAPSRLDDIFKQGVLGVPEALDLARTTVEDYERYDENFHAMDEKTRRMDTLRGIQQAYGEYAAARGKARAFEPVKPAVDGTVPAVLRDWALARMRGEVAVQLPADRAEQQNSEAEAKLLRRRTEDLRTRLDMIRGQMQGLDGGNLTRLELELDQARRTLEDVQANRTRIEQTFASIGETLPGDEQAWNERRINAVNFKREYNKRDGECEEALTAAINARAGARGDLERLQRDFDRQRSQRTRISQQMDETRAMLCRATGLAPAELPYVAELMDVNEHEEDWRLAMNVAYAPIAQTILVDKRHEQGFAAKVSTIDPRTMPRRTWQFVDTARHYDDTGAHANILTGEQDGDWLSGKLRYRDDSPFADWLRSQTQDERFDALCVTAIDDTDRTNRQVQADGQIKSGARGQHGTKDRAQVIGFVNETYLNALAAQVDAARNALSQADTDYTAAKTQSDNLHRELELANQLAYTSWERIDIAGAQRTITDTQDAIASIKNDPKLAELAKQRDELNAELDRVERQRIESDQAAARAGSAVEAALIWLRDHADTGTTDAAGATADNDDDAASGPLPDEVTAALAESYDNRFAGLADAAMRAHMIIGAGAAGTQAPGESFPERTIAGIGKDMASRINLLNGQADAARTGVESKMSTYIALYAADDDSLTASVEDYRYYLDELASLTQLAAVAATDAEYRRCLEQLLRSFLTIKRAIDTDASDIHDQLDRINAMLKGQQFGPKHGSLSLHADVRRPERTFWAQFIRVIGTLNDWKSADVNDSDASRKAFAACAPMVGLLRAELAQVKDANGVKSYGARNLDPRCRSSFYAIVHHADGPDERITSTGGRSGGALQELTSFVYGAALIYLLGGGLTSEPSYTTLFLDEALIKADGRYTQRALTVLPRLGFQVIVSAPESKTGEILEVSTKAYVTYKDPDTGLTSLREAVLHQNDMDDESSSDILKDDGVAE

SEQ ID NO: 33520 - protein, 394 aa, Bifidobacterium longum subsp. longum 72B; identical to SEQ ID NO: 30416

SEQ ID NO: 33521 - protein, 543 aa, Bifidobacterium longum subsp. longum 7-1B; identical to SEQ ID NO: 30413

SEQ ID NO: 33522 - protein, 224 aa, Bifidobacterium longum subsp. longum 7-1B; identical to SEQ ID NO: 30393

SEQ ID NO: 33523 - protein, 1182 aa, Bifidobacterium longum subsp. longum 7-1B
MMQATDVQMIADRWMLESRRLINWGSYEGYHEFRPSTDHKLPVTLLAGASESGKSTLVDAQISLLYPTGTPFNKASNSGRSERSDYTYLRGMVGVGSTETGDEPLYLRGRDENGAPQPVWGAIVDTYRNQTTGQVLSCAKFLYLMPGDGRGDVRRQYVVWGKPVDPRRMDQYRDAPFTPAQLKATYPDCLTFPSAEAFHTHIWSAMGLSEAACRLLHKIQSADAPSRLDDIFKQGVLGVPEALDLARTTVEDYERYDENFHAMDEKTRRMDTLRGIQQAYGEYAAARGKARAFEPVKPAVDGTVPAVLRDWALARMRGEVAVQLPADRAEQQNSEAEAKLLRRRTEDLRTRLDMIRGQMQGLDGGNLTRLELELDQARRTLEDVQANRTRIEQTFASIGETLPGDEQAWNERRINAVNFKREYNKRDGECEEALTAAINARAGARGDLERLQRDFDRQRSQRTRISQQMDETRAMLCRATGLTPAELPYVAELMDVNEHEEDWRLAMNVAYAPIAQTILVDKRHEQGFAAKVSTIDPRTMPRRTWQFVDTARHYDDTGAHANILTGEQDGDWLSGKLRYRDDSPFADWLRSQTQDERFDALCVTAIDDTDRTNRQVQADGQIKSGARGQHGTKDRAQVIGFVNETYLNALAAQVDAARNALSQADTDYTAAKTQSDNLHRELELANQLAYTSWERIDIAGAQRTITDTQDAIASIKNDPKLAELAKQRDELNAELDRVERQRIESDQAAARAGSAVEAALIWLRDHADTGTTDAAGATADNDDDAASGPLPDEVTAALAESYDNRFAGLADAAMRAHMIIGAGAAGTQAPGESFPERTIAGIGKDMASRINLLNGQADAARTGVESKMSTYIALYAADDDSLTASVEDYRYYLDELASLTQLAAVAATDAEYRRCLEQLLRSFLTIKRAIDTDASDIHDQLDRINAMLKGQQFGPKHGSLSLHADVRRPERTFWAQLIRVIGTLNDWKSADVNDSDASRKAFAACAPMVGLLRAELAQVKDANGVKSYGARNLDPRCRSSFYAIVHHADGPDERITSTGGRSGGALQELTSFVYGAALIYLLGGGLTSEPSYTTLFLDEALIKADGRYTQRALTVLPRLGFQVIVSAPESKTGEILEVSTKAYVTYKDPDTGLTSLREAVLHQNDMDDESSSDILKDDGVAE

SEQ ID NO: 33524 - protein, 394 aa, Bifidobacterium longum subsp. longum 7-1B; identical to SEQ ID NO: 30423

SEQ ID NO: 33525 - protein, 543 aa, Bifidobacterium longum subsp. longum 1-5B
MADVMRELERLRPVYETGVLRLLLRQNAMLYVSLLRSTFDPLTGELPRETVEERFAQSLSSLADAGEYAPREDQTFAEAAHQILADLTREGEGDYAWLANSHDAASHRFLYRLTARAHRAIEALSRLEDESRALSGAQANSIIMEIEHARMQLTADPGERIKLLNREIKERKHEIKRIQQGKQHATLSEAQVEDVIAVIHNTLRGVPIDLRELVLDERDNGDALRRRMQAGDISVDENLTRYHDEYRRSFRESDSGRRFEDAFQVIITDEGRQQIDEALRAIAKTPYLAGESGVLLGQIRDELARIYDGIEAVRRQMRVSDEAISRLVRQQTDTRYRTMLTRLNRLHARLNADAKTHMGDASRPYDTATSDALFAPLPMRPAKSMTRATAPGLSDLAAEAPQSTPVADLRDMVNSGGPRLLRMVSLIRRNPVTVDRSDDRPGATLVDIAASFNRLPESERRESEIVGFLGGLGAVSGNAIADEPSTDGVGVGVDSDIATESAPAQHGDTATWHCVSIDGEPRNWITRPVLADMDELSIIVEEG

SEQ ID NO: 33526 - protein, 224 aa, Bifidobacterium longum subsp. longum 1-5B; identical to SEQ ID NO: 30393

SEQ ID NO: 33527 - protein, 1182 aa, Bifidobacterium longum subsp. longum 1-5B
MMQATDVQMIADRWMLESRRLINWGSYEGYHEFRPSTDHKLPVTLLAGASESGKSTLVDAQISLLYPTGTPFNKASNSGRSERSDYTYLRGMVGVGSTETGDEPLYLRGRDENGAPQPVWGAIVDTYRNQTTGQVLSCAKFLYLMPGDGRGDVRRQYVVWGKPVDPRRMDQYRDAPFTPAQLKATYPDCLTFPSAEAFHTHIWSAMGLSEAACRLLHKIQSADAPSRLDDIFKQGVLGVPEALDLARTTVEDYERYDENFHAMDEKTRRMDTLRGIQQAYGEYAAARGKARAFEPVKPAVDGTVPAVLRDWALARMRGEVAVQLPADRAEQQNSEAEAKLLRRRTEDLRTRLDMIRGQMQGLDGGNLTRLELELDQARRTLEDVQANRTRIEQTFASIGETLPGDEQAWNERRINAVNFKREYNKRDGECEEALTAAINARAGARGDLERLQRDFDRQRSQRTRISQQMDETRAMLCRATGLTPAELPYVAELMDVNEHEEDWRLAMNVAYAPIAQTILVDKRHEQGFAAKVSTIDPRTMPRRTWQFVDTARHYDDTGAHANILTGEQDGDWLSGKLRYRDDSPFADWLRSQTQDERFDALCVTAIDDTDRTNRQVQADGQIKSGARGQHGTKDRAQVIGFVNETYLNALAAQVDAARNALSQADTDYTAAKTQSDNLHRELELANQLAYTSWERIDIAGAQRTITDTQDAIASIKNDPKLAELAKQRDELNAELDRVERQRIESDQAAARAGSAVEAALIWLRDHADTGTTDAAGATADNDDDAASGPLPDEVTAALAESYDNRFAGLADAAMRAHMIIGAGAAGTQAPGESFPERTIAGIGKDMASRINLLNGQADAARTGVESKMSTYIALYAADDDSLTASVEDYRYYLDELASLTQLAAVAATDAEYRRCLEQLLRSFLTIKRAIDTDASDIHDQLDRINAMLKGQQFGPKHGSLSLHADVRRPERTFWAQFIRVIGTLNDWKSADVNDSDASRKAFAACAPMVGLLRAELAQVKDANGVKSYGARNLDPRCRSSFYAIVHHADGPDERITSTGGRSGGALQELTSFVYGAALIYLLGGGLTSEPSYTTLFLDEALIKADGRYTQRALTVLPRLGFQVIVSAPESKTGEILEVSTKAYVTYKDPDTGLTSLREAVLHQNDMDDESSSDILKDDGVAE

SEQ ID NO: 33528 - protein, 394 aa, Bifidobacterium longum subsp. longum 1-5B; identical to SEQ ID NO: 30416

SEQ ID NO: 33529 - protein, 541 aa, Bifidobacterium longum subsp. infantis EK3
MADVMRELERLRPVYETGVLRLLLRQNAMLYVSLLRSTFDPLTGELPRETVEERFAQSLNALADAGEYAPREDQTFAEAAHQILADLTREGEGDYAWLANSHDAASHRFLYRLTARAHRAIEALSRLEDESRALSGAQANSIIMEIEHARMQLTADPGERIKLLNREIKERKHEIKRIQQGKQHATLSEAQVEDVIAVIHNTLRGVPIDLRELVLDERDNGDALRRRMQTGDVSVDENLTRYHDEYRRSFSESDSGRRFEDAFQVIITDEGRQQIDEALRAIAKTPYLAGESGVLLGQIRDELARIYDGIEAVRRQMRVSDEAISRLVRQQTDTRYRTMLTRLNRLYARLNADAKTHMGDASRPCDTATADALFAPLPMRPAKSMTRATAPGLSDLAAEAPQATPVADLRDMVNSGGPRLLRMVSLIRRNPVTVDRSDDRSNATLVDIAASFNRLPESERRESEIVGFLGGLGAVSGSAIADEPSTDGVGIDSDIATEPAPAQRGDTATWHCVSIDGEPRHWITRPVLADMDELNIIVEEG

SEQ ID NO: 33530 - protein, 220 aa, Bifidobacterium longum subsp. infantis EK3
MTVAEEHEEHMDANPYALFEGDTGDMPAEARMAAIALKRDRYISGPTYDTVLDNRDAVVRSLNNDLLDLVINERYRIMYATPVAGDDVTLRSLKTRVSLKREEAALLAFLRIRVLEYENVHADPADWLVSFEEIRAALATGAGYLAARNDEEGVAKQIGAIVSAMITYGYLVRLDDEAMYQITPLVPVVLDRELADTWLDVVEHGDGDTEDDDDDEKGAE

SEQ ID NO: 33531 - protein, 103 aa, Bifidobacterium longum subsp. infantis EK3
MYDIEPAWPFPVPVGLPDQAFLETNAIAVHDNNNEIRQWASKNGCEIITKHRTIGTSVELISKVVDPDESIAMRVVGRTLAAEYREAHRRTDSTDRIQRQMAE

SEQ ID NO: 33532 - protein, 543 aa, Bifidobacterium longum subsp. longum EK13; identical to SEQ ID NO: 30413

SEQ ID NO: 33533 - protein, 224 aa, Bifidobacterium longum subsp. longum EK13; identical to SEQ ID NO: 30393

SEQ ID NO: 33534 - protein, 1182 aa, Bifidobacterium longum subsp. longum EK13; identical to SEQ ID NO: 33519

SEQ ID NO: 33535 - protein, 394 aa, Bifidobacterium longum subsp. longum EK13; identical to SEQ ID NO: 30416

SEQ ID NO: 33536 - protein, 541 aa, Bifidobacterium longum
MADVMRELERLRPVYETGVLRLLLRQNAMLYVSLLRSTFDPLTGELPRETVEERFAQSLNALADAGEYAPREDQTFAEAAHQILADLTREGEGDYAWLANSHDAASHRFLYRLTARAHRAIEALSRLEDESRALSGAQANSIIMEIEHARMQLTADPGERIKLLNREIKERKHEIKRIQQGKQHATLSEAQVEDVIAVIHNTLRGVPIDLRELVLDERDNGDALRRRMQAGDISVDENLTRYHDEYRRSFSESDSGRRFEDAFQVIITDEGRQQIDEALRAIAKTPYLAGESGVLLGQIRDELARIYDGIEAVRRQMRVSDEAISRLVRQQTDTRYRTMLTRLNRLYARLNADAKTHMGDASRPYDTATADALFAPLPMRPAKSMTRATAPGLSDLAAEAPQATPVADLRDMVNSGGPRLLRMVSLIRRNPVTVDRSDDRSNATLVDIAASFNRLPESERRESEIVGFLGGLGAASGSAIADEPSTDGVGIDSDIATEPAPAQRGDTATWHCVSIDGEPRNWITRPVLADMDELNIIVEEG

SEQ ID NO: 33537 - protein, 220 aa, Bifidobacterium longum; identical to SEQ ID NO: 30789

SEQ ID NO: 33538 - protein, 1184 aa, Bifidobacterium longum; identical to SEQ ID NO: 30790

SEQ ID NO: 33539 - protein, 506 aa, Neorhizobium galegae bv. orientalis str. HAMBI 540
MPLFKYLHDDAFLIFSRKHRYLYEESLLEVYDRCFSTGSTFPTRQELVHAIYDVVGRRPDLLLDADDLIEGLPEVVSKGRRRLKFAGTGGETGDRALKAAQQVYLGLVRTGWLEEEEYGLKITVDMPMGALLVVQRLSSLKSDVSQRFGGLVVHIKTSLDLVENLSIKNPDKARSSAVYALREARVQADQFVKTLRAILSDLRRIRKALVESENLRQKMDTYFEEFIGELILKDFQAILTFNHPYRFRDQIVTTARRISYAPDLLAVVAEGYIEIGITSDMQQARDEAVSDLLSIERTFDTVGEMFDRIAQFRRALEMRLKNTVKYAEQGERGLSSRARALVARMETLLTAEPDHYVGPTVPCEVARIFVPWSQKQLAQQRRARSPIEAKPLAKRPYDPIYELRKRMRADYLDRISPSAERVSQFLARISSRYHTIEARFVELRNIDDFLAFDAARRYALTRDVPSPVSDEFELEHLPESEPHDCEWLRCSNFSIRRLGDPSRREA

SEQ ID NO: 33540 - protein, 229 aa, Neorhizobium galegae bv. orientalis str. HAMBI 540
MLSEFEQVEATYGIDKAADLRKACRYLLRNQFAYSGDRGAATVYNTLIDNRFRRIIDGFFDSIGYRVHKNAEEQWVGILFDDDDPSSVPKMRLDETIVVLVLGSHWQEDADVGNLLDRATAVTTVNVLHERYRDMLQNTGKPAITAGRFLDLLKEVAVRNLISIGDFDYDAQDREVVIRPMIKFVSGADVLARLESYVTTEERGMRTRAMPAVGELLRADASAAKGDTP

SEQ ID NO: 33541 - protein, 1153 aa, Neorhizobium galegae bv. orientalis str. HAMBI 540
MMELRRITLVNWHLFDVEDIEVQGNFGILGENRSGKSTILDMIQVVLSGASRSYLRLNAVAGEGSKARSASKRTVLSYCLGTLNDGDVRRPETLTYIALGFEDQEKQQPPITIGLAIEARQTDAAETILGRFVVIGKLLTTADFTDKRADGIYATQWDEVKARIIASVGDVNFVNHRDKAIDFVREYMRRLVPSLPNAEQSASALLKAVVNAMTLNQGYSATEFVRRFILEDNPINIRDLRSSIETYRSVSATIVTLREKLEALKELGGFIAAFEESLGQKDLENWLARRAWWLASRAENRAIKERIAEARRFIDAEKEDRGLAIEGIKDAEQEIERLRKAIATHEARSGRDQWLEVLKSVTADNDRLKKEVDRRRRSAIELVDLTQVLDDTGFMKAYCALVAGPDGKADRKAMRDAEQNFRTHVVVTVETVERRRRETAAQIVLLTKEITGIRQVLDEVDERGSAAYLSRETKLLLRRLESRGMDARPFCDLLEVADASWTAAAEALLGRDREAVFVERRNIREATALFREGRRDFQGASLVSLNKLDEFRDAPRQGTFPALFRSADPDARAFLQRRYGNVRLALTLEEFNQPGRAIMQDGLYDDGLVRSHRAVNPRDHKIGRAAQADHLINLREDFAQKADVLSGLQREEKLLTHALAALDLLKRQDTDRLADMLDSIDDCAERMRDAQERVAAIDAAGDDGLKERLRAQKAFQDRKKEELRTIDERSRKYQVDVEVGERALKSGEGTEGSAMNLSIAKARYGTQRRLYQYPEGSGAYRQRLEALRRRSHDSGTMGQSARNEAVAHRKLGQQAAEAADRAADRNRRAELDARRALHDYFNNPKFGVSSQVGPESELLADIKPWMDLLIEDIERNELRRYEDKAKEASERASVLFRGEFVNALNTRVSKMERDIEALNRSLRGHPFHNEIYSFHRTAEAQFQPILKIIDISRISDEALDTLFKPNVPDDFQHKDTIKAVEQLLEDPDKDVSAFEDYRNFYAFEIHMEDVHTKARTRWETRRNTGSGAEQQVPLYVAIGASLAAVYGSAVSHRGQKGMSPALFDEAFSKMDGKNQRAMMSFYADLGLQVVIAAPLEKKPAIIGYMHSLVEIDRINEQSFANVVYIGKRARDEILAMNPETLSDADIAARMAAE

SEQ ID NO: 33542 - protein, 393 aa, Neorhizobium galegae bv. orientalis str. HAMBI 540
MARGRKFTIAQDLLQDLLDRFEDGTAQPVGYPDHGGFADITASDVFMRKIGEAERRGGVALVYGSGRRRGELKLVRLTDARLLYEYLDRTPSRQTALTVGEEVLGGLSIHPAIRDVAFSAVEAWSRNRKWINIGVESAASMRNAVILAQAIVEKRHLDLDYRTFSRRIVADSKALEKLEGAVLRLVGAVVDVPPASSARAAFATLGLERFSPPLLLSGRFLLDGISVGASLSYLGIPPTEMMRISFSRQPDYVLTVENFASFNRHVLEADPNGSGLTLFVGGYPSLAAQKAIAVVASMLPDTVPFFHWSDIDADGTWIFRTIERALERRLRPHLMSRELAEAFGVASIGASKLRRGEAAGSMISNLVDYLAQPEAKIMEQEQVDPQIPNIVAT

SEQ ID NO: 33543 - protein, 509 aa, Sphingobium yanoikuyae
MLFGQLHSDIFALFAGSNRFLYERVLIGLYEGFYRSDLHFPTQGEVVQLIYTLLGDNAELWREDESPVVLDKLAARPGRRVRRRKLEAADAQATSAAMMRARHIYNRLQATGWIEESRYGLKVTVDMPAGAMRLAEFLCSLREGLSDQLGGLVIQVKNELEALQRNARENAPGLHKAARDAASFGRYLRSVLSALRDIDKRVVESDSVGRRLRHYFEDFVEKLLLQDYAAISTTSHPYRFRHRIFTALDAIEDSIADVAAIAEAYHEARLAPDPSAARDLVYDDLHKVRRVFDQIEEAFERIQQHRSRLETRLRNTVRYAGRRGNSFLQRSEPMLLQLDRLLAHTDGQDMAPSMSGLLEPRRFYWSPALLARPRTYRSTVSGGLLVLPPPDPLREWRKRLDRDYLARLAVTPEQVSRFLERRVAPFGSGEASRFAIETVDDFLTLEALRLSVLAADADGRGNAIANHLAPHFRFSVDTGSTIDNDWLHCAGFTVSRIGDAVTPEIQDAQ

SEQ ID NO: 33544 - protein, 222 aa, Sphingobium yanoikuyae
MLSEFQTLEARDPRRMHRVTQAISQLLRHQFLHVQDRGSSALLEVLLRPDVERLVADYFEVAGYRLVVRESEGWAGILPDTEQIGHPRMRIDETLVLLLFRRLWEEGIQEGDVERYGSVMVTLNAAYDAYQDMVARARRATLGINEFKALVTALDRRAIVHMGDIDEELEDMPITIRALIATVAGEEFMAHLEQLLAGGDYQESETEEPVIDLDDADEEEVA

SEQ ID NO: 33545 - protein, 1147 aa, Sphingobium yanoikuyae
MMQLAHIALVQWHLFGREDLAVGGDTAVLGQNRSGKSTLIDLIQAVMTGGSRRWYQFNRSAGETGSRKSERTLRGYCLGQLNEHEFLRQESVTHIVLTFDDPDGLRPPVSVGLCVEASAIEDAQVVGRYIAPGVRVDTDLLIEHLDGGQQRSAPWSLVRERLEQACAAAGTQLIRPDGPRNHIREYMRQLFTGRRHSDPDRFIRAFVMALSFEDMRSVEGFVHNFLLARNDIDIGELREGIQRYRDIQKDVHELERRLDALRALAELVSRFVTLLEREDVARGTARLAAMIEAGAALIANLRERRDTLAELDDIQHDIGRCDAEIAALGDRQDSLLAQSVAEGAAGKRAVVASELKAVDLARTGVVQRLEARFRAAALGASLLDHRERLAPLKLGALFQALEALRQQSDGLEPPTWPRDPLAMEELIASARRSAIDSIAKIQERRDQAIAQRRGLQDELADLVARRDKARAGQVSLDDRTIRLMAALERENMRPRTLCQVAEIVDPQWREAAEALLGRDREAILVDPEHASRAVEIVRANRDGFRGCRVINSRRLAEQPPGFDTDSLATVFASDDPLAIAFLRFRTGQVRLAGTQAELLAGGRAIMRDGAYNSGIVVEVLRTRDLKIGRAAAPLMEAELLARIEDRQALIAVHAESERFHDDIHRKLLPLMADVDPADRLDLLVAAIDQHEESRTELQHRLDKIAMTVDPAIQHNLDKVKLQLRSATEEKEELIGRRGQLGQARIEIQRRLDAGDAQPGSWLCLRSRRALFKDRVRSSASLSILREAYRQQRGRPLPRLVQEMMKRADEARDAYQALQGEIRETLGHYRADFDNSAPIALPGAIATEVKPWLAANIAALEENELIQYRRQADEAAEQIGQLFRTAFIHELNARFNDLRSELDNLTRALRMRPLHGEIYTLHARPKEEFAALHRLARESEHDELTFDALFGRAAPRDAEHAQALAEVERLLSDESLDFSAYQDYRNYFTFDLRMEDVNKGRTTSYDKRKGTASGAERQVPYYVVIGAALASIYHGARRQYERAELGLGLAVFDEAFSKMDGPNQRTLLEFYDDIGLQVVIAAPSEKRAVVYENLDSVIDVFRHGDNASAEAVRIKPHARTQMRAANPQHLDDAALAERLDLFALDSAE

SEQ ID NO: 33546 - protein, 460 aa, Salinisphaera hydrothermalis C41B8
MIVRLYEDHFSAEAELPESGYYLKHDLVPPIERYLAHEADWAEEEGITHDTPVNVRANNTLAYLIDCGWFVETRVVLNRTIEMRPDVAQFLQMLLEFTERGPRFIGGKVQVIYGTLKNIVDDPAGQADAFFETAKLVRDLVNGVAATRTQVSELMSSLRDIDEAGTYVEAFFNSYIEQIYIADYSDLRTTNHPLRRRREILDLVLELKINEEKRAQLLSWYRQQKWGRLTPEQALDRDFRRYDIFERIEEHLDRLNRVVATANRQAMSYIQYTMRTRQNFDRVIDRSIEIVSSAAGGHAEPATWIEAPLAAGIGLSEATLATPSTPRRPPQRRTLKKREISPRQIALNNLRKAMSDHRRTDPATVSHYLEMALGDDDELSSDELPIETVNNLCVFLTLPRVAALNQGTTQTVHHTSGVAGGPTQRRVALPGLELAIDADNPIDNAYVRAPRVTIRRTARK

SEQ ID NO: 33547 - protein, 235 aa, Salinisphaera hydrothermalis C41B8
MKDKIRHWRDVLTDHDSTEEQDLEAAAYRLVTEQVLYDSEPRQRTHYRLVKQYAAHFRQVCELLGMELHVSDNPAYCAARPLSASTIRLTLTETLVALVLRKIYHLHRQAGEDQAGHVFVPLAEFADIFQESTGRAPPTDKRQMLERHIDRMRQFGVAKRCQADPQDDQPFGIEILPGIEFLLDERALAQLQAHAAAQGTNTHEPPDESEMSDEASDLDDESHDGLIREANDETT

SEQ ID NO: 33548 - protein, 1186 aa, Salinisphaera hydrothermalis C41B8
MKRLSRINLVQFHVYEKEQIEIAGNTAILGDNGSGKSTILDAIQLVMTGGHGNYRSFNAQSSSSSASKRTIRSYLLGTLESKSQDGSVDEVLVRDEAAYSYITLTFWDTKRETPFTAGICASASQSQSDHTVHGLFLLPGVALEANDLTEYTAAGELPLAWKDFEARANKRCRDAGRTLIVKDGAEAYVKALLTQLGSGRARIDERSYLRAFTKALQLRDIDGVDKFVRQHIVPTGDIDVAEFGIQIQQFNELRALIASTRQNIEELGRIEERYGRAERAIERHASLMGLAAEYDYEAAAEAESDAQDQLTLHADTFEAANKHAGQAELKLGTIRPEFEALDQECRTRPELADRAKDEKDAERARRNCKRTQEQINVRLRAQAEGLTHLAQHESNDEHRSRLRRVARGLHDARTDLENTNRDRLLEHVVDAAGLLKTSIKTLRADLGDATSKRQDAQSRLKEAKERLAAMESSGSLLGHNSSRAANLFRDKGIPASPICSLLRVTDPAWQPAIEAYLGGQLEDFVVHDDREAEAVRAIREVPAHEAIYDVRVAQPRHLQQHRDRTPGPDDVARLIESDNWIALAYVRASMRNVRFAIGEADLSRHTRALSQDGMVSSGGGTARKRLPPKGQLRIGVRVDEEELAEATREISRLHTIFSEAEQAERRLSRLIDQIESGTSDQAKAEVLQDLEQFSSDTEELRLLEDRLSAAPSQSAQELRERRDAKKKELDTVDKQLQEAQKEASVAEANIKHTNERVQTCVSARQECQRMVDQAQAEPFFDAQLADSERQRIDTELGNVQAPTRPGGETDHAARARELAAHAQGVHDRAVTEARDELLGYTARTEMDCPPLRTGWRPEAEDALDDDFSADSDEALKSWPTAWQACMHWARREKQILESSKLVDQKARADSALTEAKNAFRRDIAYKLNEQMQLMKTRLHEMNRMLKSCKPFSQGERYQFSYKARPEHADLRRFIEHVGQAGEDELPFGDEEAGASAHAAMERLIEMAEQGLLSDDTAPTVLTDYREFYAFDLEIRVNDKIVNLLSNRTGGGSGGEHRTPFYVIAGASLARAYRLDEAEDDGGGLMLLDEAFYSMDQQNSTAAVEFLSQRGLQLIMAAPETDRSKISATCDTVMDIGREGTTPWMHITHVKSAARELLASDDPHQQPDLLEVETRRVENEQSRQTTQ

SEQ ID NO: 33549 - protein, 410 aa, Salinisphaera hydrothermalis C41B8
MTSHAIAHKALSKLLDAGTRRRIRTAAGDTVAASAITVVFSEAKLPEYIELDSSEELERVHAEIREAERAGALRIEWDSAAGRFGQISRIVLSNIEALASFLNVTPQWVHIERAMQLSTPWRGQPAVDAIRAAWVRNTKVRNLGPRDAERLVEACRVLDRVRQATDAAVETPVRRLSADMFGDTKHIENALVPILDELTRGDEPPVSEVEAVLPRIGLVKHPQTLLIGGRGTLVLTNGQRITLTPPYLGIAPDQLARIDGPAPDHVLTIENLTTFNEVSRGLNEFTDAMVIYTAGMPSPSLRRALRCIAKCCSNHTRFWHWGDIDEGGLRIAKIVAASIAEESMPERILRPWLMDPCRLPETVRQAPGSYRQIRRMVAMAEELGWCEVATGIREMPSMVEQEAISPRTPF

SEQ ID NO: 33550 - protein, 453 aa, Clostridium celerecrescens
MILMNEIPDRFWGLFRSINRSTYIEALLKINEEYEYSNYFLSREVCIQVLEEYFTAKRLVIWQDELEDEADALEPTAVRVLNWLLRAGWLRKVDDYASMTVNIVIPDYAAVMIEAFFKLTSDEEDETQIYIQNVYAILFSLKNDPRAGVSLLNTAYINTKRLNKTLQDMLHNMDKFFASLLEKKAYGDLLKEHLEGYVDEIVKKKYHMLKTSDNFYLYKNDIKRWIGSMREDTEWLEQMSHRSGQKVTAADIAEKLDQIERGFDDIEHRIANMDKEHSRYIRATVTRLNYLLNQEDNMKGLVIRLLNHLSETEDPDEAIKDAGGLMNLSQVSILSEKSLYKKRRARTCFKENLMPEEESAELTMEEILSLNRLKSRYSRKEIESYIEAHLENGRMEVKEDTVNSPEEFEKLILAYDYSTRRKSMYQVEEQETELIDNGRYRYPKLVFVRRKES

SEQ ID NO: 33551 - protein, 216 aa, Clostridium celerecrescens
MTYEESAGLISQIPYFDALGQGEKEEVRAGLRLLLQQTFVLEHKYDKRTNRFTYNPEFKICNKHLEFIRAYLAVSGVSVLENSQLGIIYIQGESTVGDKLPKLATLYLLILKLIYDEQMAAVSTSVNIYTTLSEIHEKLGNYRLFKKQPSPTEIRRAITLLKKYQILEPLDILEDLDGDSRMIIYPCINVVLFGDDVRALLEALGEGDEDDDEPEI

SEQ ID NO: 33552 - protein, 1130 aa, Clostridium celerecrescens
MTNQKFEALSRILLNNWHYISRKTLSFNQEINFFTGHSGSGKSTVIDAMQILLYANTDGRGFFNKAASDDSDRSLIEYLRGMVNIGENNEFAYLRNQNFSTTIVLELKRTDTGECQCVGIVFDVDTTTNEISRKFFWHKGPLWENGYRTGSRTMTIQEVTAYLQTLYPKEDYFATSHNERFRRQLYDVYLGGLDSEKFPLLFKRAIPFRMNIKLEDFVKEYICMEQDIHIEDMQESVMQYGRMRKKIEDTVVEIGYLNGMREKFSAVREKEGEISKNTYFFRKMEILDYQARIQALTDKSRLAREDLDRQENQRTALEGQMEDLTRQGNELLGRISSTGYEDLKNQLDSAKELSNHLNKSFTKWSQTGERLKEWIEEEATSNQTIWDIEEFEKNTIDEEKLVRLKKSIAEMRKETEEAQKEAEGILRDIRKKERQTSEELAQLKAGNKAYPKYLERARSLIQQRLLEETGKAVEVHVLADLLDIRDETWRNAVEGYLGNNKLSLVVAPAYAEAAMAAYGELDRSEYFNVAVLDTEKVGQNSYEVVKGGLAEEITVREAYLQPYIDLLLGRVVKCTNLEELRRSRIGVTPDCMLYHTFRLQHMNPDNYTKFAYIGKDSVRRRIRLLEKNLVSMEEEKKPQEQVLKECKRILSMEDLGEDTGVYLEWQQDMEAFKEKGKEIRRLEQKFEKLKAQDVEAWVKEREAILQLCDRKRAEQSAVAELIFGINSEIERFRRESLQLQEELVAKEREFEPDEELEAKVHEILESRENCRYDRLKNEFFGECRRSEEARDQAFQALVGSRGEYARKYPNRNFSLTAKDNGEYDRLLETMECGNLEEYKKMAAEQAKSAVLHFKDDFMFKIRSAIRDALLRKDELNKIISKLDFGKDKYQFVIGRNKGPDGRYYDMFMDNSLEVNPAYLTDTLDNQMNLFTMEHENQYGEIINDLINIFIPPENATPEEMEEAKRNMDKYADYRTYLSFDMQQIIQNEDEVIKIRLSKMIKKNSGGEGQNPLYVALLASFAQAYRISLSPKIQRNPTLRLVVLDEAFSKMDAEKVASCIELIRGLGFQAIISATNDKIQNYVENVDKTFVFANPNKKSISIQEFERESFPELMRELDEEEMEDNLDLQDS

SEQ ID NO: 33553 - protein, 497 aa, Xylella fastidiosa
MTEMDHATLTTLRERHPAWRLLTSPHAPLVTSFLHRVFVATNARLLSETKITQALEDTLYALREHEGPEAYPKGALDYLNDWAAPDKGWLRKFYTSGTDEAQFDLTPATEKAILWLLSLTEHTFVGTESRLLTLFALLEQMSTGTETDPIKRLDELRKKRDALDIEITRVLEGHTPLLDDTAIKDRFQQFQQLARELLSDFRQVQDNFRQLDRKVREKIALWKGTKGTLLDEIMGERDAISDSDQGRSFRAFWNFLLSSRRREELSERLGQVLALPAVAALHPEPRTRRIHDDWIEAGEQTLRTISQLSQQLRHFVESRAFLENRRIMDLLHGIERKALGLRDMTPSGTVMYLDAIGADIQLPLERPLFTPRAKPRLADLVLAAGTDDIDTTPLFNQIVMDKARLRLAIQRALRTQSQISLRTLLQTEPLQQGLAELVAYLELAHTSNSSDPDGLRGIVDETVEEPIRWQANNTVGETVTRKARLPRIIFTRRAPSH

SEQ ID NO: 33554 - protein, 234 aa, Xylella fastidiosa; identical to SEQ ID NO: 30608

SEQ ID NO: 33555 - protein, 1144 aa, Xylella fastidiosa
MRETSTLGLNFVADDKRVGFRLQHLEVVNWGTFNTRVWCYTLGGRSGLLTGDIGSGKSTLIDAITTLLVPAQRVAYNKAAGADARERSLRSYVLGYYKSERNDATGTAKPVALRGTSDYSVILGVFHNVGYDKVITLAQVFWLKDSQSQPARLFVVAERALGIATDFNNLGGDIKTLRKKLRGAGCELFDSFPPYGAWFRRRFGIQHEQALELFHQTVSMKSVGNLTDFVCSHMLEPCDVGSRIEALICHFDDLDRAHQAVLTAKQQVKLLLPLVDDGQKHQTQLANIQTLEAGRDTLRPYFAQLKGELLKHRLDALAAEADQLAVEIQQLKEQRKTADSKVTQLQQDLRDNGGDRLETLAAEIQQLEQTKAQRQKKSDRYQTLLTKIDETAPADAIGFFTQQQRFAQHTEELNAAIATLHNDKSEKDFALRNARKDHNTLLAEINSLQQRQSNISAIQIRIRHDLCAALSIDAEELPFAGELIQVREDARDWEGAAERLLHSFGLTLLVPDAHYKAVVTWVNHKQLDGRLVYFHMRPRNTTQDAALHAQSLVHKLIIKPESPHYTWLQQELQRRCNVVCCDTIEQFHREVRAITQAGQIKDPSGRHEKDDRHRIDDRSRYVLGWSNADKLHTLYEQRQHLEDSIRMLGEDLGTIQQECQKQQERLDALNKLGEYPDFADIDWMSLVRQIAGLKEEQAQLQATSNILQILQQQLTEAQTQVKLLHGKWENALREQGEVNSKQKTAQQMWNQARNVWDDAPLSQAQIALLACWRQQALGEHLLSVESCDNHEQQVRQWLQKRIDAENAHLRQLNDRITGAMHRFKDQFKAETVEMDADLAALPEYERMLNGLQEDDLPRFEARFKELLNVNTINEIASFNAQLNRERETITERIKDINQSLHGIDYNQDHYINQSLHGIDYKRGRYITLLAQPSPDAEIRDFQQDLRACTEGTLTGSDDEQYSDAKFLQVKRIIDRFRGREGLSDADRRWTAKVTDVRNWFVFSASERWRADESEYEHYADSGGKSGGQKEKLAYTVLAASLAYQFGLKWDEVRSESFRFVIIDEAFGRGSDESAEYGLRLFEKLNLQLLIVTPLQKIHIIEPFVSSVGFVHNKGGCDSQLRCLSIEEYQAEKTNGSGPGGGTAP

SEQ ID NO: 33556 - protein, 405 aa, Xylella fastidiosa
MSWTTPASLYAQVERLWKRGNLLRALVTDTHAMTWPHLLKLRVPNAADLSNRFQAVRDWVQAIAGTPQIRIQWREWKHRVQGTQQVPAAVYLDTLQDALAFIGKTHEALQFEVVWQQTAAAQPVLLAWLLRRPTQALEVADRWERLLAVVAWLQAHPRPGVYLRQVDVPGVDSKFIEAHKSVLTELLDLALPPESIETAASGVRQFTRRFGFLDKPVPIRFRLLDAALPGLPGWAGLPDISLDAAHFAALTLPITRVFIIENEINFLTFPKVAGAIVIFGAGYGWEPLARAAWLHACQLYYWGDIDTHGFAILNRLRGYFGHVTSVLMDQDTLLAHRLYWDEESEPTRQALEHLTAEEAAVYDDLRYDRHQPRLRLEQERIGFRWVCDRLACLLSTAHVAPPQDA

SEQ ID NO: 33557 - protein, 498 aa, Klebsiella oxytoca
MEENTRQRTEKYISAKNQHPAWILLATRRAPLVLSCLKTLFEKSHDGIPLEEAIQSLTGILVEHVSQEQYDINQDNPSLQASRELREWIKRRLIVERDGRVFATDALEVAITFVESLDNRFMTSTASRLSTVQREIENLETRLNPNPANRVTTLRRRIAELERELQEAEAGHIEVLETHQAVEHIREVFNLASSLRADFRRVEDSWREADRALRQSIIGEQYHRGDIVERLLNDQDALLNTPEGRVFDSFQQQLRQSSELKAMSERLRVILSHPSASDALNRLQRHDLRWLVKRLVDESQTVLQARARSERDVRGFMKTGLAAEHHRVGHLLNEFLNQALKLDWQRQIVRKQEVPLPAVGVAVTGIPAIERLRFKEVDDEAEQTLDLSNHAADLTQIGDDFWDAFNGLDREVLIQQTLQLLAKENRPVGLAELAVLLPPDHDLETFAIWIGMAREAGIEIIDSQREFAELSDGEGRRWRFNLPTTGLESQALMDIDWE

SEQ ID NO: 33558 - protein, 254 aa, Klebsiella oxytoca
MGVTGMVGFFDRQINRSVAANAGSEPEPSDEAVADESVEEIATNSEMRTLKKIREATQELLKYGLLEEASKPNLYRVVLTHPEEVTRILEPLDLDIGIDEIRGLLYVKVRLDETPEQDEWSHPLVRRQRLNLEQSLLVAILRQHFVAWEQESGTGASQAQIAIDDLLPQLQIYLGDPGSESKERTRLLTLLDQLKGHGLVTSPDAHERIVIRPIIAHLADPMNLQALLAWLQDQIAQQTSPADSSEKKSSEEDV

SEQ ID NO: 33559 - protein, 1095 aa, Klebsiella oxytoca
MNQIARLAGKESFILTRIELFNWGGFHGLHQAAIHQEGTAVIGPTGSGKTTLVDALMTLLCANPRYNLASTGGHESDRDLISYVRGVSGPGDGGEGQSHIARPGKTVTGIAATLEREGQQVRLGALLWFDSTSSSVTDMKRLWLFSDNPEQTLEHWLNVYHDGGTRLLRQMEKEVTGIWTYPNKKQYLARLRDFFEVGENAFTLLNRAAGLKQLNSIDEIFRELVLDDHSAFDRATEVANSFDGLTEIHQELETARKQQQSLQPVALSWDKYQKQERQLAERKVLESLLPIWFAQQASQLWREKVSHLEIEFGEAQIREEQILSQLEQQKKRVADCIQRYYQAGGANIDDLNERIKDWQKTLGSREALARQYQQLIHNLGLPPDLSQQQLEANQHEAEARREQLADDIKLKQEEVYQKGALRHRMTEELRERETDRAEIARRPDSNLPAHYQAFRSELAKALNVDESELPFVAELIQVKPEEAQWRGAIERAVGSNRLRILVAPESAQEALRWVNQRNNRLHVRLLEVKLPHSPARFFDDGFTRKLLWKDHPWREAVKALLAESDRHCVDSPEQLRDTPHAMTVQGLMSGKQRFYDKQDQKRLDEDWLTGFDNRDRLNFLAKEIAALQEQVKTANAAFEVAKGEVALLQNQAISFQKIQQIDYDSIDVPGAKSQLEALKERLENLIRPDSDASVAKAKLDEAQTVESEFDKQLRAANKVTNGLDTELTSARAAERKAQQTAQQGMQDEERELCALHFPAVTLEQLPDIRDLERQHERGIQQEIEGVKGELHQLSIELTKRMSEAKRVDTGALVEAGADLDDIPVYLQRLQELTEEALPEKLNRFLDYLNRSSDDGVTQLLSHIEHEVLVIEERLNELNETMFRVDFQPDRYLRLDTKKVVHESLRTLEKAQRQLNTARFVDDNGESHYKALQVLVAQLRDACERNRTLGAKALLDPRFRLEFAVSVMDRQSGNVIESRTGSQGGSGGEKEIIASYVLTASLSYALCPAGSRYPLFGTIVLDEAFSRSSHAVAGRIIAALREFGLHAVFITPNKEMRLLRDHTRSAIVVHRRGQDSNMASLSWEELEQHSRRRENA

SEQ ID NO: 33560 - protein, 382 aa, Klebsiella oxytoca
MYSPDELREKLARQWDNAKLRAERLLPPGNWPLCLTIGKPSAKIFAEQPQRVLQHVQLWRRVAVGRVDWGEVSYRASDGPVSMPLRWVLNGPFDWISAAADQAVSREFRLLEVIIEQVDPIFHPLLVSHRSLWRHKAPQDIISAARLACRLEPGCAKGLPLRLLSGQGVDTKFIENNISLLTRLLDVRFSGEASEQGLTTFLDAFDESSHWVLVVPLSPGLLPFKKCRVTTAELGETTLPASRVLVIENEQCLHQLPALSDTIAILGCGLDVQWLSSSVLDEKRVAYWGYMDSWGLLMLARARCCRPTLDVLLMNRELFEQYASHSAVPEPVKAQQAIPDGLLDEEVDFYRYLICLPRGRLEQEFLPTGIVEEALVMWQKGL

SEQ ID NO: 33561 - protein, 509 aa, Sphingobium yanoikuyae
MLFGQLHSDIFALFAGSNRFLYERVLIGLYEGFYRSDLHFPTQGEVVQLIYTLLGDNAELWREDESPVVLDKLAARPGRRVRRRKLEAADAQATSAAMMRARHIYNRLQATGWIEESRYGLKVTVDMPAGAMRLAEFLCSLREGLSDQLGGLVIQVKNELEALQRNARENAPGLHKAARDAASFGRYLRSVLSALRDIDKRVVESDSVGRRLRHYFEDFVEKLLLQDYAAISTTSHPYRFRHRIFTALDAIEDSIADVAAIAEAYHEARLAPDPSAARDLVYDDLHKVRRVFDQIEEAFERIQQHRSRLETRLRNTVRYAGRRGNSFLQRSEPMLLQLDRLLARTDGQDMAPSMSGLLEPRRSYWSPALLARPRTYRSTVSGGLLVLPPPDPLREWRKRLDRDYLARLAVTPEQVSRFLERRVAPFGSGEASRFAIETVDDFLTLEALRLSVLAADADGRGNAIANHLAPHFRFSVDTGSTIDNDWLHCAGFTVSRIGDAVTPEIQDAQ

SEQ ID NO: 33562 - protein, 222 aa, Sphingobium yanoikuyae
MLSEFQTLEARDPRRMHRVTQAISQLLRHQFLHVQDRGSSALLEVLLRPEVERLVADYFEVAGYRLVVRESEGWAGILPDTEQIGHPRMRIDETLVLLLFRRLWEEGIQEGDVERYGSVMVTLNAAYDAYQDMVARARRATLGINEFKALVTALDRRAIVHMGDIDDELEDMPITIRALIATVAGEEFMAHLEQLLAGGDYQESETEEPVIDLDDADEEEVA

SEQ ID NO: 33563 - protein, 1147 aa, Sphingobium yanoikuyae
MMQLAHIALVQWHLFGREDLAVGGDTAVLGQNRSGKSTLIDLIQAVMTGGSRRWYQFNRSAGETGSRKSERTLRGYCLGQLNEHEFLRQESVTHIVLTFDDPDGVRPPVSVGLCVEASAIEDAQVVGRYIAPGVRVDTDLLIEHLDGGQQRSAPWSLVRERLEQACAAAGTQLIRPDGPRNHIREYMRQLFTGRRHSDPDRFIRAFVMALSFEDMRSVEGFVHNFLLARNDIDIGELREGIQRYRDIQKDVHELERRLDALRALAELVSRFVTLLEREDVARGTARLAAMIEAGAALIANLRERRDTLAELDDIQHDIGRCDAEIAALGDRQDSLLAQSVAEGAAGKRAVVVSELKAVDLARTGVVQRLEARFRAAALGASLLDHRERLAPLKLGALFQALEALRQQSDGLEPPTWPRDPLAIEDLIASARRSAIDSIAKIQERRDQAIAQRRGLQDELADLVARRDKARAGQVSLDDRTIRLMAALERENMRPRTLCQVAEIVDPQWREAAEALLGRDREAILVDPEHASRAVEIVRANRDGFRGCRVINSRRLAEQPPGFDTDSLATVFASDDPLAIAFLRFRTGQVRLAGTQAELLAGGRAIMRDGAYNSGIVVEVLRTRDLKIGRAAAPLMEAELLARIEDRQALIAVHAETERFHDDIHRKLLPLMADVDPADRLDLLVAAIDQHEESRTELQHRLDKIAMTVDPAIQHNLDRVKLQLRSATEEKEELIGRRGQLGQARIEIQRRLDAGDAQPGSWLCLRSRRALFKDRVRSSAGLSILREAYRQQRGRALPRLVQEMMKRADEARDAYQALQGEIRETLGHYRADFDNSAPIALPGAIATEVKPWLAANIAALEENELIQYRRQADEAAEQIGQLFRTAFIHELNARFNDLRSELDNLTRALRMRPLHGEIYTLHARPKEEFAALHRLARESEHDELTFDALFGRAAPRDAEHAQALAEVERLLSDESLDFSAYQDYRNYFTFDLRMEDVNKGRTTSYDKRKGTASGAERQVPYYVVIGAALASIYHGARRQYERAELGLGLAVFDEAFSKMDGPNQRTLLEFYDDIGLQVVIAAPSEKRAVVYENLDSVIDVFRHGDNASAEAVRIKPHARTQMRAANPQHLDDAALAERLDLFALDSAE

SEQ ID NO: 33564 - protein, 498 aa, Bifidobacterium adolescentis
MERLRPVYETGVLRLLLRGNSMLYVALLRSTFDPLTGELPREIVEERFSRSLTRLAETGDYTPKEGQTSAEAAHTILQQLTKEGEGDYAWLANSLDVASHRYLYRLTARAHRAIEALDRLEDTTKTLSGAQANSIIMEIEHARMQLTADPRERIRLLERDIEERQKQIDELKHSDTLDKLTSQQVGDIIGVIHNTLRGVPIDLRELALEERDNGDNLRRSMQSGSISVEQALGTYHDEYHRSFHESDSGRRFEDAFQVIVTDEGRREIDEAVRDIAQNPYLEGEPGILLAQVRAELKRIYEGIEDVRRQIRISDEAVSRLVRQQTDTHYRTMLDKLHRLFVRASDDAKTHPGSDERPYRTDTGTAQFQALPSRPAKSMARAATAGLDDAPSTNVDAPDLKAMVEMCGPRLTHMIGLIRRDPVKTADGRFVDFAASFNRLPREERRESELIGFLSALRTQDGPATVAWHCVSIDGGERVWRTRPILTTEAALDEIIEEG

SEQ ID NO: 33565 - protein, 279 aa, Bifidobacterium adolescentis
MTDNTDGFDTGIGIEEETGPESGMPSEGPDMTRDRPALFDGDTGDMPLEARMAAIALKRERYIDGSLYDRACQYREAVERSLNNDMLRLVDNTKYRIMYASPVTDAETNIRSLKTRVSLTREEAATLAALRIKVLEYENQKTKPGDWLISFDDIRALLATGAGFLTASNDEEGTAKKITSVISRMRTYGYLAETGDENMYVLTPLVPMVLDQKLADRWLGSDDTDGDGMKDADGDGYDDSSIGADGGDTSDSTGTVSSGVEQDAFDFDSADDAFDGGEH

SEQ ID NO: 33566 - protein, 1152 aa, Bifidobacterium adolescentis
MEDGMKIVSDRWMLQSRQIVNWGSYGGYHVFRPSMDDAMPVTLLAGASESGKSTLVDAQISLLYPSGTPYNKASNSGRSERNDYTYLRGMIGISDGENGETPIFLRGRDADGTPQNIWGAIVDTYANRSDGGLLSCAKFLYLTAGDGPDGLRRQYVTWNQTIDPRLMDRHRDTSFTRGLMEQTYPGCTTHVNAQAFHASIWQDMGLSAEACRLLHKIQSADAPSKLDDIFKQGVLDVPESIRLARETVDDYNRFSENFHSMEDKMERVAILQDIQARYGEYAKQASERREYTPIDPDREQGETTLAAWTWSRMASEVRAGLPSAQRKAKESQDAIDRSQQRIDELDTQIEAVKERMNGIDGGSLQQLGKDFERARQDADEARRQRHAIAERFERVEGRLPADEQTWNAKRAALALSLDTYDKRLEDARSEYQRMVVERHARQGERDLLRQDYRRKIEHRTRISDDMDHARTLIARATGLDETELPYVAELMDVDEGDEQWRLAMDVTYAPIAQTILVDKRHEQGFAAKVSAIDPTRMTRRAWRFVDTDAQYDSACNEGWMSSKLRYKEDSPFVGWLKEQTASQRFDARCVEAIDDMDRAERQVQVDGQIKSGDRGFHGVKGLRQVIGFVNERYLAELERQLDGAERALEDADRRGRQMANAMTLLQDEHELALTVADLPWGKIDVDGLETKAERIRLQIERIESDPELAQLQDELKQLLRQKDDEGKNRYRAEAELENAQHAVHAEQAWLDMHGDSDFDDAALSDMVSNLLADTYETCFDTSRPQERPQRIAGGFDREGTAPFDVRVLRRIGNTVRARLQQIDERAVQLRADTERAMGDYLKHHSTEGDTVMASVEDYPYFLDELKNLNMLVTRAATDEEYANSVEKLYMSFQQLNRAFNTDEENVREQLDRINGMLKGQQFGPRGGRLSLHVDFHPIDRQFKSSLGRIMSKLDDWTRNARSNPMETRKAFAGCETFIGRLQAELGQIRDTNGIKEYGARNLDPRVRSSFYAIVHHNDLPDERISSTGGKSGGALQELTSFVYGAALIYLLGGDLTSKPTYTTLFLDEALIKADGRYTKRALTVLPRLGFQIIVSAPESKTAEILSIADKAYVAYKDPATGNSYLQELDREPATQAETQDATVEQTQPATEA

SEQ ID NO: 33567 - protein, 411 aa, Bifidobacterium adolescentis
MAAARNTTSETDIRRKLDEYVDAHLTRHMYDTDESWPLRKTIRLPKQAELEQHYNQIRAQNETIRDWARQHHCETSEKTKIVSSGLIQQKSPLIDSVTIPDLDTALRIATKQTRERYLREHDRMSALAKEFGLEPANAMNVAKTLKDHDDTDFHLVIQAAHYFANHDCHTMTPRMAPIPGFSAKWLGTPNSQRRKAICQLTGQDNLTFQERPNELRLRLMDAEHHDQPDLIVTQPWVRNQPTDIEHAIIIENKDTYQAMPTVEHAICILGNGYAATSHITTLLPWLTTIPNIIYWGDMDANGLDILSKLRATGIPCTSILMDTTAYRTYEQYGTQLDAKNKPLTTQTPQPTPGLTTEERKLYETLCTGTDIQYLRIEQERIPIRDATTILHDQHHWPIDIPGNDIPNNNTK

SEQ ID NO: 33568 - protein, 498 aa, Corynebacterium imitans
MNLVADALKAKRVGGESAALSLMRSPLMPVVVAFIKRYFPHGSKARPVVEVYEGLSTDLRLLRAEGFDLASGPQHYVSEWVKKGWLTRRTGTSRTGETVEPSEEALAVVETLERWDAPQRAVTASRIETISQALHRLARDADPTIEARLALLEEQRERIERQIAETERGEFDVLSPVQVRERIGDILDLAAGIPADFARVRHEMEALNRRLRRQLLDPEEQRGSVLEDIFRGVDMIGSSDAGKSFTSFYEVLLDRERSAQWQQWTDQVLAHEMPEDEGGPDVEMVRKLGALFHDMERASFDVNQEMTSLARSLRHYVTSDEFAENRRMVALLRETRHAAAVAAQQGEVQALTPMETKLVRIGMSIGSVSALKLRNPGEEIVEYAVQPIQEVPLDEEALRNSIRESEIDFEEIDAAIARALQRKTQASLLEVVHEAGGLTQGLASVVGFLYRAMESGFEGGVDKVELTWDDDGTHYRATVGDWYFTAPDTPSTNEADHD

SEQ ID NO: 33569 - protein, 220 aa, Corynebacterium imitans
MTNHDTHADIKGLWEGDRGGLSYDSRRALVALLKGPMIVAHEMQHIWAAIISDEQTLRSRLNDVFLELVLDEDAGIAFTRPANNGEDLTTPEGRTHTMPSVLRTRTLSHVDTLVALHLRQELSLATPGDRVVISYEELREHIRMYRPDGERNETKMDKRFDAAFNRMVEYSLLTPTETDDRFEVSPALRSIFDTATVEGIKAEYDARFKATETGDDNADE

SEQ ID NO: 33570 - protein, 1111 aa, Corynebacterium imitans
MQTSNIFPGQFRLSRIQAINWGTFGGSIDIEVPREGFLITGGSGTGKSTLLDAMSAVLLPGDKLRFNAAAQANTPRGKGRTLVSYLRGAWGSREDHATGTVVTKTARPKATYTVVVLTYSDGVEKEYSLAALFYLKAHANSSGDVQRLYGVLEGPVAATDFAPYLSGGLDTRSIKKQFPQGKFNNSHSAFAATFRRRLGIPGAEAMELLHRTQSAKDLQSLDDLFRDYVLHKPDTYELADQAVEGFRELEIAYQKVQDTKAQIDALEPLVKLRQERDAAAATKEHAEALLRTMPKVVRQLRREDAEERIEELKVELSQAINAQRLAAERKESQQSLIETLRASLNEQIGSRIEVIDAELHHAHERLAMRTRTLADLSERILALNGKAPETLEDFEQLEATARQIRDEHDEQIKELDGRAEEVVEKRTQVQNELKAITDELESLARRQNNISARHIAMREHACAELGLQARDLPFAGELIDVTDPTWEPVIQRQLRGLATVMLVPRTVFDDVRRWANDNNLGLRLRMNAVDTHVEYAAPTTSGRSLVRKIEVVESPMRNWLNWELATRYDYQCVDTPEALDELKAHEKGVTLAGLVKLATNRHDTTTRWEKDDRFSLTDRRHWYLGSNNDAKVELLLTMQQGQRKQVEAHKRVIAEIAKTRKLRNLEFNWATSMTSLTYQDVDVAGAQATIDDLEAGRKALSSSPEAATLTAQLDAARTELKAAERDEQDATGRRSVAENNLQKQQDLLQELDEEDQADPIDTTDELLKEVRALLWEKNRRINLAVNEVQSDCQRSIKRADTTLQRATNSIVSTLSAYINQWGSEAADLAADVNFLGDALTRLGQLKGERLGEFSNQFRDLINDMSTRALGQLAHAIRSAKDDIERRITPVNASLAQSEFNRGRYLQIDVRDARGDEAKTFLRDLDAAISGGLSTADDAQSIKRYQAINAIITRLSSAEYAEQRWQHTVLDTRRHVRFIGVESEQDGTIVNTYADSTTLSGGQAQKLVFFCLAAALRYQLADDGHTLPNYATVVLDEAFDRADPTFTRQTMDVFAQFGFHMILATPLKLIQVLGNYVGGSIVFDYKEEADENGNVRGVSRYSTIGITSHADA

SEQ ID NO: 33571 - protein, 485 aa, Massilia sp. BSC265
MDYHQLVLQRRSHPAWRLLAADHAPMIASFLHRSFVAPNMRTIPRQELAAQLDDHLFQLHEAEGQGLYPKSATAYLDDWASDERGWLRKYYPPGQDEPHYDLTSPAEHAIEWLDSLGQRAFIGTESRLMTVFDLLKQIVDGTELNPRTRIEELQRRKAEIDAEVAKIREGRLDLMEPTQVRERFLQMTATARELLSDFRALDQNFRALDRNVREQIATWDGGKGELLQQVFGWRDLIADSDEGRSFRAFWNLLMSPSRQDELSRLLERVMQLGPIRELEPDGRIRRIHYDWLEAGEVTQRTVARLSAQLRRYLDDQAWLENRRIMELIRNVEQKALALRGQVPDRAFAEVDEPAPELGLPMERLLYTPAFKADIRNLTMEDAEVDIVTDALYEQVHVDQARLLANIRRALQTRAQVSLAMLVEERPIEQGLAELATYLKLATQEVSAVIDDERTELVHWTDGAGRQRRASLPLVIFTLREHTTDE

SEQ ID NO: 33572 - protein, 197 aa, Massilia sp. BSC265
MNDDDRFGPLLVNLFQGVLYREQAAAPWQALLDLQARVRDYCAVIGLDLILDEAEGYAYLRQRPRSPDEAELPRLIQRRPLSFPVSLILVLLRKKLAEFDATGGDTQLVVSREDIAEQMRLFLPDTANEARLLDRMETHLNKVVELGFLRRLRGQEAQYEVRRILKAFVDAQWLDDFGKRLDAYASHAASAIGEENA

SEQ ID NO: 33573 - protein, 406 aa, Massilia sp. BSC265
MTVQQLSKWSGPDAIAAGVRQLWDSGAILRARLEGSSIFPLELRLRQPGGAEMGQAFEAVRTWIGALVGMAREARGFGYELVWRDINHRQLGRNRIPVAARIPSEEDALRLIGRGADVRRFDRLAGMTLDAFPILRPWLLRQPLKPLVYADAWEAILAVLRWFRAQPRPGIYLRQLDIEGVDTKFIELHKALVAELLDEIMPPETILANANGARQFESRFGLLIKPTLIRFRLLDPDYYIGGLSDVSIPVAHFAALETGVERIFVTENEVNALAFPPVRAGMVVFGGGYGIDRLAQAGWLSSREVMYWGDIDTHGFAILDRFRLHVPHARSILMDRATLDAHRPLWGAENAAARHTGELGRLTEDERQLFVELRDNVHAANLRMEQERIPYAWVVDAIRSALESPR

SEQ ID NO: 33574 - protein, 505 aa, Bifidobacterium angulatum
MGDIRSEMERLRPVYETGVLRLLMRANSQLYVALLRSSFDPLTGELPREVLEERFTRALSQLVESGDYAFKDDQTLPDAAHRILVELSREGDGDYAWLANSLDVASHRYLYRLTARAHRAIEALSHLEDTTQALSGAQANSIIMEIEHARMQLTADPHKRIELLNREIEERQKEIEQLEQDGAVEQLSSKQVEDIINVVHNTLRGVPIDLRELALAERDNGDALRRRMQAGAMSVENILSAYHDEYRRSFRESDSGRRFEDAFQVIVTEEGRREIDDAVRDIAKNPYLDGEPGVLLNQVRAELERIYEGIEDVRHQMRASDEAVSRLVRQQTDTRYRTMLGKLNALFAKISGEAKANPNSASRPYHTDTGAVQLAVLPTRPAKPMIHAAPPSLQERESVPTVDSPDLKAMIEVGGPRLRHMMDVIRRSPRMLADGRVDLAASFNALPERERRESEIVGFLSALHAQSDAQYVQWHCVSLDGTPRVWRTKPIAASMQTLDEIVGEE

SEQ ID NO: 33575 - protein, 342 aa, Bifidobacterium angulatum; identical to SEQ ID NO: 30942

SEQ ID NO: 33576 - protein, 1165 aa, Bifidobacterium angulatum; identical to SEQ ID NO: 30943

SEQ ID NO: 33577 - protein, 405 aa, Bifidobacterium angulatum
MSMSSRNAGSVTERERRLAARTEQWLVGKVEDYLDKQRFSANPQWPYEFNVKQPSKSELIRDSDTCIAQARAIRSWAQSYGCRYGEKSRSLGAYCGTTPLVTRVCVPGEHEALEIAGRQCAHRYCATQQRFSCLRGEFDVSEDVLAAVVYKLKDMDDLDFELVCQAAHYFARHDASGMRPRAVAIPGFSAKWLGGKGSVRRKAICLLLGRESLDFEERPGEIRLRYLDSAHCGYPDLYVTQPWRTADCARFRYAVIVENKDTYQEMPQIDDCICVFGCGRAANRMVSLLPWLADTPHVVYWGDMDADGLEILSGIRESGIDCDSILMNMDVYRRYRRFGTEYTEQGRRIEPRKVGAVPGLRAEERELYEALCTGEGVEYLRIEQERIPIVDAVAELCAAGFPIVV

SEQ ID NO: 33578 - protein, 506 aa, Bifidobacterium bifidum; identical to SEQ ID NO: 30917

SEQ ID NO: 33579 - protein, 345 aa, Bifidobacterium bifidum; identical to SEQ ID NO: 32843

SEQ ID NO: 33580 - protein, 1196 aa, Bifidobacterium bifidum; identical to SEQ ID NO: 32844

SEQ ID NO: 33581 - protein, 518 aa, Bifidobacterium choerinum
MADVRTELAQLRPVYETGVLRMLLHKYADVYIAMLRSCFDPLTAEVPQERLLSRMREAIGELATAGEYAPREGEDDMMAARRILKELKSEDAGDYAWIADSLDRRQHRIMCRLTQRAHRAIEALATLQQRTVSMSGAQVNSIIMEIENARKQLTVNVGERIELLEHEIAQRQRQIDELRAHGIEDRPTREQVSDIINVVYNTLRGVPVDLRELVIAERDSGDALRRRIDDGTMSGDEMLTFYHEQFGRIYNLSDEGRRFNDAFQVMYAPESRAELNEALQDISNSEWLHGEADDLMSVVNREFDDIYRGIDDVRRQIRVTDESIRLIVRQQTDMQFRTMSRSLAKLFTRLSDEARTKSKRRFDAGIAEASLPTLRRRPRQTPARVVAPALAETTVAPAADLAAIVAAGGPRVRHMVGLIAANPVRRGDDVDMAASFNALPADERRESEVVGFLSYFGGDDDATKSDGVGEHVWCCVGSDGRERRWRTRALLVPCGALDEFLKETAAAPMTAAVRGRTA

SEQ ID NO: 33582 - protein, 400 aa, Bifidobacterium choerinum [sequence omitted]

SEQ ID NO: 33583 - protein, 1193 aa, Bifidobacterium choerinum
MNMTTDDLYSPIELLPRHWMLKERQLVNWGSYDGRHIFRPSMAEDGTVTLLTGQSESGKSTLVDAQVSLLYPANAAFNKASNAGRSDRSDYSYLLGLRGIRNNNGHDEPLYLRGHDANGDPYAVWGAIVDEYEDTANSGSLWIAKFMWLPADGASESMTKLYAVREAPIDPGLLDARRDEKFTIPMLRQLYPGIVAYNSARQFHEDVWKRFGLTEAACRLLHRMQASDAPSQLDDIFRKGVLDEPRAIRSGRDAVDDYEQYAQNFSSMERNRTRVRQLEAIVDEYDQYEAADSGVRALRAIDPERDEAADLRAQWLDMRLTQDVVDVLPAHEALAERSAEAVDTTQARVARLEDEVASLTRQLNGSGGDEIEGLEHDLAQAKQDMGRVVERAERLAPYFTKAGEKLPATGDEWRRLADDYMARDREYETCRETLKRRQYEAFDAHKQAQGRLDELNRDYTRKERSRTRITKEMDETRAMIARATGLKVSELPYVAELMDVADDAEDWRAAMNVVYASIAPILLVDRRHEDGFAAKVSTIPREAMPRRNWQFVDVDDDADAAPREGWLSGRLTFNDESPFAAWVRRRVADPRTDARCVEAIDDLDEDGRQVQRDGQIKDGRRGSHGTKGMAAVIGFVTERYLAELRHEIVQAGDALAHADARVGELDAEARGLDAAHALAERLRDYDWQDVDANGVQLRIEELLARIDELKSDPQIAQISAALGAANKELAAARAAAYGAEDDRRCAQAALATSRQWIADRRQRGSDAPAVDEACATLLERCYLAYFGDGTKEAGERVRRLLALDDQANGSHGGHARANATSARRFMELKTSVADGVRARLGELAGQRDARRRSCEASMRAYLDQYAAGDTRIDADVENAQYFMHDLDELKPNMISDEAVHVEYFNSLNKIYQDLAELQQMLKVDTQRIREQTNKINRLLERYPFGARRGRLSIVVQVRNPDAAFIAALGRQVEQMSAFRESGSRDVERCKRLFTGCASFIAQLKGSFDDYAGVGRGNTNLDPRRRSRFFGSVAHPDGQIEHINSTGGGSGGYLQELTSFAYGAALMYLLANDNATKPSYATVFLDEALIKADGQYTRRALSVLPGLGFQVIVSAPESKTNEIMGSASKVVVARKDPDSGRTVLEIARIDGDGNGGDGDSDDGSGGDGETVAHDVAAAEVDDADAAAAHDGDDA

SEQ ID NO: 33584 - protein, 392 aa, Bifidobacterium choerinum
MGAARVAHPRGTATPDELRAWVAGIVEREMFAADDPWPRTKAVHWPKESELLADVNAVHDANNALKDFAARHGCGVTCTARRVGARVMLVDHVTVPDERVALAIAGHRLRRERERTLARAAQLEETCGVTPEVAMPAVRRLRDETDVDFALFTAAAAWFGAHRGDIAAMTAREVPLEGFSAKWLGGARSQRRSAICTVLGVDALPLRERPEELRYRHLDPAAAGDPDRIAVTPQHEPERPVRRAIIVENKDTYQAMPAFVGAVCVFGSGFAATRVARLLPFLADCDVVYWGDVDAAGFEILSAVRASGIDCTSILMDRATYMRFMRFGTRLDARSHMIGAHEPLARTAMRLDDDEYALYRTLCAAGESQVPRIEQERIPIAHAVAALRAIGW

SEQ ID NO: 33585 - protein, 508 aa, Bifidobacterium biavatii DSM 23969
MGDVRREMERLRPVYETGVLRLLLRKHSMTYVALLRAAFNPLTGELPREILEERFAQSLSSLIDAGEYALEEDQDLIGAAHQILVDLTREGNGDYAWLANSLDMASHRFLYRLTARAHRAIEALDRLQDTTSSLSGAQANSIIMEIEHARMQLTADPSERIRLLKAEIAAREHEIEQIRQGRQRDRLSDEQVGDIIAVIHKTLRDVPIDLRELALAERDNGDALRRRMQAGDMDVNDNLTSYHDAFRRSFSESDSGRRFNDAFQVIITDEGRQQIDDAVAAIAATPYLAGESSVLLDQVTAELERIYDGIEAVRQQIRVSDEAISRLVRQQTDTRYRTMLVTLNRLYTTINAAARTHPNDDTRPYRTDVGDVTFAGLPTRPARSMSRAAVPGLDEHATPVNIPEPDIRSMIVGGGPRIRHMVRLIMRDPVTVSGPNGSELVDIAASFNRLPADERRESEIVGFLSALASVEGDDTVWHCISLDGTPRDWTTRRVTAGIDELNETIKEG

SEQ ID NO: 33586 - protein, 238 aa, Bifidobacterium biavatii DSM 23969
MGDDNATAALFEGDTGDMSAPARMAAIALKRDRYISGTAYDTAMDNLDQVTRSLNNDMLELVVNERYRIMYATPVPDADQNPRSLKTRVSLRREEAALLAFLRIRVLEYENLHTPADEWFVSFEEIRAALATGAGYLASRNDEEGVLKLIGAIVSSLTTYGYLERSADDETMLRITALVPVVLDRDLAQTWLDGRDEIDDEDADAGSDAPAGDGGIDDANGAAGMDDADDDAGDKEGE

SEQ ID NO: 33587 - protein, 1164 aa, Bifidobacterium biavatii DSM 23969
MTDTMSEPTMPDGVRDIQIVPDRWMMESRQLVNWGSYDGYHVFRPSTDDKLPVTLLAGASESGKSTLVDAQISLLYPSGTPFNKASNSGRSERSDYTYLRGMIGVGDTDDAPMYLRGTDADGMPHSVWGAIVDTYRNATTGQTLSCGKFLYLMPGEGRGDVRRQYVTWNRTIDPRLMDQFRDGPFTSTQLKATYEGCSIFSNANAFHARIWGVMGLTEEACRLLHKIQSADAPSRLDDIFKQGVLGVPAAIGKAEDLVGDYERYAANFNSMEEKARRMQMLQGIRQSHEQYDQAQANVHAFDVVDPNGERGRAAIRRWALAHMAEEVTAQLPHDEYERDRHMQDAAAEHAHGDEITARIDAVKAQIQGVDGGSLARLELDLTQARQTLHAVSDSHDRIARQFATIGETIPDTRDAWQERQEQAARFVTDYERRRTQLDHDQYEAASARSQANDELNRLTRDYERQRTQRTRISQQMDEERAMLCRATGLSAEELPYVAELMDVREDEETWRTAMNVAYGPIARTILVDQRHEQGFAARVSTIDPHLMSRRTWRFVDTSRDYGHTNTAAVHTGDEPWLSGKLRYREDSPFAGWLREQTADKRYDAVCVDAIDDADEQTRQVQCDGQIKSGRHGQHGIKDIRQVIGFVNQTYLDELLRQAQDAKTAFAEADRSYETIRQQAERLRRELALAENLTETDWDSVAVQEAEQRITRIEQDIDTIRRDPKLAELTATRERLEQELERSNSRRFKAQNAADSCAQAVDAARAWLERNAVADNATTDGSARIVFGDDVAERLGAAYERQFAGQTDPATRAHLIIGAGRTDVADDMRFENMMVDQIGKEIDSRRTMLAEQADAARKTLESQMQAYRDVYAKDDDALTATVADYRYYEQELDSLSHLAASDATEAEYANCLHKLYWDALTLQRTLKSDEATIKEQLSRINSMLTGQQFGPKGGRLSLNVTVRPPERAFGMALRRMSETLTAWEQQPDADVIALRKTFGSCRPFIDMLHDQLDQVKDSGGIKQYGARDLDPRARSSFYATVHHTDGPDERITSTGGRSGGALQELTSFVYGAALIYLLGEGSVTGEPSYTTLFLDEALIKADGRYTKRALMVLPRLGFQVIVSAPESKTGEILDVSTKAYVTYKDPDTGHTTLREASLDTTGAGE

SEQ ID NO: 33588 - protein, 397 aa, Bifidobacterium biavatii DSM 23969
MRTVRDIAAMIGRRLSASRYADGDAWPYTVSVQLPSRQSDLEDAALAVHTDGNVHANNKAIRDWAARTGCETTVQRRLIGNVTVELISNVIVGDETVALRVVDRATAADYRRARRRLERIHERFGHIPATDALTAARMTDAEDDVDFELLLHVAAYCASHDIAGLRPRAVPLAGFSAKWLDRKATKRRKAVELLCGKSSLALDERPRELRFRHLDPTRVLLPDAVAVRPWDDGVALGIRCVVIVENKDTYQLMPPIRDGLCVFGSGKAAADGLTLLSWLFDERAANVHIVYWGDMDSAGFEILSAVRQLGIDCDSLFMDRTAYDRYGMFGTNDGPDGKPLARQQPKPLSGLRDDERELYEALCTGEDVAYLRLEQERIPIPDAAAALHDMGIPVVTD

SEQ ID NO: 33589 - protein, 502 aa, Bifidobacterium gallicum DSM 20093 = LMG 11596; identical to SEQ ID NO: 31079

SEQ ID NO: 33590 - protein, 262 aa, Bifidobacterium gallicum DSM 20093 = LMG 11596; identical to SEQ ID NO: 31080

SEQ ID NO: 33591 - protein, 1155 aa, Bifidobacterium gallicum DSM 20093 = LMG 11596; identical to SEQ ID NO: 31081

SEQ ID NO: 33592 - protein, 463 aa, Bifidobacterium gallicum DSM 20093 = LMG 11596
MADSGDQKMRSQFPDLERVRTQANRDLIRNLSDTMVPWPRRIPFRWPTQAILESHASACYAHERSVREYCTRQGLMRSEVTKRIGGRSVSLTGAIIIPDQEAALRVADVAIRKQYAQGMTRIRQLHDQLAVSDQTARRVIHLMRTESDIDFLLLIQATQCVSNVLKEMGYRLDSGFLDIGCEDCASTTTVPRCAPHVQCVTDEQGKTSRVIHLPWSARELPLAGFSAKWLGSQSSVRRRALTALLGLDGIQFVERPGELRLRYLANEYELLISKPWTPDTDHQVDMVIIVENKDTYQHMPNMPQFGRGVVVFGQGRVAQKLVSQLLPWITQVPVVYWGDMDADGLEILDGLRGSGVCAYSVLMDENAYAEYADFATALDAASRPIVLHAPKQTPSLTPDERDLYVALSEGGSHSEAPRIEQERIPLDVACRAIAAIMRNMQKENGMRPDEDADCCVDDQTGDR

SEQ ID NO: 33593 - protein, 543 aa, Bifidobacterium longum subsp. longum; identical to SEQ ID NO: 31042

SEQ ID NO: 33594 - protein, 224 aa, Bifidobacterium longum subsp. longum; identical to SEQ ID NO: 31043

SEQ ID NO: 33595 - protein, 1182 aa, Bifidobacterium longum subsp. longum; identical to SEQ ID NO: 31242

SEQ ID NO: 33596 - protein, 394 aa, Bifidobacterium longum subsp. longum; identical to SEQ ID NO: 31243

SEQ ID NO: 33597 - protein, 520 aa, Bifidobacterium pseudolongum subsp. pseudolongum
MADVRTELAELQPVYETGVLRMLLHKYSDIYIAILRACFDPLTAEVPQDRLLAAMTRCVGELVADGSYRVREGETDLEAARRILKELKAENEGDYAWIADSLDRRQHRWMCRLTQRAHRAIEALAALQQRTVSLSGAQVNSIIMEIENARKELTVNVHERIELLEREIEERRTQIAQLKRDGVQERPTPEQVSDIINVVYNTLRGVPVDLRELVIAERDNGDALRRQMDNGSMGSDDMLAYYHEEYERTYHQSDEGRRFNDAFQVMFATDRRAQLDGALADIAGSAWLHDKADDLMAVVGRELDDIYSGIDAVRDQIRLTDESVKLLVRQHTDMQFRTMSRQLAALFTTLSGRATAKDHTRYGIGLSTATMPTLATRARETPVKTKAPALRMHTDADASALDLHGIVAVGGPRIAHMVALIAEHPVMREGAVDMAASFNHLPKAERRESEIVGFLSYLGGTESGESTWHCVAPDGAERAWVTRDVLVSPDELDEFLQESTRTGQGAAPHRERTRHDTTDE

SEQ ID NO: 33598 - protein, 257 aa, Bifidobacterium pseudolongum subsp. pseudolongum
MTQPTNDDQGIVSASVTAQEGHVAEQSVDEMGVADVSNPFALFDGDDGDMPEPAREAAIALKRNRAITGEMFRQAMDHIGHVKRSLNNDMLVPVIDTFYEVMYAEPAAPSQVRIRSLKNRASLSAREAVLLTALRRKVLEYENVGMDASQWVVSKEEIVQLMSTGAGPLAGRNSEESVNRQVEPLINAMRTNQFLVDVEGEEGIYRITILVPVVLNTQRIGSWMATNDDLQPTPADQDEPGTTPENDAQAAKQEELW

SEQ ID NO: 33599 - protein, 1153 aa, Bifidobacterium pseudolongum subsp. pseudolongum
MVNARMSEDLYGQIELNPPHWVLQERQLVNWGSYGGYHTFNPSTMFDGTVTLLTGQSESGKSTLVDAQVSLLYPTGAAFNKASNAGRSDRSDYSYLRGQRGIRNDNGHDEPVFLRGMTDDGEPYAVWGAIVDRYEDTTGGGTLSIAKFMTLPAGGRSEDVDKFFLVSRDPIDPRLMDDYRDDVFSVPLFKRVYRTATVYRQANLFHEDVWNRFGLTESACRLLHRMQASDAPSQLDDIFRKGVLDEPSALHRGRALIGDYTQFSENFTAIEHNLRRVDLLERMADKHIRYMDERKRMETLRAVDPERAGSAEARKAWLGARVHECIARVAPTYEQGVAENQTKVASAQRETDRLDAELETIREQKNGHGGDRLQRLQEQLRDAERERERMSARIERLVPQFTKAGRTVPRTANAWQALAEEAVGVRDAYDERREELDALGYPLQERYSAMRREVEELQADIERKRRSRTRITKEMAEARTMMARAAGLEPEQLPYVAELMDVQGGEEQWRTAMNVVYASLAPVILVDKQYERGFARAISRIPHASMARRNWQFVDVQQDYHGEPREGWMSGKLTFNEESPFAGWVRARVADARSDARCVTHIDDSDVRTRQVQEDGQIKDGAHGSHGTKNISQVIGFVTEAYLRELADELERLERTMDRANGEIERISARKAELEAQRDLAQAVLAVDWNDIDVQTADTNIAMLHGEIERILADPALAELDKRERECKDALAGARKRLARAEDELAGAKHASRAARAWLEAHGDERPPALNEACTALLEQAFDGYFGTGTTGEERAARMLGLDAGSRAPGHGAAAGTAVNATLHALGKHAEKAVRARLEELRGVCEARKSECETAMAAYIEQFMANDDRVSADVENFQVFEHDLRELNASTIRASADEEYFHSLEKIHQDLMQLNTALDADRSKILEQIGKINRLLERYPFGARCGRLSIEPQVSKSDPQFLAALRARLADLNAYQQQGRKDIEQCKQLFAACAPFVELVKASFDEFAANKRGNANLDPRRRSRFFGEVTDPDGTVERINSTGGGSGGYLQELTSFAYGAALMYLLANDNATEPSYATVFLDEALIKADGQYTRRALSVLPGLGFQVIVSAPEAKTGEIMASASKVVVARKDPENGLTELRAAVLGAGDDDAS

SEQ ID NO: 33600 - protein, 375 aa, Bifidobacterium pseudolongum subsp. pseudolongum
MTTPADIAGAITRRVERRLYCTQENCPHAFPVRLGSQRALEADPITTFDADNAMRAWAERHGCRIETVTRRVGTPVDLVARVVVPDEATALHAAGREVRARRELVVARMRMVCARFGVDGTQAMAVVKMLSGESDVDFELFVRAAQWFATHRDLIAGMTAREVPLPGFSAKWLKASRSRRRRAICTLLGWSELPLRERPGELRYRYLDEACAAWPERLATAPVSAPETPIDTVLVVENKDTYQAIPAMPCTMGVFGSGFTVTRLRTLLPWCAGDGVRMVYWGDMDADGLEILARLRATGVACASLCMDRETYDAYEPFGTTLDAHGSLIPPRDSKEGLCLTDEEYAFYRALCTGALPYPRVEQERIPIAQALARL

SEQ ID NO: 33601 - protein, 498 aa, Bifidobacterium ruminantium
MERLRPVYETGVLRLLLRGNSMLYVALLRSTFDPLTGELPREIVEERFARSLARLAETGDYTPKDGQTNAEAAHAILSQLTKEGEGDYAWLANSLDIASHRYLYRLTARAHRAIEALDRLEDTTKALSGAQANSIIMEIEHARMQLTADPHERIRLLERDIEEKQKQIDELKHSDTLDKLTSQQVGDIIGVIHNTLRGVPIDLRELALEERDHGDSLRRSMQSGTISVEQALGTYHDAYHRSFHESDSGRRFEDAFQVIVTDEGRREIDDAVRDIAQNPYLEGEPGILLAQVRAELNRIYEGIEDVRRQIRISDEAVSRLVRQQTDTHYRTMLDKLHRLFVRTNDDAKNHPGSAEFPYHTDTGMAQFQALPSRPAKSMARATTAGLQDAPTAEIDAPDLKTMVEMCGPRLTHMISLIRRDPVRTSDGMFVDIAASFNRLPRAERRESELIGFLSAMRAQDGSASAAWHCVSIDGGERVWRTRPVLASESTLDGIIEEG

SEQ ID NO: 33602 - protein, 276 aa, Bifidobacterium ruminantium
MTDDIDDQDVGAETMDGGETGYPSEEPTTPQTMPALFDGDTGDMPLEARRAAIALKRERYIDGSLYERACEYREAVERSLNNDMLRLVDNTKYRIMYASPVTDSETNIRALKTRVSLTREEAATLAALRIKVLEYENQKAEPGDWLISFDDIRAMLATGAGFLAASNDEEGTAKKIASVISRMRTYGYLADAGETNMYVITPLVPMVLDRDLADEWLGSGKMDDAGGMDDTGTEGLSDFDDENDMADSNGIPASDVEQDAFDFGMADDFFDGEENR

SEQ ID NO: 33603 - protein, 1152 aa, Bifidobacterium ruminantium
MTEDGMKIVSDRWMLRSRQIVNWGSYGGYHVFRPSMDADMPVTLLAGASESGKSTLVDAQISLLYPSGTPYNKASNSGRSERNDYTYLRGMIGISDGDDGETPIFLRGRDADGKPQNIWGAIVDTYVNRSDGGILSCGKFLYLTAGDGPDGLRRQFVTHNQLIDPRLMDQHRDTPFTRGLMEQTYPGCTTHVNAAAFHASIWQDMGLSAEACRLLHKIQSADAPSKLDDIFKQGVLDVPESIRLARETVDDYNRFSENFHSMEEKAARVAILQNIQTRYGEYAKQLSERREYEPVNPDDEHGETTLAAWTRSRMASEVRSGLPAAQSKAKESQEALNLSQQRIDDLNAQIEAVKERISGIDGGSLQQLGKDLKRARQDADEARRQRHDIAERFERIEGKLPTDEHAWDLKRAALAESNDTYDERLEEAQAKYRQLVGELHDRQRERDVLQRDYRRKLDHRTRISDEMDDARALIAQATGLDETQLPYVAELMDVDERDERWRLAMNVTYAPIAQTILVDKRYEQGFAAKVSTIDPTRMTRRTWRFVDTDARYDSASNEGWMSSKLRYKEDSPFVGWLKQQTSSDRFDARCVDAIDDMDRDERQVQVDGQIKSGDRGFHGVKGMHQVIGFMNERYLAELKSQLDEAGQAAEDADRRSRQMSNAIALLQDEHELARVIADMPWSKIDVDGLETKAEQIRRQIERIESDPELGQLQDELQRLRRQSDVEGKNRFQAEADLESAQRAVHAEQAWLDAYGDSDFDDSTLSDMVSNLLADAYENCFGTYVHAQDRPLLIAGGADSEGSMPFDKRMMRNIGRVIRKRIQETDERANTLRTDTESAMSEYLRRHTAEDDTVTASVEDYRYYLDELNMLNMLVTRAATDEEYVNSVEKLYMSFQQLNRALNTDEENVREQLGRINGMLKDQQFGPRGGRLSLGVKFGDVDRQFRRSLGDIMSKLDDWTRNGRDNPMETRKAFKGCEPFIGRLQDELNSIHDTNGIKEYGARNLDPRVRSSFYATVHHDDAPDEHISSTGGKSGGALQELTSFVYGAALIYLLGGDLTGKPTYTTLFLDEALIKADGRYTKRALTVLPRLGFQIIVSAPESKTAEILSIANKAYVAYKDPSTGNSYLQELDRENAQGESQEPTDKTTPLTEE

SEQ ID NO: 33604 - protein, 405 aa, Bifidobacterium ruminantium
MAKARNAKDGMSIRRELDEYVDAHLNRHMYDTEVSWPLRKTIRLPKQAELEDNYARVRAQDDVIRDWANRHQCETSEKTKIVSSGIVRQKSQLVDSVIIPDLDTALRIATRTTRERYLRERQRMRELADEFGISQDSALNVAKTLKDHDDVDFRLVIQAAHYFTRHDCHTMTPRMVPIPGFSAKWLGTPNSQRRKAICMLTGRDNLDFQERPGELRLRFMDAEHHGQPDLIITQPWIHNRPTDIAHAIIIENKDTYQAMPTAAHAICIFGSGYATLKRMTTLLPWVTDIPDIIYWGDMDADGLDILSKLRQTGIPCASLLMDPAAYRAYERYGTMLDTKNKPLTTRESKPTPQLTSEERGLYEMLCTGTNATYLRIEQERIPIADAAAILHDQYQWPIAMPDDTI

SEQ ID NO: 33605 - protein, 502 aa, Bifidobacterium scardovii
MADVRREMERLRPVYETGVLRLLLRQHSMTYVALLRAAFDPLTGELPRETLEERFAQSLSALADAGEYALREDQTFADAAHRILADLTREGEGDYAWLANAHDAASHRFLYRLTARAHRAIEALGRLEDESRTLSGAQANSIIMEIEHARMQLTADPGERIRLLNREIKDRKHEIKRIQQGQQHATLSEAQVEDVIAVVHNTLRGVPIDLRELVLAERDNGDALRRRMQAGDISVDENLTRYQDEYRRSFSESDSGRRFEDAFQVIITDEGRQQIDEALRDIAKTPYLAGESGALLGQIRDELARIYDGIEAVRHQMRVSNEAISRLVGQQTDTRYRTMLTRLNRLYAAVSADARAHPGDGARPYATGTADGPIAPLPMRPAKSMTRAATPGLHDTPAPGAAVDLRVLIGNGGPRLRRMATQIRRDPVMRGGLVDIAASFNRLPETERHESELVGFLGGLRGADGADAAVWHCVSLGGEPRDWTTRAVLADPDELDDIVEEG

SEQ ID NO: 33606 - protein, 273 aa, Bifidobacterium scardovii
MTMSDDNPYALFEGDRGDMPADARRAAIALKRERYIDGTLYELALDHYDAVTRSLNNDLLEPVINERYRIMYAAPVAGEDVTLRSLKTRASLKREEAALLAFLRIRVLEYENMRVAADEWIVSLEEIRAALATGAGHLSARNDEEGVLRQIGALISAMNTYGYLERLDDDTMLRITPLVPAVLDRELADAWLGVAAADEDDETDGPGSDPSRDGTDDGPDDGDAEPGGTGEPGGGPDGGNGRRSPGMVDEPLFGDDALDDDALGGEAADGEGE

SEQ ID NO: 33607 - protein, 279 aa, Bifidobacterium scardovii
MTMAAKDMQMIADRWMMESRRLVNWGSYEGYHEFRPSTDGRLPVTLLAGASESGKSTLVDAQISLLYPTGTPFNKASNSGRSERSDYTYLRGMVGVGNTDEGDRPIYLRGLDDNGAPQAVWGAIVDTYRNTTTGQVLSCGKFLYLMPGDKGSEVRRQYVAWDRPIDPRAMDRFRESAFTPSQLKTAYPECLTFPSAEAFHTHIWSVMGLSADACRLLHKIQSADAPSRLDDIFKQGVLGVPEALDLARSTVEDYERYDENFRRTMEQKARRMDALQASN

SEQ ID NO: 33608 - protein, 505 aa, Bifidobacterium stercoris JCM 15918
MADVRREMERLRPVYETGVLRLLLRGNSMLYVALLRSTFDPLTGELPREIVEERFSRSLTRLAETGDYTPKEGQTSAEAAHTILQQLTKEGEGDYAWLANSLDVAAHRYLYRLTARAHRAIEALDRLEDTTKALSGAQANSIIMEIEHARMQLTTDPRERIRLLERDIEERQKQIDELKHSDTLDKLTSQQVGDIIGVIHNTLRGVPIDLRELALEERDNGDNLRRSMQSGSISVEQALGTYHDEYHGSFHESDSGRRFEDAFQVIVTDEGRREIDEAVRDIAQNPYLEGEPGILLAQVRAELKRIYEGIEDVRRQIRISDEAVSRLVRQQTDTHYRTMLDKLHRLFVRASDDAKTHPGSDERPYRTDTGTAQFQALPSRPAKSMARAATAGLDDAPSTNVDAPDLKAMVEMCGPRLTHMIGLIRRDPVKTADGRFVDFAASFNRLPREERRESELIGFLSALRTQDGPATVTWHCVSIDGGERVWRTRPILTTEAALDEIIEEG

SEQ ID NO: 33609 - protein, 279 aa, Bifidobacterium stercoris JCM 15918; identical to SEQ ID NO: 30436

SEQ ID NO: 33610 - protein, 1152 aa, Bifidobacterium stercoris JCM 15918
MEDGMKIVSDRWMLQSRQIVNWGSYGGYHVFRPSMDDAMPVTLLAGASESGKSTLVDAQISLLYPSGTPYNKASNSGRSERNDYTYLRGMIGISDGENGETPIFLRGRDADGTPQNIWGAIVDTYANRSDGGLLSCAKFLYLTAGDGPDGLRRQYVTWNQTIDPRLMDRHRDTSFTRGLMEQTYPGCTTHVNAQAFHASIWQDMGLSAEACRLLHKIQSADAPSKLDDIFKQGVLDVPESIRLARETVDDYNRFSENFHSMEDKMERVAILQDIQARYGEYAKQASERREYTPIDPDREQGETTLAAWTWSRMASEVRAGLPSAQRKAKESQDAIDRSQQRIDELDTQIEAVKERMNGIDGGSLQQLGKDFERARQDADEARRQRHAIAERFERVEGRLPADEQTWNAKCAALALSLDTYDKRLEDARSEYQRMVVERHARQGERDLLRQDYRRKIEHRTRISDDMDHARTLIARATGLDETELPYVAELMDVDEGDEQWRLAMDVTYAPIAQTILVDKRHEQGFAAKVSAIDPTRMTRRAWRFVDTDAQYDSACNEGWMSSKLRYKEDSPFVGWLKEQTASQRFDARCVEAIDDMDRAERQVQVDGQIKSGDRGFHGVKGLRQVIGFVNERYLAELERQLDGAERALEDADRRGRQMANAMTLLQDEHELALTVADLPWGKIDVDGLETKAERIRLQIERIESDPELAQLQDELKQLLRQKDDEGKNRYRAEAELENAQHAVQAEQAWLDMHGDSDFDDAALSDMVSNLLADTYETCFDTSRPQERPQRIAGGFDREGTAPFDVRVLRRIGNTVRARLQQIDERAVQLRADTERAMGDYLKHHSTEGDTVMASVEDYPYFLDELKNLNMLVTRAATDEEYANSVEKLYMSFQQLNRAFNTDEENVREQLDRINGMLKGQQFGPRGGRLSLHVDFHPIDRQFKSSLGRIMSKLDDWTRNARSNPMETRKAFAGCETFIGRLQAELGQIRDTNGIKEYGARNLDPRVRSSFYAIVHHNDLPDERISSTGGKSGGALQELTSFVYGAALIYLLGGDLTGKPTYTTLFLDEALIKADGRYTKRALTVLPRLGFQIIVSAPESKTAEILSIADKAYVAYKDPATGNSYLQELDREPATQAETQDATVEQTQPATEA

SEQ ID NO: 33611 - protein, 411 aa, Bifidobacterium stercoris JCM 15918
MAAARNTTGETDIRRKLDEYVDAHLTRHMYDTDESWPLRKTIRLPKQAELEQHYNQIRAQNETIRDWARQHHCETSEKTKIVSSGLIQQKSPLIDSVTIPDLDTALRIATKQTRERYLREHDRMSALAKEFGLEPANAMNVAKTLKDHDDTDFHLVIQAAHYFANHDCHTMTPRMAPIPGFSAKWLGAPNSQRRKAICQLTGQDNLTFQERPNELRLRLMDAERHDQPDLIVTQPWVRNQPTDIEHAIIIENKDTYQAMPTVEHAICILGNGYAATSHITTLLPWLTTIPNIIYWGDMDANGLDILSKLRATGIPCTSILMDTTAYRTYEQYGTQLDAKNKPLTTQTPQPTPGLTTEERKLYETLCTGTDIQYLRIEQERIPIRDATTILHDQHHWPIDIPGNDIPNNNTK

SEQ ID NO: 33612 - protein, 509 aa, Bifidobacterium thermacidophilum subsp. porcinum
MSDVRAQLERLRPVYETGVLRLLLRNHAMTYVALLRTCFKPLTAELPKETLEVRLAGALEELAHDGEWQFKDGETAQDGAHQTLVELTREGEGDYAWLANSYDPASHHYLYRLTARAHRAIDALSQLEDTTRALSGAQANSIIMEVENARKRLTVDPSERIALLESEVKEREREISRLRNGESVESLSDKDVEDIIAVVHNTLRGVPVDLHELALEERDNGDALRRRMQENSMSVDEILTAYHERYRRSMRESDSGRRFEDAFQVIVTDEGRRQIDDAVQDIAKSPYLHGEPNQLLNQVRAELKRIYEGIEDVRHQVRVSDEAVSRLVRQRSDTRYRTALDTFNRLFATISQEIKAGASSPSPYSFDVGDATLLALPTRPARPMAFAAPPSLDAVSSVQDDDNPGFADVDLRAMVEAGGPRLRHMLSLIMQDPIMRDGRVDVAASFNQLSDSERRESELVGFLGALRVDDNGQFSTWRCVSADGTTRAWRTRPVLADVGVLHEIIEEDA

SEQ ID NO: 33613 - protein, 298 aa, Bifidobacterium thermacidophilum subsp. porcinum
MTDELDDMMAAMGTARMDGDADAMVDAHEDGSGETDGVSNAGRDTDTIGDIDPADNPHALFPGDTSTMDADARAVAIALKRDRFITGDAYETALDHVDEVRRSLNDDLLELVDVPRYQVMYARPVTADGLGMRSLKTRASLTREEAAMLALLRIRVLGYESSRESSKDWIISTDDIRAALTTGAGWLAARNDEEGVMKRIGIAISRCVTYGYLAPVEDTDDMYRITPLVPAVLTTELAEQWLGENENSAAGSADDPEEDVQITANTDTSDIADTTYTNTADGLNAGATAAQTGEETRL

SEQ ID NO: 33614 - protein, 1202 aa, Bifidobacterium thermacidophilum subsp. porcinum
MTDEALMADHWMLASRQLVNWGSYEGYHVFRPSMDPDMPITLLAGASESGKSTLVDAQNSLLYPAGTAFNKASNSGRSERSDYTYLRGMTAVADDAEGGTAVYLRGSAEDGTPSAVWGAIVDTYVNRMGGEMLSCAKFLYLSPGDERGNVRRQYVSWNHEIDPRKMDGYRSSPFTADQLRKVYPGCAVYSNAENFHESVWTRMGLKAAACRLLYKIQSADAPSRLDDIFKQGVLDVPNALTKAREAVEDYDRYAENFRSMEENARQMDALREIRDEHAEYDKAARQARDLQVTDPQDDAGLTTLRSWVFSRLASAVRDQLPQDRRELERQQEQCRKADTTVENVQRELGEVTEMMHGAGGDTLTHLENEHEQALQELERMRHTVGRIRQAFARADEPMPQSEASWEQRRQEAQDFIEDANVQRDELQRQRDACVVRRKGITDRLDPIKRDFERQSRKRTRITQDMEDDRAAIAQATGLSERDLPYVAELMDVRKGEERWRTAMNVAYGPIAQIILVDRRYERGFARKVSTIDPSTMFRRTWQFIDIDDIDYQSGAKEHGEDGEHDDRLSGKLRFREDSPFLGWLREQTTSRRLDALCVEHIDDADTARQIQPDGQIKAGQRGSYGTKGINQVIGFADEAYLRGLKQQIDRLSEQLRQCELDGEDIKRQQSHLDELRTLSSQIADLSWTEVDEAGTEANVERLERDIDTLRNDPKLAQLAERRDQLQHALRDALDSQANARFAATNTQQAVDAAEAWLTERAGQIADTAEQPTLPDTVTELLSTAYSAATGSVAGELAHMTVLPGQPGIRRFDERVLGMVGNAITKRISEASTQANKARASVERRMSDYLARWAADDTTVTPTVDDYRYYEDELRDLSKIVAKAATPEEIANSVDKMQRDFNELSMSLENDQREVREQLDRINSMLRDQQFGPRHGSLTLDVTIRPRSAAFNGTLRRTIGRLNSWQAEQPSGGASDSRTAKRAFDSCKPMVELLRSELGKVRDTAGIRQYGARDLDSRARSSFYAVVHHDDGPDERISSTGGKSGGALQELTSFVYGAALIYLLGGDISGHPTYTTLFLDEALIKADGRYTQRALAVLPRLGFQVIVSAPESKTGEILEMATRGYVVLKDERLHSHLQELDLVGAHADGGPFEQRNPSAGKSSTGTAASSIPADAGNADDTVETSNVTSSGDSTASSSGKPQS

SEQ ID NO: 33615 - protein, 412 aa, Bifidobacterium thermacidophilum subsp. porcinum
MNARTAPTEIRDAVTRYLQRRRYDAEPRWPLVFSVRWPDQRTLTAQAPDWHRANNALREWAQRQGCPVTNKHRLMVTPVELIDTVTVADEQTALRIADRTSARHYRKARQRIDLLADECSIPRDTAASVAKMLDSESDVDVTLVIRAAQFFGTHDATGLTPRQVPLAGFSAKWLDQTHRRNVICTLCGKDSLGLSDRPPELRMRWLDPAYSNEPEMMITRPWRPGGEHDIRYVIIVENKDTYQSMPDIAHGLCVWGAGKAILASIALLLPWLTTARPDDGDDSSPQVVYWGDMDADGLEILDAVRHTGVRCQSLFMDLEAYQRYSWFGTNLTSTSTPLTSREPKATPTLDFGERELYLLTCGEAVGQSGESGLSDGPTHLRVEQERIPLIDAAEALRSLGWPIAANNDKETQ

SEQ ID NO: 33616 - protein, 509 aa, Bifidobacterium thermacidophilum subsp. thermacidophilum
MSDVGAQLERLRPVYETGVLRLLLRNHAMTYVALLRTCFKPLTAELPKETLEVRLAGALEELAHDGEWQFKDGETAQDSAHQTLVELTREGEGDYAWLANSYDPASHHYLYRLTARAHRAIDALSQLEDTTRALSGAQANSIIMEVENARKRLTVDPSERIALLESEVKEREQEISRLRNGGSVESLSDKDVEDIIAVVHNTLRGVPVDLHELALEERDNGDTLRRRMQENSMSVDEILSAYHERYRRSMRESDSGRRFEDAFQVIVTDEGRRQIDDAVQDIAKSPYLHGEPNQLLNQVRAELKRIYEGIEDVRHQVRVSDEAVSRLVRQRSNTRYRTALDTFNRLFATISQEIKAGTSSPSPYSFDVGDATMLALPTRPARPMAFAAPPSLDAVSSVQDDDNPGFADVDLRAMVEAGGPRLRHMLSLIMQDPIMRDGRVDVAASFNQLSDSERRESELVGFLGALRVDDNGQFSTWRCVSADGTTRAWRTRPVLADVGVLHEIIEEDA

SEQ ID NO: 33617 - protein, 298 aa, Bifidobacterium thermacidophilum subsp. thermacidophilum
MTDELDDMMAAMGTAHMDGDADAMVDAHEDGSGETDGVSNAGGDTDTIGDIDPADNPHALFPGDTSTMDADARAVAIALKRDRFITGDAYETALDHVDEVRRSLNDDLLELVDVPRYQVMYARPVTADGLGLRSLKTRASLTREEAAMLALLRIRVLGHESSRESSKDWIISTDDIRAALTTGAGWLAARNDEEGVMKRIGIAISRCVTYGYLAPVEDTDDMYCITPLVPAVLTTELAEQWLGESENSAAGSADDPEEDVQITANTDTSDIADTTYTNTADGLNAGATADQTVEETRL

SEQ ID NO: 33618 - protein, 1202 aa, Bifidobacterium thermacidophilum subsp. thermacidophilum
MTDEALMADHWMLASRQLVNWGSYEGYHVFRPSMDPDMPITLLAGASESGKSTLVDAQNSLLYPAGTAFNKASNSGRSERSDYTYLRGMTAVADDAEGGTAVYLRGSAEDGTPSAVWGAIVDTYVNRMGGEMLSCAKFLYLSPGDERGSVRRQYVSWNHEIDPRKMDGYRSSPFTADQLRKVYPGCAVYSNAENFHESVWTRMGLKAAACRLLYKIQSADAPSRLDDIFKQGVLDVPNALTKAREAVEDYDRYAENFRSMEENTRQMDALREIRDEHAEYDKAARQARDLRVTDPQDDTGLTTLRSWVFSRLASAVRDQLPQDRRELERQQEQCHKADTTVENMQRELGEVTEMMHGAGGDTLTHLENEHEQMLQELERMRHTVGRIRQAFARADEPMPQSEASWEQRRQEAQDFIEDAYVQRDEFQRQRDACVVRRKGITDRLDPIKRDFERQSRKRTRITQDMEDDRAAIAQATGLSERDLPYVAELMDVRKDEERWRTAMNVAYGPIAQIILVDRRYERGFARKVSTIDPSTMFRRTWQFIDIDDIDYQSGAKEHGEDSERDNRLSGKLRFREDSPFLGWLREQTTSRRLDALCVEHIDDADTARQIQPDGQIKAGQRGSYGTKGINQVIGFADETYLRGLKQQIDRLSEQLRQCELDGEDIKRQQSHLDELRTLSSQIADLSWTEVDEAGTEANVERLERDIDTLRNDPKLAQLAERRDQLQHALRDALDSQANARFAAANTQQAVDAAEAWLTERAGQIADTAEQPTLPDTVTELLSTAYSAATGSVAGELAHMTVLPGQPGIRRFDERVLGMVGNAITKRISEASTQANKARASVERRMSDYLARWAADDTTVTPTVDDYRYYEDELEDLSKIVAKAATPEEIANSVDKMQRDFNELSMSLENDQREVREQLDRINSMLRDQQFGPRHGSLTLDVTIRPRSAAFNGTLRRTIGRLNSWQAEQPSGGASDSRTEKRAFDSCKPMVELLRSELGKVRDTAGIRQYGARDLDSRARSSFYAVVHHDDGPDERISSTGGKSGGALQELTSFVYGAALIYLLGGDISGHPTYTTLFLDEALIKADGRYTQRALAVLPRLGFQVIVSAPESKTGEILEMATRGYVVLKDERLHSHLQELDLVGGHADGGPFEQRNPSAGKSSTCTVASSIPADAGNADDTVEASDVTNSGDSTASSSGKPQS

SEQ ID NO: 33619 - protein, 420 aa, Bifidobacterium thermacidophilum subsp. thermacidophilum
MTGIRARGVNARTAPMEIRDAVTRYLQRRRYDAEPRWPLVFSVRWPDQRTLTAQAPDWHRANNALREWAQRQGCPVTNKHRLMVTPVELIDTVSVADEQTALRIADRASARHYHKARQRINLLADECSIPRDTAASVAKMLDDESDVDITLVIRAAQFFGAHDATGLTPRQVPLAGFSAKWLDQTHRRNVICTLCGKDSLGLSDRPPELRMRWLDPAYSDEPEMMITRPWRPGGERDIRYVIIVENKDTYQSMPDIAHGLCVWGAGKAILASIALLLPWLTTARPDDGDDSSPQVVYWGDMDADGLEILDAVRHTGVRCKSLFMDLEAYQRYSWFGTNLTSTSTPLTSREPKATPTLDFGERELYLLTCGEAVGQSDESGLSDGPTHLRVEQERIPLIDAADALRSLGWPIAANNDKETQ

SEQ ID NO: 33620 - protein, 524 aa, Bifidobacterium animalis subsp. animalis; identical to SEQ ID NO: 31717

SEQ ID NO: 33621 - protein, 269 aa, Bifidobacterium animalis subsp. animalis; identical to SEQ ID NO: 31718

SEQ ID NO: 33622 - protein, 1153 aa, Bifidobacterium animalis subsp. animalis
MSETSDIYASIELMPPHWALASRQLVNWGSYDGYHVFEPSTAGDDTVTLLTGQSESGKSTLVDAQVSLLYPANAVFNKASNAGRSDRSDYSYLLGLRGIRSNNGHDEPVYLRGRSGKGEPYAVWGAIVDHYVDTANSGALWIAKFMYLPAEGTSESMVKLYVVSSYAIDPRLMDAHREERFSVPLIKQVYPGVTVYNYAKQFHEDIWKRFGLTESACRLLHRMQASDAPSQLDDIFRKGVLNEPRAVEFGKLAIDDYEQFAENFSSMERTRKRVRQLEAIASEFAEYESAERGVRELSAIAPQQGDSARIRTQWLDDRIHADITEVLPEYEQYATECSASAQAAKERAEQMREQVDSLNRQLQGMGGDEIGRLEDRIRDAQRRQREVLGRRELLASRFSASGEALPESRGQWDALVAEYTQLESEYQQRKTELHGLQYPLIDAQKKAEQRIKALEKDLERKRQSKTRISSDMDEARNMIARATGLSPQELPYAAELMDVGEENEEWRTAMNVAYRSLATVILVDSRHENGFAAKVSQISQEALPRRNWRFVDTSVHVEAEEREGWLSSKLTFNVESPFVDWLRARVTEARYDAWCVEAIDDTNETTRQVQRDGQIKEGRKGSHGTKNMPAVIGFVTDAYLRDLEADIAEAHKTRDAATRDLEQYDVQLNALEQRHSLAQTLQDHAWNDIDAYGVEEEIASLQQRVDELEQNPELAQLNATLKVQQQEMAKANSACYAAEDKLKRANAAVRSTRQWLEAYDRRTQSVERRHLNEACGRLLEQGYLAYFGESTQSANERMGRILGLDGQSGTSLGGHVRENEACAKHVRELLGTLAQTVGRQVKELATQRDNRKQSCEASMRSYLDQYASGDERVSADVENERYFRKDLEELKPGVIGDEATNVEYMNSLDKMLQDLVQLQTMLKLDQQRITEQIGKINHLLERYPFGARGGRLSIVVQVHRPDAKFTTALTGQIGRINAFKANDEHDVERCRKLFAGLAGLIEMLRGSFDEYAGNGRGNANLDPRKRSRFFGSVTNPDGVVESINSTGGGSGGYLQELTSFAYGAALMYLLANDNATEPSYATVFLDEALIKADGQYTRRALSVLPGLGFQVIVSAPESKTGEIMGSASKVIVAHKDQASGRTTLMQGDLLGGR

SEQ ID NO: 33623 - protein, 406 aa, Bifidobacterium animalis subsp. animalis; identical to SEQ ID NO: 31720

SEQ ID NO: 33624 - protein, 508 aa, Bifidobacterium thermophilum
MSDVRAQLEQLRPVYETGVLRLLLRNHAMAYVALLRTCFKPLTAELPKETLEARLAGAIEELSRSGDWQLKDDETAQDSAHQTLVELTREGEGDYAWLANSFDQASHHYLYRLTARAHRAIDALSQFEDATRALSGAQANSIIMEVENARKRLTVDPSERISLLEAEIREREQEIDKLRGGKAVESLTDQDVEDIIAVVHNTLRGVPVDLHELALEERDNGDILRRRMQENSMSVDEILTAYHERYRRSMRESDSGRRFEDAFQVIVTDEGRRQIDDAMQDIARSPYLRGGSNLLLNQVRAELKRIYEGIEDVRHQIRVSDEAVSRLVRQRSDTRYRTALDTFNRLFAAISRDIKDGEMSPSPYSLDVNAATLSPLPTRPARPMVFTAPPSLDSLSPETDDATRFAETDLRAMVEAGGPRLRHMLSLIVRDPIMRDGRVDVAASFNQLDASERRESELIGFLGALRVDDAGQFARWRCVSPNGTTRVWRTRPVLADTDTLLEIIEEDA

SEQ ID NO: 33625 - protein, 234 aa, Bifidobacterium thermophilum
MPDAVTEDMPAPSADVTADPADNPHALFPGDTSTMDIDARTVAIKLKRNRFITGDAYEMALDHVDEIRQSLNNDLLELVDIPRYRVMYARPVLAEDLGARALKTRASLTREEAAMLALLRIRVLGYESAREPSENWIISVDEIRAALTTGAGWLAARNDEEGVMKRINSAITRCTSNGYLAAVEGTDDMYRITPLVPAVLTTELAGQWLNDTRSGNDQHQSDDTVRDDEETRLS

SEQ ID NO: 33626 - protein, 1164 aa, Bifidobacterium thermophilum
MTDDALMADHWMLASRQLINWGSYEGYHVFRPSMDPGMPITLLAGASESGKSTLVDAQNSLLYPAGTAFNKASNSGRSERSDYTYLRGMTAVADDTDGGTAVYLRGSAQDGSPTAVWGAIVDTYVNRMGGETLSCAKFLYLSPGDERGNVRRQYVSWNHEIDPRKMDGYRSSPFTADQLRTVYPGCAVYSNAENFHESVWTRMGLTAAACRLLYKIQSADAPSRLDDIFKQGVLDVPHALTKAREAVEDYDRYDENFRSMEENARQMDALREIRDEYAEYHAMQEQARDLSVADPQDDAGRRTLNTWVLSKLAVSVREQLPQDRTTLEHQQEQYRKAETAVNALQRELDHIKDAMHDKGGDTLARMENDYAQAQKELDQVRHTAIRLRQAFSKVDEPMPQSETSWGQRQQEAQDFIDNADRQRDDLWRQREAYVTRRNTITSQLDPIKQDFERQSRKRTRITQDMEDDRAAIAQATGLTERNLPYVAELMDVRKDDEQWRTAMNVAYAPIAQTILVDRRHEQGFARKVSTIDPSTMSRRTWQFIDIDTTRDNDQTATTDESRLSGKLRFREDSPFLGWLREQTTSRRLDALCVQTIDDGNTARQIQPDGQIKAGQRGSYGNKNIRNIIGFADETYLQGLKRQIDRLTEQLRQCELDGQDIKRQQDHMDELRALSTQIVDLPWAQIDEAGVTAKVERLERDIDAMRNNPELAKLVERREQTQHALDNAMTSQVNAKFEVDRTQQIIDATETWLREHAEHIVEPAALPPLPDTVTDTLNSTYDAATGTAGDNLAHITVMPSRSGTRRFDERVLGAVSSALAKRIGEASAQAAKTRTAVERRMADYLSRWDADDTTVTPTVDDYRYYEDELADLSQIVAHAATPEEIANSVRKIALDFDELSMNLDDDQREVRNQLDRINEMLRGQQFGPRHGSLTLDVTIKPQSTTFSGTLRRIIGQLNAWQAEQPTGGSTDGSEARRAFNSCKPMIDLLRSELSKVRDTAGIRQYGARDLDSRARSSFYAVVHHDDGPDERISSTGGKSGGALQELTSFVYGAALIYLLGGDISGHPTYTTLFLDEALIKADGRYTQRALNVLPQLGFQVIVSAPESKTGEILEMATRGYVVMKDETQHSHLQELDLVGAHADGGAFSGPSADSAGPAGHPAEAH

SEQ ID NO: 33627 - protein, 410 aa, Bifidobacterium thermophilum
MAGSRARGVDAEKAPEAIRSIVTTYLARHRYDAVPSWPLMFAVRWPDQRTLTTQAPDWHRANNALREWARRCGCATTEKNRLMVTPVALIDTVGVIDEATALRVVGEQAARRYRKARERIDRLVVELDVSRETASVVANMLDRESDTDFTLAIQAARFFATHDVSGMTPRQVPLAGFSAKWLDQTHAKRRGAICALCGKDSLGLSERPVELRMRWLDPTDADKPEMMVTTPWQPGGERDIRYVIIVENKDTYLGMPAVRDGLCVWGAGRAIEASISLLPWLGMSGERGRETHVVYWGDMDADGLEILDAVRQAGVRCRSLFMDAEAYRRYSWFGTNLKPEGTPIATREPKATPMLDPSERELYQMACGADPSSRPDHLRVEQERIPLADAANALRSLGWPIINHQHQETR

SEQ ID NO: 33628 - protein, 508 aa, Bifidobacterium boum
MSDVRAQLEQLRPVYETGVLRLLLRNHAMAYVALLRTCFKPLTAELPKETLEARLAGAIEELSRSGDWQLKDDETAQDSAHQTLVELTREGEGDYAWLANSFDPASHHYLYRLTARAHRAIDALSQLEDTTRALSGAQANSIIMEVENARKRLTVDPSERISLLEAEIREREQEIDKLRGGEAVESLTDQDVEDIIAVVHNTLRGVPVDLHELALEERDNGDVLRRRMQEHSMSVDEILTAYHERYRRSMRESDSGRRFEDAFQVIVTDEGRRQIDDAMQDIARSPYLRGGSNLLLNQVRAELKRIYEGIEDVRHQIRVSDEAVSRLVRQRSDTRYRTALDTFNRLFAAISRDIKDGETSPSPYSLDVNAATLSPLPTRPARPMVFTAPPSLDSLSPENDDATKFAETDLRTMVEAGGPRLRHMLSLIVRDPIMRDGRVDVAASFNQLDASERRESELIGFLGALRVDDAGQFARWRCVSANGTTRVWRTRPVLADTDTLRGIIEEDA

SEQ ID NO: 33629 - protein, 250 aa, Bifidobacterium boum
MADDIADMMADLGASNMSGAVTEDMPAPSADATADPADNPHALFPGDTSTMDIDARTVAIKLKRNRFITGDTYEMALDHVDEIRQSLNNDLLELVDIPRYRVMYARPVLAEDLGARALKTRASLTREEAAMLALLRIRVLGYESAREPSENWIISIDEIRAALTTGAGWLAARNDEEGVMKRINSAITRCTSNGYLAAVEGTDDMYRITPLVPAVLTTELAGQWLDDTRSGNDQHQSDDTVRDDEETRLS

SEQ ID NO: 33630 - protein, 1164 aa, Bifidobacterium boum
MTDDALMADHWMLASRQLINWGSYEGYHVFRPSMDPGMPITLLAGASESGKSTLVDAQNSLLYPAGTAFNKASNSGRSERSDYTYLRGMTAVADDTDGGTAVYLRGSAQDGSPTAVWGAIVDTYVNRMGGETLSCAKFLYLSPGDERGNVRRQYVSWNHEIDPRKMDGYRSSPFTADQLRTVYPGCAVYSNAENFHESVWTRMGLTAAACRLLYKIQSADAPSRLDDIFKQGVLDVPHALTKAREAVEDYDRYDENFRSMEENARQMDALREIRDEYAEYHAMQEQARDLSVADPQDDAGRNTLNTWVLSKLAVSVREQLPQDRTTLEHQQEQYRKAETTVDALQRELDHIKDAMHDKGGDTLARMENDYAQAQKELDQVRHTAIRLRQAFSKVDEPMPQSETSWEQRQQEAQDFIDNADRQRDDLWRQREAYVTRRNTITSQLDPIKQDFERQSRKRTRITQDMEDDRAAIAQATGLTERDLPYVAELMDVRKNDEQWRTAMNVAYAPIAQTILVDCRHEQGFAHKVSTIDPSTMSRRTWQFIDIDTTRDNDQTATTDESRLSGKLRFREDSPSLGWLREQTTSRRLDALCVQTIDDGNTARQIQPDGQIKAGQRGSYGNKNIRNIIGFADETYLQGLKRQIDRLTEQLRQCELDGQDIKRQQDHMDELRALSTQIVDLPWAQIDEAGVTAKVERLERDIDAMRNNPELAKLVERREQTQHALDNAMTSQVNAKFEADRTQQIIDATKTWLREHAEHIVEPAALPPLPDTVTDTLNSTYDAATGTAGDNLAHITVMPSRSGTRRFDERVLGAVSSALAKRIGETSAQAAKTRTAVERRMADYLSRWDADDTTVTPTVDDYRYYEDELADLSQIVAHAATPEEIANSVRKIALDFDELSMNLDDDQREVRNQLDRINEMLRGQQFGPRHGSLTLDVTIKPQSTTFSGTLRRIIEQLNAWQAEQPTAGSANGSEARRAFNSCKPMIDLLRSELSKVRDTAGIRQYGARDLDSRARSSFYAVVHHDDGPDERISSTGGKSGGALQELTSFVYGAALIYLLGGDISGHPTYTTLFLDEALIKADGRYTQRALNVLPQLGFQVIVSAPESKTGEILEMATRGYVVMKDETQHSHLQELDLVGAHADGGAFDGPSAGSARPVGLPAEAH

SEQ ID NO: 33631 - protein, 410 aa, Bifidobacterium boum
MAGSRARGVDAAKAPEAIRSIVTTYLARHRYDAVPSWPLMFAVRWPDQRTLTTQAPDWHRANNALREWARRCGCATTEKNRLMVTPVALIDTVGVTDEATALRVVGEQAARRYRKARERIDRLVGELDVSRETASVVANMLDRESDTDFTLAIQAARFFATHDVSGMTPRQVPLAGFSAKWLDQTHAKRRGAICTLCGKDSLGLSERSVELRMRWLDPADADKPEMIVTTPWQPGGERDICYVIIVENKDTYLGMPAIRDGLCVWGAGRAIEASISLLPWLGTSGERGRETHVVYWGDMDADGLEILDAVRQAGVRCRSLFMDAEAYRRYSWFGTNLKPEGTPIATREPKATPMLDPSERELYQMVCGADPSSRPDHLRVEQERIPLADAVNALHSLGWPIINHQHQETR

SEQ ID NO: 33632 - protein, 498 aa, Bifidobacterium catenulatum DSM 16992 = JCM 1194 = LMG 11043; identical to SEQ ID NO: 31087

SEQ ID NO: 33633 - protein, 279 aa, Bifidobacterium catenulatum DSM 16992 = JCM 1194 = LMG 11043
MTDNTDGFDTGIGIEEETGPESGMPSEGPAMTRDRPALFDGDTGDMPLEARMAAIALKRERYIDGSLYDRACQYREAVERSLNNDMLRLVDNTKYRIMYASPVTDAETNIRSLKTRVSLTREEAATLAALRIKVLEYENQKTKPGDWLISFDDIRALLATGAGFLTASNDEEGTAKKITSVISRMRTYGYLAETGDENMYVLTPLVPMVLDQKLADRWLGSDDTDGDGMKDADGDGYDDSSIGADGGDTSDSTGTVSSGVEQDAFDFDSADDAFDGGEH

SEQ ID NO: 33634 - protein, 1152 aa, Bifidobacterium catenulatum DSM 16992 = JCM 1194 = LMG 11043; identical to SEQ ID NO: 31089

SEQ ID NO: 33635 - protein, 413 aa, Bifidobacterium catenulatum DSM 16992 = JCM 1194 = LMG 11043
MAAARNTTGETDIRRKLDEYVDAHLTRHMYDTDESWPLRKTIRLPKQAELEQHYNQIRAQNETIRDWARQHHCETSEKNQKSSPADSSNKKSPLIDSVTIPDLDTALRIATKQTRERYLREHDRMSALAKEFGLEPENAMNVAKTLKDHDDTDFHLVIQAAHYFANHDCHTMTPRMAPIPGFSAKWLGAPNSQRRKAICQLTGQDNLTFQERPNELRLRLMDAEHHDQPDLIVTQPWVRSQPTDIEHAIIIENKDTYQAMPTVEHAICILGNGYAATSHITTLLPWLTTIPQHHLLGRHGRQRTRHPLQTTRHRHPMHIHTDGHHRIPDIRTIRHPIRRQKTNPSPHKPPQPTPGLTTEERKLYETLCTGTDIQYLRIEQERIPIRDATTILHDQHHWPIDIPGNDIPNNNTK

SEQ ID NO: 33636 - protein, 498 aa, Bifidobacterium cuniculi
MADVREELAQLRPVYDTGVLRMLLHKYSDIYVAMLRACFTPLTAEVPQERLLADMTDAVGELVASGDYRLRDGEDDAMAARRILKELKAQDEGDYAWVADSFDRRQHRLMCRLTQRAHRAIEALASLQTRTVSLSGAQVNSIIMEIEHARKQLTVDVEERIELLEQEIAERRRQIDELKAHGIERQPTAEQVGDIINVVYNTLRGVPVDLRELVIAERDNGDALRRRMDSGTMSGNDMLDFYHNDYERTYRDSDEGRRFNDAFQVMYAPESREQLDDALDDIAHSEWLHGEADELMAVVSHELEDIYGGIDAVRDQQRVTDDSVKLLVRQQTDMRFRTMSRQLSRLFAGLGRRARGKERFDCAMGDVTLPTLPMRVRETTRSARPPALREADDGTSALDLGRIVAIGGPRIAHMVSLVAATPVHAGELVDVAASFNALDAEERRESELVGFLSYLAPDAEADDWSTWRCVGADGTERLWRTRPLLVSEAHLDDFLEET

SEQ ID NO: 33637 - protein, 253 aa, Bifidobacterium cuniculi
MTDDTNEALAHDALAGDDERPAVVDGSGIADLTGIHALFEGDSGDMPIQAREAAIQLKRNRAIDGALFDQAMDHLADVRRSLNNDLLDLLIDEHYRVMVAVPVRADGYAVRSLKNRASLNAREASLLAALRRKVLEYENVDVPSEGWEVSREEIVQVLSTGSGFLAGRNSEQAVHEQVDRLIGTMRTNGFLEDRGDGLYLVTSLVPMVLDPAHIDLWLGALDAPDDDGEAPPADADEADDDGEVTEEKDETLW

SEQ ID NO: 33638 - protein, 1145 aa, Bifidobacterium cuniculi
MVNEELFAQIELSPAHWQLAERQLVNWGSYDGYHVFRPAPGDGERVTLLTGQSESGKSTLVDAQVSLLYPTGAAFNKASNAGRSDRSDYTYVRGLRGVRNDRGHDEPVYLRGTDGDGNPYAVWGAIVDTYHDDANDGTLSIAKFMAIPADGSPQDMVKLYAVAPGGLDPRLMDGVRDEPLTAAVLKRVYPDARVYRHARQFHEDVWRRFGLTESACRLLHRMQASDAPSQLDDIFRKGVLQEPRALQLGRHAVDDYGQYRENFTSIERNRERVAMLETMADEYQRFEEADGDVRALGAIDPMNGAPAVKARDAWLDRRIDEDLERMVPSYAQAMDAAAAKVAQLETEQTDLQAAYDEAREQLRGAGGGDLERLQEQLRDVQRERSLVNQRRERLLARFAKVGEEFPADAPGWQEFADRCAAYLEDERERRDQLDHERFSLMESRSRLREELKELEDDYAYRKAHGTRISTTMKQARELVMQATGLGEDELPYVAELMDIDDEDWRVAMDVAYARIAQVILVDRRHEDGFARKVSTIPHQLMARRNWQFVDTSVQPDVRERDGWLSGKLRVKESPFAGWVRERIAADDVDARCVQAIDDRDTTRQVQPDGQLKAGIRGSHGTRGLEPVIGFVTEEYLRQLEARIGQVRAQLEELEGRLADLDRQHDLLEAWRVLAAAVTDDSWDAVDVASRDARAAHLEERIAAIRDNPELAALEQRCEDCAGKLATLGRRLAKARNERADAQRALHAAEGWLAEASGHGDPALNKASSQVLAEAYGSFFGTDSSVEERVGKILAVDGGAAGSAHAPADGRAASPVVRSLRERLAQATRATREERERARQLLRKTCEATMQRYLERYLPQETRVAADVDNERFFERELAELQPNTISQREADREYFNSLDKVRQDLMQLRRALKEDRAHIKTQVAKINGLLERYPFGASHGQLRIVVQVRAADPKFMATLQRVIDDLNTFRHQGGGDVDRCRELFAQAAPLIDAIKGSFDEYAPNGRGNENLDPRRRSRFFGEVLRPDGATERINSTGGGSGGYLQELTSFAYGAALMYLLADDNATEPSYATVFLDEALIKADGQYTRRALSVLPGLGFQVIVSAPESKTAEMMGAASKVVVARKDQASGLTTLHEAVFETADGD

SEQ ID NO: 33639 - protein, 378 aa, Bifidobacterium cuniculi
MRSPRELASLVEAHLGRHLFDVADPWPLTLTVQLPSARALEDDPAGAARTNREILAWADAHGVATRLTVRRMGGTPLELVSHVTIPDEDVAQRVVGRAMRGRRCRVLARAARIRALGWPVGEECVMRVVRWTEDADDLDFDLLMAAAVWFHGHLGAVASMTAREVPLEGFSGKWLGGVRSLHRRALCALLEVDGLPLRERPEEVRYRYLDPAAAGWAERLATEVQEAPELPVARAIVVENKDTYLAMPAMAGTVCVFGAGFAVGAAVRLLPWLAGLDVAYWGDLDAAGFEILASLRAAGLAARAVGMDLATYERFRAYGTALGERGTPIKASEPKEGLDLTDDEYALYGALCRQELGVPRVEQERIPLDWVMSVPQPR

SEQ ID NO: 33640 - protein, 505 aa, Bifidobacterium kashiwanohense JCM 15439 = DSM 21854
MADVRREMERLRPVYETGVLRLLLRGNSMLYVALLRSTFDPLTGELPREIVEERFSRSLTRLAETGDYTPKEGQTSAEAAHTILQQLTKEGEGDYAWLANSLDVAAHRYLYRLTARAHRAIEALDRLEDTTKALSGAQANSIIMEIEHARMQLTADPRERIRLLERDIEERQKQIDELKHSDTLDKLTSQQVGDIIGVIHNTLRGVPIDLRELALEERDNGDNLRRSMQSGSISVEQALGTYHDEYHRSFHESDSGRRFEDAFQVIVTDEGRREIDEAVRDIAQNPYLEGEPGILLAQVRAELKRIYEGIEDVRRQIRISDEAVSRLVRQQTDTHYRTMLDKLHRLFVRASDDAKTYPGSDERPYRTDTGTAQFQALPSRPAKSMARAATAGLDDAPSTNVDAPDLKAMVEMCGPRLTHMIGLIRRDPVKTADGRFVDFAASFNRLPREERRESELIGFLSALRTQDGPATVAWHCVSIDGGERVWRTRPIFTTEAALDEIIEEG

SEQ ID NO: 33641 - protein, 279 aa, Bifidobacterium kashiwanohense JCM 15439 = DSM 21854; identical to SEQ ID NO: 33633

SEQ ID NO: 33642 - protein, 1152 aa, Bifidobacterium kashiwanohense JCM 15439 = DSM 21854
MEDGMKIVSDRWTLQSRQIVNWGSYGGYHVFRPSMDDAMPVTLLAGASESGKSTLVDAQISLFYPSGTPYNKASNSGRSERNDYTYLRGMIGISDGENGETPIFLRGRDADGTPQNIWGAIVDTYTNRSDGGLLSCAKFLYLTAGDGPDGLRRQYVTWNQTIDPRLMDRHRDTSFTRGLMEQTYPGCTTHVNAQAFHASIWQDMGLSAEACRLLHKIQSADAPSKLDDIFKQGVLDVPESIRLARETVDDYNRFSENFHSMEDKMERVAILQDIQARYGEYAKQASERREYTPIDPDREQGETTLAAWTWSRMASEVRAGLPSAQRKAKESQDAIDRSQQRIDELDTQIEAVKERMNGIDGGSLQQLGKDFERARQDADEARRQRHAIAERFERVEGRLPADEQTWNAKRAALALSLDTYDKRLEDARSEYQRMVVERHARQGERDLLRQDYRRKIEHRTRISDDMDHARTLIARATGLDETELPYVAELMDVDEGDEQWRLAMDVTYAPIAQTILVDKRHEQGFAAKVSAIDPTRMTRRAWRFVDTDAQYDSACNEGWISSKLRYKEDSPFVGWLKEQTASQRFDARCVEAIDDMDRAERQVQVDGQIKSGDRGFYGVKGLRQVIGFVNERYLAELERQLDGAERALEDADRRGRQMANAMTLLQDEHELALTVADLPWGKIDVDGLETKAERIRLQIERIESDPELAQLQDELKQLLRQKDDEGKTRYRAEAELENAQHAVQAEQAWLDMHGDSDFDDAALSDMVSNLLADTYETCFDTSRPQERPQRIAGGFDREGTAPFDVRVLRRIGNTVRARLQQIDERAVQLRADTERAMGDYLKHHSTEGDTVMASVEDYPYFLDELKNLNMLVTRAATDEEYANSVEKLYMSFQQLNRAFNTDEENVREQLDRINGMLKGQQFGPRGGRLSLHVDFHPIDRQFKSSLGRIMSKLDDWTRNARSNPMETRKAFAGCETFIGRLQAELGQIRDTNGIKEYGARNLDPRVRSSFYAIVHHNDLPDERISSTGGKSGGALQELTSFVYGAALIYLLGGDLTGKPTYTTLFLDEALIKADGRYTKRALTVLPRLGFQIIVSAPESKTAEILSIADKAYVAYKDPATGNSYLQELDREPATQAETQDATVEQTQPATEA

SEQ ID NO: 33643 - protein, 208 aa, Bifidobacterium kashiwanohense JCM 15439 = DSM 21854
MAAARNTTGETDIRRKLDEYVDAHLTRHMYDTDESWPLRKTIRLPKQAELEQHYNQIRAQNETIRDWARQHHCETSEKTKIVSSGLIQQKSPLIDSVTIPDLDTALRIATKQTRERYLREHDRMSALAKEFGLEPENAMNVAKTLKDHDDTDFHLVIQAAHYFANHDCHTMTPRMAPIPGFSAKWLGAPNSQRRKAICQLTGQDNLTF

SEQ ID NO: 33644 - protein, 507 aa, Bifidobacterium merycicum
MGDIRSEMERLRPVYETGVLRLLMRNNSQLYVALLRSSFEPLTGELPREVLEEHFTRALSKLVETGEYTLKDDQTPAEAARRILVELSREGDGDYAWLANSLDVASHRYLYRLTARAHRAIEALARLEDTTQTLSGAQANSIIMEIEHARMQLTADPHERIKLLNREIEERQKEIERLEHSETVEQLSSQQVEDIINVVHNTLRGVPIDLRELVLAERDNGDALRRRMQAGAMSVEQILTAYHEEYRRSFTESDSGRRFEDAFQIIVTEEGRQEIDEAVRDIARNPYLSGEPGLLLNQVRAELERIYEGIEDVRRQMRASDEAVSRLVRQQTDTRYRTMLAKLNRLFAKTSAEAKAVPGNSSRPYRTDTGTAQFAVLPTRPAKPMIHAAPPSLDERENIPSVESPDLKAMIEVGGPRLRHMMALIRQSPCTLDDGRVDLAASFNRLPERERRESELVGFLSALHVQNGSQYVQWNCVTLDGRPRVWRTKPIVASAEALDEIVGEERV

SEQ ID NO: 33645 - protein, 293 aa, Bifidobacterium merycicum
MTAEARMVAIALKRDRYISDDMYWLVHDDSAIRDAVMRSLNNDLLELKENRKYRIMYAAPVNGTETGIRSLKTRASLTREEAAMLAFLRIRVLEYENTRTGAEGWIISHDEIRAALTTGAGYLASSNDEETAAKKIRATISRMMTYGYLEQGDADDMYLITPLVPVVLDGDVADQWLGVSADEVDDSDGDGAAVTGEPSDSVEGVDAGDFGDAGDANGSGDSDGSGDASEQDALDFGEQDMLDFDEPEPLVKIAEPAAEPNEPNEPNKPTESTEPGEPTEETATIIDENEEDQ

SEQ ID NO: 33646 - protein, 1160 aa, Bifidobacterium merycicum
MTDNDMHIIADRWMLESRQVINWGSYEGYREFKPSMSDKLPVTLLAGASESGKSTLVDAQISLLYPTGTPYNKASNSGRSERNDYTYLRGMVGSSDGENGETPIYLRGRDANDAPQAVWGAIVDTYLNRTTGAVLSCGKFLYLASGDGRGEVRRQYIAWDRKIDPRAMDRFRDTPFTATMLKKAYPECDSFLNAEAFHAYIWREMGLSPEACRLLHKIQSADAPSKLDDIFKQGVLGVPEALELARTTIDDYLRYDENFRSMEEKAKRIAKLQDIQNLYGEYAEALQARREFDAVNPDDEQGGAALEAWARSRMAGEVRAGLPAAQREREEQERAYTAACHDSETIQAELDEVKAKISGLDDGTLQRLESELDRARRDAEETRKQRTSVQNRFRQAGDTMPTDEEQWYAKREAINNAIESYDIDKAQRENQRDEIYDEVRDCRKERESLQADLNRQRNQKTRITQAMDEARNMLAEAVGLDPKHLPYVAELMDVREDSETWRVAMNVTYAPIAQTILVDKRYEQGFAKKVSAIDPRLMIRRTWQFVDTGTSYDTASEKGWMSSKLRFKAGSPFTGWLKEQVASERFDAKCVTTIDDDNRDERQVQTDGQLKSGAHGFHGIKNTHMIIGFVNERYLTELQRKLEQAIEKLAEATIRHERAKRQVDLLRDQKELANLVSDMEWSKVDVVGAERAVEDLKARIEEIRSNPELAELTAKREGLYAQLGQANRAKAMAELARDGAAKTVREEREWLDSYGSGEFDDSLIPEHLSNQLADVYEAAYGVSSSENRAALIVSGAFGGGNETYADRILRSVGNAIRKRIVSLDDQAGVMRANVETRMADYLETYAPDDNTVIASVEEYRFFVEELRSLDMLSTRKATDEEYVNSLDKLRMSFMQIARAVDTDAKRIDEQLDRINAMLEGQQFGPRHGSLSIDVDVRRPDHEFVGLMKNTIGDLTDWKQSDQNDPAATRKMFAKCRPLIERLQQELGQVRDTNGIKSYGAKNLDPRCRCSFYAIVKHEDGPDERITSTGGRSGGALQELTSFIYGAALIYLLGGDVTGQPTYTTLFLDEALIKADGRYTQRALSVLPKLGFQVIVSAPESKTAEILEVATKAYVAYKDASDGHSYLQEITSDEIDRLESEIAADMDAASGSDDAGDTSGE

SEQ ID NO: 33647 - protein, 402 aa, Bifidobacterium merycicum
MKWNIGDLSGTDAQVKTNIGKQLRAFVEQYLDKQRFALFQVWPYTVRAPQPSKSEFENDSNTYITITKVLRQWAQSHDCQYTEVFRLQGANCGKTTLVKDIAVPDERTALRIAGRECASRYRITRRRLRCLREEFNASDEAVVKVIRKLDDATDLDFDLVRQAAHYFAEHDASGMSPRAVPIPGFSTKWLGGKSSERRKAICLLLGRDALDFKERPGEIRLRYLDPAHRGYPDLYVTEPWSNADCAGFDYAVIVENKDTYQEMPEIENGLCIFGNGRAANRIAALLPWIADIPHVVYWGDMDADGLEILSEVRESGIDCESLFMDVESCTRYERFGTAYTPKGERLKLRNPAEVPGLREDERALYESLCSGEGVNYLRIEQERIPIVDAVERLRAFGFPVAG

SEQ ID NO: 33648 - protein, 541 aa, Bifidobacterium longum subsp. suis
MADVMRELERLRPVYETGVLRLLLRQNAMLYVSLLRSTFDPLTGELPRETVEERFAQSLNALADAGEYAPREDQTFAEAAHQILADLTREGEGDYAWLANSHDAATHRFLYRLTARAHRAIEALSRLEDESRALSGAQANSIIMEIEHARMQLTADPGERIKLLNREIKERKHEIKRIQQGKQHATLSEAQVEDVIAVIHNTLRGVPIDLRELVLDERDNGDALRRRMQTGDISVDENLTRYHDEYRRSFSESDSGRRFEDAFQVIITDEGRQQIDEALRAIAKTPYLAGESGVLLGQIRDELARIYDGIEAVRRQMRVSDEAISRLVRQQTDTRYRTMLTRLNRLYARLNADAKTHMGDASRPYDTATADALFAPLPMRPAKSMTRATAPGLSDLAAEAPQATPVADLRDMVNSGGPRLLRMVSLIRRNPVTADRSDDRSNATLVDIAASFNRLPESERRESEIVGFLGGLGAASGSAIADEPSTDGVGIDRDIATEPAPAQRGDTATWHCVSIDGEPRNWITRPVLADMDELNIIVEEG

SEQ ID NO: 33649 - protein, 220 aa, Bifidobacterium longum subsp. suis
MTVAEEHEEHMDNANPYALFEGDTGDMPAEARMAAIALKRDRYISGPTYDTVLDNRDVVVRSLNNDLLDLVINERYRIMYATPVAGDDVTLRSLKTRVSLKREEAALLAFLRIRVLEYENVHADPADWLVSFEEIRAALATGAGYLAARNDEEGVAKQIGAIVSAMITYGYLVRLDDEAMYQITPLVPVVLDRELADTWLDVAEHGDGDTEDDDDEKEAE

SEQ ID NO: 33650 - protein, 1181 aa, Bifidobacterium longum subsp. suis
MQATDVQMIADRWMLESRRLINWGSYEGYHEFRPSTDHKLPVTLLAGASESGKSTLVDAQISLLYPTGTPFNKASNSGRSERSDYTYLRGMVGVGSTETGDEPLYLRGRDENGAPQPVWGAIVDTYRNQTTGQVLSCAKFLYLMPGDGRGDVRRQYVVWGKPVDPRRMDQYRDAPFTPAQLKATYPDCLTFPSAEAFHTHIWSAMGLSEAACRLLHKIQSADAPSRLDDIFKQGVLGVPEALDLARTTVEDYERYDGNFHAMDEKTRRMDTLRGIQQAYGEYAAARGKARAFEPVKPAVDGTVPAVLRDWALARMRGEVAVQLPADRAEQQNSEAKAKLLRRRTEDLRTRLDMIRGQMQGLDGGNLTRLELELDQARRTLEDVQANRTRIEQTFASIGETLPGNEQAWNERRINAVNFKREYNKRDGECEEALTAAINARAGARGDLERLQRDFDRQRSQRTRISQQMDETRAMLCRATGLTPAELPYVAELMDVNEHEEDWRLAMNVAYAPIAQTILVDKRHEQGFAAKVSTIDPRTMPRRTWQFVDTARHYDDTGAHANILTGEQDGDWLSGKLRYRDDSPFADWLRSQTQDERFDALCVTAIDDTDRTNRQVQADGQIKSGARGQHGTKDRAQVIGFVNETYLNALAAQVDAARNALSQADTDYTAAKTQSDNLHRELELANQLAYTSWERIDIAGAQRTITDTQDAIASIKNDPKLAELAKQRDELNAELDRVERQRIESDQAAARAGSAVEAALIWLRDHADTGTTDAAGATADNDDDAASGPLPDEVTAALAESYDNRFAGLADAAMRAHMIIGAGAAGTQAPGESFPERTIAGIGKDMTSRINLLNGQADAARTGVESKMSTYIALYAADDDSLTASVEDYRYYLDELASLTQLAAVAATDAEYRRCLEQLLRSFLTIKRAIDTDASDIHDQLDRINAMLKGQQFGPKHGSLSLHADVHRPERTFWAQLIRVIGTLNDWKSADVNDSDASRKAFAACAPMVGLLRAELAQVKDTNGVKSYGARNLDPRCRSSFYAIVHHADGPDERITSTGGRSGGALQELTSFVYGAALIYLLGGGLTSEPSYTTLFLDEALIKADGRYTQRALTVLPRLGFQVIVSAPESKTGEILEVSTKAYVTYKDPDTGLTSLREAVLHQNDMDDESSSDILKDDGVAE

SEQ ID NO: 33651 - protein, 124 aa, Bifidobacterium longum subsp. suis
MAGMKDIAAITTCVKKHMRSHMYDIEPAWPFPVPVGLPDQAFLETNAIAVHDNNNEIRQWASKNGCEIITKHRTIGTSVELIFKVVVPDESIAMRVVGRTLAAEYREAHRRTDSTDRIQRQMAE

SEQ ID NO: 33652 - protein, 549 aa, Bifidobacterium pseudocatenulatum
  DSM 20438 = JCM 1200 = LMG 10505
MGPGSLFHDRKRRRIRTVTAASFPCFRLEWRLAAKASNTWKGVLLAEIRREMERLRPVYETGVLRLLLRNNSMLYVALLRSTFDPLTGELPREIVEERFARSLNRLIETGDYTLKDGQTAREAAHSVLLDLAREGEGDYAWLANSMDVASHRYLYRLTARAHRAIEALDRLEDTTKALSGAQANSIIMEIEHARMQLTADPRERIRLLKRDIEERQKEIDELEHSEALEKLTSEQVGDIIGVIHNTLRGVPIDLRELALSERDNGDALRRRMQAGAMSVESILTAYHDEYRRAFRESDSGRRFEDAFQVIVTDEGRREIDDAVRDIARNPYLDGEPSVLLNQVRSELKRIYEGIEDVRRQIRTSDEAVSRLVRQQTDTSYRTMLAKLNQLFAKTSAEAKAHPNDQSRPYHTDAGQAKFPTLPSRPARSMARAASSSLNDAPAATIEAPDLKNMVEICGPRLTRMIRLIRSNPVTTSDGMFVDLAASFNQLPKAERRESELVGFLSALRTQDDSSYVTWRCISIDGSERVWRTKPILITETTLDDIIEER

SEQ ID NO: 33653 - protein, 260 aa, Bifidobacterium pseudocatenulatum; identical to SEQ ID NO: 31084
  DSM 20438 = JCM 1200 = LMG 10505

SEQ ID NO: 33654 - protein, 1183 aa, Bifidobacterium pseudocatenulatum
  DSM 20438 = JCM 1200 = LMG 10505
MADGMKIVSDKWMLQSRQIVNWGSYGGWHEFRPSMDETMPVTLLAGASESGKSTLVDAQISLLYPSGTPYNKASNSGRSERNDYTYLRGMIGVSDSENGETPIFLRGKDADGTPQNIWGAIVDTYVNKTDGGLLSCGKFLYLNAGDGQDGLRRRYITWNRTIDPRLMDQYRNTPFTRSMFEKTYPECTTHTNAAAFHASIWQDMGLSADACRLLHKIQSADAPSKLDDIFKQGVLDIPESIRLAHETVDDYNRFNENFHSMEDKMARVAILQNIQTRYGEYAKQTTERREYEPINPDSEHGNATLSAWARSRMASEVRAGLPAAQRKVKESQEAIDRAMQRVGELNTRIDAVKERIQGIDGGSLQQLGKDLQRVRQDIDEASRQRHAIAERFEQVEGRLPDSEQTWDAKRAMLAETLDTYEERLKDANARFQQLVGERHDRQRDRDSLRRDYQRKLTHRTRISDDMDDARTLIMRATGLDASELPYVAELMDVNEQDEQWRLAMNVTYAPIAQTILVDKRHEQGFAAKISAIDPKLMTRRTWRFIDTGMQYESSASEGWMSSKLQYREDSPFAGWLKNQTTSPRFDARCVHAIDDMNHDERQVQADGQIKSGDRGFHGSKGLHQVIGFMNEQYLAELKNQLDKAEQALQNADRRSEQMSNAISLLQDEHELARIVADMPWSKIDVNGLREQETRIRRQIERIENDPELGQLQTELKQLNQQATAENRNQYQAEDDLDKAQHAVQAEQAWLDAYGNDDFDDATLSSMVSNLLADAYENCFGASVRAQDRPKLIAGLFDHESETPFHARALRNIARIARTRIQEIDARSNQLRADTERIMDDYLNNHSTDDNTVMASVEDYRYFLDELDELNMLVTRAATDEEYANSVKKLYMSFQQLNRALRTDEENIKEQLNRINSMLKGQQFGPQGGRLSLDVTFSPIDRQFETTLSRILSKLEDWTRNASDNPTETRKAFNNCETFVNRLHNELDKIHDTNGIKAYGARNLDPRVRSSFYAIVHHDNAPDERISSTGGKSGGALQELTSFVYGAALIYLLGGDLTARPTYTTLFLDEALIKADGRYTKTRARRTTPTRLPNHRLRPGKQNRGNPQRRQQSIRRIQRPIHRQLIPTGTRQRNHHTGRNTAHHRTRETNNGGITHGNGQKHHQQRHPQPTQRIRHRLSHQAHV

SEQ ID NO: 33655 - protein, 512 aa, Bifidobacterium reuteri DSM 23975
MGDIRREMERLRPIYETGVLRLLLRQHAMLYVALLRAAFDPLTGELPRETVEERFAQSLQLLEKTGDYVLHDQSYGDAAHRILTDLTREGEGDYAWLANSHDAASHRFLYRLTARAHRAIEALSRLEDQSSALSGAQANSIIMEIEHARMQLTADPGERVRLLNKEIKERQHEIRRIQHGQQHATLNRSQVEDIIAVIHNTLRGVPIDLRELVLTERDNGDALRRRMQAGAMSVDDTLNRYHEDYRRSFRESDAGRRFEDAFQVIITDEGRRQIDSALRDIAKTPYLAGDSATLLGQIRDELARIYVGLEAVRNQMRVSDEAISRLVRQQTDTRYRTMMNRLNRLYVSLNASAQAHMGDASRPYATDTANALFAPLPMRPARSMTHTATPKLSGGPSAPDTDMVSLKDMVTSGGPRLRHMIDLIRRNPVIQDGLVDVAASFNRLPERERRESELVGFLGGLPSAAKGNVDDGPAMDATWHCIALDGSDRDWHTIPLWATLEELDAIAEEEQA

SEQ ID NO: 33656 - protein, 279 aa, Bifidobacterium reuteri DSM 23975
MNEPVANPYALFEGDCGDMSADARMAAIALKRERYISGRLYDLVDDNRDAVLRSLNNDLLDLVVNERYRIMYATPVAGDDVSLRSLKTRSSLKREEAALLAFLRIRVLEYENTRVGRDEWLVSFEEMRAALASGAGYLAARNDEEGVLKQIGAVVSSMITYGYLNRLDDEAMYVITPLVPVVLDRELADTWLDAAAHDLEGRDEERDAADGDRPASDSTPSDDAPDDGEAMPDESLFAEPLFGATNNATDGSGEDHARNSVEQTDADTGASTDSDKQGE

SEQ ID NO: 33657 - protein, 1183 aa, Bifidobacterium reuteri DSM 23975
MPSTELHMIADRWMMTSRRLVNWGSYEGYHEFRPSTDSALPVTLLAGASESGKSTLVDAQISLLYPTGTPFNKASNSGRSERSDYTYLRGMIGVTSTAHGDEPVYLRGRDSATGAPQAVWGAIVDTYRNQTTGQVLSCAKFLYLMPGDGRGDMRRQYAVWGKPIDPRLMDQYRESPFTPAQLRAAYPECLTFPSAESFHSHIWSVMGLSEEACRLLHKIQSADAPSRLDDIFKQGVLGVPEALDLSRATVHDYERYATNFHAMQEKTERVEALHGIQRAYDDYAKARGRVHMFDTIRPIGTGASASLHDWATARMGAEVSAQLPIDRAEAQAYETEARNAKRKAENLQSRIDMIRGQMQGLDGGTLSRLEMELNQTRRSCEDAESNHARMEQVFESVGEQLPSTEQAWNERRINAVNFKRSYDERATRCEEQLTAAINARADARNAMERLQHDYDRQKSRRTRITQQMDDSRAMLARATGLSPDELPYVAELMDVRETEESWRLAMNVAYAPIAQTILVDKRHEQGFAAKVSAIDPHAMTRRTWQFIDTEREYADEATQTETTSRTSSQEWLSDKLRYREDSPFTGWLRSQTRSERLDALCVDAIDDADRDTRQIQEDGQIKSGSRGQHGVKDRTPIIGFVNEAYLAELEVQIEQSCQAFQQASRQYDDAKRESETLHRRLELANQLAYTSWERIDAAGQRKAVADIEASIASIKEDPKLAELAHRKDELTEELESVEHERMNARQLATACAQAVEAALIWMQRHTTDTDDGGKGDALPSAADLPETAAAALSEAYENRFAGIDDPALRAHMIIGAGTPATGGKGTQSPAPSFAERIIAGLSNDIGTRIEALEAQADAARTTVESKMSNYIAIWAAGDDALTASVDDYRYYMDELASLSQLAATTATDAEYERCLDQLLMSFLTIKRAIDTDADDIHDQLDRINAMLKGQQFGPKHGSLSLHADVRSPESTFSRELQRIIAKLNAWKTGGKTADDQARRDGAHNAFAACASMITLLKEELADVKDANGIKQYGAHNLDPRCRSSFYAIVHHQDGMDERITSTGGRSGGALQELTSFVYGAALIYLLGGGMENRLKPCYTTLFLDEALIKADGRYTQRALTVLPRLGFQVIVSAPESKTGEILEVSTKAYVTYKDPDTGLTCLREATVDDYDDSFAEEQPRIGE

SEQ ID NO: 33658 - protein, 517 aa, Bifidobacterium saguini DSM 23967
MGDIRREMERLRPIYETGVLRLLLRQHAMLYVALLRAAFDPLTGELPRETVEERFAHSLELLASSGEYTLKDQSYSEAAHRILADLTREGEGDYAWLANSHDAASHRFLYRLTARAHRAIEALSRLEDESRALSGAQANSIIMEIEHARMQLTADPGERVRLLNSEIKERKHEIKRIQQGQQHATLSQAQVEDVIAVIHNTLRGVPIDLRELVLTERDNGDALRRRMQAGDMSVDETLNRYHEEYRRSFSESDSGRRFEDAFQVIITDEGRQQIDSALRDIAKTPYLAGESAALLGQIRDELSRIYDGIEAVRHQMRVSDEAISRLVRQQTDTRYRTMMSRLNRLYVNLNADAKAHAGDTARPYATNTASALFAPLPMRPARSMTYTETPGLESLDAADAQVPQVNLKDMVEGGGPRLKHMVELIRRNPAIEHGTVNVADSFNRLPERERRESEIVGFLGNLPAASASNGIPSNESTASAAAGVVWHCIALDGTPRDWITSPVWATLEELDSIVEEG

SEQ ID NO: 33659 - protein, 275 aa, Bifidobacterium saguini DSM 23967
MSMSEPVANPYALFEDDHGDMTADARMSAIALKRERYISGQLYDLVNDNREAVERSLNNDLLALVVNERYRIMYATPVANDNVALRALKTRASLKREEAALLAFLRIRVLEYENTRTDQSEWLVSFEEIRAALASGAGYLASRNDEEGVLKQVSAIVSAMITYGYLNRLDDEAMYLITPLVPVVLDRELADTWLDTAARNLGDTADLNESNVIDAGPAESSDADSNESTDDIPDESLFTEPLFDAADGNAQTTIGDIENEHDAANDTDSIMKEGE

SEQ ID NO: 33660 - protein, 1174 aa, Bifidobacterium saguini DSM 23967
MAAAELQMIADRWMMVSRRLINWGSYEGYHEFRPSTDSTLPVTLLAGASESGKSTLVDAQISLLYPTGTPFNKASNSGRSERSDYTYLRGMIGVGSTEHGDEPIYLRGKDKTTGAPQAVWGAIVDTYRNQTSGQILSCAKFLYLQPGDGRADVRRQYAVWGKPIDPRLMDQYRESPFTPGQLRDTYPDCLTFPSAEAFHNHIWSIMGLSEEACRLLHKIQSADAPSRLDDIFKQGVLGVPEALELARTTVEDYERYDANFHAMEEKTKRMDALHGIQDAYGEYAKANQRVHMFDIVAGGDGETVPASLRDWVMTRMRAEVGAQLPIDRSEAQAYESEARNARRNVESLRSRIDMIRSQMQGLDGGNLTRLEMELSQAKRALEETESTRKHIEQTFASIDEQLPDSEQSWTARRINAVEFKRTYDERVSECEEQLAKTMNARAAARDTLEKLQRDYDRQKSQRTRITQHMDETRAMLARATGLTPADLPYVAELMDVKEGDERWRIAMNVAYGSFAQTILVDKRHEQGFAAKVSTIDPHAMSRRTWQFVDTTSDYGNVDKTDVAASDEDEWLSDKLRYREDSPFAGWLRSQTQSERYDALCVKAIDDTNRNTRQVQTDGQIKSGARGQHGIKDRAQVIGFVNKAYLKSLEQQINESQEALKQADADYTTAKKNSDKLHRELELANQLAYTSWERIDIDGARKTITDIEDSIASIKNDPKLAELAARKDELTAELEQLDERRMQAEQVATSASQAVEAALLWLNHHADTAEEQNGAEHSTAQAMPSDVTAVLAEAYENRFAGLEDAAMRAHMIIGAGAASSNFAERVLTGMAKDIGARITMLQTQATAARTAVESKMSAYIGVWASDDDALTASVEDYRYYLDELESLTQLAATTATEAEYQRCLEQLLMSFLTIKRAIDTDATDIHDQLDRINAMLEGQQFGPKHGSLSLQADVRRPERVFSSQLTRAIGTLNDWKNANGEADDETKRAESRRAFAACAPMITLLKDELAQVKDANGIKQYGARNLDPRCRSSFYAIVHHADGPDERITSTGGRSGGALQELTSFVYGAALIYLLGGGMENRLKPSYTTLFLDEALIKADGRYTQRALSVLPRLGFQVIVSAPESKTGEILEVSTKAYVTYKDPDTGLTSLREASLDGLDEEDTEATEMSQSVSE

SEQ ID NO: 33661 - protein, 502 aa, Bifidobacterium stellenboschense
MGDARREMERLRPVYETGVLRLLLRRNSRLYVALLKAAFDPLTGELPRETLEERFAQGLAALADIGEYALDPDLTFGQAAHRMLVDLTREGEGDYAWLANSHDAASHRFLYRLTARAHRAIEALGRLEDESRTLSGAQANSIIMEIEHARMRLTADPGERVRLLNREIKERKHEIRRIQQGMRHETLDDSQVEDIIAVIHNTLRGVPVDLRELVLAERDNGDALRRRMQAGDMDVDEILNAYNAEYRANFGESDMGRRFEDAFQVIITDEGRQQIDEAMRDIARTPYLAGESAALLGQVRDELAHIYDGIEAVRAQMRVSNEEIGRLVRQQTDTRYRSMLARLNRLYAAVNADAKAHPGADGRPYATDVGGVRLAPLPTRPARSMVRAASPGLDAAGDSDLPRVDLKTLIDNGGPRLRRMIALIRREPVTADGGIDIAASFNRLPESDRRESELVGFLGAIGGREDGDAVWHCVTIDGRPRDWRTRALIAGADELDAIMEEG

SEQ ID NO: 33662 - protein, 207 aa, Bifidobacterium stellenboschense
MIMDEKTNPDALFEGDRGDMGADARRAAIALKRERYIEGELYDLVDDNRDAVIRSLNNDMLELVDDERHRIMYATPVTGPDVPLRSLKTRTSLRREEAALLAFLRIRVLEYENMQVPEGQWIVGFDEMRAALATGAGYLASRNDEEGVLKQVGTLVNTMVTYGYLAVTDDDAMYRITPLVPVVLDRGLADAWLGVAGESDAGEEEKE

SEQ ID NO: 33663 - protein, 1171 aa, Bifidobacterium stellenboschense
MTIRELQMIADRWMMESRRLVNWGSYQGYHEFRPSTDPKLPVTLLAGASESGKSTLVDAQISLLYPTGTPFNKASNSGRSERSDYTYLRGMIGVGSTAGGDEPVYLRGRDDDGAPQAVWGAIVDTYVNATSGQTLSCAKFLYLMAGDGRGDVRRQYATWGKPIDPRLMDIYRDHPFTPTQLKDAYPGCETFTSADAFHEHIWDMMGLSEEACRLLHKIQSADAPSRLDDIFKQGVLGVPEALKLARDTVDDYGRYEANFTEMERKAKRVTALAGIRDACDAYDAARRGVRTFDPVDPAGEVGSTAIRRWATARMSGEVAARLPIDEHEHREHQTAAEAAYRDGEKIRAGIDAIRDRIRGLDGGNLARMEMELEQARRALTDVKTNRERIEAGFGSVGETMPGDEHAWTERRIAAVDFTRLYDRRAQELDETRDRAVAARAAANDELRRLERDYERQKTQRTRITQQMDETRAMLCRATGLRADELPYVAELMDVRESEERWRLAMNVAYGAIAQTILVDKRHERGFAAKVSAIDPHAMARRTWQFVDTSERFGADDGKTTAADGGPWMSSKLRYRDDSPFADWLRAQTASERFDAVCVDAIDDADRERRQVQADGQIKSGKRGQHGVKDRREVIGYVTEAYLDALEHGIAEARERSEKAEHDYTEAKRRAEDLRSGLELAKQLAYASWESVDTDSAAAKVDGLETSIAAIRNNPELADLVRREESMKEELDRNEQRRFAEKRDADAAASACEAARRWLDANRDDAGRGDAMPLDKSVESALEHSYEDGFSGIADAALRAHMIIGAGADAAAAGTSFPERVVARMRDDMAARIDALAAQASAAKTVVEARMESYKGMYAADDDALSATVEDRRYYLDELEGLSRLTAGEATGAEYRRCLEQLLMSLLTIKRAVDTDEAGIRDQLDRINAMLDGQRFGPRHGSLSLHADVRKPDRGFFSQLTRTIGALNDWKSSGDDDPTAMRKVFAACGGIIGLLRAQLAQVKDANGVKSYGARDLDPRCRSSFYAIVHHEDGLDERITSTGGRSGGALQELTSFVYGAALIYLLGGGMENRLRPSYTTLFLDEALIKADGRYTQRALTVLPRLGFQVIVSAPESKTGEILEVSTKAYVTYKNPDTGLTSLREASLEGLGMRDADYAPNGEESPTHEGEPQA

SEQ ID NO: 33664 - protein, 416 aa, Bifidobacterium stellenboschense
MSRMKSVEDLVAETRRAMRTRMYRLDTVWPLTVKVGLPGKSELESNIVEVHDNNNAIKQWADDHGCGLEYVTRRMGTPVRLVSKVLIEDEATALRVIGRRDAAEYRRMRERAGRLCDRLGVEPALAMKAVRKTHAQSDVDFELLIRSSEFFLRYDATGRRPRAVPLAGFSAKWLDQSHKVRRRTIELLCGLDDLGLDERPRECRFRYLDPALHRSPDMVAVRPWNEGPSCGIRYVVICENKDTYQTMPSIDGGLCVFGQGFAASDSLPLLPWLFDDAGHGIHVAYWGDLDASGFEILSKVRQIGISCESLCMDRETYEAHKEFGAKLSEDGKTLRTRIPQDLPGLTDEERNLYEALCTGEGVDCLRIEQERITMDYAMSRLANMGFPVRCEGIDDAWPARTAPKTEEGARDTRMGI

SEQ ID NO: 33665 - protein, 486 aa, Pseudomonas sp. 1-7; identical to SEQ ID NO: 32016

SEQ ID NO: 33666 - protein, 235 aa, Pseudomonas sp. 1-7; identical to SEQ ID NO: 32017

SEQ ID NO: 33667 - protein, 1124 aa, Pseudomonas sp. 1-7
MISEPQTASLFAREQFRMTRLQVYNWGTFSGLHDVPISERGFLFVGRSGAGKSTLLDAFSALLTPPRWIDFNAAAREADRSGRDRNLVTYIRGAWAEQKDGESGEIATRYLRAGTTWSALALTYQNALGQSVALVQVFWLRGNANGSTDVKRHYLVMERAFDLRELEDFGQSNFDIRKLKQSFPEAFARDEFRPYCERFCRLLGIESEMALRLLHKTQSAKNLGDLNTFLRDFMLDKPETFEVADRLVSEFGELNAAHQSVVTAREQVQTLAPARDQHLRRDSLMLQRNGLDELRLGVDGYRETRRIDLLKEHVASLEVQANGSEGEVGRRQSTLDNHAAILRDLERQHREAGGDQIEQWETEKSGLEGQRTDRLRKRAQAEDACKKLGWSLPDSPQAFAELLGSARQEVENWEQRSNDSRAEQFRLDREKKDAETAFSQALKEVQALQRQPSNIPADMLEMRRNIAAAIGISESALPFVGELVEVKSDEVEWQGAIERVLHGFALSLLVDERQYSALANHINTTHLGQRLVYYRTGRPETRQAKPIGTNSLVLKLNVKEGSYADWLQAELRQRFDYACVDSIQSFRSADRAITREGQVKHSKTRHEKDDRRSVGDRRNWVLGFDNREKLGLFQAQAQEQADAVARLAGEIDKLSEQDKNRAARAIQCQTLVNLQWQEIDLLPLLDRISTIERQIREAREGNTTLLQISEQIEKQKKLVDDADKDLRQATRAHDSIVDQIKTSTQKLESLLQDASIVPLTSHQVSGLDERFAKQSDAVRLDNIDKVTTSVERALNAEIEEVNRGIGACEKEIEARFADFKRQWPMDAGDMDTSLASAPDFFAKLVRLETDGLPAYEQRFFELLQNQSHQNLAALSTYLNDARKAILERMDLVNDSLGQVPFNQSANQRTYLHIDASDRQLVDVKEFKREIQQALSHAWTEDREFAEARFLALRRLVDRLASQDPEQKRWRETVLDVRQHVEFIGREIDESGVEVEIYRSGAGKSGGQRQKLATTCLAAALRYQLGGNDHGVPMYAPVVLDEAFDKADNEFTALAMNIFTNFGFQMVVATPLKSVMTLEPFIGGACFVDISDRRVSGVLLIEYDGDRQRLKLPEHAREEASVEAS

SEQ ID NO: 33668 - protein, 387 aa, Pseudomonas sp. 1-7
MKLPEDVRQFLARRFQSKHREWLVGDPGEGQWPLEVPLGIPTEQAALRQVDGVRAWVSAWQGWQGVGTLSWCERRWKALGVQRLPEKLALRGPEDVAMWIGASARWVRSLSRYQTLTARWPVLAQQLPRYFDVLADYSDADFRRLAEMLDWISRNPKSNLYPRQIPVAGADSKWLDSRKGIISDLIATLQGDPTGERDFFWRCGLRAQPQLMRMRVLDPDLRAHFGGLGDISAPCDEVARIGIRPKSVFVVENLQTGLAFDDLPGAVVIMRLGYAVDVLGQLPWLQQAQCIYWGDIDTHGFAILNRARTYIPSLKTVLMDEFTLMSHRDLWVEEKDQHSSTELPLLTNTEQKLYQSIKGNVWDQQVRLEQERIRWDVAWNAIQASIR

SEQ ID NO: 33669 - protein, 486 aa, Stenotrophomonas maltophilia
MKADKAIATYRRMRAQPLWRLLASTTGPTVIGLLQSHLYESERSLPASIFHERIARDLEELRAQGEDFPQTAQAYVASWLADGYLERRFPAGASEEEYELSTAAVEAIRFVSGLAQPHSAATESRLTLVIEALARLAEDTDTDKFRRIDRLMAEQARIDKEIDAIQKGQMRVLPHTTALERTREIITLADDLAGDFRRVRDQFDQLNRDLRERIMDNDGNRGDVLDSLFAGIDLISESDAGRTFSAFWRLLTDPEQAATLDQALDSVMSREFVGQLEAKERRFLLRLTRTLLEQGGMVHEVLQTFARSLKHFVQSREYLEQRRLNHLLKDAQRAALSLKDEVRATETLQYTLELTSSRLRSLSQWVLHDPSLQALPGQMAEGDAPPIDLESVSELVAQSEIDFRTLKANVLAVLEQRSHASIADVLEQFPAAQGLGSVVGLLALGSRHGFKADHSETVGWVGGDDERRSARIPKIFFLKERADELV

SEQ ID NO: 33670 - protein, 235 aa, Stenotrophomonas maltophilia
MNWSENDESAMPAEAQEPDAAQAPANTLFLGDSGELALDTRRALVQLLAGPSLDGRRHPKLWPILVRDEAVIRRRLAELFLELVIDRDVQVAFTRQADTGDLEVPLLLRRAQLTFIDSILLLHLRQRLTQADSQGDRAVVSTDEITEFLSLYERAANTDRAGFVKRVHASIEKIKKHSILQKIRSSEDRFEISPTLKLLFSAEEIQALTHLYQRMAAGETPAQLTQTDADEEADQ

SEQ ID NO: 33671 - protein, 1124 aa, Stenotrophomonas maltophilia
MISEPQTVSLFAREQFRMTRLQVYNWGTFSGLHDVPISERGFLFVGRSGAGKSTLLDAFSALLTPPRWIDFNAAAREADRSGRDRNLVTYIRGAWAEQKDGESGEIATRYLRSGTTWSALALSYQNALGQSVVLVQVFWLRGNANGSADVKRHYLVMERAFDLRELEDFGQSNFDIRKLKQSFPEAFARDEFRPYCERFCRLLGIESEMALRLLHKTQSAKNLGDLNTFLRDFMLDKPETFEVADRLVSEFGELNAAHQAVVTAREQVQTLAPAREQHQRRDSLMLQRNGLEELRLGVDGYRETRRIELLKEHVAALEVQANGSEGEVGRRQSTLDNHAATLRDLERQHREAGGDQIEQWEAEKSGLEGQRTDRLRKRGQAEEACKKLGWSLPDSPQAFAELLGNARQEVENWEQRSNANREEQFRLAGEKRDAEAAFSQAVKEVQALQRQPSNIPADMLEMRRNIATAIGIAESALPFVGELVEVKPDEAEWQGAIERVLHGFALSLLVDERQYSALANHINTTHLGQRLVYYRTGRPETWQAKPIGANSLVLKLNVKEGAYADWLQAELRQRFDYACVDSIQSFRSADRAITREGQVKHSKTRHEKDDRRSVGDRRNWVLGFDNREKLGLFQAQAQEQADAIARLGGEIDKLSDQDKNRATRAMQCQTLVNLQWQEIDLLPLLDRISTIERQIREAREGNTTLLQLSEQIEKQKKLVEDADKELRQATRAHDSILDQIKTSTQKLESLLQDASLVPLTPHQVSGLDERFAKQSDAVRLDNLDKVTTSVERALNAEIEEVNRGIGACEKEIEARFADFKRQWPMDAGDMDTSLASAPDFFAKLVRLETDGLPAYEQRFFELLQNQSHQNLAALSTYLNDARKAILERMDLVNDSLGQVPFNQSANQRTYLHIDASDRQLVDVKEFKQEIQQALSHAWTEDREFAEARFLALRRLVDRLASQDPEQKRWRETVLDVRQHVEFIGREIDESGVEVEIYRSGAGKSGGQRQKLATTCLAAALRYQLGGNDHGVPMYAPVVLDEAFDKADNEFTALAMNIFTNFGFQMVVATPLKSVMTLEPFIGGACFVDISDRRVSGVLLIEYDGDRQRLKLPEHAREEANVEAP

SEQ ID NO: 33672 - protein, 240 aa, Stenotrophomonas maltophilia
MLDWIASHPNSNLYPRQLPVSGLDSKWLDGRKGLLTDLVAAIQEDSSSDVDFYQRCGLKAPPLLVRMRVLDQSLRAHVGGVGDITAPVDDLAGISWPVSHVFIVENLQTGLAMSDMPGAVVFMRLGYNVDVLARLPWLARAKCIYWGDLDTHGFAILHRARSYIPELQSVLMDEETLLRHKALWVDEAAQHSAAELTLLTKDEQQLYRDLKQQRWGQNVRLEQERIDWTAAWNVLQRSFA

SEQ ID NO: 33673 - protein, 489 aa, Stenotrophomonas maltophilia; identical to SEQ ID NO: 30775

SEQ ID NO: 33674 - protein, 233 aa, Stenotrophomonas maltophilia; identical to SEQ ID NO: 30657

SEQ ID NO: 33675 - protein, 1126 aa, Stenotrophomonas maltophilia
MAISKHTPALFNEGLPDPRLQQFRMRRLQVHNWGTFNGLTEVPIAERGFLFVGRSGSGKSTLLDAMSALLTPPAIVDFNAAAREAERSGRDRNLVSYVRGAWADQQDSGTGEIATQYLRKGATWTALVLEYRAGDGRVVSLVRLLWISGNGTSAGDVRKHYMIAERPFDIAKDLGGFDLDLRKLKQKLSDLHHFDTFSGYAERFRDLLGIDNEMALRLLHKTQSAKNLGDLNVFLRDFMLDTPKTFDAAERLVSDFAELDGAHQAVVTARRQVETLLPARAYYNDLKEMHRRRGDDEALKLGVDSFRESRRQALIEARLREMDVRDRGLLGEEAQRRAALDNHTERLAELELQRRQQGGERIEELEREQGRAEAERDRRQAKREQASLAAQQLGAELPDDAHGFAELVERAQNELQDRQRASSALDDAISDRLGGKRDDERRFGEVRAELEAMQRTPSNIPAPMQKLRARLAEETGIAEAALPFVGELIQVRSEEQGWQGAIERVLGGFALSLLVDDKHYNDVAEWVNRTHLGMRFTYYRVRRNDDAFAREPSAKSLLHKLELREHVFDSWLRRELGKRFDYECVDAKQLRNVDRGITREGQVKHPGDRFEKDDRSAVGDRRRWILGFNNHDKVGAFEREAQELAKRIASCETDIARLRGQRDRDNERRLACHELVSISWNEIDIAAPQQRLSDIEATLRDLREGNADLAKLAKQIDAVRADIEQARRTYEDVRVERGQLVKERDRLDRARQQSRALVLPSLAQEQEAGLAERLQEQGPLSLETLEAHMRQVSNALNEQLSSSQQDLNRIENQLIGCFRRFIQQWPEESGDFTVSVASAEDFLARLERLERDGLPQHEERFFDLLQNQSKNNLLALQRHSAEARKSIGQRLDEVNASLEQVPFNRGTLLTIELSDRRLPEVGEFQLQLREVLSQQQTEQRELAESQFTVLRQLVNRLGSQEGEDKRWRELVLDVRMHVEFIGVELDAETRQQVEIYRSGAGKSGGQRQKLATTCLAAALRYQLGGADSQLPSYAAVVLDEAFDKADNEFTALAMNIFDNFGFQMVVATPLKSVMTLEPFIGGACFVEISGRHDSGVLLIEYDEEGKRLKLPERSRQQANEPEEAEA

SEQ ID NO: 33676 - protein, 491 aa, Acetobacter malorum
MKLDFTTLNSMRQHNPAWRLLCSDHAPLILSFLHQAFVRPNVRSLEAESMAEALEDTLYALRQQLDENAFPRTAREYLEDWASPDKGWLRKFYQLGTDNAVFDMTPATEKALSWLEQLAERSFVGTESRLRTLFDLLRQMNEGTQSDPDQRLADLHQRRDEIDAEIARIQSGDLSLMDDTGIKERFSQFTRMARDLLADFREVEHNFRRLDRAVRERVALWDGTKGALLDEILAQHDLINESDQGRSFQAFWNFLMSSRRQEELSQQLEHILSLPVIAEQNPDPRLRRIHYDWLEAGDHTQRTVAQLSHRLRQFLDDQSRQETQRIMEILHNIEAHAIAARPYLSDCPPDEALTDLDAMAASPDLIIERPLYSPPLPTILTVDPLPEDTADDVDPIALYEQVVVDRVRLTENIQQALAEAPQISLAALLRRHPLEQGLSELVAYLQLSSERFESLIDEKTNDHVNWDIMTADGSIITRHATLQRVIFVRSA

SEQ ID NO: 33677 - protein, 252 aa, Acetobacter malorum
MSQTVNTPEDAQASAHAPASLSTLAITLLKSVIYREEDESLWGHLLRLQNQVRDYVAVLGLVLIIDPAEGYAYLRSAPEPEEEEGASRMLRLIARRPLSFHVSLLLALLRQQLVRFDAMGGETRLILSRDDIASMLQTFLPESSNEVRQLAQIESYIRRVAELGFLRPLPPTSADAPNAAPRYEVRRILKAYIDAEWLATLDERLEAYLAHARSLEQTDLPLATAPTTPEQNTVAESQLFSDHADTGLTDRD

SEQ ID NO: 33678 - protein, 1135 aa, Acetobacter malorum
MTDTQQAPLDFAVDDRLAGFRLHRLEVLNWGTFDKRIWRFDLKGRNALLTGNIGSGKSTLVDAITTLLVPAQRIVYNKAAGADTRERSLRSYVTGHYKSERNDATGSTKSVSLRDTQSYTVILGVFKNEGYLQTVTLAQVFWIKKQQVQPARFFVCAEKELSIQEHFTGFGTDILQLRKNLRAQGAEVEDSFNRYAAWFRRRFGIENEQALDLFLQTVSMKSVDNITDFVRENMLARFDATERIHALISHFEDLDDSHQAILKAQKQINLLTPLTEDVTAHAESKTRHDTLKACRQALPGYFASQKATLLEQKIAKEQDVAATNQQQLTEQDAVRTTSKQQLDEIKQAIYANGGDRLEQLAIAIQQAEKTSEDRRKNAAHYAMLVEKLNEKPAHSAEGFLELTQHLKKQKNEWKKQDTWLAKDLTEQSILFHEEKNQHAEIVTELDSLRKRQSNIDERQIRMRAMLCDALDVSAEDLPFAGELIRVRDDAREWEGAAERLLHGFALSLLVPDHLYAQVVDWVDRTHLKGRLVYYHIQQHRSGSHAVRHPNTLAHKLEVHPDSSMRLWVENELAHRFSFTCCETQDDFRRSSKAVTRSGQVKEPGGRHEKDDRHQIDDRSRYVLGWNNAIKIAALEERQREQEALIQKHAGEIAQAENTRKMLQERFETLTRLERYPDYTQLDWQSAAQTAEQLTAEREALTATSDVLRELKQQKEHAEQTQQQAEAEYMILFKKQALLDQSVETLQARLQHCQTVLNDYTLTPQQEQELTELQIQLNGAELSSLEACEGAETQLRDQLDIQIDHQQRTLDSLRDSILKDMREFRTTYPVEAQDMDDHLEAGPEYCALLAQLKKDDLPRFVSRFKNLLTVNTINEIANFNAHLAQEREIIKERIAVINTSLTQIDYNPDRYIRLEAHQTLDPEIRDFQASLRACTENTVSGDDTEQYSEQRFYLVKTMIERFRGREGLAEQDRRWTNKVTDVRNWFSFAASERWRADETEFDHYTDSGGKSGGQKEKLAYTILAASLAYQFGLEWGEVRSRSFRFVVIDEAFGRGSDDSTQYGLRLFQQLNMQLLIITPLQKIHIIEPFVSSVGFVDNKDGNYSRLRVLSIEEHFANKASLHDAAPALLRHEEQSV

SEQ ID NO: 33679 - protein, 393 aa, Acetobacter malorum
MNWTTPADLKKQLERLWKKGTLPNALISKTCLFPLTLTLRTPSASDITKHLHAVRDWTEMLNAMRHIRLIRHTVKNRVQGTQTIPHKVVIETLEDTLALLDKHDTARQILALHAMTVEKAPFLLPWLAQNALTAHRHATEWERLLTLAVWMRDNPAPGIYLRQVDLPGIHTKFIERNKTILSQLFQHALPEQAINAACSGMDQFEPRYGFRTKPLRIRFRILDAALSPFPTIAHPDITLDSESFATLSLMGCRIFIVENESCFLAFPYLENALVIFGAGYCWDVLKPAHWLQKCSIYYWGDIDTHGFRILDHLRAILPRTHSFLMDEPTLLVYSAFWDEEPSPVRHPLSRLTPSEQSVFTALQTDLFSQNLRLEQERIHFSDLRKILDSLLQP

SEQ ID NO: 33680 - protein, 478 aa, Arenimonas malthae CC-JY-1
MPVTDPNANTLFDRLPRTVFRPLAAANNTRYWDLLGRLVDEFWGDGARTPGEDVPKSELIAALESYLVVSDPWEAEDGAAPDTPANIRAHGIYSVFRDSGWLSQRKRGVRDMATIRPVLAQFHTLLREFGTKEPEFLGSEVRSVFLNLQEAAGGKGDAYAKAAREAKHCMTHLASTGVAVYDLMASLQSVASTREFVAGYFDDFIRRHFIGDYHELRTKAHPLQHRTAIVTLTLQIQHDPERRKDIVAWYQHNTAGGDADRAEAYFERDTRRLMRLESVEDELRRLDDEIRAANQRALAYLDYRLRAPRHFDKLIARAIAGVASLRDGDRALPAGTAGELAGEGWLGKARQVTREPDATRVQTRVPTLEELALQSLRKRMADARLVRPDKLAAYVARHLQRATPVFSDQLQIETVSDLCCYQRLLLIASRNEAPLAAARQDPFVQMLPAVRIQFVDGPRTLNPYVEHRRFVIQREKAA

SEQ ID NO: 33681 - protein, 201 aa, Arenimonas malthae CC-JY-1
MTASWERLAEATDGRYTGADFERAAYQLLVEQVVYAADRGSATPYHLLVTYAAAFKDVLDRLGVTMQHNHHHNYVVALARHRVGPRMRLSETRLALVLRRLYDDAIHRADVTDGEALVGLEDLERAYGELLGRPFPSKGELDDLLQALRRYGIAKIEGAEDPLQPYHVVIRAGIVDVLGESALLQLAAHGVDLEEGSDEAA

SEQ ID NO: 33682 - protein, 1145 aa, Arenimonas malthae CC-JY-1
MKLLESVTLVQFFLYERQDLTMGRNTAFLGPNGTGKTALLDAIQAVMLAADAHRTHFNSQANGKKRARTLRDYCLGVFDQSEEGRCRDVANTYVALGFRDETSGQVVTAGIALSASAHSPEVIVQGLFILPGVAVDSASFLEQGSGGSQVLPWKRFQAQAADACRQAGSIGTAVFTTNREDFTRRLLVEHLAAPGDRPNPQAFRNAFQRSLQLKGMDDLSVALRDHLIEARPTNVREFRLRLDQFRQVRDVVRLTKEKIDQASVVCGKYDVVRRERIAEANYACLRAVYDSERLGESMAEASETVTTLAGELDRAHTEHRRAQAAFEAADAAKERAIATLNQDPDYARQAGSAQHLGDRQKDLAQQQRALRASVQAMTAAVRTAGGLPVLLERRGLFEAALTQLADLDSRLAPDAGTAPDAVSVASALRQVELAYQAVRRALAAAEAEYKEAEARRKDAALALERSNRGLAELNPEVARLQRELTEAGIDCTPVCDLVRISAPAWQPVIEAYLGPHVQALLVPRGKEIAAVRAYEGLRGTQAVYGVKLALPSRLRPYRAPAGGQPAALLVDGENADAVTYLRGELGSVMCVESLPDLVAGQKGFTRTGMIATGSGVERRRLASAEHLRIGRTDSHAQRRKAQAELEESTRLATARKAEEQALQGALLQLTPFGNLQVTQHDIEQRLAEIAAGQAVVQDLTERLATTATPGTRSLQDAVTAARLAAVEAKRQESQGLERVTTLKQRLETSQRTVNELAGQLALAAGTERTARQDALYDAQEVDRHRARLDERHPVMDARMQACEAAIQRARSSAASADREAWSLLAAYVAQYHLAAEGLDGQWIPAQRFIQRERQRLEETELAARLEESEEAYQRALEIFRTDVAQALLSGFDRVDEQMRGLNLVLKNAPPFSNNERYQFRSRVVDLHRPLYDFLQRVREVGGDDGLFGEAGQVPEAFRELMEGDASSVLLQDGSPLADYRRFFSFDVEISREGKVIGLLSKRFGPGSGGEHRTPLYVIFGAALAAAYGKVQGQNGGGGIMLLDEAFDKMDTQNVRAAAQYLNSLGLQLIMAGPETDQPKLSSFLSVYYDMGRYGGKTIQMDRTVLTDATRELLASDNPLYHPELIEQEMARLARERGDGSQPGDA

SEQ ID NO: 33683 - protein, 397 aa, Arenimonas malthae CC-JY-1
MDLSQATLEQLLARGERALHAASTRTIRISFKDTQSPYWALTLDDRVLLHERMRAAETAGAVRLEWSKLGGDERPLDGVVLVSLRHLAAHLGRPTVADQVDTAERVLAPWAASELPIPTLLATWRSLRTVRGMGPDAAPDFADAARLVCHLRGQPAEDRVLRQVSVELFAHSKRIEALQRHVDVLTAEDVQAPARHAEEVFARIGLRKEPQPFLVSGHGKILLPGEACRIVRPYVGVSPSAVIGYAGAPAWILTIENLTTFHVAAMALGARTDGLILYTGGMPSPAWCRAYARIRAALPPRATAYHWGDIDEGGFRIALVIQQADPATAGLHPWLMDPIACGGRRVEVSPAACAAMSRNALRLGWNAVANGIRDAGTRAGCEQESIPVRLPGLGPAG

SEQ ID NO: 33684 - protein, 478 aa, Arenimonas metalli CF5-1
MPVTDPNANTLFDRLPRTVFRPLAAANNTRYWDLLGRLVDEFWGDGARTPGEDVPKSELIAALESYLVVSDPWEAEDGAAPDTPANIRAHGIYSVFRDSGWLSQRKRGVRDMATIRPVLAQFHTLLREFGTKEPEFLGSEVRSVFLNLQEAAGGKGDAYAKAAREAKHCMTHLASTGVAVYDLMASLQSVASTREFVAGYFDDFIRRHFIGDYHELRTKAHPLQHRTAIVTLTLQIQHDPERRKDIVAWYQHNTAGGDADRAEAYFERDTRRLMRLESVEDELRRLDDEIRAANQRALAYLDYRLRAPRHFDKLIARAITGVASLRDGDRAFPAGAAGELAGEGWLGKARQVTREPDATRVQTRVPTLEELALQSLRKRMADARLVRPDKLAAYVARHLQGATPVFSDQLQIETVSDLCCYQRLLLIASRNEAPLAAARQDPFVQMLPAVRIQFVDGPRTLNPYVEHRRFVIQREKAA

SEQ ID NO: 33685 - protein, 201 aa, Arenimonas metalli CF5-1
MTASWERLAEATDGRYTGADFERAAYQLLVEQVVYAADRGSATPYHLLVTYAAAFKDVLDRLGVTMQHNHHHNYVVALARHRVGPRMRLSETRLALVLRRLYDDAIHRADVTDGEALVGLEDLERAYGELLGRPFPSKGELDDLLQALRRYGIAKIEGAEDPLQPYHVVIRAGIVDVLGESALLQLAAHGVDPEEGSDEAA

SEQ ID NO: 33686 - protein, 1145 aa, Arenimonas metalli CF5-1
MKLLESVTLVQFFLYERQDLTMGRNTAFLGPNGTGKTALLDAIQAVMLAADAHRTHFNAQADGKKRARTLRDYCLGVFDQSEEGRCRDVANTYVALGFRDETSGQVVTAGIALSASAHSPEVIVQGLFILPGVAVDSASFLEQGSGGSQVLPWKRFQAQAADACRQAGSIGTAVFTTNREDFTRRLLVEHLAAPGDRPNPQAFRNAFQRSLQLKGMDDLSVALRDHLIEARPTNVREFRLRLDQFRQVRDVVRLTKEKIDQASVVCGKYDVVRRERIAEANYACLRAVYDSERLGESMAEASDTVTTLAGELDRAQTEHRRAQAAFEAADAAKERAIATLNQDPDYARQAGSAQHLSDRQKDLAQQQRALRASVQAMTAAVRTAGGLPVLLERRGLFEAALTQLADLDSRLAPDAGTAPDAVSVASALRQVELAYQAVRRALAAAEAEYKEAEARRKDAALALERSNRGLAELNPEVARLQRELTEAGIDCTPVCDLVRISAPAWQPVIEAYLGPHVQALLVPRGKEIAAVRAYEGLRGTQAVYGVKLALPSRLRPYRALAGGQPAALLLDGENADAVTYLRGELGSVMCVESLPDLVAGQKGFTRTGMIATGSGVERRRLASAEHLRIGRTDSHAQRRKAQAELEESTRLATARKAEEQALQGALLQLTPFGNLQVTQHDIEQRLAEIAAGQAVVQDLTERLATTATPGTRSLQDAVTAARLAAVEAKRQESQGLERVTTLKQRLETSQRTVNELAGQLALAAGTERTARQDALYDAQEVDRHRARLDERHPVMDARMQACEAAIQRARSSAASADREAWSLLAAYVAQYHLAAEGLDGQWIPAQRFIQRERQRLEETELAARLEESEEAYQRALEIFRTDVAQALLSGFDRVDEQMRGLNLVLKNAPPFSNNERYQFRSRVVDLHRPLYDFLQRVREVGGDNGLFGEAGQVPEAFRELMEGDASSVLLQDGSPLADYRRFFSFDVEISREGKVIGLLSKRFGPGSGGEHRTPLYVIFGAALAAAYGKVQGHNGGGGIMLLDEAFDKMDTQNVRAAAQYLNSLGLQLIMAGPETDQPKLSSFLSVYYDMGRYGGKTIQMDCTVLTDATRELLASDNPMYHPELVEQEMARLARERGDGSEPSDA

SEQ ID NO: 33687 - protein, 397 aa, Arenimonas metalli CF5-1
MDLSQATLEQLLARGERALHAASTRTIRASFKDTQSPYWALTLDDRVLLHERMRAAETAGAVRLEWSKLGGDERPLDGVVLVSLRHLAAHLGRPTVADQVDTAERVLAPWAASELPIPTLLATWRALRTVRGMGPDAAPDFADAARLVCHLRGQPAEDRVLRQVSVELFAHSKRIEALQRHVDVLTAEDVQAPARHAEEVFARIGLRKEPQPFLVSGHGKILLPGEACRIVRPYVGVSPSAVIGYAGAPAWILTIENLTTFHVAAMALGARTDGLILYTGGMPSPAWCRAYARIRAALPPRATAYHWGDIDEGGFRIALVIQQADPATAGLHPWLMDPIACGGRRVEVSPAACAAMSRNALRLGWNAVANGIRDAGTRAGCEQESIPVRLPGLGPAG

SEQ ID NO: 33688 - protein, 477 aa, Arenimonas composti TR7-09 = DSM 18010
MQEPAPLFEVLPGGIFGPLASPNRRHHWALLCRLYDEFFGPDAPLAPPVGLPRREITAAIERWLLGDDPWEDEDGQAPDTPLPVRANAIYERFRASGWLRQERFGAREMVTMPPLVAQFLATLVEFAEHGPTYVSAKVRSIELQLQQVVDGKAAGDALDEAADQARRLLVSLSSMSLRVRDLLPEIARADSTAQFARIWFERYIAGFFIGDYADLHKVDHPLARRSAILAMARSLDEGERRTGLLAWYREHATGGDATRAESRMARSLRRLHELDRIDEYLARLDEDIRHANRRALAFLDYRLRAPARLDVLIARAVRGALAAPEDALRVQVAPGPLMDEEQLRPARRRPGAIERSANAVVRPTPEQQARLALLRRINRARLVTAEDMARYVGRHLPAEGQVDSIALSITGIADLRAYQTLLTLALRSRRIGGLRRDDPLSRLARGFRVELTDAGERADNGWLRAPRFVIHRLRKSA

SEQ ID NO: 33689 - protein, 209 aa, Arenimonas composti TR7-09 = DSM 18010
MSRSWNVLSQHSNGLYAPADFERAAYRLVTEQVLYASDRGSRSAYHLVEAYFAEFAAVLAPLGVRLERNAHYRYVVALPARAEGVPVTLDETLLLLVLRQRYDEAARRGDIEEFGEVVVELPELQEAYRRLVGRPMPEVGTLRTLARTARRWGVARLVESDADDPQPFHLRVRPAIVDIVGETWLQRLDQHNRDDVAEEAVTEDDDAAA

SEQ ID NO: 33690 - protein, 1143 aa, Arenimonas composti TR7-09 = DSM 18010
MQLLERVHLVQFFLFEAQTLELSPTSAVIAPNGAGKSALLDALQIVLLGADRTRIRFNAQAGGSVRARSIRDYCLGVWRSGDEGRKRRTATTYISLVFRDQETGEALTAGIALGASVDEPEHRVYGMYLVPGVALTLDDHLERAGGRELPLAWAGFRELLTQRCREAGSGSGPELHAGSERFLKDLLLRLRAAPAGQPDVAAYRKAFQNALNLQRVEDVDLFVRTLVAEDRPTDIARFRGLLQTFRSLKERIEQVVARIAAAEDVDGQYGKIAQQAARAASCRALAAEYQRDLLSEQVEQAENESAAASRRLGETRRALVEASSERTMLAEAHAQALARLQGSAGYGEQAQIDELAGRDRGELARLRRELTRGIGLVREQLAAVAKLGLPSIDAAAVAQAMAPWQHWHETLAALPAEAPLPWPAAALFDEAQRELAAVQPLLAAVEAQARALHTQVEDAKRRRAAAQQNQKRIAAGKAELHPDVMRLASYLADEGIAATPVCDLVRVRDAAWQGAIEAYLRSNVEALLIAPADEERAVRLYRSLGGARSVYGVKLALASAARRGPDEARPGTAAALLEGENADALGFLRRSLGELRCVDTEAELIASRQGLTRDGLLARGGGIERLRLPAASELKIGASDNRARLRVLHEEAAAAENELRRLEPALRELENCRRGLALLAEPGKLAQDLHDRIVDHRQVQRRWQDAIDSRAAAQDPDLLRASEQVRELAGQLATCDSRRDALIGKVAMDERAEADAQRLLAGLREQEERVTRDAVDAFRDPDVDPNLVERVREELDAKWPTLKERAERCEERAKDSDRQLDNLKPQAWGALAQYARDHVLELDLAPGDWRAARRLLAKELAQLRESELANYQREADEAYATATETFRSSVASALFDNFSRLKHQIATLNRTLRASPAFSNNERYQFHFEVASEYAELYRFIRRVAEIDGEDGLFGSAGEVPAAFRELIEDDAAKHGAVSALDDYRRFFHFEVQIRQDDRVIGSLSERMRSGSGGEHRAPLYVIAGAALAAAYGKTAANGGGLGLILLDEFGDKIDAQNARATVDYLRSLGLQLLLAAPDTAQGTLSGVLDSYIELFRDGDLLQVEHIEVGAAARALLLSDQFDLHPELLEAEVARITAGEAQV

SEQ ID NO: 33691 - protein, 398 aa, Arenimonas composti TR7-09 = DSM 18010
MSGVDAVLRRLLRRAESARRRGDPRPVSMNMAKVEEYTGLRTLAALEHFHARIALAERMGALRAERDVNAGDGSRLVRLMVVDAAALAAAVGVELLEDRIAAAQALLVDWRDRFPVVEEVLSRWRDGGKVRGAGPEAAADLRDAAKAVAARREDHAYERVLRRESTRLFGDSKRLEKLTRWLELIATGELAAGPLPDVEVWAMLGLRREPQPFLVAGTGEADVAGMALPLVRPFIGLPVEQLRGLATGVRCVLSIENLASFHDAAQSADAGNVLLLYTGGMPSPAWRAAYRRVLAGIDPTARVFHWGDIDEGGFRIAATLAATAAEAGYGLRPWLMSPDQLPPAVRSDAATPNPAELERLCRWAARAGWEEVSTSLRRQPMLLEQEMLEPVLPAPDAS

SEQ ID NO: 33692 - protein, 485 aa, Nonlabens ulvanivorans
MFEIEDINKILNESPSLELLQTKHRNLTIPFFVHAFKKSETSHSQKVLESILVDYLQHINYTEESEDLLINTESLEVKAKRKIKEWRGAGFLYQSIIDDGTITYDLSQYSLRSLDWIADQKRTEFVGTDSKFKSVYEKIKDILEYTDDNLIKRKQILEERKLTIQHQIDQLEAGEAVLLYDEREIIEHFQDLLRTAKDLLIDFNEVEENFIRISKDVYSKYSSNQLPKEEILNLTFTALQELKNSNQGKSFYAFWKFLLDTDYQEDWSKLTNELYSRLEQKNIPHEDTFLKNLKQNLNQAALKVTGANTKMASKVARIIRDSGTNQKITKQLLFDIKKLLSKISKQSIVPDIGIELDTKPVFILPLEPGLTSQMKEEVIYTKRPATADDDYTKAKSINKLYENSGIDRLVLRKRIADIIKDKDQTTLEEIINIYGGIKEGLPELFGYIGELKKFKHNYNTNKNISIVFDKAENKTIKIPEIILVR

SEQ ID NO: 33693 - protein, 192 aa, Nonlabens ulvanivorans
MNITTEKIKPYSKVIVLLLKGVVESKSSKWDDIFQYEDKIREYLSVIGLELIYKKEDGYAFLKQVELDEDESTIGLVSRRKLSFGASVVMVILRQILEEFERDLDAYETQERFITEEELKSEIEDFLPQDYDKVKFYSDLEKNISRISDLGYLNKSVADNGETVYSIHKIIKEKVTLDTLLNFKQNLENYGL

SEQ ID NO: 33694 - protein, 675 aa, Nonlabens ulvanivorans
MEVFNWGGTFHDKVWRINPEGNTTLLTGANASGKTTFIDALLTLMVPYKKDRFYNQSSGEEKKGARTEESYVLGHYGKKQNEGDLSATVQALRDETAISILLATFKNEDDKYCTIFQCRWFSNGDLKKQFGLAHKGLRIEEDFFPFDTKRKWKDNLMAKHPDIGRGNPIEYFSGPGDYAERMVRLFGMRSNKALSLFNQVVGIKYVEDLDLFFRNYMLEDKDVNSHIEYKELIGSFNELTKARNDIEKAEEQIFQLKPITEYAEKIKTTSSELKDLEISKHTSAYWFSAKGKELSEKEYARLEKVIENIESKIKIIDAEINGLRDKEAELKVDIKSSEAGRQTEALEKEIKELNIKLQERSKALTKYNALAQSLSFTENPSEKVIAEKEAALVKKTGCETKDKELNKCIRNEENKREESRKNIETTKVSISTLIKNDNNIPTSVARIREDILEAVGANKNEIPFIGELIKVDENSQDWEFGIEKLLHSFALRIIVPEKYYKAVNKYVNSTNLNGKIFYYRYKETDTLLENRIEDSEKTVYSKLNFKPDSNYKNWVQEQIFEQFNFYCADDLLDFENSKRALTKEGLINFGRGRHQKDDRKSFGNRSSYVLGWDNKAKIKSLRELLTILTDDETNAIKEIGKLENKIELNKNQRDNYYNFINLFENFDSINWGEIC

SEQ ID NO: 33695 - protein, 480 aa, Acidihalobacter prosperus
MLFDDTRRHFFRPLNGKYRGQVADCLILLYTRLYGAYADYSRHFMREQVVEVLEEAIARSPVFDEDEADEYTPGARSPREQANWILALLLEHGWLERQMDEVTLQASYAFTRHGRLFTQPMIDAAGGRFRTRHRNTRNTRNALQSFLDKGEAYDLLDAYEYSERIVADFSDVIAELDERRRELVREVESQQIVQRASDEFFDFMEKRFMPDVAIRLSADSVEKYRDEIAGLIERIKRKRREFKEQAEHELRRAAPELIEAPGRSVLYAILDGIDARMHNASTTMLPALRQALNGFTRRADIIMRQLSYAGGGVQNRLLRLTERFRQATPEQQSQALAVAGEALATLAVGFVVGDAVRLHAARRPRVVNARVEAVPMHDATTRRELFLQSALDQAFAFNSRAQREYVLAALRDGHRVHSQNLPVRDARDLLMSAHAIEIGALSTSEFAVRVTPTRQRVTTDYFEATDEFTLELTTPQDHAD

SEQ ID NO: 33696 - protein, 199 aa, Acidihalobacter prosperus
MCLRLLNYGVLCRDESQIEQQLYDRYLRVAEWVDDYLSVVGVRVFHDRRFAYLRLYPPGSRMPGVEEASEEAFAGGLRARLRQDEVALLLVLRQQYDKALREGQLDDGGYVTESIESLGIALRNQLGRMLPERLTDRKRVFERLRRLRLIQYRQEDDLDTGEAGLRIHPMITAFVTDEALIALEDALPAEAPPEEDDVS

SEQ ID NO: 33697 - protein, 519 aa, Acidihalobacter prosperus
MFLKRFVFINWGNIPSIDFEFGPLNLFSGGNGSGKTTAADAIQTVMTAAHESLFQYNPGQDETTQRGRGGKRVRTLASYVLGCDDGSYARLDPTDGYVAAVFQPNEGEPAEPFTAVIGVRAWLDIAGGNTVARQDDAQYFIVPGAELALGDFVREEESGRYVVALSELQTELIRMLGKRRVERYDAKKAYLRRLYGALRGKPDSVTETEAVAAARAFSRFMAYKPVKSIDRFVAEEILEPKDLGEAIRSVSSQLKTIHGMERDASRLLASIDTLARANAHAQAYIDHWIDLNLLDYTLAQAEYGLRQQDYLRGKALQREQRAEQAELEARLATVQTQTVGVQRQLIELEAQRQGVDALRQKDEIERQSQALGEALVEGAHRLVEQDRTVAANVEATRTILRALDDPSVAETLPGPSASEAQALGRAVVETAGEMLADVHALVQRDIAGGGAGLEQRLEALLAVQRAHNRWHALWHAARESGSARDRLMNLAHAARARYGALAHQATRNGARSNASARIW

SEQ ID NO: 33698 - protein, 335 aa, Burkholderia pseudomallei; identical to SEQ ID NO: 32789

SEQ ID NO: 33699 - protein, 223 aa, Burkholderia pseudomallei; identical to SEQ ID NO: 30855

SEQ ID NO: 33700 - protein, 1210 aa, Burkholderia pseudomallei; identical to SEQ ID NO: 31063

SEQ ID NO: 33701 - protein, 377 aa, Burkholderia pseudomallei; identical to SEQ ID NO: 32792

SEQ ID NO: 33702 - protein, 335 aa, Burkholderia pseudomallei; identical to SEQ ID NO: 33027

SEQ ID NO: 33703 - protein, 223 aa, Burkholderia pseudomallei; identical to SEQ ID NO: 30855

SEQ ID NO: 33704 - protein, 1210 aa, Burkholderia pseudomallei; identical to SEQ ID NO: 30856

SEQ ID NO: 33705 - protein, 377 aa, Burkholderia pseudomallei; identical to SEQ ID NO: 32792

SEQ ID NO: 33706 - protein, 335 aa, Burkholderia pseudomallei HBPUB10303a; identical to SEQ ID NO: 33027

SEQ ID NO: 33707 - protein, 223 aa, Burkholderia pseudomallei HBPUB10303a; identical to SEQ ID NO: 30855

SEQ ID NO: 33708 - protein, 1210 aa, Burkholderia pseudomallei HBPUB10303a; identical to SEQ ID NO: 33056

SEQ ID NO: 33709 - protein, 377 aa, Burkholderia pseudomallei HBPUB10303a
MSGASLWLKSMPVQELLNMLVDRLDAAEQRGSTKAKSVQLDERTWPALYMSPVESQKEHLWEHVVAMVRCGWLAVKPETALKSRSGYASSPRVSVVDQRELRAAVGRQERVKSSAERWRDAVSSGLLASDTVKRLVSEYCIDIPGRTMTEVVEQLNRLPALAEKSMLLREVSSQLFWGMSKVLDKRQGLVAAILGMDDCPFPESPIQLHVFLPAGGHRGVLFIENSVSFECAMREPRGVFGELALVYASGFKGSAQRLRTTEGCSLFYAAGGGLERDLRATFEGWLFGRQEIPSYFWGDLDFAGMRILAAMRATFSGLTAWVPGYAPMLTVLKGGGGHPPEAADKQGQKPIASTGCEYADEQLMPALQTFRRFVDQE

SEQ ID NO: 33710 - protein, 335 aa, Burkholderia pseudomallei HBPUB10134a; identical to SEQ ID NO: 33027

SEQ ID NO: 33711 - protein, 223 aa, Burkholderia pseudomallei HBPUB10134a; identical to SEQ ID NO: 30855

SEQ ID NO: 33712 - protein, 1210 aa, Burkholderia pseudomallei HBPUB10134a
MKLDRIVLVNWGQLRPGDYDLGNMTLLTGPTGAGKSTMLDGLQTIMTAAYQGIVAYNPGQEEVQQGQRSGKSKRTLESFVVGAEYSRFSRPHGAHGYMAAVFRPGPDEDSAKTFTALVAASAQVDGIGERRVPKLERLELVIVDDAALTVDDFLKDAEQSEWVAVEEIVKRLKARYSKVVTYDGHKRDYLCALYGRFRGRISITWDEAQNAAKAWCQSIAYKKIGSVHDLVRDDILEYDGKQLQESITRISDLMRQVTNLKQEGQRLEATVGRLRGLKTAIAQTTSAFEEQVQYDLLLAKMLVAADDERIAQEQKRINDDSALVTRCEQKVKAEERLKAGVDRSRIDIAAKLSGIAANAEKERLDQQLELANSAARHKLAELNTGLQEAAQIVNAATGLLRKPIPEQFPKLKASVDAVGRVTASTDVARLDGLLGAVLDASSDAQLNVEKLFRLTPAFAGVEEGLAALHSYLVGTEDSVLMAVASETSELTQRVEATRKARKELADRKELLASGASDYNRDTRMALPRIRECLPEAGVQVLCDLVEPVSDEWQEAIEGYLDNARFNLIVKPEWEARTIDLLHSWGSRCKVIQGKRCLQRADAGRVPSDSIIHELRTDHPIARAYLIEQYGAVVKVRDSEQLRDTARGLTKDGKGSGSRTMFVGERRDLVLGRKAREQALRATIEKLDAADRGIREFEQLQDTLSSVKRLLGNLREPVFDAMPLGQAAGEIDSTRRSLAQLDLTEVEQLRAERAKLELLIAGHDAEITAVNKEITLASQRITDAQGAIERINGGRDARFREREDQIRRLGQMCETNSEKTYTVIAEEVEGLLKSRRFDVHSVQVRLNTLRAQPDKLLGDVREMLAEYNANARQEERFQSALPHLHDATMFDPYYGPLVALGRAVGALHSELEGIGLYNNRAKVEEAERSFHDVFTKQFCVEIKSKVDDGVRLLRQLNMELERLKFGTDRFSIDWSKWEPEFQEYYSFFSAVTDLADSVETVDLFGETELTPKHVEVRDRLVKLLLDSDQERAGRELLRIADYRNYRRYEIWNDSDSGGRIALSTWGTGSGGQLETPAYIVRAAVVTNRLKFFEKGPSLKMLVSDESFSTMDEPRARAVLQYLRESLDIQVISAMPTRGAGGLRSEFDREYSYSRVPVDANGELDFILEYDERIFKKDKMRELWEKQRAAARAQAELAFGAAEAAQQAEALK

SEQ ID NO: 33713 - protein, 377 aa, Burkholderia pseudomallei HBPUB10134a; identical to SEQ ID NO: 32792

SEQ ID NO: 33714 - protein, 335 aa, Burkholderia pseudomallei MSHR5858; identical to SEQ ID NO: 33027

SEQ ID NO: 33715 - protein, 223 aa, Burkholderia pseudomallei MSHR5858; identical to SEQ ID NO: 30855

SEQ ID NO: 33716 - protein, 1210 aa, Burkholderia pseudomallei MSHR5858; identical to SEQ ID NO: 33056

SEQ ID NO: 33717 - protein, 377 aa, Burkholderia pseudomallei MSHR5858; identical to SEQ ID NO: 33709

SEQ ID NO: 33718 - protein, 490 aa, Burkholderia xenovorans LB400; identical to SEQ ID NO: 30493

SEQ ID NO: 33719 - protein, 277 aa, Burkholderia xenovorans LB400
MSFESEQSAASRPPFFPGSSRSPGSSEEMPANLPSNVAHWLDTADNDEPAKPAAPPSTLLFNGDTGNLRLDTRRCLVSLLNGPSVDGRRQAGLWSVLLRDREVIQTYLHNIFLDLVVDIAQQVAFVRQVPDESETDIPILLRRHQLTLVESALVLFLRQRLTEADSANERAVVSTEEMVEHLSLFDQARNTDLARFDRQCDGAIKKCKALNLIRPIRSSATRFEVSPTLKLLFNAEDIQALTAAYEALKSAPGGTSELTMDQAIAEGEREADEDEDE

SEQ ID NO: 33720 - protein, 1137 aa, Burkholderia xenovorans LB400; identical to SEQ ID NO: 30495

SEQ ID NO: 33721 - protein, 429 aa, Burkholderia xenovorans LB400; identical to SEQ ID NO: 30496

SEQ ID NO: 33722 - protein, 440 aa, Pseudomonas aeruginosa
MLAAYASQDLYEIDPDATHIQAGRELREWIKRRLVVEREGRIYATDALESAIQFVDSLDSRIMTSTASRLSVVQREIENLETGLNPSPSGRIASLRRRIQDLEHELAQVEAGHVVVLDEAQAIEGIREVYNLATSLRADFRRVEDSWREADRALRQSIISEQSHRGEIVDRLLDGQDALLNTPEGRVFESFQQQLRQSAELEVMRERLRTILRHPAVPKALNRPQQRELRWLALRLVRESQAVLQARARSERDVRGFMKTGLAAEHHRVGQLLNDFFNLALSVDWQRQAVRRSTVRLPPVGVAITGVPAIERLRFKTLDDDDTGELDLSLKPAGLEQIDDDFWDAFDGLDREALIHDTLAVLVEQGRPVSLGELASLLPPAHDLETFALWLAMAREAGIEVLTEERQLVELVDEDEQRWRFNLPYVGLDHEALKDIGWEL

SEQ ID NO: 33723 - protein, 249 aa, Pseudomonas aeruginosa; identical to SEQ ID NO: 32506

SEQ ID NO: 33724 - protein, 1101 aa, Pseudomonas aeruginosa; identical to SEQ ID NO: 32507

SEQ ID NO: 33725 - protein, 484 aa, Alcanivorax sp. 19-m-6
MFFSDERAQFFKPLTGKYREQVVECLRLLHERLYSAKADYGESLKRDQVLDVFSEALERAPLLDGDEDGGRFRNNREQAGWILNLLVEHGWLKRDKDEASFQSTYPFSRTGRLFTQTLAEVDGRSVRTRHRNTRNTLNALAAFVDRGEVYDLLDAHEHSERIIADFTDIIAELEERKRELVKEVESQQLVQQASDQFFDFMEKRFQPDVAIRMSADSVEKHRDRIQNTIEQIKRKPKAWKGNAENELRRLAPDLIVSQDASVLFQLLDSIEMRMRNASEIMLPALRRTLQGFTRRADIIIRQLSYLHSQKHNDIVGLCKELSELDEATYNERLQQAGDALASLHLGFVDPAQVRLREQRSQRVVHSRMVELDDPDADTLRELATQQLLEKAFNINGGALRDYLRDALGASRRIDNRDLPINNARDLLALSHVIELGSADHAANGFRLRITPTDPITDEHYFVRRDGFLLELEHDEPSTATTRPE

SEQ ID NO: 33726 - protein, 232 aa, Alcanivorax sp. 19-m-6
MSQAPLQHALSEALNARGVTQAQFSELMIRLLDHGVLCRSESKKEAELYDRYLQIPELVEDYLSVLHIRLHHERRFTSLRLFPPGAEIPGEADSDDGFNSGLRNRLSQQEVALILVLRAEYDKSLRDGQIDEHGQATLPLEAINLASKNLLGRPLPEGRTERDALFRRMRQLRLIRSDGDNSLEDNETWLTIRPDITSLVTDTVLSQLLGEGARPASNDDAEEPSEKDEGEQ

SEQ ID NO: 33727 - protein, 1217 aa, Alcanivorax sp. 19-m-6
MYLKRSITVNWGNLPPGELEYGPVNLFSGGNGSGKTTAADALQTLMTAAHDNLFNYNPGQDETTQRGRGGKQVRTLASYVLGCDDGAYARPYDSDGYIAGVFHPTKGETAEPFTAVIGVRAHLDKAGSTSQARQQELLLMIVPGEMLNLSHFVREYGGEKATVPITEIANQLRQQFGKKNVETYDKKGQYLARLYGALRGKRDAVSQQEAKNAARTFARFMAYKPVESINQFVASEVLEPHDMGDTLRRIRDLMRTVHGMAEEAEQLQQNVNLLAQAQSHTDTYLDTWLERTTQAYGAAAQQFQRNQKQYLEKKEEQNSLRQQQEGNREEAEQVQQRLDQAHAELVELQARILGIPALRDKQQLEKQLADLTQQLQQGARPLLEQDQQRNKNLEALRNIQGLLARHSIELELPSFASKHWRNTSKALLTEQSNALPDLNQMLARDWIDLSPLEDGLTRVRSEQQLHNQLAEQLHSEREDKPGQEALSVAQRLDRIVNKRGQALETLDQQQKKIEQQIRNLESKRVNYPQDVEIAIHAIRQECPQAEPRVLCDHVEVQDPDWQMAIEGYIGGARFGILVEPDHEAEAIRIVRRLSGKQRNRARVIQGEQARRDAERVQLPDDSLFHALRFSHRTAEHYLKASYGSVVCVEDAEALRRTRRGITADGLGSGGYAMFRCDLPDSDLVFGEAARERNLHAQRNALMELQDNYQRAADDYQSVRQLHTQVKAFQPLHWVNAATQLLDAQRQLQENEKALATLDLSDHEALEEKQQQAKTLHQELEAKQKQLTEENGKLSEKLSACRKIISTLADQSERFQEAQEEAEANLHGCTKYWPGLDVEPRIEAMDERLQNAHGDIDFIAEEEALTGQLSRTFIALEKTLDHYNQQAQPADQILADSADALHSAPFFGHVQSLHQQLDNLHNRLRNNVLLEKQEKLTSLRDTFNTTFVSDLCSQIHQAIQDGERILKSLNSELEHHQFGADRERFEFDWQWIPEYKEYWNFFKEVIDIPNLGDGTSLFDTPLSAKAEAVRDRLLNLLLDGDEQQALRELERISDYRRYRQYDILKHPQGKQPISLSQYGTGSGGQLETPAYIIRAAAITSAFRFNEGDSHLRMVIVDEAFMHMDESRSKSVINYLTNTLGLQLIFIMPTSKAGPFLDLISNQFVFSKVPSPMAVGELNTRVLVDRQQLNQERISELWEQHRRVIRQQGALDFMDEISP

SEQ ID NO: 33728 - protein, 371 aa, Alcanivorax sp. 19-m-6
MTTPIWLKDEPWLAKWLGWFLDKLDNRDGEPSQRAITRRIKKSTLPALYDFNEDTQGRWQLLQHIAREHRIFEIVLDNKRSAFQEPYENAQCRLNPDCEALLREWLNRPQQDPLAQAWQQAINEHAATFTDNGEALLNQKPQIPGLTPAEIVSAFASVEPYLNQNLTLREIAARCFNGDSKTLDNRFELLLKLYRDNANGIQPRPLLLTAWAPPGFTKLLIVENQDSFLRLVENPPEDYALLYSGGFRASATRLSSEHTRFAFLPGSDPKRFKQRWLDKRTQCYFWGDLDFAGMGILKALRNSLPNLQAWQPGYQPMLEILNTGGGHTPQQTGKTAQTDPGTTGCPYTDTILLPALRQHGKSVDQEAIHIQ

SEQ ID NO: 33729 - protein, 315 aa, Burkholderia pseudomallei
MVDAYEYAEKVIEDLADGIDYFQELVRHLMQAASAHTQWNEFVDFLDRFQRDYSKQLTADNATLNRQAIRQKLEKLRAVPEAKFNRMDAQLRDIAHWMAKEYTGSSLYDWLLGRIEDIVDAACESKQPGFLKAMETYLKRVNGLALQSMMLRSGQTRHAYLAAVQKVAESPKLEQDRLLKLVGQFLAPAEVRVLDPASFKLKTATQRRKAVTVSIRPRPTREERLAAAMARAEAEVFSIPNEDVAQGLRADLRLFQHPIRVSAMPTASARDVIRAMQAVEAARSAIGGDLIVKKLPTRLENEFYGANDYEIDLKK

SEQ ID NO: 33730 - protein, 223 aa, Burkholderia pseudomallei; identical to SEQ ID NO: 30855

SEQ ID NO: 33731 - protein, 1210 aa, Burkholderia pseudomallei; identical to SEQ ID NO: 33056

SEQ ID NO: 33732 - protein, 328 aa, Burkholderia pseudomallei
MSPVESQKEHLWEHVVAMVRCGWLAVKPETALKSRSGYASSPRVSVVDQRELRAAVGRQERVKSSAERWRDAVSSGLLASDTVKRLVSEYCIDIPGRTMTEVVEQLNRLPALAEKSMLLREVSSQLFWGMSKVLDKRQGLVAAILGMDDCPFPESPIQLHVFLPAGGHRGVLFIENSVSFECAMREPRGVFGELALVYASGFKGSAQRLRTTEGCSLFYAAGGGLERDLRATFEGWLFGRQEIPSYFWGDLDFAGMRILAAMRATFSGLTAWVPGYAPMLTVLKGGGGHPPEAADKQGQKPIASTGCEYADEQLVPALQTFRRFVDQE

SEQ ID NO: 33733 - protein, 386 aa, Burkholderia pseudomallei
MVIRALVADGWLEQFADRTGLVAAFRFSRPGKLFSEALWALDRPSRSRQRNMRGCRNALEAALSERGDAHDLVDAYEYAEKVIEDLADGIDYFQELVRHLMQAASAHTQWNEFVDFLDRFQRDYSKQLTADNATLNRQAIRQKLEKLRAVPEAKFNRMDAQLRDIAHWMAKEYTGSSLYDWLLGRIEDIVDAACESKQPGFLKAMETYLKRVNGLALQSMMLRSGQTRHAYLAAVQKVAESPKLEQDRLLKLVGQFLAPAEVRVLDPASFKLKTATQRRKAVTVSIRPRPTREERLAAAMARAEAEVFSIPNEDVAQGLRADLRLFQHPIRVSAMPTASARDVIRAMQAVEAARSAIGGDLIVKKLPTRLENEFYGANDYEIDLKK

SEQ ID NO: 33734 - protein, 223 aa, Burkholderia pseudomallei; identical to SEQ ID NO: 30855

SEQ ID NO: 33735 - protein, 1210 aa, Burkholderia pseudomallei; identical to SEQ ID NO: 33056

SEQ ID NO: 33736 - protein, 328 aa, Burkholderia pseudomallei; identical to SEQ ID NO: 33732

SEQ ID NO: 33737 - protein, 335 aa, Burkholderia pseudomallei; identical to SEQ ID NO: 33027

SEQ ID NO: 33738 - protein, 223 aa, Burkholderia pseudomallei; identical to SEQ ID NO: 30855

SEQ ID NO: 33739 - protein, 1210 aa, Burkholderia pseudomallei; identical to SEQ ID NO: 30856

SEQ ID NO: 33740 - protein, 377 aa, Burkholderia pseudomallei; identical to SEQ ID NO: 32792

SEQ ID NO: 33741 - protein, 386 aa, Burkholderia pseudomallei; identical to SEQ ID NO: 33733

SEQ ID NO: 33742 - protein, 223 aa, Burkholderia pseudomallei; identical to SEQ ID NO: 30855

SEQ ID NO: 33743 - protein, 400 aa, Burkholderia pseudomallei
MCETNSEKTYTVIAEEVEGLLKSRRFDVHSVQVRLNTLRAQPDKLLGDVREMLAEYNANARQEERFQSALPHLHDATMFDPYYGPLVALGRAVGALHSELEGIGLYNNRAKVEEAERSFHDVFTKQFCVEIKSKVDDGVRLLRQLNMELERLKFGTDRFSIDWSKWEPEFQEYYSFFSAVTDLADSVETVDLFGETELTPKHVEVRDRLVKLLLDSDQERAGRELLRIADYRNYRRYEIWNDSDSGGRIALSTWGTGSGGQLETPAYIVRAAVVTNRLKFFEKGPSLKMLVSDESFSTMDEPRARAVLQYLRESLDIQVISAMPTRGAGGLRPEFDREYSYSRVPVDANGELDFILEYDERIFKKDKMRELWEKQRAAARAQAELAFGAAEAAQQAEALK

SEQ ID NO: 33744 - protein, 377 aa, Burkholderia pseudomallei; identical to SEQ ID NO: 33114

SEQ ID NO: 33745 - protein, 324 aa, Burkholderia pseudomallei
MSERGDAHDLVDAYEYAEKVIEDLADGIDYFQELVRHLMQAASAHTQWNEFVDFLDRFQRDYSKQLTADNATLNRQAIRQKLEKLRAVPEAKFNRMDAQLRDIAHWMAKEYTGSSLYDWLLGRIEDIVDAACESKQPGFLKAMETYLKRVNGLALQSMMLRSGQTRHAYLAAVQKVAESPKLEQDRLLKLVGQFLAPAEVRVLDPASFKLKTATQRRKAVTVSIRPRPTREERLAAAMARAEAEVFSIPNEDVAQGLRADLRLFQHPIRVSAMPTASARDVIRAMQAVEAARSAIGGDLIVKKLPTRLENEFYGANDYEIDLKK

SEQ ID NO: 33746 - protein, 223 aa, Burkholderia pseudomallei; identical to SEQ ID NO: 30855

SEQ ID NO: 33747 - protein, 1210 aa, Burkholderia pseudomallei; identical to SEQ ID NO: 33056

SEQ ID NO: 33748 - protein, 377 aa, Burkholderia pseudomallei; identical to SEQ ID NO: 33114

SEQ ID NO: 33749 - protein, 324 aa, Burkholderia pseudomallei; identical to SEQ ID NO: 33745

SEQ ID NO: 33750 - protein, 223 aa, Burkholderia pseudomallei; identical to SEQ ID NO: 30855

SEQ ID NO: 33751 - protein, 1210 aa, Burkholderia pseudomallei; identical to SEQ ID NO: 30856

SEQ ID NO: 33752 - protein, 377 aa, Burkholderia pseudomallei; identical to SEQ ID NO: 32792

SEQ ID NO: 33753 - protein, 386 aa, Burkholderia pseudomallei; identical to SEQ ID NO: 33733

SEQ ID NO: 33754 - protein, 223 aa, Burkholderia pseudomallei; identical to SEQ ID NO: 30855

SEQ ID NO: 33755 - protein, 400 aa, Burkholderia pseudomallei
MCETNSEKTYTVIAEEVEGLLKSRRFDVHSVQVRLNTLRAQPDKLLGDVREMLAEYNANARQEERFQSALPHLHDATMFDPYYGPLIALGRAVGALHSELEGIGLYNNRAKVEEAERSFHDVFTKQFCVEIKSKVDDGVRLLRQLNMELERLKFGTDRFSIDWSKWEPEFQEYYSFFSAVTDLADSVETVDLFGETELTPKHVEVRDRLVKLLLDSDQERAGRELLRIADYRNYRRYEIWNDSDSGGRIALSTWGTGSGGQLETPAYIVRAAVVTNRLKFFEKGPSLKMLVSDESFSTMDEPRARAVLQYLRESLDIQVISAMPTRGAGGLRPEFDREYSYSRVPVDANGELDFILEYDERIFKKDKMRELWEKQRAAARAQAELAFGAAEAAQQAEALK

SEQ ID NO: 33756 - protein, 377 aa, Burkholderia pseudomallei; identical to SEQ ID NO: 32792

SEQ ID NO: 33757 - protein, 456 aa, Methylobacterium oryzae CBMB20
MLFAQLSDELFKPLASPSRSFNAALLLHLHRRVLGAEPVRKAELLAEIGDFAAGWSDPEVSGDEPISADPTERRTALYRRLLDTGWLIERRERYVPVAEFDPEARLLLEELSRLERGETRSYGGAVLEVLGGLESALSDPANRSEALSNAARGAAAFLSHVRGLAAGMRKVEERILREPDRAKTFRLFFEDFVERHLISDYRTLHTRFNPFRFRASVVREAGRALRDALTVRALAEGLIREGRSADLDAAQRAVRTDLAQILAVFEGLDNHLDAVDAVVARLERRIASALHVMDRPDPSGVERVAAMLRAVGGSEIAPDVPGDVSLLRPPIGHAHLQAPRARKAAIDMEPLPDIEDDPVVDAFAAAKAEFRRRTTVTPESMSAFVEARLGKAVRLRGSQIVIAGVDDFIVFQRLREIDVLFDAKLGERYAVTRLPERVANGWLDCPDFLLERRPYA

SEQ ID NO: 33758 - protein, 208 aa, Methylobacterium oryzae CBMB20
MLEGFRAIIDGDEPPPPGARAPDAEELSRALQVLLKGQVIYAETQGIGRSYELARHYAPFFTDYFACLGYALTVSHRDQMVSLSPAADAPRHDIVSERLRKDETLVLLALRLLYEEGLRDHRAGTDGIVDCTTDEIVEKIRTVARNEPPEEGRLADILRLYAKRGGLRLGERDRVERVTPLSLLPGLTVLASDAWMERLRAWSEAGEA

SEQ ID NO: 33759 - protein, 1145 aa, Methylobacterium oryzae CBMB20
MYVLTDIAISNWYLIRREQIRLRGAAALVGPTGAGKSTIFDAVGTVLAGNNASRLALNASASGRSARTVRDYCLGWISDPAEGGRPTRESCETVLVLVFENPDSGRVVSVGLALAARAVEPKETVLSRFIAVGHRFEVSDYARTAPGGTYTAPWSEIAADLRARAASFTEYRTSGERFTADVLATLREGAPSPEPRHFLRSFANAVAFKPIFDTSAFVRAFVLDPEPLDVERVRHSIANWRRLLETIAELESRLGRLRRLRDRYEAWGEAVLAAATHELRAASAELRRRSLDLIAVRSRLREGADTLRIARERVAASRGYVREIDGEIAEKKALATASAAEGRLAASTLGLSMLERDRKELIGRIGDLVGLVGQMAKLQPVAPILRQSCPQAARLAEACARAGLRRESSPEEILRPEGPLAELADGLVRLPDFDEALERAAEDAALKARAQESEAERTAPRTGGGPTARLSSDTVAFRGELERRGIDAVPICELAEIVDPTWGPALEGLLGRAREALVVPPDRLNEALGVLQSGRDRFHRCILVKTTDTAKQRSRRYDDGPLTVIETSDPHAEAFLGVRLGGYDLARDDAELARLARAVAPSGRTTAGMAYSVTRSVDLLMTRGHRGPTADSRRAHEIAVAEARRLRGEAAVLREAARTAAAIRARVARGLDDVEALRAELDGLDGRRRTLQTEREGIEKRDTAGLAAEIAALTTERVGYLRELSEELEPKLDRLLADEAALRARMGPVREAVRAALSARRAALRQLSAGDAARVRLARGEPFDLGVVAEARRALAGLDAKAAGTRVTAERGLARESAEAARSHGRIAERELAEACAAWRVENPLASGDAPAIDGFAWVRREYEAVEGHELRRYRAQAERAEVEMRRLMTEDLLTRLADRFERVHARLAALNERLSARSFTGQTYAFEAAVDRRYAAVHALATETARSPEAAQALLAGEAEGQMAAALEEITALIAGEEDAARLADYRNYFVYEIGMRDRAGNRTTMSARALRGSGGEAQAPFYVAIAASLASAYYPGDRPGDENPGLGLCLLDEAFSKLDVRNSQALVDLYRAWGLQLLIAAPEDKRTTLTEVMDTIVTVYKSPDLTSVRIEAEHPLEAARRALHAINPDQIGIEGFRQPDAAE

SEQ ID NO: 33760 - protein, 485 aa, Spirochaeta sp. JC230
MPLDYFDLRNMRRHHPAWRLMSADSAPLIAGFLDLAFRDQNHRSIPEAELTTRLEDYLYTLRDNYSDQDPEQDPFPRKAGEYLDDWAHIEKGWLRKYYPPGSDEAHYDLTPATETALRWLDSLFERGFVGTESRLQTIVQLLREISSGVETDKDKRIRELEAQRRSLKAEIDSIKNGSLRLMDGRALRERYFQVNRMARELLGDFRAVEHNFRQLDRDVRQQIAAWTGGKHQMLQTIFGEHDAITQSDQGRSFRSFWDFLMSPTSQDELTELLDRLYSLEALEDETRNDPRLRRIHFDWMAAGEQTQRTVARLSRQLRNYLDDRAYYENRRIIELHENLEALALTVRHRIPPGDFMELPDSKPDVRLPLERPLFQPPVSTDLTTLIQKADLEQLDSSALFDQIVVDKARLRRTIKSALESESQITLGVIIHRHPLTEGLAELVGYLSVAAEDGRAHIDEETVEEVSWQDRQGRQRTAKIPLVLFI

SEQ ID NO: 33761 - protein, 194 aa, Spirochaeta sp. JC230
MTEHNSLSPLLISLFKGVLYREDNQTQWQELVRHQGRIQDYVSLLGLQVVVDEQAGYGFLQNREDDQETENLPRLIPRRRLSYPVSLTLVLLRRRLADHDSSTGEDRLILSTDEVVEMLRTFLPEGNTESRTIDRMSSILSKIADLGFIRFIDSAKTKLEIKRILSAFVDAQWMNQFDERLREYADHALDREEE

SEQ ID NO: 33762 - protein, 394 aa, Spirochaeta sp. JC230
MTIPWPGKAELIQRLRKQWDQGRFLPLDSAPTRFPLDVPLVRPSSREMVDHFPALQAWIAQLSAMEKPGSIELTWQTINHRQLGRNTIPRSLVFADITALAGLLGVTKELRRFLDLSKKLVTQAPELEPWVSRVGLGVLQWEPDIERLVTLYLWIKDHPDNGLFLRELSLPGIDTKFIESRWSILDSWLSTSGVPADTAPPYMRGVRRFIHRYGFRQPPDLIRFRILDQTLLSCTGGWQDLTVPAQEFAARPLPVSRVFVCENDISALAFPALPGSIVVFGRGYDFTALSQAQWLGQCRLLYWGDIDTHGFAILNQFRQAFPQAESMLMDRQTLLRCGTSWGREAKQTKADLPNLTPPERDLYRDLCTNALAPHLRLEQEYVPWRLVCEALKEM

SEQ ID NO: 33763 - protein, 486 aa, Mycobacterium abscessus subsp. bolletii; identical to SEQ ID NO: 31556

SEQ ID NO: 33764 - protein, 249 aa, Mycobacterium abscessus subsp. bolletii; identical to SEQ ID NO: 31486

SEQ ID NO: 33765 - protein, 1115 aa, Mycobacterium abscessus subsp. bolletii; identical to SEQ ID NO: 31838

SEQ ID NO: 33766 - protein, 468 aa, Cedecea neteri
MSFNTLNTNLFKPISGENGRSMLALLVDLDTFLDPTQLVDEPTPQQVRVFLRDYIANKNLSLEIASVESTIGNPALEHYVYNRLRDTGWIREEQESGYRYVVWMAQDARRLLNFLGNMSAEHPSLGVVCLAVRSNLSEVVKDPTNGSLVRKAADDMEDFLNRLRALVGNIREIHHAISGGSVQGSGHFTFYFEEYLAELFLPNIEKLSLKGNPNLHASKIRKLVSDIRFSSERLEACARAYKRDDISNPSVQLVEADLDRLSKAFDGIAPLFKKTQDYARRITRQMYEKIKYTVHTPSNMGQQIQALLERIGSEALLGSLPSPLIGEELLADCRLATPKAKSILPVPTVRRQPKPLWEKRAYNQLKQEHISFQKCDPTRVANFIESNLGERVQMTTDDLRIDTADDMMAALHLRLLAQGISKTHPLFSLQSMYCVEFDEGEWTDLKQMAGRRIIIRRIVTMEKRTHDQ

SEQ ID NO: 33767 - protein, 223 aa, Cedecea neteri
MTSEIVLRELKDIEAKTSADYADSLRNTAAYLLQKQWVWKGKRGQKEHFKLCEDNLAYFNKLFDGLDMGWYYDRNFGYAGILPRGSGKQLDITSTLFLLILRKMYDAEASMGRTELGCVTPPTVELLNQYEHVRGEMPPITETNNALENLRKKGIIELGIKDPDTKLHELTVLPNITRVVDQTYVGMLNRFMDSYTPESAFGEAVFEGTDDLETLEVYDDSAE

SEQ ID NO: 33768 - protein, 826 aa, Cedecea neteri
MIAWQNSDAASLSRAVDAAKSAVSKSTNSLTNRIFSLQNAVREVIRQRFPDTLGIQSFELLARHWATSVDILNRAGIESLSASEHENTLKVTDKLKSAKKLLDEIAERIEVADKNVSHDLTQTMHECKALQVRIERLRKGLSDINPATAKVIELLKQERIESMPVCDLCEIADRDWQEAVESYLGPNREALVVSVRDFDHALEVYEVAQKREPQLKRVRMINPGHALAANKAPTERMVSKLIETSDPIARGFMNIILDRTKMAATRDELRRERKALMASGLATGSGTVGGTAHIRGLLMGKQAKAEQLKLLEHERDVLAQRLSGVERSAQTLSRLNRNWAGLSTSIVEGSSSVRENSIRLMQDKKALSAAQEQLKPLTSKDEQLKVAKAQADDNYEACNTAIINATAEQKNAIATLNSLNTEIESLSKNRDEAERIRSETEKSPIHNTAKADEYWQTYEQKFGGEEGCYSLIRNKAQNEAQVEREKALNTRGDLYYKVVRFTTDFAEDIANRQALLEAAKTDNVNTEAYHFIEADCTEWVERILAAQLLVHRQAAREAAEQMEKNFRGIIVGELQSRFEQMRYTFNQLNNLLKKVPFHDHIYSFHFKVREIESLRTVYEYITTADREETELVGTMFETVSEHPAIDLLKEALLSGDDLINEISDYRSFFTYDMKMRNPDTGTERSVADMQSTGSGGEQQTPAYIALAASFMNVYKISGHSDRGASLVLLDEAFNNMDGGNASAAVAFLKEIGLQLLIAAPPEVTLKIGKEMEQIYTICREDRDVVIDHTQIFEAGQELIDQRNPVYHPELVAERAAELKAKAEMVE

SEQ ID NO: 33769 - protein, 415 aa, Cedecea neteri
MNDMNSYVEKFINQLIKKIDKPEGVELECRIRITDHAYRWYFALNNSTKTALHKTLESIAYLNIHYQRKVALGAFKHIEYIEIVDGYRLMDSQGVIPQADEIKVSFRHLETTVFNVPWWDNTKLEIAKEWSSNKTFCGVNRNQADRLFDAMKVIEWIVQLPVSENVPDIRTLSAMLYGNSKKLECKSFSGLIRKLMLPHIDDDVVDLLDDGVKLLEYFGISKYPIPMRFKANGLLHCRGIIDLSALHYGIGVSPDEVKGIVWGQRPPYVLFIENRASFERYVREIDDLGVIIYTAGFPPRSWVHVIEIIIAELRMEIPIYHWGDRDAGGYRILAFLAKRLDIDIQPYLMGVGAEALTQADDELVDKPVVELMQALESAKHYPAILALYRDLAKLQIKNLPWIEQEQIAPVSPRKY

SEQ ID NO: 33770 - protein, 486 aa, Mycobacterium abscessus subsp. bolletii 103; identical to SEQ ID NO: 30761

SEQ ID NO: 33771 - protein, 249 aa, Mycobacterium abscessus subsp. bolletii 103; identical to SEQ ID NO: 30762

SEQ ID NO: 33772 - protein, 1115 aa, Mycobacterium abscessus subsp. bolletii 103; identical to SEQ ID NO: 30763

SEQ ID NO: 33773 - protein, 486 aa, Mycobacterium abscessus subsp. bolletii; identical to SEQ ID NO: 30761

SEQ ID NO: 33774 - protein, 249 aa, Mycobacterium abscessus subsp. bolletii; identical to SEQ ID NO: 30762

SEQ ID NO: 33775 - protein, 1115 aa, Mycobacterium abscessus subsp. bolletii; identical to SEQ ID NO: 30763

SEQ ID NO: 33776 - protein, 489 aa, Stenotrophomonas maltophilia
MKHRERISRYRHLREQPQWKLLAADHAPEIIGLLQGLLMDGERTLSSSVLNERLQRALDQLNGDELSRDLPRTAQAYIAHWLAQGWLERRLPEGADQEQYELSTAALQAIRFADGLEQARVAATESRLALVIEQLSQLAAQTESDPDARLSALRDERDRIDAEIARVGAGRVIALDGKRALERARQIIGLADELTEDFRRVRDDFEQLNRDFRERIIDDEGERGDVLSQLFEGVDVIGESDAGRSFQAFWRLLNDAEQSAQLDAALEAVLARGFARRLDRNERNFLRGFTSTMLERGGQVHDVLQNFARSLRGFVQSRGYLEQRRLNQLLKQAQSEALALRDEFPAQRGIGRDLQLTTSRLRSWSQWRLHDPRSAQVDGNVEYNDAAAISLESVGDLVASSEIDFRTLRRDLHDLLDAQPRLSIAQALSQREAPQGLGSVIGYLSLGTRFGNVIAGEQELAEWRGGDGQIRRARIPLVWFTQERRHELA

SEQ ID NO: 33777 - protein, 233 aa, Stenotrophomonas maltophilia; identical to SEQ ID NO: 30657

SEQ ID NO: 33778 - protein, 1126 aa, Stenotrophomonas maltophilia
MAISKHTPALFNEGLPDPRLQQFRMRRLQVHNWGTFNGLTEVPIAERGFLFVGRSGSGKSTLLDAMSALLTPPAIVDFNAAAREAERSGRDRNLVSYVRGAWADQQDSGTGEIATQYLRKGATWTALVLEYRAGDGRVVSLVRLLWISGNGTSAGDVRKHYMIAERPFDIAKDLGGFDLDLRKLKQKLSDLHHFDTFSGYAERFRDLLGIDNEMALRLLHKTQSAKNLGDLNVFLRDFMLDTPKTFDAAERLVSDFAELDGAHQAVVTARRQVETLLPARAYYNDLKEMHRQRGDDEALKLGVDSFRESRRQALIEARLREMDVRDRGLLGEEAQRRAALDNHTERLAELELQRRQQGGERIEELEREQGRAEAERDRRKAKRDQAQEAAQQLQAELPDDAHGFAELVERAQNELQDRQRASAALDDAISDRLGGKRDDERRFGEVRSELEAMQRTPSNIPAPMQKLRARLAEETGIAEAALPFVGELIQVRSEEQGWQGAIERVLGGFALSLLVDDKHYNDVAEWVNRTHLGMRFTYYRVRRNDDAFAREPSAKSLLHKLELREHVFESWLRRELGKRFDYECVDAKQLRNVDRGITREGQVKHPGDRFEKDDRSAVGDRRRWILGFNNHDKVGAFEREAQELAKRIASCETDIARLRGQRDRDNERRLACHELVSISWNEIDIAAPQQRLSDIEATLRDLREGNADLAKLAKQIDAVRADIEQSRRTYEDVRVERGQLVKERDRLDRARQQSRALVLPSLAQEQEAGLAERLQEQGPLSLETLEAHMRQVSNALNEQLSSSQQDLNRIENQLTGCFRRFIQQWPEESGDFTVSVASAEDFLARLERLERDGLPQHEERFFDLLQNQSKNNLLALQRHSAEARKSIGQRLDEVNASLEQVPFNRGTLLTIELSDRRLPEVGEFHLQLREVLSQQQTEQRELAESQFTVLRQLVNRLGSQEGEDKRWRELVLDVRMHVEFIGVELDAETRQQVEIYRSGAGKSGGQRQKLATTCLAAALRYQLGGADSQLPSYAAVVLDEAFDKADNEFTALAMNIFDNFGFQMVVATPLKSVMTLEPFIGGACFVEISGRHDSGVLLIEYDEEGKRLKLPERSRQQANEPEEAEA

SEQ ID NO: 33779 - protein, 486 aa, Phaeodactylibacter xiamenensis
MEDRFSNIDEVSRLLEDHSAVRLLRKAHAPMIVAFLWRAFREERRQAYGSQELNTLLSDFLFAANEGAGEGGKPYPRTSRLYLEDWSKEGFLRQYYEAGAAEATFELTPATEQALVWIAELDKREFVGAESRLLQLFNMLQDLTYGSSTDAQDRLEQLLAQRLELDREIMELEEGQISRLDPTRMREQLKLIEETAAKLLADFRQIEENFRQLNTKAREEQINRQHSRGQVLDEIFSAQDAIMETDQGKTFTAFWAFLMDQGRQDRLDQMAAQLFEQPELEAYRNHSVLPRLKILLVEAGERVDRTTTRLIEQLRRFLASRTFLENRRAGQVIEEIEQLALQVKNEPPPQRFFSDIAGKPAVNLVMERRLFQPADELQLASDQPVAGNAVEVLTEGLYNQMYIDPEELKGRIQKMLRGKQQVSLKEVVAHAPVEKGLSEIVAYFGLATQWEPRQKAVINTGQQEKLFYESEGQTYAVELPQILFLK

SEQ ID NO: 33780 - protein, 194 aa, Phaeodactylibacter xiamenensis
MSEPTVKAEIRAPAIYLLKGILYREQHLDAWNLLLRYRERLRAYFEVLGLELIVEEGDGYAYLRQQPEEEEADPQPRLMTRRRLSYQQTLLIVLLRKRLLEFESEGNEVRLVLRYSDIAEMMRLYWDDTAANERKQEDKLRADIKKMISFGFLQTVREEDRYEVSRILKAYVPIEKLNEILGQLKAYAEAQKES

SEQ ID NO: 33781 - protein, 1160 aa, Phaeodactylibacter xiamenensis
MLSPSEIPSSPSGYRLHRLEVLNWGTFDKHIWEISPNGQNALLTGDIGSGKSTLVDAITTLLVPQQKITYNKAAGAESRERNLLSYVRGAYKNEKVNAASKGRDVYLRPDNKHLTLLLAVFANAAQNDFATLAQVYWMQDDSVKRFYVLAEQALQIDPDFSNFGTDIRQLKKQLRKQRGAELFNSFSAYADRFRQVFGIRQPEALELFYKTVSMKSVGNLTEFVREQMLGQTNIQEDINELVAKYADLNTAHRLVAQARQQRDLLQPMIEEADERRKALHKIGELEALLEEIPGYFAKAKLQAAIRGMGRLQQDWETLEAEMLALRQQEQAAQEELARLKAARDSLNVNQQLAQIKLQIKELGAERARRQDQARTYEDRLAELGRFLPKGHGLPLGMPEDVGGFMAQKHQFTAQREQALITLEELQDARDPLAVRIDKHRARLEELDKELQSLRQRPTQIPQRNLRLRQKLLTGLYLTEEDLPFAGELLQVLPEEAKWEGAIERQLRGFGLSLLVPDQHYEAVSNYLDRIHLGGKLVYLRTLPHPDRDSREPEANSLVRKVQIKADTPFYEWLEKELIRRYDYTCCDTMAAFRRAPRALTVEGQSKDSRVRHTKDDRYDVNDRRQYILGWSNKPKIKALEAEQREVEAELAQAETEYQRLRNAERALDKQRGILERLLEYPSFENLNFKPLIIRIQALREEQQRLEAGSEELRHLQEKITEAEAAVSQLSAQVGVKFEQKGVQKNELTKLLGAITALLHQTGLPPLPLSALGAVVTNEAAHRVFSDCRAVTIPQQAPSSHLQKHLPELSPEAPAEAWAQAEQKLKEKIEGNNGMIRKYRDQESRLAQRIVRQMTTFKQQFPEEVIDVDADIRSVEEFRERYVRLQKDDIPRHEERFRELLRTKTIQSILMFKSKLDTFEQDINRKIEEINQHLREIDYNPGRFIRISKEPVHREDISTFKQDLRACLSNTYGDVADEDLYTEEKFEHVKKLLDRFAGGTEEDSRWTKKVTDVRQWYTFGAEELYRETNELHEYFSDSSGKSGGQKEKLAYTILASAIAFQFGLEWGRSRSRSFRFVVIDEAFGRGSDESTRYGLQLFERLNLQLLIVTPLQKINVIEKHISTVHYVSNPKGQSSMVRNISIEEYQAEKAAREQAVNTSKS

SEQ ID NO: 33782 - protein, 397 aa, Phaeodactylibacter xiamenensis
MITEKAALQQLEKWWPKVLRAGLEQEDYFPRSLSRIGKPKPKEWIENFEQVRSAQEQWLKRSQPYKSKGWSLSWEERDYRSIGRNRFIQSIDVATLEDYLYLLKREQVYAQVMADAAMVSEVIPGLQDWCIASPLDVESHHTQWNELLKVVRYFMEEHRPGQYYIRELPLDIPTKFIETHKRLLISLLDEVLPGSRINDQFRGVRHFEQRYGLKYRQPMVRLRLMDVSLADQYFSGVQDLALPLDALAQLKLTVRRVIILENKTNYTNLMNLLTLPQAKETIGIFGSGFGVGALSEVAWLSEVELFYWGDIDAHGLQILSRLRAHHPHVRPFLMDEETLNTFSAFSRHDAPKSPVGHLPGLTETEQAFFDYLKEYQLRLEQEHIPLDYVKQIFEALF

SEQ ID NO: 33783 - protein, 484 aa, Oligella urethralis DNF00040
MNFQLAQAQYRRYFEEHQAWVLLRADNAPYIFAFIETLFSDNAEVTYGQARQLLDAELVQSRDLGVWESNTPATTYLNQWIQQGYLRELNDQLSTTDAFQSALRFVKALDERSAGTTASHLRIVQEAVRDCVVALSTEPEDKLAHLQQKKTEIQAEIDAIEAGVIIELDEATKRERMREVYHLAFQLSGDFRHLEEEIRLLDKDIRTQMITDDATRGEILQKLMDQEAELLRTEAGSAFDGFFQLLCDPHRQQEFREQLRFLAESDAAGYLTASQQYYLAELLTVLSKESDQVIRMRRRTEQELRQYIESGQATENHQVNRLMIELEKAAIALDIDPAMLRQKTALSLAIEPISFFSLDSWRLRAPAERLEINTDEEENLQHLDAHVLAELETVNTMAVVSELHQILQQDGVRTIRELAERRVIHLGLEELMVYVRLAKAIDAVELTGRESFVIYDRKQPLRVSVPKLLLSAESFPPSLDSLVI

SEQ ID NO: 33784 - protein, 1114 aa, Oligella urethralis DNF00040
METGGRKGQVRLSEISVYNWGSFSERIHTAPIDREGTLITGDNGSGKSTLIDGLMALLQAPGRASFNIAAAQGDKRDRNLVSYMRGSYGTSHDGAGTRVLNKRPKAVVTGLRAQYQFDGGSVVSLMAIFFIKDASNSYSDVNKLYFIADEDISLKTLLDAFSKSSMREFKRWVEQQVNLRCFDDRFSEYQTVYRQKLTMGNENAPALLARALGLKKIDDLTKLIRELVLEPGNIRELARDIVHEFADLLATHERLVDTRERVKHLQRLLPLHQALQEVEKLLAQLEQDKAGLPIFEAKQQVIALAERIHRLEEEMAVLKEAMERLSAEEQTADAYTDQCYAAYLQLGGSQIEPLRQQLSALQERLGRMVRDSQRYQKLCRDLQLSYDLVGSVFRDNQRVANEQLRQAEFELPHLEEAFFANKQKLIELDAEYRELSSLIHEMQQRPNSNIDIKYQQLRDRMVEELGIAEEKLVFIGELIDVAELELPWKGAIERALGQRKLNLLVPEADAKRVTRWLNQRHLGLNLSVELVGAVMQTVSSFEAGGFLEKLIWRDHAYQNWLKNHLSRFDLWCVDTVEELNRTPYSMTVEGLIHLKQGSFEKKDRHKVDDRRQWQLGFDAKAKLNLLLAQQQALQASLVTAKEQAVKSQQQRDDYREQSQWCQQLLTFDWDSIDVPRYEKEREELSKRLAALEDDQGDLQQAKFRWEEAKKAVVTIQKQKEAQNKKIGALENALKSAETQHAEKLPLAQEALDEVVQARLALRLDAYDENDKSAYYALSKALEREYAQAQNRQIKDKEAVASLLGSFRGREKWQPYTVDWVSGFEALYDALTYLEYLEKEGLPVLVEQYQERLNKNMTQSIALLYTNIEAEFADIRDRISRINRVLSKTEFRPNSYLKLNPRRERYPAIQDFTQKMNLALSSMNDADQDKRFSLVNDVVSILKNALESGRVDDERLLDPRKQMSFYAEEIQLGTEQVLDVLDSSSGKSGGEKEAFAGTIVAASLAYVLTPKDEEYPVYATVFLDEAFSNAAEGVAARVIKVFKALKLHVNLITPYKNLNVAREAARSLILTERKAETHESRLREISWELIDEQQAKRQRDLKQYAQSQGVQVYEQ

SEQ ID NO: 33785 - protein, 410 aa, Oligella urethralis DNF00040
MSSKAPDWGVLVTTARERWRSRFLDNAKNYRSVLAGEIEFPLTLPLKPPKSAKDILAHTAHFQAFYQQWQALERSLANTACEVVWELKRFQSVAEQRLPVRLVVHDAAGLMRFIGASAYQQWQSSERLLHTLVAGIGGTDSVSLRTTLIKHLATLEAMSEDKLRLLLGVLPQLQAQMGRGEYLRALPVVGVDTKFIEQHGYLLEAILDVLHEGAISAAGGLSSWLACLEKPRDWLLVRPLCAKPLAALAGMPILRLSTETLWHMPLPAHNILIIENEQSCLALSHIPETIVVAGGGKNLSWLGAEWLADKRVAYWGDIDSEGFAMLSQARAKVPQLKALMMDAATVERFAERMVEEPHSVFKAPECLLEAEQHVFQNLRRGVYQQGRLEQERLDRDYIQQQVLAWAVAEE

SEQ ID NO: 33786 - protein, 450 aa, Pseudomonas aeruginosa; identical to SEQ ID NO: 31994

SEQ ID NO: 33787 - protein, 220 aa, Pseudomonas aeruginosa
MDDEQPLMSAAVQVDERRTPQRVREAVQEMLKYGLLEESHKPNLYRSALSNIEAVDRILEPLDLAMGVDEVRGLVFVIVRQGEVAEQDDWSHPLVRRQRLNLEQSLLIAILRQQFIAYEQESGTGASQASVVVDELIPQLQVYLGELGSEAKERNRIITLLDQLKGHGLVSALDAHDRVIIRPIITHLANPENLQALVAWLREQVEGAATPAADGEEDMA

SEQ ID NO: 33788 - protein, 979 aa, Pseudomonas aeruginosa
MGAVLWFEGTSSSASDLKKLWLLSESPEQTLEHWLSQHHAGGMRALRQMEKDGTGIWPYPSKKAFLARLRDYFEVGENAFTLLNRAAGLKQLNSIDEIFRELVLDDRSAFERAAEVAGSFDDLTDIHRELETARKQQRSLQPVADGWERYQVLQEQLHDKQALEGILPVWFAEQGYRLWLAETNRLEKEYKKAELDQEQCKSQLEAQKGVVDQHRQRYLRVGGAGIDQLRERIADWVRECDKRSLKAEQYQLLAKGLGLADELSAAALKENQQHIAARLEILDQQITDARQKAFDAGLVQQELNGRLQTLQQEGAEVEKRPGSNLPGQFHAFRSDLAQALGVNESALPFVAELVQVKPEELDWRGAIERAIGSHRLRILVPQDSSQAALRWVNQRHNRLHVRLLEVQEPTSRPVFFDDGFTRKLTFKEHPYREAIKALLADNDRHCVESPEQLRHTPHAMTAQGLMSGKERFFDKQDQKRLDEDWLTGFDNRDRLAFLAEQIREVNEQLEPAKLALDAAQGDVRQLETQASLLNRVKELQFEDIDLPGAQSQLESLRTQLATLTRPDSNLAMIKVELDAAEALQESLDQQLRQLIEQYVQLKTQFDQAASATRKAYNSAEKGLNDTQRELAQAHFPTLTADDLGDIVELERKHTRELQGQLKALGEKLGDQKSELAKRMSDALKVDTGALAEVGRELVDVPRYLERLRVLTEEALPEKLKRFLEYLNRSSDDGVTQLLSYIDHEVSMIEERLDDLNSTMQRVDFQPGRYLRLVAGKVIHESLRTLQRAQRQLNSARFIDDEGESHYKALQDLVGLLKDACEHSRNQGAKALLDPRFRLEFAVSVIDRESRNVIETRTGSQGGSGGEKEIIASYVLTASLSYALCPDGSSRPLFGTIVLDEAFSRSSHAVAGRIIAALREFGLHAVFITPNKEMRLLRHHTRSAVVVHRRGLESSLVSLSWEALDEHHQQRIKAMHEVAH

SEQ ID NO: 33789 - protein, 393 aa, Pseudomonas aeruginosa; identical to SEQ ID NO: 32927

SEQ ID NO: 33790 - protein, 501 aa, Comamonas testosteroni
MITTKQAGPALWSVGVKADKAIATYRRMRAQPLWRLLASNTGPTVIGLLQAHLYESERSLPASIFHERITRDLEELRAQGEDFPQTAQAYVASWLADGYLERRFPAGASEEEYELSTAAVEAIRFVSGLAQPHSAATESRLTLVIEGLARLAEDTDTDKFRRIDRLMAEQARIDKEIDAIQKGQMRVLPHTTALERTREIITLADDLAGDFRRVRDQFDQLNRDLRERIMDNDGNRGDVLDSLFAGIDLISESDAGRTFSAFWRLLTDPEQAATLDQALDSVMSREFVGQLEAKERRFLLRLTRTLLEQGGMVHEVLQTFARSLKHFVQSREYLEQRRLNHLLKDAQRAALALKDEVRATETLQYTLELTSSRLRSLSQWVLYDPSLQALPGQMAEGDAPPIDLESVSELVAQSEIDFRTLKANVLAVLEQRSQASIADVLEQFPAAQGLGSVVGLLALGSRHGFKADHSETVGWVGGDDELRSARIPKIFFLRERANELV

SEQ ID NO: 33791 - protein, 225 aa, Comamonas testosteroni
MPAEAQAPDAAQAPANTLFMGDSGELALDTRRALVQLLAGPSLDGRRHPKLWPILVRDEAVIRRRLAELFLELVIDRDVQVAFTRQADTGDLEVPLLLRRAQLTFIDSILLLHLRQRLTQADSQGDRAVASTDEIMEFLTLYEHASNTDRAGFVKRVHASIEKIKKHSILQKIRSSEDRFEISPTLKLLFSAEEIQALTHLYQRMAAGETPAQLAQTESDEEADQ

SEQ ID NO: 33792 - protein, 1124 aa, Comamonas testosteroni
MISEPQTASLFAREQFRMTRLQVYNWGTFSGLHDVPISERGFLFVGRSGAGKSTLLDAFSALLVPPRWIDFNAAAREADRSGRDRNLVTYIRGAWAEQKDGESGEIATRYLRSGTTWSALALTYQNALGQSVVLVQVFWLRGNANGSTDVKRHYLVLERAFDLRELEDFGQSNFDIRKLKQSFPEAFARDEFRPYCERFCRLLGIESEMALRLLHKTQSAKNLGDLNTFLRDFMLDKPETFEVADRLVSEFGELNAAHQAVVTAREQVQTLAPAREQYQRRDSLMLQRNGLDELRLGVDGYRETRRIELLKQHVESLDVQASGSEGEVSRRQSILDNHTTTLRDLERQHREAGGDQIEQWEAEKSGLEGQRKDRLRKRGQAEDACKKLGWSLPDSPQALAELLGNARQEVENWEQRSNENREEQFRLAGQKRDAETAFSQAVKEVQALQRQPSNIPADMLEMRRDIAAAIGVAESALPFVGELIEVKPDEAEWQGAIERVLHGFALSLLVDERQYSALANHINNTHLGQRLVYYRTGRPETWQAKPIGANSLVLKLNVKEGTCADWLQAELRQRFDYACVDSIQSFRSADRAITREGQVKHSKTRHEKDDRRSVGDRRNWALGFDNREKLALFQAQAQELAATITRLGGEIETLADQDKNRATRAMQCQTLVNLQWQEIDVIPLLDRISTIERQIREAQEGNTALQQISERIDKQKNFVDQADKDLREAKVAHDSVLKQINDSTQKLESLLQDASRVPLTPHQMKGLDERFTKQSDAVRLESLDKVATAVERGLNTEIGEIKDEIGDCEKEIETRFADFKRQWPMDAGDMDTSLASAPDFFAKLVRLETDGLPAYEQRFFELLQNQSHQNLAALSTYLNDARKAILERMDLVNDSLGQVPFNQSANQRTYLHIDASDRQLADVKEFKQEIQQALSHAWTEDREFAEARFLALRRLVDRLASQDPEQKRWRETVLDVRQHVEFIGREIDEGGVEVEIYRSGAGKSGGQRQKLATTCLAAALRYQLGGNDHGVPMYAPVVLDEAFDKADNEFTALAMNIFTNFGFQMVVATPLKSVMTLEPFIGGACFVDISDRRVSGVLLIEYDGDRQRLKLPEHAREEASVEAS

SEQ ID NO: 33793 - protein, 387 aa, Comamonas testosteroni
MKLPEDVRQFLVRRFQSKHREWLIGDAGESQWPLEVPLGIPTEQAALRQVDGVRAWVSAWQHWQGIGTLSWCERRWKALGVQRLPEKLALRGPEDVARWIGESRRWERAQSRYQTLTARWPVLAQQLPRYFDILADYSDTDFRRLAEMLDWINLNPKSNLYPRQIPVAGADSKWLESRKGLISDLVATIQNDPTGDRDFFRRCGLRPQPPLMRMRVLDPELRARLGGLGDISAPCEDVASIGIQPTNVFIVENLQTGLAFDELAGAVVIMRLGYAVDVLGQLPWLQQAQCIYWGDIDTHGFAILNRARTYIPSLKTVLMDESTLMNHRDLWVEEKDQHLSIELPLLTSTEQKLYQLLKSNTCGQQVRLEQERVRWDVAWTAIQASIR

SEQ ID NO: 33794 - protein, 478 aa, Mycobacterium rufum
MDQHGGPSVADLLESNRDLQGSPTVRLLAATNVSLYATLMDRHLSGGVVAETELVVRLERDLVDLADDQSGLALIKAWASQGWLHRIVDERTDQNVCYLTQDARRALDFLRGMRRQDTIATGGSIHGIAGRLRHVALKVGNDPARIRKHIESEIESLRRELDELEAGERPEPDVTDAYDEARAIALQMERLITDIGQYGTMIEQATAALDEPIDSNVEYRDRQRQMYADYQAAWDSQGRDSHRAFLRMINDPDQRAEFEADVAAVAGALPHLDPALRTVMAGFFELVGHQIDEVERIQQRCAQRVKRFTAFGTLEQSRGVARQLGEAIGAARTLLKTSLIDSRLDLELPLARHAISSVGALSFKIGDLSNPQPAKPAGSDVDLASFAALTTQVDAPAMSEMLNAAVARGPVSLPDAVAMLDSAYLGHVIVLWSWALKQPNDDTGRSTTVRFRSLDGRDREMAVPDLSFTEPITAGVAS

SEQ ID NO: 33795 - protein, 229 aa, Mycobacterium rufum
MSTDTAADFAAFSDLPQVDQSARPPHQRRPRFDGDVSELPDRACWALQHLLTRRYISAESDADIYAWVLEYRQQLSVRLSELDLLLRVVDGTEVAFVEQARYESAKGIKLLRREPLGTYDSILALHLAQMMRASGGQSVLISREEMHGLFSGVLNDVDRDAVTFAGRIDAAIARLTGLEILRRSRDDEDSYTISPVITAVMTASVITELQQQFELLATGGASTQETPRD

SEQ ID NO: 33796 - protein, 1131 aa, Mycobacterium rufum
MTEQFHLSRLQVINWGVFDGYHSIPFSEGGALIAGASGSGKSSLLDAISLGFLPFNRRNFNASGDNTAAGSSAGRRTVDKYVRGAWGQRSDGGTSRVMYLRGDGTAWSAVAVTYASDSGRTVTGLVLKWLTGESRNDSSSRFVLGDGDLGIEDVCNRWAAGRFDTGVFKEDRGERSDGRSHGWRFTTKVESQYLAQLYATIGIRASDAAQQLLGKAKSLKSVGGLEQFVREFMLDEPDSLARLPEALKQIDPLVEARELLAVAQKKRKILGDIEKIQQRYASESTDLGIIDLVDLPMVRAYTDHVRLAQCPPQIAQLDTTVDQLDNEYEDVTRALNLAKAEADSLNAQISGTSANIGPLQSQVTAAETEAEQVSRRRSAYEDLLVAQDLDVPDSADEFWNLREDLLSQATELLAKVERHREASTDAEYAQKAARIARDDAAKELKRVEHVGSALPEFALLMRDQICAAVGVDASALPYVAELMDLRADQTRWRTAVEKVLRGVGLRLMVPDQHWTAVLTFVNETNMRGRLALHHVRARMLGADPVDPEPNTLAGKLFAVDPAHPCAAEAVDVVTAAGDHVCVDTPEVFARFRRAVTDTGLYKDSDRLAIKDDRRPLKQSEYLYQGDVSAKINALTVDLAAAEEAYQKARRTADDIAAQRQQWRDRAAACKAICEQFPQWSQIDTETADGHADRLREQYELLLADNPDIEALNARADECWSQIQKLMTRRGAIQTRRDDLDARRTRLLELSERLSPAFVSEPLTELLDRYAGQVPVGLELLDPEPHRDALFSAIKKEREQLRESRRRSYDELARILNTFDTAFPDAIPNDSENFDERVHDYVALCRHIDERELPEAYERMMRLVTEQAPDAILTLHRVAEQEARRIAEQIERVNTGLGAVEFNRGTRLTLRATPRSLTAVSELTEIVRAISRRIAEVGLGDKQAILDQYADILRLRNRLASTAPEDRAWTRDALDVRNRFTFDCAEWDVASDELIRTHSNAGDNSGGEQEKLMAFCLAGALSFNLAAPESRDNRPVFAQLMLDEAFSKSDPQFAQQALQAFRKFGFQLVIVATVQNATTIQPYIDSVVMVSKTEATGRNARPVATVATRSISEFTELRHQMRSSEKVPALAR

SEQ ID NO: 33797 - protein, 492 aa, Eggerthella lenta 1_1_60AFAA
MAVVSSTLAFISLQQDNVAWKLLHAQNAPIILSILDENLGKETGKRTVADLVSLVDADLEVLRERVPEIGPKRSARDYCEQWRRDGYLVRKPLADSRQETYELSAGALAAISFAKGLAKPHRAATKSRLNMILDQIAELSLATDCDIDRRRKVLLAEKQRIEDQLAELDQGTLDTMDPDQALEQARDILNLAQEIPRDFVSVSAEFEEIAKNLYIKLIGYEEGYQDTLEGVFAGIDHITQSPPGQSFGGFYALLRDSEALEKLQDDIDSILDTDFACMLEAEERRFLRRFVQTLLDQARDVNETKTGLSRGLRKLVQSQSFQQDRVLRRFLDQTLGMASVLTESYSCTFALPIELELTKTMIAPISRLELYNPADASAQPIPASAFEENGRLTLAELYEQVREVEIDYDELVGNVNAFFAERDASNSKHPSIGEILDKYPATQGIASIAGLMVLASDQGIRTNESEIIRWQSKSGRHLQARVDTFLFVKEVR

SEQ ID NO: 33798 - protein, 227 aa, Eggerthella lenta 1_1_60AFAA
MDDFWNPSPDTVERCDEDRPLDERHLWPQDTGKLPYDARCALLQLIKGPYIDESDPLWSAVLNNQQDLSSHLADMLLELYVDAETGIAFARNASTGERTVLKATRSNVMTLLDTIMVLTLRKELQMGGTNRVFIGQSELFEQLAQYRRLESQDQSSYQSKLKASWNRLVEARILLKSDIEDRFEISPVLKLIFGTEEAAAVSEEFELMLKRAQQAVPNQGEPHDDDR

SEQ ID NO: 33799 - protein, 1136 aa, Eggerthella lenta 1_1_60AFAA; identical to SEQ ID NO: 30732

SEQ ID NO: 33800 - protein, 413 aa, Eggerthella lenta 1_1_60AFAA; identical to SEQ ID NO: 30733

SEQ ID NO: 33801 - protein, 474 aa, Clostridium innocuum
MSLFEKMDPSFFTILVSKNRDIYVDLLLQIHDCIYRNQTMSMERALLQDLLEDYVQDKKYEIDFQEEAEYSDIENELRSEKDVYDRDIQFLLRLFEKHTWINVDLHMDTMKKMVSLPYHSRVFISFVNDIIKEREQIGYLIRIHASLKDMDDPVKIEDSYQHIRNAYADFKELILTLEQTNARIRDYYAIQVKKASTKIYHDFFDVYYGDIVEGYVFPTLVEDSLKRFKNPVAGILETLLQEEAVKEKIVDSAVSHYRVASRDTAKKHIEEMLYAMYNDLNIVETLTAQLVDSDAGYRRLAKQKIMYLCNSDQGLKGKLVELIHHMKEEPQRVCEQISESINIQQTRYMERDEVYTFERRRRRDEREVMTFTFEESTQNQEELEKRIGFDRYARFTRESISAYYAEKLHGEAVGKLKDIGVKDMDDYIRSILVYVYGRDRKMDVQATLIPNQTEGITEGDFHYPNLLIKRKVKK

SEQ ID NO: 33802 - protein, 222 aa, Clostridium innocuum; identical to SEQ ID NO: 31146

SEQ ID NO: 33803 - protein, 1093 aa, Clostridium innocuum
MLLVNWLYYEKTILSFEDIVFLSGKTGEGKSALIDAMQLVILGRTDNSIFNKSANDKTTRDLMGYLKGKYKDGTFKRDKGMFSSHLCMEFEDEQHRIYCFGIVFDVNGPTRGDMEYCYYMMNQPIPGHCFTDEGTVFNIRRMKKLLASFQDRSCRSFTTHMDYKNYFRQRMLIKDQRFFDVFKMAVAYTPMMNISEFIVKNICQEEEDLNLEEMQEEIQDYRQMKEQLETVQQKKAQLSLIHEQYMDICGEQERVANLRVEQKAAVYHGMLVEHDEAAAQYEVYTKSYQKLTKESRETEEQRALLEQNMEALRDARRDNAADILERKIQAHLEQRNTLQRDTTAVQQQLVTKGEFLKEQIEQLEEIEDYDGLQLEDFDLSAIKLSIQRSVHAAQQLAAFNLDAYMDIQRQMRDIENTLSTVRQTMQNSLQTCREEQEVLAANRRALEAGKKTYPKKLLVLKQELEERLYQQVGKPVEVCILADLFSIQEEAWTNAIEGYIHNQKLNLVVEAEYFMDAYRIYRSIKEEKKIHTYSIVDIAKAKPGKRPDAKTLYDCVQVEREDVRPYVEYLLGRVVCCEAEETLRSYPVSITSDCMLYSGYAVSHMNPELYKVPFIGADSIEKQLQELIIRQQKLTSTCRKLETVTRTLQAVQLQTVISDDFIRQLEDGQCKAKEVEQLEQKIKELRAAQTPESLQELLLLDQKLDEAKKKKNELYMLQVEQESRRRQLEEDMKLCNARIQELQQQVKEAKKPEQGIPDTIGAITTADGIRRKQKQLEEALRELNSRVEISKLELITKKTHYNDTFRIALNPNFLCDDYEREYEKHSDNIVEDYIDKCRLAQQKAYECFQNNFFSALNSKIENVRMQIDRLNRSIRRHKFGRSSYEFVCTCNEDYREYYNLITNKELNGHNLLNTKVYEENEELIHELFDKISSLSSMQDPKKYQELQKEVQLLSRFTTYLKFDILENGNSLRATIGSSSGGETQTPFYVAVLVSLFSVYDAGNDGLQLAIFDEAFDKMDNERIEECIYLLKSLGFQAIIVTPTDKISNLSKVADATLIATTDEKNGQRVSTVQKWSQKENIAIPDSEMRQEEV

SEQ ID NO: 33804 - protein, 343 aa, Nonlabens ulvanivorans
MEYTDEDILKRKQILQKRKLDIQHQIDKLEAGEAVPVYDKTQITERFQDVLRTAKDLLIDFNEVEYNFKKISKDISSKYATNEMLKKEALDLTFTALNELEDSNQGKSFYAFWKFLIDTDYQEDWNKLIDELYSRLEKNEIAHQDTFLKNLKRNLNQAALKVTDANSKMASKVAKIIKDSGVNHKITQQLIFDIKKELVEISKQSEEPKVGIEIESKTHFVLPLEPKLTYTIKDEVIFTKKPERAKDGPIETRSLKRLLEHSGVDLLAIRKRIKTALDEKEQTTLEEIIETNGGITEGLSELFGYIGELRKFKHQYNADKNIMVAFDKATGKSIKIPEIILVR

SEQ ID NO: 33805 - protein, 146 aa, Nonlabens ulvanivorans
MGLELVIKREDGYAYLKQADLDGEGETIGLVSKRRLSFSASVILVILRQMLYDFEKDIDSYDTLEKFVSEEELKSEIEDFLPKGYDLVGFYKNLENNITRIKELGFIKKKTTDDGETVYIIHKIIKEKVNIDTLLQFKKNLENYGV

SEQ ID NO: 33806 - protein, 144 aa, Nonlabens ulvanivorans
MEYKLFPPTNTDTAGYRLDYMEVYNWGTFNNKVWHIDPEGHTTLLTGGNGSGKTTFIDALLTLIVPFKKDRFYNQSSGEEQKGARSEKSYVLGHYGNKQEEGALSETKQMLRDETAVSILLASFKNEDKKSVPYFNAGGSLTVI

SEQ ID NO: 33807 - protein, 489 aa, Xanthomonas sp. Nyagatare
MKHLARIARYRSLRESPLWKLLAADHAPEVIGLLQSLLLDGERLLPAAVLHERLQRMLDELNAEQLARDLPRTAQAYVAHWLAQGWLERHLPEGAQQEQFELSTQAAQAIRFVDGLEHSRGAATESRLALVMQQLAQLAALTETNPDARLSALRDERDRIDAEIARVAAGKVASLDGKRALERTRQVIALADELTEDFRRVRDDFEQLNRQFRERIIDDEGERGDVLTRLFEGVDVIGDSDAGRSFQAFWALLNDAEQSAQLDAALETVLGRAFARKLDRRERSFLRGLTATMLERGGQVHDVMQHFARSLRGFVQSRGYLEQRRLNRLLKQAQADALSLREHVPAQRLIGRDLMLTTSRLRSLAQWRLHDPRQQQVDGNIQRNEAAAISLDSVGDLVAQSEIDFRSLRRDLFELLDARPQVSIAQALEQRQATQGLGSVIGYLSLGTRHGVVDANQFELAHWRGNDGQWRRARIPLIWFTREKRHELA

SEQ ID NO: 33808 - protein, 236 aa, Xanthomonas sp. Nyagatare
MNWPEHDHGHDPDEIDAAAAALADPSPTPANGLFPGDTGQLPVEARRALCQLLSGPSVDAQRHGRLWPALLRSEAAIRSALAELFLELVLDRDTGIAFTRQADTGELETPVLLRSSPLTFIDSVLLLHLRQQLADADARGVRAVVEDAELSDALAVYEKNLSTDRAGFLRRVATAVQKMKDNHVLTRLRGDEARYEVSPALKLLFSAEDVAALGQVYRQLREGPADTDTDAPTART

SEQ ID NO: 33809 - protein, 1129 aa, Xanthomonas sp. Nyagatare
MTSAASSSLFGNDLPDPRLQQFRMRRLQVYNWGTFSGLTEVPIAERGFLFVGRSGSGKSTLLDAMSALLTPPSIVDFNAAAREAERSGRDRNLVSYVRGAWADQQDSASGEIATQYLRKGATWTALVLEYRNGEDRVVSLVRLFWIAGSSAATADVQKHYMVAERAFDVAQDLAGFDLDRRKLKQRLQDVHHFDSFAGYAERFRHQLGIHNEMALRLLHKTQSAKNLGDLNAFLRGFMLEEPKTFDAAERLVGDFAELDGAHHAVVTARRQVETLLPARTHHAELLQLRRQRSELEELKLGIDAYREQRRLALLDARLQELDVQDRGLAGEEGQRRAALDNHTRHLDDLEAQRRAQGGERIDALEREQTQLQAERDRRAAKRAQAEQACRALEQALAGSAHGFAEQTALARVALEDGQRLAAERDEAISARMAAKHDDSKRFVEVRAEIEALTRHPSNIPAPMQSLRARLSADTGVPEAALPFVGELIQVREDAAAWRGAIERVLHGFAQSLLVDERHYAEVADWVNRTHLGTRLVYYRVRGNESALSGREPGAASLLHKLQLREHAFASWLRRELGKRFDYDCVDSAKALRHAERAITREGQVKHPGERYEKDDRHAVGDRRRWLLGFDNRDKLALFEREGQELAQRIAACDAEVADLRAQRERDGTRRLAYNTLVNLSWEEIDVAASLQRLSQIADTLQQLREGDANLRALGEAIDRTRADIAQATRTYEDVRKERITLGAERSRLEKQQLECADAHSRVVTPLQQQGLAERLQTLGEVSLDTLQERFRHLERGLDAQLALSKDELTRLEQLLLGCFRRYCQQWPEDSGDFTVNIGSADDFLARLQRLERDGLPQHEARFFDLLQSQSKNNLLALQRHTAEARKSIAQRLDEVNASLEQVPFNHGTLLTIELSDRRLPEVIEFHQRLRDVLGHHQTEQREVAEQQFSVLRELVGKLGSQEGEDKRWRELVLDVRLHVEFVGVELDAATRQQVEIYRSGAGKSGGQRQKLATTCLAAALRYQLGGEDGELPRYAAVVLDEAFDKADNEFTALAMNIFENFGFQMVVATPLKSVMTLEPFIGGACFVEISGRHDSGVLLIEYDEQSRRLRLPERTRRGAADTDAVTGQD

SEQ ID NO: 33810 - protein, 397 aa, Xanthomonas sp. Nyagatare
MARAHCMLLPPAALQALRGQWQRHRGDWLIGAAAPRPIALHPPTQAQASAQFDAFGAWLRAWQRAGLPGRLEMRHVSWPQLGPQQLPQTWVCATPAEAAAALQEHERWQRASARCASLLQRWPDAVGLAARLRRQFDLLADGAQTEIERMADVVDWLHRHRDSGLFLRQLPIAGIDSKWVHAHRGIIADWLAGLRGLTEPRSFDSLSGLRKAPDRVRVRLLDPALCAQVGGLNDLTVPIDQLAALRLPITRMLIVENLETGLACEFLPGTAVLMARGYALDYVRSVGWLRAMPLFYWGDIDTHGLAILHRLRLHAPQTRAVLMDEATLHATPRALWGHEPRPHRAQRLAALTADEQALYTGLRDGRFGAAPRLEQERIDWSYAWPRVQAALTAPTRL

SEQ ID NO: 33811 - protein, 489 aa, Xanthomonas fuscans subsp. fuscans
MKHQARIAGYRQLREQPVWKLLAADHAPELIGLLQTVLMDGERRLPSAVLHERLQRQLDALRADELSRELPRTAQAYLAHWLAQGWLERRLPEGAAEEEYELSRAATQAIRFIVGLRESSSSATESRLSLVIQQLVQLAGQTEADPELRLAALRDERARIDAEIERVASGRVAALDGKRALERARDLIHLSDELAEDFHRVRDDFEQLNRQFRERIIDDEGARGDVLEQLFDGVDVIADSEAGRTFEAFWSLLNDTQQSSQLDQALDALLARGFARKLDRRERAFLRGLTGTLLERGGEVHTVMQHFARSLRGFVQSRGYLEQRRLNQLLKQAQGEALQLRDSLHATTATGYTQALSSSRLRSLSQWRLHDPRLTQVDGRVQAADAAEISLDSVGDLVAQSEIDVRSLRNDLHELLGQRPRLTIGDALQQRPAVQGLGSVIGYLSLGTRHGMVIEGQMETVQWEGSDGAVRRARIPLVWFTREKRNELV

SEQ ID NO: 33812 - protein, 233 aa, Xanthomonas fuscans subsp. fuscans
MNWSEDTRLDADEDTGAPAIDDRMPMTQTSSAEPRGELFLGDTGTLPFDARRALCQLLAGPSIDAQRHGALWPALLRNEVAIRQVLCELFLELVLDREGGVAFTRQADTAELESPTLLRSAPLTFIESVLLLFLRQQLAEADTRGERAVVDEAQLVEALSVYEKNVSTDRAGFARRVMTAIGKMRDNQLLSRLRGSEERYEVSPVLKLLFSAEDVQALVVAYRELREGEVALD

SEQ ID NO: 33813 - protein, 1340 aa, Xanthomonas fuscans subsp. fuscans
MNSQSNLSPAQPGASLFAETLAEQRAQQFRMRRLQVHNWGTFNGLTEVPIAEKGFLFVGRSGSGKSTLLDAMSALLTPPSIVDFNAAAREAERSGRDRSLVSYVRGAWADQQDSASGEIATQYLRKGATWTALVLEYANAHCQTVSLIRLFWIAGSGNAAADVRRHYMVAPRRLDVATELDGFDLDLRRLKARLGDDVAHFDGFAGYAERFRHALGIGNEMALRLLHKTQSAKNLGDLNAFLRGFMLDEPRTFEAADRLVEDFAELDGAHHAVVTARRQVETLSPAREHHAALMALRHSVGELRELQLGVDSYREQQRLALLDERLQELDNQDRGLAGEEGQRRESLDNHEQKLLGLEREQRAAGGEQIEELERERARVERERDERLRRRAQIEQACRQLGTALAAGASGFAAQIAHAQTVLDNGKHDASALDEAIAERMGARRDDERRFAEIRAELEALKKAPSSMPAPMQALRARLCEDTGIAEAALPFVGELVQVREDQIAWRGAIERVLHGFAQSLLVDERHYAQVSEWVNRTHIGTRLVYFRVRRNDELHSRRVDPGALPGKLQLREHAFTEWLRNELTRRFDYACVDNAAALRNADRAITREGQVKHPGDRYEKDDRHAVNDRKRWLLGHDNRDKLKVFEREAQTLAQRIASCDADVAALRKQREQDQERQLAAHTLVERDWDEIDVGPKLQRLSDIDEQLVQLREGNSGLRALGQAIDTARTLRDQAKRTYEDVRLERAQLARERVRLEQQQAACAGRAGTATLTPTQLQGLRERLAALTPLSLDNLEAHFRVVERGLAEQLADSQGRDSRLSAQLLECFRKYCQQWPEDSGDFTVSLASADDFLARLDRLESDGLPRHEHRFFDLLQTQSKNNLLALQRHTAEAHKGIKQRMDEVNASLEQVPFNRDTILTIEVGDRRLAEVQEFQQQLRAVLSHQQTEDRALAEAQFSTLRALVARLGAQEPEARRWREQVLDVRLHVEFIGVELDAQTRAQVEIYRSGAGKSGGQRQKLATTCLAAALRYQLGGEDGELPRYCAVVLDEAFDKADNEFTALAMNIFENFGFQMVVATPLKSVMTLEPFIGGACFVEISGRHNSGVLLIEYDEQAQRLKLPERSRGDEPAVADATDAAPSIEAAGEPAGVQGAASADGTATDGVPLHTASPATEETPPAAQETQTGQRKPAVATTNKQNKTAKTASSTRAAAQPQAKRPKKSPSRIPALAGKPASDKRTAGVPAVSSKAASRSNVGKTTRSSKTPGKPIAATSASNATSRKVAAASAALKTAAAKPRATAASVGRPARGAGKTTATRAATKPSPAATRGAKAGTAQARGKR

SEQ ID NO: 33814 - protein, 463 aa, Desulfosporosinus sp. HMP52
LLYEQHKSNRFGIEYDLMRDLFQELIETQQELGYAFDSEEDQIDTGASALVEPDLSEMDLFRAQANTILRRLKNLGWLEVETRDNFKQYIVLPHYSSRILQVLKELCEERTVEFQRFAFVTYQLLTSEEAKRRPAFAMIEAEKMTEQFIGELTILVNNMKHHAEQVAAKASLQEVLDHHFDEYKTKIVDRSYHRLKTSDHVSRYRHQILDCVQTWLMDSAFFQEAIEDGLRSEFFTTRADAEFKLRAALLTIEEVYRELDEVFNRIDLRHNQYLRASYDRARYLSQHSQGVDQRLAGILDWLSARGRQGDREADKILGSEGLHFLTISQLSDTSLLPARKKRAPLQPADYEVLEIPEGLKNELREKSLAKMRHSISRDKVRSYVLERLGQREEMGISELAPQTLEEFLYLTYVYLYGYDGETGYILDRRNKRILDIGGYRFYDRQIRRVQVRKGGTRRVRNSQ

SEQ ID NO: 33815 - protein, 202 aa, Desulfosporosinus sp. HMP52
MFETLSEQEREKLRDLINRLLKVNFLIKELERERYQAARKLRPQLEEFFKFLNWDFQLDDRHECVFAFSKDGAHRLRLTRDESIALLVLRLIYQEKRQGVILTEFPLTTKYEIRAKYETFRLPFPGKTRFLELIRLFTQYKLLQPLDEEVNLDDCRFRLFHTMLYALDADSIERIHERIKAYDLELDEEELFDEVDETAAAR

SEQ ID NO: 33816 - protein, 433 aa, Desulfosporosinus sp. HMP52
MAQKSVDQYKRRILSLLLKKYERSQSFQAGIPGKQRPQMTIKGSELAKDYDDEMDYRKRELIHNALQELCHEGITEVTWPKHKENIEVGKVYLNFEGVERAYLHTGEKPKGDKIRQLAELLIPLVHHPWDWVRTWGEETYRRLEERRPSGLDLDDHQGYGDLVQVLLALPGLEENTPKRVLSQKLFQDSKRFEQGVERRLLSLLRKIYPEELEKDEDYLDQVGIVENPKMTLVFGPLEIEMPTELVGNSATEEDRAKSLGFNFRAFQGGLGLSAESIKELSIRDIPARAILLVENLTTYHEVIRHPVQLSAPLLVIYTGGFPHKSTQRLLKKISTFIETQNPLSLEGIYHWGDIDYGGIRIFEYLKEHFFPSLRPYRMDVVTYLDYVTTGLSFGEEQCLKLEQLLTLPGYETWHPVITELLRHRKRVEQESIR

SEQ ID NO: 33817 - protein, 477 aa, Cellulomonas cellasea DSM 20118
MLDLLHKRHAPLVVSLLSVVFTAERPSVPVADAHTEIGDALEQLRAAGHGDDLPVGTARELCRQWSDAGWLVRHVLEDDVEVYRLSAHAVGALEVAGRAGGTRARVSQSRVRTLLDAVERLAQDADPDVLVRLARLDSEIRRLRAEVARIERTGAVDEVDEEQLLEEAENVLHLVRELPADFARVAESIKAMQRDVVTALRQDERPTGDVLREYLARGEHVMESTSEGRAFAGALRLIGDPQRLDELATHLDVVLRHRFARRLPAPQRTELREIGRRIEQGLDQVFTAQREASYVITTQVRNHDPLRDRQVDELLRDVMTGLQAWVPDARRGQSVEPLRRLPVAEVDHLRQTAGDLRPPQAPAPLSDRDDDDADVSQDEVRAWGGPRYAELDAHLAALADGSGEVDVAAAFRAAPDAMRRPVDLLGLLEIAHRYGMTETGEVAYVDAVRPDGTRRRFAFEGVTTTAATASTTEETHG

SEQ ID NO: 33818 - protein, 245 aa, Cellulomonas cellasea DSM 20118
MAETTDAPPDAAPEVPVAGAAPAADPATDPGAENGFIAPVPMEEDPAELFAGDSGTLDAEVRTVLVRLLQRRFLTAERNRAQWRTLLDHQQVIESRLHDLFVHLVVDHERGVAYKKQVRSAELDVPVLLRDDAYSRAETLVLVHLRTVFQRERGAGETSVRVDVEELEQTALTYFDPDDTNVATRQREIRAAVTRLAKDGLIEEESEGRYRVTPLVEVVLSNERLAELRDWLRAQAAHTGEDGAA

SEQ ID NO: 33819 - protein, 1124 aa, Cellulomonas cellasea DSM 20118
MTMVDTLFGLVPVTSTGQQWVARDLQLVNWGGYDGHHRVRLASTATLLSGGSGSGKSTLMDAYIALLMPHTTPFNGASNGGVVGRPRGKDQRNVLSYARGKVDEARTEDGTRESVLRGDGRDTWSAIAMTWADQAGRELTAVRAWYVPAAARVLDDVVAVRATCDGPFDLRDLEPAAADRLGRAAVTAAGLTPFDTDRELTARLHSTLGIGATGDGNKAVALLGRIQAGQQITTVDALYKAMVLEEPDTFATADAVVEQFDKLTGTRDQMITARQQVKALEPIRAHRADIEAAARRLRVIEQAGSFDDGTSPAALWRHERRLGLLRAVEQDLQRRHQDAQRLAAETSGRVDASRSELDGVKETLWASGGDRLATAQRELTGAQQRLDRVVRARERLDGVVGTALGAAPASAEEFAALAERAGDALADGDTKAGARRAFGDAMAEKKDAKDELAGLAAERARVERRQGNIPGDLHQARAALAQVAGLTVEDLPFVAELVEVRTEHEPWRDAFNLALGGFATLLLLDAAHLRAFRAAIDAVPTARRIRFEGVPTGLETDVALDPRTLPGRLDLRATSFTGWLRSELGSRFAYVCVDTPGELAQHAKALTRAGQVSDGRQGAHGGQSRANVLGFTNTRLLGHLDQQIARAQQRLELAEAQVVAAEGQLDRHEVERRAFEALREVTWDQVDVVTAQGEVARWSQVIEDVTSGNPEVTRLQRRATELETAIRTLTEELGRTKGAAQELAERWSATTDDVDAAQRALDEARTGGTTVAPGARAYLDALLGGEVGSGTAAEMATPAGALAAFDAVVARASDLLRSDRQAAQGVVGTARDALRRTFETFVERWPDPDLGTDPDASYADFARLLAELETHGLHELEGEWRTSLLRLSGNDLTDLHNALSRSVREIKERIRPVNEILADLPFADDGHRLRIDARDTQSTVVARFRKELRDLREVLQTEATDAERERRYVRMAKVIDRIRRTSPDFADLVDVRRHVRLSAEKVDLEGRHVALYDHIGEKSGGESQELVAFIVGAALRYQLGDAGADRPRYAPVFLDEALIKADARFTGRAIGAWRGLGFQLVIGAPNDKFGALEPHVDLKYVVLKDATGRSRTKLVAGVPDGTGA

SEQ ID NO: 33820 - protein, 491 aa, Cellulomonas bogoriensis 69B4 = DSM 16987
MMTRAEGAYLGAVRAFQNPMLALLHKRHAPLVVALLSLVFTAERPTVPVADAHTEIGDALDQLRVAGHDEALPGATARELCRQWADAGWLVRHVLDDDVEVYRLSAHAVGALEVAGRAGGARARVSQSRVRTLLDAVERLSQDADPDVMVRMARLDSQIERLRGELARIQRTGTVEVVDDEQLVEEAENVLHLVRELPADFARVAESIKAMQRDVVTALRQDERPTGEVLREYLQRGEHVMESTVEGRAFAGALRLIGDPRRLEELSDQLEVILRHPFTRRLPAPRRTELREIGRRIEQGLDQVFSAQREASYVITTQVRNHDPLRDRQVDELLRDVMTGLQGWMPGSRRGHQVEPLRRLPVAEVDHLRQTPGDLRPAQPPSPLSEWDDGVPGVLPEEARAWGGPRYATLHEHLAGLAGGDGGVDVAAAFEAAPVGARRPVDLLGLLEIAHDLGMTETDEVAFVEAVRPDGTRRRFAFGAVTARTRGEDDD

SEQ ID NO: 33821 - protein, 216 aa, Cellulomonas bogoriensis 69B4 = DSM 16987
MTETTGAFISPVPMEEDPAQLFAGDCGTLDADVRRLLVRLLQRRFLLADRNPAQWRTLVENQQVVESRLHDLFVHLVVDHQRGIAYKKQVRSAELDVPVLLRDEAYTRAETLVLVHLRTVFQRERGAGESSVRVDVEEVEQTALTYFDPDDTNVAARQREIRAAVARLVKDGLLEEESEGRYRVTPLVEVVLSNARLTELRDWLRTQVRAEGEEQA

SEQ ID NO: 33822 - protein, 1123 aa, Cellulomonas bogoriensis 69B4 = DSM 16987
MTMVDTLFGLLPEASTGQQWVGRELQLVNWGGYDGHHAVRLASTATLLSGGSGSGKSTLMDAYIALLMPHTTPFNGASNGGVVGRPRGKDQRNILSYARGKLDESRTEDGTRERVLRGEGRDTWSAVAMTWADQAGSLFTAVRAWYVPAAARTLDEVVAVRATCDGPFDLRDLQGPATHRLGRAALTEAGLTSFDTDREYTARLHLTLGIGASGGGTKAVALLGRIQAGQQITTVDALYKAMVLEEPGTFATADAVVEQFDRLSGTREQMITARQQVKALEPIREHRDAITGAAERLRVVDALGAVEDRTSPVALWRAEHRLGLLRAVEGELQVEHQQARRLVSETSSRVDAARAELDGVRQTLWSSGGDRLVNARRELRAAEQRRDRVVAARARLDQTLQAAFGDTVTSEAGFADLVERATTTLRDAGTKTTARQAFAEAMADRKEARADLAALREERGRVARRAGNVPGDLHQAREALARAAGLEPQDLPFVAELVEVRTEHEPWREAFNLALGGFATLVLIDAAHLRAFRAAIDDVPTARRIRFEGVPTGTRHDVVLDQRTLPGRLEFRNGPFTGWLRSELANRFDYVCVDTPGELSQHTRALTRSGQLSQGRQGAHGGRGRANVLGFTNTRLLTHLDQQILRAEERLAQAEEHVTDTEGRLDRHEVQRAAFAAVLETTWEQVDVDGADAEVTRWEQVAGDVTSGNPEVTRLQQQADALEASIRGLTEELGRTKGTAEDLGARWAATTDEVDAAQGALDAARAAGTTLDAAQRTYLDRLLGSGDDASGPGGPVVALRSFDDILARAAQLLRADRDAAHQAVATAREALRRIFETFTERWPDPDLGTDPDASYEDFERILVDLETNGLHDLEQDWRRSLLRLSGNDLADLHNALTRAVREIKERIGPVNDILADLPFADDDHRLRIEARDTRSTVVAKFRAELRELGEPVAPDATDAERERRYARMAKVIDRIRRTAPDFADLVDVRRHVRLSAEKVDREGRHVALYDHIGEKSGGESQELVAFIVGAALRYQLGDAGADRPRYAPVFLDEALIKADARFTGRAIGAWRGLGFQLVIGAPNDKFGALEPHVDLKYVVLKDTSGRSRTKPVVGVEEEVPTSA

SEQ ID NO: 33823 - protein, 510 aa, Xylella fastidiosa; identical to SEQ ID NO: 30618

SEQ ID NO: 33824 - protein, 237 aa, Xylella fastidiosa; identical to SEQ ID NO: 30406

SEQ ID NO: 33825 - protein, 1143 aa, Xylella fastidiosa; identical to SEQ ID NO: 30407

SEQ ID NO: 33826 - protein, 401 aa, Xylella fastidiosa; identical to SEQ ID NO: 30408

SEQ ID NO: 33827 - protein, 476 aa, Mycobacterium smegmatis str. MC2 155; identical to SEQ ID NO: 30530

SEQ ID NO: 33828 - protein, 192 aa, Mycobacterium smegmatis str. MC2 155
MSNERAVATAIIRLMQGVVYRDADEDTWLTLERAGAGVRDHFATIGIDVVVDDAEGYAYLRSRPSEDGEEELPRLVRRRALTYNVSLLLVLLRKRLVEFETSGGDGRLVLSTEQIVEMLRLFQADSTNDARVVDQAETTIRKTAEFGFLRQLRGQRDHWEVRRILKAYVDAQTLSDFAAKLRQYAGAGAGDE

SEQ ID NO: 33829 - protein, 1127 aa, Mycobacterium smegmatis str. MC2 155
MSKTISRTAELSVRPGAGYRLQYAEIYNWGTFDGQVWRFTPGAETALLTGDIGSGKSTIVDALTTLLVPSHKAAYNKAAGADAKERTLRSYVEGHYRSERNEATGKSRPKGLRENRRTYSVILGVFRNHGHDETVTLAQVFQQRESTGQPYRFFVTATKELSIAVDFADFGSDLRELRKRLRSAGAEIFDEFPKYATSLRRLLGIRSEQALELFHQTVSMKSVGNLNDFVRDHMLEPSDSTERIREIISHFDDLTRAHDAVKRAREQLEALEPIADTAAKYDAALAERDGLEHERSAVRLFIAELRSGLLADEIGRLEADGAALWQQQDAAEADQRRLNHERDSLIEERAKAGGDRIGELERLAHEARAQAESRRQARTLFDSAVGEAGLTTVADEEAFLNLPTLVAAERTRLAAEKREVDAATVDAIGRERDCERKCTTLSAEIESLEQRTSNLPHEQVVMREELCAAIGLTPEQLPYAGELLDVYDERAEWRGAAERVLRGFALSLLVPQPHYDAVTRWVNERRLTVAGRGAKLVYERVAARRVRLQPAESDGLLLADCIEVREGPFEEYLRNELMKRADFRCATTLQEFRDLRRAVTREGQVRSGDRHEKDDRHRVDDPRRWVLGWVNERKLTALRDEFADLERDRQEAAAVAAALSARREVLQHRLDALVRIEGFRSWTELDADEAVSRAGAHDAERARLQSGSSRLEEITRALERNAEEAGVVAERIRQLTGQLATTAAAVQRAQQDRKRDQEFVTAQSPEQLEVARASYPALDRRLAASRPTRADDCAAAESALSEDLYRRIERLTRELGGYGQSLAQYMLEVLRRWPELRADMDATVEARGDFLAFRRRVATDDLPRFESEFKEQLNKNAIQELAGFNNWLSRQASAIDERIDRINEALGAVPYNPGRFIRLEKEPTTNQDVAQFRSDLRNLTNDALAVDGDQYSEQRFLDVKRIIERFRGREGYAESDRNWTRRVTDVRNWFVFSASERDVDTGAEWEHYSDSDGKSGGQKEKLAYTILAASLAYQFGLEWGAEESRDFRFAVIDEAFGRGSDVSTRYALDLFATLGLQLLIVTPLQKVHVIEPYVKAIGIVDNPTGTYSRLQTMTIEEYRARRNGTRP

SEQ ID NO: 33830 - protein, 389 aa, Mycobacterium smegmatis str. MC2 155; identical to SEQ ID NO: 30533

SEQ ID NO: 33831 - protein, 488 aa, Mycobacterium smegmatis str. MC2 155; identical to SEQ ID NO: 30534

SEQ ID NO: 33832 - protein, 240 aa, Mycobacterium smegmatis str. MC2 155; identical to SEQ ID NO: 30535

SEQ ID NO: 33833 - protein, 1118 aa, Mycobacterium smegmatis str. MC2 155; identical to SEQ ID NO: 30536

SEQ ID NO: 33834 - protein, 476 aa, Mycobacterium smegmatis; identical to SEQ ID NO: 30530

SEQ ID NO: 33835 - protein, 192 aa, Mycobacterium smegmatis; identical to SEQ ID NO: 33828

SEQ ID NO: 33836 - protein, 1127 aa, Mycobacterium smegmatis; identical to SEQ ID NO: 33829

SEQ ID NO: 33837 - protein, 389 aa, Mycobacterium smegmatis; identical to SEQ ID NO: 30533

SEQ ID NO: 33838 - protein, 488 aa, Mycobacterium smegmatis; identical to SEQ ID NO: 30534

SEQ ID NO: 33839 - protein, 240 aa, Mycobacterium smegmatis; identical to SEQ ID NO: 30535

SEQ ID NO: 33840 - protein, 1118 aa, Mycobacterium smegmatis; identical to SEQ ID NO: 30536

SEQ ID NO: 33841 - protein, 476 aa, Mycobacterium smegmatis; identical to SEQ ID NO: 30530

SEQ ID NO: 33842 - protein, 192 aa, Mycobacterium smegmatis; identical to SEQ ID NO: 33828

SEQ ID NO: 33843 - protein, 1127 aa, Mycobacterium smegmatis; identical to SEQ ID NO: 33829

SEQ ID NO: 33844 - protein, 389 aa, Mycobacterium smegmatis; identical to SEQ ID NO: 30533

SEQ ID NO: 33845 - protein, 488 aa, Mycobacterium smegmatis; identical to SEQ ID NO: 30534

SEQ ID NO: 33846 - protein, 240 aa, Mycobacterium smegmatis; identical to SEQ ID NO: 30535

SEQ ID NO: 33847 - protein, 1118 aa, Mycobacterium smegmatis; identical to SEQ ID NO: 30536

SEQ ID NO: 33848 - protein, 463 aa, Clostridium beijerinckii ATCC 35702; identical to SEQ ID NO: 30568

SEQ ID NO: 33849 - protein, 201 aa, Clostridium beijerinckii ATCC 35702; identical to SEQ ID NO: 30569

SEQ ID NO: 33850 - protein, 1084 aa, Clostridium beijerinckii ATCC 35702; identical to SEQ ID NO: 30570

SEQ ID NO: 33851 - protein, 393 aa, Clostridium beijerinckii ATCC 35702; identical to SEQ ID NO: 30571

SEQ ID NO: 33852 - protein, 486 aa, Photorhabdus luminescens
MNFQGLQAKYRRLFQESAAWKLLRADNSPLILAFLGELFSEESEVPFSRARVSLGAELVRCRELGLWETETGAGTYLNKWIREGWLREMDDMLTKTDASEVALRFSQGLDERSTGTTASHLRIVQEAVRDFAVAISPNVDERVTLLEYRKAEIQREIDALRAGVVLELTELEQRERIREIYQLASVLTGDFRRVEDEIRQLDQEIRIQIIEGDSTRGDVLLSVLEKEALLAKTDAGSAFESFFDLLCDQNRTMELRDQLRSILNRPAAEHLTTQQRQFLNQLMRELSRESDRVFQIRRRTEESLRAYIESGTAQENRAVDRLLGQLERLAVELRNSGYDLQTATTLSLPVGAASISSPESMLLKSPDEKLDTSGAEEQINSREPSMQMLDCLDVVQIRLIAERTLATLKEFGPMTIASVANYHPLNSGLEELVAYLRVAKSVGAASLEGKESIEISDKRGVRLRASIPTFLLSADLFPDSLDELVL

SEQ ID NO: 33853 - protein, 263 aa, Photorhabdus luminescens
MIKHHTQSEYNPLTDTAGVESNVAFSVVNQSPSCDVDDVLVSEHAENSNSDMPPDARRVLVSLLRQGVILSSQKAKLFELLCRYQSAVRKHLSEVYLKLVLDEKAGVAFIAGFQNEEDTESLGIDDDEVVSLISRRTLSLYDTLLLLVLRKHYQDRETSGEQRIIIDIERIESHLTPFLPLTNSTKSDRRKLKGALDKMVTKKILSSVRGSEDRFEITPVIRYVVSAEFLESMLNEYLKMAREKGIELNKNGGDAVDYQDEEE

SEQ ID NO: 33854 - protein, 398 aa, Photorhabdus luminescens
MKKGQYEVRWGLLPAQVKSIIRQREWDNRSSLKDRLLGNRAFPIRVGLKPPKGNSAILDIAHFQRFIDEWRSFHYQDVVEWSSKNFRELSEQRIPTFVVIESMQHLIQFLGNDALSRSKVWERNMKPFLRIDKDLYPALVKCIDIVEKLSLRDAELLAELLPQLKQGLGEGQYLRALPLIGIDTKFLENHQILIEELADIIHKGAVSASGGLISWLGCAINPKGWLTIRPLCHAATAALGGMPILQIPGELLRKYELPASNILIVENLQSGLALPEMLDTIAVIGGGKNIAWMDAAWLRNKRVGYWGDIDTWGLSILSDARNKFVDIEPLMMDVETVKIHEDRMVPESNPVESNPSSLNEDETKLFNDLISGRFQSSRLEQERLSADYIRNKLMDWLS

SEQ ID NO: 33855 - protein, 204 aa, Clostridium novyi A str. 4552
MKVEQFNIRNKENFKKVCNKLLSVCFICKKKEDTKGDYYFIESNLEPLNEYLGLLDYEIELNKTIGVAQLINKNNSNKVNLKLIDSILLLILRILYHEKMEELSLTEDIMVQISEIQEKFIALEFQDKIIDKTKLLDSLRVLKRYNIIQNLDSNMTLGDSRIIIYPSILMALRMEDITKVYEKLNTYKRKEVKEDEEVNSHEAY

SEQ ID NO: 33856 - protein, 1086 aa, Clostridium novyi A str. 4552
MKKLTAMRLINWHAFVDETIEIKNSVLLSGENGAGKSTILDAIQFVLTCSKYNFNKAANEESKRKLTGYVRYKTGREGSEYLRTGDVTSHVALEFYEENRKNYFIIGAVIDSSSETSEKVMFYRIEKHRIKDLSYIANEVPLDISKFKTTYRNKSIQAYTNYGDARKDFLNKLGRIGDKFNNLLPKALAFKPITDVKDFVYQYILEEKALSIDNLRENIRTYKECQNLVDDVRKRIEKLRNIKESYVEYERAVSNVKLHSFIIDIVEREILKEEIEDLEEKIKRGKDNKLLGERRQEELNNLIRQNENKKDNLQITLNTNEEYLALRDINKNISEKEINIQRLASSKRTFVNKLREEERRLQRLRNLGIERIGISTFLDLTKDLNEELDNFINIARDLSKKLDEKREEELRNSFNYEIDIKKQKEELKKVEESIKELEKRNLQYPKNVITLKEEIVAKFKALGINDEPKILCEVLEVTDPKWKNAVEGYLNTQRFYLIVEGNNFDKALVEYDRLVKKKGIHSVGLINTLKLDKYDEVDTNSLAAVVTSKSRDGKRFINMILGKVIREKDINKLKEHKTAITPNCMVYQNHVARAIDKGIYKRPYIGEEAYKIQLEEFKKKREILKEHIDDLLAKKKDLDNITSIIKNIKLEKISEEAYVVREEKNEILSLASLKKEKEELSNNSTFMELNFKLEEVKKEIDRLKEEYRKLVKNIGSLETDMKYDREHLNNKVNYLEHKEEDLKEKSLKDSIVFEEGEKRVEAERKIKKLETIKINFTTSKNNNETRRQNRLEKLKELQGDYNREYEFGAAVGEEGVDGFLGELEKLRKSTIIEYEDNVKKAKERAELEFREHFISKINENITVAKKEFKQLNRALQGVKFGNEEYEFKIEKSKDAKVNKYYDMIMDDRNIGEGFTLFTEEYEDKYKEVLEELFDKLTIDNESEDKELQRFTDYRTYMNYDIKIKHSNGEHSLFSKVCKEKSGGETQTPYYVAMAASFVQLYSMPTNSEPIGLILFDEAFDKMDESRIVAMMEFFNRLPLQLIIASPPQKIDTIAPFVNTTLLVIKGEDYSLIEGYCNEKIQGKDIK

SEQ ID NO: 33857 - protein, 398 aa, Clostridium novyi A str. 4552
MKKYKEKILNNLIDVYERSSLYKGTSLNERNISFKFTVKNIKDYFDEDNYLKKEEIEQSAKELEGLELIKIIWGKGYEDHLIKRVDLNVNRINEAYKLLKRKSKGNSEKECINLLKKYVEEGFVLGKFSREMINKLEEKASIKKYLDIENIEECKNILNALKNVISQQEEIFKRNFSIRIFNDSKRFEAIEGKVLRILKDFTSEETLTLEEFNIFNNPSYVYFKGNTRLKLKNKVLDIVDLKFGIGISSQDLNEIREVEINTSKIITIENLTTFNTFNEDDFVCIYLGGFHNNARRELLKRIKKDNGGKKFYHFGDIDCGGFKILKHLREKTSIDFIPYNMNLETLINGRSYCKELTQNDKRVLEEMLKEESFKEFYDVFEYMLKENIKLEQEHLCYE

SEQ ID NO: 33858 - protein, 486 aa, Mycobacterium abscessus subsp. bolletii; identical to SEQ ID NO: 30761

SEQ ID NO: 33859 - protein, 249 aa, Mycobacterium abscessus subsp. bolletii; identical to SEQ ID NO: 30762

SEQ ID NO: 33860 - protein, 1115 aa, Mycobacterium abscessus subsp. bolletii; identical to SEQ ID NO: 30763

SEQ ID NO: 33861 - protein, 486 aa, Mycobacterium abscessus subsp. abscessus; identical to SEQ ID NO: 31485

SEQ ID NO: 33862 - protein, 249 aa, Mycobacterium abscessus subsp. abscessus; identical to SEQ ID NO: 31486

SEQ ID NO: 33863 - protein, 1115 aa, Mycobacterium abscessus subsp. abscessus; identical to SEQ ID NO: 31487

SEQ ID NO: 33864 - protein, 486 aa, Mycobacterium abscessus subsp. abscessus; identical to SEQ ID NO: 31485

SEQ ID NO: 33865 - protein, 249 aa, Mycobacterium abscessus subsp. abscessus; identical to SEQ ID NO: 31486

SEQ ID NO: 33866 - protein, 1115 aa, Mycobacterium abscessus subsp. abscessus; identical to SEQ ID NO: 31487

SEQ ID NO: 33867 - protein, 489 aa, Xanthomonas campestris pv. arecae
MKHQARIAGYRQLREQPVWKLLAADHAPELIGLLQTVLMDGERRLPSAVLHARLQRQLDALRADELSRELPRTAQAYLAHWLAQGWLERRLPEGATEEEYELSRAATQAIRFIVGLRESSSSATESRLSLVIQQLVQLAGQTEADPEVRLAALRDERARIDAEIERVASGRVAALDGKRALERARDLIRLSDELAQDFHRVRDDFEQLNRQFRERIIDDEGARGDVLEQLFNGVDVIADSEAGRTFEAFWSLLNDTQQSSQLDQALDALLARGFARKLDRRERAFLRGLTGTLLERGGEVHMVMQHFARSLRGFVQSRGYLEQRRLNQLLKQAQGEALQLRDSLHATTATGYTQALSGSRLRSLSQWRLHDPRLTQVDGRVQAADAAEISLDSVGDLVAQSEIDVRSLRRDLHALLGQRPRLTIGDALQQRPAIQGLGSVIGYLSLGTRHGMVIEGQMETVQWEGSDGAVRRARIPLVWFTREKRNELV

SEQ ID NO: 33868 - protein, 234 aa, Xanthomonas campestris pv. arecae; identical to SEQ ID NO: 31932

SEQ ID NO: 33869 - protein, 1338 aa, Xanthomonas campestris pv. arecae
MTSQPNLSPVQPGTSLFAETLAEQRAQQFRMRRLQVHNWGTFNGLTEVPIAEKGFLFVGRSGSGKSTLLDAMSALLTPPSIVDFNAAAREAERSGRDRSLVSYVRGAWADQQDSTSGEIATQYLRKGATWTALVLEYANAHGEAVSLIRLFWIAGSGNAAADVRRHYMVAPRSFDVATELDGFYLDLRKLKARLGQEIAHFDGFAGYAERFRHALGIGNEMALRLLHKTQSAKNLGDLNAFLRGFMLDEPRTFEAADRLVEDFAELDGAHHAVVTARRQVETLTPAREHHAALMALRHSVGELRELQLGVDSYREQQRLALLEERLQELDNQDRGLAGEEGQRRESLDNYEQKLVGLEREQRAAGGEQIEELERERARVERERDERLRRRAQIEQACRQLGTALAAGASGFAAQIAHAQTVLDNGKHDASALDDAIAERMGARRDDERRFAEIRAELDVLKRAPSSMPAPMQALRARLCEDIGIAEAALPFVGELVRVRDDQMAWRGAIERVLNGFAQSLLVDERHYAQVSEWVNRTHIGTRLVYFRVRRNDDLHARRVDPDALPGKLQLREHAFTDWLRNELTRRFDYACVDNANALRNADRAITREGQVKHPGDRYEKDDRHAVNDRKRWLLGHDNRDKLKVFEREAQALAQQIASCDADVAALRKQREQDQERQLAAHTLVERDWDEIDVGPKLQRLSDIDEQLVQLREGNSGLRALGQAIDTARTLRDQAKRTYDDVRLERAQLARERVRLEQQHAACAGRAGTATLTPTQLQGLRERLAALTPLSLDNLEAHFRVVERGLAEQLAESQGRDSRLSTQLLECFRRYCQQWPEDSGDFTVSLASADDFLARLDRLESDGLPRHEHRFFDLLQTQSKNNLLALQRHTAEAHKGIKQRMDEVNASLEQVPFNRDTVLTIEVSDRRLAEVQEFQQQLRAVLSHQQTEDRALAEAQFSTLRALVARLGAQEPEARRWREQVLDVRLHVEFIGVELDAQTRAQVEIYRSGAGKSGGQRQKLATTCLAAALRYQLGGEDGELPRYCAVVLDEAFDKADNEFTALAMNIFENFGFQMVVATPLKSVMTLEPFIGGACFVEISGRHNSGVLLIEYDEQAQRLKLPERSRGDEAAVADATDAAPSIKAAIEPEEVQGAAAADGIAADDLPMHAASPVPGHATPAVENKRSGKRVPAVATTNKQNKNEQNKKARTASSTRAVAQPRATQPKKSPVRTSAVTGKPASDKRTSGAQQAPAVSSGAASKSNVGKTTRSSKTQGKPMTATRASNATSKKAAAKPRASTASTGQPARGAGKTTSARAAVKPSPTKKRGAKAGTVQPRGKR

SEQ ID NO: 33870 - protein, 468 aa, Desulfosporosinus sp. Tol-M
MAVFDVLPRNFFSVLVSTNREIYVEALLLLHQMFQFELNIKVDDYISALISLQEDKDFMPEEDDEITEGSLTFSGKARLILGRFIKTGWVEKEFLDGSFIEIITPQPYAIPVMKLLGELGNGGTQEYNSLVFATYSALKQAKSDHVDQMYEAVLSAKTNTEQLQYQLRSLYHGIRSYLRGIENQSGINDLLQNHFESYKEMSDRIYHPIKTMDSIHRYMVPIQNLLMEVLGNAALMQTIYDRAMTVKKYEHPEEAQGDIVTAINYVLDAYQLLGSIITEIDRKHSNYTKSSIEKIRYLMTADQTIKGKLAQLLKAYASSDATQQESIGARLERNIIVNRQEFFDGKSLYHKSVRSRRIDTTPLEVDSSEELFNDLMSGMIEQIKNGYPISRVCAYVDKLLAHGNSEITSENITIDEDSDFILLLLAVLRANDPEVTYSVELANGTMERNGYRIPHMMIRKKEELHHVE

SEQ ID NO: 33871 - protein, 1131 aa, Desulfosporosinus sp. Tol-M
MKKLTRLLLIHWHYFTHETVSFETLNFLTGKNASGKSTIIDAMQLVLFGDTSGSYFNKAASGKGNRSLMGYLKGELGDDEDFGFKYLRNGRFTSYIALEFYDEEKDRYFTGGCCFDVYSENDMQKLFFLYDGGFPQSEFVENKIPWEIRKLREFLKENCPSHKTTDVGREFRTALYGKMGGLRDRFGSLLKKAVSFNPNVDIQDFISEFVCDTQQTVDVSQMQENIRSYKRLEEEANVLQIKITQLEQTMVEHTAFLRAKQDEQLYSFLIDQAQQDMKISELERVQKNVEELLSKLRDVELSIASQSSRLSQMQDERNQLHARLINDEAAQAIELLESEIVAKEAQIKGIFEGFEKAIARLSKYISSWNRCVNGMSEKLMSLETGNLDALLDSRILDICEESAHFLKQAECLANMDDQSILSVGENGLQELSSLVQMLSAHTIELGSRIVDEQKRLAIRRSALQQEQNSLESGIYQFPQDAIDLKAAIASRLRTLAKHKVKVTIVAEAAEIENDRWRNVIEGYLNTQKYYIIVPDLYFRDALRVFDAMKRDRKLYGTGLVDIEKLRRKNPSIDPGSLAEEIQTNDSDVRIFLNFTLGWVHKCETVNELRRFSTAVTDDGMLYQNYVVRAMNPERWAKPAIGQSAIRRRLEVVKLELTMLTNQISACATAKAGIDLCSKLSIPGESDIQQAVAYAKEMQTTSVLEQDVMRLRTSLAAIDKSSIDALKNHLAQLDISIKSLEADLRTQNKEQGILEERLRVCQEETIPKLEYEIKTSLQFIAQKYDSEWVESTGGLRYQREISTRRSAEDIYRAFPRELARSTNARNSSWSNLVELRQDYNRKYIMGYDTKAEANDAYDDAWLELSENKLPEYIARIEDTRKKAFEQFQEDFLSRLENNIRDADTQINGLNAAIKGSFFGEESFRFKVIPRPEYKRYYNMLVDPMKMEGGYNIFSEQFNLKYKDEIAELFAIITNEDGGGKAQGKSDYDKRVQMFTDFRTYLTFDLESVNRDGESQRLSKTMGKKSGGETQTPFYVAVLASFAQLYRTGRDKTQNTARLIIFDEAFSKMDGERIIRSVQLLRQFHFQVILSAPTEKVGDIGTLVDRNLCVLREGKHTCVKAFDPRKSEWIENE

SEQ ID NO: 33872 - protein, 414 aa, Desulfosporosinus sp. Tol-M
MNDEMERKLITALLNKYERSSFFRAGTVPTKRILLKLYENGKCEFSDYNIENSEQRIRVNECIQALAHKGFVRFEWMKGEENHIVSKVWLNMEDLQNVYCFIHRQPQSDILSNIEVELAECMESIRLQWIKDYLQDTCGYIRQKRKLHALVPENAQDRKSLLQALRYIDASKDKELLKRVFSVRCFGDSKHFERIVETRLLRILKKYLDCDDQTTDEQLLNQIGIVKYPEQFEFCGLISLKFPDGQCLDFSNLSGGSTVYGQDMATAQITLSKGVRCILSIENKANYFDYISKHRKPEELIIYHGGQYSPSKQIFLQAVAHSSEQLPWYHWGDIDYGGFSMLARLRREINSSIQPYRMNKQELITFAELTTSFSSEYSQKLHELTARAELKDCSECLTYMQERCMRLEQEALLE

SEQ ID NO: 33873 - protein, 543 aa, Bifidobacterium longum subsp. longum GT15; identical to SEQ ID NO: 31725

SEQ ID NO: 33874 - protein, 224 aa, Bifidobacterium longum subsp. longum GT15; identical to SEQ ID NO: 30393

SEQ ID NO: 33875 - protein, 394 aa, Bifidobacterium longum subsp. longum GT15; identical to SEQ ID NO: 31728

SEQ ID NO: 33876 - protein, 489 aa, Xanthomonas vasicola
MKHQARIAGYRQLREQPVWKLLAADHAPELIGLLQTVLMDGERRLPSAVLHARLQRQLDALRADELSRELPRTAQAYLAHWLAQGWLERRLPEGATEEEYELSRAATQAIRFIVGLRESSSSATESRLSLVIQQLVQLAGQTEADPEVRLAALRDERARIDAEIERVASGRVAALDGKRALERARDLIHLSDELAQDFHRVRDDFEQLNRQFRERIIDDEGARGDVLEQLFNGVDVIADSEAGRTFEAFWSLLNDTQQSSQLDQALDALLARGFARKLDRRERAFLRGLTGTLLERGGEVHMVMQHFARSLRGFVQSRGYLEQRRLNQLLKQAQGEALQLRDSLHATTATGYTQALSGSRLRSLSQWRLHDPRLTQVDGRVQAADAAEISLDSVGDLVAQSEIDVRSLRRDLHALLGQRPRLSIGDALQQRPAIQGLGSVIGYLSLGTRHGMVIEGQMETVQWEGSDGAVRRARIPLVWFTREKRNELV

SEQ ID NO: 33877 - protein, 234 aa, Xanthomonas vasicola
MNWSEQLPSDKYEDDEDAADSTPPLRASDAAGDLPGGALFLGDTGTLPFDARRALCQLLAGPSIDAQRHGALWPALLRNEVAIRQLLCELFLELVLDREGGVAFTRQADTAELESPTLLRSAPLTFIESVLLLFLRQQLAEADTRGERAVVDEAQLVEALSVYEKNVSTDRAGFARRVMTAIGKMRDNQLLSRLRGSEERYEVSPVLKLLFSAEDVQALVVAYRGLREGDVALE

SEQ ID NO: 33878 - protein, 1338 aa, Xanthomonas vasicola
MTSQPNLSPVQPGTSLFAETLAEQRAQQFRMRRLQVHKWGTFNGLTEVPIAEKGFLFVGRSGSGKSTLLDAMSALLTPPSIVDFNAAAREAERSGRDRSLVSYVRGAWADQQDSTSGEIATQYLRKGATWTALVLEYANAHGEVVSLIRLFWIAGSGNAAADVRRHYMVAPRSFDVATELDGFDLDLRKLKARLGQEIAHFDGFAGYAERFRHALGIGNEMALRLLHKTQSAKNLGDLNAFLRGFMLDEPRTFEAADRLVEDFAELNGAHHAVVTARRQVETLTPAREHHAALMALRHSVGELRELQLGVDSYREQQRLALLEERLQELDNQDRGLAGEEGQRRESLDNHEQKLVGLEREQRAAGGEQIEELERERARVERERDERLRRRAQIEQACRQLGTALAAGASGFAAQIAHAQTVLDNGKHDASALDDAIAERMGARRDDERRFAEIRAELDVLKRAPSSMPAPMQALRARLCEDIGLAEAALPFVGELVQVRDDQMAWRGAIERVLNGFAQSLLVDERHYAQVSEWVNRTHIGTRLVYFRVRRNDDLHARRVDPDALPGKLQLREHAFTDWLRNELTRRFDYACVDNANALRNADRAITREGQVKHPGDRYEKDDRHAVNDRKRWLLGHDNRDKLKVFEREAQALAQQIASCDADVAALRKQREQDQERQLAAHTLVERDWDEIDVGPKLQRLSDIDEQLVQLREDNSGLRALGQAIDTARTLRDQAKRTYDDVRLERAQLARERVRLEQQHAACAGRAGTATLTPTQLQGLRERLAALTPLSLDNLEAHFRVVERGLAEQLAESQGRDSRLSTQLLECFRRYCQQWPEDSGDFTVSLASADDFLARLDRLESDGLPRHEHRFFDLLQTQSKNNLLALQRHTAEAHKGIKQRMDEVNASLEQVPFNRDTVLTIEVSDRRLAEVQEFQQQLRAVLSHQQTEDRALAEAQFSTLRALVARLGAQEPEARRWREQVLDVRLHVEFIGVELDAQTRAQVEIYRSGAGKSGGQRQKLATTCLAAALRYQLGGEDGELPRYCAVVLDEAFDKADNEFTALAMNIFENFGFQMVVATPLKSVMTLEPFIGGACFVEISGRHNSGVLLIEYDEQAQRLKLPERSRGDEAAVADATDAAPSIKAASEPEEVQGAAAADGIAADDLPMHEASPVPGHATPAVKNKRSGKRVPAVATTNKQNKNEQNKKARTASSTRAVAQPQATQPKKSPVRTSAVTGKPASDNRTSGAQQAPVVSSGAASKSNVGKTTRSSKTQGKPMTATRASNATSKKAAAKPRASTASTGQPARGAGKTTSARAAVKPSPAKKRGAKAGTVQPRGKR

SEQ ID NO: 33879 - protein, 489 aa, Xanthomonas vasicola; identical to SEQ ID NO: 33876

SEQ ID NO: 33880 - protein, 234 aa, Xanthomonas vasicola; identical to SEQ ID NO: 33877

SEQ ID NO: 33881 - protein, 1338 aa, Xanthomonas vasicola; identical to SEQ ID NO: 33878

SEQ ID NO: 33882 - protein, 489 aa, Xanthomonas vasicola; identical to SEQ ID NO: 33876

SEQ ID NO: 33883 - protein, 234 aa, Xanthomonas vasicola; identical to SEQ ID NO: 33877

SEQ ID NO: 33884 - protein, 1338 aa, Xanthomonas vasicola
MTSQPNLSPVQPGTSLFAETLAEQRAQQFRMRRLQVHNWGTFNGLTEVPIAEKGFLFVGRSGSGKSTLLDAMSALLTPPSIVDFNAAAREAERSGRDRSLVSYVRGAWADQQDSTSGEIATQYLRKGATWTALVLEYANAHGEVVSLIRLFWIAGSGNAAADVRRHYMVAPRSFDVATELDGFDLDLRKLKARLGQEIAHFDGFAGYAERFRHALGIGNEMALRLLHKTQSAKNLGDLNAFLRGFMLDEPRTFEAADRLVEDFAELNGAHHAVVTARRQVETLTPAREHHAALMALRHSVGELRELQLGVDSYREQQRLALLEERLQELDNQDRGLAGEEGQRRESLDNHEQKLVGLEREQRAAGGEQIEELERERARVERERDERLRRRAQIEQACRQLGTALAAGASGFAAQIAHAQTVLDNGKHDASALDDAIAERMGARRDDERRFAEIRAELDVLKRAPSSMPAPMQALRARLCEDIGLAEAALPFVGELVQVRDDQMAWRGAIERVLNGFAQSLLVDERHYAQVSEWVNRTHIGTRLVYFRVRRNDDLHARRVDPDALPGKLQLREHAFTDWLRNELTRRFDYACVDNANALRNADRAITREGQVKHPGDRYEKDDRHAVNDRKRWLLGHDNRDKLKVFEREAQALAQQIASCDADVAALRKQREQDQERQLAAHTLVERDWDEIDVGPKLQRLSDIDEQLVQLREDNSGLRALGQAIDTARTLRDQAKRTYDDVRLERAQLARERVRLEQQHAACAGRAGTATLTPTQLQGLRERLAALTPLSLDNLEAHFRVVERGLAEQLAESQGRDSRLSTQLLECFRRYCQQWPEDSGDFTVSLASADDFLARLDRLESDGLPRHEHRFFDLLQTQSKNNLLALQRHTAEAHKGIKQRMDEVNASLEQVPFNRDTVLTIEVSDRRLAEVQEFQQQLRAVLSHQQTEDRALAEAQFSTLRALVARLGAQEPEARRWREQVLDVRLHVEFIGVELDAQTRAQVEIYRSGAGKSGGQRQKLATTCLAAALRYQLGGEDGELPRYCAVVLDEAFDKADNEFTALAMNIFENFGFQMVVATPLKSVMTLEPFIGGACFVEISGRHNSGVLLIEYDEQAQRLKLPERSRGDEAAVADATDAAPSIKAASEPEEVQGAAAADGIAADDLPMHEASPVPGHATPAVKNKRSGKRVPAVATTNKQNKNEQNKKARTASSTRAVAQPQATQPKKSPVRTSAVTGKPASDNRTSGAQQAPVVSSGAASKSNVGKTTRSSKTQGKPMTATRASNATSKKAAAKPRASTASTGQPARGAGKTTSARAAVKPSPAKKRGAKAGTVQPRGKR

SEQ ID NO: 33885 - protein, 490 aa, Xanthomonas vasicola; identical to SEQ ID NO: 31909

SEQ ID NO: 33886 - protein, 232 aa, Xanthomonas vasicola; identical to SEQ ID NO: 31910

SEQ ID NO: 33887 - protein, 1144 aa, Xanthomonas vasicola
MKSSSSSLFADDLPDPRVQQFRMRRLQVHNWGTFNGLTDVPIAAKGFLFVGRSGSGKSTLLDAMSALLTPPNLVDFNAAAREAERSGRDRNLVSYVRGAWADQQDSASGEIATQYLRKGSTWTALVLEYRNGEGRVISLIRLFWIAGSGAAAADVRKHYMVAERSFDIASELVGFDLDLRKLKARLGDDIAHFDNFSGYAERFRHQLGIANEMALRLLHKTQSAKNLGDLNVFLRGFMLEAPKTFDASERLVGDFAELDGAHRAVVTARRQVETLLPARAHYDDLQSVQRQRGRLQELKLGLDPYREQRRLALLDARLHALDVNDQGLAGEEGQRRAAVDNHQQRLSDLEAQRRSQGGERIDALEREQLQVQGELARRSDKRVRAEQACRQLDQSLADNAHGFAEQSAQARAALEDGQRLAAEQDEVIGERIAGKREDSQRFAQVRAEIEALTRNPSNIAAPMQALRARLSEETGIPEAALPFVGELIQVREGDVAWCGAIERVLHGFAQSLLVDERHYAELAEWVNRTHLGSRLVYYRVRNNEQAFAGREPGSASLLHKLQLREHPFAGWLRRELGKRFDYDCLESAKALRTAERAITREGQVKHPGERYEKDDRHAVGDRRRWLLGFDNRDKLALYEREAIELAQRIAACDADVAALRARRERDASRRLAQHTLANLGWEEIDVAAQLQRGDDIASALRQLREGDANLRALGEAIERTRGDLEQAKRTFDGVREERIALGVERTRLEKQRLQCADADTRVVTPLQREGLEERLANLGALSLDNLEAHFRQIGNAIAEQTSASDSEHNRLEQLLLGCFRRYSQQWPEDSGDFIISLAGAEDFLARLQRLERDGLPQHEARFFELLQSQSKNNLLALQRHTAEARKSIAQRLDEVNASLEQVPFNHGTLLTIELSDRRLPEVIDFHQRLRDVLGHHQTEQRDVAEQQFAVLRELVRKLGSADGDDKRWRELVLDVRLHVEFVGVELDAATRQQVEIYRSGAGKSGGQRQKLATTCLAAALRYQLGGEDGELPRYAAVVLDEAFDKADNEFTALAMNIFENFGFQMVVATPLKSVMTLEPFIGGACFVEISGRHDSGVLLIEYDEQARRLKLPERSRSAAAAAGAARATEPSADAIGAASADGLH

SEQ ID NO: 33888 - protein, 393 aa, Xanthomonas vasicola; identical to SEQ ID NO: 31915

SEQ ID NO: 33889 - protein, 490 aa, Xanthomonas vasicola; identical to SEQ ID NO: 31909

SEQ ID NO: 33890 - protein, 232 aa, Xanthomonas vasicola; identical to SEQ ID NO: 31910

SEQ ID NO: 33891 - protein, 1144 aa, Xanthomonas vasicola; identical to SEQ ID NO: 33887

SEQ ID NO: 33892 - protein, 393 aa, Xanthomonas vasicola; identical to SEQ ID NO: 31915

SEQ ID NO: 33893 - protein, 490 aa, Xanthomonas vasicola; identical to SEQ ID NO: 31909

SEQ ID NO: 33894 - protein, 232 aa, Xanthomonas vasicola; identical to SEQ ID NO: 31910

SEQ ID NO: 33895 - protein, 1144 aa, Xanthomonas vasicola; identical to SEQ ID NO: 33887

SEQ ID NO: 33896 - protein, 393 aa, Xanthomonas vasicola; identical to SEQ ID NO: 31915

SEQ ID NO: 33897 - protein, 489 aa, Xanthomonas vasicola; identical to SEQ ID NO: 33876

SEQ ID NO: 33898 - protein, 234 aa, Xanthomonas vasicola; identical to SEQ ID NO: 33877

SEQ ID NO: 33899 - protein, 1338 aa, Xanthomonas vasicola; identical to SEQ ID NO: 33878

SEQ ID NO: 33900 - protein, 335 aa, Burkholderia pseudomallei MSHR5608; identical to SEQ ID NO: 32789

SEQ ID NO: 33901 - protein, 223 aa, Burkholderia pseudomallei MSHR5608; identical to SEQ ID NO: 30855

SEQ ID NO: 33902 - protein, 1210 aa, Burkholderia pseudomallei MSHR5608
MKLDRIVLVNWGQLRPGDYDLGNMTLLTGPTGAGKSTMLDGLQTIMTAAYQGIVAYNPGQEEVQQGQRSGKSKRTLESFVVGAEYSRFSRPHGAHGYMAAVFRPGPDEDSAKTFTALVAASAQVDGIGERRVPKLERLELVIVDDAALTVDDFLKDAEQSEWVAVEEIVKRLKARYSKVVTYDGHKRDYLCALYGRFRGRISITWDEAQNAAKAWCQSIAYKKIGSVHDLVRDDILEYDGKQLQESITRISDLMRQVTNLKQEGQRLEATVGRLRGLKTAIAQTTSAFEEQVQYDLLLAKMLVAADDERIAQEQKRINDDSALVTRCEQKVKAEERLKAGVDRSRIDIAAKLSGIAANAEKERLDQQLELANSAARHKLAELNTGLQEAAQIVNAATGLLRKPIPEQFPKLKASVDAVGRVTASTDVARLDGLLGAVLDASSDAQLNVEKLFRLTPAFAGVEEGLAALHSYLVGTEDSVLMAVASETSELTQRVEATRKARKELADRKELLASGASDYNRDTRMALPCIRECLPEAGVQVLCDLVEPVSDEWQEAIEGYLDNARFNLIVKPEWEARTIDLLHSWGSRCKVIQGKRCLQRADAGRVPSDSIIHELRTDHPIARAYLIEQYGAVVKVRDSEQLRDTARGLTKDGKGSGSRTMFVGERRDLVLGRKAREQALRATIEKLDAADRGIREFEQLQDTLSSVKRLLGNLREPVFDAMPLGQAAGEIDSTRRSLAQLDLTEVEQLRAERAKLELLIAGHDAEITAVNKEITLASQRITDAQGAIERINGGRDARFREREDQIRRLGQMCETNSEKTYTVIAEEVEGLLKSRRFDVHSVQVRLNTLRAQPDKLLGDVREMLAEYNANARQEERFQSALPHLHDATMFDPYYGPLVALGRAVGALHSELEGIGLYNNRAKVEEAERSFHDVFTKQFCVEIKSKVDDGVRLLRQLNMELERLKFGTDRFSIDWSKWEPEFQEYYSFFSAVTDLADSVETVDLFGETELTPKHVEVRDRLVKLLLDSDQERAGRELLRIADYRNYRRYEIWNDSDSGGRIALSTWGTGSGGQLETPAYIVRAAVVTNRLKFFEKGPSLKMLVSDESFSTMDEPRARAVLQYLRESLDIQVISAMPTRGAGGLRPEFDREYSYSRVPVDANGELDFILEYDERIFKKDKMRELWEKQRAAARAQAELAFGAAEAAQQAEALK

SEQ ID NO: 33903 - protein, 377 aa, Burkholderia pseudomallei MSHR5608; identical to SEQ ID NO: 32792

SEQ ID NO: 33904 - protein, 335 aa, Burkholderia pseudomallei MSHR7343; identical to SEQ ID NO: 32789

SEQ ID NO: 33905 - protein, 223 aa, Burkholderia pseudomallei MSHR7343; identical to SEQ ID NO: 30855

SEQ ID NO: 33906 - protein, 1210 aa, Burkholderia pseudomallei MSHR7343; identical to SEQ ID NO: 30856

SEQ ID NO: 33907 - protein, 377 aa, Burkholderia pseudomallei MSHR7343; identical to SEQ ID NO: 32792

SEQ ID NO: 33908 - protein, 335 aa, Burkholderia pseudomallei MSHR5596; identical to SEQ ID NO: 33027

SEQ ID NO: 33909 - protein, 223 aa, Burkholderia pseudomallei MSHR5596; identical to SEQ ID NO: 30855

SEQ ID NO: 33910 - protein, 1210 aa, Burkholderia pseudomallei MSHR5596; identical to SEQ ID NO: 30856

SEQ ID NO: 33911 - protein, 377 aa, Burkholderia pseudomallei MSHR5596
MIGASLWLKSMPVQELLNMLVDRLDAAEQRGSTKAKSVQLDERTWPALYMSPVESQKEHLWEHVVAMVRCGWLAVKPETALKSRSGYASSPRVSVVDQRELRAAVGRQERVKSSAERWRDAVSSGLLASDTVKRLVSEYCIDIPGRTMTEVVEQLNRLPALAEKSMLLREVSSQLFWGMSKVLDKRQGLVAAILGMDDCPFPESPIQLHVFLPAGGHRGVLFIENSVSFECAMREPRGVFGELALVYASGFKGSAQRLRTTEGCSLFYAAGGGLERDLRATFEGWLFGRQEIPSYFWGDLDFAGMRILAAMRATFSGLTAWVPGYAPMLTVLKGGGGHPPEAADKQGQKPIASTGCEYADEQLMPALQTFRRFVDQE

SEQ ID NO: 33912 - protein, 518 aa, Bradyrhizobium japonicum
MRSGPGAASLTLFRHLHDDAFLAFSRDHKHLYAACLLDLHERFFSGAPSFPTPQQVVHAIYDVMRANPVLWNEGDDFGSLPEMISARRRRIRKADVALASEKGDKALGLARQLYARLLVWGWLEEEEYGLRVTVDMAMGPLLVLQRLASLNKDLSQRFGGLIVQIRLNLEAVEKLRPEITDRKQREAALAVREARNQADQFTKSLRAILADLKRVRRTVMESKTVATRLEAFFEEFIEQLLLKDFESILTVNHPYRFRDAIVDLARRISYSPETMQVLAEEYIASSMAADIEDGRMAAADDLLAIESIFDQIGEMFDRIEAFRRQLEARVRNTIKYAERGGQGLVGRAGDLVRRLDALLRDGRHHKATIEWSIEPLRSPWSEHHQAPARQPRRPVEARELAEPPSDPLYELRKKLRLEYIARIAPRPEDVRRFLEGQVPPFATREARFMEIDTVDDFLAFDCARRYALTGEVPAQVAAGFELEPCPDTPPHDSEWLRCANFLVKRSGALRKARAAHAQ

SEQ ID NO: 33913 - protein, 212 aa, Bradyrhizobium japonicum; identical to SEQ ID NO: 31966

SEQ ID NO: 33914 - protein, 1144 aa, Bradyrhizobium japonicum; identical to SEQ ID NO: 31967

SEQ ID NO: 33915 - protein, 389 aa, Bradyrhizobium japonicum
MARRFTDAIGLLNDLLNRFESGAASPIAHPDYPAFPSVVAADAFLKQIREAESAAAVSIRWGRGANRDQVAHVRLASAEILYRYLRRTPASRIAEDAAVRLVAGAAMHDSLKNSSSQVAEVWGRGKTWHGFASSDVETLRDAFVLAQAILANKHLGVDYKTFSRRTVGHSKTLERIEGAVVRLLSGILEFPPGARPREALRAIGLERFAPPLLIAGKIDLDGADLSGISPLYLGITPKEADRVRFREPPAYVLTIENFASFNRHIAEADPGRLGTTMYVGGYPSLATQQALRTIAGLVSEQTPIFHWSDIDPDGTWIFHTIERAVDRPIRAHLMSVEVAERLGQVPFKKSAPARCPPDSGIAALAAYLAKDGAKTLEQEELDPVLPEFH

SEQ ID NO: 33916 - protein, 490 aa, Xanthomonas vasicola; identical to SEQ ID NO: 31909

SEQ ID NO: 33917 - protein, 232 aa, Xanthomonas vasicola; identical to SEQ ID NO: 31910

SEQ ID NO: 33918 - protein, 1144 aa, Xanthomonas vasicola; identical to SEQ ID NO: 33887

SEQ ID NO: 33919 - protein, 393 aa, Xanthomonas vasicola; identical to SEQ ID NO: 31915

SEQ ID NO: 33920 - protein, 489 aa, Xanthomonas fuscans subsp. fuscans; identical to SEQ ID NO: 33811

SEQ ID NO: 33921 - protein, 233 aa, Xanthomonas fuscans subsp. fuscans; identical to SEQ ID NO: 33812

SEQ ID NO: 33922 - protein, 1340 aa, Xanthomonas fuscans subsp. fuscans; identical to SEQ ID NO: 33813

SEQ ID NO: 33923 - protein, 335 aa, Burkholderia pseudomallei TSV 43; identical to SEQ ID NO: 33027

SEQ ID NO: 33924 - protein, 223 aa, Burkholderia pseudomallei TSV 43; identical to SEQ ID NO: 30855

SEQ ID NO: 33925 - protein, 1210 aa, Burkholderia pseudomallei TSV 43; identical to SEQ ID NO: 33056

SEQ ID NO: 33926 - protein, 377 aa, Burkholderia pseudomallei TSV 43; identical to SEQ ID NO: 33114

SEQ ID NO: 33927 - protein, 335 aa, Burkholderia pseudomallei TSV 31; identical to SEQ ID NO: 33027

SEQ ID NO: 33928 - protein, 223 aa, Burkholderia pseudomallei TSV 31; identical to SEQ ID NO: 30855

SEQ ID NO: 33929 - protein, 1210 aa, Burkholderia pseudomallei TSV 31; identical to SEQ ID NO: 33056

SEQ ID NO: 33930 - protein, 377 aa, Burkholderia pseudomallei TSV 31; identical to SEQ ID NO: 33114

SEQ ID NO: 33931 - protein, 335 aa, Burkholderia pseudomallei MSHR4375; identical to SEQ ID NO: 33027

SEQ ID NO: 33932 - protein, 223 aa, Burkholderia pseudomallei MSHR4375; identical to SEQ ID NO: 30855

SEQ ID NO: 33933 - protein, 1210 aa, Burkholderia pseudomallei MSHR4375; identical to SEQ ID NO: 33056

SEQ ID NO: 33934 - protein, 377 aa, Burkholderia pseudomallei MSHR4375; identical to SEQ ID NO: 33114

SEQ ID NO: 33935 - protein, 335 aa, Burkholderia pseudomallei MSHR4303; identical to SEQ ID NO: 33027

SEQ ID NO: 33936 - protein, 223 aa, Burkholderia pseudomallei MSHR4303; identical to SEQ ID NO: 30855

SEQ ID NO: 33937 - protein, 1210 aa, Burkholderia pseudomallei MSHR4303
MKLDRIVLVNWGQLRPGDYDLGNMTLLTGPTGAGKSTMLDGLQTIMTAAYQGIVAYNPGQEEVQQGQRSGKSKRTLESFVVGAEYSRFSRPHGAHGYMAAVFRPGPDEDSAKTFTALVAASAQVDGIGERRVPKLERLELVIVDDAALTVDDFLKDAEQSEWVAVEEIVKRLKARYSKVVTYDGHKRDYLCALYGRFRGRISITWDEAQNAAKAWCQSIAYKKIGSVHDLVRDDILEYDGKQLQESITRISDLMRQVTNLKQEGQRLEATVGRLRGLKTAIAQTTSAFEEQVQYDLLLAKMLVAADDERIAQEQKRINDDSALVTRCEQKVKAEERLKAGVDRSRIDIAAKLSGIAANAEKERLDQQLELANSAARHKLAELNTGLQEAAQIVNAATGLLRKPIPEQFPKLKASVDAVGRVTASTDVARLDGLLGAVLDASSDAQLNVEKLFRLTPAFAGVEEGLAALHSYLVGTEDSVLMAVASETSELTQRVEATRKARKELADRKELLASGASDYNRDTRMALPRIRECLPEAGVQVLCDLVEPVSDEWQEAIEGYLDNARFNLIVKPEWEARTIDLLHSWGSRCKVIQGKRCLQRADAGRVPSDSIIHELRTDHPIARAYLIEQYGAVVKVRDSEQLRDTARGLTKDGKGSGSRTMFVGERRDLVLGRKAREQALRATIEKLDAADRGIREFEQLQDTLSSVKRLLGNLREPVFDAMPLGQAAGEIDSTRRSLAQLDLTEVEQLRAERAKLELLIAGHDAEITAVNKEITLASQRITDAQGAIERINGGRDARFREREDQIRRLGQMCETNSEKTYTVIAEEVEGLLKSRRFDVHSVQVRLNTLRAQPDKLLGDVREMLAEYNANARQEERFQSALPHLHDATMFDPYYGPLVALGRAVGALHSELEGIGLYNNRAKVEEAERSFHDVFTKQFCVEIKSKVDDGVRLLRQLNMELERLEFGTDRFSIDWSKWEPEFQEYYSFFSAVTDLADSVETVDLFGETELTPKHVEVRDRLVKLLLDSDQERAGRELLRIADYRNYRRYEIWNDSDSGGRIALSTWGTGSGGQLETPAYIVRAAVVTNRLKFFEKGPSLKMLVSDESFSTMDEPRARAVLQYLRESLDIQVISAMPTRGAGGLRPEFDREYSYSRVPVDANGELDFILEYDERIFKKDKMRELWEKQRAAARAQAELAFGAAEAAQQAEALK

SEQ ID NO: 33938 - protein, 377 aa, Burkholderia pseudomallei MSHR4303; identical to SEQ ID NO: 33911

SEQ ID NO: 33939 - protein, 335 aa, Burkholderia pseudomallei MSHR303; identical to SEQ ID NO: 32789

SEQ ID NO: 33940 - protein, 223 aa, Burkholderia pseudomallei MSHR303; identical to SEQ ID NO: 30855

SEQ ID NO: 33941 - protein, 1210 aa, Burkholderia pseudomallei MSHR303; identical to SEQ ID NO: 31063

SEQ ID NO: 33942 - protein, 377 aa, Burkholderia pseudomallei MSHR303; identical to SEQ ID NO: 32792

SEQ ID NO: 33943 - protein, 324 aa, Burkholderia pseudomallei MSHR456; identical to SEQ ID NO: 33745

SEQ ID NO: 33944 - protein, 223 aa, Burkholderia pseudomallei MSHR456; identical to SEQ ID NO: 30855

SEQ ID NO: 33945 - protein, 400 aa, Burkholderia pseudomallei MSHR456; identical to SEQ ID NO: 33743

SEQ ID NO: 33946 - protein, 377 aa, Burkholderia pseudomallei MSHR456; identical to SEQ ID NO: 32792

SEQ ID NO: 33947 - protein, 324 aa, Burkholderia pseudomallei MSHR332
MSERGDAHDLVDAYEYAEKVIEDLADGIDYFQELVRHLMQAASAHTQWNEFVDFLDRFQRDYSKQLTADNATLNRQAIRQKLEKLRAVPEAKFNRMDAQLRDIAHWMAKEYTGSSLYDWLLGRIEDIVDAACESKQPGFLKAMETYLKRVNGLALQSMMLRSGQTRHAYLAAVQKVAESPKLEQDRLLKLVGQFLAPAEVRVLDPASFKLKTATQRRKAVTVSIRPRPTREERLAAAMARAEAEVFSIPNEDVAQGLRADLRLFQHPIRVSAMLTASARDVIRAMQAVEAARSAIGGDLIVKKLPTRLENEFYGANDYEIDLKK

SEQ ID NO: 33948 - protein, 223 aa, Burkholderia pseudomallei MSHR332; identical to SEQ ID NO: 30855

SEQ ID NO: 33949 - protein, 1210 aa, Burkholderia pseudomallei MSHR332; identical to SEQ ID NO: 30856

SEQ ID NO: 33950 - protein, 377 aa, Burkholderia pseudomallei MSHR332; identical to SEQ ID NO: 32792

SEQ ID NO: 33951 - protein, 335 aa, Burkholderia pseudomallei TSV5; identical to SEQ ID NO: 33027

SEQ ID NO: 33952 - protein, 223 aa, Burkholderia pseudomallei TSV5; identical to SEQ ID NO: 30855

SEQ ID NO: 33953 - protein, 400 aa, Burkholderia pseudomallei TSV5; identical to SEQ ID NO: 33743

SEQ ID NO: 33954 - protein, 377 aa, Burkholderia pseudomallei TSV5; identical to SEQ ID NO: 32792

SEQ ID NO: 33955 - protein, 324 aa, Burkholderia pseudomallei TSV32; identical to SEQ ID NO: 33745

SEQ ID NO: 33956 - protein, 223 aa, Burkholderia pseudomallei TSV32; identical to SEQ ID NO: 30855

SEQ ID NO: 33957 - protein, 1210 aa, Burkholderia pseudomallei TSV32; identical to SEQ ID NO: 30856

SEQ ID NO: 33958 - protein, 377 aa, Burkholderia pseudomallei TSV32; identical to SEQ ID NO: 32792

SEQ ID NO: 33959 - protein, 489 aa, Xanthomonas fuscans subsp. fuscans
MKHQARIAGYRQLREQPVWKLLAADHAPELIGLLQTVLMDGERRLPSAVLHELLQRQLDALRADELSRELPRTAQAYLAHWLAQGWLERRLPEGAAEEEYELSRAATQAIRFIVGLRESSSSATESRLSLVIQQLVQLAGQTEADPELRLAALRDERARIDAEIERVASGRVAALDGKRALERARDLIHLSDELAEDFHRVRDDFEQLNRQFRERIIDDEGARGDVLEQLFDGVDVIADSEAGRTFEAFWSLLNDTQQSSQLDQALDALLARGFARKLDRRERAFLRGLTGTLLERGGEVHTVMQHFARSLRGFVQSRGYLEQRRLNQLLKQAQGEALQLRDSLHATTATGYTQALSSSRLRSLSQWRLHDPRLTQVDGRVQAADAAEISLDSVGDLVAQSEIDVRSLRNDLHELLGQRPRLTIGDALQQRPAVQGLGSVIGYLSLGTRHGMVIEGQMETVQWEGSDGAVRRARIPLVWFTREKRNELV

SEQ ID NO: 33960 - protein, 233 aa, Xanthomonas fuscans subsp. fuscans; identical to SEQ ID NO: 33812

SEQ ID NO: 33961 - protein, 1340 aa, Xanthomonas fuscans subsp. fuscans; identical to SEQ ID NO: 33813

SEQ ID NO: 33962 - protein, 489 aa, Xanthomonas fuscans subsp. fuscans; identical to SEQ ID NO: 33959

SEQ ID NO: 33963 - protein, 233 aa, Xanthomonas fuscans subsp. fuscans; identical to SEQ ID NO: 33812

SEQ ID NO: 33964 - protein, 1340 aa, Xanthomonas fuscans subsp. fuscans; identical to SEQ ID NO: 33813

SEQ ID NO: 33965 - protein, 489 aa, Xanthomonas axonopodis pv. phaseoli; identical to SEQ ID NO: 33959

SEQ ID NO: 33966 - protein, 233 aa, Xanthomonas axonopodis pv. phaseoli; identical to SEQ ID NO: 33812

SEQ ID NO: 33967 - protein, 1340 aa, Xanthomonas axonopodis pv. phaseoli; identical to SEQ ID NO: 33813

SEQ ID NO: 33968 - protein, 489 aa, Xanthomonas fuscans subsp. fuscans; identical to SEQ ID NO: 33959

SEQ ID NO: 33969 - protein, 233 aa, Xanthomonas fuscans subsp. fuscans; identical to SEQ ID NO: 33812

SEQ ID NO: 33970 - protein, 1340 aa, Xanthomonas fuscans subsp. fuscans; identical to SEQ ID NO: 33813

SEQ ID NO: 33971 - protein, 512 aa, Dermabacter hominis 1368
MNDSDALPRRNTPTFADIPRFGGTDAAVSRKQTYEQLRRMSTWRLLSATKAPATLAILQTVFPAGDRRLDRSELVARVASHLDLLRGDEDVQRGASEYVDSWVREGYLTRRDDPTTVETTFELSVSTVEAISFISSLEEHRPTTTESRLTLVMQQFERLAEDTEGDRDVRLRGLQLRRAQIEREIQALSEGELMLPPAEHSAERLRDILQVADELSGDFLQYREDLRAVDLHLREQILSPDGSRGEILEQLLAGDDLLGQSKVGKTFTAFFRMLNDPKQNERAQDLVDRLLSRDFTRTLTRRERDRLANVFSDLYEPAQEVLDVKTELYRSLARFVRSQDFRQHRVLLDLLQEAQGIALAQKDSVSHRKVEEVDLGLSRAQMSSVAQHLLKDPSDPGVPPEAEVHDASRLSVEVLDELVRTNDIDLVGLTSSVNEVVHAKGQASIGQVVREQGAPQGLASVIGLMFLATAHANAREGDTEIVRWREDSLETGDTDYAARVPAFFFLSEVPEP

SEQ ID NO: 33972 - protein, 252 aa, Dermabacter hominis 1368
MENEKGPRMREHEETATDGRTVPAATPSTDRDEWALASDDEDLTYAGSTGGALVEDSRRVLVALLQGPYLDGRRDPQRYGQLLRDRAYIEQRLADMFLELVLDDDAQVAFVRQSEDDPDAPKLLRRLTGLNRLDTVLLLVLRQHLLTQSSRGQRAVVSETELIANIAPYRRSTSTDEAGFMKDIRASIAKIQRAGLLEEQGDSFEVSPVLKLMINPDTARTFIDLYERAGDDITGAAHALDNLGATNEGQAK

SEQ ID NO: 33973 - protein, 1139 aa, Dermabacter hominis 1368
MSNTTGEVPLSDVHNTLDGLGEAGVGTAPENPRREPSDPEHPHPGQWRLNHVQLSNWGTFHGTHDLEISSKGYFLTGGPGTGKSTLLDAISALLTPPRALHFNAAASDAGPRSTKYRRTVASYVRGAWAMHYDPATGEFSQEVLRENSTLSVVSLRFGNGLGETLQLTRMFLLQSGHSADSDVKSLYVISSKPYDVSELRPFVGTSIEGRELEKTLEGTETFRQFREYRARFSQILGIPDEKALGLLHKIQSAKELGDVNALLRDYMLDEPRTFDLADQALANFQNLSEVYDALVTAREQRDVLTGLKNADQVWREARSRGSELVDRRNDIDVFAASHLVRLLADEKDRLVRDQDRLRAHRNRLSQDISDARDDLAQLKEQRKSAGGGEIDDWKKQIAGLEVERDRRRERATEFSGQLALAGLHTPSNEETFTQTQREVAKLRAALEDDEKNEAQTQWEAEAKVREHAHALETTRQELASLTTRASNLHSDDVALRDLLAERTGVAPTDLPFAAELLQVRAGEEEWTAAAEQALRGLARSILVPERAYRAFAREIDGMKLRRRVSYNRINTNVKTAPKKLDARSLGAKIEIREGEFHEWLSNEVASRMDYLCAENLEEFTKHPRAVLRSGQIKHSATRHEKNAERQINDRSNWVLGFDNRAKRAVFEAERTRAEQALFEAQARRRDLEKEAQTRREKLFALQAIQAVTWDDVDAASVARRIANLEDMVRAAEDGSSALTEIARQIDQVEMSISEGDEELLEIVGQLGRVNEQLDQISERHLQAEAQLEERTLSPETTADLEERFRAIAPTLLISNIDQVTRDASATLDAELMALTKKTARAEEDMRTAMREFTRRWPAGGADVDTSLEAAPEYLAILRGIEEEKLPEVEDRFFEFFTSNTLGDVQALATAIAREPAQIRKRLAKINELLAQVEFHEGRYLQLSMRPVHLAALDEFKRALNEATSSSLENDLTLDRDKAEERFLALQNLMDIITKARTREDLASRAILDVRRHVHFHAEEVNEAGEVVHAHESGGPLSGGQNERLTTFCLAAALRYQLAGTGVDVPRYAPIIIDEAFSKGAGKFITAAMESFRHFGFQVILANPGKNPQALAPFIGGVGVVSIREDRYSSVSPIDFIPAA

SEQ ID NO: 33974 - protein, 512 aa, Treponema sp. OMZ 838
MQSSDSAYIATLIAEDSGLRLLRSKNPAPVISFLFKIFRERNLQTVNADRFETLLADFLRSQEFSGFDNSSIDDWYDGETAEIQNSEEFRLALQSIEARAHFLANKWCSEKAGYIKKYYNERQDVIIELSAGVERLFTWLDTMDSKMFIGTESRFQDILHKLRELSENTTHDPQTQIAELEKQKEALQQRIDAIKTTGEAEVYTPVQMVERLREVSKAARELLSDFRQVEENFKTILADVYKKQSVSETKGAVLGYALDANLEMKETPQGQTFDSFWDFLAADAGKNEINRLTRTIIAQVTEHGIAWEDSFLLHLKQYLHEAGRKIIDTNHSLTHRLNRVLLSRDCGDHKQLTELIAFIKTKAFELAERDIVFPKEFGIQTKAVLYFPQARTLILPPLNQSFEPIVSFTEQESAALLQRSGIFNQFYIDEALLKKHIEQYRSQFLHGTLQFSLHDLSKKFPIEKGLSEVAAYFALAPKLKPAAVILDDATERITYTYNGKSVALTVPKIIFG

SEQ ID NO: 33975 - protein, 194 aa, Treponema sp. OMZ 838
MMTAQWAAVCIKLLQGAIYENEEPEAWKLLQQYQREIAAYFDQIGISLFIEPADGYAFLEQKESEEGDSKAVKLIRHYPLSFELSLLCVLLREALEQFDVSQNTSSILVLKASEIRGMLSIYFKEKTDQTKLYKELNRYLNQAVDIGFLKNLSEKDLSKTGDADIDPAYEVRRIIRAKVSVDFLAEFKERLQKL

SEQ ID NO: 33976 - protein, 600 aa, Treponema sp. OMZ 838
MQFDLLKTEDIDKNGLYLDFFQVYNWGVFDSKVYTMRCGKKATLLTGLNGSGKTTLVDAFLSLIVPPRQRFYNQSAGAESKRERDEISYVLGTYGNKREEEFTSGTAKNLRTKENCISILLGCFVLGDDQRPITLMQVRFFSGGGALQKIYSITHTRLSIEEIQKAGIDFTPQSNWKKRMTEVFGTKFYVDNFTPYAEAFSQLAGLRSDRALYLFSQTVGLKGVGNLNDFIRTYMFEGRDTERDFDDLVKHYEELSQIYNEIEKAQEQLRLLQEILDAGKIFEDCEQTNRTLKQFKMILQLWYIQTVLDTITKRIVVLQQEKLLADNKRNMLEAEIKQLDADMDSLKAVIQKNSTAILIKEIEHKIQFNELRLQTCRNNVRDYEQCARVLSLEIPQTEKKFKENIKLLPELKKQLSAERDLLYKSSLERNAQNQVNKKEEQAIIEELESLSKRTTNIPAHNIGIRDQICAHIGCSEKELVFAGELLQVAKDESRWEAAIEKLLHNFALCLLVPPHLYTKVNTYAATHNLRGRLVYLKTDTKPQLKKTYPKKIHLLRNWKYSGSMNFPIGLNRIYMIHSIISARMIRKYLAGRQRRLPQQV

SEQ ID NO: 33977 - protein, 470 aa, Candidatus Thiomargarita nelsonii
MLFEKLPETIFQPLCGPNRLIYQNVLIALGKNIFFDEESAPEKDKIRREIEETLARQDALKWSEEENEKNENDDDDISAPTRSEYANRIYHRLVQAGWLEEETEGYNTYLIMTQPVSYLLRSLNNICQLQKEHYGGTVLSILNNIEAALQNPEERGISLQEAFRTAKSFNNHISDMTHGLRDLQKQIVATKKPKDILARFFEEFVAQILVADYKTLKTQNNPFRFRHKILNILQTLKFNPEKTKALILSYQKQLNIDQSQAQRIVDEHISSIFNIFESIDQKLEKIDDFRFRLEKRVADTVRYMEKTSPGIETRITKILEQITGELKTIPVLKTLARPKPISSKSLKSPPKRRKPPERRIIQTKQVDPAILALREQIKEYESKRRITPQYVKDYIERQLGNRHTLQAQEFHIESVQDYFAFTQIPRMPYLGRMWQKLASQYIIEMEEEKLEIINVQGMLECRHFTIQRKT

SEQ ID NO: 33978 - protein, 1154 aa, Candidatus Thiomargarita nelsonii
MKRLNRIILINWYLIEGLEIPVKGNIAFVGPNGSGKSSILDAIQTVLTGANKRYLSLNAGAGEHGTRKLWEYCLGYMYDPNEAEIENLRPPRDEAQTYIALSFRDTETHEETCVGIGISAYRSREEEIIEGRFIIPNMSVTRQTFLEKTPAGFVPKPWKQLKEELRRKYKDFTDISTAERFVAEMVAKLSRETVSRFDHKKFLRNFKNAITFSPIKNPTDFVRWYVLEHKPVKMEHFRKSLKNYQFIREKTQRVKKRIDELEKIDKQCNEIINSERNALEYAWVVYSVRFDRKKQEIETLQQDIEKLQQQIDKAIESSKHLETQIELLNQEFIEKKAQLESSDVTMKIKALQAEIKSKQQSLRTVTAAINKVTDVLREASYILDGEQHLPKKIVPILKQAQELSNRLLQNESPDGILVQEGGSPDTMTGQPQGIAPTRTNDIVGAILYGCPLWPRNFRPPVLEGLKNTVLPQADYLKTKLESLVIQENEQHKEAQMLRESISLLEQGDAPLNENTWALIKLLKAHNIQSTPLCDMIDVPEQHERWRVAIESYLGGLREALLVDSERLEEAVKIYRRHYLNFKGCHIINTKQTAKWIERYDSLAKRIETENADAKAYINRIMGELTCVESEAELLKYDQAITADCLLHKSGTITAMYERDAMIGRTQRQKQLEQKRKRLGGVFGSLEETKKVKQEVTELVRLFTRLQYGLSDMTQKPSTLLQTQQNTRQEIQNHQNEIKALAQQQDESGIKSRIAAIEKALRVAKNERAKCQEQDRKATREKAAKDEKLSTLKTEQAKTQSYRDQYASKEGFDLERATKKRDKLKGSTESAEKLRKKNTTRAENLKNSVRDSINEHQIRYHDERLEGEQSHEQLEQYIKNTLKELKDSELAHYEKDAEKALREASISFRAEFVGQLKAGFDEIERHLNELNHHLKTRSFNQEYYSFVKKPNPEFADILELVKSYSREDQANVGGLFDPEQSPNTQHNNAIEKIRQALEEETTHSFEDYRHYYNFEVKMKDEEGRILGSLSHRLKKGSGGENQAPFYVAIGAALAATYLIRKNPDGKLTGGMSLAVFDEAFSKLDVGNTISCLGFMKDLGLQILLAAPDEKHGLLSEMIDTIINVTRDGDALHISPEFPTEKGQAFLSADNPYESI

SEQ ID NO: 33979 - protein, 399 aa, Candidatus Thiomargarita nelsonii
MNPYSRILLKKLFDKAKQNSQRTISLPITKQRAPLYFEISDVDEQESLHEALRDAEREGCISLKWGKYAESHLLKSIILKDPTQLGNYLGEIPATEKAALLESSLKSVISGKHIWISALIEKSMEKWSRGKKAHGLSVEQIEEIKLLFIALEAVADQKHKDMDLRTFSAKVLRDSKAMERMQGRFAAIWRKQFGLDNLETKELFETIGLSKFPWPIFLKGAIKIISPKTTIDCSNLFPYIGLPPDAILNLKIERQPDYVLTIENLASFNRYVHEIRDNSLVIYTHGFPTPSLKEFLAQIDKKVSKTIHFYHWGDIDVGGLKIFVYIEQILNRHQLKPHLMNSVYLKKRGEEVNSVDRKTLKRLAHSQSQISELAKTLLSLEKPLRLEQENVDPEVPKRF

SEQ ID NO: 33980 - protein, 480 aa, Arthrobacter sp. PAMC 25486
MDYFSINSLRENHAGWSLLRAQNAPLALTFFMTAFTDVNQRNLGRQDLIDVLDDVLFSLRDSLGEERFPRSAGEYLDDWAEPDKAWLRKFYADNRDEPVYDLTASTEDVIRWVESLRGRDFVPTQSRLSSIFNLLKTLVHGSETDPEARLAELQRQRDDIDTQMEQIRSGTIPVMTAPEAVDHFHQLTTQAKDLLSDFREVEANFRKLDRNLREQISMWEGGQGDLLESIFSSQQDISGSLQGRTFQGFWDYLMSPQLRSELHELLERATQIEALATQDGLAQITSMQKDWLPAVEQTQSTVRQLSAQIRRLLDDKVFLENKRIMALIRNIESGAVAVRATPPAGIFADLSGHDVPVALPFERPLYEPSQQVAIDDAVQVADDLDVDAQALFDQFFVDTQRLESNIDAVLTDAEQATLADVTDAFPLSQGLAEIVSYFQLATESPSATIDSDAAQTLSWTLPDGSLREATVEKIIFVRPS

SEQ ID NO: 33981 - protein, 228 aa, Arthrobacter sp. PAMC 25486
MSTTPDYLQETLETPESTVRTPDGLPLVVTKLFKGVVYRDADEKLWQRLMELSAHTRDHVAVLGLELVLDDAEGYAFLRSRPDADPELPRLIPRRQLTFHVSLLLALLRARLAEFDQQNSETRLIMTASQIGDMVSVFLPESSNEARILDQLATNIKKVTELGFLRKLRGQDGSYEVARILKAYVDAQWLEEFDARLADYRAELEGDKSAVGRSPTKTAPSPAKAATA

SEQ ID NO: 33982 - protein, 1126 aa, Arthrobacter sp. PAMC 25486
MSTQAQAGLFSLDDLTIDDAGTRPGFRLQRLELLNWGTFNKNVRTFRLDGENSLLTGDIGSGKSTVVDAITTLLLPANRIEYNKAAGAQKKERSLMSYVRGFHKSARSGIGDASRPVALRGPGTFTVVLGVFHNATLDKTVTLAITLWATQEAGQPTRFYSIAEGDQSIKGDFSDFGADIAKLKRRLRNDGVAIFDVFEKYGAAFKRHFGIGSAQAMDLFHRTVSMKQVENITHFVRTNMLEEDDVETRIKNLLHHFDDLKKAHNAVLRAKDQIRMLEPVRDNAARHAALTVDYNSSHQQREQLSPWFTTRKLELSEAHLLELERAGAKVQAQQTSLTAELGTFSRELADLRDDIRSSGGGRIAAIEAELARMSIESGAQRERYTTYSEAATVLGLFEPEDQVVFDANAAALPGVEKHLVEANAELQDQRTALDRQRSEAAEQAGELQEELKSLLSRQNLLPSWLIALRQRLCTGTGIAESELPFAGELLKVRDSEAPWEGAAERTLHGFALSLLVTGAHYGAVSDWVDSNNLRARLVYLKVSDNPAPRTAAPGTLASKIGIKPGTPMREFLLEELGRRFDHQCCETMEEFRRYPKALTVNGQLKSGGGRHEKDDRKALTDRSTYVLGWDNHDKIARLRTALDHAEGQARTALDGLARIDTQLGNLGRQQRLIGTVTAVASFADLNWQSTARAMEGLKEEKSALESSSDILRELTRREAETAERVEAANDRLRTLMERIGANKKAIQDITEQIVDCRESLAETPMTDDAGLLAQLGKLTEAALESASLTYKTTAKMESKVRDRLTAAIDALNRQVIRASEATIKFMADFRNKYPAETTDLDASLEAADEFTKILTQLVENDLPRFAERFKESLTQNTIHEIVAFNAFLDARKQDIVSRIGEINESLARIEYNTGRHIQLEPQATSDPEVREFGTDLRACSEGSIGAQEQYSEQKFLQVEALVERFRGREGRTSLDERWTAKVTDVRNWFTFSASEKWTETGEEHEHFTDSGGKSGGQKEKLAYTILAAALAFQFGIAAGPGNQRSFRFVVIDEAFGRGSDESAKYGLELFKRLKLQLLIVTPLQKIHVIEPFVANVGFVANETGADSQLRNMSIQEYRAERDKRGR

SEQ ID NO: 33983 - protein, 361 aa, Arthrobacter sp. PAMC 25486
MLREAALPTGLHPRRRALKHPSATQLRTDYALAAAWAASWVPAPQGCSLDHVSVGASTIGANTLPAAAVFASASDEILFLGLGRESAKFTELSRRVTELDAGLTAWAMLRPLELLKYGEDALTAARVALWFAANPAPGIYLRQLSLPGVHTKFVENHRRLIDGILAVLAPERPLVGKNYARRHGFHAAPDRVRVRYLDSAQAPVPGMDDVEMTAAAFAAHPLDVDRIITTENLINFLALPPAPRTLAVFGGGYGFEGIRDAAWLKDVEVLYWGDIDTHGFHILDQLRSHHPHVHSILMDEETLLAHRDFWGREALPSHAVLTHLDASENTLYEALKASTHQPQLRLEQELLRWDWVLARLP

SEQ ID NO: 33984 - protein, 485 aa, Arthrobacter sp. PAMC 25486
MRSTDNAVAQWHAQKQLRLSPAWKLLQGAPWTLAFLRAEFTATKQRVGLEEFHADLADFMKELRGENLSLNEAWQASHYADSWVRSQFLSRPMVDGKFQYEPTAATARVLAFMDTLTGSRTNLNSSRLSTLLNSIETLSLQSDPNPESRIAALEAEVAERENEIAALKNGANPAILSDDSAVAATRSVLDLAASLPADFKRMRDGVEVMLHSIRTEIMDSSVTKGVAVGQVLAGDKALRGTAEGETFQGFTEFLNDPVQQARFRQSVNEVLERDFSDQLSSEERANLASLLREMRRQAADVHTIYGRLSESLHAYVQSAEFKESVLLRKAIHAAEQAVATARLGSRTGVVEPLLYAPNFETLAGLGIFNPEDHVPPPRLAAPPALSDADIHRTPATPAPDMPALHAAVDRVRETRNGTATLADVYTSLPSELQHINTIRGLILAARGSGERIDPERSETLTFTQIDGTSRTATVPLFTFTKDSTA

SEQ ID NO: 33985 - protein, 229 aa, Arthrobacter sp. PAMC 25486
MSTERTLFPGDTGSFPLDMRQALVRLLRGPYIDGTAEPALWTTVLTHTVSLQQYLSEIFLLLSIDAERKIALLTPAEIDAVHTQPVVARKPLRREETLLALRLRVLLDRHAGSGTDVSMSRAGAREILAEHRHPGMVDDKRLDEATDAALARLLNLKLILPTELDHEYRVSNALALALPFDSIDQIPAYLAALDKAAGTEALDLDASHLDEADNQDEPDHQDQTVQEIF

SEQ ID NO: 33986 - protein, 1097 aa, Arthrobacter sp. PAMC 25486
MSIATTLPIGEELNPGQFRLSQIQIINWGTFHGRHSMYVDRAGTLLTGHPGVGKSTLFDGIQHIFYAAPRLNESAHEASNRKDRRTTFSYMRGRKIKTADGVVYQRPSATWSATALVFEDGLGRHVTIAALFDLPANGLEGQVGKHYLIHDRALDTEALENHGSRRFSPSSLHAALPGAEAFDVHKTFAERFRRKLGIHNDKAFSLLRTLQNGKGLDKGVNRFFRYEVLDKPATLAAAAAAVEDFSHLSGIYRQLEDARGQRDALAPVPELHEKLQQLAEKQSRTVELKNIQLPLLRQQFQGELLAARAVALTESQALKHAEIAAATQAKDALGESVAALSQQHANHGGQAIESLEKDIRAGKRELAERQRLETAARDDLDSAGLVYDWSAQGLADARAAAASGVEHQQEETETARTREYQAVAASVNVKAQEKALRAEIAAYERRGSNIDSRSAGARRAICAATGLNAADMPFAGELVDIGSGHGAWRPAAEKVLRSLATTLLIRGSDIAAVTSAINTLDGHGKLRWSNLGVPAKPAKEGRNHLVTKLDFHESDAGSWLRGKIACDFAFTCVDDDVALHEHVKAVSQAGTVKLSSALFERDTRTINPADYLLGFNNVAKIAQLEEQAQLLADEQAAAEASAAQSSLAKEQSARRLAALKRIAADGRSFEQLDATAPAAALELLQATLEQTIAGSTTLAQLRESLAAAQADLEAAVGRVAVLHHDLAGIEKDLAAVQDVLAGGGPGKLADEWAQEAFEPYLRDGEPATLDELEVLLSHVAVDLGERLATIKERQFRTEGSLSEIFKAFARQFGPSMSASHGTGAEAATHYAELYGRIISDGLPQRQEEFKEYFNNRSYERFSDLLQLLEEERRSIEERILPLNQILADVPFEKGSRLRLEVKTSVPDEARAFRKELKEALGNAYTKATEEKMASSYQQLERLVNALSDPALAHWADTVLDVRQHVTISCNEHRPNGEIEIGLEPGTLSGGEGQRFTSFIMGAALAYQLGIDVQGYSTYGTVMIDEAFIQANSEYAGAGINALQEFGFQLLLAAPEDKVDLSRHLGSVTDIIKHPQANVSGFVSTGQSPATATDILLR

SEQ ID NO: 33987 - protein, 449 aa, Methylomonas denitrificans
MDDALQALSEMLASYASQEIYEIEPENIHLQAGRELRAWIKHLIVEREGRLYATDALETAIHFVESLDNRIMTSTASRLSVVQREIESLEMGLNPNAASRISSLRRKIKDLETELAEAEAGKFTVLNEAQAVEGIREVFSLSTSLRADFRRVEDSWREADRELRQSIISEQYNRGEIVDRLLEGHETLLGTPEGRVFESFQEQLRQSVELDQMKERLKTILSHPTVPKALSRIQQRELRWLVMRLVKESEAVFQARARSERDVKGFLKNGLAAEHHRVGNLLSEIMNVALNLDWHRQAVRRKPTPLPPVGLPVSGLPLVERLRFKSLDDDVSVDLNLTTDSADLGQIDDDFWAALDGLDREALIKDTLAILAAEDRPLSIAELTRFLPPIHDLETFALWLGMAREAGIPVVQDKPEEIELIDDEQRRWLFRLPYASLDSKALDSIDWEL

SEQ ID NO: 33988 - protein, 214 aa, Methylomonas denitrificans
MGNSTVDSNDEQRTNRRLREAVQELLKYGLLEEIHKPNLYRIAISHVQELSDILEPLDLAMGVDEVRGLVFVIVRQREVTEQDDWAHPLVRRQRFNLEQSLLVAILRQQFIVYEQESGTGASDAVVAIDELIPQLQIYLGDLGSDAKERTRVINLLDQLKGHGLVSTIDSHDRVTIRPIIAHLANPENLQSLLNWLREQTSVAGEANDDKDELE

SEQ ID NO: 33989 - protein, 979 aa, Methylomonas denitrificans
MGAMLWFEDTSSTASDLKKLWLFTESPEHTLEYWLTIHHEGGMRALRQMEKDSTAIWTYSSKKAFLARLRDYFDVGENAFTLLNRAAGLKQLNSIDEIFRELVLDDHSAFDRAAEVANSFDDLTEIHTELEIARRQQRSLLPIADGWEKHQLLEKELLEKETLKQILPVWFAEQAHRLWKLEAERLETAWQLAEDVKSNLTTQVEVQKKAVDTRRQAYLSAGGSSIEDLEELIGEWRKTREKRAAHARQYQQLVQNLGLPHQINAEILAANQQETQLRLSQLEVEIKSAQDEAFNRGVETRNASDQLEKLEKEYCEVLNRPDSNLPSLYHEFRKALAQFLGLSDDSLPFVAEMVQVKEDEQIWRGAIERAIGSHRLRVLVPPEVAESALSWVNQRHNRLHVRLLEVKQPESQANFYDDGFTRKLSYKPHLYREVVKDLLAGIDRHCVDSSERLRHTPHAMTVQGLMSGQSRFFDKQDQKRLDEDWLTGFDNRDRIAYLQQEIANAKRLVKETKAQLEAARAIVGRLSAQSLILEQVQSLEFEQIDLPGAEQKLTELNNRLEALTSPDSDAAAAKAAMLDAENQLKAIEKKHEKAVGDCARLQGDFDRAIEQKRKAFRRAEAGLTDTQRELGTKNFSEISGEQLDDIQDLERNEDVALQQQINDLHEKLSKLAQDLARRMSDAQKEDRGALSEVGREIEDIPKYLERLQVLTEEALPEKLNRFLSYLNRSSDEGVTQLLSHIDNEVSMIEERIQDLNNTMRRVDFQAGRYLRLVSNKVVHESLRTLQRAQRQLNSARFSDDAGESQYKALQTLVALLRDACERNRTQGARALLDPRFRLEFKVSVIDRETGNIIETRTGSQGGSGGEKEIIASYVLTASLSYALCPDGSNRPLFGTIILDEAFSRSSHAVAGRIIAALREFGLHAVFITPNKEMRLLRNHTRSAIVVHRRGLESTLTSLSWEALDEFHQQRIKVQHEVVG

SEQ ID NO: 33990 - protein, 392 aa, Methylomonas denitrificans
MKSSAEISERLARQWHQAQMRAERLLSSEAWPLVIPIGKPSAREFSENIRAVQYHVQSWQGVVVGKVEWEPVNYRAGTEPVLIPVRWNLRNPSEWVTATADVTVADEYAQLEGLVASVEEIFRPILVRQRALWLKKDPNEIIATARLAATLSPGSARGRPLRLLAEHGVDTKFFERNGTLLTRLLDERFDGAVTEQGLVNFLDALEENNHWVMLAPLEKGLLPFKRLRITTSELTETALPCSRILVVENEQCIHLLPELPNTVAILGAGMDLQWLQSGQLDNKSIAYWGDMDSWGLLMLSRARRYRPTISPLLMTQALFDTYASDSAVHEPVVAQSASPEGLTDCEAYFYQYLLNQERGRLEQEYLPEHEVENALSAWATQSVKVLKRNNNG

SEQ ID NO: 33991 - protein, 543 aa, Bifidobacterium longum subsp. longum
MADVMRELERLRPVYETGVLRLLLRQNAMLYVSLLRSTFDPLTGELPRETVEERFAQSLNALADAGEYAPREDQTFAEAAHQILADLTREGEGDYAWLANSHDAASHRFLYRLTARAHRAIEALSRLEDESRALSGAQANSIIMEIEHARMQLTADPGERIKLLNREIKERKHEIKRIQQGKQHATLSEAQVEDVIAVIHNTLRGVPIDLRELVLDERDNGDALRRRMQAGDISVDENLTRYHDEYRRSFSESDSGRRFEDAFQVIITDEGRQQIDEALRAIAKTPYLAGESGVLLGQIRDELARIYDGIEAVRRQMRVSDEAISRLVRQQTDTRYRTMLTRLNRLYARLNADAKTHMGDASRPYDTATSDALFAPLPMRPAKSMTRATAPGLSDLAAEAPQSTPVADLRDMVNSGGPRLLRMVSLIRRNPVTVDRSDDRPGATLVDIAASFNRLPESERRESEIVGFLGGLGAVSGNAIADEPSTDGVGVGVDSDIATEPAPAQRGDTAIWHCISIDGEPRNWITRPVLADMDELSIIVEEG

SEQ ID NO: 33992 - protein, 224 aa, Bifidobacterium longum subsp. longum
MTVAEEHEEHEEHMDNANPYALFEGDTGDMPAEARMAAIALKRDRYISGPTYDTVLDNRDAVVRSLNNDLLDLVINERYRIMYATPVAGDDVTLRSLKTRVSLKREEAALLAFLRIRVLEYENVHADPADWLVSFEEIRAALATGAGYLAARNDEEGVAKQIGAIVSAMITYGYLVRLDDEAMYQITPLVPVVLDRKLADTWLDVAEHGDGDTEDDDDDEKGAE

SEQ ID NO: 33993 - protein, 1182 aa, Bifidobacterium longum subsp. longum; identical to SEQ ID NO: 33523

SEQ ID NO: 33994 - protein, 394 aa, Bifidobacterium longum subsp. longum; identical to SEQ ID NO: 30423

SEQ ID NO: 33995 - protein, 450 aa, Pseudomonas aeruginosa WS394; identical to SEQ ID NO: 30847

SEQ ID NO: 33996 - protein, 249 aa, Pseudomonas aeruginosa WS394; identical to SEQ ID NO: 31970

SEQ ID NO: 33997 - protein, 1101 aa, Pseudomonas aeruginosa WS394; identical to SEQ ID NO: 32973

SEQ ID NO: 33998 - protein, 385 aa, Pseudomonas aeruginosa WS394; identical to SEQ ID NO: 32974

SEQ ID NO: 33999 - protein, 461 aa, Collimonas arenae
MVVACVRALYERLHGPSADYGQNLTRDGLRDLLLPVVQESRQNMLQQEEAAAELALADDDFIPPGADDQQSSSALLRTLLRDGWLETFGDRAGLVTAYRFTRAGKLFAEAFWAIDRRSARTRQRNVRSCRNALNAALRNVDAYDLIDAYDYAEKVISDLSEGVDYFQELVRRLMLEASQTPWDGFMEFLDRFEKEFKKQLTADSIERHRQAIRDVIARLHSLEEDKARALEDQLNDIARWASQERQGPSTLDWMLDRIEEMVEAACTTKHPELIKAMSVYMQRAASIVQQALMLRGGQTRQAYSVAISKTAKLSGAAQDALLERIGAAIAPAEIRLLDPASFKLRSASQRRKALTVTAQPKVTRDSRLAAAMYRAEADAFALSNDDIVHRIRAELRLRDRPIRLSTLPVATTTDVLNNMQIVEAVRGARDERLTVQKLPSKLWNEFYAGDDYQIEMKNDTE

SEQ ID NO: 34000 - protein, 240 aa, Collimonas arenae
MNEQLALHALPLERFREIANRLFAAGIVIREEDGVEQRLYDDARRIEATLQDYFQLAGFRLEHNLKGEFFRLYAPGAEVPGMPEDGLDPVPGLRARLSPDFVAAALALRFQYQQGLSEGGNRLTDSGEVLTRFEELSATLQTQLKRALPPTSVERQRLLNDLKRHRLIRLAANFSMDDEDALLAIRPTILGIISDDMLEAALESEPLSVAERVEGEQAGLQVMLDAADAAEDESIEGNLE

SEQ ID NO: 34001 - protein, 1208 aa, Collimonas arenae
MKLDKLILVNWGALRSQEYPMGNMTLLTGPTGSGKSTMLDALQTVMTAVYQNIFSYNPGQDETTQGARNGKTKRTLWSYVVGAEDNLFARPNGAHGYIAAVFKPSEGEEGREFTALVAASARVDGAGERRQAVSEKLALLIIDGVALQLGDLTSIEIDGGMAVVAVEKIEHHLSGKYRGVTNFRDSKREYLCQLYGRFRGQKTVSFAEAESAARAWSQSIAHKPIGSVDDLVKHQILELDTTQLSQRIGQISKLMRQVNELRKEGERLSDNVKRLDKLGKAVGDTARAHQSASQSQLLVSSLALREDQRQLEAATSAIEGLQALIDEETDSADKLEQDRNAKNRSLTQIHAQMMGIPAAEQKTRIQHQIEQCDGKIKAVFNALQHNASTAQQLDTAARSVAGMQIPPEQKEIADAARQVVLALAAAGTLDIATHLRSINELARAEEVDVLKSLMLVNDFEGVDAALVKLHGALAGTEKSFVSALHTQIAQLRAGEHEALRREKDTASRKANLAEGGADYPPHIRHALKEFRSELGAARAQVLCDLVEPVSADWQAAIEGYLGGARFNLVVDQAWEGKAIDFVRQKRLRANVIQGSFCLKNLKVERTASDSIIHELSTEHPIAHAYLHDQFGQVVKVADTEALRHTSRGLTKDGKGSGSRTMFTADTDMLVFGQEAKRLAKQRAEQEHAQAEQELTQIRVQLRELQGALALMGQLQCPSFAAIADLESLARQLDAARQDLSRLDLTQVSKLEDEAQALSIEITALEARKTACSKNIGGHEKAIQGHQAAITRLHFGMGGKQSRVDADTERLRDLCIVNGSLSFTAVTDEVAAWVNDSTYSQSQASNNVGKQTALSWQLYGDARNALGEYHAHARIDERFETAQGDDLRDGDFTPLYAMMVTLQERTRAQLTRQKDIGLIKNLEQLRTAESSFNDVFTKQFCYEIRNAVDTGVRTLKTLNTELDKLKFGTDKFRIDWSEWIPEFKAYYDFFCATSEMADTQEASSSLFADPVLSADNCVVRDRLVQLLLSDDEDKAVKELQRVADYRNYRRYEIYKESDTGSHVRLSEWGTGSGGQLETPAYIIHAAVVTNRLKRFEKGNSLHLLVNDESFAKMDEGRARDVLKFLRDNLGMQLICAMPTKHAGAIKPEFSREWSFSRTVADGNGEVGFVSESDERELRSDKLRELWELRRAQVREQAQINFEAAEQAVA

SEQ ID NO: 34002 - protein, 489 aa, Xanthomonas axonopodis pv. phaseoli; identical to SEQ ID NO: 33811

SEQ ID NO: 34003 - protein, 233 aa, Xanthomonas axonopodis pv. phaseoli; identical to SEQ ID NO: 33812

SEQ ID NO: 34004 - protein, 1340 aa, Xanthomonas axonopodis pv. phaseoli; identical to SEQ ID NO: 33813

SEQ ID NO: 34005 - protein, 489 aa, Xanthomonas fuscans subsp. fuscans; identical to SEQ ID NO: 33811

SEQ ID NO: 34006 - protein, 233 aa, Xanthomonas fuscans subsp. fuscans; identical to SEQ ID NO: 33812

SEQ ID NO: 34007 - protein, 1340 aa, Xanthomonas fuscans subsp. fuscans; identical to SEQ ID NO: 33813

SEQ ID NO: 34008 - protein, 489 aa, Xanthomonas fuscans subsp. fuscans; identical to SEQ ID NO: 33811

SEQ ID NO: 34009 - protein, 233 aa, Xanthomonas fuscans subsp. fuscans; identical to SEQ ID NO: 33812

SEQ ID NO: 34010 - protein, 1340 aa, Xanthomonas fuscans subsp. fuscans; identical to SEQ ID NO: 33813

SEQ ID NO: 34011 - protein, 489 aa, Xanthomonas axonopodis pv. phaseoli; identical to SEQ ID NO: 33242

SEQ ID NO: 34012 - protein, 233 aa, Xanthomonas axonopodis pv. phaseoli
MNWSEDTGLYTDEDTGAPAIDDRMPMAQTSGAEPRGELFLGDTGTLSFDARRALCQLLAGPSIDAQRHGALWPALLRNEVAIRQVLCELFLELVLDREGGVAFTRQADTAELESPTLLRSAPLTFIESVLLLFLRQQLAEADTRGERAVVDEAQLVEALSVYEKNVSTDRAGFARRVMTAIGKMRDNQLLSRLRGSEERYEVSPVLKLLFSAEDVQALVVAYRELREGEVALD

SEQ ID NO: 34013 - protein, 1340 aa, Xanthomonas axonopodis pv. phaseoli
MNSQSNLSPAQPGASLFAETLAEQRAQQFRMRRLQVHNWGTFNGLTEVPIAQKGFLFVGRSGSGKSTLLDAMSALLTPPSIVDFNAAAREAERSGRDRSLVSYVRGAWADQQDSASGEIATQYLRKGATWTALVLEYANAHGQTVSLIRLFWIAGSGNAAADVRRHYMVAPRRFDVATELDGFDLDLRKLKARLGDEVAHFDGFAGYAERFRHALGIGNEMALRLLHKTQSAKNLGDLNAFLRGFMLDEPRTFEAADRLVEDFAELDGAHHAVVTARRQVETLTPAREHHAALMALRHSVGELRELQLGVDSYREQQRLALLEERLQELDNQDRGLAGEEGQRRESLDNHEQKLVGLEREQRAAGGEQVEELERERARVERERDERLRRRAQIEQACRQLGTALAAGASGFAAQIAHAQTVLDNGKHDASALDEAIAERMGARRDDERRFAEIRAELEALKRAPSSMPAPMQALRARLCEDTGIAEAALPFVGELVQVREDQTAWRGAIERVLHGFAQSLLVDERHYAQVSEWVNRTHIGTRLVYFRVRRNDELHSRRVDPGALPGKLQLREHAFTEWLRNELTRRFDYACVDNAAALRNADRAITREGQVKHPGDRYEKDDRHAVNDRKRWLLGHDNRDKLKVFEREAQTLAQRIASCDADVAALRKQREQDQERQLAAHTLVERDWDEIDVGPKLQRLSDIDEQLVQLREGNSGLRALGQAIDTARTLRDQAKRTYEDVRLERAQLARERVRLEQQQAACAGRAGSATLTPTQLQGLRERLAALTPLSLDNLEAHFRVVERGLAEQLTDSQGRDSRLSAQLLECFRKYCQQWPEDSGDFTVSLASADDFLARLDRLESDGLPRHEHRFFDLLQTQSKNNLLALQRHTAEAHKGIKQRMDEVNASLEQVPFNRDTVLTIEVGDRRLAEVQEFQQQLRAVLSHQQTEDRALAEAQFSTLRALVARLGAQEPEARRWREQVLDVRLHVEFIGVELDAQTRAQVEIYRSGAGKSGGQRQKLATTCLAAALRYQLGGEDGELPRYCAVVLDEAFDKADNEFTALAMNIFENFGFQMVVATPLKSVMTLEPFIGGACFVEISGRHNSGVLLIEYDEQAQRLKLPERSRGDEPAVADATDAAPSIEAAAESARVQGAASADGMATNGVPMHTASPATEETPPAAQETQTGQRKPAVATTSKQNKTAKTASSTRAAAQPQAKRPKKSPSRTPVLAGKPASNKRPAGVPAVSSGVASRSNVGKTTRSSKTPGKPIAATSASNATSRKVAAASAALKTAAAKPRATATSTGQPARGAGKTTSTRAVAKPSPATTRGAKAGAPRSRGKR

SEQ ID NO: 34014 - protein, 477 aa, Saccharomonospora viridis; identical to SEQ ID NO: 30716

SEQ ID NO: 34015 - protein, 221 aa, Saccharomonospora viridis; identical to SEQ ID NO: 30717

SEQ ID NO: 34016 - protein, 1114 aa, Saccharomonospora viridis
MSMIDTLFGLIPAASRGQQWVARDLQLVNWGGYDGYHRVRFAPGATLLSGGSGSGKSTLMDSYIALLMPHTTPFNGASNGGVVGRPRGKDQRNILSYARGKLDESRADGETKVRVLRGDGCDTWSAIAMTWVDHTGAEFTALRAWYVPAAARTLEDVVAVRATCDRHYCLRDLEGPAGKRFARAEVEATGVTCFDTDRDFTARLHSTLGIGAAGDGHKAVALLGRIQAGQQITTVDALYKTMVLEEPSTVATADAVVQQFDELSGTRQRMIVARQQVKALTPIREHRRAIDDAVERLRLIDAVGSFTEESSPAALWCHERRLDLLRAAEQDLAQRHRRAKAELAETEALVKATEAQYEGAAEALRSSGGDRLETALRELRNVDQRLVDVERARNRLDRALEDIGATVSTADDFAALVETAHRTLADAEARRTAQNHFAEAMAEKKQAETELAELRAEHKAVKSRRGNIPTELHAARAALAEAAGLTPDELPFVGELIEVSTEFEPWREAFNLALGGFATLMLIDVGRLNAFREAVNKVKTTRRVHFQGVRTGVRDEVTLNPKTLPGRLDYRPSPFTAWLKSELARRFDYVCVDTSRQLSQYTKALTISGQTSERGGRGAHGGHGRANVLGFTNDRLLADLDHRIDLARRRLEEAAAWVSRAEEELNSFEARRAAYRTVTELSWDQVDVASLQAEREHWNLLVEEVRAGNPKIDQLQEQVEELRRRAKELTERVGEQKKTEKELAEAWASIVDEVDRAQTALDVAVRTGTVVLPEHREYLEELFSGASDDGPMTELAEFDAAVKRATDRLVTDRRAATETIARSRKALEDTFSTFLERWPNPNLGTDPDASYRDFDRILTDLETSGLHELEAEWRDSLLKLSGNDLTALDSELAAAVREIRDRIDPVNRILAELPFADDNHRLRIDPQESHSAVRARFRKELRDVRALIDSATTDAERERAYHRMAKVIDRIRRTAPDFADLIDVRNHVRISAEKCDLDGNHVAVYDHIGEKSGGESQELIAFIVGAALRYQLGDAGATRPRYAPVFLDEALIKADARFTGRAIGAWRGLGFQLIISAPNDKHSAIEPHVDAEYLILKNSEGRSWAKPLVGAPDA

SEQ ID NO: 34017 - protein, 419 aa, Saccharomonospora viridis
MGEALGGGSGRMNTLVTPEDACAELRRRIDRKWAEAVCTGVNGGETVIFSVPLRPGVTTGKAVERLGYGVWHEWRMRWRDVADRLPHGVCLVHRTLSIRGVAGDFPARLVADLDGGVAFLAEFGAEPPTVDVERARQLASALRSVDAVLTPATLRAVHRLQAHDVGVLLRAVDWLRQHPDLSAWTLRQLPIRGMHTKWLDSHGALLREVSGRDVRAEVRPRPAVVHLTYVDPGYLASGRRRHDAWTTGDVHEIAYRPRVVLVVENRDCRLRFPQVRDTIVVEGGGKAAAALLAEVPWLRAAEHVVYWGDIDTDGYAILDRFRAALAEPTPDGAPPKSVSSILMDDTDLHRYAEHGVNHDKHGRPLTSSAEVPPHLTEAERLAYDTIATAGPTPFRRIEQEVIPFEHAVARLLHVTNSRD

SEQ ID NO: 34018 - protein, 489 aa, Xanthomonas fuscans subsp. fuscans; identical to SEQ ID NO: 33811

SEQ ID NO: 34019 - protein, 233 aa, Xanthomonas fuscans subsp. fuscans; identical to SEQ ID NO: 33812

SEQ ID NO: 34020 - protein, 1340 aa, Xanthomonas fuscans subsp. fuscans; identical to SEQ ID NO: 33813

SEQ ID NO: 34021 - protein, 451 aa, Escherichia coli
MPLEEAIQSLSSILIEHVSQEQYDINQDNPFLQASRELREWIKRRLIVERDGRIFATDALEVAITFVESLDNRFMTSTASRLSTVQREIENLETRLNPNPANRVATLRRRISELERELQEAEAGHIEVLETHQAVEHIREVYNLASSLRADFRRVEDSWREADRALRQSIIGEQYHRGDIVERLLNDQDALLNTPEGRVFDSFQQQLRQSSELKAMSERLRVILSHPSASDALNRLQRHDLRWLVKRLVDESQTVLQARARSERDVRGFMKTGLAAEHHRVGHLLNEFLNLALKLDWQRQMIRKQEVPLPAVGVAVTGIPAIERLRFKEVDDEAEQTLDLSNHAADLTQIGDDFWDAFNGLDREVLIQQTLQLLAKENRPVGLAELAALLPPAHDLETFAVWIGMAREAGIEVIDSQREFAELSDGEGRRWRFNLPTTGLESQALMDIDWE

SEQ ID NO: 34022 - protein, 249 aa, Escherichia coli; identical to SEQ ID NO: 31335

SEQ ID NO: 34023 - protein, 973 aa, Escherichia coli
MGALLWFDSTSSSVTDMKRLWLFSDNPGQTLEHWLNVYHEGGTRLLRQMEKEAIGLWTYPNKKQYLARLRDFFEVGENAFTLLNRAAGLKQLNSIDEIFRELVLDDHSAFDRAAEVANSFDGLTEIHQELETARKQQQSLQPVALSWEKYQKQERQLADWQTLESLLPLWFAQQANHLWREKINLLNARLAEAQTSEEQLQSQLDLQKKVVSDCMQRYLQVGGANIDELNERIKDWQKTLGSREALARQYQQLTRNLGLPSDLIQPQLEANQHEAAALCEQIAVDIKLKQEEAYQKGALSHHITEELRERENERAEIARRPDSNLPAHYQAFRSELAKALNVDESELPFVAELIQVKPEEAQWRGAIERAVGSNRLRILVAPESAQEALRWVNQRNNRLHVRLLEVKLPHSPARFFDDGFTRKLLWKDHPWREAVKALLAESDRHCVDSPEQLRDTPHAMTVQGLMSGKQRFYDKHDQKRLDEDWLTGFDNRDRLNFLAKEITTLQEQVKTANAAFEFAKGEVGILQNQAASFQKIEQIDFDSIDVPGAKSQLDALRERLENLTRPDSDAIVAKAKLDEAQTVESELDKQLRAANKVTNVLDTELTSARAAERKAQQTAQQGMKEEERELCASHFPVVTLEQLPDIRDLERQHERGIQHEIERVKAELHRLNIELTKRMSEAKRVDTGALVEAGTDLDDITVYLQRLQELTEEALPEKLNRFLDYLNRSSDDGVTQLLSHIEHEVLVIEERLNELNETMFRVDFQPYRYLRLDTKKVVHESLRTLEKAQRQLNAARFVDDNGESHYKALQILVAQLRDACERNRTLGAKALLDPRFRLEFAVSVMDRQSGNVIESRTGSQGGSGGEKEIIASYVLTASLSYALCPAGSRYPLFGTIILDEAFSRSSHAVAGRIIAALREFGLHAVFITPNKEMRLLRDHTRSAIVVHRRGQNSNMASLSWEELERHYQRRGNA

SEQ ID NO: 34024 - protein, 382 aa, Escherichia coli; identical to SEQ ID NO: 33444

SEQ ID NO: 34025 - protein, 520 aa, Bifidobacterium pseudolongum PV8-2
MADVRTELAELQPVYETGVLRMLLHKYSDIYIAILRACFDPLTAEVPQERLLAAMTRCVGELVADGSYRMRDGETDLEAARRILKELKAENEGDYAWIADSLDRRQHRWMCRLTQRAHRAIEALAALQQRTVSLSGAQVNSIIMEIENARKELTVNVHERIELLEQEIAERRAQIAQLERDGVQERPTPEQVSDIINVVYNTLRGVPVDLRELVIAERDSGDALRRQMDNGSMSSDDMLAYYHEEYERTYHQSDEGRRFNDAFQVMFATDRRAQLDGALADIAGSAWLHDSADDLMAVVGRELDDIYSGIDAVRDQIRLTDESVKLLVRQHTDMQFRTMSRQLAALFTTLSGRAAAKDHAKYGIGLSTATMPTLATRARETPVKTTAPALQTHTDADASALDLHGIVATGGPRIAHMVALIAEHPVMREGAVDMAASFNRLPRAERRESEIVGFLSYLGGGGSGESIWHCAAPDGADRAWVTRSVLVSPGELNEFLQESTHTGQGGAPHRERTRHDADDE

SEQ ID NO: 34026 - protein, 235 aa, Bifidobacterium pseudolongum PV8-2
MAEQTVDEMGVADVSNPFALFDGDDGDMPEPAREAAIALKRNRAITGEMFRQAMDYFGHVKRSLNNDMLVPVVDTFYKVMYAEPAAPSQVRIRSLKNRASLSAREAVLLTALRRKVLEYENVGLEASQWVISKEEIVQLMSTGAGPLAGRNSEESVNRQVEPLINAMRTNQFLEEVEDEEGIYRITTLVPVVLSTQRIGDWMAAADEPGSTPTDQNEPATTPDDDAQDVKQEELW

SEQ ID NO: 34027 - protein, 1148 aa, Bifidobacterium pseudolongum PV8-2
MTEGLYGQIELNPPHWVLQERQLVNWGSYGGYHTFDPSTMFDGTVTLLTGQSESGKSTLVDAQVSLLYPTGAAFNKASNAGRSDRSDYSYLRGQRGIRNDNGHDEPVFLRGMTDDGEPYAVWGAIVDRYEDTTGGGTLSIAKFMTLPAGGRSEDVDKFFLVSRDPIDPRLMDDYRDDVFSVPLFKRVYRTATVYRQANLFHEDVWSRFGLTESACRLLHRMQASDAPSQLDDIFRKGVLDEPSALNRGRALIGDYTQFSENFTAIERNLHRVDLLERMADKHIRYIDERKRMETLRAVDPGREGGAETRDAWLGARVHECIARVAPTYERGIAENQTKVASAQRDADRLDAELETIREQKNGHGGDRLQRLQEQLRDAERERERMAARIERLVPQFTKAGRTVPGTASAWQALAEEAVEVRDAYDERRKEIDALAYPLQERCSAMRREVKDLQADIERKRRSRTRITKEMADARAMMAQAAGLEPEQLPFVAELMDVQGGEERWRTAMNVVYASLAPVILVDKRYEHGFARAISQIPHASMARRNWQFVDVQQDYHGEPREGWMSGKLTFNEESPFADWVRARVADARSDARCVAHIDDSDVRTRQVQEDGQIKDGAHGSHGTKNINQVIGFVTEGYLHELADELEHLEQEMDRTNQEIERIGARKAELEAQRDLAQAVLGVDWTDIDVQSADAGIAMLHDEIERILADPALAELEARERECKVRLADARKRLARAEDELAETKRASRAARAWLDAHGDEQPPALNKACVELLEQTFDGYFGAGTSDEERAARMLGLDSGARVPGHGAPAGTGVNATLRALGKHAEKAVHARLEELRGMCEARKSECETAMASYIEQFMPNDDRVSADVENFQVFEHDLRELNASTIRASADEEYFHSLEKIHQDLMQLNTALDADRSKIIEQIGKINRLLERYPFGARRGRLSIVPQVSKSDPQFLAALRARLADLNAYQQQGRKDIERCKQLFAACAPFVELVKEGFDEFAANKRGNANLDPRRRSRFFGEVTDPDGTVERINSTGGGSGGYLQELTSFAYGAALMYLLANDNATEPSYATVFLDEALIKADGQYTRRALSVLPGLGFQVIVSAPEAKTGEIMASASKVVVARKDPENGLTELREAVLGTGDDHAS

SEQ ID NO: 34028 - protein, 451 aa, Escherichia coli; identical to SEQ ID NO: 34021

SEQ ID NO: 34029 - protein, 249 aa, Escherichia coli; identical to SEQ ID NO: 31335

SEQ ID NO: 34030 - protein, 973 aa, Escherichia coli; identical to SEQ ID NO: 34023

SEQ ID NO: 34031 - protein, 382 aa, Escherichia coli; identical to SEQ ID NO: 33444

SEQ ID NO: 34032 - protein, 645 aa, Mumia flava
MRSPMCRRHAWMAKENTAGDIGARSSRKSSTSALTPGEPAFWMSWRYSSGARPANLGLNASVPVIGACGDARVTVSPNSLTNADSSRLAWTAWMPKTSRTRALSSSPSQRNKISISPRRCSAGVSGVRMNVILHDNLSCKIIPQNCTEALSEGTTLNPSSLSPAPGGGAANPPAFFDAERQRFFRPLNSSRRELVAACLRALYDRLHGPAADYAHHLTRDVLRELLLPVVRQYQTTLADDGSDDEFTAADASDPQVLVAMVIRALVADGWLEQFADRTGLVAAFRFSRPGKLFSEALWALDRPSRSRQRNMRGCRNALEAALSERGDAHDLVDAYEYAEKVIEDLADGIDYFQELVRHLMQAASAHTQWNEFVDFLDRFQRDYSKQLTADNATLNRQAIRQKLEKLRAVPETKFNRMDAQLRDIAHWMAKEHTGSSLYDWLLGRIEDIVDAACESKQPGFLKAMETYLKRVNGLALQSMMLRSGQTRHAYLAAVQKVAESPKWEQDRLLKLVGQFLAPAEVRVLDPASFKLKTATQRRKAVTVSIRPRPTREERLAAAMARAEAEVFSIPNEDVAQGLRADLRLFQHPIRVSAMPTASARDVIRAMQAVEAARSAVGGDFIVKKLPTRLENEFYGANDYEIDLKK

SEQ ID NO: 34033 - protein, 224 aa, Mumia flava
MSLSNLIDEQLAIANVKRERFREILVRLMAYGVIVRDEDKTEQLLYDDARRVESLLDEYLDFAGFRLYHDRDNQFYRLYAAGAVVDGLPTDVYEPTPSLRARVSPDFVALALTLRFLYQNKLNTGDIQPQGGEALVSFEEIAATMQTQLKRALPSSMGDKMALLADLRRHRLLRYAPEFSILDEDALLAIRPTILGVVSNEALTAALDADGVFEQQTTVEEKDA

SEQ ID NO: 34034 - protein, 1210 aa, Mumia flava
MKLDRIVLVNWGQLRPGDYDLGNMTLLTGPTGAGKSTMLDGLQTIMTAAYQGIVAYNPGQEEVQQGQRSGKSKRTLESFVVGAEYSRFSRPHGAQGYMAAVFRPGPDEDSAKPFTALVAASAQVDGVGERRVPKLERLELVIVDDAALTVDDFLKDAEQSEWVAVEEIVKRLKARYSKVVTYDGHKRDYLCALYGRFRGRISITWDEAQNAAKAWCQSIAYKKIGSVHDLVRDDILEYDGKQLHESITRISDLMRQVTNLKQEGQRLEATVGRLRGLKAAIAQTASAFEEQVQYDLLLAKMLVAADDERIAQEQKRINDDSALVGRCEQKVKTEERLKAGVDRSRIDIAAKLSGIAANAEKERLDQQLELANSAARRKLAELNTGLQAAAQIVNAATGLLRKPIPEQFPKLKASVDAVGRVTASTDVARLDGLLGAVLDASSDTQLNVEKLFRLTPAFDGVEEGLGALHSYLVGTEDSVLMAVASETSELTQRVEATRKARKELADRKELLASGASDYNRDTRMALPRIRECLPEAGVQVLCDLVEPVSDEWQEAIEGYLDNARFNLIVKPEWEARTIDLLHSWGSRCKVIQGKRCLQRADAGRVPSDSIIHELRTDHPIARAYLIEQYGAVVKVRDSEQLRDTARGLTKEGKGSGSRTMFVGERRDLVLGRKAREQALRATIEQLDEADREIREFEQLQDTLSNVKRLLGNLREPVFDAVPLGQAAGEIDSTRRTLAQLDLTEVEQLRAEREKLELLIAGHDAEITAANREITLARQRITDSQGAIERINGGRDARFREREDQIRRLGQMCETNPEKTYTVIAEEVEGLLKSRRFDVHSVQVRLNTLRTQPDKLLGDVREMLAEYNANARQEERFQSALPHLHDTTTFDPYYGPLVALGRAVGALRSELEGIGLYNNRAKVEEAERSFHDVFTKQFCVEIKSKVDDGVRLLRQLNMELERLKFGTDRFSIDWSKWEPEFQEYYSFFSAVTELADSVETVDLFGETELTPKHVEVRDRLVKLLLDSDQERAGRELLRIADYRNYRRYEIWNDSDSGGRIALSTWGTGSGGQLETPAYIVRAAVVTNRLKLFDKGPSLKMLVSDESFSTMDEPRARAVLQYLRDSLDIQVVSAMPTRGAGGLRPEFDREYSYSRVPVDANGELDFILEYDERIFKKDKMRELWEKQRAAARAQAELAFGAAEAAQQAEALK

SEQ ID NO: 34035 - protein, 230 aa, Mumia flava
MAEVVEQLNRLPGLAEKSMLLREVSSQLFWGMSKVLDKRQGLVAAILGMDDCPFPESPIQLHVFLPACGHRGVLFIENSVSFERAMRAPGGVFDELALVYASGFKGSAQRLRTMEGCSLFYAAGGGLERDLRAKFEGWLFGRREMPSYFWGDLDFAGMRILAAMRTTFTGLTAWVPGYEPMLAVLKAGGGHPPEAADKQGQKPIASTGCGYADEQLLPALQTYGRFVDQE

SEQ ID NO: 34036 - protein, 489 aa, Xanthomonas euvesicatoria; identical to SEQ ID NO: 30424

SEQ ID NO: 34037 - protein, 233 aa, Xanthomonas euvesicatoria; identical to SEQ ID NO: 30425

SEQ ID NO: 34038 - protein, 1351 aa, Xanthomonas euvesicatoria; identical to SEQ ID NO: 30426

SEQ ID NO: 34039 - protein, 489 aa, Xanthomonas euvesicatoria; identical to SEQ ID NO: 30424

SEQ ID NO: 34040 - protein, 233 aa, Xanthomonas euvesicatoria; identical to SEQ ID NO: 30425

SEQ ID NO: 34041 - protein, 1351 aa, Xanthomonas euvesicatoria; identical to SEQ ID NO: 30426

SEQ ID NO: 34042 - protein, 489 aa, Xanthomonas campestris pv. cannabis
MKHQARIAGYRQLREQPVWKLLAADHAPELIGLLQTVLMDGERRLPSAVLHERLQRQLDALRADELSRELPRTAQAYLAHWLAQGWLERRLPEGAAEEEYELSRAATQAIRFIVGLRESSSSATESRLSLVIQQLVQLAGQTEADPELRLAALRDERARIDAEIERVASGRVAALDGKRALERARDLIHLSDELAEDFHRVRDDFEQLNRQFRERIIDDEGARGDVLEQLFNGVDVIADSEAGRTFEAFWSLLNDTQQSSQLDQALDALLARGFARKLDRRERAFLRGLTGTLLERGGEVHTVMQHFARSLRGFVQSRGYLEQRRLNQLLKQAQGEALQLRDSLHATTATGYTQALSSSRLRSLSQWRLHDPRLTQVDGRVQAADAAEISLDSVGDLVAQSEIDVRSLRNDLHELLGQRPRLTIGDALQQRPAVQGLGSVIGYLSLGTRHGLVIEGQMETVQWEGSDGATRRARIPLVWFTREKRNELV

SEQ ID NO: 34043 - protein, 233 aa, Xanthomonas campestris pv. cannabis
MNWSEDTRLDADENTGAPANDGRPLMTDASSAQPRGELFLGDTGTLPFDARRALCQLLAGPSIDAQRHGALWPALLRNEAAIRQLLCELFLELVLDREGGVAFTRQADTAELESPTLLRSAPLTFIESVLLLFLRQQLAEADTRGARAVVDEAQLVEALSVYEKNVSTDRAGFARRVMTAIGKMRDNQLLSRLRGSEERYEVSPVLKLLFSAEDVQALVVAYRELREGEVALE

SEQ ID NO: 34044 - protein, 1340 aa, Xanthomonas campestris pv. cannabis
MNSQSNLSPAQPGASLFADSLAEQRAQQFRMRRLQVHNWGTFNGLTEVPIAEKGFLFVGRSGSGKSTLLDAMSALLTPPSIVDFNAAAREAERSGRDRSLVSYVRGAWADQQDSASGEIATQYLRKGATWTALVLEYCNAHGEAVSLIRLFWIAGSGNAAADVRRHYMVAPRSFDVATELDGFDLDLRRLKARLGEEVAHFDGFAGYAERFRHALGINNEMALRLLHKTQSAKNLGDLNVFLRGFMLDEPRTFEAADRLVEDFAELDGAHHAVVTARRQVETLTPAREHHAALMALRHSVGELRELQLGVDSYREQQRLALLDERLQELDNQDRGLAGEEGQRRESLDNHEQKLAGLEREQRAAGGEQIEELERERARVERERDERLRRRAQIEQACRQLGTALAAGASGFAAQVAHAQTVLDNGKHDASALDDAIAERMGARRDDERRFAEIRAELDALKRAPSSMPAPMQALRARLCEDTGIAEAALPFVGELVQVRDDQMAWRGAIERVLHGFAQSLLVDERHYAQVSEWVNRTHIGTRLVYFRVRRNDELHSRRVDPDALPGKLQLREHAFTEWLRNELTRRFDYACVDNATALRNADRAITREGQVKHPGDRYEKDDRHAVNDRKRWLLGHDNRDKLKVFEREAQALAQRIASCDADVAALRKQREQDQERQLAAHTLVERDWDEIDVGPKLQRLSDIDEQLVQLREGNSGLRALGQAIDTARTLRDQAKRTYDDVRLERAQLARERMRLEQQHAACAGRAGTATLTPTQLQGLRERLAALTPLSLDNLEAHFRVVERGLAEQLADSQGRDSRLSAQLLECFRKYCQQWPEDSGDFTVSLASADDFLARLDRLESDGLPRHEHRFFDLLQTQSKNNLLALQRHTAEAHKGIKQRMDEVNASLEQVPFNRDTILTIEVGDRRLAEVQEFQQQLRAVLSHQQTEDRALAEAQFSTLRALVARLGAQEPEARRWREQVLDVRLHVEFIGVELDAQTRAQVEIYRSGAGKSGGQRQKLATTCLAAALRYQLGGEDGELPRYCAVVLDEAFDKADNEFTALAMNIFENFGFQMVVATPLKSVMTLEPFIGGACFVEISGRHNSGVLLIEYDEQAQRLKLPERSRGDEPAVAGTTDAAPSIEAVGESAGVQGPARADGMAIDGAPMHTASPAAAGTPPAAQKTQTGQRKPAVATTNTQSKNARTASSTRAAAQPQAKQTKKSPPRISADAGKPVSAKRTARAPAVSSGAAATSTVGKTARSSKTPAKATVATSASNATPRKVAAASAAVKTATAKPRATAASTGQPARGTGKTTSTRAVAKPSPAKTRGAKAGTAQARSKR

SEQ ID NO: 34045 - protein, 489 aa, Xanthomonas campestris pv. cannabis; identical to SEQ ID NO: 34042

SEQ ID NO: 34046 - protein, 233 aa, Xanthomonas campestris pv. cannabis; identical to SEQ ID NO: 34043

SEQ ID NO: 34047 - protein, 1114 aa, Xanthomonas campestris pv. cannabis
MNSQSNLSPAQPGASLFADSLAEQRAQQFRMRRLQVHNWGTFNGLTEVPIAEKGFLFVGRSGSGKSTLLDAMSALLTPPSIVDFNAAAREAERSGRDRSLVSYVRGAWADQQDSASGEIATQYLRKGATWTALVLEYCNAHGEAVSLIRLFWIAGSGNAAADVRRHYMVAPRSFDVATELDGFDLDLRRLKARLGEEVAHFDGFAGYAERFRHALGINNEMALRLLHKTQSAKNLGDLNVFLRGFMLDEPRTFEAADRLVEDFAELDGAHHAVVTARRQVETLTPAREHHAALMALRHSVGELRELQLGVDSYREQQRLALLDERLQELDNQDRGLAGEEGQRRESLDNHEQKLAGLEREQRAAGGEQIEELERERARVERERDERLRRRAQIEQACRQLGTALAAGASGFAAQVAHAQTVLDNGKHDASALDDAIAERMGARRDDERRFAEIRAELDALKRAPSSMPAPMQALRARLCEDTGIAEAALPFVGELVQVRDDQMAWRGAIERVLHGFAQSLLVDERHYAQVSEWVNRTHIGTRLVYFRVRRNDELHSRRVDPDALPGKLQLREHAFTEWLRNELTRRFDYACVDNATALRNADRAITREGQVKHPGDRYEKDDRHAVNDRKRWLLGHDNRDKLKVFEREAQALAQRIASCDADVAALRKQREQDQERQLAAHTLVERDWDEIDVGPKLQRLSDIDEQLVQLREGNSGLRALGQAIDTARTLRDQAKRTYDDVRLERAQLARERMRLEQQHAACAGRAGTATLTPTQLQGLRERLAALTPLSLDNLEAHFRVVERGLAEQLADSQGRDSRLSAQLLECFRKYCQQWPEDSGDFTVSLASADDFLARLDRLESDGLPRHEHRFFDLLQTQSKNNLLALQRHTAEAHKGIKQRMDEVNASLEQVPFNRDTILTIEVGDRRLAEVQEFQQQLRAVLSHQQTEDRALAEAQFSTLRALVARLGAQEPEARRWREQVLDVRLHVEFIGVELDAQTRAQVEIYRSGAGKSGGQRQKLATTCLAAALRYQLGGEDGELPRYCAVVLDEAFDKADNEFTALAMNIFENFGFQMVVATPLKSVMTLEPFIGGACFVEISGRHNSGVLLIEYDEQA

SEQ ID NO: 34048 - protein, 489 aa, Xanthomonas vesicatoria
MKHQARIAGYRQLRDQPAWKLLAADHAPELIGLLQTLLLDGERRLPSAVLHARLQRQLDALRGDELSRELPRTAQAYLAHWLAQGWLERRLPEGAAEEDYELSRAAIQAIRFIAGLRESGSSATESRLSLVIQQLVQLAGQTEADPATRLAALREERDRIDAEIERVSTGRVAALDGKRALERTRDVIHLADELAEDFHRVRDDFEQLNRQFRERIIDDEGARGDVLEQLFSGVDVIADSEAGRTFEAFWSLLNDTQQSSQLDQALDALLARGFARKLDRRERAFLRGLTGTLLERGGEVHTVMQHFARSLRGFVQSRGYLEQRRLNQLLKQAQGEALQLRDSLHATAATGYTQALSASRLRSLSQWRLHDPRLTQVDGRVYAADAAEISLDSVGDLVAQSEIDVRTLRNDLYVLLGQQPRLTIGDALQQRPAPQGLGSVIGYLSLGTRHGVVIDGHMETVQWEGGDGIVRRARIPLVWFTREKRNELV

SEQ ID NO: 34049 - protein, 234 aa, Xanthomonas vesicatoria
MNWSEQASRDADDDNDAARDAALALPASDAANAAPSGSLFLGDTGTLPFDARRALCQLLAGPSIDAQRHGGLWPALLRNEVAIRQVLCELFLELVLDREGGVAFTRQADTAELESPTLLRSAPLTFIESVLLLYLRQQLAEADTRGERAVVDEAQLVEALSVYEKNVSTDKAGFTRRVMTAIGKMRDNQLLSRLRGSEERYEVSPVLKLLFSAEDVQALVVAYRELREGEVALD

SEQ ID NO: 34050 - protein, 1337 aa, Xanthomonas vesicatoria
MNSQSNLSPASPGASLFAETLAEQRAQQFRMRRLQVHNWGTFNGLTEVPIAEKGFLFVGRSGSGKSTLLDAMSALLTPPSIVDFNAAAREAERSGRDRSLVSYVRGAWADQQDSASGEIATQYLRKGATWTALVLEYRNAQGEAVSLIRLFWIAGSGNAAADVRRHYMVAPRSFDVASELDGFDLDLRKLKARLGDEVAHFDGFAGYAERFRHALGIGNEMALRLLHKTQSAKNLGDLNAFLRGFMLDEPRTFEAADRLVEDFAELDGAHHAVVTARRQVETLTPAREHHAALMALRHSVGELRELQLGVDSYREQQRLALLDERLQELDNQDRGLAGEEGQRRESLDNHEQKLAGLEREQRAAGGEQIEELERERARVERERDERLRRRAQIEQACRQLGTALAAGASGFAAQIAHAQTVLDNGKHDASALDDAIAERMGARRDDERRFAEIRVELDALKRAPSSMPAPMQALRARLCEDTGIAEAALPFVGELVQVREDQMAWRGAIERVLHGFAQSLLVDERHYAQVSEWVNRTHIGTRLVYFRVRRNDELHSRRVDPDALPGKLQLREHAFTEWLRNELTRRFDYACVQNATALRNADRAITREGQVKHPGDRYEKDDRHAVNDRKRWLLGHDNRDKLKVFEREAQALAQRIASCDADVAALRKQREQDQERQLAAHTLVERDWDEIDIGPKLQRLTDIDEQLVQLREGNSGLRALGQAIDTARTLRDQAKRTYDDVRLERAQLARERVRLEQQHTACAGRAGTATLTPTQLQGLRERLAALTPLSLDNLEAHFRVVERGLAEQLAESQGRDSRLSAQLLECFRRYCQQWPEDSGDFTVSLSSADDFLARLDRLESDGLPRHEHRFFDLLQTQSKNNLLALQRHTAEAHKGIKQRMDEVNASLEQVPFNRDTILTIEVSDRRLAEVQEFQQQLRAVLSHQQTEDRALAEAQFATLRTLVARLGAQEPDARRWREQVLDVRLHVEFIGVELDAQSRAQVEIYRSGAGKSGGQRQKLATTCLAAALRYQLGGEDGELPRYCAVVLDEAFDKADNEFTALAMNIFENFGFQMVVATPLKSVMTLEPFIGGACFVEISGRHNSGVLLIEYDEQAQRLKLPERSRGDEPAVAEAADAAPSIEAAGKPEEVQGAATAGGMTADAVSTDPTSPAVDETSPAAQKTQPSKRRPAVATANEQNTNAKPAFSTRAAAQAQAKQSKKSPSRAPAVTGKPASDKRAAGAQQASVASSGIATKSNAGKTTRSVKTPGKPVAATGASNATSKKAAATSTAKPRATAASIGQPGRGAGKTTSAHAAVKPSLAKKRGAKAGAAQSRGKR

SEQ ID NO: 34051 - protein, 453 aa, Xanthomonas vesicatoria
LLLDGERRLPSAVLHARLQRQLDALRGDELSRELPRTAQAYLAHWLAQGWLERRLPEGAAEEDYELSRAAIQAIRFIAGLRESGSSATESRLSLVIQQLVQLAGQTEADPATRLAALREERDRIDAEIERVSTGRVAALDGKRALERTRDVIHLADELAEDFHRVRDDFEQLNRQFRERIIDDEGARGDVLEQLFSGVDVIADSEAGRTFEAFWSLLNDTQQSSQLDQALDALLARGFARKLDRRERAFLRGLTGTLLERGGEVHTVMQHFARSLRGFVQSRGYLEQRRLNQLLKQAQGEALQLRDSLHATAATGYTQALSASRLRSLSQWRLHDPRLTQVDGRVYAADAAEISLDSVGDLVAQSEIDVRTLRNDLYVLLGQQPRLTIGDALQQRPAPQGLGSVIGYLSLGTRHGVVIDGHMETVQWEGGDGIVRRARIPLVWFTREKRNELV

SEQ ID NO: 34052 - protein, 234 aa, Xanthomonas vesicatoria; identical to SEQ ID NO: 34049

SEQ ID NO: 34053 - protein, 1337 aa, Xanthomonas vesicatoria; identical to SEQ ID NO: 34050

SEQ ID NO: 34054 - protein, 488 aa, Acinetobacter baumannii
MNIQGIQATYRRLYHESSVWKLLRAENAPLILAFIADLFAEKAEVLYGHARSLLDEFIKYSREQGLWQTENNAAYYLNSWIKAGWLREMDDLLSKTDTSETVLRFCRNLDERHSSTTASHLRIVQDAVRDFVVAISDNIDDRVALLEQKKAQIQQEIDDLHAGVVMQLNETEQRERIREIYQLASILTGDFRRVEDEIRQLDKELRVEMIGGNAARGEVLLALMQKEQLLAKSDAGSAFDGFCQLLQDQDRSTEFREQLRSILNHPVAQQLSEAQKKYLGQLMRELARESSRVFQVRCRTEEGLRAYIESGAALENRMIDCLLSQLEKQAVNLTLEQQFDLKTETQMYLAVGSVQVGSPENFALKSPNEHMDTRGVQQQQNRKEPSAQMLQYLDSVQVRMIAEKTHNTLLKKGVMSIANLTQEHPLQAGLEELVAYLRIAKAIKAPQLTEKNEQIQFRDQHGVNLQASIPTYYLSAELFPENLDELTL

SEQ ID NO: 34055 - protein, 261 aa, Acinetobacter baumannii
MQPQKSSFFDRVRRPSSDENHEIQSQCIAEVEDEFTRVEVDQELENDPQASDELSSMPHEARRVLVYLIRHGTILAAENLKLFDVLCRYETAIRQHLAEVYIQLILDARQGVAYIINVESIGNENDNSPLSDDFPTLIRKRTLTLYDTLVLLILRKYYQERETAGEQKIIIDLERIQGNLIPFIPITNHESKDIKKLSGTLDKFSEKKILSVIRGEEGRYEITPIIRYVVNAEFLQSLLSEYKQLADKTALHQSEQNKGKV

SEQ ID NO: 34056 - protein, 400 aa, Acinetobacter baumannii
MARTAVWGLLPDDAIAQLRKKEWDHQRHLKQRLRHQRPFPIVLSLKAPTGQQAMSNLDHFHTFFKAWKNFVYPDLVEWQQRQFKQLATQQVPVKLIIPTLDVMVDVLGQQQRFKKISDKISYLLLQPFVQPQVEYALFCTLIEYLELLEKYREADWQLLIQLISQLKANMGAGHYLRALPLQHVDTKFLERNVLLVEAICDVLYHGEVQAAGGLLNWLNCLDHPKGWLMIKPLCTLVQQSLGGLPVFQLSTDVLIQFELPAQHIIVIENIQSGLALPVMENTIVVCGGGKNIKWLDAPWLKNKQVYYWGDIDSEGLNILSMVRHKVPDVIPLMMNEATLLQFQDKMVDEPDSVFLEPKYLTDEELILFHQLRSKSYINKRLEQERITNDWIRENLKRQIK

SEQ ID NO: 34057 - protein, 481 aa, Mycobacterium setense
MDQLYQLNREVADSRSARLLATNNLATYLTLMERHLDRGAKLTEIDLVVRLERDLADLGSETDQSGLSLIKYWAGQGWLHRVTEQSGDTERNVCHLTYEARAVLDFARRMRREDTLATGGSITGIAAGLRRVAGQVSNDPDRIRADIEAEIARLRDELDALEQGQRPEPDLVDIEDEARAIALQMEQIISDIGQYGSMLNRITTRLLDASADTDLGYRERQRQLFDDYESLFASRESASYTAFTRMIQDPEQRAALVADIEEVTRELPHLDPGLREVMTGFFSLVSAQTAEVGRTRQRCARRIKRFVASGTLEHSRGVTRQLNDALASAHELLSVSLADSRIGIEVPLVRTDFNSIGAVAFKIRDAIPPSQAEPSEGEVNLSAFSALASQVDAAELAELVNDAIAAGPLSLPDAIGMLDSAYLGHVIVLWSWALKQGTEGGADAGSAARVRFRSLEGTDREIEIPRLVFTEPVPTVSESLL

SEQ ID NO: 34058 - protein, 243 aa, Mycobacterium setense
MQASDVAIDFDALPSIDAVERSTDQRRAPRFDGDVSELPDRACWALQHLLSRRYVSKDNHSELWSWVTRYRSELTVRLSELDMRLCISDDHDIAYVEQADYESQWRRRLLRRETLNTYDSILALHLAKLMRAAARDENVLISRDEIHELFAGVNNDTDRDIASFDKRIDNAIERLTDIDMLARNREDEDSFTISPVVNAIMTASMITELQQQFEQLKRTANGTGNDADETDDARLDDEVDAHG

SEQ ID NO: 34059 - protein, 1120 aa, Mycobacterium setense
MADPTNQFSLSRLQVINWGVFDGYHSIPFSRHGTLITGSSGSGKSSLLDAISLAFLPSHRRNFNASGDTTAAGSGTGKRTVDKYVRGAWGERREGTSRQIMYLRGTGPAWSAVAVTYTDRTGRSVTGLVLKWLAAEKTSDPGSRYYLIDDDRDIFGPCNRWAANGYDAAVFRDDGWTGGRSESQYLAQLYSSIGIRASEAAQQLLGKAKSLKSVGGLEQFVREFMLDEPASLSGVEEALEQINPLVEARGLLDVARRKRNTLGNIAAVQARYADEAAKFGVIDTIDNAMIRDYVDHLRLAQAGPEIDNLDDQITQLGAQRDEFGSQQRQLKNEHNSLMAQINTVTVDLVPLQQRLTEAERISEEVSRRRTTYEDKVTALGLTPPDNGEEFWSLRETLMDEADRLHRELFTGNQPYVEASAKEVRAREARESVEAELERVQRLGSPLPRTEYEMRARIARALDISERDLVYVAELMELKPEESRWRLAVEKVLRGAGLRLLVPDAHMERALRFVNENDMRGRIQLQHVQHGTQLRTPPAGTLATKLQLADPTHDSAVEALNVIAAVGDYVCVDGPEEFTEQSRAVTDQGLRKDSGRLSIKDDRSRLRPSDYIFLGGTAAKIEALQDDLTAAQDVYQVARTARERLDEHRGQLQSRERACRALCDQFMQWSDIDTDSVDEMLERLQDEHDLLVSDNPDAERLQQRADECWERVEKVIQQIGSLNERETTLDRRRTALLELSELLTERLGSSEFPSHARDTIDGYAADIALTLDLLDSEPYRAELTRVISRERDRLRADRNRSHDELAGIMAAYDSSFPDAIPNDSDVFDERVHDYVALCRRIDERELPDAYERMQRLITEQAPGAILNLHMIADNEARRITEQIARVNTGLGAVEFNRGTRLTLHAGTRHLAAVDELNEKAQRISARVSLVSFGDETAMFEQYTDILQLRKLLAGNTPEDRQWTRDALDVRNRFVLYCEERDAETGEVIRTYSNSGDNSGGEQEKLMAFCLAGALSFNLASPDSNDTRPLFAQLMLDEAFSKSDPQFAQQALSAFRKFGFQLVIVSTVQNSTTIQPYIDNVVMVSKSDASAPNARPVASVTSASISEFADLRRTSGDAVPSV

SEQ ID NO: 34060 - protein, 481 aa, Mycobacterium setense
MDQLYQLNREVADSRSARLLATNNLATYLTLMERHLDRGAKLTEIDLVVRLERDLADLGSETDQSGLSLIKYWAGQGWLHRVTEQSGDTERNVCHLTYEARAVLDFARRMRREDTLATGGSITGIAAGLRRVAGQVSNDPDRIRADIEAEIARLRDELDALEQGQRPEPDLVDIEDEARAIALQMEQIISDIGQYGSMLNRITTRLLDASADTDLGYRERQRQLFDDYESLFASRESASYTAFTRMIQDPEQRAALVADIEEVTRELPHLDPGLREVMTGFFSLVSAQTAEVGRTRQRCARRIKRFVASGTLEHSRGVTRQLNDALASAHELLSVSLADSRIGIEVPLVRTDFNSIGAVAFKIRDAIPPSQAEPSEGEVNLSAFSALASQVDAAELAELVNDAIAAGPLSLPDAIGMLDSAYLGHVIVLWSWALKQGTEGGADAGSSARVRFRSLEGTDREIEIPRLVFTEPIPTVSESLL

SEQ ID NO: 34061 - protein, 243 aa, Mycobacterium setense
MQASDVAIDFDALPSIDAVERSTDQRRAPRFDGDVSELPDRACWALQHLLSRRYVSKDNHSELWSWVTRYRSELTVRLSELDMRLCISDDHDIAYVEQADYESQWRRRLLRRETLNTYDSILALHLAKLMRAAARDENVLISRDEIHELFAGVNNDTDRDTASFDKRIDNAIERLTDIDMLARNREDEDSFTISPVVNAIMTASMITELQQQFEQLKRTANGTGNDADETDDARLDDEVDAHG

SEQ ID NO: 34062 - protein, 1120 aa, Mycobacterium setense
MADPTNQFSLSRLQVINWGVFDGYHSIPFSRHGTLITGSSGSGKSSLLDAISLAFLPSHRRNFNASGDTTAAGSGTGKRTVDKYVRGAWGERREGTSRQIMYLRGTGPAWSAVAVTYTDRTGRSVTGLVLKWLAAEKTSDPGSRYYLIDDDRDIFGPCNRWAANGYDAAVFRDDGWTGGRSESQYLAQLYSSIGIRASEAAQQLLGKAKSLKSVGGLEQFVREFMLDEPASLSGVEEALEQINPLVEARGLLDVARRKRNTLGNIAAVQARYADEAAKFGVIDTIDNAMIRDYVDHLRLAQAGPEIDNLDDQITQLGAQRDEFGSQQRQLKNEHNSLMAQINTVTVDLVPLQQRLTEAERISEEVSRRRTTYEDKVTVLGLTPPDNGEEFWSLRETLMDEADRLHRELFTGNQPYVEASAKEVRAREARESVEAELERVQRLGSPLPRTEYEMRARIARALDISERDLVYVAELMELKPEESRWRLAVEKVLRGAGLRLLVPDAHMERALRFVNENDMRGRIQLQHVQHGTQLRTPPAGTLATKLQLADPTHDSAVEALNVIAAVGDYVCVDGPEEFTEQSRAVTDQGLRKDSGRLSIKDDRSRLRPSDYIFLGGTAAKIEALQDDLAAAQDVYQVARTARERLDEHRGQLQSRERACRALCDQFMQWSDIDTDSVDEMLERLQDEHDLLVSDNPDAERLQQRADECWERVEKVIQQIGSLNERETTLDRRRTALLELSELLTERLGSSEFPSHARDTIDGYAADIALTLELLDSEPYRAELTRVISRERDRLRADRNRSHDELAGIMAAYDSSFPDAIPNDSDVFDERVHDYVALCRRIDERELPDAYERMQRLITEQAPGAILNLHMIADNEARRITEQIARVNTGLGAVEFNRGTRLTLHAGTRHLAAVDELNEKAQRISARVSLVSFGDETAMFEQYTDILQLRKLLAGNTPEDRQWTRDALDVRNRFVLYCEERDAETGEVIRTYSNSGDNSGGEQEKLMAFCLAGALSFNLASPDSNDTRPLFAQLMLDEAFSKSDPQFAQQALSAFRKFGFQLVIVSTVQNSTTIQPYIDNVVMVSKSDASAPNARPVASVTSASISEFADLRRTSGDAVPSV

SEQ ID NO: 34063 - protein, 518 aa, Bradyrhizobium japonicum; identical to SEQ ID NO: 33912

SEQ ID NO: 34064 - protein, 212 aa, Bradyrhizobium japonicum; identical to SEQ ID NO: 31966

SEQ ID NO: 34065 - protein, 1144 aa, Bradyrhizobium japonicum; identical to SEQ ID NO: 31967

SEQ ID NO: 34066 - protein, 389 aa, Bradyrhizobium japonicum; identical to SEQ ID NO: 30454

SEQ ID NO: 34067 - protein, 489 aa, Xanthomonas axonopodis pv. phaseoli; identical to SEQ ID NO: 33242

SEQ ID NO: 34068 - protein, 233 aa, Xanthomonas axonopodis pv. phaseoli; identical to SEQ ID NO: 34012

SEQ ID NO: 34069 - protein, 1340 aa, Xanthomonas axonopodis pv. phaseoli
MNSQSNLSPAQPGASLFAETLAEQRAQQFRMRRLQVHNWGTFNGLTEVPIAQKGFLFVGRSGSGKSTLLDAMSALLTPPSIVDFNAAAREAERSGRDRSLVSYVRGAWADQQDSASGEIATQYLRKGATWTALVLEYANAHGQTVSLIRLFWIAGSGNAAADVRRHYMVAPRRFDVATELDGFDLDLRKLKARLGDEVAHFDGFAGYAERFRHALGIGNEMALRLLHKTQSAKNLGDLNAFLRGFMLDEPRTFEAADRLVEDFAELDGAHHAVVTARRQVETLTPAREHHAALMALRHSVGELRELQLGVDSYREQQRLALLEERLQELDNQDRGLAGEEGQRRESLDNHEQKLVGLEREQRAAGGEQVEELERERARVERERDERLRRRAQIEQACRQLGTALAAGASGFAAQIAHAQTVLDNGKHDASALDEAIAERMGARRDDERRFAEIRAELEALKRAPSSMPAPMQALRARLCEDTGIAEAALPFVGELVQVREDQTAWRGAIERVLHGFAQSLLVDERHYAQVSEWVNRTHIGTRLVYFRVRRNDELHSRRVDPGALPGKLQLREHAFTEWLRNELTRRFDYACVDNAAALRNADRAITREGQVKHPGDRYEKDDRHAVNDRKRWLLGHDNRDKLKVFEREAQTLAQRIASCDADVAALRKQREQDQERQLAAHTLVERDWDEIDVGPKLQRLSDIDEQLVQLREGNSGLRALGQAIDTARTLRDQAKRTYEDVRLERAQLARERVRLEQQQAACAGRAGSATLTPTQLQGLRERLAALTPLSLDNLEAHFRVVERGLAEQLTDSQGRDSRLSAQLLECFRKYCQQWPEDSGDFTVSLASADDFLARLDRLESDGLPRHEHRFFDLLQTQSKNNLLALQRHTAEAHKGIKQRMDEVNASLEQVPFNRDTVLTIEVGDRRLAEVQEFQQQLRAVLSHQQTEDRALAEAQFSTLRALVARLGAQEPEARRWREQVLDVRLHVEFIGVELDAQTRAQVEIYRSGAGKSGGQRQKLATTCLAAALRYQLGGEDGELPRYCAVVLDEAFDKADNEFTALAMNIFENFGFQMVVATPLKSVMTLEPFIGGACFVEISGRHNSGVLLIEYDEQAQRLKLPERSRGDEPAVADATDAAPSIEAAAESARVQGAASADGMATNGVPMHTASPATEETPPAAQETQTGQRKPAVATTSKQNKTAKTASSTRAAAQPQAKRPKKSPSRTPVLAGKPASNKRPAGVPAVSSGVASRSNVGKTTRSSKTPGKPIAATSASNATSRKVAAASAALKTAAAKPRATATSTGQPERGAGKTTSTRAVAKPSPATTRGAKAGAPRSRGKR

SEQ ID NO: 34070 - protein, 487 aa, Brevibacterium linens
MSALSSALAYRRLLESDATLRMLRADNLAVMAGTLDAHLGRPGTRMNTEDLHESIDADLEELRDHFDLSQRTAKAYCDDWRRAEILVRRPATAARGETYELSAAGFDAIRMLEQLRTPPQTATESRLVSLAQSVRQLAIDTDPDTSRRLDALRAQRDRIDAEIARVRRGDPRSVVLDRRRASERVNDILQQAQSLPADFARVRARFEELNQDLRVSILAAEEDRSQVLDDIFRGVDLIESSDEGQTFSAFSALVRDPEQTAAFDEDITAILDRDFSATLPLETRRSLRTLMRQMKDGSREVSDILTEFARGLRRYVHSHEFQRDRAMRNLLQEGLSAAVPASALVRPYDDVGVELELSSSTLGSLGEVVLHDPAEFDAGAELAEAEDAEIDFAELLAVARESEIDFSELSDNINHALQDAEAASVGEILDRFPATQGLASVVGLLSLANTHGEVDPDEREVLTWSGIDGTGRTATIRRHYFTEGITL

SEQ ID NO: 34071 - protein, 228 aa, Brevibacterium linens
MTSTEQHTNGSARDETRDDDRGMGHSSTGLWTDDTGTLGERTRRVLLELLKGPYVSGAQSPQLWSALIADERLVRSRLHDLFLDLVIDKIDEFAFTRKVVTDELDVPAAVRSERLTFLDTAMLIVLRQMLLAAPGENRVIIDREEVYERMAIYRTGDESSFLRHLNGAWGRMSNRLRVLHSVSEDRFEISPMVKFLIDEDRVRELIDVYERIAAGQSPRPDLTEEDDA

SEQ ID NO: 34072 - protein, 1122 aa, Brevibacterium linens
MTEALFPLDAAFVADQARARGLGRPDVGAQWRLSEIQIANWGTFDSDIHRIPVSHKGHLITGPSGSGKSSLLDGIAAVLTPDKWLRFNVAAQTAGNRLDQRSLISYVRGAWTRTADSEEDRVVSKFLRPRATWSGILLRYDNGSDRPLTLARLFFVKGSGTKMSDLSDICVLERAGLDLSQLQQYARSGLEARRLKADRPDALVTSNGSHARFYARMRKVFGMASESALQLLHKTQSAKSLDSLDRLFRDHMLETPVTFDLAETAIGQFGDLKDAHDHVVELRRQRDHLLKLREASAAFDSAHAEAAESLALGEALLPFQKRRELDLLRHELTAGTSRLVELEVAADRAKRNLDDAVDEFDLARRATLELGGSEAEHLQQRIATAEAELEAIITRWEALSRQLEQAGITTVPQTQKEFAELQATIAAAIDDDTEVTGPTHADHDRFSAARRRVRELEAEIDSLRRSGSTVPTNLLEIRRELADGTGLTEKALPFAAELIEVDPEEAAWTGAIERVLRPMALTVLVRSENIASVRAWVDSHRIRGRLVFEEVPAHVPGPRPAGSDSSLINKVHVAETGFGDWVRSTLSERFDFACVDAPEELDDHHRAVTVKGQIKTSRTRYEKDDRRRIDDRSQWVLGDRESKLEALVASLKEAQSELAEAESIVTTADAQTAQAHRRRGILSGLREQTWTDVDQTGAREKVDALEARLRELEAADGDLQQAIGAEREAKAAKDQAETERADADYALRRANEEITGLRDEITRLDDDITAGRIPEVEDRLGEELERRFAKVTGGGRRDGLAEAGQDISQTLQAEKDRAQAAASDAGQVVTRLAVEFKAAWPSVGAQLTAQVDDRQDYLAILDEIEAHGLPDHEVRFRDLLHQRSRNLIGELLNEILAAPRDIEDRVAPINSSLLRSQFDEDRYLRLKVKTRRSETVNTFIADLREIAGGVWENEDEETAERKYDTLAEIMRRFSSSEHVDRVWRQQCLDTRLHVSFLAEEIDDYGRAHATYDSGAAMSGGQQQKLVIFCLAAALRYQLADPDEAISRYGTIILDEAFDKADTRYTRMALDIFIEFGFHMVLATPQKLLQTIEPYVGAATSIENPSRQKTLTSTMVWEEVDSE

SEQ ID NO: 34073 - protein, 451 aa, Pectobacterium carotovorum subsp. brasiliense
MPLEEAIQSLTGILVEHVSQEQYGINQDNLSLQASRELREWIKRRLIVERDGRIFATDALEVAITFVESLDNRFMTSTASRLSIVQREIENLETQLNPNPANRVSTLRRRIAELERELQEAEAGHIEVLETHQAVEHIREVFNLASSLRADFRRVEDSWREADRALRQSIIGEQYHRGDIVDRLLNDQDALLNTPEGRVFDSFQQQLRHSAELTAMSERLRVILNHPSASDALNRLQRYDLRWLVKRLVHESQTVLQARARSERDVRGFMKTGLAAEHHRVGHLLNEFLNQALKLDWQRQMIRKQEVPLPAVGVVVTGIPAIERLRFKEVDDEAEQTLDLSNHAADLTQIGDDFWDAFNGLDRDALIQQTLLLLAKENRPVGLAELAVLLPPVHDLETFTVWIGMAREAGIEVIDSQREFAELSDGEGRRWRFNLPTTGLESQALMDIDWE

SEQ ID NO: 34074 - protein, 249 aa, Pectobacterium carotovorum subsp. brasiliense
MASFFDKLINRSVTANAGGEPEPLDEEVADSSVEETATSSEMRTLKKIREATQELLKYGLLEEVSKPNLYRVLLTHPEEVTRILEPLDLDIGIDEIRGLLYVKVRLDETPEQDEWSHPLVRRQRLNLEQSLLVAILRQHFVAWEQESGTGAGQAQIAIDDLLPQLQIYLGDPGSESKERTRLLTLLDQLKGHGLVTSPDAHERIVIRPIIAHLADPINLQALLAWLREQIARQTSQDNASEKDSSEEDV

SEQ ID NO: 34075 - protein, 973 aa, Pectobacterium carotovorum subsp. brasiliense
MGALLWFDSTSSSVTDMKRLWLFSENPGQTLEHWLNVYHDGGTRLLRQMEKETTGLWTYTNKKQYLARLRDFFEVGENAFTLLNRAAGLKQLNSIDEIFRELVLDDHSAFDRATEVANSFDDLTEIHQELETARKQQQSLQPVALSWDKYQKHERQLADRKALESLLPIWFAQQASQLWWEKINRLDAELGEAEASEARLQSQLELQKKVVADCMQRYYQAGGANIDDLNDRIKDWQKRLGSLETQANQYQQLTRNLGLPSDLSQLQLEANQHEVERRLEQLAGDIKLKEEELYKKSALNHNITVELRERETERAEIARRPGSNLPANYQTFRSDLAKALNVDESELPYVAELIQVEPEEAQWRGAIERAVGSNRLRILVSPESAPEALRWVNQRNNRLHVRLLEVKLPHFPVRFFDDGFTRKLLWKEHPWREAVKALLAESDRHCVDSPEQLRDTPHAMTVQGLMSGKQRFYDKQDQRRLDEDWLTGFDNRDRLNFLAKEITALQEQVKTASEAFEFAKGEVGLLQTQAISFQKIQQIDFDNIDVHGAKNQLEALKERLENLNHPDSDASVAKAKLDEAQTVESEIDKQLRAANKVTNGLDTELISARAAERKAQQTAQQGMEDEERELCASHFPAVTLEQLPNIRDLERQHERAIQQEIEGVKGELHRLNIELTKRMSEAKRVDTGALAEAGADLDDVPVYLKRLQELTEEALPEKLSRFLDYLNRSSDDGVTQLLSHIDHEVLVIEERLNELNETMFRVDFQPGRYLRLDTKKVVHESLRTLEKAQRQLNTARFVDDNGESHYKALQVLVAQLRDACERHRTLGAKALLDPRFRLEFAVSVMDRQSGSVIESRTGSQGGSGGEKEIIASYVLTASLSYALCPAGSRYPLFGTIVLDEAFSRSSHAVAGRIIAALREFGLHAVFITPNKEMRLLRDHTRSAIVVHRRGQDSNMASLSWEELEQHYQRRENV

SEQ ID NO: 34076 - protein, 382 aa, Pectobacterium carotovorum subsp. brasiliense
MYSPDELRKKLARQWDNAKLRTERLLPPGSWPLCLSIGKPSARLFAEQTQCVLQHVQLWRQVVVGRVDWEDVSYRASDRAVSLPLRWILNSPSEWIKAAAEPAVSREFRLLEEIIEHVDPIFHPLLVSHRSFWRHKDPQDIISAARLACRLTPGCAKGLPLRLLSGQGVDTKFIENNISLLTRLLDVRFSGEASEQGLTTFLGAFDESSHWVLVVPLSPGLLPFKKCRVTTAELAETILTASRVLVIENEQCLHQLPVLSDTIAILGCGLDVQWLSSSALDEKHIAYWGDMDSWGLLMLARARRCRSTLDALLMNRELFEQYASHSAVTEPVKAQEAIPDGLLNEEADFYRYLTRLPRGRLEQEFLPAGIVEEALVMWRKGL

SEQ ID NO: 34077 - protein, 451 aa, Pectobacterium carotovorum subsp. carotovorum; identical to SEQ ID NO: 34073

SEQ ID NO: 34078 - protein, 249 aa, Pectobacterium carotovorum subsp. carotovorum; identical to SEQ ID NO: 34074

SEQ ID NO: 34079 - protein, 973 aa, Pectobacterium carotovorum subsp. carotovorum; identical to SEQ ID NO: 34075

SEQ ID NO: 34080 - protein, 382 aa, Pectobacterium carotovorum subsp. carotovorum; identical to SEQ ID NO: 34076

SEQ ID NO: 34081 - protein, 489 aa, Xanthomonas axonopodis pv. phaseoli; identical to SEQ ID NO: 33242

SEQ ID NO: 34082 - protein, 233 aa, Xanthomonas axonopodis pv. phaseoli; identical to SEQ ID NO: 34012

SEQ ID NO: 34083 - protein, 1340 aa, Xanthomonas axonopodis pv. phaseoli; identical to SEQ ID NO: 34013

SEQ ID NO: 34084 - protein, 510 aa, Xylella fastidiosa
MDHATLTTLRERHPAWRLLTSPHAPLVASFLHRVFVAPNARLLGETEITQALEDTLHVLRQQEGPEAYPKDALDYLNDWAAPDKGWLRKFYIPGTDEAQFDLTPATEKAILWLLSLTERAFVGTESRLLTLFALLEQMSTGTETDPIKRLDELRKKRNALDIEIAHVLAGDAPLLDDTAVKDRFQQFQQLARELLFDFRQVQDNFRQLDRKVREKIALWEGTKGALLDEIMGERDAISDSDQGRSFRAFWDFLLSSRRREELSERLDQVLALPAVAALHPEPRTRYVHYDWIDAGEQTQRTISQLSQQLRHFVESRAFLENRRILDLLHSIERNALGLRDTTPSDTVMYLDALGADIQLPLERPLFTPRAKPRLANLVLVAGTDDIDTTPLFNQIVMDKARLRLAIQRALRTQSRISLRTLLQTEPLQQGLAELVAYLELAHASSSSDPDGLRGIVDETVEEPIRWQANNTVGETVTREARLPRIIFARRALSDHQKSSQGDRDHEGHAV

SEQ ID NO: 34085 - protein, 234 aa, Xylella fastidiosa
MKDTLYENDVVETPRNALPTVPELSHLMVSLLKGVLYRDQEERLWSSLLRLQTQVREHTAVLWLDLVLDQAEGYAFLKSRPDPDAAEGSARPPRLIARHALPYPVSLMLALLRKRMAESDARGGDPRLVLTREEIAELMRVFLPDATNEARLIDQLNTTINKVVDLGFLRPLPSPSNSTPNHGNYEVSRILKAFVDAQWLAEFDARLETYRPVLSGDQDEPDTRPEAERESGDA

SEQ ID NO: 34086 - protein, 1144 aa, Xylella fastidiosa
MRETSTLGLNFVADDKRVGFRLQHLEVVNWGTFNTRVWCYTLGGRSGLLTGDIGSGKSTLIDAITTLLVPAQRVAYNKAAGADARERSLRSYVLGYYKSERNDATGTAKPVALRGTSDYSVILGVFHNVGYDKVITLAQVFWLKDSQSQPARLFVVAERALGIAADFNNLGGDIKTLRKKLRGAGCEVFDSFPPYGAWFRRRFGIQHEQALELFHQTVSMKSVGNLTDFVCSHMLEPCDMGSRIEDLICHFDDLDRAHQAVLTAKQQVKLLLPLVDDGQKHQTQLGNIQALEAGRDGLRPYFAQLKGELLQHRLDALAAEMAQLTVEIQHLEKQRKTADSAVTQVQQALRDNGGDRLEELAAEIEQLEQAKAQRQRKSDRYQTLLTKIDETAPADAIGFLTQQQRFAQRTEELNAAIATLHNDKSEKDRALYDARKEHTKLLAEINSLQQRQSNISAIQIRIRHDLCVALSIDAEALPFAGELIQVREDARDWEGAAERLLHGFGLTLLVPDAYYKAVATWVNHKQLDGRLVYFHMRPRNTTQEAALHAQSLVHKLIIKPESPHYTWLQQELQRRCNVVCCDTMEQFHREVRAITQAGQIKDPSGRHEKDDRHRIDDRSRYVLGWSNADKLHTLNAQRQHLEDSMGMLGQDLGTIQRECQKQQERLDALNKLGEYPDFADIDWMSLVRQIAALTEEHAQLQATSNILHTLQQQLIEAQTRVNVLQGKWRNALGEQGEVKSKQKTAQQMWNQARRIWDDAPLSQAQIAPLDGLRQQALGEHLLSVESCDNHEQQVRQWLQKRIDAENAHLRQLNDRITGAMHRFKDQFKAETVEMDADLAALPEYEQMLNGLQKDDLPRFEARFKALLNVNTINEIASFNAQLNRERETITERIKDINQSLHGIDYNQDRYINQLLHGIDSQKGRYITLLAQPSPDAEIRDFQQDLRACTEGTLTGSDDEQYSDAKFLQVKRIIDRFRGREGLSDADRRWTAKVTDVRNWFVFSASERWRADESEYEHYADSGGKSGGQKEKLAYTVLAASLAYQFGLKWDEVRSESFRFVIIDEAFGRGSDESAEYGLRLFEKLNLQLLIVTPLQKIHIIEPFVSSVGFVHNKGGCDSQLRCLSIEQYQTEKTNGSATGGAATP

SEQ ID NO: 34087 - protein, 405 aa, Xylella fastidiosa
MSWATPASLCAQVERLWKRGDLLRALVTDTHAMTWPHRLTLQTPKYADLSNRFQAVRDWVQTIADTPQIRIQWREWKHRVQGTQRFPEAVYLDTLQAALAFIGKTHQAQQFEAVWQQTAAAQPVLLAWLLRRPTQALEVADRWERLLAVIAWLQAHPRPGVYLRQVDVPGVDSKFIEAHKSVLAKLLDLALPPESIETAASGVSQFTRRFGFLDKPVLIRFRLLDATLPSLPGCTGLPDITLDTAHFAALTLPITRVFITENEINFLTFPKVAGAIVIFGAGYGWEPLARAAWLHACQLHYWGDMDTHGFTILNRLRGYFGHVTSVLMDQDTLLAHRLYWDEESEPTRQALEHLTTEEAAVYDDLRYDRHQPRLRLEQERIGFRWVCDRLACLLSTAHVAPPQDA

SEQ ID NO: 34088 - protein, 485 aa, Arthrobacter sp. MWB30
MSRSAMSSADAIGARLRDLEQLTKGPAWALTRSAPWVIAVLQASFTRTRPQLPLEEFHADVDAFLEQLRRQDPALGGQQNGKLFGDEWTRKQFLTRRNQSGRIVYEVTEPAARVLAFLDSLSSERSTLNGSRLGTLLGDVEKLANETNPDQSARLEALEEEIHERQQLVEDISSGEFDGLLDDEEAVEAAGNILDLAASLPADYKKMRDRIEELVGELRNQIIEESLSKGATMAQVLEADKRLRQSPEGRTFRSFTAFLEDPQQQLRFRSAIGEVLSRQFADDLSHEDRETLKNLVAELRYQHSQIQRIYGKLSESLNTYIQSDDVRQSVSLRKVLAEAEQAIRSLPYERDRPGLVPGPVLFNAGFESLAMVKLFDPDEFATPPRLADPIAFSDSDRVRSARTGKARPDVVRAAMAGSATLGEAWENLPAEERHINSVRTLLSMALQTGAAFDRAAWEHIDFEQIDGSIRTAYLPVVTLNEDSND

SEQ ID NO: 34089 - protein, 299 aa, Arthrobacter sp. MWB30
MTEDITTTDITEAEDVTVAEDVTETERDTEAEQDTVEVPDETAQHPDPFRITPRDTFVDGAALFPGDTGVLPMKVRHALVKLLKGPYVDGARDEKLWTTLLDNQLILRSRLSELFLTLQLDHDRKIAVLRPVDPEIIGASSRSSILRQQRALSRVETIVLLRLRLLLDRHVTAQTDPTITREEISDLVANYTPAGQQDALRDSDVVTRTITKLLARQLLLPTPLDDTYTISNALPLALPFENIGDIPAHIEALVAVAADESGTEPLLDMEADSSPTSEDGDDDAGTAADSDPAAEEAAK

SEQ ID NO: 34090 - protein, 1157 aa, Arthrobacter sp. MWB30
MTIASMLPLGELTNPGQMRLALVQVVNWGTFHGAHTMHVDRKGTLLTGNSGVGKSTLFDAMLRVFDARPRSNEAAAQRSGGAVEDKRTTFTYMRGKVGDKAVGDSSASAFQRPGATWSAVALTFDNAAGTKVTVSALFDLPKNGTESSVGRFYVIDSKPLDLEAIEGIAQKRFTKSALESIFPDGQVFDVHKAFAERFRRLLGINSDQALPLLRVIQAGKGLGGSVNTFFRDQVLDAPATLAAADDVVEEFSNLMSIRQRLEDVRLQRDQLAPVPGLNKEYAQALLDANRLRELAGEEFEAYKQQLAVTVHAKTLARFKELAQSKAQELAAERVVRDALAKELRDLELDYNNRGGNAISAIEQSLENAKVGLKLRQQVEDSARKALADAGLNLEWSAEGWDQAHEQAAARSIELKDDSEALKELRFEAFDGHATKKRELAAAQQELLSLRSRKSLLPPSSIENRAAIAAATGVPEERMPFGGELIDLAEGQDQWRPAAERALRNLATTLLVPGEHFAAVTRYLNDNTVRGALRAVDVSKPLAGGALAVEDVSDGDLLTKLSILTSGANADAGEWIRERIALDFAYACVEDPDELASMDKGLSLGGVVKRNRHTVEKDDRFTSRQDYVLGFDNASKLELVAARVGELENELAKAAELAQSREDSHQGMARQLEALRRVAEDERPWEQVSAAVAADELARIEQRLVDALAAQADLEPLRANIEAVREKHQSSTGVAAVLQSEYKALDHKMTTADGLLDAARLKLEQSPPSASTVTALEPYFDGVADVSELYELVNLANSVRNKLLDELHAAESRSQATAERLTRMFEAFVRDWGSAISADHGTSIGAAGDFEARYHAIVSDGLPAQEAEFRLFFNQRTHESFSTLLHLLDEERRSITSRILPLNGILSEVNFHEGSFLELDIKQTLPATAKVFKDAIQNALKTKHTRPSRGASAAGSAETDDDAELTARYKSLETLVKRLGSQTPEDRRWRAEVLDVRGHVFIQCKEHREVAKQGKAGASKTGKKKTEVFMHADTGSMSGGERQRFTAFIMAAALSYQLGIAEQGFTTYGTVMMDEAFVLASEEFAGAGIKALHEFGFQLLLAAPENVIDLSRHLGSVTEILRDKRTNRSGVLTAPVIAGPGEPGAWRSEANPVDIVLR

SEQ ID NO: 34091 - protein, 439 aa, Klebsiella variicola
MLIEHVSQEQYDINQDNPSLQASRELREWIKRRLIVERDGRIFATDALEVAITFVESLDNRFMTSTASRLSTVQREIENLETRLNPNPANRVATLRRRIAELERELQEAEAGHIEVLETHQAVEHIREVFNLASSLRADFRRVEDSWREADRALRQSIIGEQYHRGDIVERLLNDQDALLNTPEGRVFDSFQQQLRQSVELTAMSERLRVILSHPSASNALNRLQRHDLRWLVKRLVDESQTVLQARARSERDVRGFMKTGLAAEHHRVGHLLNEFLNLALKLDWQRQMIRKQEVPLPAVGVAVTGVPAIERLRFKEVDDEAEQTLDLSNHATDLTQIGDDFWDAFNGLDREALIQQTLQLLAKENRPVGLAELAALLPPAHDLETFAVWIGMAREAGIEVIDSQREFAELSDGEGRRWRFNLPTTGLESQALMDIDWE

SEQ ID NO: 34092 - protein, 222 aa, Klebsiella variicola
MTDELVEDSAASGETRTLKKIREAIQELLKYGLLEEASKPNLYRVVLTHPEEVTRILEPLDLDIGIDEIRGLLYVKVRLDETPEQDEWSHPLVRRQRLNLEQSLLVAILRQHFVAWEQESGTGASQAQIAIDDLLPQLQIYLGDPGSESKERTRLLTLVDQLKGHGLVTSPDAHERIVIRPIIAHLADPMNLQALLAWLWEQITQQTSPDDSSAKESSEEDV

SEQ ID NO: 34093 - protein, 974 aa, Klebsiella variicola
MGALLWFDSTSSSAADLKKLWMFSDNPTQTLDHWLNIWHDGGARSLKQMEKETTGIWIWLNNKKQYLARLRDFFEVGENAFTLLNRAAGLKQLNSIDEIFRELVLDDHSAFDRATEVANSFDGLTEIHQELETARKQQQSLQPVALSWDKYQKQEQQLADRKALESLLPIWFAQQASQLWREKVSHIEVELGESQTREEQIQSQLELQKKVVTDCLQRYLQVGGANIDELNERIKDWQKTLGSRETLAHQYQQLTRNLGLPPDLSQPQLEANQHEAEARCEQFADDIKLKQEEVYQKGVLSHRMTEELRERETERAEIARRPDSNLPAHYQAFRSELAEALNVDESELPFVAELIQVKPEEAQWRGAIERAVGSNRLRILVAPESAQEALRWVNQRNNRLHVRLLEVKLPHSPARFFDDGFTRKLLWKDHPWREAVKALLAENDRHCVDSPEQLRDTPHAMTVQGLMSGKQRFYDKQDQKRLDEDWLTGFDNRDRLNFLAKEIAALQEQVKTANAAFEFAKGEVGVLQNQAISFQKIQQIDYDSIDVPGAKSQLDALRERLENLIRPDSDASVAKAKLDEAQTVESELDKQLRAANKVTNGLDTELTSARAAERKAQQTAQKGMQDEERELCASHFPVVALVQLPDIRDLERQHERGIQQEIEGIKGELHRLNIELTKRMSEAKRVDTGALVEAGADLDDIPVYLQRLQELTEEALPEKLNRFLDYLNRSSDDGVTQLLSHIDHEVLVIEARLSELNETMFRVDFQPDRYLRLDTKKVVHESLRTLEKAQRQLNAARFVDDNGESHYKALQVLVAQLRDACERNRTLGAKALLDPRFRLEFAVSVMDRQSGNVIESRTGSQGGSGGEKEIIASYVLTASLSYALCPAGSRYPLFGTIVLDEAFSRSSHAVAGRIIAALREFGLHAVFITPNKEMRLLRDHTRSAIVVHRRGQDSNMASLSWEELEQHSRRRENA

SEQ ID NO: 34094 - protein, 382 aa, Klebsiella variicola; identical to SEQ ID NO: 31025

SEQ ID NO: 34095 - protein, 490 aa, Pseudomonas sp. PI1; identical to SEQ ID NO: 32137

SEQ ID NO: 34096 - protein, 224 aa, Pseudomonas sp. PI1; identical to SEQ ID NO: 32138

SEQ ID NO: 34097 - protein, 1125 aa, Pseudomonas sp. PI1
MNDFSPQELDFVADDSRVGFRLQRLEVLNWGTFDRRVWRYELDGRNGLLTGDIGSGKSTLVDAVTTLLVPAQRIAYNKAAGAETRERSLRSYVLGHYKSERNETTGSTRPVALRDTTSYSVILGVFRNEGYGQAVTLAQVFWFREPQGQPARLFVAVERELSITEHFSGFGSDINGLRKKLRAMGCELNDSFPPYGAWFRRRFGIEHEQALELFHQTVSMKSVGNLTDFVRSHMLEPFDVGRRIEALLGHFDDLDRAHQSVLKAKRQIELLAPLVEDGLRHGQITGEIQALRQGRDALRPYFAGLKAALLERRLELLTQDATRWDARIKQLGEQRDNARIEQGKLEGALRENGGDRLQQLAAAIQQQEAEKQQRQEKADAYTTLLTCIGEAAPGDEAAFMTQRSTIGEHAEALRTSIADHDTQINEDGYALRRGQEEHKALSDEIDSLARRKSNIDAAQVRIREALCTALSIAEEDLPFAGELIQVREDERDWEGAAERLLHGFGLSLLVPDVHYKDVADWVERQHLGTRLVYFHVRARKSTQAVSLPPQSLVRKLLIKPDTPHYDWLERELHHRFDLACCDNTEQFRRETRAITRAGQIKDPSGRHEKDDRRRIDDRSRYVLGWSNADKLRILRDEREGLEQQLGDIGLRIANTQRLRGQCQAQLEALAKLEVFTRYSEIDWQAPAREIARLTEERDRLKAASDTLRELESQLAQVVERLKEIEDDLGEAQGKRGEIRSKHETAQAQHAQALEIQTQAALDDMLLQSLEGWRAEVLGDHQLTVESCDNREQDVRNGLQARIDAEDKRLSRLTERIINAMRGFKEAFKAETAEIDISLAALPEFERLMKDLQHDDLPRFEARFKELLNVNTINEIANFNAQLARERETIKERVDVINQSLQVIDYNPGRYIRLLAQPSPDAEIRDFLQDLRACTEGALSGSEDEQYSETKFLQVKAIIDRFRGREGLAEIDRRWMQKVTDVRNGFLFSASERWREDDAEHEHYSDSGGKSGGQKEKLAYTVLAASLAYQFGLEWGAVRSRSFRFVVIDEAFGRGSDESAQYGLELFRQLNLQLLIITPLQKIHIIEPYVSSVGFVHNEGGRESRLRSLSIEEYRAQKAAARGGAV

SEQ ID NO: 34098 - protein, 401 aa, Pseudomonas sp. PI1; identical to SEQ ID NO: 32140

SEQ ID NO: 34099 - protein, 486 aa, Arthrobacter sp. W1
MQPSHRANSLWLQSQQFKSSAAYRLLTAQPWAVAFIRAEFTADRSRIALELFHASLDSFLKQARKSDDQIPASYSAQDFAETWVKQGILARPLIDGRFVYEPSAQTLRTLRFLADFSTDDSHLNSSRLNTLLSSLESLAHETDPDPEARIRALESQIALRQAQIDQLRSGDDPAVLSRTTALSATRSVLDLASSLPADFRRMRDGVQDMLHSLREGILDASTAKGVAVGQVLEADRQLRSTAEGETFSGFTEFLNSPEAQQRFRAALAEVLERDFVDDLETPERQILTNLLRELRRQAAEVHASYGKLSESLHAFVQSEDYKQAELLRQAVREAELAISKSTSLKPRSGLAPMELFAPQFVTLAGLGIYDPSEHVAPPPLAQAPEFSEADIVRNPSTPQADMQLLRESITRQLGQSGSGSVRLDDVFESLDAEQRHLNTIRALVEIGRTNGEPLNESDLLSIEFQQLDGSQRTAILPALSFTKEPL

SEQ ID NO: 34100 - protein, 228 aa, Arthrobacter sp. W1
MTTSDSYAAPITDPLFDGDTGKFTLPLRQLLVRLLRGPYLDGSTDPSAWQLLLDQQQGISDYFSEIFLALRLDMDRKIAMLAPVQIEQVHTSPIAPRRPLKRDETLLALRLRLLLEQHSGSGSDAVISRAGMHEILAEHRQASDRDDKRFAESCDAAITRLQSLRLLTGTELENEFRISPALAMALPITNIQDIPRYIAAIDANDPAFSLGADDTDDLAEQTPELVQE

SEQ ID NO: 34101 - protein, 1108 aa, Arthrobacter sp. W1
MSIEMTLPLGGALNPGQHRLSRVQIVNWGTFHGLHDLAVDRAGTLVTGHPGVGKSTLFDAMGHVFFATPRLNESANDAATREDRRTTFSYMRGRKFKTSAGTVYQRPGATWSAIVLSYDDGMGNTVTAGAVFDLPDAGLEGQVSKHYLLCEGKVDIAELENHGPRRFTVSSLSKALAPSEAFDTHKAFIERLRRRLGVESDKAFALLRTLQNGKGLAKGVNQFFRHEVLEEPATLKAAAAAVEDFAHLRGIYRQLDTARAQRDVLAQVPEQDQAYRDLAGQIASTRQLLESDVNTLEAQVRQLVLRNDLASHESELSKLKADEAELRQRKDQLDDQLASLEAAHDSAGSASLMLLEREADVARKALSEKESLIRTLQQQAADAGLSFEFSATGLDELRANAARTLQQLSSITHDAQTVEYEAMATLVNLRKRAETLAEQIRSYQRRASNIDDRSIAARRAIASACSLKEEQLPFAGELMDVSADAGSWRLAAEKSLHSLARTLLVPGELLAQVTHAIDRLDGLGRVRWSDISQQPRTAQAGPADLVTKLDFAPGDAGAWLKAKITADYPLACVENDAAMHVHPKAITPAGTIKSGTGTFERDTRTLPASEYLLGFTNESKIAELQSKAARLDEKIIKAQQAADERSAAKNKVVAKAQLLQALIADERTFGQLDASEALEALRRSEQKLGDALALSGDSSRVRQQIETAKAEAETLVGDLALVRSRIADLELQVQRAQQILSASEELDSGWEDSIPPALRQHQLLGPVLQQVAAGDCPASEDISEAFAEVKLQLGSQVNSLQSRRQEIGGALSETFRRFAREFGTSHAQTHGTTAEAAEHYAQLHDQIVADGLPHHETQFREYFANRSYERFSDLLQLLDEERRMISERIKPLNQILSEVAFEHGSVLRLEVANAIPVKAGTFRKELKDALQEAYTTKDESTLASSYQALEALVTALSDPAMTAWRSTVLDVRQHVMISCNEHKPNGEIETGLEPGTLSGGEGQRFTSFIMGAALAYQLGFASAGFTSYGTVMIDEAFIQANSEYAAAGIRALQEFGFHLVLAAPEDKIDLSRHLGSITDIIKHPGSNISGFVTTGRSPAMATTITLRS

SEQ ID NO: 34102 - protein, 485 aa, Novosphingobium sp. MBES04
MQTESNEHREKGTRDALFGHLPPSLFAVLASPARRDYARLILWVYRAFFGEHYTNPVRKDDLVAFIATQIDRLSDIADDFASDAANADASQNPLKVYVKLRQAGWLVEHSRGYVEMVDLDASVSMLLETLSAIEEGEAVHFGGTIAALESVIERLGDDPFDKASSLADAALRARRFQQHLSAIIGNLRAHEQRIVSDPQPTQILARFFDFVEDVLIADYRVIKTTNNPFRHRNRIIQMISDYEHDAEVVAAFARGYQAQGLATNPENATSRVRQHLDQVKRIFDAAEERLDDIDAFRSRLEQRIARTVSYMNEIDGSSLLRVTHLLRDASALPLEWDDAVEVPSELTDPVRHWGPDSLAAPTARRIVAPPSPVRTSTVDPAMIAYDHSQKAYLLRLAVTPQKIADYVERNLGQRDALDADAFGIATPEEALLLQGARQLDMYASKDLSRRFRVVHDPGRVVETDWSAFTAFRIERLSPEPASNEQ

SEQ ID NO: 34103 - protein, 261 aa, Novosphingobium sp. MBES04
MNGPTLYDLEELLEHPQNRDLSKEMMVRAADRLLYQQCLFRDDHNAAGTYDLLVRHRVYFAGLFDALGRDLVVRPDEMMVELRPQESLTRTILSLDETILLLALRATFENGVLTMSQEEFGHVETTSMEVMERYDQWVARTRPPWSRVRRILDSFRRRRFIDLGDEIPQENGIAITIRPSIRSVTGDAWQTRIEEWMEATRARLETEAAQDEPEPEVEAEDVAAPKNTEAQAPDTAPETDATTSEDAKSEDGDDTSQETTS

SEQ ID NO: 34104 - protein, 471 aa, Novosphingobium sp. MBES04
MITLSRINLINWYTFERLSVDLRGSTSLIGPNGAGKSSILDAIQVVLTGNNRNYFQLNASANVTAGQTRKVGENRSVFDYCLGRVAGETLRTNCLSYVSLVFERESDGYCWTVGIAMSAVEGEQTETVLGAFIAPGQSLRDADFIEESKDGASYVLPYADLVTRLRTHEGFENFGHRPTHFTRRVLSVLGGKGHHADPEKFLKALRNGLRIREMKSATEFVREFLLDPAGLDVDGLRKSVATWRGLLKKIDDLEVQKKQVTEAIAAYRELDEKVSEETRMRWIASKAERDRLEEHLRVVTGQHEAKLAEQDLVDRRVVRTRETVGRLREEIRDISRALDNDTREQAIREFRDLNLPIAERAFTEADGQYQAYFAAIGAVAGLADRIVRTYAGEEYRHASEALEALKARIADGAALSARDIDQIVVQLLPPLERYVTSAQDAREAHLASLPASGSSCARTASSSRAWSAAAR

SEQ ID NO: 34105 - protein, 483 aa, Microbacterium hominis
MSAVAQVLELAQLAERDAAWKLLRADSAPVVAGLLGTHLGGDERRVDAEELYERIDADLERLRAQGLILPLTAKGYCGEWRSAGFLVRRPSSEARGETLELSPDAIAGIRFLQGRAAPRSSVTESRLASLAAQVRRLAIDTDPDVSARIALLEEEIESIERRIESLRSGDESAIDEDRALERVRDVLAQAADVPDDFARVRAEFEMLNATLRAKIVESDVSQAAVVDEVFRGIDHISDSDAGRSFAAFSQLVLDPALGAAFEADIRRILDRGFARDLTSDERRALRAFLTTLKGRSAEIHDVITLFARALRRYVQSQDYQRDRVLRTLLREAQHAGMEAAAHTRPWHPTSLTLDLSAVALSSVGGIDLHDPAEFAATEEIVTQTTSLASLEELRAIARETEIDFDELTRNVNDLLAEVPSCTVADVLARYPATQGVGSVIGLLSIAAEQGTVDGEPEVLAWQGADGVPRAAIVAAHRFTGAVV

SEQ ID NO: 34106 - protein, 219 aa, Microbacterium hominis
MTESTTADVAPDEHTGLWRGDAGELPDRTRRVLLRLVRGPYISGAREAQLWAVLLTDEAVLRSRLADLFLELVIDRDNEFAFVRNAPSEDAPKAVRSEALTFLDTAMLLVLRQTLLSEEGRGRVIVGQAEVFEQLAVFRTPDRDEKDFASRVNSSWNKMQNKLRVLHAVGDDRAEISPVLRLLVDADQIRAITSEYHRIAREGGGESAAPSTDAEDDTE

SEQ ID NO: 34107 - protein, 373 aa, Microbacterium hominis
MTTLVTPFDLRARAKKLFDRDARTWAAEQQADVVLEVPLRPPTEREALDDLNRVRQWVDAWRDVSEGWGIELEWVVRHWSRIGSQEIPVRAVLRGSDSIARAAGETDGWRRLVARLDELRGLAGSDASSVLRASARAIADLDGADFDRLVHVLAWLRENPESGHLVRELPIRGIHTKWIESRRGLVEALHRAGTGAPGLGLRELSPLIRIRALDPSLSFQGLTDVSAPVDDLAASTIRPERVFVFENLATLLAMPDVPRAVAVHGGGHRVDLVARLPWAQTVTYWGDLDSHGFAILNRLRARGVDATSALMDMDTLFDHRDLWGIDPDPNVGVFELLTSDERATLRSLSAEGNVRLEQERVPWSYALARLGVC

SEQ ID NO: 34108 - protein, 485 aa, Pseudarthrobacter phenanthrenivorans
MPRSARSSADAISARLRDLELLTKGPAWALTRSAPWVIAVLQASFTRTRPQVPLEEFHADVDSFLEELRRQDPGLGGGANGKAFGDEWTRRQFLTRRNQSGRIVYEATEPAARVLAFLDSLSSERSTLNGSRLGTLLGDVEKLANETNPDQSARLEALEEEIEERQQLIQDISTGGFDGLLDDDEAVEAAGNILDLAASLPADYKKMRDRIEELVGELRNQIIEESLTKGATMAQVLEADKRLRQSPEGRTFRSFTAFLEDPQQQVRFRSAIGEVLSRQFADDLSPEDRETLKNLVAELRQQHSQIQRIYGKLSESLNTYVQSDDFRQSVRLRQVLREAEQAIRSLPYERERPALVPGPVLYNAGFESLSMVKLFDPDEFAAPPRLADPIAFTDSDRVRSPRTGKAKPAVVRAAMAGAASLAEAWQQLPAEEQHINSIRALLSEALHAGADFNRGAWDGLDFEQIDGSTRKAYLPVVTLAKDSDD

SEQ ID NO: 34109 - protein, 269 aa, Pseudarthrobacter phenanthrenivorans
MTEEITTAEEAAVGHADIPAASGTGYTGAVSPRDTFVDGAALFPGDTGVLPMKVRQALVKLLKGPYIDGGRDEKLWTVLLDNQVILRSRLSELFLALQLDHERKIAVLRPVDPDVIGGSTRSSILRQQRALSRVETIVLLRLRLLLDRHVTAQTDPTITREEISDLVAHYQPSGQQDALRDADVVTRAITKLLARQLLVPTGLDDVYTISNALPLALPFENIGDIPAHIEALVAARTDPTGTEALIDVDANPVVEATDDDDTDEAEAGK

SEQ ID NO: 34110 - protein, 1154 aa, Pseudarthrobacter phenanthrenivorans
MTIASMLPLGDVTNPGQMRLALVQVVNWGTFHGAHTMHVDRNGTLLTGNSGVGKSTLFDAMLRVFDARPRSNEAAAQRSGGAVEDKRTTFTYMRGKVGDKAVGEGSASAFQRPGATWSAVALTFDNAAGTRVTVSALFDLPKNGTESSVGRFYLIDNVPLDLEAVEGIADKRFTKGALETVFPHAQVFDVHKAFAERFRRLLGISSDQALPLLRVIQAGKGLGGSVNTFFRDQVLDAPATLAAADDVVEEFSNLMSIRQRLEDVRQQRDQLAPVPGLNREYAQSLLDANRLRELVGEEFEAYKQKLAVEVHRKTLLRFKELAQAKAKELGAERGIRDGLAKELRQLEADYNNQGGNAISAIEQSLENARVGLKLRRQVEEAAQQALSDAGLQLEWSAAGWEQAHEQAAARSAELKDDSQALQELRFEAFDAHATRKRELAAAEQELVSLKTRKSLLPPSSIENRAAIAAATGVPEDHMPFAGELMDLAEGEERWRPAAERALRSLATTLLVPGEHFAAVTRYLNGHNVRGALRAVDVSKPLAGGALAVEDVRGGDLLTKLDILASGAAAVAGEWVRERIALDFAYPCVEDPDELAALDKGLSLGGVVKRNRHTVEKDDRFTSRQDYVLGFDNAAKLELVAGQVEDLRQEVAKAAELAQSREDSHQGMSRQLDALRRIAEDDRPWEQVSAAVAAEELARIEQRLKDALAAQADLEPLRATIEEVRQKHQSSTESAAVLQSEYKALDRQLTGADAMLEAARRRLAQAPPSDATVTALEPHFAEFGDVTEMHELDNLANRVRTALLGELHAAESRGQATAERLTRIFEGFVREWGSAISADHGTSIGAASEFEARYHAIVNDGLPAQEAEFRQFFNQRTHESFSTLLHLLDEERRSITSRILPLNGILSQVNFHEGSYLELDIKQTLPPTAKQFKDAIQNALKARHTRPAKAEAGRADGSAPEKDDDGELTARYKSLETLVKRLGSQAPEDRRWRAEVLDVRGHLFIQCKEHREVAGPRGGRKTEVFMHADTGSMSGGERQRFTAFIMAAALSYQLGIAEQGFTTYGTVMMDEAFVLASEEFAGAGIKALHEFGFQLLLAAPENVIDLSRHLGSVTEILRDRRTNRSGVLTAPVIRPRPGEEGAWRSEANPVDIILR

SEQ ID NO: 34111 - protein, 487 aa, Flavihumibacter sp. ZG627
MTFEEILLQFKTAKPLLLLRAKNAAFIISFFQKVFSDANITTITNSELRSKLEGYMEELSYEERDEELEAGTLFDDFSVRAAQYIDKWSNSGFLRKYPNDEGEDLHELTPDTIKALKWLSDLERREHVGTNSRFKDIFFKLQKMIEQTNEDAEARIEELQKKKWAIEDEINLLKSGKKPSVFDETEIKEQFYDLNKMARELLADFSEVEQNFEQIRKDIQRKYTEKDVAKGTLLVFALDALDDIDQKPQGKSFKAFWEFLMDERRQQEFTQLTERLYQLLNEHNIDYNNDRFLKHLKRFLHVSGRKVIDSNRKLSEKISRVLSEKNLLERRRAMELIGDIRQMAYSLIETKIREDDFIVIEDEPYINLFDRWEPGEEKDDITGILFPDGSADEEDADFKILFDQFTIDRKKLLQRIDAMLEEKTQVTLKEIIDEYGIENGLSEIVGYFSIATSSTHHIIIEEAKEPILIGERKVNVPMVIYTRPTTK

SEQ ID NO: 34112 - protein, 198 aa, Flavihumibacter sp. ZG627
MEIKIARAPFAAVIIKLLQGPVYADDKNIWRELLGWQSAIQEYFGKIGMELIITEQDGFARVMQPETDENDDNPLPRLMKKQSLNYEATLLAVMLREGLEEFDVKSEGTKFYLTQKEIKERIELFYKEQTNKSKLWKDLSKPITSLINIGILKLNREDTVNKDNNQYEIKRIIKAFISNDKLEEIKNKLSNYVNTVQQ

SEQ ID NO: 34113 - protein, 1132 aa, Flavihumibacter sp. ZG627
MSTLFSNNNSDNGYRLRHLEVFNWGTFNGKVYKLQPDGRTSLLTGANGSGKTTLIDALLTILVPTNKRFYNQSSGAESKKERDENSYFWGYHGKTFSEAEEKSKTEQLRTKTDNPYSVLLACFQNSGTQHTITLVQVRWFSNGGLQKIFIVSPYPLNITDHFGKDHFDFKGDWKKKLVKQYAKTEVYNSFKEYAARFSELFGLRDKALSLFSQTVGIKVLGDLTNFIRQEMLEESDAEEQFKGLYNHYSDLLISHKAIQKDEKQLELLEPVIKNKHRLDELRQKKEQLDFIEEQMPFYLGKIEYGLLEKDVERLELDIEIANRDKELISASVDRLDKEKEQLVMQRAALNIDSQISLLNKDIDGETEKRNRKSAENTRYVKFCEQLKLDTEIDVAVFRNNYNKILELNTSVPAESEKFAEKKLRLKIEQESVGNKIEDLQQQITSLLARKNRIPDDLINARKRLVDILETTEDEIPFVGELIKVKATENLWEDSIEKLLHNFSMQLLVPEKFSKAANQFIYNNDMRTKLVYHKIDRRPSNSIVRWPTESDALVNKLELKESEYSKWLETTLLDRFNYYCTDDLEVFYGSPKAVTSNGLMRNVNRHEKDDRPGRWNKSKYRLGWDNKATIQYLQQQKYNEEKKHAALSGEIKELTPLIAALQLKVQTISNLIQIKNYDDINWAQHAEKINTLNKQVQDLKKSTDAYELIEKQIKEVGKQLQTENEKRDALITRISKLDDEYNSKNLRKLNLKFEELQEAGEQAIIEFLKEEEIASSGIQTLTQFDSMMMQSAIKLKARQKAAGNAVNKLELDTTTLIAAFINPGEKITNEFANWSGDVMNIKPDLTGLGDLEDLYKTIQTQRLVEHKRRFRDYMDKSMLDALTSYRAWLNNELSKIEDMIEELNVPLKKITFNRNPDTYLQLECRQLRGENEINIFRGQLNAAIPNTLDFAIQKDESYRQEVFNNIKELITELQKEETWRRKVTDVRNWLVFSAREYSAMENKAGQYHDNTASYSGGQKAQFTYAILGAAIAHQFGIFQQGKQHKSLRFITVDEAFSKLDPEKSRFLMEFCAQLNLQILVVTPLDKINIAEPYINAVHFVEIKNKKSSVLYNLTMEQYYEKKESFKQLAETRE

SEQ ID NO: 34114 - protein, 386 aa, Flavihumibacter sp. ZG627
MITPNELFEKSDKLFYKVITAVLKEQDIFPLVIPSNKKLSGTNFSELKAAIVPLYQQSKQVKGKGYTIEWKEKVVDGTKQKIPSKIFFEALDDYLFYAKRTKDYEAIINAFDNITASCNSLSAWAKENVIFLLNQADKIDDLIKVCIYFCNNKPPHNLYLRELPIEVHSKFVEDNTAALKKMLDVMLPPNWINKTETDFSSRYYIKKPNIYAQIRILDESLKPIIGYDELALTLEDSALLNWKPEKVFIVENRACFLSFPKVKNAVAIFGEGFKSRISKHIPWLAKAELFCWFDLDAAGFEMLNIIRQYYPEAKSFLMDEKTYNQFSQFSVTSPYRKLQLEKLDANELKLYEFLQANSTRLEQERITNSYISEQLKSLLVGVLKNG

SEQ ID NO: 34115 - protein, 489 aa, Xanthomonas sacchari
MKPHVRIAGYRQLREQPLWKLLAADHAPELIGLLQTLLGDAQRRLPADVLHERLQRQLDALKDDELSRELPRTAQAYVAHWLAQGWLERRLPEGDAQEEYELSRQAAQAIRFIAGVRDSASVATESRLSLVIQQLVQLAGQTETDPDARLAALRAERERLDAEIERVAAGKLAALDGKRALERTRDIIRLSDDLTEDFRRVRDDFERLNREFRERIIDDEGARGDVLEKLFAGIDVIGESEAGRSFQAFWSLLNDAEQSVQLDAALEALLARGFARRLDRHERAFLRGLTGTLLERGGQVHEVMQHFARSLRGFVQSRGYLEQRRLNQLLKQAQGEALQLRDQLHATAATGYVLPLSSARLRSPSQWRLHDPRSQLVDGRVQAAEAATISLDSVGDLVAQSEIDLRGLRNDLHDLLGRQPQLSIGEALRQRPAAQGLGSVIGYLALGTRHGVVVDGEWEAVQWEGGDGQVRRARIPLVWFTKEKRNELV

SEQ ID NO: 34116 - protein, 229 aa, Xanthomonas sacchari
MSWSDEFHGHDADAGDVAAAAATSAAADGGTALFAGDNGSLPLEARRALCQLLSGPSVDAYRHGPLWQALLRHEAAVRRVLSELFLELVLDRDGGVAFARQADTGELETPALLRTAPLTFIESVLLLFLRQQLAEADTRGERAVVDEAQLLEVLSVYEKNVSTDRAGFARRVLAAIAKMRDNHLLSKLRGSEDRYEVSPALKLLFSAEDVQALSAAYRGLRDGVAEAAP

SEQ ID NO: 34117 - protein, 1274 aa, Xanthomonas sacchari
MTSLSESSTVPVAPSLFAETLAEQRAQQYRMRRLQVHNWGTFNGLTDVPIAEKGFLFVGRSGSGKSTLLDAMSALLTPPSIVDFNAAAREAERSGRDRSLVSYVRGAWADQQDSASGEIATQYLRKGATWSALALEYRNAHGQAVSLVRLFWIAGSGTAAADVRKHYMVVPRGFDVAAELDGFDLDLRRLKLRLGEDVHHFDSFAGYAERFRHLLGIGNEMALRLLHKTQSAKNLGDLNAFLRSFMLDEPRTFEAADRLVEDFAELDGAHHAVVTARRQVETLTPARDYHAELLALRHSVGELRELQLGIDGYREQRRLALLDARLQELDTQDRGLAGEEGQRREALDNHEQTLAELETQQRAQGGEQVEALERERGRVERERDERMRRRSQVEQACRQLGMGLAGSASGFAEQVAQARALRDGVAGEASSLDEAIAERMAERREDERRFAVIRTEIEALLKAPSSIPAPMQALRARLCAETGLSEAALPFVGELVQVEADQAAWRGAIERVLHGFAQSLLVDERHYASVADWVNKTQLGTRLVYFRVRHNAPLQQREPDAKSLLRKLELRDHAYAPWLRQELARRFDYTCVDTVAQLRDAERAITREGQVKHPGDRYEKDDRHAVGDRKRWLLGYDNRDKLKVFEREGQTLAQRIAACDADVAALRKQREQDQGRQLAAHTLAEREWDEIDVAPKLQRLSDIAEQLLQLREGDTALRALGEQIATVRARRDQARRTYEDVRLERAQVSRERARLEAQRETCAARVATAVIGPAQVAGLDARLAALPPLSLDNLEAHLRSVERGLGEQLAQSQAQDARLSQQVLDCFRRYCQQWPEDSGDFTVSLASADDFLARLQRLESDGLPRHEGRFFDLLQTQSKNNLLALQRYTAEAHKAIKQRMDEVNASLEQVPFNRGTLLTIEVSDRRLLEVQEFQQQLRAVLGHQQTEDRALAEAQFAMLRGLVQRLGAQEPELRRWREQVLDVRQHVEFVGVELDADSRAQVEIYRSGAGKSGGQRQKLATTCLAAALRYQLGGEDGELPRYAAVVLDEAFDKADNEFTALAMNIFENFGFQMVVATPLKSVMTLEPFIGGACFVEISGRHNSGVLLIEYDEQAHRLKLPERSRNDAATPAVESGVAVDQAGADLPPPAADAAATIAEPGAATVADTVAAPARASAKARDGRGNRAKSTPRKASPMAPGKRGDTRAAPSSAKTTSAKAPRTSTAAAAAASAATRPAARSASAKPVKAGTGSKPAKPAKAAAVKTPPASGKRRGH

SEQ ID NO: 34118 - protein, 524 aa, Bifidobacterium animalis subsp. lactis KLDS2.0603; identical to SEQ ID NO: 30666

SEQ ID NO: 34119 - protein, 269 aa, Bifidobacterium animalis subsp. lactis KLDS2.0603; identical to SEQ ID NO: 30689

SEQ ID NO: 34120 - protein, 1165 aa, Bifidobacterium animalis subsp. lactis KLDS2.0603; identical to SEQ ID NO: 30668

SEQ ID NO: 34121 - protein, 406 aa, Bifidobacterium animalis subsp. lactis KLDS2.0603; identical to SEQ ID NO: 30669

SEQ ID NO: 34122 - protein, 489 aa, Xanthomonas citri subsp. citri A306; identical to SEQ ID NO: 30402

SEQ ID NO: 34123 - protein, 233 aa, Xanthomonas citri subsp. citri A306; identical to SEQ ID NO: 32320

SEQ ID NO: 34124 - protein, 1340 aa, Xanthomonas citri subsp. citri A306; identical to SEQ ID NO: 30404

SEQ ID NO: 34125 - protein, 524 aa, Bifidobacterium animalis; identical to SEQ ID NO: 30666

SEQ ID NO: 34126 - protein, 269 aa, Bifidobacterium animalis; identical to SEQ ID NO: 30689

SEQ ID NO: 34127 - protein, 1165 aa, Bifidobacterium animalis; identical to SEQ ID NO: 30668

SEQ ID NO: 34128 - protein, 406 aa, Bifidobacterium animalis; identical to SEQ ID NO: 30669

SEQ ID NO: 34129 - protein, 489 aa, Xanthomonas fuscans subsp. fuscans; identical to SEQ ID NO: 33811

SEQ ID NO: 34130 - protein, 233 aa, Xanthomonas fuscans subsp. fuscans; identical to SEQ ID NO: 33812

SEQ ID NO: 34131 - protein, 1340 aa, Xanthomonas fuscans subsp. fuscans; identical to SEQ ID NO: 33813

SEQ ID NO: 34132 - protein, 484 aa, Azotobacter chroococcum NCIMB 8003
MMDHASLEALRSHHPAWRLLASPQAPLVASFLHRVFIAPNVRVMAAADLAEALEDELYALRERLGEETFSRKPAIDFLNDWASPEKGWLRKFYRQGSDEPQFDLTPATEKAIAWLGQLSERSFVGTESRLLTLFGLLKQMSEGSEADPAKRLAELQKRRDELDAQIARVQAGEVVLLDDTALKDRFQQFLQLARELLTDFREVEHNFRRLDRRVRERIALWEGSKGALLEEIMGERDAIADSDQGRSFRAFWDFLMSSRRQEELTALLDQVLTLAPVAELKPEARLRRVHYDWLEAGEHTQRTVAQLSQQLRRFLDDQAWLENRRIMEILRGIEAGTLAVRDSPPAGEFMDIAEPAADIELPMERPLHTPALKPVIADIALQAGAEDIDAAALYAQVVVDKARLAGHIRKALQERAQVTLRELTEAQPLQQGLAELVTYLQLGSETFRTVVDEGTSERIAWEAPASDGVPVRKTAHLPRIIFVR

SEQ ID NO: 34133 - protein, 218 aa, Azotobacter chroococcum NCIMB 8003
MEEPQQPQGSAAPQVDLSVLAIALLKGVLYREGDERLWGALLDLQARVRDYVAVLGLELMLDEAEGYAFLKSRPEPEDTSATHHLPRLIARRPLSFPVSLLLALLRKKLAEFDAGGGDIRLVLSRDDIVELVRVFLPDSSNEARLIDQIETHINKVVDLGFLRRLKTAGGPASYEVRRILKAFVDAQWLADFDARLAVYRAQLRGGEAPQADRPGGAG

SEQ ID NO: 34134 - protein, 1120 aa, Azotobacter chroococcum NCIMB 8003
MNEPQTPSLDFAADDALSGFRLKRLEVFNWGTFDGKVWTLSLDGRNGLLTGDIGSGKSTLVDALTTLLVPAQRIAYNRAAGADSKERSLRSYVLGHYKSERNEVTGSARPVALRDHNSYSVILGVFHNAGYGQTVTLAQVFWMKDAQGQPARFFVGAERELSIAADFAGFGPDIAQLRRKLRALGAEIEDGFPKYGAWFRRRFGIDNDQALELFHQTVSMKSVGNLTDFVRSHMLEPFDVAPRIAALIAHFDDLNRAHEAVRKAKRQAELLAPLTADCDRHQGLSGELEGLRACRDALRPRFAELKLDLLERRLQLLGEEQARLGTQKERRLEERDRQRREEDRLKRAVAEQGGDRLEQLAAEIREQERERNRRQQRAERHRDLLSRLDEPPVADEAAFEALRQRLDARREALSQQESDVQNRLTEWGVTLREGKREHAALYEELASLKARRSNIPKAQVGMRTALCEALGLDEAVMPFAGELLQVHEEARDWEGAIERVLHNFGLALLVPDEHYAEVSAWVDRTHLAGRLVYFRVRPARQGGAPSLHADSLARKLAIRPDSAFYAWLERELAQRFDYACCATPEQFRRETRALTRSGQTKTPGERHEKDDRHSLDDRSRYVLGWSNAAKIAALEAQRHSLELRLGKIAQDIAGTQNEQARLRQRLEALAALREFADFREQDWAACATAIARLQEEKARLEAASDTLQELGARLAGVQDELRAGEEVLSKLDQALGSVEGKQEAARALQAETTTLLGDLPVAARQRLDALRTEMLGEHQLSVESCDNRERELRDALQARMDAEGKALSRLAEKIIKAMSAFKDEFKLETAEFDASLDAAFEYRALLEQLNRDDLPRFENRFKELLNVNTINEIANFHGQLARERETIKERIARINESLAQVDYNPGRYIVLESQASPDVEIRDFQSELRACTDGALTGSDDTQYSEAKFLQVKAIVDRFRGREGQTEQDRRWTAKVTDVRNWFLFAASERWREDDSEHEHYSDSGGKSGGQKEKLAYTILAASLAYQFGLEWGAVRSRSFRFVVIDEAFGRGSDESAQYGLQLFRQLNLQLLIVTPLQKIHIIEPFVSSVGFVHNEGGRASRLRNLSIEEYRANKAEPAP

SEQ ID NO: 34135 - protein, 395 aa, Azotobacter chroococcum NCIMB 8003
MNWTTASDLKQQLSRLWERGELLRAQIQEMPAFPLRLPLKGPGSAEVTGQFEAVRHWIAQLVAMPHLRIEWREVRHAVMGAQRLPQSLWIDSPEAAIAWLGKRREYECFAGLVALTRSRQPSLLAWLARRPLQAVELAGKWPQLLDLVEWMQRHPRPGCHLRQVDVPGVHSKFIETHRAVLAELFELVLPAEAIAGEHGGVGGFAARYGFLDKPVRIRFRVLDARLGLLPGTPLPDVTLDADSFARLAIPVRRVFITENETNFLAFPALPDSLAIFGAGYGWDALARARWLAGCTLHYWGDIDTHGFAILDQLRGRFAHVESFLMDRQTLLAHQALWGEEERPVRHDLPRLDADERALFDELRDNRIRRALRLEQERIGFHWVQAALARLAGDGR

SEQ ID NO: 34136 - protein, 492 aa, Bifidobacterium adolescentis
MYETGVLRLLLRGNSMLYVALLRSTFDPLTGELPREIVEERFSRSLTRLAETGDYTPKEGQTSAEAAHTILQQLTKEGEGDYAWLANSLDVASHRYLYRLTARAHRAIEALDRLEDTTKALSGAQANSIIMEIEHARMQLTADPRERIRLLERDIEERQRQIDELKHSDTLDKLTSQQVGDIIGVIHNTLRGVPIDLRELALEERDNGDNLRRSMQSGSISVEQALGTYHDEYHRSFHESDSGRRFEDAFQVIVTDEGRREIDEAVRDIAQNPYLEGEPGILLAQVRAELKRIYEGIEDVRRQIRISDEAVSRLVRQQTDTHYRTMLDKLHRLFVRASDDAKTHPGSDERPYRTDTGTAQFQALPSRPAKSMARAATAGLDDAPSTNVNAPDLKAMVEMCGPRLTHMIGLIRRDPVKTADGRFVDFAASFNRLPREERRESELIGFLSALRTQDGPATVAWHCVSIDGGERVWRTRPILTTEAALDEIIEEG

SEQ ID NO: 34137 - protein, 279 aa, Bifidobacterium adolescentis
MTDNTDGFDTGIGIEEETGPESGMPSEGPDMTRDRPGLFDGDTGDMPLEARMAAIALKRERYIDGSLYDRACQYREAVERSLNNDMLRLVDNTKYRIMYASPVTDAETNIRSLKTRVSLTREEAATLAALRIKVLEYENQKTKPGDWLISFDDIRALLATGAGFLTASNDEEGTAKKITSVISRMRTYGYLAETGDENMYVLTPLVPMVLDQKLADRWLGSDDTDGDGMKDADGDGYDDSSIGADGGDTSDSTGTVSSGVEQDAFDFDSADDAFDGGQH

SEQ ID NO: 34138 - protein, 1152 aa, Bifidobacterium adolescentis; identical to SEQ ID NO: 32725

SEQ ID NO: 34139 - protein, 411 aa, Bifidobacterium adolescentis
MAAARNTTGETDIRRKLDEYVDAHLTRHMYDTDESWPLRKTIRLPKQAELEQHYNQIRTQNETICDWARQHHCETSEKTKIVSSGLIQQKSPLIDSVTIPDLDTALRIATKQTRERYLREHDRMSALAKEFGLEPANAMNVAKTLKDHDDTDFHLVIQAAHYFANHDCHTMTPRMAPIPGFSAKWLGTPNSQRRKAICQLTGQDNLTFQERPNELRLRLMDAEHHDQPDLIVTQPWVRSQPTDIEHAIIIENKDTYQAMPTVEHAICILGNGYAATSHITTLLPWLTTIPNIIYWGDMDANGLDILSKLRATGIPCTSILMDTTAYRTYEQYGTQFDAKNKPLTTQTPQPTPGLTTEERKLYETLCTGTDIQYLRIEQERIPIRDATTILHDQHHWPIDIPGNDIPNNNTK

SEQ ID NO: 34140 - protein, 524 aa, Bifidobacterium animalis subsp. lactis; identical to SEQ ID NO: 30666

SEQ ID NO: 34141 - protein, 269 aa, Bifidobacterium animalis subsp. lactis; identical to SEQ ID NO: 30689

SEQ ID NO: 34142 - protein, 1165 aa, Bifidobacterium animalis subsp. lactis; identical to SEQ ID NO: 30668

SEQ ID NO: 34143 - protein, 406 aa, Bifidobacterium animalis subsp. lactis; identical to SEQ ID NO: 30669

SEQ ID NO: 34144 - protein, 489 aa, Xanthomonas axonopodis pv. phaseoli; identical to SEQ ID NO: 33242

SEQ ID NO: 34145 - protein, 233 aa, Xanthomonas axonopodis pv. phaseoli; identical to SEQ ID NO: 34012

SEQ ID NO: 34146 - protein, 1340 aa, Xanthomonas axonopodis pv. phaseoli; identical to SEQ ID NO: 34013

SEQ ID NO: 34147 - protein, 489 aa, Corynebacterium humireducens NBRC 106098 = DSM 45392
MSLVSHALGFARFRRTSPVMSLLRSDHLPVVLAVVARYFPQGAVARPVQEIYALLDEDLRNLNAEGFSLPRGPQDYVGDWVRSEWFIRRPGTSRTGETIEPSEESLAVLDALQRWDRPHRTVSASRMEALSQALQTLARESDPDAGQRLAELEREREEIDRLIDSTHRGEFEVLTSAQIQERVGDILDLAASIPADFARVRQEIGDLNRQLRRQLLDPEDPRGDVLEEIFRGVDLIGESDAGRSFNSFFDVLLDRERSTLIDRWISEVLGRDATGEIPEELQVRLHRVFRDMEESSYEVSDEMTSLARSLRHYVTTDEFAENRRMVQLLRETRHAAAQAAQAGAVHPVNQMETPLVRIGMQVRSVAALRLRNPGEEQVGQQPEKVAEVELNTDTLLAEIRASEIDFEELEEAVARALALHVTATIAEVMHQHPPTQGLASVVGLLHLAMQRGSPTGAPQVVEWEDEGTRRRARISGWQFTRPDTTEEQR

SEQ ID NO: 34148 - protein, 209 aa, Corynebacterium humireducens NBRC 106098 = DSM 45392
MTEPMWPGDSGTLSYHSRRALVQLLKGPMIRAEMHPQVWKAIVTDRGALQTALHNVFLDLVLDEEAGIAFSRAAAGGQDVEVEGRQEPVPKVLRTESLSHMDTLIILHLRQELALAAPGERVIIDRGELRDQILLYRVDAESDEAKLARRYEAAFKRMIDYSLMYKTETEGRYEVSPALRQIFDAATVEGVRVEYERFRTDTTIPEDQA

SEQ ID NO: 34149 - protein, 1105 aa, Corynebacterium humireducens NBRC 106098 = DSM 45392
MSIHPGQYRLSRIQLINWGTFEGSLDIPVSREGFLITGGSGSGKSTLIDAITAVLLPGDRVRFNAAAQANTPRGKGRNLVSYVRGAWRSREDHASGQVVATYLRPRATYSVVGLTYDNAEGEVYTLVAMFYLKSGHNSPTDVERFYGLFSGEFTVYGLVDYLGSGIDKRRIKAVHKKAIFSDRHSVFAAKFRSRLGIASEEAQFLLHRAQSAKDLQSLDDLFRDYMLVEPDTFAKADRALEQFGDLEGAYERVEDIRAQVEALEPLVGLQKRKEEASTSKEHAHHLKQALPTVTNRIKREEQEALVRRFIIEHDEALSRLQSARQALTHAAEMQRIAQDAVDRTLGARHGELSARRSAAVEQAQRTRAERTRVVEAVAGIGGVEPEDAEGYQQLSNDARVIVDEFTERREKLDASSEEAVSARTRAEDELKAAEKELNALSRGTSNIEARLLDVRDKLCRDLGLNNRDLPFAGELIDPVDADWEPVIQRRLSTLAATLLVSETVFPRVREWVDAHHLGARLVINAVHTKETYSSPRLAHNALPRKVTVIESPFRDWLHAELGKRHNFLCVADAGALGELRPSDNGVTLQGLVRFALRSGDPTERLEKDDRRRLGDRSTYRLGSTNHAKIELLRQQVATLRRTVEAARNRLREARVRIEGLQREYQAAQLILRTTWADVDVAAADTVVADLDRALEELTRTPVAAELQLRLEAATLDLRRADQAAEEAVRHQAVLADKKGTAEKELARLKSQPVADVDEDIARELEERLTGATRRLHAGNVDERTQALREELDHRLEALEVTLRNTDTQIGNHLTRYIQTWPAEQADILPQPEYIGEALNRLTLLRDDRLAEFTQRFLSLMNDMSTRNLGAIARTLRNARREIEERIEPINRSLARSEFNTDRYLHIEVRDRRGEVVVQFQRDLDEATSGGLGSSDEKQAFARYQSIAKIMRKLGSQDSADRRWRSLVLDTRRHVSFIGLERDSAGETINTYVDSTSLSGGQAQKLVFFCLAAALRYQLAEPGAQYPAYASVILDEAFDRADPAFTRQTMDVFASFGFHMILATPLKLIQTLSPYVGGTVVVSYSEAPDSRGEVRGVSGLSRIEVG

SEQ ID NO: 34150 - protein, 377 aa, Corynebacterium humireducens NBRC 106098 = DSM 45392
MVVMRADARVKLQSYIRRHRRKLLLDAFPGHGFPLHPPTARAAAADEKGARRFVRDWEGVPGVVWEKRDWTAAGAGRHPVPVRFEVDSLDALVQEAELGAEWAAWVQRRDLLVDAGCDREAVVTAIALWADQGMPTLETALRVVTWFRERPGVTVLPRAVAVEGVDTKWLERHRPLVETLLAATRGVSGREDLGLLAPPDRVRMRSHPGEGPGGLSDVEVPVEELAAVSPARGILMVENLSSFLALPTWPGVVHVWGVGYRAASLAAEPWFRAAPLLYWGDLDADGFSILSNVRGIHGDVTSVLMDVDTVRRWSRLGVPDREFQVRSYPGLTEAEGAAVEALIMAGHLRIEQERIRFDVAVAAIEEAVLIRLGRSGA

SEQ ID NO: 34151 - protein, 495 aa, Corynebacterium glutamicum
MTVVSHALGFKRFRQESLELSLLRSDNFPVVFAVVAQYFPQGAIAKPASELYQLLSDDFRVLREEGFELPKSPSDYVSDWVKSRWFVRRPGSSQTGETVEPSEELLAVLDSVQRWDNPHRSISASRIESLTQALQTLALESDPSTAKRLAELERERDRIERQIEAVHAGEFEVLTTVQIGDRVADILDLAASIPADFARVRHELSDLNRKLRRQLLDPEDSRGDVLEEIFRGVDLIGDSDAGRSFNSFFDVLLDRERSSLIDRWIREVLGRDEAIDLDAKLRTGLYRIFRDMEDASFEVNGEMTGLARSLRHYVTTEEFAESRRMIQLLRDTRSAAAKAAEAGEVTSLNHMDTPLVRIGMDVRSIAGLKLKNPGEERVEDLPEPVEEQELDTEVLLEQIRASEIDFEELEEAVGLVLAEQSHATITEVLEHFPATQGLASIVGLLYLAMRDGVSTGHAQVVEWESESVLHRRRITGWQFIRGLNSEDLAESEMNK

SEQ ID NO: 34152 - protein, 212 aa, Corynebacterium glutamicum; identical to SEQ ID NO: 31489

SEQ ID NO: 34153 - protein, 368 aa, Corynebacterium glutamicum
MPLLIDDALHRSKKYFHAHLSELLLGEFAGLSLPLHPPTAAKAAADIDATREFIRQWEGRDDVEYAVRNWSPVGLGKTEVPVRLTLNTIEELVVFAQVEDEWSSLHERFSQLSGFTAEVVAKHVSLWRSLSNEDLSKAVLVVEWFLENPNSGLLKRAVAVEGVHTKWLENHRVLIETLVADKRGEPGRADLGLGDAEARVRLRFHSVDAPAGLTDIEVPLSNLCELQEPQVILMVENLDSFLALLTWPGVTIAWGAGYRAVDIVRGLYFSNGRLLYWGDLDLNGFKILDGVRSHVPHTESVLMNPETVSRWRYLGVADREFKAESFDNLHDFESDALDLLITDGELRIEQERIRLDVAVEEIEKVIRG

SEQ ID NO: 34154 - protein, 469 aa, Geoalkalibacter ferrihydriticus DSM 17813
MLFGKLPDDIFRPLAGPNRHLFEKVLKRLHTLFFDDDNPDSDAPRREIVQHEIYQVLAIEETLALKDEEAEAVYDTIPLAADYIYRRLVNTGWLEPEEDGYHTNVVPNPNARLLLEALLGIEAHEKKNYGRTVISILAHIESAINNPKERGIVFLDAVSQTREFSNHLRGILYSLKEVQDLLAKINDPKKVLASFFEEFVENILIADYKTLNSADNPFRFRGRIISLLQQAEHIDSIFHPLVEAYASHFSIGEDDAAARLRRDMDYISRVFRSVDRRLEKIDSFCSRLQNRMEETVRFIDRTMPGISNRLVDLLSSLGPVLQDDGDLPDIPGPLLSNQTKVLSPFSLYSPRGRKEKPAAQVLRPKSVNPEVKLRKELIRRFMKKRAFEPHRVVMYLDRQMGARTVMSASEFEILTVDDLISFLLIRHLPKMYGRGQFKAKAYSVRRKKDLVQTDWISCPNFIVERRKNA

SEQ ID NO: 34155 - protein, 1161 aa, Geoalkalibacter ferrihydriticus DSM 17813
MKHLVKIIFVQWYLFDIQEIPIVGTTAVLGGNGAGKSSILDGVQVVLAGGDKNKIYLNKGSNERSARTIREYCLGIVSDPNAPVKLPSRDRANTYIVLCFYDDQKDEHICAGVAIWATAAEPREDILGYFITKGAPLSVDDFNEDTSEGAASLPWARVKDRLTRRFRLGESLELPNKGPGDFTRKFYTHMSAEPAMPMSAPTVVKSLLSAISFKPINDPTKFVRENMLDSDHINIRDLSESLKFWRGLRDKAVKTSELISELSDLDRICRNVEGLDGEILHHEHASYAARIEMCYELASPVQMELDEINDDLVRLDKEAKELEEEKETVQKKLWEKQRDLEKEDVTQRIQKLEDERNIKEKNLRQTRSSIDSRRMDCLSLKTLSDGASNIPEELSSAAKELLAEADIDDLLGQAWPQSPTHFDMLVEKFTKASTNALPSISAQSANLWQQIVPLQENKRELEAQAAMLARKQAPIGKATRGLMELLAKNQIEATPLCDLIDVSDERWRDTIEAVLGNAREALIVPPEKNKARDAIRIYRYEGKGFRGSLVVNTTKTAEWENLSKKDSLAEKVTTDDPHARAFINLRLGNIICVEKESDLLQHRRAATTDLMLASGGTVTMMSEVPYSILGRQNREALRVRLSKLIETKAVEIEKLTAHQNRVEDAVQIIKGFVAKFTNAECVTDLASERRSLEDRIEELISEIELLNQKENTKLKQLITDLKGTLDDVVKRLMEARSEAESKREFRVHLSNFIAEREREAEAFEASLGEIREDSRLDPALASETLYRLRVRFAESENVYEAVINHIHGHLESRRKTRATSKEKVMVGLTNFLSKNFAQTFLLGDGALDFETFEQRAKFIAEEKTRLEETTLAEYETRAENALKEVEVTFRTKFISRLVERLGAVRDNIAGLNKILKNRPFHGEIYQFRCVANPELDKVIKFAKAIEEDRSSQYMGGLFDPANDPDSPHREAIEFINWAFQDDDAAKLVSDYRNYYVFDVEMFDRDGNKVANLKHRIAKGSGGENMAPFYVAIGSSLSASYRITKRLNGTVAGGMNLAPFDEAFSKLDAANCFNCLEFLKDTGLQVLLAAPDEKYPTLAAQVDTVVWVYRDGVDVEIETEFLSTKAHDLLRSDNPFFIKKEDDGTEKESDSISIERSVVGGT

SEQ ID NO: 34156 - protein, 396 aa, Geoalkalibacter ferrihydriticus DSM 17813
MNPGHDLLRKLFQIWQRNPDGKQRKTLTITKERAPAYFQTIDPDAKDQLHACLKNAAAEGCIELVWGKHFESHLLRKIILLDGETLGRFLGVPLAREIAAEAQAKLMFHVPPEESWLSDLVARVAEKWSRGEAAYRISPGEVGEVKLLIDALGAVKEGKQKGLDLRTFSARVLGDSKAMERMYDRFARIWNEQFDTGLEPKELFESLGLVKFPQPLFFKGPVRIKSGGDWLNMEPLKWGFGIPPDAIEDIAFALMPSYILTIENLASFNRHVREVDDEGLIVFSAGFLNPHTAEVIQTLERKLDSHTPFFHWGDIDVGGLRIANHLQAQIRRDLRLHLMSPEILSRHGEMVTGSLPRFRAKSISPQIQDLMDALVSHDPAIILEQESIDPQPPQIP

SEQ ID NO: 34157 - protein, 511 aa, Mesorhizobium plurifarium
MSDASRPQIFGQLGPDIFTVFSGGNRLLYERAILAVYEDLYRSDLLFPTEAEVVGVIYDCITREPGLWAEDEAAVDLDRLVTRTGRRVRRRRVAGVDDLATGTVISRSRHIYNRMLQTGWLDEASYGLKTTVEMPSGAMRLAEFLCSLKEGGAEQLGGLVVEVRNAIRAVREKPAENALGLNKAAQDSARFGRYLRSVLAALREVDRQVLSSDTLADRLRHYFEDFVERVLLRDYTSISTTAHPYRHRQTILVSLDELEDSEIDLAAVADAYLEARLVPDEKAARDLVQEDLFRIRRVFERIDGSFEAIQQHRSRLETRLRNVVRYAGRRTNFLQRSEHVIQGLDDALSQGVDDIAIQGLIEPRTTVVAPELLAKPRGARPQIADADLTLPAPDPIREFRRQLEREYLDRLTISPAKVSRFLERRVPPFGETTAAFMRIETVDDFLAFEAIRMMVAGGLGGDADSRLAKALEGRFELVASDEPVSNEWLDCGGFHVKRLDDSITLEVRHAA

SEQ ID NO: 34158 - protein, 216 aa, Mesorhizobium plurifarium
MLLEFNALENSNPRGFLRVTQLISHLMRHQFVHVEDRGGATLLEMLHRPELAKLVEAYFDVAGYRLVHRETEGWAGILPDPERTSLPRLRIDETIALLVMRRLWEEALQLGEIYINGTVRTTLNEGYAAYQGIVAGSRRAALAPSEFRDVLRMLERKAIVRLGEFDADAQDMDLDIRALITSIAGDDFVASLEQILSRPAAPTPNADDQTVVGDEA

SEQ ID NO: 34159 - protein, 1144 aa, Mesorhizobium plurifarium
MMELRRIVLVNWHMMVRADLDLAGDVAILGQNRSGKSTIIDLIQAILAGGSSRLYRFNRSAGESNGRSDRTLGGYCLGQLNEDTFLRNQARSHIALVFEHPERRRMPVSLGLSIEAARGQQTEVVGHFVAEGISVDSSMLLDIGEDAPRPTMWPVVRRRLDQACGEGGGQLLTPDDAKTFIREYMRALFTGRRASDPERFVRTFVAALSFTDISSVEQFVHRYLLEPKPIDIAELRDSIRRYREIQKTIADLNRRLQALRAIRAQIEEFDRLLAEELTCRAIEKTAMLVEGFAKLLANINEHRSKSHELHVVMEEFARVEEEIERETEGLASVQRQLAATGAQGQRVILEQEIRGLERDHAGVMERLLARHLRAARAIQLLKLRDKLSVINLGELFLALERVEEASRGLAPPDWPRDPAKMDELLDAVSEAAIARAEKVADRRDDAIVWVKQLEAETAEDSKQLANAKRGQVSLNPTTSKLMEALRREGMTPRTLCEVADVVDERWRNALEALLTRDREAVIVDPEHAYRATEILRHGRDAYPGCRVVNTRKLQSRSTVPEGGTLASMIRSDDKLAMAFVVFRIGNVRLAENQDELLSGGRAVMADGAYYDGLITEMRRPDGLKIGRAAAPLMEATLRERIEQRSQLLRIHLEKKHFFEDAIRRLEDCSKPVDEKDKLEALALALGDLADRRADARRRLDRISAQVDPELLDSEKRSQALLKSLNLNRDEMIGSRESLKTKIEEVKARLGAGEQSVGSYLCLAHRRRQFRSVVTSAAQMRSLRERYRGHPAKSPARIASDMEKAADDAKQRHRELGHEIRAALGKYAIDFPDALEGYADVPIIGTVKPWVSDGIAMLEDNELIRYREQADEAADRVSRLFKTTFIHELNSRFGQLHSEMEKLSAALRTRPLHGEIYRLTELVKPEFDDLYHLAKDSETDERVLDALFGRAEPRDERHARALNQIEQLLADETFDFTVFQDYRSYFTYDLRMRDVTTGRTTSFDRRRGVASGAERQVPFYVVIGAALASAYHGVRQATAPSDLGIGLAVFDEAFSKMDGPNQRTLLDFYRAIGLQVVIAAPTEKRAVVYENLDYIIDVFRSGDVSLAESIRIKDRVREEMRAANPQHATDDELAERLGLKASAAE

SEQ ID NO: 34160 - protein, 415 aa, Mesorhizobium plurifarium
MSRRGFSTIISLIDNLLARHERNPAARNLIAAIDNDGFANMDLRDTFDEELAVLERAGGLELIQTGPRTERRVTGVRLKDARVLYRKVERRPAGELAYQAVSELRAQPGLPAGATSLIDDVVAAWSRGVSHIGIRKGDGRTLADVIGLAIAVRGRMSGDPQEDQDFRTFSRLTVGDSKVLEKNVRQVAVAMTKIFAGMDEQIRLNPEELLASAGVRRLPQPILLHGDVSLGGRSFPAMPYVGIPTDCAGGIGLLTKPDYVLTIENFTSFVRHVREVARSEQALVIYSGGFPSRPALATITRLAAQAQVPTFHWGDMDAGGVRIFQHLERHLAGFDIPLRPHMMDTELLRRFGKPAPGVAGPVADRHVSAIAGLADFLTASGLVHEQEEFDPRSPITETLAPGEQKAPMPRPDPLQ

SEQ ID NO: 34161 - protein, 508 aa, Mesorhizobium sp. SOD10
MALFRYLNDDAFLIFSRKFRFLYEAALLDAYERFFSRGASFPTPQEVVHAIYDLIKRKPELLAEGDDVGEGLPDLVSKRRRRLKFAGEANEAAETALRVASVAYQKLIQTGWLEEEEYGLRVTVDMPMGASLVMQLLSSLKSDVSQRFGGVVVNVKQSLELAARLQPGSSGKDAVDAAYAVVQAREHATAFLKTLRAILSDLRRIRRTIMESRSMRERVDAYFQEFIGELVLKDFQAIHTFNHPFRFKDHILDLARDISLHPEIMKMIASGYVESGMADTREDGLRTAETDLLSIQEVFDGIGEMFDRIAIFRRQLEQRLRNTVKYAEQGSSGISSRASSLIHRLHKVMDQRPTLSEFAWVPLPVEPMRTPWSERHLAQPRQPRKALESMAVPPKVLDPLLALRKKLKKQYMERIVPDEKQLLQWLNDKVPLAVTKEARFLEIEDVDSFIAFDVIRRFTKPGEVPPSIAAAFEIVDDSQGHQHDSEWIKCGNFLIRRRAAMAGGVDAD

SEQ ID NO: 34162 - protein, 216 aa, Mesorhizobium sp. SOD10
MLTEFEEVEARYGGDKGADLRKACRYLLRHQFVYSGDRGVATVYDVIMDSRFRKVIDNFFDCIGYRVHREQDEQWAGIVLDDEEMSSTPKMRADETIVLLVAAAHWQDEANQGNVEERATVLTTFNALYEKYREMAERGTKMLVSQSRFQDVLEDLASRNLIWLGEFDRVLQDREVVVRPIIKLVSGSDALRRIEEQVALEDYEPRQLGPVEEKLQ

SEQ ID NO: 34163 - protein, 1154 aa, Mesorhizobium sp. SOD10
MMELVHLTLVNWHSFTVEDIPVSGHVGVLGENASGKSTILDMIQVVLTGASGRYMNLNPVAGESRRRSGPRRTVQGYCLGARGEGDFRREACLTYVAISFRDADGVKPDLTVGLAMEARKTQPAETILGRFVVRGKILTTANFLREREGRQEFAQWEEVRQSLERECGNGFVNHRDSATDHIREYMRDLVPRSAPTSGNAAALAKAIVNGMTLNQGLSATDFVRNYILEESPMKVGELRESLKTYRQVNQTIKNMRERAKRLKVVKARAEDFRNFLNEHVEEDWISRKARYLAASAAMRALEEEVKEAEASLLAESEEINDLTTSINEANQDVHRIIKQIEAIKAKVGIDDLNKMAESHSFSAADCLKRISERVKHMQRIAAAAEALGKGESSSRELVAHASAAAEAVKRGNTEATAVIEQAFLASLPVTAERIGRARSETEAALHTKNKEVDKLSRSIEAAASDSRDSHLGDHTRELMRLLRMAGMAPRALCDIIDLIDKDWGQAAEGLLGRDREAIFVDRDHIHTATTILRENRRDLRQASLVSLNKLERYKDPVESGWFPSLFRSDDQDAVAFLQRRYGNVRLARTMEEFNQPGRALMADGLYDDGLLRGTRLEEAFRLKIGKAAQEQLFLEQKRRLEVLREEIETLSQRRRILSEVDRSVALVTSPADGETVAGLLERAQQQERLAGEARSRLEAVDQGDLKRLYELEEKKKVQQAYVDARNVELNSIQKRQGAYQKQAETARKTLTGLTNQEGSRHLRNLARRMFQYSWRLTAAVPANRRYRERIAGKQIPSDPSAHYEALAGIHRAIGQRAEDRSKQAKDRMMEADRNVRAAMRSYFDVAPISSEVGAESEILKDILPWVEATLRDIEENELTRHEALAAEASERVSSIFRGEFVNSLHSRISKLKRDIDSLNHSLRNHTFHGERYSFSRTQVAQYAPILKAVEIYVTSEDALDLLFKGEIPEGSPHKPVLDEVKRILEDPDTEFDSFEDYRSFFVFEIHMENLDTGHKTRWETRRGTGSGAEQQVPLYVAIGASLASVYGTAEGRSGSQLGMALAVFDEAFAKLDGKNQRQMMSFYESLGLQVIVAAPPERRPSLLGYMHAIVEVDNIGNGQSETTVVQVKEKARKELQRINPELMDDEALRRMAAE

SEQ ID NO: 34164 - protein, 393 aa, Mesorhizobium sp. SOD10
MKFTDPIALLSYLLDRHEDGRAGARAYPDSGAFSNIGEADRFRKKLEEASRAGAIELRMEMGRRRAGEIKFVRIADVARLYCFVERKPSSERSASALEDLFRRAELAVPFAEHARDAAEAWSRNRRWAGIAPGDIGSLERALLLAQAIYRRQHLGLDYRTFSRRAVSDSKALERLEAAVAKVLRGVGANIPEGATPREALGALGLEKVPPPLLLSGPITFGASQPDVSFLGVPAEAINTVGFSRTPEYVLVVENYTSFVRHVTEADPDRRGLVIYGGGYPSTGVQKALGLIAGRFPDDVPFYHWSDIDPDGIWIFLTVERAFGRRLLPHLMTVDLAEKHGSKPDQKASRVARAEGSVLFDLIAYLAKPDAKHLEQEELDPIIPRLHQSEWRAS

SEQ ID NO: 34165 - protein, 508 aa, Mesorhizobium sp. ORS3324
MALFRYLNDDAFLIFSRKFRFLYEAALLDAYERFFSRGASFPTPQEVVHAIYDLIKRKPELVAEGDDVGEGLPDLVSKRRRRLKFAGEANEAAETALRVASVAYQKLIQTGWLEEEEYGLRVTVDMPMGASLVMQLLSSLKSDVSQRFGGVVVNVKQSLELAARLQPGSSGKDAVDAAYAVVQAREHATAFLKTLRAILSDLRRIRRTIMESRSMRERVDAYFQEFIGELVLKDFQAIHTFNHPFRFKDHILDLARDISLHPEIMKMIASGYVESGMADTHEDGLRTAETDLLSIQEVFDGIGEMFDRIAIFRRQLEQRLRNTVKYAEQGSSGISSRAASLIHRLHNVMDQRPTLSEFAWVPLPVEPMRTPWSERHLAQPRQPRKALESMAVPPKVLDPLLALRKKLKKQYMERIVPDEKQLLQWLNDKVPLAVTKEARFLEIEDVDSFIAFDVIRRFTKPGEVPPSIAAAFEIVDDSQGHQHDSEWIKCGNFLIRRRAAMAGGVDAD

SEQ ID NO: 34166 - protein, 216 aa, Mesorhizobium sp. ORS3324; identical to SEQ ID NO: 34162

SEQ ID NO: 34167 - protein, 1154 aa, Mesorhizobium sp. ORS3324
MMELVHLTLVNWHSFTVEDIPVSGHVGVLGENASGKSTILDMIQVVLTGASGRYMNLNPVAGESRRRSGPRRTVQGYCLGARGEGDFRREACLTYVAISFRDADGVKPDLTVGLAMEARKTQPAETILGRFVVRGKILTTANFLREREGRQEFAQWEEVRQSLERECGNGFVNHRDSATDHIREYMRDLVPRSAPTSGNAAALAKAIVNGMTLNQGLSATDFVRNYILEESPMKVGELRESLKTYRQVNQTIKNMRERAKRLKVVKARAEDFRNFLNEHVEEDWISRKARYLAASAAMRALEEEVKEAEASLLAEREEINDLTTSINEANQDVHRIIKQIEAIKAKVGIDDLNKMAESHSFSAADCLKRISERVKHMQRIAAAAEVLGKGESSSRELAAHASAAAEAVKRGNTEATAVIEQAFLASLPVTAERIGRARSETEAALHTKNEEVDKLSRSIEAAASGSRDSHLGDHTRELMRLLRMAGMAPRALCDIIDLIDKDWGQAAEGLLGRDREAIFVDRDHIHTATTILRENRRDLRQASLVSLNKLERYKDPVESGWFPSLFRSDDQDAVAFLQRRYGNVRLARTMEEFNQPGRALMADGLYDDGLLRGTRLEEAFRLKIGKAAQEQLFLEQKRRLEVLREEIETLSQRRRILSEVDRSVALVTSPADGETVAGLLERAQQQERLAGEARSRLEAVDQGDLKRLYELEEKKKVQQAYVDARNVELNSIQKRQGAYQKQAETARKTLTGLTNQEGSRHLRNLARRMFQYSWRLTAAVPANRRYRERIAGKQIPSDPSAHYEALAGIHRAIGQRAEDRSKQAKDRMMEADRNVRAAMRSYFDVAPISSEVGAESDILKNILPWVEATLRDIEENELTRHEALAAEASERVSSIFRGEFVNSLHSRISKLKRDIDSLNHSLRNHTFHGERYSFSRTQVAQYAPILKAVEIYVTSEDALDLLFKGEIPEGSPHKPVLDEVKRILEDPDTDFDSFEDYRSFFVFEIHMENLDTGHKTRWETRRGTGSGAEQQVPLYVAIGASLASVYGTAEGRSGSQLGMALAVFDEAFAKLDGKNQRQMMSFYESLGLQVIVAAPPERRPSLLGYMHAIVEVDNIGNGQSETTVVQVKEKARKELQRINPELMDDEALRRMAAE

SEQ ID NO: 34168 - protein, 393 aa, Mesorhizobium sp. ORS3324
MKFTDPIALLSYLLDRHEDGRAGARAYPDSGAFSNIGEADRFRKKLEEASRAGAIELRMEMGRRRAGEIKFVRIADVARLYCFVERKPSSERSASALEDLFRRAELAVPFAEHAREAAEAWSRNRRWAGIAPGDIGSLERALLLAQAIYRRQHLGLDYRTFSRRAVSDSKALERLEAAVAKVLRGVGANIPEGATPREALGALGLEKVPPPLLLSGPITFGASQPDVSFLGVPAEAINTVGFSRTPEYVLVVENYTSFVRHVTEADPDRRGLVIYGGGYPSTGVQKALGLIAGRFPDDIPFYHWSDIDPDGIWIFLTVERAFGRRLLPHLMTVDLAEKHGSKPDQKASRVARAEGSVLFDLIAYLAKPDAKHLEQEELDPIIPRLHQSEWQAS

SEQ ID NO: 34169 - protein, 508 aa, Mesorhizobium sp. ORS3359
MALFRYLNDDAFLIFSRKFRFLYEAALLDAYERFFSRGASFPTPQEVVHAIYDLIKRKPELLAEGDDVGEGLPDLVSKRRRRLKFAGEANEAAETALRVASVAYQKLIQTGWLEEEEYGLRVTVDMPMGASLVMQLLSSLKSDVSQRFGGVVVNVKQSLELAARLQPGSSGKDAVDAAYAVVQAREHATAFLKTLRAILSDLRRIRRTIMESRSMRERVDAYFQEFIGELVLKDFQAIHTFNHPFRFKDHILDLARDISLHPEIMKMIASGYVESGMADTHEDGLRTAETDLLSIQEVFDGIGEMFDRIAIFRRQLEQRLRNTVKYAEQGSSGISSRAASLIHRLHKVMDQRPTLSEFAWVPLPVEPMRTPWSERHLAQPRQPRKALELMAVPPKVLDPLLALRKKLKKQYMERIVPDEKQLLQWLNDKVPLAVTKEARFLEIEDVDSFIAFDVIRRFTKPGEVPPSIAAAFEIVDDSQGHQHDSEWIKCGNFLIRRRVAMAGGVDAD

SEQ ID NO: 34170 - protein, 216 aa, Mesorhizobium sp. ORS3359; identical to SEQ ID NO: 34162

SEQ ID NO: 34171 - protein, 1154 aa, Mesorhizobium sp. ORS3359
MMELVHLTLVNWHSFTVEDIPVSGHVGVLGENASGKSTILDMIQVVLTGASGRYMNLNPVAGESRRRSGPRRTVQGYCLGARGEGDFRREACLTYVAISFRDADGVKPDLTVGLAMEARKTQPAETILGRFVVRGKILTTANFLREREGRQEFAQWEEVRQSLERECGNGFVNHRDSARDHIREYMRDLVPRSAPTSGNAAALAKAIVNGMTLNQGLSATDFVRNYILEESPMKVGELRESLKTYRQVNQTIKNMRERAKRLKVVKARAEDFRNFLNEHVEEDWISRKARYLAASAAMRALEEEVKEAEASLLAEREEINDLTTSINEANQDVHRIIKQIEAIKAKVGIDDLNKMAESHSFSAADCLKRISERVKHMQRIAAAAEVLGKGESSSRELAAHASAAAEAVKRGNTEATAVIEQAFLASLPVTAERIGRARSETEAALHTKNEEVDKLSRSIEAAASGSRDSHLGDHTRELMRLLRMAGMAPRALCDIIDLIDKDWGQAAEGLLGRDREAIFVDRDHIHTATTILRENRRDLRQASLVSLNKLERYKDPVESGWFPSLFRSDDQDAVAFMQRRYGNVRLARTMEEFNQPGRALMADGLYDDGLLRGTRLEEAFRLKIGKAAQEQLFLEQKRRLEVLREEIETLSQRRRILSEVDRSVALVTSPADGETVAGLLERAQQQERLAGEARSRLEAVDQGDLKRLYELEEKKKVQQAYVDARNVELNSIQKRQGAYQKQAETARKTLTGLTNQEGSRHLRNLARRMFQYSWRLTAAVPANRRYRERIAGKQIPSDPSAHYEALAGIHRAIGQRAEDRSKQAKDRMMEADRNVRAAMRSYFDVAPISSEVGAESDILKNILPWVEATLRDIEENELTRHEALAAEASERVSSIFRGEFVNSLHSRISKLKRDIDSLNHSLRNHTFHGERYSFSRTQVAQYAPILKAVEIYVTSEDALDLLFKGEIPEGSPHKPVLDEVKRILEDPDTDFDSFEDYRSFFVFEIHMENLDTGHKTRWETRRGTGSGAEQQVPLYVAIGASLASVYGTAEGRSGSQLGMALAVFDEAFAKLDGKNQRQMMSFYESLGLQVIVAAPPERRPSLLGYMHAIVEVDNIGNGQSETTVVQVKEKARKELQRINPELMDDEALRRMAAE

SEQ ID NO: 34172 - protein, 393 aa, Mesorhizobium sp. ORS3359; identical to SEQ ID NO: 34168

SEQ ID NO: 34173 - protein, 503 aa, Rhodococcus ruber
MVEPDPGGSVVSTADLHRLARLRQEHPAWALLRSDNAAAVLALLGRHFDRGTRRLPAPELFARLDADLQELRDEGFELPRTGQAYCADWVRAGFLLRRASADAREETLEPTEATFAALTFVAGLTTATSSVTESRLTTLSSQLQALARDSDPRSESRLAALRAERDELDRQIAAVESGDFPVLDGNRAVERSAEILALAGEIPGDFARVRAELEALNRELRARILDEEGDRGDTLGEVFRGVDLIGSSDAGRSFAGFYDMIIDPERSSQLDDWIEAVLQRPFAQQLTTEQRGRFRTLLTEMEDAGGEVHATMTSLSRSLRHFVQSRHYEEHRRLQRLLRSAQQQALQVAQRRKPYDLLDLELVRVGMGIDSVAALQLHNPADDLVAEPVVTQPVGEVDLAELRRIVRESEIDMDELAGNVAATLRSRGSATIGDVLRDHPATQGLASAVGLLVLAAEHGHRVDGTEEIAWTSPSGATRVATVRRHLFDPTDTEFTARITEDAS

SEQ ID NO: 34174 - protein, 201 aa, Rhodococcus ruber
MTESTTRTGLYPGDTGELDLDTRRALVQLLKGPLVTADKHPEVWRTVIRDERVLRSRLADVFLDLVVDEDDQLAFTRPADTGDHKAPTVLRTERLTFMDTVMLLALRHRLLRAQPGERVIVDFDEVAGQLEMYRAATSTDPAGFRKRVNASWEKLKKYTLLASTSTEGRMEVSPVLRQLFDADQVAAVEAEFRRIVEEDAP

SEQ ID NO: 34175 - protein, 1099 aa, Rhodococcus ruber
MSAAPVHPGQFRLARVQVVNWGTLHGHHDIPVARKGFLITGASGSGKSTLIDAISTVLMPGGSVRFNAAAQESAAGSGRNFVSYIRGAWRREADADTDALTASYLRTGATWSAVALTYDAADGTAPVTLVKLMHLRRGANANNEISHLHLILDTDLELTDLEPFVARGIDTRGIRKRWPDAVVNPSYAPFARAFRSKLGISSEAAQRLLHRTLSAKSLNSLDQLLRDYMLDEPATFAMAERATTQFRELREAHRVVVDARRQVETLEPLVALADARRTGLQAQRDLQDETDHLDAVHARMTVDLLSDRLDETRAQTGLLQAAADKTADEADRAGERTLDLRVRAESAGDGRLATLRVHKETAETALERITQQRRRFDVALAHWEAETPGTADDFAHLQAQLERELRELDATADTRKAELYEVAGALAERRKTIRELIADREVLARRRSNLDPDLLRARELVCSAAGLGEDALHFAGELIAVRAEHAEWTGPIERVLGGFGRTLLVPDELYPRVAAAVDAHHLGARLVYRRVRTGVGAPDAPTTADGSLVRKLEVRPGPLAAWLHHHLADRFDYACVDTADDLRRVPRGVTRAGQVKHGGDRHEKDDRRRIDDRSRWVLGFDNEAKLADLRRRIGDAETDVDTLQRRQEALERAESAIQQRRQAAAVIRESAWADVDVAAAGSAVDAIEERLREWMQGNTEYATLTADLARAESEERAARQAHTAALAKLEQHRDELTRVQARLDDAQAHAGTAVPDPIFARIRARFAAAVRRVTVDNIDRALSTVGRAINEQMRSAQRDTADAERRITAILTGYLAEWEARRAEMRSEAEYVDDALAVLARLRSDGLPAYEDEFFRLLREQSHRNIGELARAIRKAPGEIRSRIEPVNESLRRSPFDTDRILRIDVKDRRSPAASEFLAELLQITSGAWKEEDRAAAERRFEQMAAVLERLDSGEPADLRWKRLVLDTRLHVGFIGVEVDPEGNDANYHDSSSGLSGGQAQKLVFFCLAAALRYQLAAAGEELPRYGTVILDEAFDRADPAYTRRALDVFTQFGFHMVLATPLKLLQTLDDYIDGVAAVSIRDKRYSQIALLPIRGAGT

SEQ ID NO: 34176 - protein, 378 aa, Rhodococcus ruber
MSALCVPPSAVAGKAQAAYRSRRARWITDPAAAESDSLSIVLHPPSERRVAQDPDAVVAWVRAWHGYRGAGQVEWETRRWPSFGTQEVPVRLMLSGATEIAAAAARAPEWRTLTERRARLLDGLGPGTATLATAIAATHARWLELDEPDFARLVAAVRWLAEHPSSGLFIRQLPVPGVDTKWVSRHRGLVETLLDGVRGDRDLGVRSLPRMCGVAVCDRTLLPTAPRIFATSLDELAALPVTPARTLILENKEGLHALPELPATVAVHGGGYAVHELADVPWLAASDVVYWGDLDTHGFAILDRLRGHLPHVRSLLMDRGTVERWRDLAVPEASPAPHVPAHLTGPERDALDAVRTEGLRLEQERIPWPYVVAHLAAL

SEQ ID NO: 34177 - protein, 541 aa, Bifidobacterium longum subsp. infantis; identical to SEQ ID NO: 30638

SEQ ID NO: 34178 - protein, 220 aa, Bifidobacterium longum subsp. infantis; identical to SEQ ID NO: 30639

SEQ ID NO: 34179 - protein, 1183 aa, Bifidobacterium longum subsp. infantis
MQATDVQMIADRWMLESRRLINWGSYEGYHEFRPSTDHKLPVTLLAGASESGKSTLVDAQISLLYPTGTPFNKASNSGRSERSDYTYLRGMVGVGSTETGDEPLYLRGRDENGAPQPVWGAIVDTYRNQTTGQVLSCAKFLYLMPGDGRGDVRRQYVVWGKPVDPRRMDQYRDAPFTPAQLKATYPDCLTFPSAEAFHTHIWSAMGLSEAACRLLHKIQSADAPSRLDDIFKQGVLGVPEALGLARTTVEDYERYDGNFHAMDEKTRRMDTLRGIQQAYGEYAAARGKARAFEPVKPAVDGTVPAVLRDWALARMRGEVAVQLPADRAEQQNSEAEAKLLRRRTEDLRTRLDMIRGQMQGLDGGNLTRLELELDQARRTLEDVQANRTRIEQTFASIGETLPGNEQAWNERRINAVNFKREYNKRDGECEEALTAAINARAGARGDLERLQRDFDRQRSQRTRISQQMDETRAMLCRATGLTPAELPYVAELMDVNEHEEDWRLAMNVAYAPIAQTILVDKRHEQGFAAKVSTIDPRTMPRHTWQFVDTARHYDDTGAHANILTGEQDGDWLSGKLRYRDDSPFADWLRSQTQAERFDALCVTAIDDTDRTNRQVQADGQIKSGARGQHGTKDRAQVIGFVNETYLNALAAQVDAARNALSQADTDYTAAKTQSDNLHRELELANQLAYTSWERIDITGAQRTITDTQDAIASIKNDPKLAELAKQRDELNAELDRVERQRIESDQAAARAGSAVEAALIWLRDHADTGTTDAAGVIADSGDDDNATTGPLPDEVTAVLTESYDNRFAGLADAAMRAHMIIGAGVAGTRAPGESFPERTIAGIGKDMTSRIDLLNGQADAARTGVESKMSTYIALYAADDDSLTASVEDYRYYLDELASLTQLAAVAATDAEYRRCLEQLLRSFLTIKRAIDTDASDIHDQLDRINAMLKGQQFGPKHGSLSLHADVRRPERAFWTQLIRVIGTLNDWKSADVNDSDASRKAFAACAPMVGLLRAELAQVKDANGVKSYGARNLDPRCRSSFYAIVHHADGPDERITSTGGRSGGALQELTSFVYGAALIYLLGGGLTSEPSYTTLFLDEALIKADGRYTQRALAVLPRLGFQVIVSAPESKTGEILEVSTKAYVTYKDPDTGLTSLREAVLHQNDMDDESSSDILKDDGVAE

SEQ ID NO: 34180 - protein, 541 aa, Bifidobacterium longum subsp. infantis; identical to SEQ ID NO: 30638

SEQ ID NO: 34181 - protein, 220 aa, Bifidobacterium longum subsp. infantis; identical to SEQ ID NO: 30639

SEQ ID NO: 34182 - protein, 1183 aa, Bifidobacterium longum subsp. infantis; identical to SEQ ID NO: 34179

SEQ ID NO: 34183 - protein, 541 aa, Bifidobacterium longum subsp. infantis; identical to SEQ ID NO: 30638

SEQ ID NO: 34184 - protein, 220 aa, Bifidobacterium longum subsp. infantis; identical to SEQ ID NO: 30639

SEQ ID NO: 34185 - protein, 1183 aa, Bifidobacterium longum subsp. infantis; identical to SEQ ID NO: 34179

SEQ ID NO: 34186 - protein, 541 aa, Bifidobacterium longum subsp. infantis; identical to SEQ ID NO: 30638

SEQ ID NO: 34187 - protein, 220 aa, Bifidobacterium longum subsp. infantis; identical to SEQ ID NO: 30639

SEQ ID NO: 34188 - protein, 1183 aa, Bifidobacterium longum subsp. infantis; identical to SEQ ID NO: 34179

SEQ ID NO: 34189 - protein, 541 aa, Bifidobacterium longum subsp. infantis; identical to SEQ ID NO: 30638

SEQ ID NO: 34190 - protein, 220 aa, Bifidobacterium longum subsp. infantis; identical to SEQ ID NO: 30639

SEQ ID NO: 34191 - protein, 1183 aa, Bifidobacterium longum subsp. infantis; identical to SEQ ID NO: 34179

SEQ ID NO: 34192 - protein, 541 aa, Bifidobacterium longum subsp. infantis; identical to SEQ ID NO: 30638

SEQ ID NO: 34193 - protein, 220 aa, Bifidobacterium longum subsp. infantis; identical to SEQ ID NO: 30639

SEQ ID NO: 34194 - protein, 1183 aa, Bifidobacterium longum subsp. infantis; identical to SEQ ID NO: 34179

SEQ ID NO: 34195 - protein, 541 aa, Bifidobacterium longum subsp. infantis; identical to SEQ ID NO: 30638

SEQ ID NO: 34196 - protein, 220 aa, Bifidobacterium longum subsp. infantis; identical to SEQ ID NO: 30639

SEQ ID NO: 34197 - protein, 1183 aa, Bifidobacterium longum subsp. infantis; identical to SEQ ID NO: 34179

SEQ ID NO: 34198 - protein, 541 aa, Bifidobacterium longum subsp. infantis; identical to SEQ ID NO: 30638

SEQ ID NO: 34199 - protein, 220 aa, Bifidobacterium longum subsp. infantis; identical to SEQ ID NO: 30639

SEQ ID NO: 34200 - protein, 1183 aa, Bifidobacterium longum subsp. infantis; identical to SEQ ID NO: 34179

SEQ ID NO: 34201 - protein, 489 aa, Xanthomonas citri pv. citri; identical to SEQ ID NO: 30402

SEQ ID NO: 34202 - protein, 233 aa, Xanthomonas citri pv. citri; identical to SEQ ID NO: 32320

SEQ ID NO: 34203 - protein, 1340 aa, Xanthomonas citri pv. citri; identical to SEQ ID NO: 30404

SEQ ID NO: 34204 - protein, 489 aa, Xanthomonas citri pv. citri; identical to SEQ ID NO: 30402

SEQ ID NO: 34205 - protein, 233 aa, Xanthomonas citri pv. citri; identical to SEQ ID NO: 32320

SEQ ID NO: 34206 - protein, 1340 aa, Xanthomonas citri pv. citri
MNSQSNLSPAQPGASLFAETLAEQRAQQFRMRRLQVHNWGTFNGLTEVPIAQKGFLFVGRSGSGKSTLLDAMSALLTPPSIVDFNAAAREAERSGRDRSLVSYVRGAWADQQDSASGEIATQYLRKGATWTALVLEYANAHGQTVSLIRLFWIAGSGNAAADVRRHYMVAPRRFDVATELDGFDLDLRKLKARLGDEVAHFDGFAGYAERFRHALGIGNEMALRLLHKTQSAKNLGDLNAFLRGFMLDEPRTFEAADRLVEDFAELDGAHHAVVTARRQVETLTPAREHHAALMALRHSVGELRELQLGVDSYREQQRLALLEERLQELDNQDRGLAGEEGQRRESLDNHEQKLVGLEREQRAAGGEQVEELERERARVERERDERLRRRAQIEQACRQLGTALAAGASGFAAQIAHAQTVLDNGKHDASALDDAIAERMGARRDDERRFAEIRTELEALKRAPSSMPAPMQALRARLCEDTGIAEAALPFVGELVQVREDQTAWRGAIERVLHGFAQSLLVDERHYAQVSEWVNRTHIGTRLVYFRVRRNDELHSRRVDPGALPGKLQLREHAFTEWLRNELTRRFDYACVDNAAALRNADRAITREGQVKHPGDRYEKDDRHAVNDRKRWLLGHDNRDKLKVFEREAQTLAQRIASCDADVAALRKQREQDQERQLAAHTLVERDWDEIDVGPKLQRLSDIDEQLVQLREGNSGLRALGQAIDTARTLREQAKRTYEDVRLERAQLARERVRLEQQQAACAGRAGSATLTPTQLQGLRERLAALTPLSLDNLEAHFRVVERGLAEQLADSQGRDSRLSAQLLECFRKYCQQWPEDSGDFTVSLASADDFLARLDRLESDGLPRHEHRFFDLLQTQSKNNLLALQRHTAEAHKGIKQRMDEVNASLEQVPFNRDTVLTIEVGDRRLAEVQEFQQQLRAVLSHQQTEDRALAEAQFSTLRALVARLGAQEPEARRWREQVLDVRLHVEFIGAELDAQTRAQVEIYRSGAGKSGGQRQKLATTCLAAALRYQLGGEDGELPRYCAVVLDEAFDKADNEFTALAMNIFENFGFQMVVATPLKSVMTLEPFIGGACFVEISGRHNSGVLLIEYDEQAQRLKLPERSRGDEPAVADATDAAPSIEAAAESAGVQGAASADGMATNGVPMHTASPATEETPPAAQETQTGQRKPAVATTSKQNKTAKTASSTRAAAQPQAKRPKKSPSRTPALAGKPASDKRPAGVPAVSSGVASRSNVGKTTRSSKTPGKPIAATSASNATSRKVAAASAALKTAAAKPRATAASTGQPARGAGKTTSTRAVAKPSPATTRGAKAGAPRSRGKR

SEQ ID NO: 34207 - protein, 489 aa, Xanthomonas citri pv. citri; identical to SEQ ID NO: 30402

SEQ ID NO: 34208 - protein, 233 aa, Xanthomonas citri pv. citri; identical to SEQ ID NO: 32320

SEQ ID NO: 34209 - protein, 1340 aa, Xanthomonas citri pv. citri; identical to SEQ ID NO: 30404

SEQ ID NO: 34210 - protein, 489 aa, Xanthomonas citri pv. citri; identical to SEQ ID NO: 30402

SEQ ID NO: 34211 - protein, 233 aa, Xanthomonas citri pv. citri; identical to SEQ ID NO: 32320

SEQ ID NO: 34212 - protein, 1340 aa, Xanthomonas citri pv. citri; identical to SEQ ID NO: 30404

SEQ ID NO: 34213 - protein, 489 aa, Xanthomonas citri pv. citri
MKHQARIAGYRQLREQPVWKLLAADHAPELIGLLQTVLMDGERRLPSAVLHARLQRQLDALRADELSRELPRTAQAYLAHWLAQGWLERRLPEGAAEEEYELSRAATQAIRFIVGLRESSSSATESRLSLVIQQLVQLAGQTEADPELRLAALRDERARIDAEIERVASGRVAALDGKRALERARDLIHLSDELAEDFHRVRDDFEQLNRQFRERIIDDEGARGDVLEQLFDGVDVIADSEAGRTFEAFWSLLNDTQQSSQLDQALDALLARGFARKLDRRERAFLRGLTGTLLERGGEVHTVMQHFARSLRGFVQSRGYLEQRRLNQLLKQAQGEALQLRDSLHATTATGYTQPLSSSRLRSLSQWRLHDPRLTQVDGRVQAADAAEISLDSVGDLVAQSEINVRSLRNDLHELLGQRPRLTIGDALQQRPAVQGLGSVIGYLSLGTRHGMVIEGQMETVQWEGSDGAVRRARIPLVWFTREKRNELV

SEQ ID NO: 34214 - protein, 233 aa, Xanthomonas citri pv. citri; identical to SEQ ID NO: 32320

SEQ ID NO: 34215 - protein, 1340 aa, Xanthomonas citri pv. citri; identical to SEQ ID NO: 30404

SEQ ID NO: 34216 - protein, 489 aa, Xanthomonas citri pv. citri; identical to SEQ ID NO: 30402

SEQ ID NO: 34217 - protein, 233 aa, Xanthomonas citri pv. citri; identical to SEQ ID NO: 32320

SEQ ID NO: 34218 - protein, 1340 aa, Xanthomonas citri pv. citri; identical to SEQ ID NO: 30404

SEQ ID NO: 34219 - protein, 489 aa, Xanthomonas citri pv. citri; identical to SEQ ID NO: 30402

SEQ ID NO: 34220 - protein, 233 aa, Xanthomonas citri pv. citri; identical to SEQ ID NO: 32320

SEQ ID NO: 34221 - protein, 1340 aa, Xanthomonas citri pv. citri; identical to SEQ ID NO: 30404

SEQ ID NO: 34222 - protein, 489 aa, Xanthomonas citri pv. citri; identical to SEQ ID NO: 30402

SEQ ID NO: 34223 - protein, 233 aa, Xanthomonas citri pv. citri; identical to SEQ ID NO: 32320

SEQ ID NO: 34224 - protein, 1340 aa, Xanthomonas citri pv. citri
MNSQSNLSPAQPGASLFAETLAEQRAQQFRMRRLQVHNWGTFNGLTEVPIAQKGFLFVGRSGSGKSTLLDAMSALLTPPSIVDFNAAAREAERSGRDRSLVSYVRGAWADQQDSASGEIATQYLRKGATWTALVLEYANAHGQTVSLIRLFWIAGSGNAAADVRRHYMVAPRRFDVATELDGFDLDLRKLKARLGDEVAHFDGFAGYAERFRHALGIGNEMALRLLHKTQSAKNLGDLNAFLRGFMLDEPRTFEAADRLVEDFAELDGAHHAVVTARRQVETLTPAREHHAALMALRHSVGELRELQLGVDSYREQQRLALLEERLQELDNQDRGLAGEEGQRRESLDNHEQKLVGLEREQRAAGGEQVEELERERARVERERDERLRRRAQIEQACRQLGTALAAGASGFAAQIAHAQTVLDNGKHDASALDDAIAERMGARRDDERRFAEIRTELEALKRAPSSMPAPMQALRARLCEDTGIAEAALPFVGELVQVREDQTAWRGAIERVLHGFAQSLLVDERHYAQVSEWVNRTHIGTRLVYFRVRRNDELHSRRVDPGALPGKLQLREHAFTEWLRNELTRRFDYACVDNAASLRNADRAITREGQVKHPGDRYEKDDRHAVNDRKRWLLGHDNRDKLKVFEREAQTLAQRIASCDADVAALRKQREQDQERQLAAHTLVERDWDEIDVGPKLQRLSDIDEQLVQLREGNSGLRALGQAIDTARTLREQAKRTYEDVRLERAQLARERVRLEQQQAACAGRAGSATLTPTQLQGLRERLAALTPLSLDNLEAHFRVVERGLAEQLADSQGRDSRLSAQLLECFRKYCQQWPEDSGDFTVSLASADDFLARLDRLESDGLPRHEHRFFDLLQTQSKNNLLALQRHTAEAHKGIKQRMDEVNASLEQVPFNRDTVLTIEVGDRRLAEVQEFQQQLRAVLSHQQTEDRALAEAQFSTLRALVARLGAQEPEARRWREQVLDVRLHVEFIGVELDAQTRAQVEIYRSGAGKSGGQRQKLATTCLAAALRYQLGGEDGELPRYCAVVLDEAFDKADNEFTALAMNIFENFGFQMVVATPLKSVMTLEPFIGGACFVEISGRHNSGVLLIEYDEQAQRLKLPERSRGDEPAVADATDAAPSIEAAAESAGVQGAASADGMATNGVPMHTASPATEETPPAAQETQTGQRKPAVATTSKQNKTAKTASSTRAAAQPQAKRPKKSPSRTPALAGKPASDKRPAGVPAVSSGVASRSNVGKTTRSSKTPGKPIAATSASNATSRKVAAASAALKTAAAKPRATAASTGQPARGAGKTTSTRAVAKPSPATTRGAKAGAPRSRGKR

SEQ ID NO: 34225 - protein, 489 aa, Xanthomonas citri pv. citri; identical to SEQ ID NO: 30402

SEQ ID NO: 34226 - protein, 233 aa, Xanthomonas citri pv. citri; identical to SEQ ID NO: 32320

SEQ ID NO: 34227 - protein, 1340 aa, Xanthomonas citri pv. citri
MNSQSNLSPAQPGASLFAETLAEQRAQQFRMRRLQVHNWGTFNGLTEVPIAQKGFLFVGRSGSGKSTLLDAMSALLTPPSIVDFNAAAREAERSGRDRSLVSYVRGAWADQQDSASGEIATQYLRKGATWTALVLEYANAHGQTVSLIRLFWIAGSGNAAADVRRHYMVAPRRFDVATELDGFDLDLRKLKARLGDEVAHFDGFAGYAERFRHALGIGNEMALRLLHKTQSAKNLGDLNAFLRGFMLDEPRTFEAADRLVEDFAELDGAHHAVVTARRQVETLTPAREHHAALMALRHSVGELRELQLGVDSYREQQRLALLEERLQELDNQDRGLAGEEGQRRESLDNHEQKLVGLEREQRAAGGEQVEELERERARVERERDERLRRRAQIEQACRQLGTALAAGASGFAAQIAHAQTVLDNGKHDASALDDAIAERMGARRDDERRFAEIRTELEALKRAPSSMPAPMQALRARLCEDTGIAEAALPFVGELVQVREDQTAWRGAIERVLHGFAQSLLVDERHYAQVSEWVNRTHIGTRLVYFRVRRNDELHSRRVDPGALPGKLQLREHAFTEWLRNELTRRFDYACVDNAAALRNADRAITREGQVKHPGDRYEKDDRHAVNDRKRWLLGHDNRDKLKVFEREAQTLAQRIASCDADVAALRKQREQDQERQLAAHTLVERDWDEIDVGPKLQRLSDIDEQLVQLREGNSGLRALGQAIDTARTLREQAKRTYEDVRLERAQLARERVRLEQQQAACAGRAGSATLTPTQLQGLRERLAALTPLSLDNLEAHFRVVERGLAEQLADSQGRDSRLSAQLLECFRKYCQQWPEDSGDFTVSLASADDFLARLDRLESDALPRHEHRFFDLLQTQSKNNLLALQRHTAEAHKGIKQRMDEVNASLEQVPFNRDTVLTIEVGDRRLAEVQEFQQQLRAVLSHQQTEDRALAEAQFSTLRALVARLGAQEPEARRWREQVLDVRLHVEFIGVELDAQTRAQVEIYRSGAGKSGGQRQKLATTCLAAALRYQLGGEDGELPRYCAVVLDEAFDKADNEFTALAMNIFENFGFQMVVATPLKSVMTLEPFIGGACFVEISGRHNSGVLLIEYDEQAQRLKLPERSRGDEPAVADATDAAPSIEAAAESAGVQGAASADGMATNGVPMHTASPATEETPPAAQETQTGQRKPAVATTSKQNKTAKTASSTRAAAQPQAKRPKKSPSRTPALAGKPASDKRPAGVPAVSSGVASRSNVGKTTRSSKTPGKPIAATSASNATSRKVAAASAALKTAAAKPRATAASTGQPARGAGKTTSTRAVAKPSPATTRGAKAGAPRSRGKR

SEQ ID NO: 34228 - protein, 489 aa, Xanthomonas citri pv. citri; identical to SEQ ID NO: 30402

SEQ ID NO: 34229 - protein, 233 aa, Xanthomonas citri pv. citri; identical to SEQ ID NO: 32320

SEQ ID NO: 34230 - protein, 1340 aa, Xanthomonas citri pv. citri; identical to SEQ ID NO: 30404

SEQ ID NO: 34231 - protein, 483 aa, Geoalkalibacter subterraneus
MSLDYTTLDLLRKNHPAWRLLRSDHAPLVASFLHRVFIAPNVRTMAQADLAEALEDELFALRDRYGEEAFPRSAAAYLNDWADNEKGWLRKFYPAGSDEPHFDLTPATEKAIAWLESLTERAFVGTESRLLTLFELLRQMSEGSQTDPETRIAELHKRRNEIDAEIARILDGDIPLLDATALKDRFQQFLQLARELLTDFREVEHNFRTLDRRVRERIALWEGAKGTLLEEIMGERDAIADSDQGKSFRAFWDFLMSQRRQEELSHLLEQVLELEPIAEMHPDARLRRVHYDWLEAGEHTQRTVARLSQQLRRFLDDQAWLENRRIMDILHDIEGRALAVRETPPPRDFMELAESAPRVDLPFERPLYSPPVKPVIADVELESGETDIDTAALYAQVVVDRAELLRNLRQALQERSQVTLGEVVARHPLRHGLAELLTYLHLAGDWPEAVVDEEQQDLIEWRTEEGTVRRARLPRIVFLRKNG

SEQ ID NO: 34232 - protein, 1121 aa, Geoalkalibacter subterraneus
MSETLELEFIGDDKLAGFRLQRLEVLNWGTFDSKVWTLNLDGRNSLLTGDIGSGKSTLVDAVTTLLVPSQRISYNKAAGADARERSLRSYVLGYYKSERQDTLGSVKPVALRNHNSFSVILGVFHNAGYNKTVTLAQVFWMKDVQGQPARFYVACERDLSISADFSRFGTDIAQLRKRLRGDKAELFDSFPPYGAWFRRRFGIDNEQALDLFLQTVSLKSVGNLTDFVRNHMLEPFDVAPRISALIGHFDDLNRAHEAVLKAKRQVEMLEPLVADCERHGEMVQSRDNLRACREGLRPWFAGLKMALLDKRLESLDEELQRHQTRIARLEVQRHEQQVRERELRRTIAEQGGDRIETLAEEIRRKQGELQRCRHKAERYAELMQGLELVPADNEEDFLVRRRQCADLREQTLENEARIQNDLNEAGVSFAQLRSEHEKLQEEIRGLKARRSNIDEKQVAVRRALCRALDLAEDDMPFAGELLQVREDERDWEGAVERLLRNFGLSLLVPDQHYARVAEWVDATHLRGRLVYFRVRERAPAELPSLHPHSLARKILVKPDSAFYDWLEREVAHRFDLACCNDQEQFRRETKAITRAGQIKAPGERHEKDDRHRIDDRSRYVLGWSNAAKIAALEEKARLLEMELTETGGHISSLQKEQNVLKERLGLLSKLDEYPDFGELDWRPLALEISRLEDEKADLEAASDVLKTLADQLQEVEKALAETDQHLKDRYDKRSRTEQKRSDAQELRRQAEAVHQDATPDQNAQFDHLAVLRDEALGDQQLTVESCDNRERDMRDWLQARIDAEDKKLGRLRDKIIDAMRQFQTDYPLETQEVDVAVEAAGDYRAMLDQLQADDLPRFEARFKELLNENTIREVANFQSQLSRERETIKERIARINESLIQIDYNPGRYIVLETQAAPDVDIRDFQAELRACTEGALTGSNDAQYSENKFLQVRRIIERFRGREGQTEQDRRWTAKVTDVRNWFVFAASERWREDDNEYEHYADSGGKSGGQKEKLAYTVLAASLAYQFGLEWGAVRSRSFRFVVIDEAFGRGSDESAQYGLKLFAQLNLQLLIVTPLQKIHIIEPFVAGVGFVHNENGRTSVLRNLSIEEYRAEKQRQQA

SEQ ID NO: 34233 - protein, 391 aa, Geoalkalibacter subterraneus
MSWTTPADVRAQVRRLWDRGLLPAQLVGGEELFPRRITLKGPGSKELAERFDEVRNWIARLDGEAKHYRLVWRNVNHRILGANAVPAEIWVDSLDDALSLTGRQKDAQRLAAIVEETRKSLPQLIPWLIKRPLRALELADDWTRLLAVAHWLREHPRPGIYLRQIDLAGVHTKLIERHRGVLSELLDLVLPADAIDPSHSGVAGFCRRYGFRDKPLRVRFRVLDSSLRLLPGQEEQDITLTQRSFSSLELPVSKVFITENEINFLAFTEVPEALVIFGAGYGFENLASAPWLNEKEIHYWGDIDTHGFAILNQLRRFFPHARSFLMDRRTFLGHRRLWGQEMKPETANLDKLNKEEAALYDQLRDNHWGERIRLEQERVGFDYLCGALDCL

SEQ ID NO: 34234 - protein, 489 aa, Xanthomonas fuscans subsp. fuscans
MKHQARIAGYRQLREQPVWKLLAADHAPELIGLLQTVLMDGERRLPSAVLHERLQRQLDALRADELSRELPRTAQAYLAHWLAQGWLERRLPEGAAEEEYELSRAATQAIRFIVGLRESSSSATESRLSLVIQQLVQLAGQTEADPELRLAALRDERARIDAEIERVASGRVAALDGKRALERARDLIHLSDELAEDFHRVRDDFEQLNRQFRERIIDDEGARGDVLEQLFDGVDVIADSEAGRTFEAFWSLLNDTQQSSQLDQALDALLARGFARKLDRRDRAFLRGLTGTLLERGGEVHTVMQHFARSLRGFVQSRGYLEQRRLNQLLKQAQGEALQLRDSLHATTATGYTQALSSSRLRSLSQWRLHDPRLTQVDGRVQAADAAEISLDSVGDLVAQSEIDVRSLRNDLHELLGQRPRLTIGDALQQRPAVQGLGSVIGYLSLGTRHGMVIEGQMETVQWEGSDGAVRRARIPLVWFTREKRNELV

SEQ ID NO: 34235 - protein, 233 aa, Xanthomonas fuscans subsp. fuscans; identical to SEQ ID NO: 33812

SEQ ID NO: 34236 - protein, 1340 aa, Xanthomonas fuscans subsp. fuscans; identical to SEQ ID NO: 33813

SEQ ID NO: 34237 - protein, 495 aa, Corynebacterium glutamicum
MTVVSHALGFKRFRQESLELSLLRSDNFPVVLAVVAQYFPQGAIAKPASELYQLLSDDFRVLREEGFELPKSPSDYVSDWVKSRWFVRRPGSSQTGETVEPSEELLAVLDSVQRWDNPHRSISASRIESLTQALQTLALESDPSTAKRLAELERERDRIERQIEAVHAGEFEVLTTVQIGDRVADILDLAASIPADFARVRHELSDLNRKLRRQLLDPEDSRGDVLEEIFRGVDLIGDSDAGRSFNSFFDVLLDRERSSLIDRWIREVLGRDEAIDLDAKLRTGLYRIFRDMEDASFEVNGEMTGLARSLRHYVTTEEFAESRRMIQLLRDTRSAAAKAAEAGEVTSLNHMDTPLVRIGMDVRSIAGLKLKNPGEERVEDLPEPVEEQELDTEVLLEQIRASEIDFEELEEAVGLVLAEQSHATITEVLEHFPATQGLASIVGLLYLAMRDGVPTGHAQIVEWESESVLHRRRITGWQFIRGLNSEDLAESEMNK

SEQ ID NO: 34238 - protein, 212 aa, Corynebacterium glutamicum; identical to SEQ ID NO: 31489

SEQ ID NO: 34239 - protein, 1111 aa, Corynebacterium glutamicum
MTSEQALDPIHPGQFRLSRIQLINWGTFHGTVDIPVTREGILVTGGSGSGKSTLIDAITAVLLPQGKLRFNSAAQANTPRNKGRSLVTYIRGAWRAQEDPLQDQIVSTYLRPRATYSLVGLTYSNGEGVEHTLVAIFYLKSGHNLTSDISSYYGVFPVDQDINALLDFLKEGIDKRQIRAAFKDATFSEQHSVFSGRFRSRLGISSEEALLLLHRAQSAKDLQSLDDLFRDYMLVEPDTFSIAKTAVEQFQDLEGAYEQVEDIKRQIHTLDPLVQLKNRREKAQQSKDHANALKKALPTVGNRIKKEEQETLVRQFTVEQTQAKSKVESAKIETDRAREMETLAHDNIKQIVGAQHGILSAKREGAVDKRRTISAARAGLDALVKGLGGTAPESAEELLELNNAARLTVDEYPAAREALESAGQRNVEDRTRAVDEFKAADQELSSLSKGSSNIEYRLLQVRENLCQDLGVSPRDMPFAGELIDPNNSEWEPVVQRLLGSFAAEMLVPHGLLPRVRDWVNAKHLAALLKFNGVVTTGEYKTSRFPADSLIRKVDVVESPFRDWVNQELGKRFNIRCVRTPEELSALGPRDQGVTILGVRKFAQQTGDPTTRWEKDDRRKLGDRSTYRLGSTNDAKVETLREAVKAGKAVVQAADNRIAANRAELRELERQYQASQEILKVSWAQIDVESADAAIAELDRLLEELNSTPEATELSARHEAAKQTLARVSDLLVAAQSEETVASMNLKRAETELKRLESLPVAEVSEEIAREVEKLFLANTRRVHAANVDEQTIALREDLDKQIDANEAELRRCENQIVGILRSYIETWPANRADLQAEPEFVGEAINRLGELRSDRLAEFTAKFLGLMNEMSTRNLGQISRRLRDARREIEERIEPINASLAQSEFNEGRFLHIDIRDQSGPIVREFQQKLDAATSGDLGTSTEKQAFARYALIAEIISKLASHDSADARWRNTVLDTRRHVRFIGLERDSDGATVNTYVDSASLSGGQAQKLVFFCLAAALRYQLAEPGAHYPTYATVILDEAFDRADPAFTRQTMNVFHSFGFHMVLATPLKLIQTLGDYVGSTIVVSYTEKPNAQGAIQGNSSFSRIEK

SEQ ID NO: 34240 - protein, 368 aa, Corynebacterium glutamicum
MPLLIDDALHRSKKYFHAHLSELLLGEFAGLSLPLHPPTAAKAAADIDATREFIRQWEGRDDVEYAIRNWSPVGLGKTEVPVRLTLNTIEELVVFAQVEDEWSSLHERFSQLSGFTSEVVAKHVSLWRSLSNEDLSKAELVVEWFLENPNSGLLKRAVAVEGVHTKWLENHRVLIETLVADKRGEPGRADLGLGDAEARVRLRFHSVDAPAGLTDIEVPLSNLCELQEPQVILMVENLDSFLALLTWPGVTIAWGAGYRAVDIVRGPYFSNGRLLYWGDLDLDGFKILDGVRSHVPHTESVLMNPETVSRWRYLGVADREFKAESFDNLHDFESDALDLLITDGELRIEQERIRLDVAVEEIEKVIRG

SEQ ID NO: 34241 - protein, 486 aa, Pseudomonas stutzeri; identical to SEQ ID NO: 32951

SEQ ID NO: 34242 - protein, 235 aa, Pseudomonas stutzeri; identical to SEQ ID NO: 32952

SEQ ID NO: 34243 - protein, 1124 aa, Pseudomonas stutzeri
MISEPQTASLFAREQFRMTRLQVYNWGTFSDLHDIPISERGFLFVGRSGAGKSTLLDAFSALLVPPRWIDFNAAAREADRSGRDRNLVTYVRGAWAEQKDGESGEIATRYLRSGTTWSALALTYQNALGQSVVLVQVFWLRGNANGSTDVKRHYLVLERAFDLRELEDFGQSNFDIRKLKQSFPEAFARDEFRPYCERFCRLLGIESEMALRLLHKTQSAKNLGDLNTFLRDFMLDKPETFEVADRLVSEFGELNAAHQAVVTAREQVQTLAPAREQYQRRDSLMLQRNGLDELRLGVDGYRETRRIELLKQHVESLEVQASGSEGEVSRRQSILDNHTTTLRNLERQHREAGGDQIEQWEAEKSGLEGQRTDRLRKRGQAEDACKKLGWSLPDSPQAFAELLGNARQEVENWEQRSNENREEQFRLAGQKKDAETAFSQAVKEVQALQRQPSSIPADMLEMRRDIAAAIGISESALPFVGELIEVKSDEAEWQGAIERVLHGFALSLLVDERQYSALANYINNTHLGQRLVYYRTGRSETWQAKPIGANSLVLKLNVKEGTYADWLQAELRQRFDYACVDSIQSFRSADRAITREGQVKHSKTRHEKDDRRSVGDRRNWVLGFDNREKLGLFQAQAQELAETITRLRGEIETLADQDKNRATRAMQCQTLVNLQWQEIDVVPLLDRISTIEQQIREAREGNTALLQISERIDRQKNLVDQADKDLREAKVAHDSVLKQINDSTQKLESLLQDASRVPLTPHQIKGLDERFTKQSDAIRLESLDKVATAVERGLNTEIGEIKDEIGDCEKEIEARFADFKRQWPMDAVDMDTSLASAADFFAKLVRLETDGLPAYEQRFFELLQNQSHQNLAALSTYLNDARKAILERMDLVNDSLGQVPFNQSANQRTYLHIDASDRQLVDVKEFKQEIQQALSHAWTEDREFAEARFLALRRLVDRLASQDPEQKRWRETVLDVRQHVEFIGREIDESGVEVEIYRSGAGKSGGQRQKLATTCLAAALRYQLGGNDHGVPMYAPVVLDEAFDKADNEFTALAMNIFTNFGFQMVVATPLKSVMTLEPFIGGACFVDISDRRVSGVLLIEYDGDRQRLKLPEHAREEASVEAS

SEQ ID NO: 34244 - protein, 387 aa, Pseudomonas stutzeri; identical to SEQ ID NO: 32954

SEQ ID NO: 34245 - protein, 450 aa, Pseudomonas stutzeri
MEDALQALSEMLAAYASQELYEIDPDATHLQAGRELREWIKRRLVVEREGRIYATDALESAIQFVDSLDSRIMTSTASRLSVVQREIENLETGLNPSPTGRIASLRRRIQDLEHELAQVEAGHVVVLDEAQAIEGIREVYNLATSLRADFRRVEDSWREADRALRHSIISEQSHRGEIVDRLLDGQDALLNTPEGRVFESFQQQLRQSAELETMRERLRTILRHPAVPKALNRPQQRELRWLALRLVRESQAVLQARARSERDVRGFMKTGLAAEHHRVGQLLNDFFNLALSVDWQRQSERRKPACLPPVGVAITGVPAIERLRFKTLDDDDTGELDLSLKPAGLEQIDDDFWDAFDGLDREALIHDTLAVLVEQGRPVSLVELASLLPPVHDLETFALWLAMAREAGIEVLTEERQLVELVDEDEQRWRFNLPYVGLDHEALKDIDWGL

SEQ ID NO: 34246 - protein, 220 aa, Pseudomonas stutzeri
MDDEQPLMSAAVQVDERRTPQRVREAVQEMLKYGLLEESHKPNLYRSALSNIEAVDRILEPLDLAMGVDEVRGLVFVTVRQGEVAEQDDWSHPLVRRQRLNLEQSLLIAILRQHFIAYEQESGTGASQALVAVDELIPQLQVYLGELGSEAKERNRIITLLDQLKGHGLVSALDAHDRVIIRPIITHLANPENLQALVAWLREQVEGAATPAAGAEEDEA

SEQ ID NO: 34247 - protein, 979 aa, Pseudomonas stutzeri
MGAVLWFEGTSSSASDLKKLWLLSESPEQTLEHWLSQHHAGGMRALRQMEKDGTGIWPYPSKKAFLARLRDYFEVGENAFTLLNRAAGLKQLNSIDEIFRELVLDDRSAFGRAAEVATSFDDLTDIHRELETARKQQRSLQPVADGWERYKALQEQLQDKQVLEGILPVWFAEQGYRLWLAETNRLEKEHKQAELDREHCERRLDAQKGVVDQQRQRYLRVGGAGIDQLRERIAEWGKVCGRRSLQAEQYRRLAKGLGLSEELSAASLKENQEQITERLEILTQQLDGAREQVFKAGLAQQELNGRLQTLQQERAEVERRPGSNLPGLFHAFRSDLAQELGLDESTLPFVAELVQVKPEELAWRGAIERAIGSHRLRILVPQGSSQAALRWVNQRHNRLHVRLLEVREPASRPVFFDDGFTRKLTFKEHPYREAVKALLADNDRHCVESPEQLRHTPHAMTAQGLMSGKERFFDKQDQKRLDEDWLTGFDNRDRLAFLAEQIHEVNEQLAPAKLALDAAQDDVRQLETQASLLKRVEELQFEDIDLPGAESQLESLRTQLATLTRPDSDLALVKVELDEAETLLESLDQQLRQLIEQCVQLKIQFDQAASATRKAYNGAEKGLNDTQRELAKEHFPTLAPEDLGDIIELERKHTRELQQQLKSLGEKLGHEQTELAKRMSDALKVDTGALAEVGRELVDVPRYLERLRVLTEEALPEKLKRFLEYLNRSSDDGVTQLLSYIDHEVSMIEERLDDLNSTMQRVDFQPGRYLRLVAKKVIHESLRTLQQAQRQLNSARFIDDEGESHYKALQALVGLLKDACEHSRNQGAKALLDPRFRLEFAVSVIDRESKSVIETRTGSQGGSGGEKEIIASYVLTASLSYALCPDGSSRPLFGTIVLDEAFSRSSHAVAGRIIAALREFGLHAVFITPNKEMRLLRHHTRSAIVVHRRGVESSLVSLSWEALDEHHQQRIKAMHEVAH

SEQ ID NO: 34248 - protein, 385 aa, Pseudomonas stutzeri
MKSPTDIGRSLARQWHRSSVRLERLLNPGSWPQCFNIGKPSARVFAENIHAVLQHVENWRSVKVGKVGWELVSYREGLAPISLPMRWHLRSPSEWIAATNDPTVSQEYAQLEYLVEQVDSAFHALLVAQRSLWLTKPSEEVVATAQLATRLSPGCARGRPLRLLAEHGVDTKFFERNASLLTRLLDERFEGAASEQGLTTFLDAFEESSHWVLVVPLQPELLPFKRIRLTTAELAETPLPGSRLLLVENEQCIHLLPEALPDTLAVLGSGLDLQWLASSHLAGKQIAYWGDMDTWGLLMLARARLHQPAVEALLMEQELFEQHSPVSAVVEPTKALDSAPPGLLADEADFYRYLQVQERGRLEQEYLPKAQVERAIEQWARKIPV

SEQ ID NO: 34249 - protein, 499 aa, Bacillus pumilus
MQYINKPTGARNSILTRECVTSMKLFDIIPDRLFTLLVGSNKQIYAEALLLLYDQAQTERFGIRYNVMRDLLQEMLDTRRELGEDIAVLDTEDEESERSDDLRQINMEDMTRAQANTMLRRLEERKWIDVETRAQFERFIVLPHYASRLIGVLKELCAARTVEYQRFAFLVYQSLTGEGARLQPCSAVMSAAEVSGQFRQELVALYNNMKHLMEQVVQKTSIQDVLDHHFDHYKTQIIDKSYHRLKTSDHVARYRMQILNTVQQWLLDRQQLEEAALDGVKSGLYTSVDEAGQAVKQALFFIDETFNGLDELFYQIDVRHNQYLRSSYDRARYLSQQNEGIDQQLARLIERLSKDLSMDGTESLFALRQTRALSEQSLLPPRRKRAPHQPDVHVVVEMPDHLLEELRTKNLERMRKAITRKKVDDYVTNRLGGRSEMEMAELAPENAEQFIMLGYIYLYGSDGGSNFLVRRSDGRNILTIGGYRFDNHTIVKKKGGPKR

SEQ ID NO: 34250 - protein, 202 aa, Bacillus pumilus
MMFDELSESEQAKVRHVLNRLFEVNLLVRDKDREAYAIIRRHSQALEAYFQFLGWELTVDERHECVFLHLPDGRLRRRMDREQTLWLLVLRLLYEEKRQGLSLADYPMVTLHEIRSKFETFRIEWVGRTALDKLIRLCAQFQLLEAMDEDHRADDARFKLYHTWMYVVQADEIAQLTERLERYDAAEEGGLLDEMDDTAPVD

SEQ ID NO: 34251 - protein, 1170 aa, Bacillus pumilus
MKWMTRLRLINWHYFKDVTMEFGRQTLITGQNAAGKSTIIDALQVLFVVDQRLIRFNAAAHDEAKRSFENYLMGKIGSDERSYVRDGDFTTYIIAEFRDEDKKESFVIGAAIDVYRDRSYEEEYFILAACKLDQLDFINPEGQLLNREGFKRRYGPGVGTGLGEVDQHLGVRQSSRGRVLFERNKSNYQKALLARLGQLQDRFFHIFTKALSFKPIRNIRTFVYDYILDKRELQLDLMKQNFEIHERYRQELELLQKRKMQLQGIRDSYQEYARLKETIKEQDYVIRKLKVLYETENLEQQERLKHQAEEKSNRLLESIGLAEVKLNEAREQSQLAYQRWQNHADEKRKRELEKETRELETKRVDMENLLSIYCAKLDRERQLLGNFSTWTDGEYWSWEIGEQERIGQYTEHLAGLLAIVDKGNAEELDEEIWESRLDEIGEARSGWYDRLLLGEDRLLETLDAAEEQATELENIICDLEQKRRSYSEPVRQLKALLEEHLSGRSAVWIFCEEAELVDEGWRDALEGYLNTQRFDLLVEPECFAEALGIYEREKWTRKLEGVGLVDTEKERKYLGTAEEGSLAYELIAEHPVVRARVEHLLGRVMKAKDEQELRRHRTAVTSSCMVYSNLVARQIPKKHYEIPYIGAKAIAHQLEIRKLELQEVRETVLRLRELATAFREWMDRLRDKDAVYNSLSSHLTLPRELEACRYRQEQVQLEWEGLNLAEAERLKAEYEHWREVEKQWTEKWGGLLEDKGTVEAECKQLAGILLVQQNKVRDAEVILEQWLGEHGVESEQRAKQRYEEAERSTTVSTFQKLQNWERSSKGIQTKRDDQFNDVAKLRQKYNVDHAFSGDANDSENDAYDRLLDTIEHLNIPEYQQKVTEALAESEEEFKSHFVFKLREAIEMARREFQQLNYALRNFPFSDDKYHFEVSPSERYKKFYEAVMDPLLMEKGSLFDLPENDRTAVLHELFEMLVRGEAGQMEEYADYRQYLDFDIIVSSSSGGRYRFSQVLKEKSGGETQTPFYIAILASFHHLYSNKSSRLVVFDEAFNKMDEQRIQSSLRLIKQMGLQLVAAVPDEKMQHMAPEVTTTLFVSKHDYQCFVDMIDRWAPDEAETSPAFHNIETIEKSVNPTEEQISDTDSLSSKLGESTESPTFDSERHGRQGTLF

SEQ ID NO: 34252 - protein, 423 aa, Bacillus pumilus
MCMEANEISFKQKFGKDLLTLLLSKYEQSQSFVTGIPGKMRPQLTIGKSPFARDYNDEMDFRKRHWMNERLVELEQEDVVQLTMAKYRSDEIEKVYLQWQAIEEAYRISGRTPLRTKMKQLRASLIPLTSHPWGWVQKWRQEMDDSLAQGKAVRLDPDDVQGTVDLVHTLNELPLLGDRAVPIRIFSQWLFRDTKHLERQTLKRLISLAKQASGEQRETEEEWLDWLGLTRNPQSVFLCGSLVFRTREGKQVDTSAFPGGLGISGETIDMITDFFMPARQILTIENLTSYHHYLEQPSVRADEVLVIYTGGYPNRVLQSFLRKLSQVVNEASNPPELFHWGDIDLGGIRIFKWIQSNFFSELRPYRMGVDTLLQYESQAAPVSEDYANQLLHALSEPQYADWLPVLETMIERRIRLEQECIID

SEQ ID NO: 34253 - protein, 492 aa, Comamonadaceae bacterium A1
MTMEHATLAMLRERHPAWRLLASAHAPLLASFLHRVFVAPNVRVMNEADLAEALEDELYALREQIGADAYPKAASEYLNDWAAPDKGWLRKFYKPGTDEAQFELTPATEKAVAWLLSLIERPFVGTESRLLTLFALLEQISDGTEADPVKRLDELRKKRDALDAEIARVQAGELPLLDDTAVKDRFQQFQQLARELLADFREVEHNFRLLDRKVREKIALWDGSKGALLDQIMGERDAISDSDQGRSFRGFWDFLLSSRRQEELAERLDRALALPAVAALKPEPRMRRVHHDWLEAGEHTQRTVAQLSQQMRRFLDDRAFLENRRILDLLRGIESRALGLRQALPAGTVMHIDAMGAEIELPLERPLHTPSAKPLLAQLALEVGADEIDTARLFDQIVVDKARLRSAVQGALRRQPQITLRELLHAEPLRQGLAELVAYLELAHADPGSDALGGLRAVVDEAVQEPIRWQAHNAAGETVTRQARLPRVIFTR

SEQ ID NO: 34254 - protein, 234 aa, Comamonadaceae bacterium A1
MNDPLDHDLALAAAPSAAPAAPELSQLLLHLLKGVLYREEDERLWASLLRLQARVREQAAVLLLDLVQDEAEGHAFLKSRPDPDEAEGAPRLPRLVARRPLSYPVSLMLALLRKRMAEFDAGAGDTRLVLSRDEIAELVRVFLPDGTNEARLIDQVDATLSKVVELGFLRRLKPTAGSGQTARQERSHYEVRRILKAFVDAQWLAEFEARLEGYRTALSGSGSEPGAAREATDA

SEQ ID NO: 34255 - protein, 1138 aa, Comamonadaceae bacterium A1
MLEAPTIGLDFVADDSRVGFRLQRLEVLNWGTFDQRVWRYELDGRNGLLTGDIGSGKSTLVDAITTLLVPAQRVAYNKAAGADARERSLRSYVLGHYKSERNEVTGSSRPVALRDASSYSVILAVFRNEGYDQAVTLAQVFWLKDPQGQPARLFVAAERALAIADDFSGFGSDIAGLRKKLRGAGCELFEGFPPYGAWFRRRFGIEHEQALELFHQTVSMKSVGNLTDFVRSHMLEPFDVASRIEALIRHFDDLDRAHQAVLKAKRQVELLAPLVADGQRHKALLAEIQGWREGREALRPYFARLKGELLEHRLALLAQDAARLEAQIERLDAQREAERLEVGQLERALRDNGGDRLEELAAQIRRLEQDKVQRQKRSDRLHELLARIDEAAPGDEAGFLAQQQGIAQRAEGLREQIADLDNREREQDFAFRKGREEHAALSDEIESLERRKSNIDAAQVRIREALCAALAIDEGELPFAGELMQVRDDERDWEGAAERLLRGFGLALLVPEAHYPALAQWVERQHLGARLVYFHVRQRKAAQGAASPQPQSLLRKLLIKPDSPHAEWLEQELRNRFDVSCCDSDEQFRREARAITRAGQIKDPTGRHEKDDRRRIDDRSRYVLGWSNADKLRALRDQRQRLEQQLATLGQGIAALQQARKELRGRLDALSKLEEFTRFADIDWMSLAREMAALTEERARLEAASNTLQELGRQLQAVQGRLTDTENKRAEALDKRGEGRAKRAAAQELRDQARAASQAMPLEAQQIERLDGWRAQALGAHQLSVESCDNREQELRKWLQDRIDAEDKRLARLSERIINAMRGVKEEFKAETSEMDVALAALPEYERMLSGLKGDDLPRFEARFKELLNVNTINEIAHFNAQLARERETIKERVNLINQSLQAIDYNPGRTIKLLAQPSPDAEIRDFQQDLRACTEGALTAAADEQYSEAKFLQVKAIIDRFRGREGLADADRRWTAKVSDVRNGFLFSASERWRADGAEHEHYSDSGGKSGGQKEKLAYTVLAASLAYQFGLEWGAVRSRSFRFVVIDEAFGRGSDESAQYGLRLFQQLNLQLLIVTPLQKIHIIEPYVASVGFVHNEGGRDSRLRCLSIEEYRAHKAAETAPGLGDASAAIGGAPA

SEQ ID NO: 34256 - protein, 402 aa, Comamonadaceae bacterium A1
MSWTLPADLRAQVQRLWERGDLLRAAVDAGAVAWPLRLSLKAPSAADLSERFEAVRDWVRAISDTEQVRIEWRDWNHRVQGAQRLPAALWLDSLPAALAFIGKARQAQRFQALWQQTAAAQPALLAWLRKRPLQALDLAERWERLLAVVAWLQAHPRPGVYLRQVDAPGVHSKFIEAHRGVLAELLELALPPDCINTQASGGAQFARRFGFLDKPLRIRFRLLDPALPSLLGLPNCASLPGLTDSALLPDLTLDAASFARLALPVERVFITENETNFLAFPPVARALVVFGEGYGWEALARAEWLQRCPLHYWGDIDTHGFAILDQLRGHFPRAASLLMDRQTLLAHRAHWGEEPDPVRHDLPRLTPEEAAVYDELRFERLQPRLRLEQERVGFGCLIGRLR

SEQ ID NO: 34257 - protein, 490 aa, Comamonadaceae bacterium B1
MDHHTLSALRERHPAWRLLASAHAPLVAGFLHRVFVLPNVRLMNAADLAEALEDELYALREQLGPEAYPKGALDYLNDWAAPDKGWLRKFYKPGTDEAQFDLTPATEKAIAWLGQLSERAFVGTESRLLTLFALLEQISAGTEADPVKRVDDLRAKRDALDAEIARVQAGELPLLDDTAVKDRFQQFQQVARELLADFREVEHNFRQLDRKVREKIALWEGSKGALLEQIMGERDAIADSDQGRSLRAFWDFLMSSQRQEQLSERLDQVLALPAVAALKPEPRTRRVHHDWLEAGEHTQRTVAQLSQQLRRFLDDRAFLENRRILDLLHGIESKALALRSAAPTGTLMHLDAMGAGVELPFERPLFTPSVKPRLADVALEGFEAEIDTARLFEQFVVDKARLRSAIVQALRHQPQVTLRDVLQTAPLQRGLAELVAYLELVHAPPDGSALDGLRALVDESVTEPIAWQAHNAAGQSVTRAARLPRVIFTR

SEQ ID NO: 34258 - protein, 252 aa, Comamonadaceae bacterium B1
MTPPPQAHDRRTLPPMHTEPPDTAATLDAPESPPGAPPTAPELSQLMVHLLKGVLYRDDDERLWASLLRLQARVREQAAVLLLDLLLDEAEGYAFLKGRADPDESEDAPRLPRLVARRPLSYPVSLMLALLRKRMAEFDASAGDTRLVLTRDEIAELMRVFLPDGSNEARLIDQVDSTLTKVLDLGFVRRLKPAAASAPDRGHYEVRRILKAFVDAQWLAEFDARLEGYRTALATPSAAAAGKAAQPGGSDA

SEQ ID NO: 34259 - protein, 1142 aa, Comamonadaceae bacterium B1
MLDTATPGLDFVADDSRVGFRLQRLEVLNWGTFDQRVWRYELGGRNGLLTGDIGSGKSTLVDAITTLLVPGQRVAYNKAAGAEARERSLRSYVLGHYKSERNELTGSARPVALRDASSFSVVLGVFRNEGYDQAVTLAQVFWLKDPQGQPVRLYVAAERALAIAADFSGFGSDIGALRKRLRASGCELHDSFPPYGAWFRRRFGIEHEQALELFHQTVSMKSVGNLTDFVRSHMLEPFDSGQRIEELIRHFDDLDQAHQAVLKAKRQVELLTPLVADGERHQALLAEIAGWRDGRDQLRPYFARLKGELLQRRLELLGQDAARIDAQIERLEAQREAERVDVARLERALRDNGGDRLEELAAEIRRLEADKALRQTKADRFHALLARIDEAAPADEAAFMALQQRIAQRAEGLRDADAELKNRESERDYEFRKGREAHTDLSSEIDSLQRRKSNIDAAQVRIRDALCAALAIDEGELPFAGELIQVRDDERDWEGAAERLLRGFGLALLVPDAHYKAVSDWVERQHLGARLVYFHVRARKPVPGAALQPQSLVRKLVLKPDSPHYEWLEHELRQRFDVACCDSGEQFRREARAITRAGQIKDPSGRHEKDDRSRIDDRSRYVLGWSNADKLRALRDQRQRLEQQLAALGHELGAIKQARDELRGRLDALLKLEDYTRYADIDWMAPARQMAALAEERARLQAASNALQELERQLKTVRERLAELERQWRDTLGKQGELKSKHEAALELRQQVQRISHEAPLTEAQIERLHGWRAAALGEHQLSVESCDHREQELRKWLQDRIDAEDKRLARLTERIVNAMRGFKEAFKAETAEVDVALAALPDYARLLTGLKSDDLPRFESRFKELLNVNTINQIASFNAHLASQRETIKERVARINQSLEAIDYNPGRFILLLAQPSPDAEIRDFQRDLRACTEGTLTGSGDEQYSEAKFLQVKAIIDRFRGREGLSDADRRWTAKVTDVRNAFLFAASERWRADGAEHEHYSDSGGKSGGQKEKLAYTVLAASLAYQFGLEWGAVRSRSFRFVVIDEAFGRGSDESAQYGLRLFQQLNLQLLIVTPLQKIHIIEPFVSSVGFVHNEGGRDSRLRCLSIEDYQAQKALAGAEARAVAGGDAAGAAADGAAT

SEQ ID NO: 34260 - protein, 417 aa, Comamonadaceae bacterium B1
MSWTTPADLRAQVQRLWERGELLRAAVSDSSWVPLRLNLKAPSAADLSERFEAVRDWVRALADTAPLRIEWRDWNHRVQGAQRLPAAIWLDTLHEALAFIGKLRQAQGFRALWKQTASAQPALLAYLSRRPIQALELIERWPRLLAVVAWLQAHPRPGVYLRQLDVPGVDSKFIEAHRGVLTELLDAALPPEAIDSQASGVAQFTRRFGFLDKPVRIRFRLLDPALPSLPGCQAPAALAPAAVPSPAALAAVPLAALPDITLDAASFAALALPVERVFITENETNFLAFPALPRALVVFGAGYGWEALARAAWLQRCQLHYWGDIDTHGFAILDQLRGQFPHAASMLMDMDTLLAHRAHWGAEPEPVRHDLPRLTPAEAAVYNALRFDQLEPRLRLEQERVGFGCLRALLARMRAQT

SEQ ID NO: 34261 - protein, 543 aa, Bifidobacterium longum; identical to SEQ ID NO: 30420

SEQ ID NO: 34262 - protein, 227 aa, Bifidobacterium longum; identical to SEQ ID NO: 31245

SEQ ID NO: 34263 - protein, 1182 aa, Bifidobacterium longum; identical to SEQ ID NO: 31044

SEQ ID NO: 34264 - protein, 394 aa, Bifidobacterium longum; identical to SEQ ID NO: 31243

SEQ ID NO: 34265 - protein, 450 aa, Pseudomonas aeruginosa; identical to SEQ ID NO: 32505

SEQ ID NO: 34266 - protein, 220 aa, Pseudomonas aeruginosa; identical to SEQ ID NO: 33036

SEQ ID NO: 34267 - protein, 979 aa, Pseudomonas aeruginosa
MGAVLWFEGTSSSASDLKKLWLLSESPEQTLEHWLSQHHAGGMRALRQMEKDGTGIWPYPSKKAFLARLRDYFEVGENAFTLLNRAAGLKQLNSIDEIFRELVLDDRSAFERAAEVAGSFDDLTDIHRELETARKQQRSLQPVADGWERYQVLQEQLHDKQALEGILPVWFAEQGYRLWLAETNRLEKEYKKAELDQEQCKSQLEAQKGVVDQHRQRYLRVGGAGIDQLRERIADWVRECDKRSLKAEQYQLLAKGLGLADELSAAALKENQQHIAARLEILDQQITDARQKAFDAGLVQQELNGRLQTLQQEGAEVEKRPGSNLPGQFHAFRSDLAQALGVNESALPFVAELVQVKPEELDWRGAIERAIGSHRLRILVPQDSSQAALRWVNQRHNRLHVRLLEVQEPTSRPVFFDDGFTRKLTFKEHPYREAIKALLADNDRHCVESPEQLRHTPHAMTAQGLMSGKERFFDKQDQKRLDEDWLTGFDNRDRLAFLAEQIREVNERLEPAKLALDAAQGDVRQLETQASLLNRVKELQFEDIDLPGAQSQLESLRTQLATLTRPDSNLAMIKVELDAAEALQESLDQQLRQLIEQYVQLKTQFDQAASATRKAYNSAEKGLNDTQRELAQAHFPTLTADDLGDIVELERKHTRELQGQLKALGEKLGDQKSELAKRMSDALKVDTGALAEVGRELVDVPRYLERLRVLTEEALPEKLKRFLEYLNRSSDDGVTQLLSYIDHEVSMIEERLDDLNSTMQRVDFQPGRYLRLVAGKVIHESLRTLQRAQRQLNSARFIDDEGESHYKALQDLVGLLKDACEHSRNQGAKALLDPRFRLEFAVSVIDRESRNVIETRTGSQGGSGGEKEIIASYVLTASLSYALCPDGSSRPLFGTIVLDEAFSRSSHAVAGRIIAALREFGLHAVFITPNKEMRLLRHHTRSAVVVHRRGLESSLVSLSWEALDEHHQQRIKAMHEVAH

SEQ ID NO: 34268 - protein, 393 aa, Pseudomonas aeruginosa; identical to SEQ ID NO: 32927

SEQ ID NO: 34269 - protein, 226 aa, Vibrio sp. JCM 19241
MDNKTDWGASESRDLASVLEEIETYEVEHELTTNEELRVAYQALSRGIIYADTQQALYTIISNNVKQLNERFEFDGARLLINTTFNFAYLTTLKTEAGESLPNLLRTLRLNKYDSYLWIFLRSEFDKAMRLSGEAIIKESEIIAQLDQIEPSSVQDKRKHDRAMSSAITKSIDNGVLKKLKLMKNDEQRYLIRPLISVVIGAEQVDTFLSQFSNPKSDSVGGDSNA

SEQ ID NO: 34270 - protein, 483 aa, Vibrio sp. JCM 19241
MKKFYLEKFQIYNWGTFSGYHSFNISKLGTVITGQSGAGKSTILDANSALLVPPIKRRYNLASTNDGKKRSDRNDVTYMLGAWSKKGDNNNQERTQFLRTAPNYSVLAQTYKSGDGRTVTLCQLIYLNKKSMALDDVKRVYLIINRDFSIKEIKHFESLKQLKALLPPAKDFRYCDTPTEYFNLLREELGIDSEKALSLLHKAQSAKNLGNIDAFLKDFMIDEPETYDVVRQMSTQFININQTYEHIRSLEKQIELLEEIDGFEKELVNLKLEEKNVTSNRDYRQSFSDLLKREISIRVFSHLETDLTRLNAEIESNRETLAKHEKTLIDLNVEYRSAGGDAIAKLKNTQQDIIDSQQSIKTSLDQFKSALKKCDIPSDITDEQSFAEALVRCRKKERELERVSKSLFKDAGYASVKLEELEEQKENAETDLALMKDSNSMIDGHAARIRNEICEHLGLNVDDLPYAAEYLRIKKVRCNGQVQ

SEQ ID NO: 34271 - protein, 364 aa, Vibrio sp. JCM 19241
MLIQLYVNERELPKFPIMSMTTQVFAANIDRLTGFYSAWKHHPLNEYAQWQDRSFQKWGNQPYPKELKFENIEALFQITGLLSNLEQLLDKYKALILLNRRLSLLLKKCVRWFVAASMIDVKHLINTADWFVENPNSGLYMRQVDIEGVHTKWIEQNITPLFTALKLINNDDTELSFEAYTGLMTPPATVRFRLIGCELDDFFHGAKDITMPIKDLNIIGSKLGPLCPVIVILENEKPGLYFNNIEHGICIFGLGNAVSILEQVDFIRQCPRILYIGDLDIEGLYILNRLRKRIPQVESRYMSIQTFIVNEASAVTYRPSFTNESLDALTDIERKLFDYLSERQSSGRKSRLEQEFIQLADRLL

SEQ ID NO: 34272 - protein, 480 aa, Mycobacterium kansasii 662; identical to SEQ ID NO: 30957

SEQ ID NO: 34273 - protein, 192 aa, Mycobacterium kansasii 662; identical to SEQ ID NO: 30958

SEQ ID NO: 34274 - protein, 1132 aa, Mycobacterium kansasii 662; identical to SEQ ID NO: 30959

SEQ ID NO: 34275 - protein, 386 aa, Mycobacterium kansasii 662; identical to SEQ ID NO: 30960

SEQ ID NO: 34276 - protein, 480 aa, Mycobacterium kansasii 824; identical to SEQ ID NO: 30957

SEQ ID NO: 34277 - protein, 192 aa, Mycobacterium kansasii 824; identical to SEQ ID NO: 30958
